United States Patent Application Publication US 2004/0123343 A1 - sequence listing, part 21

SEQ ID NO: 57687 - DNA, 1871 bp, Oryza sativa
  Clone ID: PAT_MRT4530_59474C.1
ggaaccccccactcaacggaataagcttgggccgctgggggcgctgctgcacgggccgcagctgccgccgttcctgtccaagacgtacgacctggtgtgcgagcccggagctggacggggtcatctcctggggccacccgcggcaacagctttcctcgcctgggacccccccgccttctcgcgcgacgtgctcccccaccactgcaagcacaacaacttctccagcttcgcccggaagctccccacctatggttttcgcaagcatcatcctgctcgttgggagttatggaccacaacaccgaccctcctccgaccaccatggtggacgccgcggcggcgctgctgctggagcccaagctggaggggtacgacgacgacggcggcggcgagccgctgcagccggccccgttcgtctctccgctggaccagctgatgcagccgccgcggccgctggaggcgctgctgcaggggccgcatctgccgccgttcctgtccaagacgtacgacctggtgtgcgagccggagctggacgggggtcatctcctggggcccacgccggctacagcgtcgtcgtccgggacacctccgccttcgcgcggaacctcacgtctcacccgacctagtactacagcgtctccaccagcgtaacaacgtttaccgcctagtctgtccgctaagcacatactgagaaaaagaagattggtcatgatgaaatcccaggacatagcaaacattggttgatgaagattgtacgtcgcaggtactcaccaacacaacaaagtggccttcagcatggatcttcagttgaatccggtttagaccctgaactcaacacactgagaagggagaagagtgcattgcttcaggaggtgaccaggctgaagcaagagcaccttcagacaattgaacaaatgagcacgctgaatcagaggctagaatcagcggaagatcggcagaaacagatggtctctttcttggccaagctcctccagaacccaactttcctgaggcaacttaagatgcacagacagcaaaaggaaatcgactccaccagagtgaaaaggaaattcctcaagcatgtaccacatggcaacattgactcaggtgagtccagctcacaacacactggagagagcaatttagatttctcccctacgtccctggaccttccagccacgcacagtgacatcttagaccttcagaattttcttttggaagatggggacctcaatcttgccatgctgccagagaacataggacttgatggaatcgaagcaccagacgacatcggggcgttggttcagggatttgacacacaggaggaacttgagcttggtagcggagttgagctactggaaatacctccagcttctggtcctcgtggccaagatcccacgattggcagatccaagggaaagaatgtattgtctccaggattggatgctacctcttctgaagctgattgcctcggatcattttctgacaatatggggatgctttctgactccatgttacaaacagcgggtaaattgatggatgcagatgatgacgagcgaatttggggcgtcgatgcttcgtcggctttacaaagttcttgcagtggcactagtcagcaagcatatggtagtcttgttagtgatccctatctgatggagatggctaataagcctgaaaaattctgggagctcgattttcaggcactggatgatggagatctgcagctggacaatcctgagaaggtgctggacacaggcgtggttgctcaggctcaggcgcttgaattgggtggcctgactcaggcaaccgaattaaagaaggcatgcttttttctcaggctcatcactcagggcaccaaccaaacaggcccttag

SEQ ID NO: 57688 - DNA, 195 bp, Oryza sativa
  Clone ID: PAT_MRT4530_59475C.1
tcacagtccgacgtcttctcctctcctcaccccacttacctcctctccacttcacaggccgacaaaggtggtggcggcagcatcgggcgctcgcgtgcggatccgccaatggcagcaataggaggctggaaggatagggagggcatcggcaacgacgacggtcaccggatatggagtgatgatggcagcggccgc

SEQ ID NO: 57689 - DNA, 446 bp, Oryza sativa
  Clone ID: PAT_MRT4530_59476C.1
atatattatttatttttttttttgtttttttttttttgttaggcaccaaaaaagctgtgtataacgtttctacttgttctcatcagtatctcacacatttaaggccgcattgcctttttgcatcgcgttacatgacctgaaaaagctctcaacgagaaattcgtcgcggctgccggatgatcaccatttcaacaccaccaacacaagaaaaggctttgatactacatgggcgcagttgctcgatctactgccccagcagtcgattgacgccggacttttggtctggggtgatcctcgccgggaacttgatgtataacttgaccctgagattgcccttattggaggggtccttggggatgggtatgccctctccgaggactatcttcttttagcccgggttgatgacggaggtgatctgcatcgtcatggttgggccgtctagcgta

SEQ ID NO: 57690 - DNA, 533 bp, Oryza sativa
  Clone ID: PAT_MRT4530_59477C.1
ggaattcggcacgaggcttccgccgcgcggcgtctctctccctttctctccccctcccttgcgttcccatcaccgccgcggaacgcgccgccgccagaaaccctaaccctagatcgcgaggggtggtgggtggccgggccggcggggggtggggggatggcaagcaagttcgggctcgccgggggcatcccggagaggcgggtgcggccgatctgggacgccgtcgactcgcgccagtacaaggctgcgctcaagctctgcaccgcgctcctcgccaagcacccgacctccccttacgtcctcgctctcaagggtcttatttgggaaaggatgggaaagcctgatgaagcactcagtgtgtgtctgaatgccaaggagcagttgtattctgacaacatctttcattttgatgatctcactcttagcaccctgcagatagtatttcaaaggcttgagcgattggatcttgctacttcatgctatgagtatgcttgtacaaagtaccccaataacttggagttaatgatgggcct

SEQ ID NO: 57691 - DNA, 432 bp, Oryza sativa
  Clone ID: PAT_MRT4530_59478C.1
tttggttttttttttttttttgttttttttttttttttttttttttttttttttttttttttttttttttttttttttttttttttttttcccacccaaggggccccctttcctttggaggggaaaaaaaaaaaacccccttcaaaacccccttggggaaaagggaaccttaaaagacaaacctttgggccccggatcccccaaaaaaaaaaaaaaaacctttgggccccggggaaaacaaaacaaatttccttggataaatgtggcccaaaaaaaaaaagggggggcctgggccccaaaaagtttctcgccaactcccccccaattacaaacagggtcgggaggggggcttgggggaaacacaaaaggccggggggacaacccctccgtggaacccccaggaaacctttaaaacccccaaaaaggccccgg

SEQ ID NO: 57692 - DNA, 333 bp, Oryza sativa
  Clone ID: PAT_MRT4530_59479C.1
cccacgcgtccgtccacgcgtccggacgcctactccggtcctccattgcttgcgccaacaagcccactcgagatctggatcggccaggaagagcaaagcagatcaggggaggggagcctgcacatctggaagaagctcttgatacaacagccttaacgtttgttaatactacaagtaacagcagatgcgcagtcagctcccatgaccacataaaggctatgcgcacgcgtcacccatggcctgcttctaactgtaacgctggaccacgcattggcatgtgcctaactgagacgctcgactagacggtctacagcgggaccattaggctggggc

SEQ ID NO: 57693 - DNA, 296 bp, Oryza sativa
  Clone ID: PAT_MRT4530_5947C.1
tctgtcctcgatcgagagccgcccctccttgagtggcggtggttccgacgaacgacgacggcggcggctcccccctcctcgcctcctcgggcgccgaatccgccgccggctctcctcgccgctggccggtctcggggaggggaggggagtggaggggagggaaggcggataaaaagatgcggaacccgccgtctaaagcggtacataaaccgccgtcctgggggaccacgtgaaatacaaaaacggcgtttcctgggcaaaaacaagttcaacaccgcccgccttgggggtcaccc

SEQ ID NO: 57694 - DNA, 464 bp, Oryza sativa
  Clone ID: PAT_MRT4530_59480C.1
cccacgcgtttttccactcttccgcccacgcgtccgaaaaaaaaaaaaaaaaaaaaaaaaaaaaaaaaaaaaaaaaaaaaaaaaaaaaaaaaaaaaaaaaaaaaaaaaaaaaaaaaaaaaaaaaaaaaaaaaaaaaaaaaaaaaaaaaagggggggccgtttaaaagaaccaaatttaactaacccgggtatggaaattaaaaacttttttatggggcaaccaaaataaaattaaggggcggggttttaaaaaattcgaaaggggaaaaacctgggggtaaccaaaaaaaatggtttggaacaaaatccccttttcaccagtgggggaaaaaaaaaaaaggcccgaacagatggttcttccaaaaaatggcccaccctaaaggggaaagggaacgccccttgaagcgaacaataaaacggggggggggggggggataccccaaaggtaaccgttaaatttgcaa

SEQ ID NO: 57695 - DNA, 459 bp, Oryza sativa
  Clone ID: PAT_MRT4530_59481C.1
ggttgttgtttttttttttttttgtttttttttttttttttttttttttttttttttttttaattttttctttttttttttttttttttttttgaatacataattaatggtacacttttaattttgattttttaaattgatgaggagtgagcttttttttaaaagatgaaggatatgactctaatacctagttggatcgattttggtaagactcatcaaattatgggaggaaaggaacttttacagtcggcccctttttatattccagtctagggggttatatcttgggatggggcaataggaaacaggttattttttggtttaaattcgaaatgttttttgaaacaaaattgttaggactggttttgatttttttaaacttttgcgggggcactttttttccaaccaaataattcgctttggttttatgctttggagggtaatggaaaaggttttttt

SEQ ID NO: 57696 - DNA, 390 bp, Oryza sativa
  Clone ID: PAT_MRT4530_59482C.1
atgacgtcgtcgatgagggtgtcgcttggagctgaagatgatgacgacgacatgacagcagcgagcgagacgtgcaatgttaggctaacagtgggcgaccccaaaacgagcgatggcgaggataacaagggcggcgaggtcggtggatcgaacggcggaaatcaaaccgagagcgcaggaggggtagcgtggtgcggtcaaggtgggggcggcgagctggtggctggcgtccgcgtctctgccttcgagcgcaagcgaccaaggagtggaggcagggcgccgttcggcggggccaccgtgacgacgacggtgactgcaaaggtggaagaggtcggtttggtggtgcgcgagggcagggcggtcgacgcggcaggcagcgaccgagggtga

SEQ ID NO: 57697 - DNA, 1248 bp, Oryza sativa
  Clone ID: PAT_MRT4530_59483C.1
ccaattgcatccaaaaagccaagattaatttcctcaaaccctctaaacttccagtctctaaagcctcagaatccatccacaagcaccaccaatcttagccctcactaaacagcattgtgctagcgtcccctattcccccccaagatccagaactctaccgccaccaccgccgtcgtcgccgctcctttctctgcacccgcagcctcctccgcacacgcgttgccgcgggtccggtccctccgccgcagccgctacctccctccatgagtggccgtgccggctcgtcccctcccgtatcaccatcttctccacctcgctccactccgccgccgccgtcgggcgctcgccgtcgccgccgccacctcccacctccccctcacgcggcgccgccgcctccgccgccaccagcttccagtcccagtaccgcccctcgctgccgaccacgacgcgcccgcgcctcaccagcacgacgcgccgcagcgccacgcacgcctccaccacgtgcctcacgaaccccacctgcccccgcgtctcggcgaaccccaccaccgccagctccgcgaggcgctcgtgccgcgcgctctccgccggcggccatggtatctccgccgccgccgccgccgttgtccccgccgccgaaggccagcgcgacggggccgtccacgcacgccacgcgctccagcgccggcgccgcgcgcaggtcgacggtgtcctgaacgccccacgcgccgaccgccatggcgatcaggtcctcgacgaagcccgtgctgcgcgccgcctgtcaggttgccgacaccctccccaccacctcccctcatcggcaagcatttgcgaggcccaccagcggctccctctctcatcccgaatccccgccaaatccgtcgacatctcatcgtcttcttcagctctagccaaatccccccgaccgacctctcctccttgatctcccatgacaaccccccgaatgctaatccaccaccgccgaccctacccaccaccctcctccatacccgcagttccggtgcctcgtcgccctcccatctccgtaggccaccgccgccaaccataggtaataagccaccctaaatatccctctaaatccaccctaaccgccctcctaccctagaacgccgccccgccgcgcgcggcgtcccacagcgagggcgacgaccgcctcagtgcgctgcccgacgagctcctgctcatcgtcatgcgcggcctcggcacctgctccgcgctcggcaccga

SEQ ID NO: 57698 - DNA, 605 bp, Oryza sativa
  Clone ID: PAT_MRT4530_59484C.1
ttgaagaaccatcgaatgcctagccttcgcatctcgctctgtttttctccaattaaacaccacaactacagtgatatatatcaagtgatatgaataattcttttgatatttggagattatcgtcaaagtggttttgcgagcggtcagaccggccggcccgcagtctgaccggccgacgctgtgtcggcttcggtttcgggttgtttctttggatatccgtgattgtttcatggttatggcttctagatggatattatacgtgactcgatgcctcgggagagtatttacggtgatggaccggaagtcggcttggagagaagtaataaagtcgtcatctactttaagagttcttcgatttgtgtttcaccgggtttcggcggtccaaccggctacataccggcggttagacaggcggcatcgcggcggtcaaaccggcgggaatacggcggtcagaccggcgtcgacaggagtctgcggcaggcgatctcggtggttcgaccggagttagatcttggtcagaccgacgttcatcaagcggtcagaccggcgcattcacttcggtcataccgcgatctgtcgaattcgagggtaacttttatttccgc

SEQ ID NO: 57699 - DNA, 2234 bp, Oryza sativa
  unsure (1)..(2234): unsure at all n locations
  Clone ID: PAT_MRT4530_59485C.1
aaccaaaattcacagttctattttcttataaatgatgcattaagcagctccaggaagaaaatcattctgaagtctgaactgaaaaaaccaggacgttaacctgaacgaccaccatttccaatcacaaaaacactttccagtgatgaaattttctgaagcaaccatcatacagaaaaggaagttaaataagttaccgtcaaggaactaaaacacatacgagttgttcttcaaattcacaatcctaagttgtccaaaaaccaaaaccaaactaatcagggctgacttagctgctccaaactccaaagtcgtccaaattgtgtagagcttgactggcatgaacaataccttcagagtggctcaaatcttaatcaggaagaggaattggccttacgggtaaggcgaacacaatctggataaaccagctcacaaaccgagagcgtttcgacctcctcgcgacgaatttcagaaacatcgacaacattgttgtggtcttctctgcagagatattcaatggcgacctcatacccatcaagatactgaaacccttccaagggtgacagcatcgatatacaaggaagggcgaagagcggcttggggtcgaccttcatcgccctgatcatggcggaatttctgagaatgtgcagtgacagctccaattggtctttcatgccgatgaatccacttatgtgtacaagcctgagatgggcatgaggctgcggtggaagactccgtagctcgccatgagcttcttcgcgataccgttgatggtgaaggggcatccacatatgtaattcaaacttttgcagtaaaggagcagcttccagtaggcaggcaaagtcaagaagatcaatcttcttttccgtcacagggtgtctcaattgcaacctcaaatgctttagatacataaatttgatatgattttctggcaaaatagccctctcgagttctgaacattgcaaactcagcgtctcgagatggagcagcgtgcttggaagattggtgaagatatatccaagagaggaacgagcgtgttgcagcttcatgcagacattcgttagcagcaatggcccaggaggtgacaacggtatcagtgtgcccttgtacccaagtttcgtcaggccaagattcaactctatctctttaagcagatggcagctctcgacatgcaaatgtttaagctggttccaaaggtgcgatgtcgacaatcttgtgagcttcccacaatcaacgataccaagaaactccaaggcattgcagttggagatcaaaatctgcatgttttcatcagtaatatttgtgtgttctaacttgagccttttaaggttcagaaaggctttgaaatccacaggcgggttcagagaaacagcactaagcctcatggacagcaaatatgaactgtccatagcaccgaaaaacttaaaagggaaatcatagggcccctctctaggataccgggatttgaaatcaaaagtaagatctttcgttttagtagcactaacaaagctgagccatctgtttatgtggtctgcatgttcattatccaacttaccttggattgctattttctgaacacttagaccactgtgttgcgcaaagacttgactgactctctcgatgaacattttcatcctaagccgtgcatcatgtgaggtcgaagctaatcttggcgacatcgagtagaaggagaattccaagtttacatgggaacaccagatttttttccagtggcttgataatatactcgtccttgccgcctcttttatcggcagccgggatatgataccaatcaatatatccgtaggtaggtcattgaaacgaatcactggtcttgtccttttggtcgtagtagcatcatccatacgcgtgggcggtttggtgggccgacgcgtgggccgcccccggctgcggttggtcctgcgcgcgcgccccccgacgccgcccctcggctgcagcaccagctcgtggtccgtgctgagcctcgtgccgatatatatattagaagatgatgagcaccgacttgacctccaactctaatccgaaacgaacatgaaccgatagtcaatttcagcaagaggcaggcatagcgccgccggcaacggacagccggatccggcgtggcgtggggctaggtcgccggcccgccgcctggggctcgtcagatcttgatgactgtcgtcgcccntgcccgccgtcgccagcgcctactgccgccaccgcttagaggtggccaaatg

SEQ ID NO: 57700 - DNA, 1503 bp, Oryza sativa
  Clone ID: PAT_MRT4530_59486C.1
gtagctcgccatgagctcttcgcgataccgttgatgtgaaggggcatccacatatgtaattcaaactttgcagtaaaggagcagcttccagtaggcaggcaaagtcaagaagatcaatcttcttttccgtcacagggtgtctcaattgcaacctcaaatgctttagatacataaatttgatatgattttctggcaaaatagccctctcgagttctgaacattgcaaactcagcgtctcgagatggagcagcgtgcttggaagattggtgaagatatatccaagagaggaacgagcgtgttgcagcttcatgcagacattcgttagcagcaatggcccaggaggtgacaacggtatcagtgtgcccttgtacccaagtttcgtcaggccaagattcaactctatctctttaagcagatggcagctctcgacatgcaaatgtttaagctggttccaaaggtgcgatgtcgacaatcttgtgagcttcccacaatcaacgataccaagaaactccaaggcattgcagttggagatcaaaatcttggattgctattttctgaacacttagaccactgtgttgcgcaaagacttgactgactctctcgatgaacattttcatcctaagccgtgcatcatgtgaggtcgaagctaatcttggcgacatcgagtagaaggagaattccaagtttacatgggaacaccagatttttttccagtggcttgataatatactcgtccttgccgcctcttttatcggcagccgggatatgataccaatcaatatatccgtaggtaggtcattgaaacgaatcaccggacgcgggggtcgacccggggaacacttagaccactgtgttgcgcaaagacttgactgactctctcgatgaacattttcatcctaagccgtgcatcatgtgaggtcgaagctaatcttggcgacatcgagtagaaggagaattccaagtttacatgggaacaccagatttttttccagtggcttgataatatactcgtccttgccgcctcttttatcggcagccgggatatgataccaatcaatatatccgtaggtaggtcattgaaacgaatcactggtcttttccttttggtcgtagtagcatcatccatgtcttcttcttttttggtcgatcggcaggattcgtacccgcggcagaggaagatgcagagcacggaagcggcggcgcagccgtttggatgaagaagaagatgatgatttgtatatatatatatatatatatatatattagaagatgatgagcaccgacttgacctccaactctaatccgaaacgaacactgaaccgatagtcaactttcagcaagaggcaggcatagcgccgccggcaacggacagccggatccggcgtggcgtggggctaggtcgccggcccgccgcctggggctcgtctgctcagggatagggcagtcatcactcaatgattccccccccccccccccctctcagagagggagggtgaaaccgtg

SEQ ID NO: 57701 - DNA, 363 bp, Oryza sativa
  Clone ID: PAT_MRT4530_59487C.1
atggaagttattctagtcatctcactcgttttgcttcttgtactaggagccatctttgttattccaaaatccaacaacaatggtaaagggaaggaaatacaatcaccaaacggtggaatggtgtatgacgtaacctcttatgtggaggaacatccaggtggtgatgaaattctaaacaatgccggtgcaacaagcaaaggcaattacgctcttattttacctgtcaatgaatttccattctttctggtgtattccaatggtattgtgcaatggtttcctgtgtttgagtactggtcatgtatttttgtcatcattgaaactatttatgctcagcgacatacacccataaatccatatccgtga

SEQ ID NO: 57702 - DNA, 614 bp, Oryza sativa
  Clone ID: PAT_MRT4530_59488C.1
ccgccctcccctgccagcccctccctccggccgccggcgaaaaaatgcccgtgcgttgtaacgggtgaagtatattttaattttattattgttatatatatgtctagttaagatgaaattcactgtggagtttgtttgaacatatatatatatatatatatatatatatatatatatatatatatatatatatatatatatatatataatttgatttacgtactcccgggagtacagaagcattttcctatatatatatatatatatatatatatatatatatatatatatatatatatatatatatatatatatatatatatatatatatatatatatatatatatatatatatatatatatatatatatatatatatatatatatatatatatatatatatatatatatatatatatatatatatatatatatatatatatatatatatatatatatatatatatatatatatatatatatatatatatatatatatatatatatatatatatatatatatatacggagggagtatttgactgttcgtcttattcaaaaactttttgtgaaaaatgtaaaactatatgtatatgtatacatataagtatatt

SEQ ID NO: 57703 - DNA, 1864 bp, Oryza sativa
  Clone ID: PAT_MRT4530_59489C.1
tagctttacctttagaactactaggactgagagcataattgtttatttagctttaggaggtaagtggctagaaataagacgactggtcctttcttcttgaagttttgtgccatttgggttttgggagacgatggtgtaatttgctatgccttttgctgtcaacctcttccacaagagttttggtgaatggagagcccggccaggacattgctcactgtagaggcctccggcaaggtgaccccttgtctcctatcctttttatctaggttatggacgcgttgaacttagttgtggcgtgtgcggatcgtggaaatctcctggagcctctcactatcccgcgacagcacaccaggtttctctgtatgcggatgatgtggtcatgtttttgtgtcctacaagtggggacctatctcttatcaagcagattttggagttttttggttagatttctggactaaggaccaatatgatcaagagctcttgcactcctattcactgcttggaagatgatctggaagtgatttctaatgagttgtcttgtgaagtggcgagcttcccttgctcttatctcggacttcctcttacaatccgtaaatcaaccaagacagacttgttgccccttgtggacaaagtggcagataatttaccgagttggaaagcctctttaatgaacagggtgggtcagctaataacagttaggtggtcctcttggctattcctatttatgcaatgatggcgttggatcttcctaagtgggtggtcaaggctatagataaaaggtgtcgtggcttcttatggaagggaagagaaaatactaatggaggaaattgtttgatctcttgggatcgtgtgtgtcggcctttgtcctatggaggccctggtatccctaacctagaaaatatggggtgggcactacgcctgaggtggttattgtttcaaaaaactgattttgctagaccttggggcggtttatctattcatgtgtctcaatgtacgttctcttttcaatgtggctgtcaaaactatagttggaaatggagaaaatactgaatttggagtgataggtggctgcaagggaaaacagtagcagagctggcgcctaatctctttgccttgatctctaagagcacaagcaagcaacgtactgtggcgcaggctttggagaacagaagatgggcggctgacataaatgggggctatctctcgggccatatggccatctataagtacttgaccatttgggttttggtagaagaggtggttctgctacaagatgtacaagatcagcatgtttggaagctaaccgccgatggatgtatacttgtaaatctatctatgaagcttatttcctgggatcgatcaagtttgctccatggaaaaacatttggaagagttgggctcctcttcgctgtaagttcttcatttggttggccgtcaataagaggtgttggacagccgaccggcttgctaagcgcggactgcagcaccccacggcctgtcccttttgtgatcaaagtgaagaatccgtccaacacattttgatttcgtgtcttttctcgccaagtgtggatggcactgttcttgaagctagggttctctgatgcagtgcctcaaccttcagccgatcatttttttaggtggtgagccaagctacaaaagaccggccaaaggacgtgcgaaaatggctcaactccttggtcatcttagtggcttgggagatttggaagcatcgcaatgactgtgttttcaatgggcgccaatcctagtattgcgacggtcttgcaggtggtagagaatgagggtaatctttggtgtttagcgggggcgcctgccctccaaaagtttcttaataggtcggcaaacc

SEQ ID NO: 57704 - DNA, 540 bp, Oryza sativa
  Clone ID: PAT_MRT4530_5948C.1
atgagaagagtttttttttcaaattatatatcctacacaacatgaatacaatattacggtgttggctggttccttaccaataaaaattacagatgggaaatagacatacacatattcattttgataaaaaaaatcaagaagattgtaaccaatgactactccctccgtcgcaatatgttacaatctaggatgagattaaaccaatactagaactacaaatctggaagaggttgctacatattgagatgaagcgagtacatcccaactcgccaaataccatcgccggtgccgaagactcacggtcgacgtcaaaatcccactgccagctacatccatggtggagtcggtagcatcggcatgctccaccgaggatccaaccttcacccttaaatgctacatttagacttgctgatgttcttgatcttgacagcactccagatcgacttgcttcccaggctcatatgtacctatcagtagagagcaaagtcagagactagcaaggactatgtactgtatccatcaatcgcgagattcaatcgt

SEQ ID NO: 57705 - DNA, 302 bp, Oryza sativa
  Clone ID: PAT_MRT4530_59490C.1
tctttttttcacatcagcggaggaaatggagcatgggcgccatgatggtcgctgccccggccgcagccgacgacccacggaaggcctctccctcgagctcctctccctctcaaccacctacttcctcttcccccctccttgctcgtcccctcccctccttccactatagcagggcgtccaagcgaagagacagtggccaacgagcggagaggcggctgaagcagcggtggcgtggattggaggacgacaacgggcaacaacaaggtaggcacgaatcggaggacgacgacgggcaacaataa

SEQ ID NO: 57706 - DNA, 1395 bp, Oryza sativa
  Clone ID: PAT_MRT4530_59491C.1
atggaggcgcgcgcgcgggggcgggaggcgggggagggaggttggggcggaggcggaggtggcctgccgctcgccgtgcgggagctcgtcgccggcggggtggcggggggagtcgccaagacggccgtcgcgccgctcgagcgcgtcaagatcctcttccaggcacgtagtcctctgacatttgaatgtttcttttggaactttcagactagaagagcagaattccatggttctggattaattggatcatttcgaacaatctctcgaacagaagggcttttagggttttacaggggaaatggagccagtgttgctcggattgttccttatgcagctttgcattatatggcctatgaagaatacagacgatggatcattcttggttttcctaatgttgagcaaggccctattcttgatctagtggctggatcaatagctggtggaacagctgtcatatgcacataccctcttgatctagttcgcacaaagttggcttatcaggttaaaggtgcagtgaaacttagtttaagagaatataagccctctgaacagtttataaagggatccttgattgtgtcaaaacaatatacagacaaaatgggttaagaggcctatatcgtggcatggctccatcgttgtatggaatcttcccttactctggtcttaaattctacttttacgagactatgaagacttatgtacctgaagagcacagaaaagatatcattgcaaaacttgcctgtggatctgtggctggtttgttagggcagacaataacatatccccttgatgttgttaggcggcaaatgcaggttcaggccttttcatcatccaacctagaaaagggaaaaggaacatttggaagcattgctatgatagcaaaacatcaaggttggcggcaactgttctcaggattatctatcaactatttgaaggtggtcccatcagtagccatagggtttacagtttatgactcaatgaaggtttggcttaaagttccatcgagagaggacacggctattgctgcgctgacagaagaaagaagtaatgcagcccctgctcactccagttagtacaaatcatactcttttggtggtgcaatccccttcattgccttgatattttcggcatgtaacatagcattatttcttggggctgttgtaccaccacaattcttaggctcatccaacatagtgcagaaaataattcggccttcaataagcccataagcggcatggtcacggatgcctaaagattggcatttgactagagatagaattctttgctgattctaggggaacttcacaatgtacagattctgtatataattgaatacagctagtagcttgtatctaactgaaagcttagtaaattcacaatccagagcctttcacc

SEQ ID NO: 57707 - DNA, 363 bp, Oryza sativa
  Clone ID: PAT_MRT4530_59492C.1
atggagaacgactgccgcgtcggcctgcgtgagcgcaggcgccaagagtggtgcggtagcaaggcggcgaggtggattttgtggagcccggacaatcccggccgccgctacttcaaatgtgcagacgcaaggagtggaggttgcgatttttttgcttgggttgatggaagatctgtggaatcagagctggatttagctagaaaggaattggccacatcaaggaatgctgttggtgagaaggaagctattgtagggatgatgaaggataggaataataggttggagttagagatatttgtgatgttgttggtagttctaggtcttgttgttgttgtttttaccatgttgatgggtaggaaatga

SEQ ID NO: 57708 - DNA, 1380 bp, Oryza sativa
  Clone ID: PAT_MRT4530_59493C.1
atgtcgatggctcttaagatgaatcgggaagaaaccttttctgctgcagtggaatccttaatcatgtccagaggttgcatcgttctcgacctcttggatctctctagtttggttggcttaaaaattcgtcagtttgatattgttggcatgatggcgaaacgatgcacggacatcttgctagctccccggccacgaaagacgaagcggattgatatcaattcttgcagatcgaggttcttgctcccttacatcccggatgaggtgatgttcgacgttctgttacgactgccatccaagtctctcatgcggtttaagtccgtgtgcaaggcttggcacgccatgatatcaagcccaattttcatcaacgctcacctcgagtggtcaaagctaaagccatcatcactgctcatggctcctggcttttaccagaagcagaagaacggtcagaatattgcctttctgatgggcctctataagtaccagggtggtaataataatgtagtgcatctgcatgattttccacgtgattttccgcaggtattggatacatggactcgccctgtgcactgcgatggtttgctccttgtttccaacatgagcaaaaaaatgattatctacaacccatcaacaagagagattgtttccctgccaaaagggagccgtaaccttcataagggcacagggattggatttgggtttgaccctcgcagcagcaagtataaagtggcgagagttttttatcaaagggatgacaaaacatcaatgttggtctgtaagtttgaagtgcttaccctgggcactattaatgtatggaggcaaactgaagacccaccttatccaattggtaagtcgactccagttcatgtgaaaggcgctatctactggatggtttctcgaacatcactttgcccagatccacccaacacacttgttcgattctgtttgactgatgagaagtttagtctgtttccatgcccatgcaatgtaaagccttcctgtttgaccggattgggggatgaattgtactgtggctattttttcagtcaaccactccaactggagatttggggttgtagtgttgttgggcagaaacctgaatggactcgacgctgcgctttacagattccacctgatgttattaagcggcctgtagcaagtcctttggttgtctttcatggaaaaatgttgctgttggcgttgaaaaaggtctacaagtatgacatccaagcctgtaaattggagaaaatacctttagtggttgaagacttcatgtgctatgaccgcgaaaataatatgtaccagacatattcaaagaaggaagtaatggatttccatctatttaattatgttgagagtctagtttcgattagagaattttga

SEQ ID NO: 57709 - DNA, 2687 bp, Oryza sativa
  Clone ID: PAT_MRT4530_59494C.1
ctcattcatggcgtgcacggctccacgggaggaggacctcctcatggaggaagacgagcaccggccgcctctcaaccgggccctgctccaccgcagcgccaccaacaacacctcccaggttgccatggtcggctccaacccctgccccatagagagcctcgattacgagataatagagaacgacctgttcgatcagaactggaggtcgagagggaaagccgaccaggtgcggtacgtggtgctcaagtggaccttctgcttcgccatcggcatcatcaccggcatcgccggcttcgtcatcaacctcgccgtcgagaatgtcgccggcctcaagcacaccgccgtgtccgccctcatggagtccagcagctattggacagcgttctggctgttcgccggaaccaacctggccctgctgctgttcgcgtcgtccatcacggcgttcgtgtcgccggcggccggcgggtcggggatcccggaggtgaaggcctacctcaacggcgtggacgcgccaaacatcttctcgctcaggacactcgctgtcaagataatcggtaacatcgcggccgtgtcatcctcgctgcacgtcggcaaagctggcccaatggtacacacgggcgcgtgcatcgccgccatcttcggccagggcgggtcgcgcaagtacggcctcacctgccgctggctgcgctacttcaagaacgaccgcgaccgccgtgatctcgtcaccataggcgccggcgcaggtgtcaccgcggctttccgcgcccccgtcggcggcgtcctgttcgctctcgaatcactctcgtcatggtggcggagcgcgctgatctggcggtcgttcttcacgacggcggtggtggcggtggtgctgcggatgttcatcgagctgtgcgcgtcggggaagtgcgggctgttcggcaagggtgggctgatcatgtacgacgtcagcaccaagtttgatgacctcatgacctaccacctcaaggacatccccatcgtcgtcctcatcggcgtgatcggcgccatcttgggcgccctctacaacttcctcatgatgaaggtcctgcgcgtctacagcgtgatcaacgagaggggcaacgcgcacaagctgcttctggcggcggtggtgtccatcctgacgtcgtgctgcgtgttcggcctgccgtggctggcgccgtgccggccgtgcccgacagccggggcgccgtcgccgccgaacgggacgtgccattcgctgaaccgattccggcggttccactgcccggcggggcactacaacgacttggccagcctcttcctcaacatcaacgacgacgccatccgcaacctctactccacgggcaccaacgacgtctaccacccgggctccatgctcgcctttttcgtcgcctcctacgcgctcggcgtgctcagctacggcgtcgtcgcgccgtcggggctgttcgtccccatcatcctcaccggcgccacctacggccgcctcgtcgccatgctgctcggcggccgctcaggactcgaccacggcctcgtcgccatcctcggctccgcctccttcctcggcggcacgctccggatgacggtgtccgtgtgcgtcatcatcctggagctcaccaacaacctgctcctcctcccgctcgtcatgctcgtgctgctcatctccaagaccgtcgccgactccttcaactccagcatctacgacctcatcctcaatctcaagggcctcccgcacctcgacggccacgccgagccgtacatgcggcagctcaccgtcggcgacgtggtggccgggccgctgcggagcttcaacggcgtcgagaaggtgggccacatcgtgcacacgctccggaccacggggcaccacgcgttcccggtggtcgacgagccgcccttctcgccggcaccggtgctgtacggcctcgtgctgcgcgcgcacctgctggtactgctcaagaagcgggagttcctgacggcgccggtgcggtgccccaaggactacatggccgggaggttcgaggcgcaggacttcgacaagcgcgggtccgggaagcaggacaccatcgccgacgtggagctgtcgccggaggagatggagatgtacgtcgacctgcaccccttcaccaacacgtcgccgtacacggtggtggagaccatgtcgctggccaaggcgctcgtcctcttccgcgaggtcggcctgcgacacctcctcgtcgtgcccaagtcctgcgacaggtcgccggtggtggggatcctgacgaggcacgacttcatgccggagcacatcctcgggctgcacccggtgctggtgggaagccggtggaagcggctccggtggcagaagggcgccgtcgccaagaaattccggtcgctcctcgactggctagccaacgacagcggctgatcgatcgatgcagaggagtacattatattgatacacgcacatacattctggccggacaacgagggatgatgatgatggagtgcttgcacataaatatacgtacatacacgttggattggtcattgagtttttgtgaattttgtgcaataataacagcacctatacctggtggtcatgaatgacatagacacaatcattcaattttcttttcttctttttgcttgtatattactccctctattttatattataagttgttttgattttttaaaaaaaaaaaaaaagggcg

SEQ ID NO: 57710 - DNA, 188 bp, Oryza sativa
  Clone ID: PAT_MRT4530_59495C.1
ggataacaacaggaagtattattgctatacaggaacgcgatacacacatgaatcatgctaacttagctctaattcacaatagaatatgccatgtggcaaatccataataactagacatgacattcatacaatggacagggaacacgagatccatgctttatggtcatgaggcgaactatgatgtccga

SEQ ID NO: 57711 - DNA, 749 bp, Oryza sativa
  Clone ID: PAT_MRT4530_59496C.1
tgcgctgcggtccggaactcgcgttcgcccacgcgtccgcccacgcgtccgcccccgcctccgcatccatagccgatctcagcttttccattcgcatttctgcttaattagcttagcaagcaacgaattaactgcaagagagagcgatgccgtcgctgacgacggggaggtcgccgtggcggaggaggaagagggggacggcgacgacggcgaggaggaggaggacgccgacgtcgctccgggcgctgtggcgccggatagtgcccaggacgtcgacgacgacggcgccgcgcgtgcgcacgaggaagcccgggctgctgtcgcgcgcgttacgggtgctctcctgcggcggcgggaggaggtcgcgcgccgcacggcggtcgtgatcatgatatcatcgtcgccggcgccggcgaggttaactgctcctctagtcgcttgcgatactacgtggagtacgtgagactagtggtgactgtgccgtgtgtgtataatttactgcagtaacaagtgtgttctgtgttctgctttgctttaccgggagcaattacgtgttgtatgttgtacactactatcttcttgtttaatatgtgtatgttgtactatttcatcaagtgacaactatatgaaaccagtttgttttctctacacaccatgtaaaaaaaaaaagttttcaaaaaaaaaaaaaaaaaaaaaaaccccaaaccgcgtgcatgcgtgcatcatagctcttatactactttcacagt

SEQ ID NO: 57712 - DNA, 206 bp, Oryza sativa
  unsure (1)..(206): unsure at all n locations
  Clone ID: PAT_MRT4530_59497C.1
gtgaaagtctaacngccgtgagtgtttcggagttncngtcacaacaccttttcaagcaacctaacnagcnctaaccgatgaatcggcttacnggactctagttggnctaacaccctgggaggaggcacngatgaaacnacagaaaatacngaaagggtttattctatacnttggatccatcaaaccgatttacttatgagaaaaag

SEQ ID NO: 57713 - DNA, 309 bp, Oryza sativa
  Clone ID: PAT_MRT4530_59498C.1
tgaacttcctgaacgagaggactctcaagggaacctttttcggcacctacgagccacgcaccgatactgaccaacgtcgtcgagctctacatgaagaaggagctggacgtggagaagttcatcacacacagagtgccgttctgggagatcaacacagcgttctatctgatgcacaccggcgagggcatccgatgcatcatacgcatggagaactgacgatattcacgtgattatggtgatgggtaatatgataggacagattgagcagcctgccttgtgtgaatgatgatatacggctgttctgtgtat

SEQ ID NO: 57714 - DNA, 1726 bp, Oryza sativa
  Clone ID: PAT_MRT4530_59499C.1
ttttttttttttttttttttttttttttttttttttgtgcagttgtgctgagtactataattcagtacttgcaaagtcaaaagtagcacggacacagtcacgcccaaagctgatgacactcgacagacatactgtactgtgcctggagactcaagtagccaaagcccacacactgtcaaaactcaaaaccaccactagctcatatcactacattacagatcagtttacattgcagagtgcagcagcagcagcagcagctaacaccaggtcgagagaacgggggatggtcagagcagccttgggctggtgtaagggccattgaggatgctgttggcgatggcgtggtagccggcctccgtcaggtggacgccgtcccagttggcgtacgccgacgggtccgtgcacacgctggagccccgcacgccgcagctcgccttcgggttgaagttgtacggccctccgccgccgcagcacgtcctcagcgccccgtgcctgaacccgaactgcttggggttctgggcgaaggacatggcggcgccgtagtagtcggcgtacatgatcctggcctccgggtagctccggcgaagcagccggagcttgtcctggagcacggcgttgtggtgctgggcgaagtcgttgtacgtcttgaggcagccggtggagtcgtagtcgctcctgttgctgctcgggtgcagcgtcaggtacgctgacgagcagccgatcggcaggttcccgggcaccaccaggtgcaccgcccctgccttgatcagcctctggaaattgaaaaaaaatccaccattgcaagatgagagaatggatgtacattctgtgattattgtttcagtgtttggtcttgccttgatcagcctttcggtggcgtcggcgacggcgccggcgacggtggggacgtaggatttggcgtcgtccaagctcttgcccttgaagaaggcgtagttgtagtcgtttcccccaatctccccgacgaggaagagtgacttgctgaagaactccttgcaatctttgggtgagctgcagagtgagggcttgagctgctcgaaccagccgagctggacgctgagcgacaggttggtccagagcttgtcggacgcgccgatctcctcgaagaacggcggatccatggccgtcgcgccgccgacggcgaagttgacgccccgcgtgacgtcctcgccgcgcgacaggtacggctgcagcagcggcagcccgaacgcttgcgcgaggaagtcgacgacgaggcggccgtcggagcagcggccggtggggcggtggaagtatgtcatgccgtaggggtacttgccgacgatgctgaaggagagcgggctggacacgacgaggttgccggtgtccgtcagcgagtcgccgaagctgaacatcgaggtgtagttctgcgccctctgcccgccgccgccgccgccgcaccgggagagccgcacgagtgagcagcagaccaacgcggcgacgaacaccgagacccgcctggaggccgccatggcgcgcgacatcgtgacgacacactacacgctacacactacacgctggatggtttctgcattgggatgagctcggcaatggtgggactataaagagggcattaatcgggctcgcttgagattgtaggtgagggcgtaaatgccgagggcaaatctggggtaggtgcgtgcgcgcagcgcgcgtacgagcgttcgtcccagactcccgtaaaatatca

SEQ ID NO: 57715 - DNA, 288 bp, Oryza sativa
  Clone ID: PAT_MRT4530_5949C.1
atggccgagaagacccttcgcgagttcgctgccccctcagctgagaatgtgcccgttgggcctcaaatcaacttaggagacacggacttcgatctaaagtctagccttatcaccatggcgcaggctagcctgttctgtggcaagccaaacaaagatgccagtgcacacttgcaacagttccaagagatccgcagcacatatacagtgaaaggtgttagcccagatgccgtcaggatcaggttgtttcccttctccctcttagggaaggtgaatgctggtatttcttaa

SEQ ID NO: 57716 - DNA, 759 bp, Oryza sativa
  Clone ID: PAT_MRT4530_594C.1
cgagagcaacaccaaacgaaggggaaaggaaggaaggagatctcctatctctcctgggtggtgggtccccgtaggcagccaccaatggagggctcgccagcgacgcgcctcccggaggccgactcgctccccgacggcttcgtggagagctccgccgccgaccaggcgccccctcctcccgccgacgccggcgatcccgcgagccgctccctcggcctcgatcaagccgacgcaaccgtgggcggcggcggcggcgacgaaaccctaggggctcctccctcgaccctcgcctccgtcgctcaggacaccctggacgcctattcggccgccgacgcgctgcagagcctcaccgtgggcggctccgctgcggagccggagcgtgctctcggcgaacccgccgtcgacgcaggagctgttcctgttgttgcagatgctaaagagtcctcgaaggagagcagtgtggtggagcaggtggaatctatggccgatcagaaggtgtcattgctgaggggagtggtgagcagaagcgcaaggtcgtgaaaaagagcaaggtagagaaggacagagagctgtttgaacttgcgcaggcgtaccacaaggtggtagcagagagggatgcagctattgcagttaaagagaaactagagtctctttgtagggagtttcagcgtcaaaataaaatgctaaaggaagagtgcccgagggtgtcaacagaggggcaggatatgcggatggagttatccgaccaattcaatatgc

SEQ ID NO: 57717 - DNA, 483 bp, Oryza sativa
  unsure (1)..(483): unsure at all n locations
  Clone ID: PAT_MRT4530_59500C.1
tttttttttttttttttttgaagtcccatcaaatgttgtcactgtactcctctacgacccatccgttgcctgggattttaaaaatcaaacatgattatcgtttanattcattttttactttctagaagtcccaccaaaccatcactggctttgccactgtacttctctacggttcgcccgctacctgccctctttattgtccttgagattttaaaatcaatcatgattatcattggggtttattttttattttttttcatgaccgngttgcttaatagcctatccatcgtccttgcttttaatcgtcattggattatatttggggttttgttaatagtttttagatgtctcatcaatcgttacaactgcttctattcattctctttggaacatttaaaaattggaccttatagtttttagagtttattatcttcattgggtttcaattctattatttttggaagtctcatcaaacactgccac

SEQ ID NO: 57718 - DNA, 3129 bp, Oryza sativa
  Clone ID: PAT_MRT4530_59501C.1
atggaagctggagcaagattagccttcgtaatgccgctcgtcgtcgtcctcttgctgatgatcttctcgttgggcgttcggggagtggatgtggtcgtcgatggaggaggaggaggtgcggcggctgctcggcggaggagggtggaggtgggggtgatcctggacaggaggacgtggctggggaacatcagctgggcgtgcatggagctcgccgtggaggatttctacgccgacgaggagcgcgccagctacaccaccgcgctcaggctccacctccgggacacccgcctcgacgccgtcgacgccgcctccgcaggtgtcgatctactgaaaaatgtccatgtgcaagcaatcgttgggccacagacatcagcacaggccaaatttctcgcggagcttggggaaaaatcatcggttcctgttgtttcattctctgcaaatagcccatgtcgaacggccagccaaactccatacttcatcaggacggcatggaacgactcctcacaagcagaagctatcgcgtcacttgttcaaagattcaattggagggacgtcatccctgtcatcgaagatgatgactccaatacaagattcattcctgaccttgttgatgccctaaggaatgccgagatccgtgttacccacaggtgcaagatacacccgtcagctggagctgatgacataaagaaagtcgtcttaagcttaaaggaaaaatggacaagcgtatttgtcgtgcgcatgtcgtatcagctagctcttagttttttcaagcatgccaaggatgaagggatgatgggccagggctttgtctggattgcagcttatggcttaacagacatctttgatgtagttggttctcctgcatttgatgtgatgcaaggagttattgggatgaaaccttatgttaatgatactaaacaacttcaaaacttcaggcagagatggcgcaagatgtataagtctgaaaatccaggcaccacattgagtgagcccacattatctggtctctacgcatatgacactgtgtgggcattagcgttagcagcagagaaggctggatatgttaactcagactttcttctgtctgaaaaaaacaacgggtcgactgattttgacaggatcaatacttcaaatgctgctaagaagctccagagcacactcttgaatattgatttccaaggcatgagtgggaaatttcagtttcaagacatgcatttgctatcgatgacttatgagataataaatatagttggggaggagcaaagagtagttggtttttggacaccagaatttaacatttccaggggtctaaatacgaaagctgatgttaatgaaatcatatggccaggaggagaaacaactgtaccaagggggtggctctttccaatgaataaaacactcaaaataggcgtgcctgcaaaacctgggttttctggttttataaagaaagaaaaatataatttcacaggactctgcattgaggtattcgaggaagttcttaatggattaccctacaaaataccccatgactatgtggagtttggaaatggaaagggggaaagtaatggaacttacgatgaacttatctacaaagtttatcagaacgacttcgatgcagcagttggtgatataacaatcttggccaaccgatctttatatgtggacttcactcttccttatactgagtcaggagtgcgcatgctagttccagtccaggaccagcgacagaagactgcatggacgtttctgcagccattaacagctgacttatggttaggaactgcggccttctttgtcttaacaggttttgtagtttggtttattgagcacagaacaaatgaagatttcagaggaccaccagtcaatcaaattggatctgtcttctacttcgccttctccacacttgtttttgctcatcggcaaaagattgtgaacaatttatcaagagttttgttagttatttggcttttcgtggtgctgatattgcagcggagttatactgcaagcttgagctcaattctcacagtggaacaacttcagccaacagtcaccaatttagacgaagtcatcaggaaaggggccaacgttggctacctcaatgattctttcatgcctgagcttttgaaaaggttgaaaattgacgaatcaaagttgattgcccttgactctcctgatgaatacaacgaggctctatcaactggtagagttgctgtagttgtcgatgagataccataccttaaggtgtttctttcaaagtattgccacaactatactatggttggcccaacttacaagttcgatggatttggttttgcattccctctaggctccccgctcactgctgagatttcaaggggaatattgaacttcacatcaagcaacagaatggcccaactggagagagaattgtacaacaatagaacatgccctgacaaagatgactcccaaacttcaagcagccttacactacgcagctttcttgggctgttcatcatcactggagcatcttcactgctggcactgttcctacatgttgtcataaccctctataatcatcggcatgatttgagcagcgccagcagtagtcagagttcatggtgtggatggtttgccatcctcctaaagatattccacgagggtgatagacctaatgctccacaattggatgagccagcagtgtcaaatgctaacactacagctgatactccatggagcacacctgatcatcacattatcgaaaatgttgattcaggcagtgatgtggagagcgtaagagaagaagatagagaagattttgttcagggccctgacccaccatcttttgcatacatgcattcagagagggggcaataatggattagtttctccatctcttgcaaacttgaacaccatccttctgaaacagaagcactcaacaagatcaagaacgagtacataactgatcactgattcactgtaattattgattcatttgattgtcaatatatatctgctgcctgcagtttcatctgaagtagagtactagcaccaacctgtacctatgatttcttttcacaaattaggtcggcaatgccacttgctacacagctagtgttggcactgtatgtctgtacacagttgctggtaatt

SEQ ID NO: 57719 - DNA, 317 bp, Oryza sativa
  unsure (1)..(317): unsure at all n locations
  Clone ID: PAT_MRT4530_59502C.1
cgagatccgcccagganaccccccagccgaggacctcctctccttccgcgccagccatggcggncgccgacgtggcnnncgcgccgccgatnaagtccggcaagatcggcttcnanagctcgcacgaggtgcatnanaggatccgcatcaccctctcctctttttagcgtcnagaacctcgagggggggccggtacccaattcgccctatagtgagtcgtattacaattcactggccgtcgttttacaacgtcgtgactgggaaaaccctgngcgttncccnacttaatcgccttgcancacatcccccaancgcca

SEQ ID NO: 57720 - DNA, 473 bp, Oryza sativa
  Clone ID: PAT_MRT4530_59503C.1
tcttcttctggccttccaatttatgttacaaagaggggggctggatccactttggtggggacttagatccagctcaacttagttcttggaaagaaaggttggattattactctgaacaaagcgaaaggtaaaaccgtctattttgtaatgcagcactttatgtatattttggcgtactttcacttatttcgtttgatcagatgtggcaatgggcgggagcggaacgattatctccatttaccctgatgatcttacttttctatgccagtccacaggactccttgagaatatctaatgatgttaacatttaccgatggatagcacttaacccatttttgttggttctttactccattaaattatgaggtgtagaatagctggataaagctcagctaatgcaatctcaaagaggagaacaacagctaggatcatgcgtcattcaacgaccatggtctccctttcatgaccatatt

SEQ ID NO: 57721 - DNA, 111 bp, Oryza sativa
  Clone ID: PAT_MRT4530_59504C.1
atgggggttcctggaaagatagcgcaagaacagagcgaccgcgaccaccacaagaatacgctggagaagtgggagaaaaattctcagaaccacaactccgtggagcgctga

SEQ ID NO: 57722 - DNA, 690 bp, Oryza sativa
  Clone ID: PAT_MRT4530_59505C.1
tcaagcacttgagtatctgcagcctgacgaggatgaaatcgtagccgacggcgagacggcgccgaatagcaggttgacgacgacgacgacgccgccgccaccgcccatcatcatgaggcgcgccgcctcggcaacggtggccgggtggcggcctgctcgcccgtacgtcgtcgtcactgtcaccgccgcgtgctctggcggctgtgccctgcgctgcacgcctactggccgacccgtccacgtgccgccgccgcagctgctggtacaccatctgctgctactgcatcgccgccgccgcagccgcggggtggtagccgtggcggcggcggcggtggtcttctcactctcgcctcgccatcttgctcctccagtttcacggcacaacggcgacgacgagatcgtggcggtggagggggatagcgccagcacgggggatgtggggctaggcgcgccgcgcgagttagcacggggcactgcagccatggtctccgccacctccacggcttgatacgaagtggcgaagccttgagccccgctcacacacgccctgccgtgcacgtcgtgatacctgtttttacctgtcaaaccattcactttcctgtcatttcggcctatatcggcctctatggtttccaaattccaagtctcatgtagggattgcatgaacacgccattgccggcttccgccat

SEQ ID NO: 57723 - DNA, 256 bp, Oryza sativa
  Clone ID: PAT_MRT4530_59506C.1
ggctgggggggggtttttttttttttttttttaaactcataagttccccaaattgcatatcaaaacatctaagggttgtgttgtggttttttagacgtaacttacaatcgctaaagctgttctggatagtgcaaaaaaaaaaagtgctgggggtacgataggggaaacaactgctgtaattataaggtcagccactaatatgacagatgagagctgatttattaactagcccaatgatggtaagcttgtgctgctt

SEQ ID NO: 57724 - DNA, 161 bp, Oryza sativa
  Clone ID: PAT_MRT4530_59507C.1
atggacgggcgacggtggcgcctaaggcatcatgacctccttatacttgctagctgcaataactactgcccgctcgaccacggcagctgcctggctggccgaccgccggcggcggcggcgacgaccggccgacgaaatatatgcaacggcgaccaccgcgt

SEQ ID NO: 57725 - DNA, 312 bp, Oryza sativa
  Clone ID: PAT_MRT4530_59508C.1
atggattggatcctttccccttttcccctcgcgaccgcgagacgtcaagcggtcgcgtcgacgccgccggtagagacgtgtgggggagcgcgcgggggcgggggcacgaacaatctggccggcgagcgaggcggggtcggggaggtctactctggtggtggtacagcggaagtgggcgtggaaataaagaaagaaaggcaggagcaagactgcctcagtgcttcggccttcgaggtgcaatgcttccgtgaaatgttgccttccacggcaacattgtcggcttatcgcatcgtgcacctcagcatgcattcg

SEQ ID NO: 57726 - DNA, 1402 bp, Oryza sativa
  Clone ID: PAT_MRT4530_59509C.1
caagcaacaaatcatccagtcagcccgaacacagataatgcagccgtcgcaacgatcccgccggccaccgaggttgagccgccgcaatgccatccggcagtcggcgtacgtggcccggccggcgtcacagctctcgccgccgtcggagtcggaccaacccgccttctggtattcgacggaggaatccgttctggaggaaagggttgtggaagatgaggtcggagatcatgcagaggcaggtggagccgaggcggccgcattggtggtggaggaggcgtcgacttcgagctcgtctgcggtctctgtccacgcggctatggtgatcaggaggagcatcttgaattggagtaagctggatcttatcggggccggatcgtccggcagggtgtacaaagcggtggctgaggatgggtttgtatttgctgtcaaagaggcttcgttgattggtcccgaaagctatacgaagcaaaccgcatgtcagctaaagcaggaaatcttgcttcttagtcggttggagcacaagaacatagtgcagtattttggtgccaaaatgggagaaaccgtgctatgtattttccttgaatttgtgagtgaagataaaagtctggaagcagaaaagatcttgtaccggaagtgtatattggatggctccagaggagtgtccagggaggcagtggcgagttgcttcgtgcttcgtcggcggcggcgagttgcttcgtcggtgacgacttgcttcgtgggaggaggcggcgtggcggcggctgatccgtttgaggctgcggcgtctgatccgtttgaggcggaggtggcggcgacggcggtggcggcaggtggttcgttgcggcgaggttgtgttgggcgcagtggtggcgggcgcggcagtggcctggtgctgctggtggcgggcgcggcggtggcctggtggtggccacggtcacgaggtagcggcggcggctggatttgtattgtacgatttattggatgttttgatgagctcaaccattacttgttctttgtgaatgttcaaatggccaataccctcccatatcatttactgattactgcaattcgagttgttcgtggcaatccgtatgggtattctgctgatatttggagccttggatgcactgtcttggagatgcttacccaaagaattccttatcctgatgataactggttctatcaggtatcagtcttctaccaaattggccgtggtcaacttcctccagttccaggctccatatcaccggtgtcacgcgatttcatccacaaatgcttgcaggtgaatcctgatgatcggccttctgcagatgaactgctgaatcatcccttcgtggctaatcccccaatcttctcgcgatccgctcgctctgctgctgcgccgcgggagcgcgggggagga

SEQ ID NO: 57727 - DNA, 426 bp, Oryza sativa
  unsure (1)..(426): unsure at all n locations
  Clone ID: PAT_MRT4530_5950C.1
cttcttcttcttcttcttgttcttcttcttcttcttcttcttcttcttcttcttcttcttcttcttcttcttcttcttcttcttcattactacaggattaataccatctctgtggacttgtacattcatcccaacatcttcaaagccgaaaacantcagnnnattgccccttcatctnggttgccccccaaatggcccatcaaaatgatgataagatccatctgcctctgataaagtttggcgcccatcaattatgacagcattcctcaaacaccttcccacttggaaaaataagtgggtcttgcacaaccccacaaaaaaaccccaaacctggaaaaaaaagaaaaaaaaaaaaaaaaaaaaaaaaaaaaaaaaaaaaaaaaaaaaaaaanaaagaaaagagagaggagatttcccccccttttt

SEQ ID NO: 57728 - DNA, 1455 bp, Oryza sativa
  Clone ID: PAT_MRT4530_59510C.1
tcaaaatgtgcctataatctgctgaagggaggtgtaggtgccaacaatggcgacacacactccgatgaccagtatcccgatgatcgccgccatctcgaagcagccaactcctcctcgggacatgtagatcttgaggtagctcaagcacgggaacaacacagcaacggtgacgttcagcgaggacccgatgaatgatatgaggtagccgaagaagggcaccgtgcatgccagcaccaccgtgctgataacgacggctgtgctggtgagcaccctagtcagcctgttgatctcggcgtccgtcgtcgctgacagcttctcctctatcgctattgtgactggctggatcacgagcgcgtacttcgctagcggggtgattagtgtcgtcaggatggcgatcctagtgtacagcttccccgtgggtaagctcagtgtcacttgcgcctgcacatcctcaccatagatcagatatcccaacaccgctgtcactgcgtagttgagactgcacagcaccaaagagatcagcaaaaccttaggaaaatccttcttagagttcattgaggagtacacagtcgggaaaacgccatgtccagcgaagcagacgaaatagaggctaagggcggtgggcagctcgctcagattcaagaggctgctgccctccatgtggaggcccttgccggccacgccggcccagaccagcgatgccgtcagcgccaccgacgagacgagcccaaccgccgagacgtacgcaagcatgctgaggttcttgagccacgttgtcggaaggatgacggcggccgccgcgagcacgaacagttgcttcccgtgaacctggtaccctaggatctccaccactatgccagggaggagcttgtcgaggttgtcgccctcgaggatgaggaagctgatggcgacgaggtagagctcgacgtatatgacgaggccgatggccatccggccgtagctgccgaaggcgaggtagccgatgtctgggtagctccgtacacagcggtcgacgcgcatgcaccggtcaattaggttgccagtgtagaagcagatggcgccgaccatggtgaagagtgtcaagctgagccacccgccctgggatagcgcgtacggcacagagagcatcccgatgccggatatgatgttgctaaggtttaggcagctcctcccaaaggaagcgccggtcatacaaaatgagccgccgccggtagggaggaggagatgctgctccatgttgctgccggtagggaggaggagatgctgctccatgttgctgccggtagggaggaggagatgctccatgtcgtaatccacctcatctcgtagatcttcttgcctatggagaagagcctcatcgataggactcttatccgccgccataatccccgtgtctgtgtgtgcactgtcgcagccgaagccctcgtggtagccaacgatgcacgttgacggcat

SEQ ID NO: 57729 - DNA, 3055 bp, Oryza sativa
  Clone ID: PAT_MRT4530_59511C.1
tcagccggtgttgcgcatgccggcggcaatgccgttgatggtgatgagcagcgcgtcgcggagcttgcggttgtcgtcgtcctggcggaggcgacggaggacctcgacctggagcatgttcatggggttgaggtacgtgagcctgctgtcgatcagcttccgcaggctgcggttgttggcggacagcttcttgtgaccgctcaccgccagcacgcagttctccgtccgcgccagctcctgccggagctccgccccgagcgtccgccgccccgcgtcgtgcaccagcacgtcgtcgtagtgcttggccatgggcgcgtccgccttggccaccaccatctcgatgaggtccaccgtggactggaagaagggccactcctcgtacatggcgcggagctcgtgggtgtggcccttgtcgcaggcgtcctggaggccgcgccccacgccgagccacgccgggagcaccagccgcgtctgcgtccacgcgaacacccaggggatggcgcgaaggttggagatccccggcgtggtcctgcgcttcgcggggcggctgccgatgttgaggtagcccagctccgcctgcggcgtcgcctcctggaagtacttgatgaactccgggttctcgtacaccgtgctccggtactgcgcgcagctcacccgcgatatctccgccgtcgtgtatatctccagctgccggacagacgtctgcggcagcccgaacttggcctgcaccatctccccttgctccgtcgaccgaagagttcccatcactgagccgggtggctgcgactgaatggcgagataggtcggcccgccgccgcggccgatgctcccgccgcggccatggaagagcgtaaccttgatgccgaacgcgttgcacgcggccaccacatcttcctgagccttgtatagctcccatgccgcggtgaaacggccggcgtccttgccggaatcagagtagcccaccatcacctcttggtgcccgttatggttcttgatgatgtggtctctgtaccagtcgatggacagtaactttctgatcgctgggccggcttctcgcagatcattcaccgtctcaaacagtggaacaactctcaacgttccaccaggacatggccttcctaggtccccgctgactgtaagtcttgcgtccttctgcaacagttcaaccgctaggacatcgcttgcatttgaggccattgaaatcacatatgctccaagtgcatcgcttcctaactctgcagcaacacggaatgtatcaagaacttcttgcacatcagcagtaacctgtatgtatggggggacaagagggcgcttccctttcagctctctagtcaagaaatccagtttcttttgttcatcccactcactataaacaccaagatccaggtaagatgtgatggcatcaagtgtttccgtatgccggcctgattcctgccgtacatcaagcttcattaacaccataccaaaggttgcaacccgtcgaatcaaatctgctaaccggccatccgcaagcacactagatccacatgattgcttttctttcacatcaccaaggacaactctataaggagtactccctggtctctctgatatgcttggttctagaagtttccggaagctcgatcgaccaatttgggattctgtgaacatcttccttagttgacctccacttggagttcgacccatcgggcgatgactaggagacggcaatggactgtcttcacgtttttctgttatgtttagagccaacggcgatgccatagcttctccatagcatttttcactccatgtcatttcaatgttcgttgaaaaaaaatgtagcgcatattggaatagttgtgccaatgcatttttatggacagtttgtgcttccaatgatctcttatgctttggattccctggaagttttgacattctgatttgagattccccatcgttgcattctgtacatgatggaagatcagcaccagaaggaagctgtgcaggaagggccaagctgtgctgaagctttagattgttctggggtccagtttgattccaggtattggtcttctggtcctctgatgctgattctttgagcaggatgtcatttgctaagtttgcaagcttctcgctgcatctgttaattgatagctcaaagcttagagtgtctagttcccggatgtacagatcaattgccatccattgggacaaaatggaaacatccctagtaacttttgctgtgacattaggattcccatcacggtcaccacccatccatgaaccgaatttgattggtgtgcaggtgagcggaagtggcttgccagtgttcttctttagagcattgctaacacggcgaagatagtgtggtattgctttccagagcgattgctcaacaatatgaaggccagctctagcttcgtcaacaggtgtaggtttatggcgcctcaactcatcagtctgccatattgccgtgatttctcttaccagatcttcaattagaatttctttatcctcgaggctaagatcagcacgttcgttgaattccaaaaggtgctgcttgcatacagtgtcatagagttcttccgggctaacaccactttgaatcaatttggcaaatgtatcatcacatgatttcgacaggtcggcgaaattgcgtgctttacgaaccctgtggtaagtgtcggcgatggtcatgaggttgaggtggtgggagaaggcgcgggcgaggcagagcgagtcctcgagcgacatggcggccagctcggcgccgagctgcttctcgacgacgacggcggtgtcctccaccccggcggagcgcatgttgacggcgctctgggcgaggatggtgatgcgctcgaggaggtggatgaagcgggggccgagctcgcggaggaggacgtcgtggaggaggctgcccagcagccggcagtcgtcctcgaacgcctggaatgatatcccctccgcgatgtcatccgtcgtgtccgtcatcgccgatcaccgccgcgcctcgcctcccctgatcggattcggattcctcagatagagagcaccagatggagagagggattgattg

SEQ ID NO: 57730 - DNA, 225 bp, Oryza sativa
  Clone ID: PAT_MRT4530_59512C.1
gaacggagaaacactgatctgatagtcccattcatacatgtatgtccacttccataccctggatctgagcaccccagaggctatggctcagacagggcaactctctagtacactgacaaagagacaagtgactacctgaacattgtctaccttgctcctgatggggcgcactaagctcagactttattagagatcctacatacaggatttgcctcgaccaggaac

SEQ ID NO: 57731 - DNA, 2588 bp, Oryza sativa
  Clone ID: PAT_MRT4530_59513C.1
ggagaagaagggagaggctactctacttttgcttgcttatccacaccacacgtcctcctctcgtctcatcgtcttcccccccaatctcctcctccaggctccaggggccaagcaagatccttcctatgcaacacgagaggggagcagctcccccagagctgagtgagtgagtgagagagagagatcctcttgtgctctgaccaggcggaggccatggctatgggggccgtgctctccagcagaaccttcgcctctccactctcctcctcaggaaagcagcatccaccacaaaacaacaagtgcacctgttcctcacctcccacccgagataaattcagtcgactcactactaggaccaccattttccaagtctctaactattccaggagcacttcaatggaaagatttcaactttctgcccgattccaccagcctgtggttgactcttctacaaactacctcaccaggtggttttacaatgcaaacctcaagaggcggcggattgaatgctttctcacttcggatccaataaacactggttggctaaaaccaagaagatgggacaacttcactagtttggacactgcttgtgtccagccagactacaaaattccggtcagaacacgcgccgactgtaaagccgagcagtatgagataacgggatcaccgttgagcccttctgatgttcccgccgaggcagttctcattggagatacaaatgagatttctccctggtggcagcagttccctaagcgatggacagtcgttctcttgtgcttcttttccttccttctgtgcaacatggaccgtgttaatatgagtatcgcgatccttccaatgtcatcagaattcggctggagtccagcaactgtaggcctaatccagtcctccttcttttggggttaccttcttactcagatccttggaggtatatgggccgacaggtttggtggtaaggtggtgctaggatttggggttgtctggtggtcaattgcgacagttcttacaccccttgctgcaaagattggacttcctttcctacttgtcatgcgggctttcatggggataggagagggtgttgccatgccagccatgaacaacatactctccaaatgggttccagtttcagagagaagcagatctcttgcattagtgtacagtggaatgtaccttggttcagtgactggcctagccttttcacctctcttgatcagcagattcggttggccatctgttttttacgcattcgggtcccttggaagcgtctggtttgcactttggcaaagaaaagcacacagctccccgagtgaagatcccgaactaagcaaagccgaaaagaggtacattctaggtggaagcaccttgaaggagcccgtcacctccataccttggaagctaattctatcaaagcctccagtatgggcgctccggttatcacatttttgccataattggggaaccttcattcttctaacatggatgcctacatactacaaccaggttcttaagttcaatcttactgaatctgggcttttgtgtgtcttgccgaggctgacaatggctatatttgcgaatattggtggctggattgctgacactcttgttgggaggggggtttccataacgaatgttcgtaagatcatgcaatcgattggtttccttggaccagccctcttcttgacactgctgagcaaagtccgaactccagccatggctgtattgtgtatggcatgcagtcaggggagtgatgccttttcacagtctgggctatattcgaatcaccaggacataggcccacgttatgcaggtgtacttcttggactgtcaaacactgctggcgtgcttgcaggagtttttggtactgctgccactggctacattcttcagaaaggttcttgggatagtgtgtttcaggtggctgtggtattgtacatagtagggacagtggtgtggaatgtcttctcaactggagagaaagttcttgaatgagctgtagatgctcttatacgcacaaaaagtatagctgattttgctgatgtcttattgtggtacgagaagaaaagctctcgtttagacagagagatatagctgattgaaaaccttcattttagcaagagaaatatagctgcgtttgacggttgggacactgaaaacaatgaagagcaaactgaagagttgcaatggattagtctgtgaactgaaacttggagccagtgaattaccttacgctgcctgaaagcatctgcaccaagaagtgtcagtctttgcagtaagcttgtcgctgaacaagctcctgcccaacttgcttaacatcttcttttgttttgaaatattgatccactagtgaaccagctaccttgcttgctcgaggaaggagctagagctactgccaaactcgtgtattatgagagcattttgggagattaagctttttttttgttaatttgtgatgctgctcctgttattttgcaaatcctgcgggatcgtatcgcatgactatctatgcttgtgctgaatcatcctatgcttcttgttaaaattgctagcaaaacctactgaattaaaaaaaaaaaaaaaaaaaacaaaaa

SEQ ID NO: 57732 - DNA, 2142 bp, Oryza sativa
  Clone ID: PAT_MRT4530_59514C.1
atgcacatggtctcatttcgtgcggggcaagatctccatgatgtcgtagagagaaatggcgtcgagaagagtatgctaactgagtattttgaggcaaataaagttaacgaagatgctcgaggaatcctctacaaggattttccagaggcatttacttggcaagctggcccaaaagtatggcaacggaggaaacggcgaatcactcaaattgggagaatcgtgacagctcatcctgcagagggggagcggtactaccttagggtgctgctaacccatgtgactggcgccacctcctttgaacaccttaggacagtggatggtgaagtctgctcgtcctttcgtgaagctgcagaaaaaaggggtcttatcgaggcagacaacacattagatgagtgccttactgaggctgaggtgttccaaatgccatcatcgctacggaggctctttgccacgatattggtcttttgtgagccaagtgacgtacttggtctatggaacaagcacttggagggaatgttggatgactatcgtcgttctcacacgtgcccacgtacaattgagcagatggtgcttttggacattagaaatatgctccagtcgatgggaaaagaaataacgtcgtttcctctacccgaaattgatgagtcatacgacacttcaggcagcgagcctagagagatctttgaggagtctacaatcgaggtggatcatgggcacatggatttgtcaagttcactcaaccctgagcaaagatgtgcttatgatgagatattatccgctattgagggcggacaaggaggtctcttcttcgtagatggccctggaggtactggaaagacttttttatacaaggctctacttgctactattcgtggtcagggaaagatagccgttgcaactgcgacgtctggtgtagctgcttgcatcatgcctggcggtaggactgcccactcaagattcaagatcccactgaacattgatgatggaggggtatgcagtttcacaaagcagagtgggacagctaaacttctccagagagcttccctaattatatgggtccaagcttctatgacaaaacggcaagcagtcgaggccctagatagaagcatgcgcgacatcatggaccgtcctgacgtgccatttggggggaagacagttgtgttcggtggagactttagacaggtactccctgttgttcggaagggaacgagacctcagataaccgatgcaacactacgtaagtcctacctttgggattgtatgcgccaactaaggttggttacaaatatgagagcgcaaaatgaccgatggtttgccgaatttcttcttcgtgttggcaatggcatagaggaggcatgtgatgatggttacatacggcttccagatgagatatgtgtgccatgcaccgggaatgatgacgacctcaacaatttaatagataatgtgtttccgatgcttgatgctaatctagccgacccaaactatatcacatctcgggccatcttgtcaacacgaaatgagtatgttgatcaaataaacatgaagatgatcgatcgttttcgaggggaggaaatgttataccacagcttcgatcgtgccgaggatgatcctcacaactactatcctcctgaattcttaaattcgttgacccctaatggattgcctccgcacatactaaagcttaagatcaattgccccgttatacttctaaggaatattgatcctgccaacggactctgtaatgggacgaggttggtggttcgaggattccagagaaacactatcgacgctgagatagtgcttggtcaacatgctgggaagagggtgttccttcctaggatacccctatgcccctccgacgatgagatgttcccatttcgttttaagagaaagcaatttccggtcagacttagctttgccatgaccattaacaaggcgcaaggccagaccattccaaatgttggcgtgtacctccctgacccggtgttctctcatggtcagttgtatgttgcattgtctagagcaacagcaagaatgaacattaagatcctcgcggtacaaagcaaggacaagagccatcgttccatgtctcgtgggacgtacacgaggaacattgtatatagagaggttctcacgtcatag

SEQ ID NO: 57733 - DNA, 1023 bp, Oryza sativa
  Clone ID: PAT_MRT4530_59515C.1
ccccaacccccgcgccaccgcttctgccggcggtgcccactcccggaggagataaggccgacttctctctctctctccatttctttcgatttctccacttctctctctctccctttctctctgtgtgcagcggcggcctggcagggacagaggggagcgtgcggcggcccagcggcggcggcgccctcccctccaccagatctaacaggagcaggaggagaggcacggtcatggcgaacggtgtggaggtgcaacgccggtgaccacaagccggctagggctccaagtttggacaacccgagctcggggggctgtggatctagctgtcccgagtttgggtactccagatccagtggcctccggcgccaacagcgccagatccaggctcatggtgagtggatggcgtctcctctctcctccaatcggctgtgtgcgctgccgtccgccgtcaaggcctatcggctgtacggcgagcatgtgcttctcctcatcctgtgcagtcaccacctaccggctacattagctagacatctttggagctgcttctccagttgctgcagctctttgagattcagagattcaagatcctctcccatgagatggctgcaggaattacagaaaatcaattttgctgcaagatcctcttctcccataaggtaaataggtgctccatagactatggagttgctgacatagcagataattgaatgactctgcttttctaagtgcaagccattgtgttctttgagttttatattaattctcgaacttgatgatgttggcctggtagcatgtctctatatttgaaaactcaaaagagctcttttctgatatggcatcattactttctaatttttgaatttgtaatttctttttctatgagcaattttggcagtacgaatgtaagagacatggtcctaattcttgtttgtctggagaatgggaattggttgaaaaaaagaagctacaaatgtttaacaaaaaaaaaaaaaaaaaaaaaaaaaaaaaaaaaaaaaaaaaaaa

SEQ ID NO: 57734 - DNA, 488 bp, Oryza sativa
  Clone ID: PAT_MRT4530_59516C.1
tctaggttctcctgcgcacccaaaaatatcaaagaactcataagcggagagaggcgaataacaggggggacgccatgtacgtggaggaggaggtggggatgtctccagtggattttctatggggctgttctccacatataggatgaggcccccagctgacgtctggctgtatgttaagacagtagcgtcttgatctatgttgttagcttctattttcaggattggctcctctattcatttaactttttccttatagactctcttctccttcttttccgcttgacttattcttttaattttttcttgttttgttcttcctctttaatatcctttttttgcatttgttttttattctttatctctttacttttttgatattttattcatttttttatctgtatattttttcatccttttatattatctttacctttacctttaattttatttttttatttttccttactctttatcttctttttcctttt

SEQ ID NO: 57735 - DNA, 365 bp, Oryza sativa
  Clone ID: PAT_MRT4530_59517C.1
gcacgaggatctggtctcgccgtcgccgccggccgccgcctcaccgccggccgctcggtgaacgtcatgctcatgtccgacgggcagcagaaccgggcggacgcgacgcggctggaccccggcggcgtgcccgtccacaccttcggcctcggcgccgaccacgaccccgccgtgctccaggcgatcgccgggaagagccgggaggggatgttccactacgtcgccgacggcgtcaacctcaccgcgcccttctcgcagctcctcggcggcctcctcaccatcatcgcgcaggacctggagctgacggtgacgcgggtcgatggcgaggccgccatcaagaaggtggacgccggcacgtacccgca

SEQ ID NO: 57736 - DNA, 3726 bp, Oryza sativa
  Clone ID: PAT_MRT4530_59518C.1
atgggccctattgggctgaaatacacacgcctacactcaacaggtgtgccaaggaagattattttcagagaagcgggctctgcgagctcatcctcgataggggaaaagagggatctgctgcacccgacagaaccaccggtaagaattgatacttttgatggctttgagtcaagagagagaaaaggggatgaaggtgtggatgcccaactagcagaacaggccaaccagatacgcgtgtcggacatgaatagttcccagcataaacccataaatactgataaggggctctctagagatttgattatggctgaaagagggggggagctgttgccaatcccttcaaatgagatgataccggctgtcagggatctgagcgcttatcaggactcgttggatgaaggctctatggatgaaacaagcagtccgagcaagaggaaaacaggcagtttgtcagatacaaagaagacaggcattgttcagcaagctttgttggagtacaaacagctagaggagagcacagctcaaagcaagaaggacattgagtccataggacggtcgctaaagagactcaggaaggatggtggagcaacaggggaggtgactggcttggaagctaccagcgctggggctgctgtcaaggacactagttcccagttagtcttcttgtgtgaaacaaggcagcgagttgagaaggtaagccgcctcagtaaaaggttgggtcttagaggttttactggtgttagtagtgaaggtatgagtggtggtttggctttgttctggcacgaatctgtcattgttgatattaaagatgtgaatgcaagatatattgatgcgtatgttcgtttgtctccgattgatcctgtttggcatgttacttttgtgtatggcgaacctcgggtggagaatcggcaccatatgtggtcgtctttgaatgcccttcgacaatcgtcaaactttccgtggatggtcataggcgattttaatgaagccttatggcaattcgaacacttttcgaaaacaccgagaaatgagaatcagatgaaggcttttcgggatgtcttgcagatctgtggtctgagtgacctgggtttcaaagggctaccccatacttatgataaccgtagggaaggctggaacaatgtgaaggtgagattggacagagtgattgtagatgatagttggagggatattttctctgaggcacatgttgttcatttggtttctccctgctctgaccattcacctcttttgttaaactgtaagatgaaggatactagcactgtacgtaacaagtgcttgcactatgagatattgtgggaaagggaagctgatttccctgaggttgtggcagatgcttggtctgatgcaggggataagggcgacctggggaaagttaacaaagctctagatcgggtgatggcttcactgcgttcttggagtaacaggaaggttaagaatataggcagggagtcagaaaaggcaagaaaaagactggcggctctgttagagaatggagctgatagttcagttgttcggcaagcttcagaccatatgaatgaattgttatacaaggaagaaatgttgtggctccaacgctccagaattagttggttgaaggaagaaagagttgcacaggggtccatctctcctattcagatatgtcgacgcgctcctggtatatctcatttgctctttgcagatgataccttgttatttttcaaggctgaacaacaacaggcgattgcggtaagtgaggttctcagtgcttatgcagctgggactggacagctaataaacccagcgaaatgttctattatgtttagtgaggcttctccaccaggaatacaggaagcaattaagagtattcttcacattgagaaagacgaatttgaagaaaggtacttggggttccctactcccgaaggtaggatgaagagagggaaattccaaagtcttcaagagaagatatggaaaagaattattcagtggggggaaacattcctgtcctctggcggcaaagaaataatgatcaaagcagtcctccaagtgataccagtgtatgtcatgggaatcttcaaactgccagagtctgtgtgtgaggatttgaacaaactcactcgtcaattctggtggggatctcaggatggacggcgaaaaactcattggaaggcatgggatgtgctaatgaagtcgaaacagagtggtggcatgggtttcagggatattagatggttcaaccaagccttgctagctaggcaagcatggcggttgattgaatctcccgatagtctctgtgctcgggtgttgaaagcgaagtattatccgaatggttccctcattgatactgtttttggcggtaatgcctctcctggatggaaaggagtggaatatggtttggtacttctgaaacaaggattaatttggaggataggaaacgggaaatcaatgaaaatttggagagatccttggttgccgagggagtttactagaagaccaattacagtcaaacgacattgtcgtctgaaatgggtttcagagctaattgatgagaatgttgcttgggatgtagataaggtctctcaatacttttggaatgttgatgcagaggaaattttaaaaatcagactaccctatagggaaacggaggacttcatatcctggaaccccgacaagaacggccggttctcggtgagaagcgcctatcaccttgcagtgaggctggcatccaaggatgagagctcttcatcctcttcaatttgtgcaaagaattcttgggatttaatctggaaatgtgaagttccacacaaggttaagatcttctcctggagagtagccacagacagtttggcaacgatggagaataaaaagaaaaggaaactggagatgagtgattcctacaccatctgtgatagagaaagagaggatactggacatgctctatgtcgatgcagtcatgccaggaatctttggatggaaatggccaaggcaggaaatcttgtatctgacattaattcgatcagagggggttcttactggttcttggactggttggggagagttccagctgaggagcaccctatgattctcatgatcctttggcgaaattggcaggttcgtaatgatataactcatgggaagccggctgcccccgtgtgggcgtcaaggcggttcctggaaagctatatgtcaacaattgtccaaatcaagcagaatcctggtgcaaatttgaagaaagggaaactggctgttggtattgctaagcgggctcctgccccttgctgctctgtcaaggatgtccccgtgtcgtgggagaaaccaccagcggggtggatgaaactgaatatcgatggatccttccatccacaggaggaaacaggaggagtaggaatggttctgcgcaacagttcaggagagggtacacggtggcggataccccctcctgctggcacaccgagggggaagctgcacgagatggtgttgaaggagcaggaggagagctccaccgccttcgtcgagtcccccctttatcccgctgacaaagctgggtccaagcctcggcatgtgctcgtcgcctcctcgggattctccgtcaacgcgagcggtgccgactccgacaacggcgaggaccggagcagcgatagcagccagcaggtcctccactgccatgagcgcccctcaccgccacgactcctcgccctcttcctcgcactcagtggcaggcggtga

SEQ ID NO: 57737 - DNA, 945 bp, Oryza sativa
  Clone ID: PAT_MRT4530_59519C.1
atgatcgccgtcgggtcggccaaggggttggcctacctgcacgaagactgtcgtccaaagattattcaccgagacatcaaggcagccaacatccttctcgattacaaattcgagccaaaggttgcggactttgggctagccaagatccaaccgggagacgacacacacgtttccacccgcgtgatgggcaccttcggctacttggcgccggagtatgctgctactggcaaagtaaacgacagatcagacgtcttctccttcggtgtcgttcttctggagctgatcaccgggaagaggcctgtcatttcgactgagcccttcaacgacgagactctggtttcttgggcaaggcctcagctgacaaaagctctagagcagcatgtctacgacgatctgatcgatccaaagcttgacgccttgtacgacgcccacgacatgcatcggctgatctcctgcgctgccgccgcggtgcggcacacggcacgctcccgccctcgcatgacccagattgtgagatacttggagggggagctgtcaatagatgacctgaacgccggcgtcgcaccggggcagagctcgctgcgctcgcaggagcactccggcgacatgacggagctggtgcggcggcggctcaggagggtcgcgttcccgccgggcagcggcgtcaccgtcaccggcaccggcgccgtcaccgacagcggctacctgagcgaggcgacgagcgagtacggggtgaacccatccatcagctcgagcagcggcggcgacgacgacgacacggccggcgaggtggtcggcggcgtcaccgccaccagccggccgcacgccgccgccgccgcgtccagcccggacacgtccgaggtggcgtcaccgcacgccggcgagctcgccgccgacgccgccaagccgatgagcagacgaacacgcctcggccgctttccgtga

SEQ ID NO: 57738 - DNA, 759 bp, Oryza sativa
  Clone ID: PAT_MRT4530_5951C.1
tcagtcttcttcatccttgatcgcatcttggagctcagagaagtccactatgatgttgttctccatggctatctctttcgtcaccttcctctttagctccatgcttttcgcatcactggacaacttccacaccaacatgggatcgacgattttttttttttttttttttaggactcagttaacccgtctcctttcgcaaaacggtgattacaactcctttgtacaggacaacaaaaaaaaaaagggggggaatatatcacctctgtaattgtacattctctttcgtttctagcgcaatccattttaattacacatatttgatttcccggaggcgggatcttatatcggttcctcgaaggcgcttccaatgacttaactgcgcatgcagtggagtcacaggaactccgtcaattcgttgccacaaccggcggcgaacgagacccccgcggcagggcctcgaatcaaatcggtgcactccccaggcttgtccagcttcgcagcatgctcgatgagtcgcttgcaatacatctctatcatttcgaacgcctccaacatgttgtcctccgctatgacctgctctgcccggtggatggcgcgatcgaggtggtcgagggtgagaagctggcgaacatcatcggtggcaatggatttgcgagcgaggtggggccggcgagcggtggcgatgcgcaagacggcgagccccaggagggtcttgagcttgctcgtctgcttggaggtcttccgatggaggaaccccat

SEQ ID NO: 57739 - DNA, 1500 bp, Oryza sativa
  Clone ID: PAT_MRT4530_59520C.1
atggctgcggcggcggcggcgggccagatctccctggacgacctccgcaacggcggcggggtcgccgccaatgccggcggcggcggcggcgtccacgacgacttcctcgaccagatgctcagcagcctgccgccctcggcgtggcccgacctcgccgccgggaaggcggccgaggacgacgccgaggggatgcatcaccaccaccaccagcagcagcagcagtttggtgggccgtacgacgagtcggcgatgctggcgtcgcggctccggcagcaccagatcagcggcggcggaggaggaggcggcggtggcgcggccgccgtgaagcagatggtgctgcagcagctcgccgatctgaggcaggggcaccacatgatgctccagggcttggggggacggtcgccggcggggggcggcggcggcggcggcgacgggggccttctcctcccgctcaccctcggcagcggcggatcgggcggcgacgtgcaggcgttgctcaaggccgccgcggccaattccgccggaggaggagacgccggcggcgtctacggcggcggattcgccggctcgctccatcaacagcagcaacatttccagccacatccacagacggcgccgacgattccgacgcagagcttcggcggcggcggcggcggaggaggaggaggaaccgcgtcaggcggcggggcggcgcagcctcaggccggcgcggctggaggaggcgcgccggcgccgccgcggcagcgggtgcgggcacggcgaggccaggccaccgacccccacagcatcgccgagcggcttcggagggagaggatcgccgagaggatgaaggcactgcaagaactggttcccaacgccaacaagttgatgcagacggacaaggcttccatgctggacgagatcatcgactacgtcaagttcctacaactccaagtcaaggcaagcacgtacactaaattactaatacatgttttgagcatgagccggttaggtggcgccgcagccgtcgcgccgctcgtggccgacatgtcctcggaggggcgaggcggcggcgcggcgaacggcggagcaccggcggcggcggggagcgatagcctgacggtgacggagcagcaggtggccaagctgatggaggaggacatgggcaccgccatgcagtacctgcaggggaagggcctctgcctcatgccgatctccctcgcgtccgccatctcctcggcgacgtgccatctccggccgccggtggtcgccgccgcgcagcagttcccggccgggctcggcgccgccgctgccgccgcgcatcaccaccaactgagcgcggcggcggcggcggcggccatgcgcggacacctgcccggcctgaacgccgacggctccgtgccggcctcgccgagcatgtcggtgctcacggcgcagtcggccatggccaacggcggcgggggcgccgccgacggcgaggggtcgcagctcaaggacgccgcctccgtctccaagccgtga

SEQ ID NO: 57740 - DNA, 210 bp, Oryza sativa
  Clone ID: PAT_MRT4530_59521C.1
attcttcatggtgatgtcaaaacctccaacgtacttcttgacgagaactatgccgcaattttggtgccaactgacgaggcccaatttgtcaccttggtgcaaggaacctgcgggtacctagatcttgagtacatgcagacctgccaactgacagataagagtgatgcatatagctttggtgtggcttcgctagaataccatcctcaacca

SEQ ID NO: 57741 - DNA, 377 bp, Oryza sativa
  Clone ID: PAT_MRT4530_59522C.1
gcctgcacgcgggcgcctgcttggacgctcgttctcggccgccctttgtttttttttgtgtattctggttcttgggactcaataatcagaggtggccctacatgagtttataatccgtatcatcggtaactttttttacaagagcatcacatattcgaggtgcaacatttgtttcagaggttctatgcactaggtttaactttccgctttcagtggggtccgcggacagcttctttgggtgcatttcttaacacaaagacaagggtggccataaccaggtaccgcaagaaaaatttaactaacttgaaatgaaaagaaaaggatatggacttaatacccgtctataccatttggcctttggggggacatacaatatc

SEQ ID NO: 57742 - DNA, 810 bp, Oryza sativa
  Clone ID: PAT_MRT4530_59523C.1
atgaggaaagccggcagaagggcgttcacttgctcggcggcggcggcggcggcggcggcctccgctcttgtgaagcttcttgttcttgtggcggcggtggcggcgacgacgtccgccggtggcggcgacgagccgacgtacgagaccaagtccatagacccgagcctcgccgtgatgacgctgccggcgcccgtgacgggcccggagagcctcgccttcgacggccgcggcgacgggccctacaccggcggctccgacggccgcatcctccgctggcgcggcggccgcctcggctggaccgagtttgcctacaactccaggcacaagagcatcagcgtttgctcgccggagaagaagctggtggtgccggagagcgtgtgcggccggccactggggctgcagttccaccacgcctccggcgacctgtacgtggccgacgcgtacctgggcctcctgagggcgccggcgcacggcgggctcgccgaggtggtggcgacggaggccgccggcgtgccgttcaacttcctcaacggcctcgacgtcgaccagaggaccggcgacgtctacttcaccgatagcagcaccacgtatcggaggaggggtcttcacctgctggtggcggccacgggcgacgagacggggcggctgctccggtacgacgcgcggcggcggcgcgtcaccgtgctccactctggcctcccctacccgaacggtgtcgccgtcagcgacgacggcacccacgtggtggtggcccacacgggcctctgcgagctccgccgctactggattagattaagtttatatatataa

SEQ ID NO: 57743 - DNA, 1050 bp, Oryza sativa
  Clone ID: PAT_MRT4530_59524C.1
acttgctcggcggcggcggcggcctccgctcttgtgaagcttcttgttcttgtggcggcggtggcggcgacgacgtccgccggtggcggcgacgagccgacgtacgagaccaagtccatagacccgagcctcgccgtgatgacgctgccggcgcccgtgacgggcccggagagcctcgccttcgacggccgcggcgacgggccctacaccggcggctccgacggccgcatcctccgctggcgcggcggccgcctcggctggaccgagttcgcctacaactccaggcacaagtaagctagctatatctatccagaaattgagagcgtgtgcgggcggccgctggggctgcagttccaccacgcctccggcgacctatacgtcgccgacgcgtacctgggcctcctgagggtgccggcgcgcggcgggctggccgaggtggtggcgacggaggccgccggtgtgccgttcaacttcctcaacggcctcgacgtcgaccagaggaccggcgacgtctacttcaccgatagcagcaccacgtaccggaggagccagtacctgctggtggtggccatgggtgacgagacggggcggctgctccggtacgacgcgcggcggcggcgcgtcaccgtgctccactccggcctcccctacccgaacggcgtcgccgtcagcgacgatggcacccacgtggtggtggcccacacgggcctctgcgagctccgccgctactggctgcgcgggccgcgcgccggcaagtcggagacgttcgccgaggtgcccggctacccggacaacgtgcgccgcgacggcgacggcgggtactgggtggcgctcagccgcggggccgacaatgacgacgtagcgccgaccgtggccgtgcgggtgacggcggcggggaagaagaagggtggaggcgcggcggtggtggcagaggcgctcgccgggttcagcttcgtgacggtgagcgaggtggcggagcagaatggcacgctctggatcggctccgtcgacacgccgtacgccggcgccgcggtgaggggtcgccggtga

SEQ ID NO: 57744 - DNA, 2707 bp, Oryza sativa
  Clone ID: PAT_MRT4530_59525C.1
atggctgagaaaccaccagcatcactgtcctcagctggcaaagaggggactcctaaatctaaaactccggactggttgacacccgagcagcagaaggatcttgaggctatgatgcagtaagcacggaaccaattcttgaactcattcatggagacccgcaagggaacagttgttcagaagtataaagtaaaagtaattgctgatgttcccggaacaggttcttccaaggatgcagaagtacaacaggttccagatggtacaactcaatcaagtgataaaggtgttgcagatggttttcaagggattcaaggtgatggctctcaaggggttcaaggtgatgaatctggagtattagtcaacacattatcaaacatggtgaagtcgatggttgatggcttgatagctgaatatcaggctacaggaccggtttatttgccaggaggtgttttcccaaactatcggcccttaatcactaataatcaaccagttgtctagccaattcctcccaatgcaccatcggctcaaccgacagcaccagtatcggctcctgcacctgttgcaccatcatcggcactgggtcaattaattaatcctcggttgttgcctactgttgacacaatccagcaacagccgattcaacaaacaccaccaaggcagcaggttgtgcagccgattcaacagcaaggtttgatgaatgcatcggctgtgtttggaacacctgacgatcagctaaggtagcacgctgcgaatcaagttgtcctagagcatttggtccataacgtgcaaccagatcaaactgtggtacctcaggttattcccgaacatttggtgcgcaatatacagccgaactttcagaattaccattggggcaatttgaattatcagtattagcctccatcgccgtaagttcaatatcagcagggaggaccggctcagccccagtttgttcctcaatacaatcaattcgagaccgtgccacaacaagcacaaggagtgcctcagcaacgaccatgggcccgagtggtttgagagagttcctctgcctaaccaattcaaagttccagatttttcaaaattcttagggcaggatagtgtttcaacctatgaacacgttagccgatttttagctcagtgtggtgaagcatcggctgtgaatgccttgaggggtatgataactccgatcagggagaagttctcgtctcaagactttgatagtttgtctcaccttgcacagaaggtaaccttgcatgaacagaggtttgcagaagccaggaagaactttaaaagggttaatcatgtctgtccttacatatatggatcagatgatgatgatgatgatgacgactccgaaatagcagcagccgaatgggttagaaacaagaaggttataccatgccaatgggtgaagagttctggaaaagaagagaggtatgactttgatatcatcaaggctgataagatttttgatttgttacttcgggagaaacagattcaacttcctactggtaatacaatcccatcggctgaggaattaggcaagaagaggtattgcaagtggcataattctgggtcttattctaccaatgattgtaaaatctttagacagcagatccaagcggctattgaaggaggcaaaatagaatttgatgattctaagaggccgatgaaggtcgatggcaatccttttcctgtaaatatggtacacacagctggccgaacagccgatggaggaagagcaagaggttttcaggtgaattcggctaaaattatcaataagtatcagaagaagtatgacagacagcaggagaggcattatgaagaagatgatggcggttttgattctcattggggttgcgagttctttagattttgctggaataaaggtatgaggctgccatctattgaagactgtcccgggtgcggcaatgttgcagaaagttcaagccgatcgtataatggaagcaatcggctaaggcaagcaagagttcctgttcatcaaaggttgggcccggtgaaccgagattgtaaccaagaggacgatgaagacaggaagactcaatggtgtccttctggttcgcgagtgcgccggaagtgttcaagaagattaattgaagaccgattattgcaaggaacggtgcgctgtggtggattgtgttatgcgaggggtactgtcacagctcctttccgaggtatcgtggtgtggtacacctctggccagagtaaaactagtcgaatagccgtgcccgaggaagttgagcaagaaatcaatcatcagctaaagaagacgaagccaaagcaggagtggcgtgttaagattcaagttcctgcagccgatgaagccacagccgatgaagcaaaaagattggctaaaggaaaaagtgtggtgactgcatcggttaacatggttttcacgttgcccgctgaatttggagtcaaacaagccgatgttgataaagttgaagaaaaatcggctaaattgattttattaccagaacaagcagtctttgagaagccagaagggatagagaatcggcatcttaagggattatatgtgaacggctatgtcaatgggaagccgatttctaagatgatggtcgatggtggggctgcgttaaatttgatgccttatgctacatttaggaagctaggtagaaatgctgaggatttcatcaagacaaacatggtacttgttggcagtatggcatga

SEQ ID NO: 57745 - DNA, 1464 bp, Oryza sativa
  Clone ID: PAT_MRT4530_59526C.1
ctccaccgcgctcgcagtcaatgcgccaccgccaccgtcgcagccccccgcaccgcactcccgccaccacccatacgagacgccgcgcgcgtgtgatgtgaggaggacccacccaacaagaacacgacaaggccgccgcgccctcggaaacctcacctagctagagcctagaaccagcgcgcccacggcaacgaagcccacacaaaccacccttcttcttcttcttcttcggcggcggcggcggcggcgatggcgaggccgaggaggcgaggaggcgccggcgcgtgggtggcggcggttcttgctgcggcgctgcaggttcttgcggtgtccgccgcggggaagtacagggcggtgttcaatttcggggactcgctggtggacgccggcaacctggtcacggacggcatcccggactacctcgccaccgcgcgcccgccctacggccagacctacttcggctaccccaccggccgctgctccgacggccgcctcgtcgtcgacttcatcgcgcaagagttcggcctgccgctgctgcccccttccaaggccaagaacgccagcttcgcgcggggcgccaacttcgccatcaccggcgccaccgcgctcgacaccgacttcttcgagaggcgcggcctcggcaagacggtctggaactccggctccctcttcacccaaatccagtggctgcgcgacatcaagccctccttctgcagctccacccaagattgcaaggatttcttcgccaagtccctgttcgtcgtcggcgagttcggcgggaacgactacaatgcgccgctcttcgcggggaaggacctcagggaggcctacaatttgatgcctcatgtcgttcagggcatatccgatggcgttgagcaactgattgccgagggcgcgagggacttgattgtgcccggagtgatgccatccggttgctttccggtgtacttgaccatgtacaaagagcccaaggaggggtatggttcgcgtagcagttgcctgaagcggttcaatacgttctcatgggtgcacaattcgatgctcaagcgagcgctagcaaagctccgtgccaagcatcctggggtgaggatcatttacggggattatttcacgccggttgtccaattcttgcttcagcccgaaaagtttggattttacaaacaattgcctagagcatgctgtggtgctcctgggacgggaccttacaatttcaatctgacggccaaatgcggtgagcctggtgccactgcatgtgccgaccccaagacacactggagctgggatggtattcacttgacagaggccgcatatggacatatcgcgcgaggtgaggtgctttgcaggtcccagattagtgggaagacaagaagcttcagcttgcagactagcgtggatcccactatttctatgttgttacgtttttctatcgatatggttgaacttaagtcttataagaaagtctga

SEQ ID NO: 57746 - DNA, 264 bp, Oryza sativa
  Clone ID: PAT_MRT4530_59527C.1
tcggccactcgtccggggacgttgttttacccttgggaaggggctttagtgcccggttccaaggggacaacggctagcacttgtgaaccttttgtcaaaaaacttgtggatggttctttgggccgttgcttggggggggggtatttaatggggggtataaaatttggctacattgggttgaaaattaagcctggtttaccaaaaaataaattggaaccttgggccttaggggggggggggcatttaaagaaccagtttgttaaa

SEQ ID NO: 57747 - DNA, 953 bp, Oryza sativa
  Clone ID: PAT_MRT4530_59528C.1
atgggcaacggcctctccccgtgcatgcacctgccggcgacggcggcggcgggggtgaagctggtgtactggggcgggcagacgaggatgctggacgacgatggcggggtgtgcgccgtggcgggggacgtcacggcggagctccccggtgaccacgtcgtctgcgcggccgactccttctacgtcggcctcccgatcccggtggtgtccgccggcgaggagctgatggcggggcggacgtacttcgtcctccccgccgagcgcttctcctgcttcaaggtgctcaccgccgcggcgctcgcgtcgctgtcgccggcgccgtcgaaaaaggtgtccgtggctgggccggggcagtgcccgttcgagtacgtcaagggcgagggcggcgccacgctcatccgagtcctcccggagttcatcgagaaggtgatcagctgcgacgagaacggcggcggtgcgcgccgccggaagccgtcgacgacggcgacggcgacggcgacggagctgtgcagcacgccggagctgaagcggcattacgcgctgctgatggggcggaggaaccagccgtggtcgccgaggctggagacgatctcggagtgcaacaagactaggaagctgctactgcggacgctggcgaggctcttgtcgtcgcgatgagcggcggcggcggcgcgtcgaactcgaagacgaccaccaccacactacgctagttgtaggattctagctgtgcagataatacatagaaggattccattcagacatgtacagtcaattggcgaatggagattgcgattaagacgcactgttcaactaattagatgggtgaaactgcgatatatatagagcgagaaaacacggcacaaatacacacttctttgtaaattaagtattcaaagtctcaaattaaacgatacttcctccatttcagactataaaaaaaaaaaaaaaaaaaa

SEQ ID NO: 57748 - DNA, 5763 bp, Oryza sativa
  Clone ID: PAT_MRT4530_59529C.1
ttaatccctttgttccaaaatataagtttggttggatatgtgacatatcatagtattatgaagctggacagaaactaacttattcagatcagtagtcctatgatatgtcacattgtcaattagaattatttcaagttgtggggagtagatcccatcccggaggtcatcgagcacctctgacctctcaaactcgtgccactcccgctgatgtgggactacctccaagcccccaatcacctgctcgtcgtcgtcttcaacgacgtgcccgtcgatcaggtgcacccgtctcaaccttggcgacgccttcatgacatgcttaacaaagccgatctgccaccccactgcactgaagccgacgatggtgagatccttcaggcgatggtacagatgctgttgtgcttgcacctctagccaagaagccatctttaccgacccattgtcaatgtgaacatggcatggctccagggcaggcgcagcatcaagcaggaggacaatccagaatatatcccaattcattggcacatttgcaatgaatagcttcttgagatgaagcaacgggctgggtaaagctattggctcaatccaaacctccggccctttgaactgtagaacgaggctctctatcgatggcatactcatgacgaatttgctgagtcgatatgttgtgttgctaactgcagaaggctcaaccttggtttttaagtagtccaaactgacatgcctaagtcgaggcacctcgccatagtacacctcggtaggctgcacgccccggcaagcaaaagtttcaagccaaggcagcgaatccagatagatttccacaaattcgcagttgtcaaccagcaacttcttaaacccagaatctggcacactgaactgaagaataggctgggagcttcggcaatgtctgatactgaagtccaccagagacacacagtttgacagaatacgactagcccctccataatacgaagctttgcacaactcgagcttggtgagccaccgaagcatcaagcaatcaaatataccaatcggcttgcagttgatcagcacgagccgctttagccgcatgctctggcattcatccagcacacggaagtcatagtcgacgcggtgctcttcgacgtcgagctcgagatcctcggctccccacctgccgatcgccgcggtgacccatcgctggatgcactcgctccacctgccactgccgctacgggtctgaagccttagctttcggatagttctgcggacgccgtcgtcgggaggcggcagaaggaacgcgtccacccgcttgacgtagcggcgcatcgcgcagcgcttcgcgcagcgctcgtagcgtcgcatgatactttccaagagcgggcgggtcctcctcgtccactgctgcatcctctccttcgtctcctccgtggcgctcctcctcgccgccaggtacgccgccttctccgcctcgtacgccgcgctgccccgcttggaggaggaggcgccggtgactgtgcagacgtcgtaggcttcttgagacggcggtagcatcgtgcacttgtctcctctgaagccatctgatctgatcgtcagtggctgaccgagcgagcgggcggcggcggcggatctgagggtttgtacctgctcgtcgtcttcaacgacgtgcccgtcgagcaggtgcacccgtctcagccatggcgacgccttcacgacatgcttaacaaacccgatttgccaccccaccagctcattcaggcaatggtactgacgctcttgtgcttgcacgtctacccaagaagccatcttttccgacgtgttgtcaatatgaacatggcatgactccaggacaggggcggcgtcaaggagggcgacaatccagaatatatcccaaatcattggcacgtttgcaatgaatagctttctgagatgactcaacgggctgggtagagccattggctcaatccacacatgcctaagctgaggcacctcaccatagtacagtttggttggctgctggccccggcaaacaaaagtttcaagacaagggagcacatccagatagattttcccaaatttgcagttgtccaccagcaaattctttaatccaaggagagtttggtgagcctccgaaacgccaaggaagtaaatataccaattggacagcactagccgttccagctgcacattctgggatccatccagtatcttgcgaaagttaaggctgacgccgggttcttcaacgtcgagctcaaaatctttgactccccacctgccgatcgtggcgataatccatctctgaatgaatacactccaccctctgccaaaggtatgaagccttagcttttggatagtccggtgcacgccatcgggaggtagaagaaacgcattcacccgcttgacataggaacgcattgcctgacgtttgtagcgttccagaatagcttcgagtacactgattatcctaatccgccgatcattgtggtcctccgtggtgtaaatgtcagccagcctctgatccatagggcccttgctggccagcttcagggcatccttctccgccgcaaacgtcgccttggcctctttccacattcgcttcaccctatggtagcgtggagggaggaaatcatcaacggtgaggtcatagcatgtcatggagcgccgaggaagatttttccatttggcccacattggcccactatagcgagggttaggaacacgagctcgaatgggcttctttgctgtagcgattgaagtctcttctatctcctgctctgctgctatctccagttctgctgtattgttctcctgttctccatcaggaaagatcttgacaaccccctccccttgaaaagtggcttgcccccaagccagtgccattggaaaacgctgctgaagatcttcccgatcctcccaggtggcatcctctgcaacagaatcagaccaatatacaagaacttgagaaacagtgcgattacctttcctgatcaatcgctggtccagaatctgaagaggatagacagttgatttcaggaatttgggcagccgagattgaacttgatgcttaaatccatgtgcaaccttgagctgggaaacatggaaaactggatggatagtactgtcatctggcaattgaagcttataagcaacagtaccgacccttgccaatatctgaaaggggccatagaacttgaaagccagcttatgacaagctcgagatgcaacagacttctgaacgtatggttgcagcttaagaaatacccagtcccctactgcaaattctctgaatgacctgttcttatcagcatgaaacttcatcttttgttgtactcggtgcaaatgctgttgcagcaattctgccatcagtttcctctcatgaagccaaacagccagatcgggaatcgcacaagtttccatagtaacacccaactgaagagggttatggccatagagtacttcgaatggtgtcttgttcaaagcagaatgaaagcaagtattataccaataccctgctaaatgtaaccaagtaacccacttaaaaggggctgcattagtgaaacaacggagaaacatttccaaacactggttaaccctcttagtttgcccatcggactgtgggtgataagcagaactaaggtgcagggcaatgccagatttcaagaaaagaaattcccacaatttgctagtaaaaattttgtctctatcagagatcagtactttaggcatcccatgaagtttgtagatgttcttcatatatgacactgcaacatctagggctgagaatgggtgtgacagaggaacaaagtgggcatacctggagaatttgtcaaccaccactagtatgcaattgtatctctctgattttggcaatccctcaataaaatccaatgagaccacttgccaggcaccttctggaatcggcaagggttgcagcagtcctggatatttagctaggtctggtttcgcttgctgacagatagtacaattctttacccactgctgaatcattttcttcatctgtggccaagcaaacagtgcttttactcgctgataagttactgggaaaccagaatgtccacctatagggctggcatgcaaggcagtgactagctgttgctgtaaggataaattatgcccaatccaaattttacccttgtaccgcaataccccttgcactaaatgaaaatgttccctggcagtaggatgcaatgccaattcagttaagagttgctgagcctgctcatcagtttcatacccttttaccactgctgttaaccaaaggggttggcattcggatacagcccacaattgatcatttgtctcttcatcccttcttgataatgcatctgcagctgcattagaggttccccttcgataacaaaccttatactgcagtcccatcaacttagtgaaagccttatgttgcaacggagtatgtaatctttggtcagtgatatgcattagattgtggtgatctgtgagtatgacaaactcatcatgctgcaaatatgatctccactgatcgactgccaataggatagccaggtattccttctcatatgtagacagccccctggtttttggacctaatgctttgctaacaaaggcaatagggtgcctgtcctgtgacaaaactgcccctattcccatatcacaggcatctgtttccacagtgaaagtttttgagaagtcaggcagtgccaaaactggggcactaaccaaagcttgcttcaaggcattgaaagcttcatccatttgtgctgtccatttaaagggcacccctttcttaagcagctgggtgagtggtttgttgatagttccaaagtttctcacaaacttcctgtaatatcctgccaaacctaggaagcccctcaactgcttgactgactgaggaattttccaatgcagcacatcagcaatcttagaaggatcagtggttactccatccttgccaatgatatggcctaggtaagccagttgttgttgtgcaaaggaacatttactcaacttgactttccattgttgagcttgaagtagttgcaaaacttgttctaaatgctgaatatgcgatggtagatcagggctatagattagaatgtcatcaaagaaaaccaatgtaaattttcttagcactgtcgctagggtatcattcattgccttctgaaaagtagctggtgctccagtcaacccaaaggacatcactcgatactcatagtggcctgagtgagtctggaaggctgtcttgtgctcctctccaggttgcagccttatctggtgataacctgcccttaaatcgagtttagagaaatacttagctccagaaagctcatccagaagctcatcaatgacaggcaaagggtattttcccttaattgtaattgcattcaggtgcttatagtctatgcaaagtctccaggtgccatctttctttttgactagcagtgctggtgatgaaaaagcactattgctgttttgtatgactccagactgaagcatttcagttacttgacgctcaatttcatccttgagtgctggggtatgcctatagggtctgaggttgactggacttgctccttccatcaagggaatcttgtgatcacaattccttacgggtggcatttctgtgggttcttggaacacttcctgaaacctgtccaatacatgcttgattgaatcaggaatcactacatcagatgtctggtcagtcttctgaatctgtagtacatgcattactgactcagtcttcataagccctttgatcttcttgccagaggaaattcgagccat

SEQ ID NO: 57749 - DNA, 645 bp, Oryza sativa
  Clone ID: PAT_MRT4530_5952C.1
atggactccctagcgacccccgtgggcttatcttcgccacttctcagtctggtgcctcgcgatgaaccacactatacaaaaggaaaaaatgatttattgtgtcaacgggctcggatttacggtggaccgggtgcacgaaaacggtttacggaacgaacggctgagatttaatctaaacaaaacgaacggccgagatcgatctaatctattgcgggtctacggctgacgtggcgctgacgtcgacgatgacgtcattgccgacggcggctcggcaccacgtgctcgctggcgaacgacggcgcagcggcgcaaacggacagcacctacgggtagagggcgacgcggcgaactcaccgagggctctgacgacgacagacggcaacagacggcgacgacggcgaggtcgaggcggcgaagacgttcgggtcgacggcgactgcgatgctccggcgatcttcggcggaaacggaggacaagacgaggacagagacgacttggcgaacccgacagcaacctccccaagcgatgacgacaaccagagcggcgagggcacacggctggacttgctgcggcgacggcggcgcacgggctaacgcggctagagctctaccggcggtggagggctaaggcgaaggtggcacgaac

SEQ ID NO: 57750 - DNA, 418 bp, Oryza sativa
  Clone ID: PAT_MRT4530_59530C.1
aagattcaagatatacacaacatcacagaactcatgataagcaagaacacatcagcaatggtccacgtagaaaggttcgtatatcaatagttatcacaagacggactgaattctggatttaacaaataaagtaactaaggtccacgagaagattttctcctgcaatgagaagatgcccgtctattcaaccagcttcattaagaataggatcatcacgggcactgatgagctctgaacgggatatggggtggcagttcctgctgcagggtacctgcctgcggccatacagcacaggcagaaagctgctgctgtggaggagaaataaaaacaggccactgcattggagtaacaggaggtccaggcagaattggaccaggagtagcgaacgtctgcattgcgagcgatcgaaccgaaggac

SEQ ID NO: 57751 - DNA, 513 bp, Oryza sativa
  Clone ID: PAT_MRT4530_59531C.1
gaacagcaggcgagacaacagcggagcctagactgcttcctttgatcatcgatactaccgactattctggacagagtcctagagcgagacctaaaacgagtgctattgataacgtgtatgggagctcagtataatggaacgccatatgtatcactcttggtgtggatcttgctggagatcactgctgatttataggcttcaatcttgggtccaaacttcttgaccaaaaaaaaaagggtctgactttgtggtggatgcatgcttacatccatgtgtacgcaagcacatcaattcaaatatagtgtctgctatatgcaattctctgtccagtgtactacaacgtgtttattggcaaatccattgcgtgacccacgtcattccccttgtaatgcatctcgctttagactgctgttttgctagctgaaagaatagcacagatggcccttccgaacagttgttcaaactgaatggcaaacggaacgggcactggatcgcgacattaaacgctgcatt

SEQ ID NO: 57752 - DNA, 472 bp, Oryza sativa
  Clone ID: PAT_MRT4530_59532C.1
aaaaaattccaaacgggcccccaaaattaaactaaaatttcaaatcatcccgtccaacattatggggaagaattcctattgataaaaggaagccccccctcttaataagaaacccagcccccaaacccgggcccagggggaaccccaggggtcccccccccaaattcagctggggatgcaaaccccccccccttaaaaagggccaaacaaggacccccttcagcgattcaagaggctttttaactcccggggactaaaacccccaaaaagccccacttgggccccccgtaaattgccaaaacgggcccccaaaaagtcttttcccctcaggaaaatacccggtttgcagaaaacccaaaagggtaaaaaacccccaaaaattatggcaaaattctgcaacaaaacccgcttcccctggaaaagttcccccacccttcccccaaaaataagaggacatcctaaaccttaaggg

SEQ ID NO: 57753 - DNA, 213 bp, Oryza sativa
  Clone ID: PAT_MRT4530_59533C.1
atggtcgccgccgctggcctccgcaaggggcacaaccaccgccaccgcccaccatcgcgccgcactgcccacccaccagttgatatcaagaagagaggaggtgaggagctccttaagaggtcccggctgcgaaaatcgatttttgcatgcgggcctcttaatgagccgtatgcgaaaatggaggtcgatttttgcagacgtggtcagttatga

SEQ ID NO: 57754 - DNA, 655 bp, Oryza sativa
  unsure (1)..(655): unsure at all n locations
  Clone ID: PAT_MRT4530_59534C.1
cgcccacctagctcttgtgttgcccctaagcagactgttgagatcacgtagataaaaaatatccaaactgaattccagtaagccgtatanccgtagcatcttcagtatctcagaatatatcaacgaaagcattatatctgatcccaaccggcatatcaaaaccttgtggatgagaatcaaggaagacctcaggatggcgggcagaaggtaggcgtcggcgaggaagccggtgaagaagtcgtggaatgaaagcacggaaaggcattccacttccacctaggcgctgtggggggcagtcccggacgggtgcggtggaaggggaaccacctcggcgccggtgattccagactgcggtggagtgcggcggcggcaggaaaggatctcgccatcgggggcagtcgcggcggtccggtggacgggggaaccacaacctcgccgtcggggacaggctgcggtaggtggagtgcggcggcggcgaggaaggacctcgccgtcgggggcggctggggacgacctcggctccgcacggctgcggctgcacgagggcgggagcaggcggcgccacccacgacgctgcgcgctcaactacacatccaccatgatcgccgccgtggcgaggagcaagagctacggctgctcggagagcaaggcctag

SEQ ID NO: 57755 - DNA, 252 bp, Oryza sativa
  Clone ID: PAT_MRT4530_59535C.1
ccggccgggaaaagattaagttcattatccctacaacaacatgtgaagtccatatgtcgcctacctagttctcttcacagttctgattgctcctcttgtgtgatggctccctagcccagcatgtatcaagtcagagcactaatcaatggcacatgtcttatcctgcaagtccgaaaggatagagatttgataggttgtaaacatattgagacaattcccactgcgaagactcaagctggaacaactgaggac

SEQ ID NO: 57756 - DNA, 459 bp, Oryza sativa
  Clone ID: PAT_MRT4530_59536C.1
atggttagggttatccgatcgctgggcgacgtcaaggctcttcttcgcacgcacggcgacagaatcggcctcaccgtcagcatcaggtgcttgtggcgcatccgccatgccaggaggatgcgcgctctcctccggcagcagatgaagatcgacgggatgcactgggaggtggagggcatagagcacctcaacgctatgcgccgccatagaggagatcgtgcatctgcttggggagttgctggaggatgtcgccacggcgatcaccacggagcggcacccgcgccctacgatgatcgattatcttcgccgagccaagttgctggtagaccaggtgtgggatctgaggattccggccagggaattctcacggctttgagtaagccagtctactcctacccttctcatcgtctcgtcctcctcctcctcctcaatctcggtctgtctggtgctactgcgtga

SEQ ID NO: 57757 - DNA, 1551 bp, Oryza sativa
  Clone ID: PAT_MRT4530_59537C.1
atgaaggggttttcttcccctcctttcgccactttgcttctgccgctctcctgcgccccaactcaactcgcatcttgctcttccttcgccacactctcgctccccgttccccctcttgatgacgtcatgacgcggagctcagcgccgctcgatggcagcatccttcccccctctcgcattacaaacgagaggttcgcggggttgccgaggaagttcgtgccaatgccgtccgggcgggcaacggtgatctacggcgaggctcgtccagcgccgcagtaccccgagcgatctgtgttcttcctctcctatgcgatggtgggactgatcccgcccttctcttccttctacgacatgctggatttctatgggatccaaatggcgcatctcaccccgaacgccgtgctgactctggccatcttcgtacatctatgtgagatgttcatcggggtgagaccatgcctccagctcttccggtggttcttcaccatgcagctagtgtcctccgacggaggccgggggctgctacttccagccgcggccaaacacgcagcagcgctacatcgggcagacgctgtgcaagaagtggaacgactagttctacaccgtccaccccgaccaccctcgtcagtgcacacggcgaactggcaggaggcgccggtgctgggggacgcgttcgacacggccctcgattacctcgtcgggctgcggtccctggggctaaacgacactatggtcttcggtgattacactcgccggcggctcgcgcctctccaggagcaggcccggggcgagtggaccgaggtctcttctcggggtacaccatgggtaacccccctccccccgcgtcggcccaaagtacccgggcgcgatgaagccaggcccggcgcgcgggagaccgaggcggagagatcgggtgcggaggcggagccccgggtccagaggaggcaaacggcctctgacaccgcgcccgaggacgaacccgaggcgagggccacaggaggcgacccgggcgcgggagacgatgcgtcccgctcggcagatggcgaggattcctcggccgtgccaagggcggaggccgcccggggggcctctgccgctgacgccgccaggagcgcatctggcgttggcgggggcggtgcccaggacaatgggggcaacgcattcctcccggtgctgcggatgctacggcctcacgcgcgcagtgcggggaccggctccccttccaccccctggaccggggccccgaccaccggcgggtcgtcaagagggcgcggtctcctttttcctcaccgactccaacgggctcggagcctcttctgcaggacgctggtcggggattttggtcgaccagaacgccaagctccccgccggtctgaccgggctcgcccgtcggctggaggaggtggccgtcgagttggagcatatccccaaggaggtggacgacacggtgaagttgtcgtcggcagcgctggcacaggaggcggtcgagctggtgctagcgagccactgggcctgcgacccagacttctcgcccttcctcacgctggatga

SEQ ID NO: 57758 - DNA, 658 bp, Oryza sativa
  Clone ID: PAT_MRT4530_59538C.1
gctgccaaaatttcccccctcgccgcgtcgccgccgccaagtcctccccgccaccgccggctactccccaagacctccccctcgctgccaagtcctctaccggctcctccccgaagtcgtccccctcgccgtcaccgccgccgccgccaggacctctccttggccccctcgccgtcgctgccgccaagtcctctgccggctcctcctcgaagtcgtccccctcaccgtcgccgtcgccaggacctctccccggccccctcgccgtcgctgccgccacgtcctccccgccaccgccggctcctccccgaagtcgtccccctcgccatcaccgttgccgccgccaggacctctccctggccccctcgccgtcgctgccgtcatgtcctccccgccaccgctagctcctccccaagtcctcccggcccctcgacgccgccaagtcttccccgccaccgccggctccttcgcaaatcatcccggcccctcaccgccaaggccacgccgggtcctccccgaagtcctacccctctctgtcaccgccgtcaccaccggcaatacctccccaccaccgccgtgccggctcctccggtcccaagtcccccggctgactggaatacgtttgttaaagatcatacaacagttgaagcattggctttga

SEQ ID NO: 57759 - DNA, 363 bp, Oryza sativa
  Clone ID: PAT_MRT4530_59539C.1
atggtgacgagttcgaggaggaagaggacgtgcgtagctcgtcccccgcccgccaccacccgtgcccgccgcatccagctcatctccgtcggctgtcgcccgtcttcaccggcggcgcggagcggggcggtggctggcacagcacgcaggccggcgaggaggtggttcgcggatccggcggtgcagagcggggcagtggcggacgacgacgacgatggtgacgagttcgaggaggagcaggatgcgcgcagctcctcccccgctgccgcccgccgctcgtgcgcagctcctccccctgcgcgggcatggccgaaggccggcttggagagcgaaatgtgggcaagaagaggagaagagagatag

SEQ ID NO: 57760 - DNA, 220 bp, Oryza sativa
  Clone ID: PAT_MRT4530_5953C.1
atgcgctgatgattatcaagagctggagacactttctacccatattcagagttaacgcactcactcaacaaccaaatgcccaaattaagacaaatggcatgcgttcaataacgcacacagtgtgtagctgccggagcatggcacgctacaaatgtcatgcatcatagtaccaacaatgtatgcatgtaaggtgaaccactttaagattcacacgatgctg

SEQ ID NO: 57761 - DNA, 155 bp, Oryza sativa
  unsure (1)..(155): unsure at all n locations
  Clone ID: PAT_MRT4530_59540C.1
tggaaccctctnatgtngnattgtttntntcngnacntcatgccaatcgnatgcnagtcntatancggcttgtgagncgantgntggcgttgntgtttcggcaanttatgtncatgcacctgcttggtggaaatgtaaaaaaagnacntataant

SEQ ID NO: 57762 - DNA, 304 bp, Oryza sativa
  Clone ID: PAT_MRT4530_59541C.1
ggggacataaaccctttgaagattagttacggatttgggttaacttgttaagaaacaaaggggcttaatatttaactgaagttttaaagttcaagggaataaattaaaaagggccacgttttaaactaaacccaaaaaaaaggggtgcaaaagctaacacaaaatgtgggaaaaatttttttcctggtcaaaccattttttggtgccttgaagaaaactttgttctaccccctgttggatgccacgtttttgctgaataggcaacggttgtaaacaatttgaaaagggctttgcccccatgaaa

SEQ ID NO: 57763 - DNA, 273 bp, Oryza sativa
  Clone ID: PAT_MRT4530_59542C.1
atgtcctacgccggaaaactgcttgacgatgaagagatgatgtcatatattcttgccggactcgacgatgactacgagcctgttgtttccaatctggttggcaaggcggaagctgtttcagtcgccgagatttactctcaacatctgagcttcgaaggcagggcgaagctacggcaacaggcgagcggctcttctgtcaacagcgccaaacgtggaggaaaaagcggcgatggtttcaacagcaactttgtcgaaactagatttcggcaataa

SEQ ID NO: 57764 - DNA, 3344 bp, Oryza sativa
  Clone ID: PAT_MRT4530_59543C.1
atgggtagaagctttcttgctattcccctcgcttggctctatatgctcataattaaataagacatatctatgtgcttggagccatgtagtctaaggtcaccatgcactttccagacaaatcccgaccaatgttgttgtagaagaatggcatggtaattgagcttggtttatctatactagttctggattttcgagagaacctagtttcacatccttctaaataacgagagcaaaatgtaagactctcatcaaacaaatagccttcagcaattgatccctcaggatgactcttggtgcgtacatatccctttaacctcattagaaacctttctattggatacatgttgctgtactgaactgggccagaaatccttacttgggtaggaagatgagccattaagtgaaccataatatcaaaaaaggctggtagaaatatagtctctagaaggcttaatgtttcagcaatttcagcatctaacttttccatatcacttatggaaataacaggtgagtatattttcttaaagaagttactcacacgaaccaatactgcactaacatattctggcaatgtctttcgtactgctagtggaagcaagtgttgtaagaggatatggttgtcatgacttttcagaccaattatccttttctctttaacatgtacatgccggcgaatatcagaggcatagccatcaggaaatttgattcgtttcagaacttcacaaaacaatttcttctcttcagaactcattgagaaaggtgcaggaggcaaataataagaatccccaacttcgacaggatgcaaatatttccgtatatctagaagtttaagatccaatcgagcattcagattatctttagatttcccatcgatactagatagtgtgttgatgatgttgtcacatacatttttttcaatgtgcattacatcaaaattatgtggaagcatcacatccttccaatatcgcaacctaaaccagatagatctcctattccatattattttttcctctgtttccttgcctttactatttggtttggtttttttcttctttgggtcctttccaaaatctgcaggtagatcttctgtttgcttaaaaatctcttctctggtcagaggcttcggtgctgtccctaactccacattgccatcgaatgatgctgcatcaaacctaaacttgtggtttgcatctaagaacctccgatgacccatgtaacaacacttgcctccatttttcaaatgaatagaacaagtatatgagtggcaatgagggcatgctacttttcctgaagttacacatgcagagacataacctaacccaggaaaatcagtgatggttttttgtagggcagcatgcaactggaaatattcgtccttggaagaatcataagttcttacaccttcctcaaacatatcatgcatatcatctactagtggttcaaaatagacatccatattctttccaggtgaatttggaccagggattaataaggaaagaatgaagtttggttgcttcatacattgccaaggaggtagattcattggaattatcacaacaggccagatgctataactgcagttcattaatctaaatggattaaagccatcagtagctaaagttagcctgagattgcgactatctgcagcaaactctgggtatgtgttatcaaaatgcttccaatctggagagtcagctggatgcctcaatagtccatccttcgtgcgcccttcatcatgccaccgtacatcattagcaagttttggggacataaacattttttgaagcctctcttcaataggaaaatagcgaagcacttttctaggaactttatggacacgcttcccatcaagacttttcttggatgttttcctgtgagaagtattgcattttggacagacatctgcattggcatattgcttcctaaacagtacgcagtcattctcgcatgcatgaatagtatcatacccaagcgaaagacacttgactattttcctagcttcataaaagctcttaggtactgttgagcccttagggaaagcctctctaagaagatcaagaagcatatcaaaactcttatcactccagccaccaagaagttttatgtggagtaattcgactagaaagcgtaactttgagaagctttcgcaccgtggtacgaagtttttcttgagatgtcctgctgggtagatgctcaacaacgtaggttgattgcagcaaaatcgatagtggaccactaaactaaacctggaggttgaggaggcggcggaggaggtggggaagagggtggactcaactgcagcgatgggaaggcattggggaagagggaggagccgacagcggaagccggccggccggaggaggagtcgatggagaagtagaggaggacggcggcgtgtggagtcggcgcggatctgcaggaggcatcgtggtcgggctcgtcggaggagggtaggcatcggggtcgggctcgtcggaggaggggaggcgtcggggtcgggctcgtcgaggtcgggctccggcggtggcggggtcagcaggaggaggacggcggcgcaggaggaggacggcggcgcggggaggggcggcgacgccctcccctccgctagatcggggggaggggaggtgtggcagcggtggcggtggacgtcatggaggtggcaggtcggacggcgtggaggcggctggccgagcctcgcctccgccagatccagcggcgtggaggcggctgtggccaggcaggggcggcaggccggacctcgcctccgccagatccggcggcttggaggcggctgtggtccggcgggggcgggagaggcgacggcatcatctctttctctctgtctctctctgtgcatggtggggaggtgcggcggtgtggaggcggctccggcccagcgggggtgggaggggcggcaggccgaacctcgcctcggccagatccggcggcatggaggcggctgcggtctggcgggggcgggagaggcggcgccagatttgggggggagggagggaggggagccaccgccgacgccccgggccgtcatccttgaggacctccccccacccccctccggcaagatctggaggggaggaagggaggggagccgccgccggccgcaccacacccggccgccggtccgcgcttcgcctgacgccgttcgccccacgcccaatgccgtccgccccgcgcccgacgtcgtccgcccttccctgccggccgccggcctcccccctccggccagatctggaggggagggagggtggggagccaccgccggcgcaccttatgtggtccgcctgcgaaagtcattttcgcaagtgccgctcaagtggtctgtctga

SEQ ID NO: 57765 - DNA, 494 bp, Oryza sativa
  Clone ID: PAT_MRT4530_59544C.1
ggtcttgccaagtatgttgagtggagtgccaacatgatggacgttgatgcaaaaataaagctgaagaatgctgagcttcaggctaagaaggaccagttgagaatttggacaggatttaagccaccagtgacaaactcgaagccaatccacgaccagaaattcactggaaaagttgtagaggttgtgagtggggattgcatcattgttgctgatgacgcagctccttacggaagtccttctgcagaacgccggcgatctgttcagatgttatactctagaaggatcagcactgtggatggacagcccacaacaaacacagctgaagacagggttttggattatgggtcggtttttcttggttcaccttcgcaggctgatggtgatgatgtttcttccattccaagctcaggcaaccaacctggtatcaatattgctgagactctgctctcaaggggctttgctagaacatctaaacatcgggactacgaagaaag

SEQ ID NO: 57766 - DNA, 3547 bp, Oryza sativa
  Clone ID: PAT_MRT4530_59545C.1
tcctttttttttttttttttttttttttttttttaagttcaatcctgaattttaattgactgcgctctcggtattatgttgtgtctacaaagaactgcagtgcaccaagtacacgacattattaagtttaggggaaaaacaatgtatcttaacctcaacattacggtgtaaaacggaataatagttcagcatcaagcaacagtgctcaaactaaggaagtttcgcctcgctaagttctgttctaactgcataaataaggtaatcctcattttctttctctatgtttttcatctaaagctcccggtagagtctgacccggtgtccaaaacttgatgatagcttaccgacgccattgctgtcttgagcagccttctctcatctaccgacgccctccagttctcctagccgctggagcttgctcttcctcgtcagattcaacatcaccatactgccagatctgcagcctttccttctttgctttctcctggaactgttccagattctggagagcagcctttctctccctagtatcccatctcttgcttctttcaagccgagcaagcccttcctcaagcatggtagcattgatgctggtttctgtctctgcgtcaaccagtgtaacaatcagaatagttccagtgccttgtcccttggactttccaccagaagtatcacgctcttcaatcattgccctgtattgtttttggctgttgagcaagcaatcattcagatagactgctgcttcatggccaaaatcatcttctaggttgggcacttttatgaaggcaaggctgcacaactgagcaagagcaggcgaagaggaaattgatgggtcagcaggccgtatgcgactgtaaggaacgacttcttggttgccatagtcaatgtagaatacttcaaacttgtcgtcttgagatgatacagctcctcgaggtccattcacaatcattgctctattccaggagttgtcagcactaaactgagcaagaactatttcccccttcacaggattaaaagcaccaataacaggtgcatctttaagttttaaagatgcaagctgttgttgaatggaagccactctatggtcaccaactgtttggacatagaactttccaccaccaaggacttcagttacaacaaccttgagaatttccttttgtttggattcagatgcagatccattggaaacttcttcaccctctacataattctcccagatcttgagtttctgctgctttgcagactgttcagccctcattagaacatttgcatccggaatcctatccaagccaaatgaactaagcttggccagaccagcctccagaagaacagaagccatgttggttttggactcccataaggaacctaagaatgtcccagttctatcaactgcttcaacctctatctccacatctcgctgtagaattctcctcctcatcaaagcaatagcttcgttcgagtagggctcatctttaccagggcatctaacaccagagaaagagaaggcaatgctgcaagtctccttaggaattgttagtttgaaacggtggccactgaagacatattcaacaattgcggaatgtcttctgttccgctgtaagaaaggaaggaagtctctggccttctttgctgaaaccgttgtcaagtctgttatgtgcatgacaggtgattcttttgcagaatgaactcctttctttgctttctcagctcgtgattcagccgccaacagcaggtcaaaatagtgtgacctttcttcgtagtcccgatgtttagatgttctagcaaagccccttgagagcagagtctcagcaatattgataccaggttggttgcctgagcttggaatggaagaaacatcatcaccatcagcctgcgaaggtgaaccaagaaaaaccgacccataatccaaaaccctggcatcagctgtgtttgttgtgggctgtccatccacagtgctgatccttctagagtattccatctcaacagtcacttgcttgccaatcaaccttgtgcgcaagaattccttggcttcacgagcaaaattatcaggcttctcatctctacgagggttgcccattttaggagctctaatgcttgaaagattaacccggcgttctgcagaaggacttccgtaaggagctgcgtcatcagcaacaatgatgcaatccccactcacaacctctacaacttttccagtgaatttctggtcgtggattggcttcgagtttgtcactggtggcttaaatcctgtccaaattctcaactggtccttcttagcctgaagctcagcattcttcagctttatttttgcatcaacgtccatcatgttggcactccactcaacatacttggcaagaccattttcaacaagctcaagggccagatccttcaatgtatccccatcagagtaatacactgagccaattatattgctgaaactatctgtgccttccaccacaattcgcacatctctattgagaacccgtgtctctgtgaagtgcttagcttctattccaaacctgtccggtggaatttcagtagaaaccgctgctgcggcaagcctttgggctgtagtcagtggtgctggagcttcctcagaatctccaccgtttgtagcgccatcagcagtactctctgctgcagccaccactgtaggattcggtgggcgcctccccatggatggagactgaactccagcaacatatatctgaacaaattggaaacttgggagcaagtaaacacgaactgtactgccatcacgaacttgttcaacaatggcttccagactcttgcctttattcgcaactgcaaaaccctttgcatcaaaaccactagcttcaccaattgctgatggtggaagatctcttattgattcttcagcagcaccaggttccttgctccaacgacctaaaccctgctgcttagcaacttcctccaaccttagcagctcagtaagatatggactcggttcaccgccctttgggccttgctcctttacccttgcccatcctgcagcaattatcgagtaggcaacattcttgtcaccgaggtaaacagtaccaaattctcgtccaacatttggagctgtgtagtccactctgaatgtgacctcctttcctatgcagagtttccttagaaactccctgctttcccaagcaaatggttcatccactccaccacggcgagccagccttggggccatgaggtatgacagagtaatcgacttctcaggcggcgggacatccgccttggtgctccccatgatgagaagacagtccccagaagtcacacccttcaccttacccctcagccatccagacgctccagtggctgacgccatgatagtaagctacaccctcacctcagctcagctcggcgcgatcgcctcgagagagagggcggggagcggggtgtagacggctagatccgtccggcggcgacggcggcggcggtgccctctccacgagcccacgatcccgtcgccgacgacgcagcggcgcggcgaggcgaggggagagagcgcgtgagaggtttttggggtgtagcg

SEQ ID NO: 57767 - DNA, 244 bp, Oryza sativa
  Clone ID: PAT_MRT4530_59546C.1
agagaaaatttggtgcaggcatccaaaaataagatacaaaaacacatgttcacaaaaagccataaactttccctaccccccatggataaagcacttgatctaaggccaaaacatttttcatagttggaccatctaacattcaacacaatcatatccttactatttaaataacaccgtgcacacccactatgtctacatgtttagaggctacttaaaccgaaaagcctccgaactcattggccct

SEQ ID NO: 57768 - DNA, 798 bp, Oryza sativa
  Clone ID: PAT_MRT4530_59547C.1
atgagcgacgacgtgatatggcactgcatccggcacaaccactgcagcttcatggccaagatcacgacggggatattctgccggaacccgtacaacgccaccggaatatgcaaccggagctcctgccctcttgccaacagccgctacgccaccatccgcgaccatgacggtattttctacctatacatgaaaacagctgaaagagctcatcatccaaataaattatgggagagggtcaaactaccaaggaattatgagaaagcaattgaagtcatcaacaggcatcttgaattttggcccaagttacttgtgcacaagattaagcagcgcctgacaaaaatgactcagtatcggataagaatgaggaagcttcgactgaaagtgagttatcccttcaaagttcttgacatggaaaaaggtgatgtagatcctgaggaagatgaagaagaagaggtggaagagtatgttgaaggagactatatggatgacatggaagatatggaagactttgaaggcctccctggtggtgattatggtgagatgaatgaagatgatctttcggatgaacggatagcaaagaaacccaaagttctaggttctgatttgagatcaaatatagggaaaaaatccaagaagccaactgaggtggaacttgatgaggacattatatatgggtatcaggcgaaggacgtaaatatgaaaggagtagatcaagtcgtagttaaccgcttcctcgtatggatggcatacctgccaaccgacgtagctgtgtttgtgcttggccagctagcgctttga

SEQ ID NO: 57769 - DNA, 2022 bp, Oryza sativa
  Clone ID: PAT_MRT4530_59548C.1
atggatcttgacaagtccacctccactaccgcgtccctaaagaagctgcaggacaacggcgccctccctggtcgcgggactatggagagggaagcaggagttgcgctggatggaatccaacagggtatctggatgcgttggattctgacttcgggatggcctgaagtcgtgatagaagactcggatcctgtccttgttgtccctgaggagcaaccggacaagatttcagagtggactaccaaacccaccctaactccctccctccagtctttcatcgacattgtcgatgacctccaagtacaaggtttgtctggatacgaagtcgatggtgacttcattggtaggcggatccaactgctccaggcacgtgcccacccaacctttgactactctgggttggaggacgtgacccgggtttctcctcgaggcttaaacagtgacaccgtgacccgccgcgtcggccagattatgatcagcggccctacgacgacgagcaacatccccctccccctttgcgagaaggggccggccgagcgcgaagttgcgatcaacgcactccctctgacggatgtcatcgggccgcttgcggatcatcaggcggcggcgtcgctgaaggaaggtgtcgccaaggaggcgtccaacgttgctgccgttgctgccacgacgagtggtagcaacgttccgaagagagggaagaagttctcctccgtgctcgagaatcgtcagaaagcgcctacccaatcggcctcggacgcgtctcctccgcctcagcgacggcaaaggctggtgacactcagcgagaagcggctcgggcgaaggcggcgcaagacgggtctggaggaaactccagtgcgtctcctgcagcggcttcgacagatgtcgtggtcgtgcctaggagtcgtgaggcgacgcccagcggccctgtcgacggccttgtgcctgctcgaggcccgcccactgacgtcctcacctggggagctccaaatcgagatggagagcaccctccaggccggtgctcgtggcataggtcgcgagattaaggaggcgaaggcggcggcggcatcgtcggtgaacgaacgggccgacaagctggcgcgtgacctggcggagctcattggggagtgcggcgtcaagaccaccatcccggcgaatcctgatgagttctcgctgacgtcttcgctcacggaactagccacggcgatggaggagatcccctccaagcatgcggccaggatcggggaggagacgtccaacgggatctacatcggggcatgccacgtccttgcgtgcgtaaggttggcgcaccctgaactcgaccttcagaggatcttggatcagggggctgctgatgacgcgcataagggcatgatggaggaagtcggtgacttcggggagtctgttctccccctttttgaagaagatgtcgacgtcgaggatgtccagcagcgcgggcagcctgagtcaccggtagtcgttccggcgcttgggcttgagccatacgtgcctcgggacgatgttgatcaaaacttgtccatggaagcgggcatggcgacgacttccttagacctcgagagtgcgctggccgaccgagatagtcgaatccaatattggaggacaaaattcgaggtggccgaactcgagaggactatggtggaggtgaagaaggaccgagccatggaggcactccgagggcgcgaggtgtggttcaactcgtacctcaggagctgttgtacgaccatggccagagtctgcagggaactccgagtacctcgtagggatcccgaggagtcggcggccgaatacatctcgtggttaaatggggcctgcgctaagcttgaaggcatcagcaagcgtatcgacgaggccttgaagcaggagtgtcatcgatcgagccgatatgctggagggcatgtgcatgtgcacatcgatagcctgtatccgagatcaccgcccgcagctgcacctcgagttcctccacgaagggttttctcgttatcggaggactcccgcagagatagataa

SEQ ID NO: 57770 - DNA, 494 bp, Oryza sativa
  Clone ID: PAT_MRT4530_59549C.1
tttttgtttttttttttttttttgttttttttttttttttttttttttttttttaagcaaaagggccagccagaaaaatagaaatatgtccctccaaaggtaaaaaaggtagaaccctaaaattggtttttggcaaaaaaagaaaagaaagaaaaggggtatacaacaatgatactttgggacacaaggtgggctgtacaaatctgagcttcccaaggggaaagcttattgccacctgactaacccaaacatgtcacaaaatggggggggggccccgttttgggcggaagatgcccaaataacaacaggtgcaaagatcctttaggccaaagggaggtgaaaccaagggcttggatttcactgaacttccgaaaatatgattggagaaaaaaacaacacgtcgggacgctgtttttgttttgacttagggcacaatcagggaggttttatttgctcatatttttcacctatgctcccacctttttgtttttgga

SEQ ID NO: 57771 - DNA, 268 bp, Oryza sativa
  Clone ID: PAT_MRT4530_5954C.1
gccacgcttccttttacgcgtccgggtgcacctgccaagagaaggctggacctgcacaaccatgtcgatattggtcctcctccagccatccggaccaatgacgatcttggacaggctgtgctggctcaagctgctgccagtagcatcttcaatccaaaaaatgcatctacaagagcataaggtggatgcacaattagtccgatcgctacccctgaaaaggaggtgtagacgatcttgacatcacaacgcacttgtattaattattaca

SEQ ID NO: 57772 - DNA, 1719 bp, Oryza sativa
  Clone ID: PAT_MRT4530_59550C.1
atgtcggcgtgggcagcggctctagcgaggatgtggcggcagtccacgtggagaaggggaggactccgtcatcgccgccgccgtgccggcgcagggccaggtggtggccgcctccgcctccgattcattagggttcgcggcgtgggaggattgggaaagtttttcttttttcctccgaggtggtgttcggcggcggcatcgcggcagggaggtttgccatggccacaaccatatgttgctgctgagtcaccttttgttggtgttgcagagctatatgctgctatttactccccttcatctcgatctgttcggcgtcgcataatcccaaatgataatgctgtacaccaatgcaacaatgtcatacacaactaccacaacagaatctgtcatcggcttctcaccaaggtgacgatgatcttaggcaaccatttcccggtcgacaccaccctaccggacccatctgttgatcatattggttatgaagctgtctccaagtttatgatacatggcccttgtggcagttcaaacaaatcgtctacttgcatgaatgatggaaaatgcagtaagttttatcctaaagaatttacagaaaaaaactatggtgttgtcgggcgtgttatatatgctcggccaaaaaacaatattaccacagagaaaggtggtgtagatgtcgataacaggtatgttgtggcccataatgttgatctcttggttaagtaccaagcacacatcaatgttgagattgttaatcgtgatggaatggagaagtacctattcaaatacacaaccaaaggtcctgattgtgctaaggttgggatacgggatggaggcaatgaaatacaacaatatcttgattgtaggtgtgtaacaccttgtgaagctgcatggcgcctactgcaatttgacatccaccacactgatccatctatggagcgcttacctgtgcatctcccactcgaaaatagtgtggtattttctgaagatgaccatctggaccaggtcattgaaaatccacgtagcaccatcaccaaattgactgcatggtttgatgctaataggatatacccacaagctcgccaacacatgtatgtggaatttcctgagttttggacatggcatggtgatggtaaatattggaaacaacgctctcagagccataagggcaaggttggtcgcattgccaatgttggacctaaccaaggtgagcagttttacttgcgtatattactgcatgttgtcaaaggcgctcaatccttttctgatgtacgcactgttagtggcattcaatacccaacttttcaatctgcatgtgaagaaatggggttacttggcgatgatcgtgaatggtctcatgctatcactgatgcagcacagtgggcgcttccatatcaacttcgacaattatttgtcatgatgcttctattttaccaagtatcagacccagccaagttgtttgacaataatgttcaactaatgggtgaggattttgcgtatcgtgtgtgccagcagacacctaggatacatcaaaatatccttcaagagcatatcagattatccaccctagctgaattggatagattactaagagatgtaggatacagcttggatcactttcagttaccgcggctaagccatcttgcttttccaccattggagagtaggcttataatggatgaacttgcttatggaacaactgaggtgaatgaacagctcaattaa

SEQ ID NO: 57773 - DNA, 198 bp, Oryza sativa
  Clone ID: PAT_MRT4530_59551C.1
atggctgtctgctggcgacatgaccagtgtcagaccggtcacaaatcggtcattcttgtccaccacatgatatatctgaccgggtccaacgtgccacctccaggagctaacacgccggctccggatagggacgagtgcttggaggctctcatcctgacgggatggggcgaggcgtgcgtcagaccgcctaccggataa

SEQ ID NO: 57774 - DNA, 201 bp, Oryza sativa
  Clone ID: PAT_MRT4530_59552C.1
gtcggattccgacgagccatgctcctcctgcggtggttaggatgaatacgtctttgccaggggtggaggattatgaggctcacctgagcaaggtgtatgtggaggatatcatggagcggatagggctgggcgtgggcggccatggcgaggggctgaatgcgaggatggggctcgacttggttgtctaggctgatctacgcc

SEQ ID NO: 57775 - DNA, 275 bp, Oryza sativa
  Clone ID: PAT_MRT4530_59553C.1
tcacttatgttggccgcctcgccctgccggttccggacctacctgctcgacccacgcacgcgatctgtttcgcccgaccttgaagacggacggggtagagttggtgtctcccggcgcgctcggaacctccctagaaaaaatgacttatatggtcgacttcgacgccgggaacatatgaaccataaaatgtgtaaaaacgatgttaccaaaaatcgtggacaacaccacttaccgatcgtgggaattaacaaccagtttaattgttcacacgaaaa

SEQ ID NO: 57776 - DNA, 562 bp, Oryza sativa
  Clone ID: PAT_MRT4530_59554C.1
gtcgactctagaggatcccccacgcgtgatggcgtcgcaggtcttgtcctctttgccgtactccctcgccgtcacgcgctttggcactgcgccgccgccacggcgagccgccgcgcgggtcagcctccgccgccagcaaacgtcccgcgacggcgccctcctccttcgctccctgacgacgacgcgctcgcggtgcgctccggcggcaaaaggaggcgacggcgccaaggaggcgccggaggcagctggcgaccccgacgacaagctgtggccgtgggacgagttccccgagaactccgtgttcgtcagcaagggtatgctcattgcatgcattgggtgttataacctcttcaagatgaatccaaccacgttcatagacgcggccctcggttacacgttctacaggctctgcatcgtgtcgtcgcagctccggagaagaggcttttccaacgacctcatcatccgggttaaatttgtcgtcatgttggttatggctatcaatgatatcaacaactgcatttattggcttgatgctatcagggcacctgtctatttcctctag

SEQ ID NO: 57777 - DNA, 561 bp, Oryza sativa
  Clone ID: PAT_MRT4530_59555C.1
atgggacccacatgtcccttctctctcccctccctcagttccttctctctcatcgccgctccctccatttctctctctcccgcggtgggtggagatggcggcgagcagcggaagcgcggcggcggcgcccgggctgagctccaccgcggcgaagacggaggagacgacagtggcggcggtgggacgcacatgcggcggggtatggtgagcttggccgccattgaccaggtcttcgacgccataaccggcgggtgggagccggcggcggcggcgggagggtgggcggaacaagcgctcaaaatcatggccaacgaggagaagttggacctcttcttgaagaaaatggtggaggaagcggcacagagagtggaggcggagcaaaggagcatatcagatcttctctccttcaaggcgacggtagaggcatggattcctgaggtggagtggaaggtggattcccttaattcgtcggtagtgtatttgcagaacaagctgacactgatggagaagaagggggccgcggcagtggatgtggcagcagtgacaaggaggcatgtttag

SEQ ID NO: 57778 - DNA, 448 bp, Oryza sativa
  Clone ID: PAT_MRT4530_59556C.1
gagacgcagatcacactagttttttttataatggaaatgtgttactccggcctctgcccataggcacacagccaaaaaatgaaataaacagaaaagaacttaaaaaaggtgagatgggataaacccctaacttctactgataatatgatctactaaaataatatttttaaaaatcacgtagattctatcataaaattctgtagatactacgccatccaagcatatcgcacttgtaggaaagatcgcactagtaggaagaggagaaaaaatgtgtggcaaatggagtgagtaattgagtggttttgctgcatgattaagcagccggcgaatggtttgatctctggaggtgacgcatgctcgaatggatgatccttttctggctgctgcgccttttttgctcgtagagtatttcttttgttcgtgcatgtatgactgcttttgcttggtc

SEQ ID NO: 57779 - DNA, 327 bp, Oryza sativa
  Clone ID: PAT_MRT4530_59557C.1
atggccacaaaggttcaacgaatcttcaggaatgcggttttgagtggaataactgatgaagacacgagggaggcgacggggagcagcgtgggacgaatcacatacagatacaccaaccaaccggagtgtccgcgacgaatcccgcggggaaatagaccggagaagaaccagaaggcggcggcgagcggcgaccgacggcgcgccgcggaggtgaaggggaggaaggagaccggaggaggagagagggtttacggctcaggtttccccaactcctgccgcttgtgggctttctccaacgaagatatgggcctaaacagtggcccatag

SEQ ID NO: 57780 - DNA, 2466 bp, Oryza sativa
  Clone ID: PAT_MRT4530_59558C.1
ttttttttttatcacaaatggtacgatgttaaatgatatcgactgctcattcccaacttgcgtgtggtcatcgcaaaccgtttccttttcagtcaaacaaacacatttacgcgccaacatcactcatgcaattatgcatacatctttcatcagggggggacctaactaaactagaccctacctagatatgaattatactctataatagaattgtagtagaaccctatcaggatatatgacgctacatagaattgtaaatttgaactagcctgagctggctgactgatctccagagaacacacttccactggacagtgccgctgatcctgactgggaagggcccaacccgcggttcctctggatctgcctaagcctgaatatgtcccgcggcattgctcggctctgcactgttgtcgacgtatcatcctcctcttgtgctcgccccctttcagagttcttccgcttcgtgggttgcccgtctcttggaggtctatggatggatccattctggttcaatcctgatttgccaggacctgagaggtcactcgtggcaggaccaggaacttgcgaacctggtttgtctcccactggcaatgtactctgcatcagcacgcttagcacaatatccatatctggtgatggcccttcaatagcaggcaaatttgtgatgaaagacatcatctgtggagaaagtcttttcaatatttcatcaatctcctttgtatacccactggctgtggttgagaagtctgggcctttcatctgtctaggatcatagataaccattcgagaaatctcaggacgaacaacctttgaagattgtgggaacgactttttattggaaccaactcggatatcacctttatctaaagtagcaccgccagttagcacaactgatttgtcacccctattagcaatgttttttgcaagccactcatgtcttgatagataatccaattctttggttgagcatggccaaagatccatatagctgtatcgagaaacaacgtcataaagtgtgttttccaaggcagataaggcgtcttcggatgtcctagataaagcctccttccttctttgttccacctttaacatgcttgacaaatccccgtatgtttgctcaaattgagcaaatcgtttccacacctctatagattcttcaggaggaagtaagctcagagctcgctcaaacaaagcacgcacatttctgtcgtcatttaagcgacacaggaagtctgcatattcaaggatatatcctggctcatgcataaatcgctttaaaccagcttcaaaaacactttgggctacctttgcatccttgtcaaggcaaaatgccattgtagcgtaagcaacatagacatgataagtgcagcctggcaatttccgagcatccagaaagtacttacgagctgcttcaatgccttcagttctccttagaaatcgaataaactgaatatgtgcaagtgaagtcattcccgcattctcagctataagagactcatatattgctttagcaggctgaattgctcctctagactcttccagttcagcaaaggcatactttagtactcctgaatcagggagtgcctttacagcacgttgaaatattttaattgcagaatccacagaaccattcttggcatgccacatggcataatcataccatatatcaggatgatggtatagatacatcaaacattgttcaaatgtaaaggtaacacgcctattagcagttgtagcatcaatcctctgagggttccccctgccagttaaatactgggcatttgcctttccccaagtcctgattaccttgtaggagcctgtggggggaactgccagcatgttccaatcaatatcatcaatgtatttcttacgctctctatatactgctttggcactgttaaactttggctgatactccgataacaaaccttttgccaaggtgcggctaacagaattctcaaaattctcataatccttccatagctgctccacatgattagttggaactaaaattgccttctgatatactttccgtacagtagtcatacgatgtgattcttcctgcggtgtcacaaccggcattgacttcaagaaagcaatataatccatccaaacagggccagaagcaacatcattgccaacatagttcagcatgaaatcaaaagcctttttggtctcttccaaaccatcagaaccccttttatcgttcactctcctgataaagttgatgtaacaacgccagagattaatctgaaggcaactgagcaagcatctgctgaatatctgcttggtggcctcatcatccttcgcggacatgtaagcttcgacatactgcttccagtacttcgcggcagtggggaaagttgacagcagcttctcgtagatgggagcggcctcgccgattgggagcagctgggcctcgttggcgaggatctcggcggcctcgacattgtagatgtccat

SEQ ID NO: 57781 - DNA, 344 bp, Oryza sativa
  Clone ID: PAT_MRT4530_59559C.1
gcaccacgacatacattgtaaaatgtagtccggaaaagtcaaatggcttatggcagatgagccctccaagcgccacagtcaaacacccggtacgtggacagatcgcccaacatgccccactgcacggcttcatctcaagcgagagtctggaccagcagaacgaagtgaattgcaatgagcacttacacgagacacttaacaacgttacaggcactaggagaaagggtgctggctacgagcccctttatttccataaaaaaaacaacggcaggggctaccagacccagatcaactacgccaaagctaaagagagctcccaaggacccaacgcctacaggagggtg

SEQ ID NO: 57782 - DNA, 1373 bp, Oryza sativa
  Clone ID: PAT_MRT4530_5955C.1
atgacagaagccgctgccaacgcccgcccaaaactggactgggttttcacccgaagtggagagagtccacaaggcaacacctccaatgaggaaacgacacccataggcatcgatgtcaccgatcctagaagaccaggcagggctgtcgcccaagactccctcaagaagtacaggacctctaagaagctagagcaagagtgtttacatagccacagggcacgtgaagcatcggcgaggcccaagcgcccttactaccaacagactagaccaccaacacggacgaaaaaaactcaaccaccaaaagactccacggccggtctgggagcaggcgaccaagagaagggaggagcatcaaggaggggaggaggcctggccggtctgaaggtgaaactgagaactggcagcaagggcaacaaagacatcggtgtcatccatgtttccagcgaggatcttcgggcttcgtgggacaatccaaaacaactgtggcaaccacctccaacttcaccaccagcgcagagagaggagcaccggggtgagcaacatagcaactgtatgagtggcgctcaaaatcagcgataccaacaagatttggttgagaaacttgagttgcttacacaaccgcatcctcatccatattacatcaaatggttcaactcttgtggtaagttcaaggcatctgagaacaacaaaggtaatgaggaagagaagaaagacgaagaggaaaaaaacctatacatagctccacgcatgcttgaggaatgtttaattgaccaagtgcctacaatttctgaagatgagaaaaaaggtaaagataatggtgctacaagtgctcaagaggttcttgcttgggcgaagaaaaagagaccgagcgtaacgaattcattgatgatcaaagaagttgattggggaccatatcaaggccttcttcaagtccacttccatctcatcatgtcacttttggtccatagaagacaagagataaagttctacacgttttggattcggattcgggcctcctgacagcatcaacttcaagtggacctagccgctgatctagaaggaatttcggggcccatgagtacttgctggaaagcttatggagtctactttcaaatgattttggttccacgtcaaaattcctaccgagctgccgggaatctgcaaaacaaaccacggattagccttatcggcgaggtcaaccgagtttcggcacggttgataactagaggagacgtggtgctgcgattgaggggttgagtagcatgctcattcggaagccggatcgagttgtgtcacgactctgcccaaattgactgtttatcaatacctatcgaaaaatcgggacctaacatcttcatcaccaagttccaccg

SEQ ID NO: 57783 - DNA, 378 bp, Oryza sativa
  Clone ID: PAT_MRT4530_59560C.1
atggctagcccatgcacatgtcgggccaaactcaacatggtcagcgttgattcggttacaacacttccaaagagaagggcccctacgtactgtccggaaagatcaagcatctcgatcacggatctacctgtcgcctaccacctcaacctcaaacagaaggtgatcaccattgctgccttagccccaaagagaccgccttcgttgcggaaaccagcggtcatcgtccccgtatttgacaataggaccatccgatggaagcttacatcttgctgggacttatggaatgagaaggctctactgccaccacggtccttgcaaccgcacagtctgctccagtggtggcgaagcagggaaaggactggaaggaagcggtggtag

SEQ ID NO: 57784 - DNA, 387 bp, Oryza sativa
  Clone ID: PAT_MRT4530_59561C.1
ttggttttttttcattttttttgtgactcaatcaattctattcattccattattgttggaacacaatgtgaatacagatacacattattagctgaatccaagaaattacccttatcaatcacacaatgaaaatggtagcttattacaaccccggcgggcatgaaattaatcttcgatcgaccgacatatacgaggatgcataatatcgatcgataggcattagcacgacgattattaatcatagtatatgggcatatataaaccggtcggcgcagtaattaatgaatttacaggcccatggcgtgcaagtctccccagagggtttcggcagaaaaactaatccttctcttctccatgggggtgagcaccagctcgggggtgacccca

SEQ ID NO: 57785 - DNA, 294 bp, Oryza sativa
  Clone ID: PAT_MRT4530_59562C.1
atgaggtcccgagatactcacaaggtccactgtcacgaggagtctgtcgccgtcgctgccagcgacacctcgccacgagctctcaggacgcgtcgcaccagcgctgacaccggcgagagggtacgcaagccgaccagctgccgctcgtcgcttcctcggggaggagtgccgcggcaccaagaacgtatctaccctggatcactgtctcgaagcatctcctccaccgccaccgtcaccgccaccgtctcctacgccgcctcctccacctacgacgcctcctccatccagatctga

SEQ ID NO: 57786 - DNA, 123 bp, Oryza sativa
  Clone ID: PAT_MRT4530_59563C.1
ttgccagtgctgccacaagcccccatgcctcctgcctgctgcctgactgcctgcacctgtgctgccctgctgccctgctgtgatgcctgtgctgtgactccatctgcctgctgcacccctgat

SEQ ID NO: 57787 - DNA, 804 bp, Oryza sativa
  Clone ID: PAT_MRT4530_59564C.1
atggctccgtacgacgggcgacggccagaggcgggggcttcgcgcgacggcggccggtggcaggggcttcgcgcgacggcggccggcgacaggggcttcccgcgacggcggccgacggcgggggcttcgcgcgactgcggccggcagcgacaggagcttctcgcgacggcggccgacggcgggggcttcgcgcgacggtggccaggagaggggcttcccacgacggcggccgatggcaacgataccgatggcggtggctttgggctttggcttcgtgcagcgctagctgagcatgggacttcgcaagagattaggctgaccatcgattccatctccctcctcgtgctcccctgccggacgccggttcgtccgaagctgctcgccaccgccggcgagagcagggcggcatcggtgggagagagcggtggcggagcggcggcggcgacgagcgagcgcggctgcggatggggagaggcggcgccgacgactccgtgccggtcttgtcatcgtttgcggctccgggcgcgagggaggagggcgcgggccttgtcgtcggtgttggcggcggcggtggtgggtagggggcggctcctccggctgcgacggcgcgggagaggccggcggcgagggcgtatgaggggaaaggcgccgtccgcggtttgctgctgcttccccttcgccgtcctcgcggccgtctgcgtccccgctgcgctctgcgtccccgacaacggggtgcgccaagatagatggcgcggtgaagagcatgtacgccgcgggcgagagtggtgcggcgtctgcgggtga

SEQ ID NO: 57788 - DNA, 1014 bp, Oryza sativa
  Clone ID: PAT_MRT4530_59565C.1
atggaaggacgcctaagaggcatagaaggagggttacaaggcctgcgctccctcgtatcattgactattatcgattgccctgatttcttctcctcctactcatcatcttcctcatctttcccatttccttcctccctgaaatatctgtctattgaccgtgtaagtggcatggagactctgtcgctcctctctaacctcagctctctcaccaacttaggcatagaatgtggtgatttaagaggcgaggatttgtgttctctgctcgcccaaggccaactcacaaggctgcgagtcaacaagaaccccaaattcttcgtcgggatcaacccctcatcactgcagcaccttgtaacggatgacatcgcaggagtgcttgttgtgcccatctgcagactcctctccccctcactcaccaagctaaccattttttgcaataacgaggtgaaacgcttcaccaaggagcaaaacatggcccttgagcacctctcctcccttcaggagctcagttttagtttttgccggctgcagttcctcccctctgtgttacacaggcttgttagcctcaagagattagagatctcgtgcatgagagaattgtgggatttaatcccctgcacacagaaagaacttcaccttgtcgccgcctccaccgtctgtcagctaggtaacgagcaaacaatccttttccgggaggacaattggttgcaaggaggaaccatccgagctattgcaccctccatctacgatcatgtctctactcgtatccggaagcgccggatggtggctgaagcgctgtctaaccgtagatggatcaaggacataagtggcgcgcttgggactcaggcaatactcgaatacctcaaactttggtcgctgattcagtcagttgattgttcttccgcagagcccgactcactctcctggaagtgggaaagctcaagcaaatacacttcaaaatctacctaccgagctttgttccttggacgaattgcctttgaatccacaccgatctag

SEQ ID NO: 57789 - DNA, 317 bp, Oryza sativa
  unsure (1)..(317): unsure at all n locations
  Clone ID: PAT_MRT4530_59566C.1
gctttctctctctcgctcacgtcaaggtggtcagggcgccggcgagacggagctcagggcaaggcgccgacgctcactgtggaaaagccaccggcgttgtccaaatccggcgctggcatgcacggntctagtctccccatgctcggatctgttgctctgggcggcggagagcagggtcggcgacggctgcgtggagattggcgacgacgactgcgtgtaggtggtggcattggcggcggggctggacgaagcggccgaccgncggcggggctgaggttgcgtcggcgtggagtgggcggcttcggccgaaacggcct

SEQ ID NO: 57790 - DNA, 3078 bp, Oryza sativa
  Clone ID: PAT_MRT4530_59567C.1
atggagtcggcggccgtgaacgcggcgcggtgggtggttggcaaggcgctgagcccgctgtcgggagggttcgtggaggcgtgggcggccagcacggagctcgggccaaacgtcggcgccatcaagatggagctgctctacgcgcaggggatgctgcacaacacccgtggcagagaaaccagcaaccccgcgctgcagcagctgctcctggagctccgtggcctcgcctatgatgccgacgacgtgctcgacgagctcgactacttccgcatccaggacgagctcgatggcacctacgaggccgccgatgagcatgccagcggctgtctccttggccttgtgctcaacgctcaccacactgccagaaacatcaagagaaggtacctctctgcctcttgctcgtgcggtggtgacgaggaagcgagtcgccacgccaacgaagaggaggctgttgctggcagcggctgcatgcgcatcctcgcttgcagtgctcagagcaccatccatctcgttggtaaacaccttccatgcttcccttttgcacctggtcttgacaattgtgatgactccggtgccttgcacatatctaccatgaaaacaccaaagctgaagttcgatagggtggatctgtccacaagaatgaagcacatcgtcgaacaattgaagcccgtatgtgccaaagtctctacaatccttaatctagagctgttggaatcatgcattgccatcagtatcaatggtgaattttcaaggaaaccagggcaaacgctagttcatccaagcaacgttgctatgaatcgtcctgtaactacttcagggattatagaccctgaattttatgggaggaagggtgatagaagtagaattattgaggacattactcggggtgattactgtgacaaggatttgaccgtcattccaattgttggtccagggggaatagggaagacaactctcactcagcacatatacaaggaagtacataaccattttgatgttaaggtttgggtatgcgtctctctcaatttcaatctgtatagattgaaagaagagatctcaaagtggatacctaaactcaaggatgatgagaaatatgtcgacatggatgattcaattgagcaaagattgaaatctaagaagcttcttcttgtcttggatgatatgtggaagtgtgataatgaggatgagtggaaaaagttcttagctcccctcagaaaagcaatgacaaagggaaacataattctagtcaccactcgatttccagtggttgcagaaatggtgaaaacatttgatcgaccaatacaattggaagggctagaacctgaagagttctgggaattattccaagcatgtgtttttggtgatgacaaatcaatagatgatcatgctaacttacttgagacaggagaaaagatagtgaaaaaacttaagggctctcctttggcagcaaaaacggtgggtagattgctgagaaatcaccttgatttggatgattggatgagggtcctagaaagtaaggaatgggaatcacaaactagtgaaaatgatattatgccagctttgaagcttagctatgactatctatctttccatctacaacaatgtttcacatattgtgctttgttccctgaagattacaagtttgatagtgaggagatgattcacttgtggatagggcaaggcattttacattcccaggatgaaaacaaaacaactgaagatattgggttgagttatttgaatgatttggttgattatggatttttcaaaaaaaatgtgaatgaagatgggtctccttattacagtatgcatgatctactacatgagttagcattgaaggtttcatcctgtgaatgtcttgctgtcagtagttctaacgtaaggtttgtgcaaattccaccatctatacgccatttgtctattgtgatagatgacatggatgtaaatgatagagtgacttttgaaagcatcaagacggatttcagcacactaagtaagagactggatgttgaaaagctacactcttttatgctatttggacgattccatggaagctttatcagtcctcttggtgatttgttaagtaacgcaaaatcactccgcgtcatcttgttgtctactccatcatatgcagtggagaatatgttgcacaacttttcaaatctcgtccacttgcgctacttaaggattattaggggatattttccagaaataaggctacccaacaccatttcaaggttttatcacttgaggatccttgatgtacgaaaatgcaatggtcactttggtttaccaagagatatagataatcttgtaaggctacgccattttcttgtccccgatgacaatctccactctgacgttgctaatgtgggtaagttaaaatgtttacaagaactaaggagatttaaagtgaaaagacaaagtgagccatttgcattaagacagttaggacagttggagctgaacggaacactaggcatttataatcttgaaaatgcacaggcggcggacgaagcaaaacttttaaacaaaagtcatttgcacaagttaatattacattggtcaacaaaggattgttcccaagatgaacatattcttgaaagtcttaagccacataacaatcttcaagagctacaaattgaagggcatggaggtgccacttgcccatcatggttaggttttaacttgtcaatcaaaggcctgcaatctcttagtctgcatggtctagactggaacaaattcccacctataggggagttatggttggttaaccagcacagtgaaaaatccttgagttgtatagaaggccaaagcttttggaatttaaaaaggttagagctagttggcataccgcgactagaaaaatggaccggaaatgatgcttcccgtgtgttctctcagctagaagtgttcatagtaagagattgcccagaacttatagagttgccatattcaaagatggacagcactcaattccctacactaaaggagcttgagattgtaaaatgcccaacgctatcatcattgcctcccgttccttggacaaactctccatgccgtgctctgattgaagaa

SEQ ID NO: 57791 - DNA, 789 bp, Oryza sativa
  Clone ID: PAT_MRT4530_59568C.1
atggcccccctcagacgagttggacggtggccaaggcatccaaacttaaggaggaagcggtgcgccggcggccagatccggatccaatgtccttgtagccggatcccgcgccccagccctgtggatggatccgacatctccacgtcggatctcgctagagttgtcgcgcggtggggcgtcggcagggggaggcccacgtgggcactaatggggagtccctcgcaattggcggcagtggacgccatggcggctagtggcaagaaggttgacgcaagcaacaacagtggaaagccacgatggctggcggcaacgaaaggcttagaccacaatggtggcgttggggtcttctccctgggtgcatggagatacaaaggggttgccaggcagagcgctagcatgtgctgtggacaactcgaccatagctccggcatgcatgatgacggcgaagtttggttacgcgccggcccgtgtagcgacatagcaggcattgtccgatggagtagccgccgaatttggggccctgagctcaaactcggccgtatagcaccgtcatcgtgggcagcgacgacggcggatcgccctctatgcccgataccttctcatctccttggagctcctacccttcttggctggtttatcagtcataaggagctccatggtgagacggtgaagacggcagcaggagaggaaggccgtggttgccgacatgtagtagtgggcggtggtatagtcacctctcctcccttccttggtgaggagatggaggtgatggcatgcgaggaaggctaa

SEQ ID NO: 57792 - DNA, 4839 bp, Oryza sativa
  Clone ID: PAT_MRT4530_59569C.1
ctagatcggtgtggattcaaaggcaattcgtccaaggaacaaagctcggtaggtagattttgaagtgtatttgcttgagctttcccacttccaggagagtgagtcgggctctgcggaagaacaatcaactgactgaatcagcgaccaaagtttgaggtattcgagtattgcctgagtcccaagcgcgccacttatgtccttgatccatctacggttagacagcgcttcagccaccatccggcgcttccggatacgagtagagacatgatcgtagatggagggtgcaatagctcggatggttcctccttgcaaccaattgtcctcccggaaaaggattgtttgctcgttacctagctgacagacggtggaggcggcgacaaggtgaagttctttctgtgtgcaggggattaaatcccacaattctctcacaatcaaatcccagtcgctgtctttgatgattggaatggttcctcttagcttgcggcactgccttttgagctcctcgctgcctccagagacatctagtatttctagtgaacttggaagaccactcttgggcaacgaactgatgaactcactgcacgagatctctaatctcttgaggctaacaagcctgtgtaacacagaggggaggaactgcagccggcaaaaactaaaactgagctcctgaagggaggagaggtgctcaagggccatgttttgctccttggtgaagcgtttcacctcgttattgcaaaaaatggttagcttggtgagtgagggggagaggagtctgcagatgggcacaacaagcactcctgcgatgtcatccgttacaaggtgctgcagtgatgaggggttgatcccgacgaagaatttggggttcttgttgactcgcagccttgtgagttggccttgggcgagcagagaacacaaatcctcgcctcttaaatcaccacattctatgcctaagttggtgagagagctgaggttagagaggagcgacagagtctccatgccacttacacggtcaatagacagatatttcagggaggaaggaaatgggaaagatgaggaagatgatgagtaggaggagaagaaatcagggcaatcgataatagtcaatgatacgagggagcgcaggccttgtaaccctccttctatgcctcttaggcgtccttccatgttttctccaagtgaatcgtggtggaggatcagctttgagcaacaggagatgaacaactcctgtagctgggtaggcaagagcagcagtcctgaagatgccgctgctttctcgtcctctcctcttggctgttgttgctcttgtccgaaacgtgcattctccaacttattaccagaaagtgatggtgaagatgccgatgttgccgttatctgctgctcagccacaccaagcattgctatcttctccaatctatacattgtcaagtcagagagtttggggaaatgggacagcagcagcgtcaattccttcccgctagcaccacactttctgatcacaagtttctttactggaaactggtatctaacagcgctcccaccttcaaccatcaacaaggaactacttgaaccatttatttcaagcttcttcaaacatgataacatctggaggtgttccaacggcaaaaaagggcattttgtcaagatcaaatatttcatctcagttaaattactagatgcaagtacttttgagaatgcacaattcagatggcccttctttcccgcaacccacaagtgtgatttagattggtataaatttgagtacttcaagtgctgaaaatctgatctcacttcttcaatcagagcacggcatggagagtttgtccaaggaacgggaggcaatgatgatagcgttgggcattttacaatctcaagctcctttagtgtagggaattgagtgctgtccatctttgaatatggcaactctataagttctgggcaatctcttactatgaacacttctagctgagagaacacacgggaagcatcatttccggtccatttttctagtcgcggtatgccaactagctctaacctttttaaattccaaaagctttggccttctatacaactcaaggatttttcactgtgctggttaaccaaccataactcccctataggtgggaatttgttccagtctagaccatgcagactaagagattgcaggcctttgattgacaagttaaaacctaaccatgatgggcaagtggcacctccatgcccttcaatttgtagctcctgaagattgttatgtggcttaagactttcaagaatatgttcatcttgggaacaatcctttgttgaccaatgtaatattaacttgtgcaaatgacttttgtttaaaagttttgcttcgtccgccgcctgtgcattttcaagattataaatgcctagtgttccgttcagctccaactgtcctaactgtcttaatgcaaatggctcactttgtcttttcactttaaatctccttagttcttgtaaacattttaacttacccacattagcaacgtcagagtggagattgtcatcggggacaagaaaatggcgtagccttacaagattatctatatctcttggtaaaccaaagtgaccattgcattttcgtacatcaaggatcctcaagtgataaaaccttgaaatggtgttgggtagccttatttctggaaaatatcccctaataatccttaagtagcgcaagtggacgagatttgaaaagttgtgcaacatattctccactgcatatgatggagtagacaacaagatgacgcggagtgattttgcgttacttaacaaatcaccaagaggactgataaagcttccatggaatcgtccaaatagcataaaagagtgtagcttttcaacatccagtctcttacttagtgtgctgaaatccgtcttgatgctttcaaaagtcactctatcatttacatccatgtcatctatcacaatagacaaatggcgtatagatggtggaatttgcacaaaccttacgttagaactactgacagcaagacattcacaggatgaaaccttcaatgctaactcatgtagtagatcatgcatactgtaataaggagacccatcttcattcacattttttttgaaaaatccaaaatcaaccaaatgattcaaacaactcaatgctatatcttcagttcgtttgttttggtcctgatgtgattgtaaaatgtctagtcctatccataggtgaatcaactcatcactgtcaaacttgtaatcttcagggaacaaagcacaatatataaaacattgttgcagatggaaagggagatagtcatagctaagctttaatgctggcataatatcattgtcaccagtttgtaattcccattctttactttctaggacacttgtccaatgattgaaatcaaggtgatttctcaacaatcgacctacagtttttgctgccaaaggggagccctttagttttttggctatcatttctccagtctgttgtaagatagcatgatggtttattaatttctcatcaccaaacacatatgcttggaacaattcccataactcttcaaattccagcccttccaattgtattggacgataagtcttttgtactatttctgcaactgctggaaaacgagtggtgactagaatcacatttccctttgtttgtgcgtttctgaggggtgctaatagccttttccaatcatcctcattactgcaattccacatatcatccaagacaagcaaaatcttctttgacttcaatcttcgctcaatcaagtcatctaggtcacccagttgctcattctcatctaggtcacccagttgctcattctcaactttaggtattgaatcagcaatctcttgtttcaatctgtacgcattgaaattgagagagatacatacccaaacattaacatcaaaaaggttctttactgctttgtaaatttgctgagtgagagctgtcttccctattcctcctggaccagtaattggaatgacggtcaggtccttgacacagcaatcaccatgagttatgtctttaataattctatccttctcacccttcctcccataaaattcaggctctatagtcgctgaagtggtcacaggacgaagcatagcaatgctgcttcgaatggtgcgatttgattccggcaactctagattaagaatggtggagaccttggcgcagactggcttcagctgctcggcgatgtgcttcgttcttgtggacagatccaccctgtcgaacttcagctttggtgttttcatggtgtcctccctctgtgatccccactgtttttcttttctaggcatgtgcgttgcagtagagctgtggtcgatatcagtagagccggtgtcgttgtcgtcttcatcggtacagtcgtcatcggcatcatgttcaccagctaaagagaggtcactgccggcaacagctttctcgtcacctccgcccgagcaacaagcagaaaggtacctcttcttaatgtttctggcggtgtggcgggtgttgaggaggaggccatggaggcagcctctggtgtgctcgtcggcggcctcgtcggtgccgtcgagctcgtcctggatgcggaagtagtccagctcgtccagcacgtcctcggcgtcgtaggcgaggccacgcagctgcaggagcagctgcttcagcgcggggctgcgggtctccctgccgcgggcgttgtcgagcatcacctgcgcgtagagcagctccagcttgacggcgccgacattggtgccgagctccgagcaggccagccacgcctcgacgagccctcccgacagcgggctcagcgccttgccgaccatccaccgcgccgcttcaacggccaccgactccat

SEQ ID NO: 57793 - DNA, 508 bp, Oryza sativa
  unsure (1)..(508): unsure at all n locations
  Clone ID: PAT_MRT4530_5956C.1
natttganaagagtccgatgggggttaaagggctttggcggggcggcccaagaanaccctttgtttntggattnttggcacaagggaacgggccaagggttttggaggggggaaccggttttggtgccaanagcaggccnccnaatccccaggattttggtgttttttttttcaggangcanantngaaattnntgggntgccnaagtttaanaagngctgnttattattntttgggnaanaantgtttaannnttttgtttttgnatccnttncaaanttttttagngnagngggtgnantanaaaaagtngnngggngttacccatcccatgnnaaagnangtaantcnaangnttgggantaannttttgtaaacccannnnanattgngnnncnaaaanangggngnnttgnagggaaaaaaaaaaaaaaaaaaaaaaaaaaaaaaaaaaaaaaaaaaaaaaaaaaaaaaaaaaaaaaaaaaaaaaaaaaaaaaaaaaaaaaaa

SEQ ID NO: 57794 - DNA, 408 bp, Oryza sativa
  Clone ID: PAT_MRT4530_59570C.1
atgcggcggaagcagcaggacgagcgacggcggcgaccctgctcgcgcgatggatggggatcggcggtggcggaggatgcgctcaccaggatgcggcaggacgaacgacggcggcgtgctcgctcgcgggatagatggggatcggcgtcggcggaggcggaggcggcgcgcaagggcagagtgacgactgacgaggaggggggcatagcggcatcaaagcagtccctcgaaaacggatccactccccttcacccttactgttggatctaccccgagtgcacgttggttacaagaaggagacaaccagtaaggagggaggttgtcgggaagtatgctaaccagcgtgagcttctcggcctccttattctaagcgcgttgctggtggtgatggaggggagtgaccaatga

SEQ ID NO: 57795 - DNA, 3858 bp, Oryza sativa
  Clone ID: PAT_MRT4530_59571C.1
atggctgatctagtaaccagcatggtgatcgggcctttagtgtcaatggtgaaggagaaggcctccagttacctgctggagcagtacaaggtgatggagggcatggaggagcagcatgagattctcaagcgcaagctgccagctatcctcgatgtcatcagcgatgctgaggagcaggcatcccacagacaaggagtaaaagcctggcttgaggcactcaagaaggtggcctatgaggctaatgacatcttcgatgagttcaagtacgaggcactccgtcgtgaagcaaagaagaatgggcactatcgaggactcggcatggatgcggtaaaactctttcctacccataaccgtatcatgttccgttatacgatgggaaaaaaacttcgtaggatagttcagatcattgaggtccttgtggcagaaatgaatgcttttggattcaaatatcagcggcaatcattggcatctaagcagtggaggcaaacagattccatcattgattactctgagaaagatattgtggaaagatctagagagacagagaagcaaaagattgtgagatcattacttgaaaacaatgacataatggttcttccaatagtgggcatgggtggtctaggaaagacaacttttgcaaagcttatctataatgaaccacaaatcaaggagcatttccagttgaatagatgggtttgtgtgtctgatgagtttgatcttagtaaaattgcaagtaagattagcatgaccacaaatgagaaagattgtgacaatgtgcttcagaagctccagcaagaagttagtggaaagaggtttctcctagtgttggatgatgtgtggaatcgtgatgttgataagtggtcaaaactaaagacttgccttcaacagggtgcagcgggcagtgtgatattaacaacaactcgtcttgcagaagttgctcaaattatgggaaccgttcaagcacacaacctcactacgttggacaacagatttttatgggaaataattgaaagaagagctttctatttgaaaaaggaaaaacccagtgaacttgttgatatggttgacaaatttgtggatcgatgcgttggctctcctttagctgcaagagctgtaggctctgtactgagcaataaaaccactcccaaagaatggaatactttattaagcaaaagcgtcatctttgatgatgatagtgggatcttaccgattctcaaacttagctacgatgacttgccttcacaaatgaagctatgctttgcattttgtgctatatttccgaaagattatgagattgacgtggaaatgttggtaaagttatggatggcaaatgacttcattccttctgagaatggagttggccttgaaaaagttggcaaccggattttcaacgaactggctcgaagatccttctttcaggatgtggacgaaacatcactgttcaagatgtacaggagggataagctctgccaatttaggaagacgtgcaagatccatgatctcatgcatgacattgctttgtatgtcatgagagaagaatgtgttacagtaatgggtaggcctaattccatccagttgttgaaagattcttctcgccatctgttttcatcatatcatagaatgaatacccttttggatgcttttattgagaaaagaattctacctctccggacagtgatgttctttggtcacttagatggcttcccacaacatttactgaaatacaattctctacgagcattatgcatacctaattttcgtgggcgaccatgtctaattcaagcaaagcatttgcatcatctaaggtatctcaatctttctcatagctggaatatggaaagacttcctgaggaaataagcatattatataatttacaaacgttggatctttctgattgctgttctcttcgttgtcttccaaaaaatatgaagtatatgactagcctccggcacctatacactcaaggatgtacagacttggagtgcatgcctccagaactgagaaaagtaactgcactacagacacttacatattttgttgtgggcaatagctcggattgtagtaatgttggagagatacatgacttaaatcttggaggtgagctggagcttggcaaactagaaaatgcaaatgaagaacaagcaattgcagcaaatattaaagaaaaggtggatctcacacatttgtgtttcaaatggagcaatgacatagaaaaggacccagaacattatcagaatgttctaggcgctctaaggcctcatgctaagctacaattgctaaaggtacagtcgttcaaaggaaccaatttcccgacatggatgacagatgtatgtacattcatgaacttgacagagatccatttagttgattgcccattatgcaaggaaattccgaagttctggaagctaccagcccttgaagttctgcatttaacaggattgaataaattgcaaagcctatgcagtggtgctagtgatgtcattatgtgctctgcatttcaaaaactcaagaaactcaagttgcaacatttgaagagcttgaagagatggggcacaatggagggaaaactaggggatgaggcaatatttcctgtgcttgaggatattcatattaagaactgtccagagttgacagttatccctgaagcaccaaaaattggaacattgaagctggaagaaaataaaccacacctgtcactgttagttgttggttctagatacatgtctttgttgtccaaaatggagttgtcaatcgatgacattgaagcagcattaataccagatcaaagctctgtagaaacattagatgacaaggatatatggaatagcgaggcttctgttacagaaatgaagttagatggttgcaatatgttcttccccacaacaccatcgaaaccaacagttgggctttggaaatggtgcaaatatcttcaaaaactggaaatcaaatcctgtgatgtgctcatccactggccacagagagaattccaaagcctagagtcattgaacgaactaacagttgagtcttgcaaaaatctaaaaggcattatgccagtggatggagagcccattcaaggaattgggcagctcctaccacgtctgaaatttctaggaatacgcaactgccaagagttaacagagatatttaatcttccctggtccctcaagactattgacatatatcgctgtcctaggttgaaatcgatatatggtaaacaggaggatagtgaatcgggaagtgcacatgcagagcagctcaccacattattgagcaaaaggatgccagacccatcatcatcagcagcagctgcagcaacggagcatcttctaccatgcctagaacaccttaacatagggcactgtgatagcttcacaaaggttcctgatctcccaccatcgctccaaatattgcacatgtataactgccctaacgtccgatttctatcggggaagctggatgcactcgactccttatatattagtgactgtaagaacttgaggtccttgggaccatgcctggggaacttgccgtccttgacaagtctcagcatttacagatgcaaaagcttggtgtccttgccggatggccctggagcatactcctccctagagacacttgaaatcaagtactgcccagctatgaagtcacttcctggacgcctccagcaacgtcttgatagccttgaggagaaagacttgtcaaacatgcgttccagcgatccatgggaaggtatacattctgctttccatttttctttcttgcgagctgttgatcccttgtgtcctggtggcatgtacagaaaatcaggaatacttcttaacaagctattttttgcctgctgtgttctacttaactaa

SEQ ID NO: 57796 - DNA, 158 bp, Oryza sativa
  Clone ID: PAT_MRT4530_59572C.1
gaggccaaaagctttccccaattttaaaaaaggttcagtctacaggggcgggaaaacataaaagcgggtaattggactaatatccccggcatcatttaaaataagttacacggagaggaaaaaccgaccacataaccccaaaatggacgcgggggccc

SEQ ID NO: 57797 - DNA, 195 bp, Oryza sativa
  Clone ID: PAT_MRT4530_59573C.1
atggtctcgccaccacgtgcaagacaaccagatccagccactgctgctgaggacgacagcgagcccctacctgttggggcactgcccaaggatgtcggtggaatttggaaccaaatcgtgttggcagtgtctaatgagtatgagttaggaagccaagccaacagggccaccaatggtgaaggcacaggtggataa

SEQ ID NO: 57798 - DNA, 1923 bp, Oryza sativa
  Clone ID: PAT_MRT4530_59574C.1
atgcagctcaacccgaaagcaagaactcgtcgaaataaaacgaaacacctctccaatctagttgcaattccaagcctctcgcatgaaaattacaaatttctcagcccggttggcaaccctgatcctaccgaatttatcatcggtgaaacaaatagggttcctttcagattagccaacccaaatctaggtcattggaagaacaccttcatatcttggctatctcttgagaaaaccccacccgagaagagctggaccacgtggttcaagcgcatgtcagctagtaaaagagttcattgggacgaaattagaatcggccaagcactcgaccttaccatagccaattcagccaaggacgaacccctaatggcagccgcctcctatttctggtccaacaccatcaatgccttcttgttcaaccaagggccgatgaccccaactctagtagacatcactatgatcaccggtctagatgtcacctcattggctaaccccatgagtttgaacacgaagaatcagtatgacttcatgaccaagagcataggcggttggtcaggttatgtagcaacatacatgggtcaaggctctatcacccctcgagagcgtgtagcctttctactgatgtggctagagaaatctcttttgtggatcaagctgtggccctacaaccaattggcagtttatagccgaagccttggaaacaaagaagcaatttcctttaggaaaaatccttctcggctacttatatcaaatgctaaacaatgcatcagccaaaatagtcgtccgctcagtagtcggagcagcttttatgatggctttctcaaagaagctcgaatttggttcctctacgaagattcatcgcttctagagaatctatcagactttagatttgaagacatcaaccatgaaagataccaaaagtctagagaagtccttttagctgcaatcagcccatgcatccttcctgtcggcattcatcaaggaagaaatatcaagacgacagaattttctcctcctcaccagagcaatagtaacagaaatatcaaatatgctccaggtctaattcctaatggaggcggaccatctccccctatcattggctttcatgcccccaggacttcaactcttcttcaagggctcatcagagaaccagccgatgccagcaaaaagaaaagaaccagatcatcggctgtggatgcatcagctcctgctccaaagaagaaggccaaactaaagaagcctatgccaaccgatgatctgcctgccctagatccatccattgaacaagctctagatgaagaagaaatcggcgaggatgttgatcaagccgcagataaacctcctcctcctccttcttcccctgtacaacaatcattgagtgatcaaactccatcggctgtagagaggcaccatattgaagaagaagaacaaccagctattcctactatcccagccttagccgatctgttctctttcgaaattaaagactatcttgatgaagaaacagaagaagacaccaccagcaagtctttggctcccttgtctgatgatgtgaagaaaacccttgaagacatctctcatcggctagaagcatcatcactagacaacttggtggtaaactgtgggccgattaggactcggttacacgagatccatgctctaatcccagatgagctagccgatgtccttactctagctatatatcttgagcagcaccaattcaagctggaaaaaagccaaactaagattagccgaatgtcgggagcgcaaacatatatcgaagctacaatccaagccaatcgacagcttgttcatgaagagaaggccaaacttgatcagctatctgagggcccgattaaatctattattgatcggcacaacttgaagaatgcaacgctgagctggatatggaacataaaatgctag

SEQ ID NO: 57799 - DNA, 384 bp, Oryza sativa
  Clone ID: PAT_MRT4530_59575C.1
ccatattattttattttattttcctttaaatcttattttcattttctaatggttaacttaaactgaaaagggaagaggctgaaactgccccaagaaaagtacatacataacggggaagtttttgggactcccagaataccaaacccatgaatcacaaaaacacccaaccattaacaagggaaaaataaagcccaacaacaatgggcatgccaacaggcccgcacttggctgaacccaaagggtgataccagctcccagggggaaacaagaaaaaagccatcgaatttcctaacgaacatcaatgtgaaaaaaccaatcggaacttcacgaaaaggacccacagcctttgaatatggagaacagcagcctgcggccccagcttgg

SEQ ID NO: 57800 - DNA, 400 bp, Oryza sativa
  Clone ID: PAT_MRT4530_59576C.1
atatttttttttttttatttacatcaccggttttttttaaatattttgggcgccttttcatttttacacacttatctttctatatcttactttttctccaattacaaaaacacaggggaacacaaaacacactatttcttgcaagcatacaaaaaaaaaactccaacccattttacaaatttcaccccctccccaaaaagggaaaaaaaaaacctccaaccaaacccaaaggggttaccccccccccaagggggatcaacaaaataccccaacccctttaaaaaacaaaggggttttgaaaaaactggccccctttcaaaaaatgtcacccaccgcaccaatggttttggaaaccgggcccaaaaaacaaccccggggcccccagagccccaaaaaccaa

SEQ ID NO: 57801 - DNA, 1404 bp, Oryza sativa
  Clone ID: PAT_MRT4530_59577C.1
gcacgaggggatttttcagtacagggggattcggtgctcgtccccttccccctctcctctctcccgtgcttctgatgctgctgtcgtccgctgtagcagtagccaccaccttctccatctcgtcggctctgattagatttcttgatgtcgtgttagcctttccctgttcctttagctaaagaatttaacggcagtggggcagagacggattgatgccattgttcgattctttctcctccttttgcttccttttaagcattgcttttcctggccatccttttccattcccatttgttttgtaggctagctgccatagcctttttctcgtcttccagggctagtatctcagtatctccacttgcttctcattcttataatcgtcgtcgtcgtcttcctctgtgatctgtggttgccttctctgcttcgcctccatttctgttcttggctgcttgttcttcttcttgggcgttgttagccaagaaagcgaattcgtttctttttttcttgagcgatttgagctcggttctttctgctttggacagcgattgagtgaatgagtgagtgagtgagtgaactcagggcctttcctgctttcttcatggacagctcactctgcacagctcaaggttctggctgggtgaagcagagaactttagctgctgccgccatggatagggcgtcaagatcaggtgttctttcagagacggcttctttcgccgacactccgaggtccatctattcgtcctgcaatctccagcatcttcagtcacagagtatccggaagatacatgaaggtgccttggatatatcgccacgattctcctactgcaaacctaatgctagtcaggacaagatactgcacagaagattctcacttaacttgccagagcatatgccaggccattactccaggacagtaactgaaagaaatcaaaaggctgcttcaaagtccatcacagatctagttgtggagattgcggcccttgagcaggaagtcgtccgaaaggaattgcatctgctatccctctatagaaaagcatttgatcagtatttatcggagtctggcagtgttacgagtgaggtggatcaagaattgctgaaaaacattgacgagggtgcccttcgtttgaaagacatcaagcaatctgcagccttcaacttaccaatagtctcagatactaaaagtgaggtatcaagatcaccttcaaggcattccagccttgttaacttcttgagtgcatctatttctgaatatgtacccaagatctcttgcaaactatcagaagacattctgagctgcatagctgctgtctactgtaaactcggaagcgtgccactgcaagatagcgaatacataacctcccccagtccttctgtttcatcttcaagtactttttctccgag

SEQ ID NO: 57802 - DNA, 466 bp, Oryza sativa
  Clone ID: PAT_MRT4530_59578C.1
ttggtaacttcagcccaaatgatcagcgcattactgggttaccaggcgccagagcattatcttgtgcagaggggtcattcatgcaggatggatatccaaggtctaacattgacagatcttcaatgaaccctatgactcatcaacgtcctgtactcaaccgtatgccatctggagcacctgtaccaggacatgttcctcagatgctgccggccagacctgatattcacacatttaattgctggaggccttcgtaatgaaatttcacaaattgaactccttgctcgtgggttttcacatgggaaattgggattgccagaagccgtttcaattcaacttgcaacaagaggtctaaacaatttctgttactgaaaggcaaggggtttcttctggcttgtttggtatggccgttggttactctgatgaagttgaggggagcttctgtggcaagttcaatgccaatgctgga

SEQ ID NO: 57803 - DNA, 316 bp, Oryza sativa
  Clone ID: PAT_MRT4530_59579C.1
acaaaccccaaaaagacgcgactcggagaggcacgccctgcaaagagattttaagagaaggactgttagcctattccagatctcacattaaaacacgagtcaatgctgacgaggaggaaaacgttctgaatactatgaatgataagaatcctgtaaaataaaagcgagtgttcgactctactggtaggaagagtatggcgcatgttgagcacacgtccgagattaccgaccaaagcctccgggatgccgtgaggaaagcaaagcttggcaacaaaaaccggaacagcatggcaggaccttcatggtgcttaactgt

SEQ ID NO: 57804 - DNA, 1536 bp, Oryza sativa
  Clone ID: PAT_MRT4530_5957C.1
atggcgcggccgctgcccgtgtcaccctcaacgccatcagagagacgccttgccacatctgaagggtttagccttcccggcgaggtcaaccgggtttcgatttggttaagaaacttgagttgcctacacaaccgcatcctcatcgatattacatcaaatggttcaacaattgtggtaagttcaagatataatggtcgaaaaatgaaattggaaccaatgagtttttctgaaattttcgaagataatcttgaaaggatgaagaatggaatcgaagaaattttcaaagatagtattgaaaggacgaagaatagaatcgatgagattttcagagataacaggaataaaaataatattgtgatgccttcaactaagtctgagttattacaaaacgaacgtaatgttgtggctattattttggatactaatattttgtacgcatctaagaacaaccaaggtaatgaggaagagaagaaagacggacaggaaaaagacctatctatagttccatgcatgctggaagaatattcaattgaccaagcacctataatttctgaagaggagaaaaaatgttcaattgaccaagcgcctataatttctggagaggagaaaaaaggtaatgataatggtgctacaactactcaaggtatgcatatttatgatgtgccaactatgtccactatttatgctacattagagcaacccatagtgaaaacaattgctgaaatacctttatcacaaaacaatttgtttgatgtttcttgtgataaagaagagttgtgtgatgcttcacttatatccgtgccacaactaatgaatgaacatgttaattctatagtagagccaccatgtgttgaatttaaacatgttattcacattggtagcgagaatgaagagcttaaattgctatcttctttaaatacttggggttatattcaatttgatgatctttgtccagtcaactatttagagaagaaattatttgctagatttgaattgccatgcccttctgatgtgatttttcatgttattggcaattatgatagtaaaggagaatataacgttggtttgcaagaaggggagtgttgtggtttttcgactacaaagattttaggatccaaccatatggccatcaagaaatgttcctcaccggatgttgtgatagataaagataagttcaatacactccatgacaaggcgttagccatctcggcgaggtcaaccgggtttcggcacgcttttggtcagatccgactcattgagccttttgatgggtcaaattatgctaagtggaaggctgacgtgttactcaacttaggcatactcgattatgattatgccattagagaggaccgtcctgaggaaccttttagtgttgagcacgattgtgaggagaaactgaagttatatcgtgagaaaactaatgaatgggagaagtccaataagatttctctcatgtacatcaagagtgccatatcaaatgtcattattggtcggattgaggactataattatgttaggacatactctgatttctaa

SEQ ID NO: 57805 - DNA, 4593 bp, Oryza sativa
  Clone ID: PAT_MRT4530_59580C.1
atggctcccgccggtaggcggggcgccaaggcccacaagtggaccacacagccgcagctcggcgacctcgtcctcgccaaggtcaagggctaccccccatggccggccaaggtcagcaagccggaggactgggaccagatgccggttccgcgcaaggtctttgttgtcttcttcggtaccagagagatatttcactgcatagcttgcgtttttcaattctacctctttagcctgtggggtttcagcgctcacatcgctttgccagatcttcagccgtttactgagaatgcaaagagtgaggtgatggatcgatctcggaacaagcagtgccccaaaaagtatatcgacagttttgctgaagctgtcgtggagatctgcaaggcctatgatgatctgccaaaatcatctgaaactacgacctgtatgttgcctgatgatcaaagtgaacaacctacagagcaccttgtaaagtcacccaataatgatgaggctccaagatcggggcaaatggaaggtgatagtcctagtgacaacttaaatacatcagggttaggttcagggactgaggtggacataaaagatggttcttgtgacataagggattcctctctggcagctgttaaaaggaaaaagcctaaggatcttgatcaacccaagaaaaagaaaccggtgacttctaagtcagccatcaatatgcaccttgaacaagactgttcagcaaccactgtccatgcagaaagagagcttgaagaaccaaaagctgaaaaggagatcaatccatcagaattcttgaccttggaccccactgtacaaatagtgtgcgcccttgaagtacccaagaaatctaaagccgcgaaacagtcaaagaatgctgaaagaaaggacaacaaacgtgttaatgttgctgatatttcagggaggactacaccaggagctgtacttgacaccgaacttaaaaggagtgccgagaaggatagcaagggttttaaaaagtctaaattgatgatgaaacaatcagtttccaatgaatcagagaaaatagaccataaacgaataatggtagacaaatctgacaagctgttggctaggaaatcatcttcagtcttctcttccaataagaaacctctccctggtagcgagcagcgcaagctggacaatagcactgatatgcgtccagcaaagaggccaaaattgatggacagggccaatgaaacagttaagacagaagcaaagagcgagaccagcttacatgctgataatgaaaaagatagtgccttgaaaattgaaaaatctattcctgcagaagctgtaagtaactcggttcctaagattggagtgggtgatgattggacccgaagatcaggtagtcttttatcacccctagcaaggctgcactctcagggatcagaaccagcatctggttcaactcagttaagcgctgttgatactgctaaaaaagtctccagcttgaaggagaatttctcgcgtgttggtaagccattggcaaagcccaggagaagagcatgccgctttggtgatgatgacgaggaagaacaacggacacctcctcataaatcttctgttaaatccatccccatgcgtggagtccccacagagaagttccaatcacagacaggggttcgtgggatttcttcatcccaaattggcaatgcttctgcaatgaaatttggtgtggcaagagaagagaaacctaaaagcattgggaggtcacctgtggagcatgagccagattatacttcaccaaatcaagacaaaatgcatggtagactacagataatggggaaaaggtcaaccacaagctcggttgacacttctgctagtctgggtaacaaaactaacctggcagatcgcagatcctctgggcaattaagaatggcagcatcctctgaagtgaagaaaacacaaggaagttcttctaaactattgcaccagacaccggggaacttgcactctcaaaaccctgatgactcggaaaagaatgcactgttgtctaaatcggaaaacagtaaggctaagactaaatctggcacacagataactgcaactgttgagggtcggataagtaccgctatgcaagctgaacggattgggaagatggaccactccaaagagcaaagatcagattttgttgataaagcagcttttgctgaacctaattctgatcctgtcaagtcaatgaagcatctcattgcagctgctcaagcaagaaggaatcttattgcggctgctcaaggaaagtctgatgggttatctgctgataatactgttctttcctccacaccatatggcttgcctggactaagccctggtcctgtttttcacattccatctgcatctagaattattccagagagtgatggcatgcagtttccggactccttttgtgctattactgaacctggtcaacaagttgctatgaaaaatctactggaaattgagcatgaacatggaaagagccccaaaactaggcaatcgagcgattcattgagtggtggaacagatgcagcgattgcacgtgatgctctggagggtatgatagagacgctttcaaggacaaaggatagtatagggcgtgctacacgtcatgcaatagagtgctcaaaatatggcatcgctgcagagattgtggagcttcttgtgctgaaattagagaatgagcctaatttgcatcgaagagttgacctcctttttcttatagactccataactcagtgttctcactctcagaaaggtgttgctggcgtttcatatgttcccaccgttcaagctgcgctacctcgtctcttgggcgctgctgctccaccaggacccggtgctcgtgaaaatcgacgacagtgcctcaaagttttacggttatggcttgagagaaagattatgccagaaggcatacttcgaagatacatggatgatattgaggtgccaaatgatgatgctaacacaggttttctgctgaggcgaccatctcgagctgaacgctctgtagatgatcctattagggagatggaaggcatgcttgttgatgagtatggaagcaatgcaaactttgagctctctgggattctatcatccaatgtctttgaaaatgatgacgatttccctggattatcaccagctatttcactgccagttcaaagtggcaggatgcaagaaaatgaacaagctattgcaccaaattttgttgaggaaaacattaggttaccaaaagatgtgactagtgatgttccaatggaagatgcctctcttttaccaagagataagcaacagacagatggagctatccctgttgtgcatgacttacagcatgaaattgatcgagagcaggcattggctgatcagaatgaacttcctcctctacctgacggtcctccaccgcttccattagatgcaccacctcccccacctctgcctgagggacccccaccgcttccatcagattcaccaccttgccagcctcctttgcctccttcaccaccacctgctacaccgccaccgccaccaccactttcaccatctttgccacctccgccaccacccccacctctaccatctggcccacctcctcagcctgccccaccacccctgccaatccagcccccacctattcctcccccacctgttccatcatctccgtcatcattgggctatcagcctcctgcacccgaatatttcagggcttcaaatatccagaagtattcctggttaaataataaactgattttgatgcagagcaaccaacttaaccagatggcagggaatgcatcaattcaaggaattggaaatatgacaaacttcattcctggtggatcagtgaacactcaagctgcagttaattttaccccatcagtgccaccagattatgggaataacaatctatatataaaaccacaaggttctaatggtaattttcagtttcgaccaactggtgtaccttttcagcaagggacattcagtgcttttccatctgcacaaacaccaccagttcgtccccacactcatcttacacaaatgaacccagtgggccaacaagctgtacctccgtgcaatccttatgctgtacagtcctttccaaataatcaaagtcaatatacatctgacgagcaatggcgaatgacatctggtaacttcagcccagatgatcagcgcaatacttggttaccaggcgccagagcattatcttgtgcagaggggtcattcatgcaggatggatatccaaggtctaacattgacagatcttcaatgaaccctatgactcatcaacgtcctgtactcaaccgtatgccatctggagcacctgtaccaggttattggtttgttgagagtttacatttgcttaataacttcattctgaaggccatggacatgttcctcagatgctgccggccagacctgatattcacacatttaattgctggaggccttcgtaatgaaatttcacaaattgaactccttgctcgtgggttttcacatgggaaattgggattgccagaagccgtttcaattcaacttgcaacaagaggtgcttatgctagtctgttttgtgatgaagatgcacttttgcttatgaaggcatga

SEQ ID NO: 57806 - DNA, 412 bp, Oryza sativa
  Clone ID: PAT_MRT4530_59581C.1
acatcacatgatcacaccaatcgaactgttgttatggacaatagcagcagatgcagagatgctgctggtgccaattcatttaaaaaagataaacacctttcattagaaaaaggaaagaacaaaaaaatatatatactcagccaacaacactctccagccatcaccacctcacataagtcacattagcaacacttgctgtggtgatcatatggttgggagcttgggggcagtagtaggagctacaagcaaaagctatacatatgtgtacattacaatgccccggttttctatcagcgccagattagtctcacgcccatgaaaaacagggcatgttgttgtgatatgagccaaaagctgctactactactctgtatgcgttgttgtgcaactatcttcaaacccatggcctctg

SEQ ID NO: 57807 - DNA, 1872 bp, Oryza sativa
  Clone ID: PAT_MRT4530_59582C.1
cgagctcacccatcctctcctctcctctcctcgcgacagcgccgccccaaaaaccctcaaaaccccggcggcggcggcggcggcggcggagtagtcggcggcggcggcgagatggcgacgcgggtgaaggacgtggcgcggcggtcgagcaagaagtacgtcgacgaggcgctgtaccggcggctgttccgccggggctccacgccgcaggccgtgcgggaggaggtggacggcttcctcgacagccggaagcgcgccttcaagtgggaggtcggcgtctgcgtccgccgcctccggaagcaggccctctaccgccccgccctcaagctttctgaagtcatggcaagaagaggcatgaatcctacagtcagtgaccaggcaatccgccttgatctcgttgccaaatcaagaggcattgctgctgctgagaagtacttcctggacctcccagaaacttccaaaactcatctcacatatggtgctcttcttaactgttactgcaaagacttaatgactgagaaggctgaagcccttatgggaaaaatgaaggaactcaactttgctttcactgccatgtgctataacagcttaatgacactatacacgaaagtcaaccaacatgagaaggtccctagtgtcatccaggatatgaaagccgatgatgtgttgcctgatatttatacctataatgtttggatgagggcgcttgcagctcgtgtagacataaaaggggttgagagggtgattgaagagatgaaacgggatggtcgtgttactcctgattggacaacctacagtaacctggcttctatatatgttgatgctggactgtttgagaaagcagaagctgccctgaaggagctggagaagtggaacactagcaatgatcttgaagcataccagttcctcattacattatatgcaagaacacaaaatttagtggaagttcatcgtgtttggcgatcattgaagcggaatcaaccaagaagggcaaacatgagttaccttaacatgattcaagccttggcaaatttgaaggatctgcctggtgctgaggcctgtttcaaagagtgggaagctcagtacatcaatccacctaagactaacacaaaggcccctgggacagctgaaacgtcatctaatgaatctgatgtcaaggcaaccaaggacaagggcacagatggggaattgaagcatcctaaatatgatatccgggttgcaaatgccatgatcaaagcatatattacagagggtatgtttgacaaagctgttgctgtcaagaagcgtgccaagatgcgtggtggaagacttaacgctaagacctgggaaattttcatggaacattatctcaaggaaggggatctcaagatggttcactggtgcgctgatcgtgcaatcaagaaagggcacagcgctggtaggatctgggtgccaccacatgaagtgactgaaaccttgatggattactttgagaagaacaaagatgtagatggagctgagaaatttgtcgaggtattaaagaaggtacagaaggatttgggcacggtggtgtttgaaccactggttcgcacgtatgcagctgctgggaagaagctccctgggatgaggcaccgccttaagatcgaaaatgtggaagtcagcgaggaaaccgccaagctgcttgattctgtctgtattgatcaatgaacgtgccttagatttggattatgtaataacatcaggatgcatgcaaattgacatggttcttctgcaaaacctgtaatagttgctgtaagctgaaatttagcactacatttacttttgttcctcggctgtttcgacccagtccccagatgctgaatggttggtttgaaatcttctttcagttcccat

SEQ ID NO: 57808 - DNA, 419 bp, Oryza sativa
  Clone ID: PAT_MRT4530_59583C.1
cccacgcgtccgcccacgcgtccgcccacgcgtccgcccacgcgtccgattcctattgctgtcggacttgttgattctaccggaaaggatatgcccctaacttccatttacagtgatgggatgctccaatcactcactagtgatggccagccagtcttcactactgttcttcaatttaataagaaggaggaagaattcatatttaacaacatacctgagaaaccagtgccttccttgttgaggggatacagtgctcctgttcgtcttgattctgatctgactgagagtgacttgtttttcctacttgccaatgattcggatgaatttaacaggtgggaagctggtcaggtgctgtcacgtaaactgatgctcagtcttgtagctgacttccagcaacagaaaacactggccctgaaccc

SEQ ID NO: 57809 - DNA, 246 bp, Oryza sativa
  Clone ID: PAT_MRT4530_59584C.1
atgctgaagaacaccatgaagcttgaagaaaagactaagcagcttgatacggagaacactcagctcttcacaatcaacatgcacctggataggcataaagcacatttcaaacacatcgagaagatgaagacaaaaaggatgatctacagcaatccctcatttcagctcgactacaagatgtctctgcagggagagatgatgtcgttgagctctagtatagctagtggcccaattggggagtcatga

SEQ ID NO: 57810 - DNA, 999 bp, Oryza sativa
  Clone ID: PAT_MRT4530_59585C.1
atgcagtcggaggaggtgaaaatgcggttcggccggtgtccgtactgccgcgccatgatctaccagaaccccaaggccgtcatcttctactgcagcagatgccgcactccgatccgaggcaagaacccggagccgacggatgaggcggagtacgcgctgagcaggctggagatcctctccgccgacaccgcgtcggtgttctccgacgagccggaggacgccgggtcggaccggcgcgccgacgaggtccggccgttgtcgaggcggacgaagcggccgtcgagctcgtctgactggacgacgacgacggattcggagcggagcgaggaggcgttctacacgccaaggaacgcgcaggaggggcggccatggcagtcgccgtcgccggtgagctcgcaggagctcggggcgtccggtggtggtggtggcttgcctcgacctcccgatgagccaggcgccgtcgcggcggcgcgcctgatggacccggcgtttcacaaggagctcctccacgcgctggacaacctccgcagcttgatcgtcaccatcgagcagccgcgcccggcgagcggcggcggcgggagggccctgacgcggcgcgattcgcggctcttccgccggctggagtcgcagctggagcgggcgcttccgccgcaggacaccgcttccacgtcggcgtcgtcatccagctgccgcggcgaccgcggcggcgggcgtccgtcggcgcccgcgcggcgggagggcaccgacccctgccgcccggtcctgggcggcgcgccattcgtgatctgcggcaagtgctcggagcttctgcggacgccgccgccgccgcggccacggaggaggaggtggaccaccaggatacggtgcggcgagtgcaacgaagtgctcgagctgtcccttcccgccggcggcgtcccggctcagcaccggccgatcaggacgtgctcggcgccgctggtctccgaccaccaccggccactgccacgacggctggagtga

SEQ ID NO: 57811 - DNA, 683 bp, Oryza sativa
  Clone ID: PAT_MRT4530_59586C.1
gtggtggatgataccatgagggaactaagtgatgcaaacatggatgaagatgtgcaacaccatgatcaaagagttgtttgtagttctgtcttgatggcttctccattggctgttggtgattatgaggatgtaatgtccagcgggagcacacaagacatccctgaagtttgtgatgagacatcccagcctggtcaggagcatgatcagtctgatgggtttgaggcaaaagtaatttctggggacaaggatctctacaccgaagaacacgtaaggcaacagctcgaaacattaagaacaataacagggtacagatctccattttcttcgacactcgaaggtgagctggctgccctttacctgttcatcggagtggagccccctgtcagctcgaggaatgcctctgacctaatggagatcaatgcaaaactccggctgttgaaatcaatcgttggtgttgattgaattatctcgagggcgatcaatcaggacgtttttggttttgattatacatctatggatgcatatcatacagtttaacaattctctgtacatccaagacagtcgatcgagactgtttatcaatcagtagagtacactgcatctgcctatgtactttgtatggagagacggttcttgttctgtttaatttcttctggacataaaaaaaagttactgtccaacgc

SEQ ID NO: 57812 - DNA, 262 bp, Oryza sativa
  Clone ID: PAT_MRT4530_59587C.1
gcgtcgcctgcgagctatcgccgccgcctgtctggcgcatgcttaggagaggaggcacggtacactgcgccagggctgtgtgacgaagtgtgagagcgaccgatgatgcttaacgagagacggatgacatcgcatgtgaggaggcctatgtcctttttgtacagaaacgcctatctacgatatccaagggtccttggaaagatatgaagcgctatgatgagggaaggcacctgcactgaatgagcagccgtgttgatcacta

SEQ ID NO: 57813 - DNA, 199 bp, Oryza sativa
  Clone ID: PAT_MRT4530_59588C.1
caataccatttcccccatttcctcccctcccctaccctaccatggacttctccggcggcagcggcggcggcggcgtcacgtcggggaggctgcaagcggagcggcggctccagatcacccacaagctccttgcggcgccggaccacagaggacactggcgcagatccgcgagccgctggtcaagaaccagggtgccacc

SEQ ID NO: 57814 - DNA, 642 bp, Oryza sativa
  Clone ID: PAT_MRT4530_59589C.1
gtcacaaccaccccacggtaaaccctcatgcctcgtgcatcacctagtgacctagaagccggcggctccctcgattggaggcgtgcaccgccgcattcttgccggcacggtcggcgtcgcaccgccaccgagctccccgtgggcagacgtaattccaatgcaacctaggctatattttcgcgaaactagcatcactaggaaccctagatcgtgaaatcagagtcggatgcgcttgttttggccgccatgctcgctgcgtgcagtcatagcctgcgcctggtggccgccacgtctcgtcgtcaccggcggcgagtcaccggcggtgtgccgccgctttcctcgcttctcgtgcacactccgtacaaatgtcacgaaaaattctagaaaaattggacacatatttccaatattattgcacctaagtgtgaaatgttatctttaaattcattatattttagcgtaacaaaaaatacaaattatgacagattttaccaaaaaagacaaaaattattttaccaaaaaaatgtcagatttttctttttttttttgttatcactaaaattaataaattggaaaatgagacttttgcggattggtgttttactactgggagtaaatatcttggttttttatagatttttt

SEQ ID NO: 57815 - DNA, 260 bp, Oryza sativa
  Clone ID: PAT_MRT4530_5958C.1
gtatattggagcatgctgaggtgaatgcatattgtgttcaacaaggtagtactcggcattgactgatggaaagggggttaaccatagatgagcgattctgtttaggggattattggacttgtcgtctaagacaaaaacgtgtaatacgttacatttctctaagattataagagtcagatccaataacccgtaatactcatacatacgatgatagagtttttaattgttagttgatgatccaaaatggcatgatgttaaag

SEQ ID NO: 57816 - DNA, 1125 bp, Oryza sativa
  Clone ID: PAT_MRT4530_59590C.1
atggctgcggcggtcgtcgtcgccggggaggcggcggctgcggcggcggcggcgggggcgggagggaagaagcgcggggcgtcgaggagctggatcctgttcgacgcggcgggggaggagcgggtgctggacgccgacaagtacgccatcatgcaccgcgtcgacatcaacgcgcgcgacctgcgcatcctcgacccgctgctctcctacccatccaccatcctcggccgcgagcgcgccatcgtcctcaatctcgaggttttgctccgggatccattagatgataatgtgattcctgtagtagaggagctccggagacgacttgcaccttcaagtgccactcaacatgatgtggaaggtgctgaagaagatgaatctccctttgaattccgcgcactggaggttactttggaagccatttgcagttttcttggtgcacgcactactgagttggagagtgctgcttacccagctttggatgaactgacatccaagattagcagccgcaacttggatagggtgcggaagttaaaaagtggtatgacacgattgaatgcgagggttcagaaggtgagagatgaacttgaacaattattggacgatgacgatgacatggctgatctttacttgtccagaaagttggctggggcagcttcccctgtcagtggctctggtggaccaaattggttcccagcatccccgactattggttcaaaaatatcaagagcaagcagagccagtgccccaactatacatggaaatgaaaatgatgttgaagagctagagatgttgttggaggcatacttcatgcaaattgatggcacattaaacaaattgacaacgctgagagagtacattgatgacacagaagattacattaatatccagcttgacaaccaccgtaatcagttaattcagctagagctattcttgagttctgggaccgtatgcctgtcgctttactcattggttgccggaatttttggtatgaacattccatacacctggaatgacaaccatggatacgtattcaaatgggtggttctcgtgtcaggacttttctgtgccttcatgttcgtctccattgttgcgtacgcacggcacaagggcctcgtcgggtcgtga

SEQ ID NO: 57817 - DNA, 751 bp, Oryza sativa
  Clone ID: PAT_MRT4530_59591C.1
ggcacgagagaaagttggctggggcagcttcccctgtcagtggctctggtggaccaaattggttcccagcatccccgactattggttcaaaaatatcaagagcaagcagagccagtgccccaactatacatggaaatgaaaatgatgttgaagagctagagatgttgttggaggcatacttcatgcaaattgatggcacattaaacaaattgacaacgctgagagagtacattgatgacacagaagattacattaatatccagcttgacaaccaccgtaatcagttaattcagctagagctattcttgagttctgggaccgtatgcctgtcgctttactcattggttgccggaatttttggtatgaacattccatacacctggaatgacaaccatggatacgtattcaaatgggtggttctcgtgtcaggacttttctgtgccttcatgttcgtctccattgttgcgtacgcacggcacaagggcctcgtcgggtcgtgaaccttgcccaaactgtaaatttgagctagagcaaccttgcgtatgattaatctcttgtaccaaaattcatcagtataaaattgggatgatgaaaaagaacaataaataggaaaaaaaaagagtaaattccaaagagataaaaaaaacatataaaattaaaacgaggttaaacacttataggtgaaaaaaaaacaagctggtagcctggacaaatataaaaaaaaaaaaaaacctgcagcccggggatccac

SEQ ID NO: 57818 - DNA, 553 bp, Oryza sativa
  Clone ID: PAT_MRT4530_59592C.1
gcggctgcggcggcggcggcgggggcgggagggaagaagcgcggggcgtcgaggagctggatcctgttcgacgcggtgggggaggagcgggtgctggacgccgacaagtacgccatcatgcaccgcgtcgacatcaacgcgcgcgacctgcgcatcctcgacccgctgctctcctacccatccaccatcctcggccgcgagcgcgccatcgtcctcaatctcgagcatatcaaggcgatcattactgctgaagaggttttgctccgggatccattagatgataatgtgattcctgtagtagaggagctccggagacgacttgcaccttcaagtgccactcaacatgatgtggaaggtgctgaagaagatgaatctccctttgaattccgcgcactggaggttactttggaagccatttgcagttttcttggtgcacgcactactgagttggagagtgctgcttacccagctttggatgaactgacatccaagattagcagccgcaacttggatagggtgcggaagttaaaaagtggtatgacccgattgaatg

SEQ ID NO: 57819 - DNA, 306 bp, Oryza sativa
  Clone ID: PAT_MRT4530_59593C.1
ctgacatgcacttttgtttgctgaccaacaaacccaaccccgacccgcgcctgcgcccgccagcgaggtcgtcgccggcgcctaagctctcattcatggcggcggaggcggcctacggtggcggtggtgggtaccggatgctgccgcaggcggagatgccgatcggtttccggttccgacccaccgacgaggagctgctgctctactacctccgtcacatggctatgttgggcgccctagccgcagtagtcaggcttgtggtccaactcttccaccaacattcgtggtgacggaaccagtcacctt

SEQ ID NO: 57820 - DNA, 285 bp, Oryza sativa
  unsure (1)..(285): unsure at all n locations
  Clone ID: PAT_MRT4530_59594C.1
tactgtggttcatcctctactacttctccctcgccgtcnccactaagaccttcaagggcgtggcgctncccgggcgcggctgacacttttaacttgcacttctcctgctggaacatcctgacgctgcagcatccctcgctgacgtggtcgcgcgtgcgccatagcgtggtccacctcctggtcgcgctcgcctacgacgggacgggcaccggggatctcttcctggacgactgctagtctccggagattgcctggccactgagcatgtggagccagatcaaattc

SEQ ID NO: 57821 - DNA, 297 bp, Oryza sativa
  unsure (1)..(297): unsure at all n locations
  Clone ID: PAT_MRT4530_59595C.1
atgggggtnaaggggaggnngggtgnggagaaaggnggcncgcagngaggggctaggttcgccnngggcaaggcccntggttngntggtgaggaagcctaccggggcagcctgggccctggccatggccgccaaactccgggagcggccgctgtcccatggatggatgacggcggcggtgtcccatggcggccgctgtctcctcagcaccgatgccgatgatgtcgtcctcagagacgtgataaggacattagagacgcaggaggaaggggacacggcgatgggaagatcctcatga

SEQ ID NO: 57822 - DNA, 828 bp, Oryza sativa
  Clone ID: PAT_MRT4530_59596C.1
atggggcagcaaagccgacgcttcctccggatccggcacctcctcctcccctcccgtccctcaagctcaacaagcagcagcaggggcgcgccaccaggaaagcgctcgcacgaagaagcctcgggagggcgggccggccaaagcccaagcccaagccgaaccctcgcaatcgcagctatagcccgcgcccagcaagaatcgtccttcaccgcgaaaggccatgccaaaggtatccaaggcgaaggtgcaactgcagctcggcgacggcgagccaaagaaaaagccagccccgacctcgtctcagaagcgcaacaacaagaaaaagcgggtggcggcattcgagcgttgtggtccaaggccgacgagcttaggattttggaggccatggctaaccacgtgaacacccatcgtagcactctgtgggatacatgccgtctgtttcccgcccttgccagcagcctcgacaaaagagacgctgacctgcccgatctcgccgacaaagtccacaagcggaagagatgccattggaagggtgtttttactgtacctcccacagcatcgtcgtctggctcttgctgtgcgagcgacggcacctcggtgcctctttcgtcggcggcgagaagagctgaaagagagaggaggagacgggcaagcgtcggcctccgtgagggcgtcctgaaggtgaaggggcgagccaacctcaccgtcgacgccaaggacaagctcctcctccagctggagaggcgagacgccgagagggcaaagacctcctcggccgcaccacccacaagacatgtcatcgctgctccggcagtccggccaaggtga

SEQ ID NO: 57823 - DNA, 1957 bp, Oryza sativa
  Clone ID: PAT_MRT4530_59597C.1
gcccgggacttcctggctggacccacgcgtgcgtgttctagatcttgaacggctttactaaattttgatacaactcaagatttgaaactctaggcacaagccaagcatgaacataacaattcagtcagctaattattacagttacaggcagagcaaatatgcttctacagagcaacctgttaaaaaaaacaaaagaaaaggagaatgtagggatacagatacaacacaacagcatctacaaatcagggaacatgtctagaaaaaaaacattggttttctaatgactacaagttaatagggcataaatagcaaacaacaggatagagcccccagctaaatttggagggggcccaatttgttacaataatcgataaccatgctttcgcaccgatgatttcattcgcaggccagcttggtgtcgaaactactcaagcagattgcaaaggcctggaaggccgaaagggggtaacgatagtccattgtgaacatatccttcgcaaccttaccaaattgtagtatgaccttgtcatgatcaggtggaggcggcggggcaggttgcgatggcgtcggggctccagcagcaggctgtgttgcagcaacaagctggaagttcttcacagacgcgacggttaccctgcccttgaagttgaggcaccagcactgcaactgctcgtgccatcttggggccttgttacggagaatcaatggcctctccttggactcatcactgtcacccaatgcctggcctccgaccatggggccacctactgagatgtcagaatatctgctactgctgaaacggatagagcggtccataatggatgacttggaaaaggagatgctgccaaatgactcatcaagagagcgtgcaagcacactgtctggctggcatgggacagtgccaccagcctcaagcgatgaggcagggattgagtgcatcacacagttcatccgcctaggaccccgagtccccaagacattcagttcatatgaaacttgagctatgctgtaggtgctggaagggttctttggcgacaccttcctggagtagaacctacggcttgttttccctgactgtgaaacattggctgtgttgcatggaggttgggtatcatatattacaaactttgttccgagaagatttgacctcaattttccaatgtacatgttgcttgacctagatgtattgtcagcactcataaatattgtatattctgtacaggttgcacgggagtatcttttcgccgataaaaggaacttgccactttcaacgagcacagctgagctaagacatagatataggttgtaagtttgggtagatttatcccttttaatgaagcactggatggctccattccggggcccaggctgcttgagggaaacaggaaaagtgatcttcccgcaaaactcggggttcttgacgatctctctacacatgtccctccatgtccggcatacggcggcgcacgcgacgacgttcttcctggacggccacgccgcctcgctggcctccagccgctcgatcacgtcccggagcaactccggcggcaggttagcccagcagctgctctggaccacgtcggcggcggcggcggccgcgtggccgtcacgcagctcgtgcaccgcgctgtgagacctccccctccggtgccccaccagcctcacctcgaaccctcgcctggacaggctcccgaacccgtcgcgcacgtcgcggacaatgctgcggaacgacatctccgcctcgcctcgctccgaagctcaaaatcaagaaccctaggcgcaaccgctcgggggtggcgccggcggcggctagcggtggccgcgggggggggggcggggcggggggaggatgcgggggggacggaggaggaggctggcgccggcggcggctggccctcgcccccggggccgcggcccggaggcggaggaggcatggggatcggaggaggaggaggaa

SEQ ID NO: 57824 - DNA, 197 bp, Oryza sativa
  Clone ID: PAT_MRT4530_59598C.1
actgaaacaaaattctttatggcaaggatcaaacatggaagttattatccatagctcacaatcaaccatgacatatataacaaagagcaattaaaacatatagtgttacaaaaacaaacaaatgggctataactcggtagcatgacatgccttatcgttctgatacaagtgctggataatatacacaataaacaatt

SEQ ID NO: 57825 - DNA, 441 bp, Oryza sativa
  Clone ID: PAT_MRT4530_59599C.1
ggagaaatggcttggaagcacatggaactgattggtgctttattgcaactcaacaaagttcatcaaaaatacattgcacatctcccacaacaggcagccattacgaaattttgatacaactcaagatttgaaactctaggcacaagccaagcatgaacataacaattcagtcagctaattattacagttacaggcagagcaaatatgcttctacagagcaacctgttaaaaaaaacaaaagaaaaggagaatgtagggatacagatacaacacaacagcatctacaaatcagggaacatgtctagaaaaaaaacattggttttctaatgactacaagttaatagggcataaatagcaaacaacaggatagagcccccagctaaatttggagggggcccaatttgttacaataatcgataaccatgctttcgcaccgatgat

SEQ ID NO: 57826 - DNA, 1165 bp, Oryza sativa
  Clone ID: PAT_MRT4530_5959C.1
gcatccacgacgagcacatgatcaccgacaacccaccgcccctagcggcgggtgcagagctttcactcgttttctgcgagaggttagatggcctgagaaatttcgactaggaacaatagagaaatacgacagaagcaccgaccctgaggagtttcttcaggtctattccacagtactctatgctgccggagtagacgacaacgcattggcaaattatttgccggcggcgttgaagggatctacacgttcatggctggttcacctcccaccctacttgatttcttcatggacagatctgtggcagcagttcgttgctaacttccaaggaacatacaagcgccacgcgatcgaagacgacctacacgcgttgaagcagaatccgggcgaatcattgagggactatattcggcgctttaatgagtgcagaaatacgatccccgagatcaccgatgcttccgtaatccgcgctttcaagtctgatgttcgagatcgctacactacccaggagttggcgacaagatggatcacgactgctcgtaagttattcgagattgtcgatcaatgcactcacgcggacgacgccctgagacgcaagaacgacaagccgaagacagggggagagaagaaaccagccaaggatgcacctgaggcaagcaagaggaagagtcgcaggagtaggaaaaggaaagctcaaacagaggtcctcacagcagaatatgctgacccacccaagcacctagacccacaagatttggttgagaaacttgagttgcctacacaaccgcatcctcatccatattacatcaaatggttcaactcttgtggtaagttcaaggcatctgagaataaacaaggtaatgggaaagagaagaaagacgaagaggaaaaagacctatctttagctccatgcatgcttgaagaatgtttaattaaccaagcacctataatttctgaagatgagaaaaaagaggaccgcatgcatataagtaattctctatctagttcctctagttgtttaaatgagttacaggttggtttgcaagaaggggagtgttgtggtttttcgactacaaagattctaggatccaatcatatggccatcaagaaatgttccgcgcaggatgttgtgatagacaaagataagtgtaatacgctccatgacaag

SEQ ID NO: 57827 - DNA, 2213 bp, Oryza sativa
  Clone ID: PAT_MRT4530_595C.1
agggcatccgccctcctctcctcgccaaatccatgctcaatcacctcaggctaccgcagctgccatccacgcccacgagcccagacgcattcacccttccgcgccgccgacccacacttctaccaaggacacgctaccgccgccgccgccgcaaatcctagcgcctcccgaggctgctatcgccgcggcttcgctcgccgggtgccgtggtgtatggtgcagccgcggcgaccgtggatacgtaaccaacgacatcgaatatcagaaattcgtccaaatcttagaaaccagcctccgcaaagggaagaactcccacggggtcaccatgaccagcccctataagctcgtgatagcgctccagctagcccgcctcggcctctacatgatctagaccgagttccctgcatcctctcctgacgacatcgacgctgtgagccccaacgccgtcgagatcgggagcaggcccttcgggggggacggggcaatttcggtcatctgtgcactctcgagaggtgataaggagatacaatagatcccactggttggttcgagaatacagcatgacatcggtcacagaaggcattgatgcaattgcaactactagagtggttgtcactggaagatgttagcgactctaaacatgctttgactggtcactccttcagccgggcattcagtgggagtggtgccgcactggatattgttgtttccagtgtgcgagcttacctgagtgccctgaacaagatgtccagttttgttggggctatcaaggctagtagtgaagtatctgaaagccaaagagttcaaaccacagaatgagtcttgacttccttttgggttttcatatccgatggttctatgtttcacattcccagcaaggagtatgtgcttgttgaaacatggtttttccgtccagaaaaaacatggttccgtttagtgcatctggaggatgttctgggtttcttggtggagcctgacttaaggttgaacatccaggacgttttgggatatgcagtgtataattcatatttgaaaaccgtatttacaataagacaataataaataattgtttgacaaaaaaaaaaaaagagacagctaaaaaagctgatgatgatttagaacacatccccacggaacttcaagaatatagcatgacctcggtcacagaaggcattgatgcaattgcaactactagagtggttgtcactggagatgtcagcgactctaaacatgctttgactggtcactccttcaaccgggcattcagtgggagtggtggcgcactggatattgttgtttccagtgtgcgagcttacctgagtgcccatgaacaagatgtccagttttgttggggctatcaaggctagtagtgaagtatctgaaagccaaagagttcaaaccacagaatgagtcttgaccctccttggttttcatatcggatggttctatgtttcacattcccagcaaggagtatgtgcttgttgaaacatggtttttccgtttagtgcatctggaggatgttctgggtttctttggtggagcctgacttaaggttgaacatccaggaagttttggggtatgtagtgtataattcatatttgaaaaatgtatttccaataagacaataactaaataattgtttgaccctgacgttgatggccgtaatgtacggccacacccggcagccagccgacgccgagctgctgcgaaggccgcaacgccgccgtgctgctgctgctgctgatccgccgccgcacatccgcaacgcaagtgtggtcgaaaacaccgagcctgatgtcctgttcgcgtatactccacacgatggtttgtcaccggagttcgacgatgacagcggcggcgttgctgattattttgcagccgatgatgacgaagcttacagcaacggtggcttcggcgcggtgccggcgttgtccgaggccatcgttagcatgccggagttgtccgtcggcgaggcgagggagaagcagtgtggggtgtgtctagaggggttcgaggagggtgacaagctcaggaagatgccatgcgagcactacttccatgagagctgcgttttcaaatggcttcaggtcagccgtctttgtccctactgtctcttcgccatgcctgcggctgaggaggaggaacataacaatgatgatgaagaagaagaagacgaagcaatgatgtgcatccgtttcttgttcccagagtag

SEQ ID NO: 57828 - DNA, 458 bp, Oryza sativa
  Clone ID: PAT_MRT4530_59600C.1
ccacgcgtccgcggacgcgtggggtggcaagttccttttatcggcgaaaagatactcccgtgcaacctgtacagaatatacaatatttatgagtgctgacaatacatctaggtcaagcaacatgtacattggaaaattgaggtaataacccaaaataatggcaactttgtttagagaaggtacatcgtctaagtgttttaatggtataatctgatatatttactgtgttggacttttaggtcaaatcttctcggaacaaagtttgtaatatatgatacccaacctccatgcaacacagccaatgtttcacagtcagggaaaacaagccgtaggttctactccaggaaggtgtcgccaaagaacccttccagcacctacagcatagctcaagtttcatatgaactgaatgtcttggggactcggggtcctaggcggatgaactgtgtgatgcactcaat

SEQ ID NO: 57829 - DNA, 408 bp, Oryza sativa
  unsure (1)..(408): unsure at all n locations
  Clone ID: PAT_MRT4530_59601C.1
ggccaccggaagaggacttttgggatgcccatttgccgaatccttatgaacaacgggccatggtgcccacatctgatggaaaggaacgagatggtttgcgttgtttgtggcttgcaggaccagagctcttgcagaatcagcgatgatacattcaacatgctgaagaccatgctgattgaacctatgataaggattaaatgctttcatgtgttgtgacttgtggcagacagcccttggcagcacccgaggagccatgctgattaactggaatggcgtggtgccaaacctgtttnagcatgccccttgattaacatgtgacacttgggaagcacaacctgggctgcctttgtttggagtttttttttaggtgccttgttctcatgcatattggtcctatgaaaaaaaaaa

SEQ ID NO: 57830 - DNA, 203 bp, Oryza sativa
  Clone ID: PAT_MRT4530_59602C.1
ctcgagctgatctactagctacctagcactcttatgtttgtcactagcttttgctcgatcaattacaacgatggcgaggaacgcagctctcgctctatcagggtgccttctgggggcggctgagacgagcgcctccacctactgtccggcatcgtctacaccaaagccgaagcaccagactcggagcattgcttctcctaaca

SEQ ID NO: 57831 - DNA, 106 bp, Oryza sativa
  Clone ID: PAT_MRT4530_59603C.1
cacacacatccgtggagggaagcagaatattgttgctcagaatgggttccaggatatgaatcagatgttgaatgggtctcagttcgtggccggtgcattgcgcctg

SEQ ID NO: 57832 - DNA, 390 bp, Oryza sativa
  Clone ID: PAT_MRT4530_59604C.1
atgacgtcaatagcagatggcagcctcggacacagggtggcgacggctgattcgctcctcgccgagaaggaagaagacgccggcggatgtggccgggagatgcggagcggaggcggcagtgccgtatgtggccggccgggagcgcaggcggcgacgcttccgctgggggagcaatctcagtccgaagcagcgacggcggcagcacgattctctctccactcccttgacgccggcggccgcaagcaggaggccgcggatgatgctcgtcgtcgtgccgtcatgccgccgcatcgtcctccactgctgtcaactgcacgggtagtactagtgtgggagagagataagcctctccggcatggggcctaccaatggcaaggcagattgggatag

SEQ ID NO: 57833 - DNA, 976 bp, Oryza sativa
  Clone ID: PAT_MRT4530_59605C.1
ataaagcgctgcagccgttctcgcagggggttgccgatgccgttgtcttctctgccgcggcaccacggggggcaccccattcgtgcgaccctgttcttcccaggcgccccggctccaaaggccttcggttcatttcggttcctggcgacttgggtggctgcgcctcggccggtacatcgcttggtgtgctcctgggggtcggccctctttgggccgggtctcctgctgtggcgccgcgccgccccggtgccgcgggcacggatccaaaggctttggtttcaaaaaattaccaggcgacttgttttgctgggcctcgtcttgaagatggcaagatgtgttcttggtggatggtagacattggaccggatcaccagcttatgtgcaactactacacggtgaggcaggatggctccgcgaccttcatgaggtcgtgggttcttcagggatcaatggacggccgtagctggactagcctgcatgtccacgaagacgaccagaccatctgccagcctggccagttcgcgtcgtggccgatcaccggccagacggcgttgctgccgtttcggttcttccgggtcatgctgacggccccggcgaccggcgtctccaacacctggaatctctgcatctgcttcctcgagctctatggctacttccggtgattgggacagctttgctgcacacccctgagaagagatcggcagtgagcaatgatctagctaggtggctctgtaatccggtgtgttcatatctgcactagtaaagaacttttcgttttagtttgctttggtcactttggttttttttttctttgcggtataattaccatagaaaaagtgaataatgcttatacgtccttgtaatacacatgtgtcatctgtaagttggtacaaaaccgtgattacacgaggaatgcttggacgaaggatcaacgagtgaaaccatgggaatcatagaaaaaaaaaaaaaaaaaaaa

SEQ ID NO: 57834 - DNA, 345 bp, Oryza sativa
  Clone ID: PAT_MRT4530_59606C.1
atgattggccaaattcatctcctcaatggccaaatttggctatcccaatctgccttgccattggtaggccccatgccggagaggcttatctctctcccacactagtactacccgtgcagttgacagcagtggaggacgatgcggcggcatgacggcacgacgacgagcatcatccgcggcctcctgcttgccgccgtcgctgcttcggactgagattgctcccccagcggaagcgtcgccgcctgcgctcccggccggccacatacggcactgccgcctccgctccgcatctcccggccacatccgccggcgtcttcttccttctcggcgaggagcgaatcagcc

SEQ ID NO: 57835 - DNA, 597 bp, Oryza sativa
  Clone ID: PAT_MRT4530_59608C.1
atggacttggtcttggaggacgccaggaatatgctcaaggaccagcacctcaatatgctgtcatctgtccacccgcagcggcaggaatcgacagatggaagcggcaacggccttggtgcaaggacgcccgcgggacgatgggcggacggggttgccgccggcgatggtgaagatgagcgctgccggtggcggctgcaactggcgaagggaaacgcggcgacgacgacgaggacggcggcagcggcaagaaaggagccaactcaaccagggccagggatcctggacttccggcgccggcggctggaacggcgagaatcagacccgaggttcggcggcggcgcggcggtcacgcgcgtcaaggctcccagccctagcgccaacgcctgcctcccgggacagcgagcaaagcaaaggctggcgaccaccccatcttgtgtggttctgggtgtagcggcagagaatgagggcacagacgacgacggaccatggcagcaaggcgggcaaaaaggaggtcaaggtggagttgctaacctcgggtatgattggagttctctcatggatatctccgctgattttatttgggtggatagagtctaa

SEQ ID NO: 57836 - DNA, 396 bp, Oryza sativa
  Clone ID: PAT_MRT4530_59609C.1
atgggaccgacgggcgacgcaaccccagcgtgggcgcgcggcaccgcgtcagtccctttagccagccaagctcatcgtgcggacccgcttgctggtcatgcaagaccggcgtgcttgcgtcgctacaactgttggtcggtcgcgcgtggctggctcacgccaccgcttggccggttcgcgatgttgcgcgtctggggcgtgggaccgacgtggtgccgcgtttcccagctacgggacaaacgcggtgccgcgtttccaagctgtgggaccgtatcggtctcacgcgttctagttggccactgcattgacatgctttcgaggcgcgggaccgtcgtggtgctgcacttccgacctatgggaacgtggcggttccgctcacccgtgctgcaagaatga

SEQ ID NO: 57837 - DNA, 873 bp, Oryza sativa
  Clone ID: PAT_MRT4530_5960C.1
atggtaggttacatctcttatggacatgagataaagttggatgggagacaaaccgtagctgctacatcaccttccacagatgcacgtgatgacagtactttggtgcaacaagtgctaagttctcaaatggagaaagcagagcaatggcagtaccacgaattatttgaaacaaagtttgtggttaaggatagagcatgtcgcactataatcgatagtgagagttgcaataacttgatgagttcagatttggttgagaaacttgagttgcctacacaaccgcatcctcatccatattacatcaaatggttcaactcttgtgataatcttgaaagaatgaagattggaatcgaggaaattttcaaagatagtattgaaaggaagaaaaatagaatcaatgagattttcagagataccaggaaagatactattgtgatgccttcaactaagtctgagttattacaaaacgaacgtaatgttgtgcctattgctttggatactaatattttgcaggatctaagaacaacgaaggttggtttgcaagaaggggagtgtagtggtttttcgactacaaagattttaggatccaatcatatgaccatcaagaaatgttcctcaccggatgtgatagataaagataagtttaatacgctccatgacaagttcaacgcattttcctcaaccgcgttgccctatcgccggggaaccaccgcccacagccgaaagctggggaaggtctcgacgcccctcttcctcagagcccacaaccggtcgacgtggggctgttcggcactaggaatgtgtggtgttggtttaaatcagaatggagtcaaagatcagaatggtgttggtttatgtgtggtgttgggattttga

SEQ ID NO: 57838 - DNA, 251 bp, Oryza sativa
  Clone ID: PAT_MRT4530_59610C.1
acggcccgtccttttttttttttttttttctaacccagccattggacaacattagttgggtaggatatactaatacagaagagattgtgcaagaacctctgaacgagaaagaggtaaccggcaggagttccgagcccaccagtttggcctgcccggcaacgaatgcagaacgcccacccggttcaggggtcctgggcgtctgaagcatgacacatgattggcacacacacgaacgaacgcatgcattaatg

SEQ ID NO: 57839 - DNA, 224 bp, Oryza sativa
  unsure (1)..(224): unsure at all n locations
  Clone ID: PAT_MRT4530_59611C.1
atggccgacacccttcggcatgcatttaggtcaagcacgtccacgccatccnacattagcaatgaccatgacctcaagtttgggcatatccagataaagaaagggctcttctccttgttctcgtcgatttggatgatcgagggaagagatcgacatttcctcttctccttgttctcgtcggcgccgtcttcctcaactgctgttgcctcccttccagcaccaag

SEQ ID NO: 57840 - DNA, 371 bp, Oryza sativa
  Clone ID: PAT_MRT4530_59612C.1
tcgtcggcgttctgaggcgcgtacatgctcatcggcggtagaggagacagatactggctgacgagaggtgactactagctatgctactgaccatagctgatcctggctcaggtggggacactaaaataactagtgtccagatttcgccaggcagcatatgacaccagcataaacgatgaagatgcgcaggttgtatatctgacaaagacacaaggggcgacccggtatatacgaaccaggctcacgtacgcgtaccatgctgaccctatagcgagtctatatgagagacctgaagtaaaatgagtgatacgtgttccacagcgaaatgactgataaaacacagttgcaaacaaaataaaaggcctaggcat

SEQ ID NO: 57841 - DNA, 486 bp, Oryza sativa
  Clone ID: PAT_MRT4530_59613C.1
atggcgccggggacgaaggcggtggcggcggcggcggggaggagggggtgcatcaggtcgacgcgggggccgtggacggtgcggcggagggggcgtggcggcggggtgacgacgtcgctgcggcacccgacggcgcgggagcgggagaacaaccggcagcgggagcggcggcggcggcaggtggcgacgaggatctacgccggcctgcgcgccggcgccgggtacgcgctgcccaagcacgccgaccagaacgacgtcctccgggcgctctgcgccgaggccggctacctcgtcgacgacgacggcaacgtctcgcgccgccacgacgagcgtttagccggcgccggcgccggcggaggcggcagctccgatcagctgcaggtgtcctcctacagtggagcaacagaggcagcagtggctatccagcatcaggagcaggagcaagagatatcactcgagctgacactctcattcacctacatgtag

SEQ ID NO: 57842 - DNA, 369 bp, Oryza sativa
  Clone ID: PAT_MRT4530_59614C.1
atggagaggacagggagacaattagagagggacttagaggcatggaggatcagcaagggtgtccaagtcaagatggaggcccaaaccatgtcgacttcgaggacatttcagagttcaggaccagtctgcactaaaacggaggcccatgtcgcatacatgcatggattaggacattctttatatggatggaaagggattagccttctcggcgaggtcaaccatgcttcgacacggttgataaccagaggagacgtggtgctgcgattgcggggctcaagagcgtgttcgttcagaagccaaatcgatttgtatcgcaactccacccaattgtctgtctatcagaacctttcaaaagatcaggaaccctag

SEQ ID NO: 57843 - DNA, 1895 bp, Oryza sativa
  Clone ID: PAT_MRT4530_59615C.1
atggcgcgctcgacctccctcaccgaggcggaggcggggatcacctgcttcgcctcctccctcccgggcttccgcggcgtcctcaagcaccgctactccgacttcatcgtccacgaggtcgcccgcgacggctccgtcgcccgcctcacctccttcgatctccccgacgagtgcgtggatgtgagtgaggaggacaaggcggcgccgtccgccgacgcggaccactcgcaggccctcgagtcgttccgtgcgctctgtggcgatgcggattgcgacgcgttgaaggggctcctcgagaaggcgtccgcgggggctgaggctgatgtatcgccggttattctctcgccggacgccgataaggctcatcgatcggaggtgcataatttcttcaagaggagcttcaagtttttggtcaccgacacggtcgaacacaatgatggagttcagagatgcattagggtgcggctgggatcaggagctaggggagggcggggtgccggtgggagaagtggtggtgggaggggaaggaagaggaagaacatgggtggttctgattggagagatgacaggccatttgatagcagaggatcaactagctggccaaatcatgttgggaagttcctaaggtttcacctttgcaaagagaacaaggacacacaagaagcgttaggagtaattgggaaaatgttaggacttcagtcacgttcattcgggtttgcagggacaaaagataaacgtgctgttacaacacaacaggtgactgttttcaagatatcagccaacagattggctgcacttaataatcgactatttggaattaaagttggaaactttagttatgtgaaggagggacttgttcttggtcaactaatgggaaatcgatttacaattactctgaggggtgttgttgcagaatcagaagacataataaaggcttctgtggagggcttaggaaagaatggatttatcaactactatgggttgcagagagatgacataagggagatgcgtgaacattacaaggagcatggtgatattgatatggcactaaggaacttccctcgacatcttgtagccgagaaggctattcttcaatgtttgaagaaatgccctggtaactatctgcaagcattaaagagtataccaagaacattacgaatgatgtacgttcatagttaccaaagttacctctggaaccatgctgccagtgccagagttgaaaaatatggcatttcgcaggctgtagaaggtgacttagtttatagcaaagagccccctcctggagaagcaacttcagttgatacttcagaaccttgcgatgaccaaataaattcatctgatattgatctatgttctgagacacttccagaagaaacaatccagtctgtgaagatagttgattctgaagatttattgaagggtgtctacacatttgaagatgttgtccttcctttgcctggttcgcaagcattatttcctggaaacggaattgctgacatttatcatgaattggctaaaaaggatggcattagcttgacagagaatgcacatggtgtcaaggaactcatgacttatacagatgacacagcatctttagcagaaactgatttggatgttctgtccagaaacaaacctacaaaagccaaggaagtaaatgagactatatctagcgcgatttcaaatgctcaatcacatgattccaaggtggcaggaccattggatagctctatgccaggtcacgtatcagaaaacactcgattgttaattttgttattgacatcaattctttatggggaatcttccaagccgcatcttagaggagttgacatagttaagcaacatgagttgtattgcatttaaggaatccccggtaccgagctcgaattcgccctata

SEQ ID NO: 57844 - DNA, 414 bp, Oryza sativa
  Clone ID: PAT_MRT4530_59616C.1
acgccgccatatatcgacatcagagattagcctagacataccccgtccagtgtctatggagaccggcaagagagatctagcaccatctctgatctcgacaggtccatatttgaggaggaagactgacctgtcgtcgactacgagttgatgaataaagagcaacactagcttcggccaacaggatgtagggctattacctgtcagataaggggcccgaatctgtataaaaatccctgtctccatctcttttacctcaatctcacatatactctggtaccagcgatccccataccatccaaataacgtagtcgtgatctcaaacttcgacagattaataaatggagcacaactaatggaagggaaattggtcacagggactgtagtggtcagagaggggttcttagcaaaatgagc

SEQ ID NO: 57845 - DNA, 414 bp, Oryza sativa
  unsure (1)..(414): unsure at all n locations
  Clone ID: PAT_MRT4530_59617C.1
ctgagacggaagcccatgaaggtgatgaaagcaagttacctttgcaattggcaattgttgggcgtcctaatgttgggaagtctaccctgctgaataccttgttgcaagaacaaagagttctggttggccccgaggcaggcttaacaagggactctattcggactcagtttcagtttgacaatcgaactgtatatttggtggacactgcaggttggatggaaaggtcaggaaaggagaaaggtccagcatcgttgagcgtggtgcagtcaagaaagaatctgatgagagctcatattgtagctcttgttctggatggagaaaagattgcaaagtctaaaagtagcatgaatcaccctgaagttctgatagcacggcaagcaatagaagaaggtcgnggacttgttgtgattgtca

SEQ ID NO: 57846 - DNA, 638 bp, Oryza sativa
  Clone ID: PAT_MRT4530_59618C.1
ctgcaggaatcggcacgaggcttttttagtaactcagagcttcagacttcatccgtgtgattcactgaaccaatcagcctcctttgtttttgtccattccatgcatttaatttcccccacaataatctcatataacatttccttgtgccctcttaaattctgttttcccatgctataaataagtaggcagactttctaccactctccaccagtaccaccactaaaaattaaagtgagctaagccaacactttggcggcagaaacttgcagctaagcattgtccctcctcatctgcaaaggcagaggagatacattctctcgtcctctttcgcttgatatcaagttatcaacagtgctctcctatccgtgagccgtgcacaattgcacacgatggtgttgattcgtcttactatgctgatctttatcgccatcctccttgccggccgcacatgcgtacttcttgttgccggccgtggaatgccggcaaccttcgtgttcggtgactcgctcgtcgacgccggcaacaacaactatctcgtctccctgtccaaggcaaactacccaccaaacggcatcgacttcgacggacaccagcccacccggccggtacaccaacggccgcaccatcgtcgatatac

SEQ ID NO: 57847 - DNA, 333 bp, Oryza sativa
  Clone ID: PAT_MRT4530_59619C.1
atggcggggatggggacgagcggacggtccggatggtgggctgtggggtcagcgggcgccgtcttggagggggcggttgcacgggagcagggccgttattttatgagccgtatttgggctgggctgcttgctggggtggcccagaagcagcacccgcgcacccgcgcgagccgagcgcagcgattcagcgaagggcggctccgaataataccacctcggggagttgtgcgcgagcgcggtcgaggggaggctacaaatatgagcgggatgagttgggttgaagttaaaaagggatcaaggattccaggttatgtatgcaacacaaaggtctag

SEQ ID NO: 57848 - DNA, 150 bp, Oryza sativa
  Clone ID: PAT_MRT4530_5961C.1
atggccgggccaccgtgcccatcaccggccgtcgcacgccttccccctcctctcctagccggtgaaaccgccgcttttccccgcgtcaccactttgttgccacggcgccaccacaagggctcagacaacgctaccattcaccctctttga

SEQ ID NO: 57849 - DNA, 747 bp, Oryza sativa
  Clone ID: PAT_MRT4530_59620C.1
atgtggtcgccgtgggtccgccgcggccgggccaccggccggctcacgcagtccccgtccttctccccctcgtgcgtggcgtcgccgcccagcagcggcggcggcggcggcggcggcggcggtaaggccgaccaccagggcatcggctccgtcctcgacgacgacgacgcggcgcccgcgccccccgggccgggctcccggaacgtcctgcaccgcgtgaggtcgtcgaccaagctccgggcgtgcaagtcgttcgccgtcgcggcggaggcggccgccgcggcggtggcgggcgagcggcgcgtggtgctctacttcacctccctccgcgccgtgcgaggcacgttcgaggactgccgcgacgtgcgcgccatcctgcgggggctccgcgtcgccgtcgacgagcgggacgtgtccatggacgccgcctacctcgccgagctccgcgcgctcatgcgccgggaccggccggcgctgccgcagctgttcgtcgggggccgcctcgtgggcgacgccgacgaggtgcgcctcctccacgagagcggggagctccaccgcgtggtggccggcgcggcgcgggcggcggccacgccgtgcgcgtcgtgcggcgggacgcggttcgtgccctgcggcacgtgcgacggcagccaccggcggtacagcgagaagaccggcggcttccgcgtctgcacggcgtgcaacgagaacggcctcgtccggtgcgccgcctgctgctccggcggctga

SEQ ID NO: 57850 - DNA, 1613 bp, Oryza sativa
  Clone ID: PAT_MRT4530_59621C.1
atggcagaactaccaccggaaggccgcggcggcggtggcaacaacaatgggaagtggaaggggaaggagaaggtggtgcccgagcacggcaagaaccggcacggcatgcccgtcggctgctacttcgtccccaaggaccctggagctcttcgccatcctcaggtgcaagctcgtccgcggccagctccccggcgccctcaacaacgtcttcgagcatatcaggatcctcgaattccaccccgccctcctccatgagacgtacatcgagaacgaggaggatgggtacatctacttcttcagcaggaggcagttcgcgacgaaggcagggaacaagaggcggccgacgcgggtggcaaagggcgggacgtggaaggcgtctggtgggagcaagacggtgaggagcaagaaggtcggcggcatcgacgttggccagaagctcaccatggtgttctacgagcgcaggttcgagggtgaccggaaccccatcaagaccaattggggcatgcacgagttcaccaagatcattgatggctccaaaaaccagttaccaggtagtccttgtggaccttgccgtgtaccgcctgtacaagatcaaaaggaaggaggacgaagaaccgtcgaacactgccgccgcggcgtcgagcaccgacgagccctccacgtcgtcggcattgccacctcctacgccaccgcggccattgccggacatggccggaccgtcgtcagcaacgccgctactgccactgcaattgccgggcctggccgggtcgtcgtctgcgatgtcgctgcctgcactgcagctgccgggcatggccgggtcgtcgtcggcgatgccgctaccgccactatcgttgccgggcctggctggagggatgatgtccatggcggaccaggcgaacatggcctcgacgtcgcaggcgtccacaccgtcgtcggagctcctgcaagactggtacgacgagttcgagatcacgtacggcgccgtggctccgccgtctcctagcacgatcagctgggtggcgccgcagagctcgccgacggggtggtggccgtcgccgaacggcgggccggtgcagcacgacggctacctcgggatggcagcggatccaacgtcgtacatgctggaaaacctgttgcccaccgcggcgatcccgccggagccgatgatgccgccgacgagctcgccggcgccaccaccagccgtcgaccaccaccaccggctctcgcctccgcatgacgccgccggcagcaactacaaccacccggagctcgccgactacaacggcggcgtccaggcgcagcacgagcatcagtatcacccacaggagccgcaggcatcgctggtggatgccgaggacggctacagcgccatggccggtggcgacgacgcgcagctgggcggcgcggagcttgacaccgaacgaatcgccgaaatggtaaaccatataatggatggcgaattcgagttcaaattcgaggacaacaccgtccttaagtacaacgaagtctttcctgacaatgatgaggtggtggcggcgccgatgatgatcgacggtggtagggatggcgatggcgcagatggaggtgatggagacgacccattcgacaattag

SEQ ID NO: 57851 - DNA, 436 bp, Oryza sativa
  Clone ID: PAT_MRT4530_59622C.1
gggacatttggttccggcagaaggatatcggttaagaggctcgttcagatgtggcacgcacgttcggtcacatattctgcggcgcccgggaggtgcccggtgaaaatgcaaggagcccgtaaggcatcgcgctccgtccgattagcaggtgcacctaatggctcccggggcccagacggggacctcaaggcgcccggctgggtgccgtgcggtgcactaaactatttgtcctttgacatccgcgcctccattgaaaattacaagaagaaaatcgggaggggccgtctgtgcaccgaccgaaacccgctcggacccgttcgggacatccatggctcccggaaggtgccctgtcggcgcccgaccgggatcctcaaggcgcccggccaggtgccgcgcggttcactgaactatgtgtcctctggcatccgcacctcct

SEQ ID NO: 57852 - DNA, 486 bp, Oryza sativa
  Clone ID: PAT_MRT4530_59623C.1
acccgactgccgatcttgggatcgatatcgggacgatgcacgatgccatgctgtatgacatcatgttgatcagcgatgatgacaatgatgacactaatatcctcaataatattcggaagaccaagtgcgaacccaagaacgagaaggagaaggctaaggaggcagctgcggcagcaggtgatggtctttctgaggtccagaataagatctatgacattatgtacaaactcgctgacattccattcttggaaccatacttgactcagatcattgctgtaatcgataagggagagaagcaggccaacatcaccatcggcattatgatctgcatcgttgtctccattgtgactgtgctcttgacgatcctgttcaggagcctgaagccagcggctactgcgaagcctgctgccaaggtcaaaaaaccagagtctaccgcgtactatacagcttgcaacacaggtggcaacgaggacgacaaggaagacg

SEQ ID NO: 57853 - DNA, 5202 bp, Oryza sativa
  Clone ID: PAT_MRT4530_59624C.1
ttatgaactgttcgaggtggtttaaagccatcacaagtcacctccaccaaggatagtagatccgatgcttctcatagtccaaacacaccaaaacgtacagctgatcgagaaaatcaatggagaacatcatggacggggtctgaagagtcgatctcaacaaacccgtcgcagagagatgcacaaagtgaatatggaagactagagagttctacagaagataatgaccaatctataagtgggtctggaactgttgtactgcgctcgccaagagcatctcaggtgtaccctgcagctactaaccacagttccaagcctcccagtagattctcctcgtatgaagacacgtctatcagtgggacagtcgttcggaatcaaattgaagaaccagaaactccacgatcttcaaggtcgagactgggaatccaagaaaagtcaccaaatgcttcactggaggacagtgcaactaaccttgcagaggcaaaggctgctctccaggctgtttgataaggttaattctcgtgaatctcatgctatcaggacaatgtgtatttactaatgtatatttatgtacctttatgcacatgttgtttcctaattcagattattatagatcctattgtttcctgtcaaaaatttatagcaatctagctcctatgagtttccatatacatgttataagaatgcaccctgtaatatttatgggatctagaattcaagaattacatacacaaaatatcctttcaatctagctaattatctgcatggtgctgctgatattactagctcacttggatatgccacacattagtccattcatgctacacatgcacggatcaacaatatgcaatggtttgagttcacctcttgtatctgtaattcattttcttatctagataatatatggcgtttaggcaggaatgtacatataagtcatagttatggctatgtgagggattcactggatttgtgttcaacccttaagacatgtcaggcatgttaggcttaagacattacgatttttaatttctattttttggtacaagaatctccatgtgaatttaggtgtatgcctgtttgtcagcatctatgatattttatttaagttgtaaaatctgctcgtgtaagttttgtccatattcagccaatacagtaagtgaaccacccagattgccttaaaaaaaaaaaaaaaaaaaaaaaatattaaacaaatttaaaaatttaaatatgttaatgcctttccacacttccacagcggcaaatatcctcctgagcgaaagtgaaaaggggaggggagaagacttcgtaatctccaagctgcacgccacaaccaccttccccagatccaatccaagtcgtagtgcctaccggcgccgacgaggacgcctaataacccgttctccttatcatcctcaggcttacgcctgctcgaaagcctaaccccggctggagatggcgacaggggctgcgcctttgccgatcttccgccgagggacgctgcttccggggacgcccccggagaagccggctccgccggccgagaccttatcggacgcggctcatgagttgacgtctccaaagggtttgacaaggaactgcgtaaggaagttgcaataaaacctatcgatttagcagtagctgaggatgacattgaagacatccaaaaggaggtatctgttttgtcacaatgccgtggtccctatataactgactattatggctcatatcttcatcaaacgaaactgtggatagtaatggaatatatggctggtggttctgtcgctgacctactccaaactggccctcctctagatgaattgtctattgcatgcattctgagggacttgttacatgcagttgaatatcttcattcagaaggaaagattcaccgtaacgtgatcacaagtaacatccacctgactgaatgtggaggttgctacgaatagaacattctcaacacaacgcacctgactacaagaaactcaacggggaacatcttagacggggaccgaaagctctgactacctaaaggcgtcgaagacagccacccacacaaaatatagacaagtagccagttcttaagaagatattcgccaatatacaagaggggtgaacacagttgtactgagctcgctaccatcatagttgttttcctcagacgtcattaaacacatctccagcttgatgagtatattcttaaagtgtgaagagacgttttgtcattagacttagggaaggaatcaaatggaaggccaagacacaagacgatcctcaagcacgagaatgtgaagctaacaaaagacacaacatggttgatgggaggacaatgacagaaacttgagcgtggaaagagaagggaccctggctgcacaaaaaagggatgaaggttggtctaagcaggtagtaaggaaattgaaaaagtaatcaattgggcccaaaagttaggcagcacactgtcatgatgccgcaagtcagtatattgagatggcagaaatttgcaaaacatgccagatagatgatggacagttagctcctcctgattccggttctatatctcctccagcactgtcatcagtaataattccttctataaaacagactcctggaaacaaatagaacggagaggttgttaatacattcattgattgctcggtgcatctcgaaaaggtcttaccaggatcttgtgaggtggttattcaaagtatgcacgatcggctagggagctctaaagaatacaatcaccaaagtcttcaagagacggcgacatcagttttcggatcgacatctgaacctccctcttaacctccaagtaacaagaaaatggctaatacaccttcctgggctgccccttcctcacaccccacaaaaatagccgttgcgaccccgcgccggctccgagccgccgacccgttcacacacaagcgccgcacacctccctttgttaaaacgtttaaaactctcccgaacgatatcgcctcctccccctctatccccccaacccaagcaccgaaggcgacggacgcgaacccggaggcggcggcgccgccgccgcagttactggtggacgagggctacgagttctgcgcgcccaagttcttcgacttcgtatgcgacgagacgtaggaatgattccgtggcgccgagcgctggttcgaggccacctccagccacgccccttcgctcttcactctgatgatatagcaagaaagatgggaccagattgacaataccatccccctctaaattacatacaggtgaattagggcatgggaaagagtggcagctagctccacaactgctgcaaaagcaattacaggaagagaaagccaggattccgaaggctaatccttatccctacacaactgactatccagtgataccaccgaagcctgaaccaaaaccatgcacgaggccagaaggctttcagttagagagtttggtgaggcatgagatggagcaacagaggataatggaagaaagagagaggatggagagggaagaggcccagaggagagtagtgaaggcacaccccataatgaaagaggatcccattccgcttacagagacagagaggaagcctcttactgcaagttcaaccacttaagttacatgttgatgaaagggctgtcgaaagatcagaatttgacaatatggtgaaggaaaaggaaataacttacaagagattgtgagaggaaaatgaattcgcacaaaagatggagtaagagaaaatgtcgaagtagctcacgaggtcctaagggccctaagcacgccctctacctaagtttgacagaccaatccgtcaccagacatcaacttagtaggtgaagaagaagaaatccccacagcttcaggtcgaccaaagaggggcaagaaggcacgccttcatcagatgatccaactctccggctcatcttgttgtcgtctatcggttacccactggctgctgctgttttctcttctgttcttgacgtcaagatcatccccaattctcgcagcgattctttctgaccaatacataaataggccgatccaatcctgttatatagtcagtcaacacagctgacggcgtgtgtatgctcctttagggttctgctgatgcttgactgcattattgtaaattcagtttgtgtgctgtgtgtgtgtgctgttcgatcatttcctcctcttccaaggaaagctccacagcttcctgaatttaatgagtttcatcttaaaacgatggagagagctacacgacatgcagacacctgttccgaagcttcttccgtggggactatcaggagtcagagcagtaagccactgaccttgacagcgccaaaaccaccccaacttgagacagcattacgagctagaccaccaagggtgaaaagttctcaggaattggaactagaagaattagaaaaggctcccaagttcaaggcaaagccactgaacaaaaagattctcgagagcaagggtgatattggtgtgtttccacatctaaaggctcaaccaacagcccccaaggaattccatttctctaccgatgatcgcttgggtcctcctgcagttgtggatctatttgataaggaaagagggcatgagaaagagaggcagctagctgcacaactgctgcaaaagcaattacaggaagagaaagccaggattccgaaggctaatccttatccctacacaactgactatccagtgataccaccgaagcctgaaccaaaaccatgcacgaggccagaaggctttcagttagagagtttggtgaggcatgagatggagcaacagaggataatggaagaaagagagaggatggagagggaagaggcccagaggagagtagtgaaggcacaccccataatgaaagaggatcccattcctcttccagagaaagagaggaagcctctcactgaagttcaaccacttaagttacatgttgatgaaagggcggtccaaagatcagaatttgacaatatggtgaaggaaaaggaaataacttacaagagattgcgagaggaaaatgaattcgcacaaaagattgaggaagagaaagcgttgaagcagctcaggaggaccttggtgccacaagcacggcctctcccgaagtttgacagaccatttcgtccccagagatcaaccaagcaggtgacgaggccgaagtccccacagcttcaggtcgaccaaagaggggcaagaaggcacgccttcatcagatga

SEQ ID NO: 57854 - DNA, 366 bp, Oryza sativa
  Clone ID: PAT_MRT4530_59625C.1
ttttggttttttttttttttttttttttttttttttttttttttttttttttttttttttttttttttgttatgttggtgttcaagggcaaaacctagggaaaaacagggaaaaaaaaagccccccgcggaaaaaacaggggcccaacaccaaacccggggggccccaaaaaagggggggaaaaaaaagggggggcggaaacccccgagggagggggacacggacacggggcctagaagggggggaaacaaaacacaaagggggctccgagcaaaagaacccggacgggggaaacaacacacttggctcctcccacaggagggccggcacaaccccccaggggaagccgggggcgcccctaccccc

SEQ ID NO: 57855 - DNA, 2304 bp, Oryza sativa
  Clone ID: PAT_MRT4530_59626C.1
atggcgacggacgcgaacccggaggcggcggcgccgccgccgcagttactggtggacgagggctacgagttctgcgcgcccaagttcttcgacttcgtctgcgacgagacggaggaggaaatccgcgccgccgagcgctggttcgaggcctccgccagccacgccccttccccgttcgctccgaggatcaaggagtcgagggcggaggtcaagatcgagagcctctgcgacttcaccgacgcggagccgattccgaaggaggtagcagtggaggaggcagcaggaagcgccgccaatccctcgcagaattctgatgggaatgtgcaacagaataaggacggctccatcaaacttgtccatgaagcaaatcccagtgaaaattgtgtcactgacggcgatcataagcaccaagaaagtgatgcaatgttggagtcgccaccagcagaggaggatgagaaggaatcgccaaaatccttcgagtttgtcccttccaatgcaaaatcagcagatgttgcttctagcacaccgaagattcagaggcctccacccgtcaaagctgtcactacggtgcctacctgtcccaagctgacagtgaagacagaagccttcactccgaaggtgcaggcaacgaactcctccagaggtcttgcacccttgactggctcaagggcacatccatctgctttgaagcagtcgatgagcgtcaagaggagtgtgatcaaatgccctcgtgagttgctggctgggaaggccgctactgctgcgaatgaaatcgcacaagaaaatcaagctgtcaagagacagaagcttgatgatgggaggacaagacagatactgaacgtgaagacaaggaccctgcctcacaaggggagaggaggtggtctagcaggaagcaccgagatgagcctgtcggccatgaggaagcaccgtgacgattcacactctctcaaggaagtgactcactatatatcggcagcagagatggtaaagaagttcgagtctgggactagagagttggccatccctcacaacagatcgctttctcatgaggatgcagcaaccgcattacaaagaagaacaaagctgatgctaacaaggccaaaggaacctgagttccagacctcccacagggtccgtgctgtcagagtgaaaagctctgctgagctagaggaggagatgctagccaaaattccgaagttcagagcacggccgtttaacaaaaaaattgcggaggccccttcatttcctcctcttccaaggaaagctccacagcttcctgaatttaatgagtttcatcttaaaacgatggagagagctacacgacatgcagacacctgttccgaagcttcttccgtggggactatcaggagtcagagcagtaagccactgaccttgacagcgccaaaaccaccccaacttgagacagcattacgagctagaccaccaagggtgaaaagttctcaggaattggaactagaagaattagaaaaggctcccaagttcaaggcaaagccactgaacaaaaagattctcgagagcaagggtgatattggtgtgtttccacatctaaaggctcaaccaacagcccccaaggaattccatttctctaccgatgatcgcttgggtcctcctgcagttgtggatctatttgataagctctctctttgctcagaatcttcatatcatagcaagaaagatgtgcccagattgacaataccaaaccccttcaatttacatacagatgaaagagggcatgagaaagagaggcagctagctgcacaactgctgcaaaagcaattacaggaagagaaagccaggattccgaaggctaatccttatccctacacaactgactatccagtgataccaccgaagcctgaaccaaaaccatgcacgaggccagaaggctttcagttagagagtttggtgaggcatgagatggagcaacagaggataatggaagaaagagagaggatggagagggaagaggcccagaggagagtagtgaaggcacaccccataatgaaagaggatcccattcctcttccagagaaagagaggaagcctctcactgaagttcaaccacttaagttacatgttgatgaaagggcggtccaaagatcagaatttgacaatatggtgaaggaaaaggaaataacttacaagagattgcgagaggaaaatgaattcgcacaaaagattgaggaagagaaagcgttgaagcagctcaggaggaccttggtgccacaagcacggcctctcccgaagtttgacagaccatttcgtccccagagggatgattaa

SEQ ID NO: 57856 - DNA, 1722 bp, Oryza sativa
  Clone ID: PAT_MRT4530_59627C.1
ttttggacacaccttctctctcatcgaggtgggttaatatattcttctgggtgctttagcatccaagctccagtttcaccgagctaaggtagggggaagggaattgaattgaaggttcttgggtgctttcttttccagttacctcccaccttaggaaccctctgaaagacccctcaccatctcctttgtgtccttgctaaccaactccccattaaatccctctccgcgcgccttctcgctggccattagagctagctagcgagagctctagctacagctatacatacgtgtacccaacggccacggtcacccgcgcgagcgagcacgcgcaccaaccgatcgagcccaacaagctcgctcgctcttggtgcgcgcgcgcgcggcgagttcgatcgatcggtgtatacgcgtatcgtgttgtgtatgcaaggcggtgatcacggaggcatggagatgggcgtggggtcgttcaccggcggcggaggaggcggggagtgctcgtcgtcgtcggcgacggcggcggctgctgcggcggctgcggcggcggcggcggcggcggaggcggaggagcggcagctgctcaagggggagatcgcggtgcacccgctgtgcgagcagctggtggcggcgcacgtgggctgcctgcgcgtggcgacgcccatcgaccacctcccgctgatcgacgcgcagctcgcgcagtccagcggcctcctccactcctacgccgcgcaccaccgccccttcctctccccccacgacaagcaggagctcgactccttcctcgcgcagtacatgatgctgctgtgctcgttcagggagcagctgcagcagcacgtccgggtgcacgccgtggaggccgtcatggctaactggcacaacaactcacagacatcaacccttaaatcaaagcgtaaaaggtaaagggcagaaaaaaatgtatacctgacgtactcgctaatcaaatcaaaagaagacatggtgactcataagtaataagatcatcttaaattgtatatctagttattaattagtcagaggtgacaaattcatgacatacatactagtctgaccactggcatatgcgttgtaatttttgagcagatatgctcaagcaaattcttcttgttggtatagtttttaaggaagaggagggcaggaaagttgcctggggacaccaccaccatactcaagcaatggtggcagcaacactccaagtggccataccccacggaggatgataaggcaaagcttgttgaagagactggcctgcagctcaagcaaatcaacaactggttcatcaatcagagaaagcgtaactggcacaacaactcacagacatcaacccttaaatcaaagcgtaaaaggtaaacaaaccgttatccaagtattttatccacagtaatacaatgttgatgtttcagtaattaacaactgaattataacacaaacttcttttttctatatgtaatacaggtaaagggcagaaaaaaatgtatacctgacgtactcgctaatcaaatcaaaagaagacatggtgactcataagtaataagatcatcttaaattgtatatctagttattaattagtcagaggtgacaaattcatgacatacatactagtctgaccactggcatatgcgttgtaatttttgagcagatatgctcaagcaaattcttcttgttggtatagtttttaaaaaaaaaaaaaaaaaaaaaaaaaaa

SEQ ID NO: 57857 - DNA, 208 bp, Oryza sativa
  unsure (1)..(208): unsure at all n locations
  Clone ID: PAT_MRT4530_59628C.1
gcgcattngtcnggggaattcgggataagcagcnaagtcattcatagacgnnccaagcncngatgnccntcncngatcctnccgaaacttnncactcccactcccanccnnccnccgtcgcctnncttncaaccganccgctncgcaccntntnctnccntngncgncnnaanttcgtnttngtcgtcaancnntncnntgcaatggc

SEQ ID NO: 57858 - DNA, 1253 bp, Oryza sativa
  Clone ID: PAT_MRT4530_59629C.1
gcggcgcacgtgggctgcctgcgcgtggcgacgcccatcgaccacctcccgctgatcgacgcgcagctcgcgcagtccagcggcctcctccactcctacgccgcgcaccaccgccccttcctctccccccacgacaagcaggagctcgactccttcctcgtacgcatctatttaatttcttcctgagttcgatgcgccatgcttgattaatttcactaggttgaatttaatctttgcatttgtgcatgcatgcatacattacatgcaagtatcataccgtacgcactagctacatgattaactagaagctatccagccaagctaactgtatatatgcatactgaaatgatcgatgcaggcgcagtacatgatgctgctgtgctcgttcagggagcagctgcagcagcacgtccgggtgcacgccgtggaggccgtcatggcgtgccgcgagatcgagcaatccttgcaggacctaaccggtgcaactttggaggaagggacaggggcgaccatgtcggaggacgaggatgagacggcgccgatgctggagggcccgatggatatgggctcggacgggcacgacctcatgggcttcggcccgctcatgcccaccgactccgagcgatccctcatggagcgggtcaggcaagagctcaagattgagctcaagcagggcttcaagtcaaggattgaggatgtgagagaagaaatattgaggaagaggagggcaggaaagttgcctggggacaccaccaccatactcaagcaatggtggcagcaacactccaagtggccataccccacggaggatgataaggcaaagcttgttgaagagactggcctgcagctcaagcaaatcaacaactggttcatcaatcagagaaagcgtaactggcacaacaactcacagacatcaacccttaaatcaaagcgtaaaaggtaaagggcagaaaaaaatgtatacctgacgtactcgctaatcaaatcaaaagaagacatggtgactcataagtaataagatcatcttaaattgtatatctagttattaattagtcagaggtgacaaattcatgacatacatactagtctgaccactggcatatgcgttgtaatttttgagcagatatgctcaagcaaattcttcttgttggtatagtttttaattttgttgtcgtgggtgtacctgcatgcatacataaccccaagactaattcatttgctgtgcatatacattgaccattctataacaaaaa

SEQ ID NO: 57859 - DNA, 576 bp, Oryza sativa
  Clone ID: PAT_MRT4530_5962C.1
atggcatgtgcacgtgatgaaagtactctggtgcaacaagtgctaagttctcaaatggagaaagcggagcaatggcagtaccacgaattatttgaaacaaagtttgtggttaaggatagagcatgtcatgctataattgatagtgaaagttgcaacaactctgtgagttcagatttggttgacaaacttgagttgcctacacaaccgcatcctcatccatattacatcgaatggttcaactcttgtggtaagttcaaggcatctgagaacaaccaaggtaatgaggaggaagagaagaaagacgaagagcaaaaagatctatccatagctccatgcatgcttgaggaatgtttaattgatcaagcgcctacaatttcagaagatgagaaaaaaggtaaagataatggtgctacaactgctcaagagtaccgcatgcatataagtaattctctatctatggccatcaagaaatgttcctcaccggatgttgtgatacataaagataagttcaatacgctctatgacaaggtacttgcttgggcgaaagaaaagagaccgagcgtaatgaattcatga

SEQ ID NO: 57860 - DNA, 117 bp, Oryza sativa
  Clone ID: PAT_MRT4530_59630C.1
atgacgatgacgatgcgagccgacagtgatgacgacgctaatgcgtgcccagcgatggcgatgacaatgcgttgcggcagcggctggtgggaggaggcgagcagcgacggccgatag

SEQ ID NO: 57861 - DNA, 1835 bp, Oryza sativa
  Clone ID: PAT_MRT4530_59631C.1
cttccctgcaaagccaaagccctcgcacgcgtgcctgcctcttctgtgtctctctgcgacagccatcgccaccgacttcttcgtcttcctcgttggtctcctctctctctctgtgttcttggtgttccctgtgctgttcttgggcaagaagaagaaggagagcagatgggagggtcagggaagtgggtcaagtcgctcatagggctcaagaagcctgacagggaggattgcaaggagaagctgcaagttccatcggtcaatggcagaggaggaggcaaggggaggaagtggaagctgtggaggagctcctccggcgaccacggctcgctatggcggggctcgaggggcggcggcggcggcggcggccaccaccgctccgcgtcgtcggacgcctccgacgacgcctcctccgccgccgccgaccccttcaccgccgccgtcgccaccgtcgcccgcgcaccggccaaggacttcatggccgtccgccaagagtgggccgccatccgcgtccagaccgccttccgcggcttcctggcgaggcgggcgctgcgggcgctgaaggggctggtgcggctgcaggcgatcgtgcgggggcggcaggtgaggaagcaggcggcggtgacgctgcggtgcatgcaggcgctggtccgggtgcaggcgcgcatccgcgctcgccgcgtgcgcatgtccaccgagggccaggccgtgcagaagctgctcgaggctcgccgcaccaagctcgacatcctccgggaagccgaggaaggatggtgtgatagccagggaacattggaggatgtgagagtgaagcttcagaagcgtcaggaaggcgcgatcaagcgtgaacgagctatcgcgtatgcgtattcgcagcagatcgaaggcgctacgaaatgcaatttttggactgaatgtgtaatctttcttgtctttgctcagcagcaaccgaagcctacttcttatggtcggctgaaccagtctggaatgttgcttaagcaccaacatttcgacaagagcaatggcaactggagctggctggagaggtggatggcggcgaggccttgggagaacaggctgatggaggagcacaaccagaccaactccagctcgccggacctcctgtcctccaagaactgcgaggattcattcggcattcttggggacttctccgaaccaaattcagtgaaagtgcgcaagaacaatgtcagcaagagggtctgcgcgaaaccgccggtagtatcacaccaccagcgcatcaaagctcagtcgatctcgtctctgagcactgaattgcacaatgatgagagctcggcatcgtcatcgtcgtgctttgcttcgacaccaatatcgttctccacctttgtcacgacggagaagaccgaggacagcatcagggcaaggccaaactacatgaacatgacggagtcgatcaaggcgaagcgaaaggcgtgtaatgctcaaagaacgacagcagggaaactgatggaggataggaaggcctcaggtgtcgagttgaaggtcgctcaagtttgaatttgcaatgttcttggagctgtaagctgagatgaagccaacttctacctctctagggtgtttgttaggtggattgctccatccacaggtttttcgatgtcttgctgctgcattcttgagttgtgtctgtgtcgccaatctcatgttcaacatcttgttgtcgagtcatcccatttttggggatgtcctcattgtcagtggcagtgtctttgtaagatagctctttgattgggaaaaaaatggtgtggatttgttgcagattgtgaatttcagagaaagggtgtcattacccatctctcatg

SEQ ID NO: 57862 - DNA, 394 bp, Oryza sativa
  Clone ID: PAT_MRT4530_59632C.1
ggggagaaagaggcccaccagggtttgaggccaaaacctttaacgcaaaaacccgttccagggcaatgtttaagtcaaggctcaaaccctgaccatctaacagggtatcacaatctcaaaactcggtggtctaaacaaccaaatttattggatttttgcccaagggcagccggggatttattggttcaaacgtcggccccgtgaacaaggaaatgatttaccccaattgcataactagaggtcatagcatttcaaacccaacatgaagcttccgcaacaaccgccccaagtctgttcaagggaaaaatttcaaaccaatccccaccaagggccttgataaatgcaatgcccttcattttaccatcttctgggtttttaacaaaacctaccccaa

SEQ ID NO: 57863 - DNA, 432 bp, Oryza sativa
  unsure (1)..(432): unsure at all n locations
  Clone ID: PAT_MRT4530_59633C.1
agtaagttgacgaggaggctgaggttgatggggaggttgangttgatcgggcatcttccncctcccccgccgccgccgcttcctcctcctccgccgcctccgcttcctccaccgcctgaacctccgccgccgcttcctcctccacctgaaccgccgcctccacctgaacctccgccgctcccgccaccacctccacgccctccaccaccgccaccgccaccgccaccgccaccgcctcctccgccgggactagggcatgagccgcactggcagccgcacgcgtcggagaaggtgaagaagtggaggttcagggccaggagcgtggcgattcaccccagctttcgtcgccatgcccacccaccgcactgcacctgcagatngatctcgatctatggcctggcctctacctagctttgcttgctagccagcgga

SEQ ID NO: 57864 - DNA, 847 bp, Oryza sativa
  Clone ID: PAT_MRT4530_59634C.1
ttagcctcgcccttgagtccgcgtacgccggcgcttcacctcgccctcgtccggccgccgccgcgaccgggggaggcgccaggctgccctgccctgccgccgcgaccgggggcgcatggaggcggccagccgccgggcctgacagagcggtggtgcaggcgggcggcccacagcccgagcccggcgtgtggaggaggtcgtgctgctcctgcggcgccgcacgtcccgatttcggcggcctcaactccacgatggatatcagatcgctcaaagcaacagccccatttttaaacctctcgccggcgacgaagtgggcggccgactggtgcgggctctggatgcgggctcggacgctgaaatccatcgtggagttgaggccgccgaaatcgggacgtgtggcgcggcaggagcagcgcggcctcctccacgcgccgggctcgggctgcgcggctgcccgcctgcaccaccgcgccgtcaggccccggcggccggccgcctccacgcgcccccggtcgcggcggcagggcagggcagcctggtgcctctccggtcgcagcgacgcgcctcccagctgactcgcggcggcggccggacgagggcgagatgaagcgccggcgtacgcggacctgagggcgaggcgaagttgagtccgtctcaggctgcgccggtgtacgcggacgagggcgaggttaagcgcgtcctgtgcgcgtgcgggcttcccgattcgcggcgcagcaagggcggggcggagcggagcggagccagcgacggcgcgaccgcatccactgtcccgatcgacctccgattccggtacggcccggttgatccagatgctgattttctccat

SEQ ID NO: 57865 - DNA, 216 bp, Oryza sativa
  Clone ID: PAT_MRT4530_59635C.1
atggagtcaggtaggggaagaagagagaagaaaaagaaagattcctgggcccactatccctggccggtcagaccggctattatcggccggtcagacctcaagggtgcggccggtcagaccgggcccaagtggccggtcagaccgccgccatcaggccgatcagaccgtgcatatagcaccggtcagaccgcctggcccccagccgactgtgcatag

SEQ ID NO: 57866 - DNA, 453 bp, Oryza sativa
  Clone ID: PAT_MRT4530_59636C.1
atgatgtactctgcactgcactacatggacgagaacaaaattaacagcggccgacaggcgggctcatggcgacgggcagcagtggctagtgggctcgcgacagtgggaatcagtcggacgaaaggtgcgcggtggcggtccggcgactgtggatctagcgtggggcagcgggagttgaagccagcgaggggcggtggctgtcccccatccagatccggcggtgatggccatcccccgcatagatccgcgcggatgcggcggcggtggctggaggagcagggcggcggcgacgaaggcgtgaggagcacgatgtcggcgggtggacgggctctacccggatccggcggcaagctggcaacaactgtccccgctcggatccgtgcggatccatcggcggtggcgggagaagcacagtggcagcgggcggcgagcgcgcatcgacgggcgttttga

SEQ ID NO: 57867 - DNA, 279 bp, Oryza sativa
  Clone ID: PAT_MRT4530_59637C.1
atggcggaggcgatcgtggggccgctggtggggaggctgcaggagctggcgctggggcaggcgcgggcgctggtgggggtgaacgccgacatccagaagctcaaggacaagctcatgtggctgcaggccttcctccgggaggccgacgccaagcgccgcgccgtctccgacgaggtcaccaaggtgtgggtgctgcagacgcgggacgccgtcttcgacgccgaggacgcgctcgaccattactatctccagttggacaagtccagtatgaatatgtaa

SEQ ID NO: 57868 - DNA, 266 bp, Oryza sativa
  unsure (1)..(266): unsure at all n locations
  Clone ID: PAT_MRT4530_59638C.1
accgaatncannggattttttaaattggggagggacacttaactaagcgggggctataacaacaaaataacacacttctacattacttacattaaaaaagttctacccccacaaacctattacatcttaaagcacaataaaattgaaaaaaaattttccaccttgttctaggaaaaaattttattcaagtgtgaagttcagaactgtttttcatcccatcataaacttaactaaaaccatcgcatttccccggacagaatgtcaaa

SEQ ID NO: 57869 - DNA, 3163 bp, Oryza sativa
  Clone ID: PAT_MRT4530_59639C.1
cacgcgtccgtttcagatcaaacgccgaagcaattcttccgcaagatttcgagtgatcccatctcaatccaagctaaaccgagagattttgatttgttgctgtagattgattgtgtgaggagaggaggagcagccatgaatccggacaacttcacgcacaagaccaacgaggcgctcgtggcggcgcacgagatagcgtcggaggcggggcacgcgcagtgacgccgctgcacctggtggcggcgctggcggcggacaagggcgggatactccggcaggcgatctcgcaggcgtccggcggggacgccgacgcgccggactcgttcgagcgcgtggtgagcggggcggggaagacgctaccatcgcagtcgccgccgctgcctcaaggaggccggcgtgtccgcggcgcgggtgcgcgccgagctcgagaagctccgtggcggggagggccgcaaggtggagtccgcgtccggcgacaccaacttccaggcgctcaagacctacggccgcgacctcgtcgagcaggccggtaagctcgaccccgtcattggccgcgacgaggagatccgccgcgtcgtgcgcatcctgtcgcgccgcacgaagaacaaccccgtactcatcggcgagcccggcgtcggcaagacggccgtcgtggagggcctcgcgcagcgcatcgtgcgcggggacgtgcccagcaacctgctcgacgtccgcctcatcgcgctcgacatgggcgcgctcgtcgccggcgccaagtaccgcggcgagttcgaagaacggctcaaggccgtgctcaaggaggtggaggaggccgagggcaaggtgatcctcttcatcgacgagatacacctcgtcctcggcgccgggaggacggagggctccatggacgcggccaacctgttcaagccaatgctcgcgaggggccagctccggtgcatcggcgccacgacgctggaggagtaccgcaagtacgtcgagaaggacgccgcgttcgagaggcggttccagcaggtgttcgtcgcggagccgagcgtcccggacaccatcagcatcctgcgaggcctcaaggagaagtacgaggggcaccacggtgtgaggatccaggaccgcgcgctcgtcgtcgccgcgcagctctcggcgaggtacatcatgggacgccacctgcctgacaaagcgatcgacctcgtcgacgaggcctgcgcgaacgtgagggtgcagctggacagccagccagaggagatcgacaacctcgagaggaagaggattcagctggaggtggagcaccacgcgctggagaaggagaaggacaaggcaagcaaggcccggcttgtcgaggtcaagaaagagctggacgatctgagggacaagctgcagccattgacgatgaagtacaggaaggagaaggagaggatcgacgagatcaggaagctgaagcagcgccgcgaggagctccagttcacgctgcaggaggccgagcgccggatggacctcgcccgcgtcgccgacctcaagtacggcgcgctccaggagatcgacgtcgccatcgcgaagctcgagagcgagacgggggagaacctgatgctcaccgagaccgtcggccccgagcagatcgccgaggtggtgagccgctggaccggcatcccggtgacccggctcggccagaacgacaaggagaggctcgtcggcctcgccgacaggctgcaccagagggtggtcggccaggcggaggccgtgagcgccgtcgccgaggcggtgctgaggtcgcgcgccggacttggccggccgcagcagcccaccggctcgttcctcttcctcggtcccaccggcgtcggcaagaccgagctcgccaaggccctcgccgagcagctgttcgacgacgagaacctgctcgtccgcatcgacatgtccgagtacatggagcagcactccgtcgctcgcctcatcggagcaccacctggctacgtcggccatgaggaaggtgggcagctgacggagcaagtgcggcggcggccgtacagcgtgatcctgttcgacgaggtcgagaaggcgcacgtcgcggtgttcaacactctgctccaggttctcgacgacgggaggctcaccgacgggcaaggccgcacggtggacttcaggaacaccgtgatcatcatgacctccaacctcggcgccgagcacctcctcgccggcatggtcggcaagaactccatgaaggtcgcccgtgaccttgtcatgcaggaggtgaggaggcacttccgtcctgagctcctgaaccggctcgacgagattgtgatattcgatcccctgtcccacgagcaactcaggaaggtcgcccgtctccagatgaaggacgtcgccgtccggctcgccgagaggggtgtcgccctggcgttcctcgacctcgtgcaagccggcacgatctatgattgtgatattcgatcccatgtcccacgaccaattcaggaaggtcgcccgtatccagatgaaacacgtccgccgtccgggtcgccgaaaggggtgtcgccctggcccttcaccggacgccgccgctggacgtcgattctgtctctgtcctatgatccggtttatggcgcgaggccgatcaggaggtggatcgagaagagggtggtgacgcagctgtccaagatgctgatccaggaggagatcgacgagaactgcacggtgtacatcgacgcggcgccgcacaaggacgagctggcctacagggtggacaaccgcggggggttggtgaacgccgagacggggcagaagtcggacatcctcatccaggtgcccaacggcgccgccaccgggagcgacgccgcgcaggcggtgaagaagatgaggatcatggaggacgaggacggcatggacgaagagtagtaagtagtagagcgcgtatgtgcgtgttgcgcccccgggcagaggcagaggagggcgccgatcgagctgtgtgaatgaatgtggggtgtctccgttgaataagctgtgaaatatggtgtttttccgatgatgcctttttgtgaagttgttgttctgctaagacgactttcttttgtgaaatttctgatgaactgaagaagtgtaaaaacgtttacgttctggttgagttgagttgaaagttcatgtgtttacggatgacaaaaaaaaaaaaaaaaaaaaaaaa

SEQ ID NO: 57870 - DNA, 351 bp, Oryza sativa
  Clone ID: PAT_MRT4530_5963C.1
atggtccacgcgcgcgtggcgtcgttggaggcgtggagcagccggccagttgctgtcgatagcggcgtatacgtggacgcggccgccgcgcgccccagtgcggtggttgtaccggcgggggcagtggctgagggcggcagcctcggcgcggaggcggtggcggtgagcggcgatggttgtgtggggatggggccgactgtggcggctattactaacccgggtgaacttgcaactcttgagtcatccgccgggcgcatgcaggggctggggcagggcatgcagccggccgtcagcctcgtcacgtgctgcgcctgcctacctgtggtggccatgccgtctcgggcgtattag

SEQ ID NO: 57871 - DNA, 2898 bp, Oryza sativa
  Clone ID: PAT_MRT4530_59640C.1
atgaatccggacaacttcacgcacaagaccaacgaggcgctcgtggcggcgcacgagatagcgtcggaggcggggcacgcgcagctgacgccgctgcacctggtggcggcgctggcggcggacaagggcgggatactccggcaggcgatctcgcaggcgtccggcggggacgccggcgcgccggactcgttcgagcgcgtggtgagcggggcgctcaagaagctgccctcgcagtcgccgccgccggacagcgtgccggcgtccacggcgctgatcaaggtcatccgccgcgcgcagtccgcgcagaagaagcgcggggactcccacctcgccgtcgaccagctgctgctgggcctcctggaggactcgctaatctccgactgcctcaaggaggccggcgtgtccgcggcgcgggtgcgcgccgagctcgagaagctccgtggcggggagggccgcaaggtggagtccgcgtccggcgacaccaacttccaggcgctcaagacctacggccgcgacctcgtcgagcaggccggtaagctcgaccccgtcattggccgcgacgaggagatccgccgcgtcgtgcgcatcctgtcgcgccgcacgaagaacaaccccgtactcatcggcgagcccggcgtcggcaagacggccgtcgtggagggcctcgcgcagcgcatcgtgcgcggggacgtgcccagcaacctgctcgacgtccgcctcatcgcgctcgacatgggcgcgctcgtcgccggcgccaagtaccgcggcgagttcgaagaacggctcaaggccgtgctcaaggaggtggaggaggccgagggcaaggtgatcctcttcatcgacgagatacacctcgtcctcggcgccgggaggacggagggctccatggacgcggccaacctgttcaagccaatgctcgcgaggggccagctccggtgcatcggcgccacgacgctggaggagtaccgcaagtacgtcgagaaggacgccgcgttcgagaggcggttccagcaggtgttcgtcgcggagccgagcgtcccggacaccatcagcatcctgcgaggcctcaaggagaagtacgaggggcaccacggtgtgaggatccaggaccgcgcgctcgtcgtcgccgcgcagctctcggcgaggtacatcatgggacgccacctgcctgacaaagcgatcgacctcgtcgacgaggcctgcgcgaacgtgagggtgcagctggacagccagccagaggagatcgacaacctcgagaggaagaggattcagctggaggtggagcaccacgcgctggagaaggagaaggacaaggcaagcaaggcccggcttgtcgaggtcaagaaagagctggacgatctgagggacaagctgcagccattgacgatgaagtacaggaaggagaaggagaggatcgacgagatcaggaagctgaagcagcgccgcgaggagctccagttcacgctgcaggaggccgagcgccggatggacctcgcccgcgtcgccgacctcaagtacggcgcgctccaggagatcgacgtcgccatcgcgaagctcgagagcgagacgggggagaacctgatgctcaccgagaccgtcggccccgagcagatcgccgaggtggtgagccgctggaccggcatcccggtgacccggctcggccagaacgacaaggagaggctcgtcggcctcgccgacaggctgcaccagagggtggtcggccaggcggaggccgtgagcgccgtcgccgaggcggtgctgaggtcgcgcgccggacttggccggccgcagcagcccaccggctcgttcctcttcctcggtcccaccggcgtcggcaagaccgagctcgccaaggccctcgccgagcagctgttcgacgacgagaacctgctcgtccgcatcgacatgtccgagtacatggagcagcactccgtcgctcgcctcatcggagcaccacctggctacgtcggccatgaggaaggtgggcagctgacggagcaagtgcggcggcggccgtacagcgtgatcctgttcgacgaggtcgagaaggcgcacgtcgcggtgttcaacactctgctccaggttctcgacgacgggaggctcaccgacgggcaaggccgcacggtggacttcaggaacaccgtgatcatcatgacctccaacctcggcgccgagcacctcctcgccggcatggtcggcaagaactccatgaaggtcgcccgtgaccttgtcatgcaggaggtgaggaggcacttccgtcctgagctcctgaaccggctcgacgagattgtgatattcgatcccctgtcccacgagcaactcaggaaggtcgcccgtctccagatgaaggacgtcgccgtccggctcgccgagaggggtgtcgccctggccgtcaccgacgccgcgctggacgtcattctgtctctgtcctatgatccggtttatggcgcgaggccgatcaggaggtggatcgagaagagggtggtgacgcagctgtccaagatgctgatccaggaggagatcgacgagaactgcacggtgtacatcgacgcggcgccgcacaaggacgagctggcctacagggtggacaaccgcggggggttggtgaacgccgagacggggcagaagtcggacatcctcatccaggtgcccaacggcgccgccaccgggagcgacgccgcgcaggcggtgaagaagatgaggatcatggaggacgaggacggcatggacgaagagtatacttgcagggtgcagtttttgttcctcaactggaacgaagttacagatggagcatctactgttgataaattgcccggctggaagtctctactatcagattggatagctgggcataagagcaacatcaaaagggcttcaggtccttggaagccccactga

SEQ ID NO: 57872 - DNA, 548 bp, Oryza sativa
  unsure (1)..(548): unsure at all n locations
  Clone ID: PAT_MRT4530_59641C.1
gaaaaggggtggtggnggcgaaaagcggacaaacactcccaaatcgggacttggcaggccgcccagtggaacatgtggtcacagctcctggagggcaggtttctgcaaaagtatgccgaagtcagcacgtccgagaccccaacaggcgaagacagtggagggacccccgcggaacgtgccgtggccgagtcagatcgcctactgtgcacgttaccctacctacccgctattttcatccgcggccactcatggcatctagctgcaacctcccggcaaggcgataaaactatactttggcatgaatacgcctttgggacgacccagagcgttgtgggcacatataaaatcataagtggattgcaaagcctgcagcgatatattcgcgacgtcttttggccgtggtaccttcgagttattctggaaatcgaacactgaccgcgctgctgggaaggatttatttttgggcagcgcgtgtttcctagcatagtgtggttccgattaagatccccgaagttttactaagttgcaagcaaaaaaaaaaaaaaaaa

SEQ ID NO: 57873 - DNA, 213 bp, Oryza sativa
  Clone ID: PAT_MRT4530_59642C.1
cccacgcgttcgcgcgacgcggcgacgccctatggcgacccaccacgcccgccgcctccccgccgccgccgccgtcctggggctcgtgctcctcgccggcgggtgcgcggccgacgacacctccagcgacgacgacgcgggcgtcccgacgtcgtccggctgctccaacaagttccagctggttaaggtgaagaattgggttaatggaactga

SEQ ID NO: 57874 - DNA, 694 bp, Oryza sativa
  Clone ID: PAT_MRT4530_59643C.1
gttcttggccaaacttttgtgatatttttgacctgattaggcctccatgaaactctctacatgttactagatacaaactgattttatcaaattggctactctaagtattacaaagtattatctgggagaagatctgtacaaaggggggcattggattattcttccagagcaaaaaaccgatgaaattatctggccaagcctggccacaatcaagcaatacctactttgatctaatccctctacatttccaatatgtatgtcatcatacttgtcatatgtatagaactttgtatgtactaaacatggccgtgcgaaaactttggttttgattccagataactagaaattctccttgtggaagtcgaatttcgtgctcgtctttctcgagaaatcttgagcgagctcacgcagttccttcgtcagcaccggcgcgccacagtagaacaccccgacgcgttggtcgcggtggttgagggcgatgcgcttgtagacgttgcgccagttggggcgggcgaagtgggtcttgacgcgggtgccggagacgacgtctaccccgtgcttggcgtggttgagcgactggagcatagcgatgagcgccgaccgggcgttccctttctcgtacacgctggtgcagtagttgtgcagcttgatcacccccttcttgtccgtcttcgccaccttgtccatcaccccc

SEQ ID NO: 57875 - DNA, 3403 bp, Oryza sativa
  Clone ID: PAT_MRT4530_59644C.1
tccacacgaatcgaaaccgccattggagggagcagctgccgtttcttggtttcatttcttgggagttcaattggagagcgcgcttgaggtgtttgttgttgttgcgccatgcaccataccagggctggcgccgccgatggcgccggcggcggaggagaggacatcgtggaggccggggcggaggcgccgccgccgcagagggagcggctggtgccgcacagcgggccactgagcaagaggtccgggatgaggaagagcgcgaggttcgcggagtcggtgtcggcgccgctgtccgcgccgtcgggggtggcggcggagcggcgcgccgccgccggcgccaacgacgacgacgaggaggactacgtggagatcaccctcgacgtgcgcgacgactcggtggcggtgcacagcgtgaagccggcgggcggcggcggcgaggactcggacgtgacgctgctggcgcggacgctggagaagcggtcgtcgtcgttcggccactcggtgatccggaacgcgtcgtcgcggatcaagcaggtgtcgcaggagctccgccgcctcgcctccgtcaaccgccgcggcggcggcggcggcggtccccgcttcgaccgctccaagtccgccgccgcccacgccctcaagggcctcaagttcatcagccgcgccgacggcggcgccggctggcccgccgtcgagaagcgcttcgacgacctcgccaaggacggcctcctcccccgctccaagttcggccagtgcatcgggatgaaggagctggagttcgccggcgagctgttcgacgcgctggcgaggcggcggaacatctccggcgacagcatcagcaaggcggagctgctggaattctgggaccaaatctccgacaccagcttcgacagccgtctccaaaccttcttcgacatggtggacaagaacgcggatggcaggatcacagaagaggaggttaaagagattatcacgctgagcgcgtcggccaacaagctgtccaaggtgcaggagcagtccgaggagtacgctcgcctcatcatggaggagctcgaccccagcaacctcggctacatcgagctgtacaacctggagatgctgctgctgcaagcgccgagccagtcggtgaggatcgggacgacgaacagccggaacctgagccagatgctgagccagaacctccggccgacggcggagcccaacccgctccggcggtggtggcggcgcgcctcctacttcctcgaggacaactggcgccgcgtctgggtgctcctcctgtggctcgccatctgcgcgggcctcttcacctacaagttcatccagtaccggcaccgcgccgtgttccacgtcatgggctactgcgtctgcgtcgccaagggcggcgccgagacgctcaagttcaacatggcgctcatcctcctcccggtgtgccggaacaccgtcacctggatccgcaaccgcgccgccgtcgcccgcgtcgtgccgttcgacgacaacctcaacttccacaaggtgatcgccgtggggatcaccgtgggggccgggctgcacgtcatctctcaccttacctgcgattttccacggctgctccatgccaccgacgccgagtacgagccgatgaagaggttcttcggcgacacgcggccgcccaactactggtggttcgtgaaggggacggaggggtggacggggctggtgatgctggtgctcatggcggtggcgttcaccctcgccacgccgtggttccgccgcggccgcctccgcctcccccgcccgctcaaccgcctcacggggttcaacgccttctggtactcccaccactgcttcgtcatcgtctacgccctcctcatcgtccacggctactacctcttccttaccaaggattggtacaagaaaacgacgtggatgtacctggcggtgccgatgttcctgtacgcgtgcgagaggctgacgagggcgctccggtcgagcgtgaggccggtgaagatactcaaggttgcggtgtaccccggaaatgtgctgtcgctgcacttctccaagccacagggtttcaagtacaagagtgggcagtacatcttcgtcaactgtgccgccgtctcgccgttccaatggcacccattctccatcacgtcggccccacaggacgactacgtcagcgtccacatcaggacgctcggtgactggacacgggagcttaagaacgtcttctcaagggtctgccggccaccgacggaagggaagagcgggttgctccgggcggagtacgaccgcgacggcgccatgaccaacccaagcttccccaaggtgcttatcgacgggccgtacggcgcaccggcgcaggactacaagcagtacgacatcgtcctcctcgtcggcctcgggatcggcgccaccccgatgatctccatcatcaaggacatcataaacaacatgaggcagctggacggcgacctcgaggacggcgacggcaacgagaactcggtgtcgtcggcgtcggcggcgttcaagacgcggcgcgcctacttctactgggtgacgcgggagcaggggtcgttcgagtggttcccccgggtgatggacaaggtggcggagacggaaaatagtaagatgaacgagctgcacaactactgcaccagcgtgtacctagaaggatacgcacggtcggatcgaatcctaatgatccagtaactcatccaagcaaagtacggcgtggacgtcgtatcaggcacccgggtcaagacccacttcgcccgccccaactggcgcaacgtctacaagcgcatcgccctcaaccaccgcgaccaacgcgtcgttgcttctggggatctagctgatggggacaagcatgatcagagttttgaggttgagtgttcaattggaagtagtgatggactgggtgcagcagttatcaaggttgaacaggaacctgctggggtgttctactgtggcgcgccggtgctgacgaaggaactgcgtgagctcgctcaagatttctcgagaaagacgagcacgaaattcgacttccacaaggagaatttctagttatctggaatcaaaaccaaagttttcgcacggccatgtttagtacatacaaagttctatacatatgacaagtatgatgacatacatattggaaatgtagagggattagatcaaagtaggtattgcttgattgtggccaggcttggccagataatttcatcggttttttgctctggaagaataatccaatgcccccctttgtacagatcttctcccagataatactttgtaatacttagagtagccaatttgataaaatcagtttgtatctagtaacatgtagagagtttcatggaggcctaatcaggtcaaaaatatcacaaatgtttggccaagaacaagaaaaatcatgcccattgcaagc

SEQ ID NO: 57876 - DNA, 2647 bp, Oryza sativa
  Clone ID: PAT_MRT4530_59645C.1
gatcgaccgatcccctccccgccttcctcttctcccccctactgcgttggtagggttttacgcctcactgcccaccgccgccgccgtcaccaccgggcgcggccgccgccaccatgagagccctcatctccctctccaagctcacccgccgcctcctcccctccctcgccgtcgcccgcgccccactcccgcccctccgccgctgcctccacgcggaacccccaccgcctcctcatcacgcgccgccccccgtcgcctcccggatcctccagtccgagctgaccccgggcgcgggcgcggacgcggacgcggagcaagaacagcagccggcccccgaccccttgctcgacgagttcctcgcgcgcttcgtcgccgcgctgcggccgaccctcgccgcggcgttccccacccatgcccgccacgtgctcgacgagatgctccgcctcgtggcggaggccgtcctgtgccgcctcaccggggtcgagccggaggagggcggcgccgtcgagctcagcgacgacctctgggcggcggtgtgggaggtcagcgccgccgtgcgcgacgggatgcagcgggaccgggtccgcgccgagctccggggctacctccactgcgaggaggtgaaggagatgacgcggttcgcgtcggacgtcggcatccgcggcgagatgctccgcgagctccgcttcaagtgggcacgggagaagctcgaggaggtcgagttctaccggggcctcgacgacatgcgcgcccaggccgaggcggccgctaaccctgtcgcgctcccgccgcccaggctcgcagccttgccgcagaggaagggggagatcaagttcaagatacatgggttggacttgtcggacccaacgtggggtgaggttgtggagcgcgcggccgaggctgaagcgcattttgtgccacaggaggccaagccaatagaagggaaggcgaagaaggctgaggagaagctgatggcggttgatccgaggaaaggagacccggcgcctgccatggaagagtggaaggaggagctgctgccgaaacgtgccgactggatggcgctgctcgagcgtcttaaagcccgcaatgttgagttgtatctcaaggtgatatatcctttacttgaaggctctactattgtgccttatgttgctgaaattctgctggctgatgaatcctttggtgcaaccattcgtgattactctaagttaatcgatcttcactctaaagcaaatcatgtggaagacgcagaaaggattctaggtaaaatgaaagagaatggtattgcacctgatgtcgtcacatccatcactttagtccacatgtattgcaaggtggggaatcttgaacaagccaatcaggcatttcaattccttaagggggaaggcttcccaccagatatgaagcttttcacgtcaatgatcagagctcatcttaagtctggagaaccaaaacaagcagaaaatttgttacgtgaaatggagagatcgatcaaacccacaaaggaactattcatggatgtaatcctggcatttgctcagcgtggcatgatagatggagccgaaagggtgaaaacatcgatgttacttgctggattccagctcacgccagagttatacacatcacttatagaagcatatggacggggtggtcacgttggccaagcatataccctgtttgagcagatgaggagttctggacatgaaccagatgatcgttgcgttgctggtatgatggttgcctacatgatgaagaaccaactggaccacgctctgagcttcctgttgaagttagagaaggatggacttaaacctggagttaaaacaaaccttgtcttgctggattggttgtctaggttgcagctagtgcaggaggctgaacaagttgtgcagaagattagaaaggctggagaggaacccctggaaatgcatgttttccttgctgatatgtacgcaaagtcacaacaggaagagagaacccgcaaatccctcaagattttagaggagaagaagaaattattgaaggcttatcattttgagaggattatagcaggccttctcgaagggggtttcacggaagaagccaataaatatttcaaaatgatgaaatcccatggctttgttccatcaccaacaattgagattggggtcaaggctagttttggggttagggggggtgttcatccaactggtaggcatcgtggttaaggctttgtccgttggcagtgatcagctgccattcaggcactgattctggtttgaaaatcttgaagtagcactgacgacgccatagccaattctgtcaactgaagcggcaaaaaaaatttccggcttcaattggttttgtttgatctgatatcagatgtcttcattttgaagatgcctccatgaactatggattcatacaagtagatggccgcttgtcctgttattgccgggattttttttcctcatcaattgtacttgcatgctcacacttaataagtcttttagtcactgtaacgcctggatatctaggctgtgcttgtgccaacaatcggatttatcttagcaaatatcagttatgacttccctgtcataggcatttgtcaccaaataaatgtttacattttaatgaacaatgaaattaaaaaaaaaaaaaaaaaaaa

SEQ ID NO: 57877 - DNA, 249 bp, Oryza sativa
  Clone ID: PAT_MRT4530_59647C.1
atgtcaaagctgcaaaatcagcctgtacgaaaaattgcgaaatcaacaattgaccacacacatctctgtagcatatcgcatcgccacaccggcaggcacaacgccttcagcgcagtaggaaagggacgtgagcatgcccaccgcaaaggcccaaaccgaacggcctcgcgcggcgcgacgtcgcgtgctctcggcgcggcggtggcccgcgtggggcgccgcctccgacccgccgcgccattcctgtga

SEQ ID NO: 57878 - DNA, 285 bp, Oryza sativa
  Clone ID: PAT_MRT4530_59648C.1
atgggggagatcaacatacccttcaaaagcggagtggtctctgcgggcgctcgcagcaacagcctcgcccacacgttgctgccggcggcgccggagcgcggcttccacgaggccgtggaggcaccccggcccggccacccgccggagcgcggcgagacggaggcggaggcagaggcgggcgcccacctctccgcctcgccctcgccggaaggaagccacatgttcctgtgcctggtgccagagaatttccgcagacaaattcaatccatacaggtaacggtctag

SEQ ID NO: 57879 - DNA, 1645 bp, Oryza sativa
  Clone ID: PAT_MRT4530_59649C.1
gcacgagggagaaactagtctcgagtttttttttttttttttttttttttaatagtttaaccacagggtgtatccaaaacaaacagaaccggagagagtattaatcaagtcgattacatcataaatacaagaggggcaaacaaaaaatgttcagcaacatagagcctttctcatggcaaaactgttgtataagtgcacgcaatgctttatttccgaggtatacaagcatcgtgagagatgtggcacattgcatctccctatctatacggctatatatggtgccaccagattctacaaacatgcaggttagtagtggcacccagcaccaatgaccaaacacatcggtgtgttggatttggataccatgcaacggatgtggggcaaatttacaatttacaggttgccccaaaaatgccgccagctccagcctccttaagctatagtattatgttgtgaattgagttactgcatgctattccagagagcagagaatttatgccctcaatgatgcattggccggctgtcaagttgccccgctcattttcctgaacttcagagggaggaaattgcttgaatcggcgttcctcttcttgccaaaactgctaggtgtgacaccagtcggtgagaccaaggaagtggtggtgtttcgccgaaacctccccatgttccaatatgagaatccatcatgttggcttccagaactaggagaacgcatagcaaaatttcttggtatcacactttgctgtcggtcatggatatcaattatggcaactagcatggcctgccatcctataaagttatcccgcactaactccttaagcttaacatgcaaagatgccacatcatcatccacttccttttgatctaacttgatataactcacctgaagagttcttatgggaaccatgtccacagcatggctagggtaagcagcagctatgacaagagaaatttcataatcacaattaattgagatccactgtatcgaacaaacgcatacagtatttgaaccatattgactatgtagaaaaaaattgcttcctctgccgtaaatacttgcttttgtaactgcaactcccattgcaaaaggagatgagctgccgccgggaatcatccgcgacgacggccccgggaacccgccgctgccgctgctgctgccaacctcgaaaagtggcatggtaggcgagaactccccgaagtcggtcaccggcggcgacggcgacggcgcgggtaggcggaagaacggcgagagcataggtggtccagttccgccgccgccgccgccgccgctgcggacgggggaggcggcgtcccacgcggcgagcggcgcgccacgcagcgggcgcgggctccagcggaagggaccgaatccgggggcgcccatcgggggaggcggcggcggcggcgtgcgggactcgtcggtggagacggcgtcgtggtggtgctgcggctgcgggagcggaggcgggggcgggggagggggcggctggtgggggaggaggtggaggcggcggatccagacggagttgagcgggtcggggtgctgctgctgcggcggcgggaggcggcggtggtggtggtaggacggcggcagcgcggagctgtggctcccgacggagctccgcagcgcgaggtgctccgacat

SEQ ID NO: 57880 - DNA, 1122 bp, Oryza sativa
  Clone ID: PAT_MRT4530_5964C.1
atgacaggtatgagtggcgctcaaaatcagcgataccaacaaggtgcacgtgctaacagtacttgggtgcaacaagtgctaagttctcaaatggagaaagcagagcaatggcagtatcacgaattatttgaaacaaagtttgtggttaaggatagagcatgtcgtactataatcgatagtgagagttgtaataacttggtgagttcatatttagttgagaaacttgagttgcttacacaaccgcatcctcatccatattacatcaaatggttcaactcttgtggtcaaccatgggtatatgataataatggatcgcataattttgttgctaatacatacacatttagacataatggtcggaaaatgaaattggtacccatgagttttactaaaattttagaagataatcttgaaaggatgaagaatggaatcgaggaaattttcaaagatagtattgaaaggacgaaaaatagaatcgatgatattttcagagataccaggaaagatactaatattgcgatgccttcaactaagtctgagttattacaaaatgaacgtattgttgtgcctattgctttggatactaatattttgcaggcatctgagaacaaccaaggtaatgaggaagagaaaaaagacgaagaggaagatgagaaacaaggtaatgataatagtgctacagctattcaagggattagccttctcggcgaggtcaaccgggtttcggcacggttgataaccagaggagacatggtgctgcaattgcggggctcagtagcgtgttcgttcagaagccggatcgagttgtgtcgcgactccgcccaaatcgactgtttatcaatacctatcggaagatcgggacctacatccctcaccaggggatcaggtgtattactatcggaggaaggaggaacacttgagttaggggggttgctttggtcagccatggaacccaacaagaaaaggaagactgcgaagagattatttggacatagaaaatggacagggaacgagtgggagaggaacacaaggcagaaaggggtcacggatctggaaaaaggagattacatggaagagaagagtgaaaaacgaaggtggaagaagcgtgctgtggaagattga

SEQ ID NO: 57881 - DNA, 101 bp, Oryza sativa
  Clone ID: PAT_MRT4530_59650C.1
actgtaacggacttttactttacggtggccacggcggcaaccactgaccactaccactgacgacctgctacacggtacgctacgactacggctacgactac

SEQ ID NO: 57882 - DNA, 480 bp, Oryza sativa
  Clone ID: PAT_MRT4530_59651C.1
tcctctaaatcccccacccttgtcttctttttttctttttctctactaccaagagacaaaacgggtcaaggtgggcatttgttcataccgtgctgtccccccctactcattccattgccactgacagaaacatcaaaaatctataaagttcatactaggtgcatactctcactggacctatactgatcctaactagagctcatgatgtccaccgtcggcaaaaccattatttatacacaacacgctaagtcacaaaattgctgacatggccttccacatattgtcaatgatgccattcttaactacttatttccttcgacatttaacaaatcccaaatgaagttccatgactagatcctatttttctcttgcaaatcaataagcatgcttttccgggcgatgatcaattcttatgctttttagaatgatgattgatgctgatgggctatacaccaaatttgcatcctattaattacctgg

SEQ ID NO: 57883 - DNA, 400 bp, Oryza sativa
  Clone ID: PAT_MRT4530_59652C.1
tagtggatcccccgggctgcaggcccgcctcaagaccgcctacgagctgctccgcgtcagcatcctcatcgagtcaccatcctcccccacgtctccctccccttcctcatcctccacggcgccgccgaccgggtcaccgacccctccgtcagcgacctcctctaccgctccgcctccaccaccgacaagaccttccacctctacaccggcatgtggcacgccctcacctccggcgaactccctcacaacatcgatgccgtcttccgcgacatcatcgactggctccaccacaggacatcccccacctccgcttcatatgtgcaggaccacgacttaagtacttctttcgaggcggagcgcaaggccaagcacgacgacaccatccatcgcggcaagcaaa

SEQ ID NO: 57884 - DNA, 653 bp, Oryza sativa
  Clone ID: PAT_MRT4530_59653C.1
cccgggctgcaggaattcggcacgagggcaacactaagacgaggacaactgtcacaaagatctattaagaaaaaaagatctttcaagagacaaagaagccaagctggccgtggaaagcctgacatatgcttgcaaggtactgatgttttctccttgatgtctatcttactagagaattgggaccgccattggtgtggcccttcacttagttgaagcaagaaagcatcataaaagatacaagaagcttctttatccatttgttcgaagagtgacctcaattgatttcggaagccatgtgaatctttttttctttcacataagaaaccacatccttctattcctgaaatatcaagcactcctaatattatatctaatcctacattttagcatctgtaaggttacagtgttagtttccctgcctctggtgtattaccaattttccatatcaaggtgcacaaagttgctaagtagatggccatggtattttagctacattcaatccagttggaaatagttgggtgtaaacatgtgtatatattattactttgataagaatggttacagaaaaatgcatgcataatttgtagtaatcggcaaactaacaaatctattggaaatgataacttctcactccatcccaaaatttatccaga

SEQ ID NO: 57885 - DNA, 2208 bp, Oryza sativa
  unsure (1)..(2208): unsure at all n locations
  Clone ID: PAT_MRT4530_59654C.1
ctagccgccgccgcccgctcgttccgacggggattcggaggggtcgaagggaggaagaggcggtggcggtcggcgaagaggatgacgatggcgacggcggcagcggcggaggaggcggacgcggcggtgggagatggagacggtggtgatggcggtcggcgaagaggacgacgatggtgacggcggcggcggaggaggaggcggatgcggcggcgggagagcgagacggtggtgatggcgacgacccccgcactctctcatggcaatctcgggggaggtgtcggggaccacggcaacgctggtggtcatcaatggattcacggtcacggtggagtcagtcggggactcgcggtgcatcctggacacgcagggtggtgaggtgtagctgctgaccgtcgaccactgcatcccatcatcgacggcggcgtggattttggtggtcgcgcaggtctggctgacgagctccattttcgccgaggccaccgagcccccggggccaaaggccaaagcttggtttgaagtttgaacgaagaggcggaagattgaaaagcccggccggccgggannnnnaaaaaaaaaaaaaaaaaaaananccaaccctagcgcgccgccacctcgcgtcggcatcctcctccgcctccgccgccgccgcctcgccgcccaaggtaaggtaagccatggtgaagcacaacaacgttatccccaatggccacttcaagaagcactggcagaactatgtcaagacatggttcaaccagcccgcccgcaagcagaggcgccgcattgctcgccagaagaaggctgtgaagatcttcccccgcccaacatctggccctcttcgacccattgttcagtgccaaactttgaagtacaacatgaagtcgagggctgggagaggctttacccttgaggagctgaaggctgcgggcatccccaagaagtatgctccaaccattggaatttccgtggatcaccgccgcaagaaccgctcacttgagggactccaggctaatgtccagaggctcaagacatacaaggccaagctggttatcttcccaaggcgtgctcgcaaggtcaaggctggtgattccactgccgaggaacttgccactgccacccaggtccagggtgactacatgcctattgctcgtggtgagaagcgctcagttgaggttgtgaaggtcaccgatgagatgaaggcgttcaaggcctatgctaagctccgtgttgagaggatgaaccagcgccatgttggtgcccgccagaagagggctgctgaggcagagaaggaagagaagaagtgaagtgaccggacatagtatctgttttgttatattcagcagctagtggatgctatcagggactaaatctaaattttgtttttgtgctggaaatagagaccagcttatcattttggtgtcatcataccccttctgtttcatatctggtactgatttgcatgactctgctatcgcaatgaaattccatccatataataaaactgggaaaaaaaacccccgccctacatcttgaccacttcgccccatggttcagttgcatacacttaagtacaacatgaagtctagggctggaaggggcttcacccttgaacagctaaacgcagctgggatccccaagaagtttgccccaaccattggcatctcagtggatcaccgccgtaagaaccgctcacttgaaggtctgcaggccaatgtccagaggctgaagacctacaaggccaagcttgtcatcttcccaagacgtgcccgcaaggtcaaggctggtgactcgactcctgaggagcttgccacagccacccaggtccagggtgactacatgcctatcactcgtggtgagaagcgctcagttgaggtcgtgaaggtcacggatgacatgaaggcgttcaaggcctacgccaagctgcgtgttgagaggatgaaccagcgccatattggtgcccggcagaagagggctgcagaggcggagaaggaagagaagaagtgaaatgatcggaatctgcattgttaagaatagatgctctaaattttgtttcctattgtgctgaatagagaccagcttatcattttggtgtcatcataccccttctgtttgatatctggtactgatttgcatgctctgctatcgaatgaaattccatccatgtgttgtgtctgattaagcaaaaaaaaaaaaaaaaaatttgcggcc

SEQ ID NO: 57886 - DNA, 3045 bp, Oryza sativa
  Clone ID: PAT_MRT4530_59655C.1
atgccgtgccacggcggatgggagactaagtcagcgtgccaacgtacattcagcgccatgctatttagcgctgaggtgtctaaattcagcgccacacgatttggcgttgagcaaaagggggaaacgttcttgatcatcatctccctcgtcagcggctgcacgcaccaattaaggcctcactctgaggcgagtctttcttcctcacgcaccaaccctctgcttgcccacaagctctggttccttgcggatgctgaggcaaggaggatgaaagattctgcagttcaaaaatggcttgaccagctaagagatgttattggcctttcactttcatcctgcttttctaatattcgtatacgtcatgaagttgctgtaaaaattagaagcctgaacaaaaagatagataacatttcaaaggatgatgtatttttaaaactcagcctcacacaacataatggaagtggttcagcatggacacctatagaaagctccagcctagttgaacctaaccttgtgggcaaggaggtcgtacatgcttgcagagaagtggtggatttggtgcttgcacacaaggcaaagaatgtttacaagcttgctattgttggaacagggggagttggcaagacaacactagctcagaaaatattcaatgataaaaaattagaagggagatttgaccatcgtgcctgggtttgtgtctccaaggagtattctatggtttcccttttggcacaagttcttagtaatatgaaaattcattatgaaaaaaatgaatcagttgggaaccttcaaagcaaactcaaagcaggcattgcagacaagagttttttccttgtgttggatgatgtatggcactataaagcatgggaagatttactaagaactccactaaatgcggcagccacaggaataattctagtaactactcgagatgaaactattgctcgtgtaattggggtggaccgcactcatagagttgatttgatgtcagccgatataggatgggagttactttggaggagcatgaacatcaaccaagagaaacaagtgcaaaatctccgggacacaggtatcgagattgtccgcaaatgtggtggccttcctcttgcaatcagggctattgccacagtcttagcaagcctgcaagatcaaacagagaatgagtggagacggatattggggaaaaatgcctggtccatgagcaaacttcctcgtgaattaagtggtgctttatatctgagttatgaagtgctgccgcaccaactgaagcaatgttttctttattgtgcacttttccctgaagatgaaaccattttgcgcgacattcttactaggatgtgggttgctgaaggctttatagatgaggaaaaaggacaattactagaagatacagcagagagatattattatgagctgatccatcggaacttgctccaaccagatggtttatattttgaccactggagctgtaagatgcatgacctcttaaggcagcttgcttgttatttgtctagagaagaatgttttgttggggacgtagagtcactagggactaatactatgtgcaaagtgcggcgtatttcagttgtcacagagaaggacatgatggtgttacctagcatcaataaggatcaatataaagtgcgaacgtatagaacctcctatcagaaggcactgcaagttgatagttcacttttcgagaaacttacatatcttcgtgttttggatttgactaactcacatgtacaaagaatcccaaattacattgaaaacatgattcatctgcgcttgcttgatcttgatgggacagacatttctcatctaccggagtccattggttccctgcaaaaccttcaaatattgaacttgcagaggtgtaaatctctgcaccgccttcctttggcaaccactcagctgtgcaatttgaggcgacttggtcttgctggtactccaataaaccaggttccaaaagggataggaagactgaaatttctcaatgatttagaaggatttcctatcggtggtggaaatgacaataccaaaatacaagatggatggaatttggaagagttggcttatcttccacagttgaggcagcttggtatgataaaattggagagaggtactccacgcagcagtacagacccatttctactaacagagaaaaagcatctcaaagttctgaatctagactgcactgaacagacagatgaagcatattcagaggaaaatgctagaaacattgaaaagatcttcgagaagctaacacctccacacaacttagaagatctttttggtgggaatttctttggttgtagattccccacctggcttggttgtacccatttgtcttcagtgaaatctgtgatcctcgtagattgcaaatcttgtgtgcatcttcccccaatcggacagctaccaaacttgaaatacctaagaattaatggagcaagtgcaatcaccaagattggacccgaatttgttggctgctgggagggtaatctcagatccacagaggcagttgctttccccaagctcgaaatgttgatcttcaaggagatgcccaactgggaggagtggtcctttgttgaagaagaagaagtgcaggaggaggaagcagctgcagcagccaaggaagggggagaggatggaattgctgcttcgaagcaaaagggggaggaagccccgtctccaactccaaggtcgtcgtggctgctgccttgtttgaagcagttgcaacttgtggagtgccccaagctgagggctctccctccacagcttggacagcaggccaccaacttgaagaaactctttataagagacacaagatacttgaagacggtggaagacctcccgttcctctctggttgccttttagttgaaagatgtgaaggcctggagaggatctccaaccttccccaagtaagagagctgcgtgcaggtggttgccccaatttgaggcatgttgaggagttgggtggttttggagcagctatggctgtcaaagaatatgcagaagatctcttcactgtgggtcccagggcttga

SEQ ID NO: 57887 - DNA, 343 bp, Oryza sativa
  Clone ID: PAT_MRT4530_59656C.1
gggggtctaaaactttaattgggctttaattctcaaaacacgagagacagaccttaacccctacggggtgtcagaagaatccataagaatcagacttaaatcctatgacgaaaaaagatagcaatgctatgaatgtttgcctaagagttttacggactcctgaaagtaaaacctatcgcgtaggccaaggagaggttcttgggtacttcaacataacccatacagggcaaattccacaaccggaaatgccttaatggtaaaagggagaccagctcaaaggtacctttgcctcagaaatggttggaccagcttgtggtgctcaccacccacagggatcccggag

SEQ ID NO: 57888 - DNA, 504 bp, Oryza sativa
  Clone ID: PAT_MRT4530_59657C.1
atggcgtccatgctctgtgatcctacctgccccgttgaggcgcaactgctactattgcctgaggggctgaccattacaggaggaatggagcgtgaacgtctcgagcttgtggtccacaacatctctttctctgattccgggacaaagcttggcggcgacggcattggccaaggcagcgtcggcaaaggcggtggcgtggcacgcgcggcagtggtggcgtggcgcggctgcggcggcgtcggcgtcggcaaaggccgtggcggcaaaggcggcggcgtggcgcgcatggcagcggtggcatggcgcgactgcggcggcgtcggcgccacgcagcgtcgcggcggccgaggcgcgacggaggcggtggtgttgtgcggcggcgtcggggtcggcagtggtggcggtgtaggcgtcggcgtcgggagtggcgttgggacggcggtacacggcccccttgtgggggtctacggcggagggagggctgaggcccggggggaattctag

SEQ ID NO: 57889 - DNA, 488 bp, Oryza sativa
  Clone ID: PAT_MRT4530_59658C.1
atgtttttcaccggaattaaaaagttcaaaaagcagcaaaacatgattttttgacatattggagtgtattggcttcgtccgtgtcaaaaaatcactacgtgactcgcgcggtgaacttttgtcaattaatgccaatattggcacacgtgggtgcgatgttttcgaccgaaagacaaagttcgaaaatcaccgaatcaagatttttggacatattggagtgtattgggtgcgttggtggcgaaaaaaaacttcgtgattcgcgtggcgaacttttgtcaattaatgccaaaattggcacatgtgggtgtgatgtttttcactggaatgaaaaagttaaaaaagcacccaaacatgagttttggacatattggagtgtgttgggtgcgtgcgtgtcgaaaaaccactccgggactcacacggcgatcttttgtcaactaatgccaatattgtcctgcattagctgtaacaccctgaaaattcaagacaag

SEQ ID NO: 57890 - DNA, 1676 bp, Oryza sativa
  Clone ID: PAT_MRT4530_59659C.1
gatcctcacaacccccacaccacatgggctgagtagctagttagctcctcttctcttcccctcctacctccactcctactccattatccagcagttcgatcgatccatggctatctagcttctgatcttgatccctttcttcttctcatcgtccttgtttgttcttattcctagctacttagcgagatctatcgatcagttcagacctcttaattcctgtcctgatcaatcacgttctgtctgtatcctttgattcgtcgacaatcctagtacttcatggagcagtgttagttagctagcaaaagtagtactttcatcaggagtgtctatcggcaaatagctaggttttctggcttaacacgtactttcattaatttggaagaacagcaagacaaagaaactgattaagatcagcgagtaatcgatgatggcaggagctcccccgatgcatatctgcatggactccgactggctcaagggcatcgtccccgaggagcacgggatggggtcgtcgtcgccgtcggcggagctgatcgcgtgcccgcgggcgccgatgcaggcggcggcggcggcggccgaccgccggcttcgcccccagcacgaccagccgctcaagtgcccgcggtgcgagtcgacgcacaccaagttctgctactacaataactacagcctctcgcagccgcgctacttctgcaagacgtgccgccgctactggaccaagggcggctcgctccggaacgtccccgtcggcggcggctgccgcaagaacaagcgcgcgccgcccaagaaggccgccgcccacgcccagcccgcggtggcggtggcggcggcgctgcaaggccgccacatggagaccggactccacctgtccttctccgggatgcagcatcatcttgcgccgccgccgccggcggcggccaccgcggccgacccgctctgcagccttggactatttgactggaagcagtacgaccccgtcttcgccggctccggtggcggcggctcccccgtggcggcgctggagagcgctggtggctcggaggcgcagttcatgggtgctggcatgatgggcattggcggcggcggcgtcgcggagtaccatgcgctgagcgcgctccggttcgcggcagggctcggcgatcacctggcgctgccgttcggcgcggtgcgggcggagcacgacgccgtcgaggtgaagccggtggcggcggagaggctgctgtcgctcgagtggtgcggcgaggcgagccgcacggcggcgccggagagctccattagctcgctgggcgggctgggactgtggagcggcatgatcggcggcgggcaccatcaccatggctcctccgctgccatctgaggcgaagcaagctagcatgcatgcaatgcgaaggacacgtgatcgaacgccgcgagccgctgcaatctgtgcaagaaggaaaggattagcggtttgctaatagcattaacaaagtatgactacgtagaattgtttggctttaatttctttgctgctgttttccatcttctcccccactggtaatctcctacttattttcgtcgttttgtctttgtatttcccaactattccaagtcctggtgatgttctgctgttgttccagctcatgcatattgtcgtgcatggttctgttaaacacgatgctggcttgctagagatt

SEQ ID NO: 57891 - DNA, 684 bp, Oryza sativa
  Clone ID: PAT_MRT4530_5965C.1
atgacagaagccgctgccaacgcccgcccaaaactggactgggttttcacccgaagtggagagagtccacaaggcaacacctccaatgaggaaacgacacccataggcatcgatgtcaccgatcctagaagaccaggcagggctgtcgcccaagactccctcaagaaggcacgtgaagcatcggcgaggcccaagcgcccttactaccaacagactagaccaccaacacggacgaaaaaaactcaaccaccaaaagactccacggccggtctgggagcaggcgaccaagagaagggaggagcatcaaggaggggaggaggcctggccggtctgaaggtgaaactgagaactggcagcaagggcaacaaagacatcggtgtcatccatgtttccagcgaggatcttcgggcttcgtgggacaatccaaaacaactgtggcaaccacctccaacttcaccaccagcgcagagagaggagcaccgggcgactggagcggtcggagtcgccgacgcgaccccccggcaggacccaatcccaccgactgacggagacagccggcgcagctgtaggcaggccaatgcgccgccccggacgccgacctgccgcgagcgccagccaccgccggccaccccgcgggccgccaccaccacgctgccccgcgccgcaacaacctccgccgcctaa

SEQ ID NO: 57892 - DNA, 1025 bp, Oryza sativa
  Clone ID: PAT_MRT4530_59660C.1
gatgactgtgaaatcattgagcaatactcgttgggagagtcgcatcaaaagtgtcagggcgtattagatatcaagctcctcaactaaggtcagctttgttgtggctaagtgagggtagagatactgaaccaaaggacaggagtgatgcaaaaaaaaaaaaacaaaaaagttggcagctttgaagttcatacttggaatggttatttggcatgacattctatattctgtaaatattgtcagtaagaagttgcaatcaccatccatgtgcattgattctaccttacagcatatagaaggtatggtgagttactttcagagctatagaaataatgggtttgctgatagtctggttgcagccacagaaattgcacttgaaatgggagtagagccatccttcccagtagagcgtcagtctcaaaggaagaaacaatttgatgaaactgagtacaatgaagctattttgcaagctgagaaggattttgaagtcaattattttttagttatggttgatatggcaattagttcattgaaaagcagatttcaagaactccagtcattcaatggaatattcggatttctaatgaattcaacatccttgaagtcattggatgcagctgatctaaaagaccaatgcactaaatttgcacaaactttctctttggatggttcctcggatgttgatataaatgacctaatttctgaattaggtgttatacagtttactttgccagataggccaatgtctgctatggagatttttgaatttgtcacagaagcggattgttatcctaatatttccatcgcttatcggatcctattcactatgcctgttactgtggcctcagctgaaataaccttttcaaagttgaaattattgaagaattatttgaggtctgtaatgtctcaagaaagattaaatggtttggcaactttatgcatagagaagaaactattagatgaaattgatattaaactatcagctttagtttcctttattcaaaagatcgtaagaaaatctctaagtt

SEQ ID NO: 57893 - DNA, 372 bp, Oryza sativa
  Clone ID: PAT_MRT4530_59661C.1
aattaagctaattaattagacgtccagctgaaagcctgaaagctaaagctcgaaatcatacacgaaaaaaagaaaagaaaaggcaaaaaaaaaagttattacacatgatgagatgaggacgcggcggcgctagctcgcgttaggagatcggaccggagtcaggcgacggcggccgggagcgcgagcgtgccgacgaaggggaagctgagctgcggcagcgcgaccagctgccgccgccccgccgccgccgccatctccatcagcgccttcctgatcggccgcagcagctccgccaccagccgccaccgcaccagccgcgacacggccagcctgcaccggcccgccggcctgcgccgccgccccagccacacc

SEQ ID NO: 57894 - DNA, 1737 bp, Oryza sativa
  Clone ID: PAT_MRT4530_59662C.1
ttgtttctggagattaaacgttctcaaacgaaattatgcgtttccaaaagaagcccaaaataggctaggttagttactgctacatttttttgctgcagaagactagtaaaatctatctaaatccgtgatgccatggtgcaacaggctggggagcttctgcattatgcggaccaagaactccatgaagcagacggtgcgcagcgcggcgtgctgccccattcgcctgtccagctccttcgcgggcttcagggcggcgagcacataggccgccaggtcacggcgctgctgctcgtgctggctgagctcgccgtcgccgatgatgctcgccggagacacgagcgtcggcttgtaaccccaacagatccggtagtccgactcctcctccggcgacgcgttcggcggcgcgtccaagtgggacacctcctgcgtcacatcgtcgtgtataacgatggagatttcgtcgccggactgcaataaaataagcagcccgctgccacagtcccagacgccggcgaccttcgccgccgacgacaagtagtcattgcggaacgcgcaccgccgctcccaccggcgatcgcccatgagcagccatatggcgtagcgtgtctcgtcgccgccgtcggctgtcgcgacgcacacgcgtccggacatctccatgagatccgatttggcgtgcgagcgaggctcgccaccaccttcgacgacgacacgctcgccgggcaagtcgatgggggtgatggcctcatcgtcgacgtcgaaggcgaggacggttcccttgtcggcgttgaggaggtacaccgcgccgtccatgtaaagcgatcggccggggatcttgtcgttgtccagcccggcgagcaccgttcgcggctgctgctccgccgcggtgcccaacgagtacacgaccaactcgtcagcacggtctatgtagagaggttgaccagaaacgcgtccgcgtgtctttctgccgtttgggtatacttttaggttgagaacgaactcgtgcttgcgagcgaggagcttgtaggttcttgttcttggaccgtaaccgaggcccgatatgtgatagttcgttctcttgtccggcgaggaacagtcgagggagactttcatctcgtcgccggcgacggccgggttcaggagaagcccgatggaagggtcgtcatcctccgcctcccctttgccggcaaggagtacgacgccgttgcacgtgccgacgtagttctggtcgttgcgcttctgcctggcgaggacgcgcatcgggtcggtgccgcggcggcggccgtcgccggcgacgtggaagccatggtacgtccacgagcggtcctgctctgggtcgtcgtagctcgattgacaggcgaaagcccctgtcccgaagccgtgcttcgctcgttgttcggcccattgttcgagggacttgacgcggccgaacatgtcgcggtgggtggcgacgaccgccgtggcgacgtaggcgatgtgcgggcgcggcaggggcgcgccgtggcggcagtggaggcgggcgaactctgggctggctatcaggcggcggtggtgcctcgacagcgccatggacgcgacggcgtcgcgtgccggcaggcgggcgaagatgttgcggacgacgtcgtcgcagatggcgccccacgacgacgacgacgacgacgacgacgaagccatgcgcgctgcggcggccgggatctctccatccgccgcggcggcggcgtcctctctcttcctcttcat

SEQ ID NO: 57895 - DNA, 522 bp, Oryza sativa
  Clone ID: PAT_MRT4530_59663C.1
ggggggggggaacccgagctttactaaaaaaaaaaaacctttttacgggggacaaaccaagtgaggaggctttaaccaagggctaaataacttctccgggcgggacaaaaccctgaaaaatcttaggaaattttgtccccctaacttggaactaccacccataaaaagctcaaaccggggggaaaaaaaaaaggttttccggggccccccactggctaaattttttcatgggacccctcgcgccccctatgggggcttaatttctagcatcctccgggggggtcccccccccaaccaccttttgggaaaaggaggccaaaccctggaaaaacctgagaaaccccgccggggggggaggaaaaacttggcctttctccggttgggggccagggggcaaaaaaaaaacctccgccggggggcgccaagaacttccccgggggggggggttgggaaacatttggaaaaatttcctcgcggggagggggggcgccccccatgcccaaaaaaaaaaagggggggaaa

SEQ ID NO: 57896 - DNA, 141 bp, Oryza sativa
  Clone ID: PAT_MRT4530_59664C.1
atggacgcgcggccgccggcggcgaggaagagaggtgaggtcaccgcggcgggagacgcaacgccggcgaacgctcagctcctggtgttgactgtcgagacaaagcagggcacagatcacatgcagtttgacatcatctaa

SEQ ID NO: 57897 - DNA, 391 bp, Oryza sativa
  Clone ID: PAT_MRT4530_59665C.1
ggctttctttatgagaacgagtgctacagcaagttcctggagccggccacccggggctagacgcctacgacgtctactacaccaccaaggtgcgcgatttccagtacctgctccgaacgtaggcgggcgtcaagcgatgccgagtgacgacccatcaagaacctcttattgactgagtgccgactcgccattaacgacctcatcaacaacctctacgagatcaggtgggacatctcagtgatagactgggcgttggtgtgtaacctgaaatcgcccgtgcggatcccgtcgatgttcccatccggcgtgctgggcgcacccacgccaccggcggcaaggcccccaacaatcttctggagcacgacttccacttgctgcagcagcagatcct

SEQ ID NO: 57898 - DNA, 1139 bp, Oryza sativa
  Clone ID: PAT_MRT4530_59666C.1
tgccctacccaggggcaatgatggtcaaaccgtcccacgcaattgttgcaaatggaacagtgcgaacaccgaggaggccgaaaaaccatgcaagtttcacagtacttgaccttcacaggcaccccatttaccataacatcttttacacgaatgagggtaagagtgtgcatgaggaacgacaactgatacgcgcacaggagaaattcagagcaatagaattacaggtagcatcctaagtatcatggatcagtttttttttacaaaaagaatcatcctggcactatcagatgagactagcagaaaaaagacccacagcgaagtaatcgcccacttctttgaaaacagaggtcatacatgaaaaatggtggaaagcactgatgaatgccgttgaagttcatgaagggcattgttcctgtctgtgcagatgtgacttgaatgaatcagttcatcagcttaatgatccatgccactggcatctattcagacttcataagacccgggggaaggctggtctgtccgcaagagatgcagcgaaaaattgtcatagtgaaactcttcttctggtggatgagatgcacgaggtacaataccaggatcctgagctgcggtgatgaaaagtaacgaacctcatcttacactgtaggagcttgcgcctgcatgtatgatatccatttggagtttgagacagcctcaatgacgaagattccgtctacaaaacgcacagaagacagcaaccgggacaaaaatcagtgcaacagaaaaaagcagggatttagcatcaggtccaaatattagccgaccaccaaagaagaacctattattccccttccaggcttcgtagacgcgctgccgctgcgactgcggctgcggctgcgccatgggcagcggactccaggccctcccgaggctctcctccaatcaacaacccatcgaatccgcgcgagccggcgaggaagaaatcgatgctcgcacgcaagaaactgaagtgcacgaaatcgacgcgaagaagagagagagagaagggaagcaggcgagagaggaagcgatgctgcaagcaagagccgagagagatatcgctataggtcggtaatgcaagagaagcaggcgtgggtgccactgccgtacaccctgccgcgcgg

SEQ ID NO: 57899 - DNA, 213 bp, Oryza sativa
  Clone ID: PAT_MRT4530_59667C.1
caattgcaaattatttatgaggccctcgatttggtgttctttatccccttctttttgtcctgatttcgaactgtttctctctgttttttttctttttggtttggttttgattgcgcaagaataataatgctgtgatagagatgagatttcaggcaacaaattagagtctctgatgcgctaaatccgtagcgctcagcgtacgtgcgagaacga

SEQ ID NO: 57900 - DNA, 1148 bp, Oryza sativa
  Clone ID: PAT_MRT4530_59668C.1
atggacgacttcaccttccctataaccgcagcagcagcagcagcggcggcagataccgccgccgccgccgccgcagcagcagagcccctccgcctccaccaccaccaccaccaccatcgccgccgcggccgcctccacttcgccgcctcgccgctctggttcccttcctcctgccccgtcgccgccgcgccacctgacgtgccggtggccgacgacgccgacaccgccgacgccgccgtggcgagcgccgtcaaagacgtcgacgtcgtcgtcttcgtccgagacgccatggaaggcaaagaacaagaacaagaagatgaagaaggaggaggaggcggtcaagaagaagcgacgtcggacgccgggcggcgggaggaggaggaggggaagaaagaggaggaggcgacagcagcagcagcagcaacaggagagctctcgcgcggcgacggcgacgaggacggcggcgaccatggcggcggtggcgcggcgcgcgacaaggaggagaagatggaccagctgtgggagaacttcaacgaggagctccgccaggcgctgcaccagcgggtgggctcgtgcccccgcgcggacgcgcgggcggcggcggcggccgggatggagctgtcgccggagacgtcggacgcagagtcggagccggcggcggcggcggcgctgcgcgggcacatcgggtgcgcgccgatgctgcggccctcgtcgagggccggcgccggcggctaccgccggacggccaccagctgggtgctgctcatgaagatcttcaggaggctcttcgtcatcgagaagaccatctcgtcgtcgtcgtcggcggcggcgtcggcgtccggccgccatgggagtgcgcgccggtgatgccgccatcattaattcacgatcagcgcgcggcatccgtactgctctttgcacgattaatcgcctgcaattaattaagaagcatcgctagcttctgatgatgctaattaaactgcagttaagtaaattataggcacacgtacgtacgaattgctcctgcatgctgataacgccatgtagctagatagggtttgttcagcagatacaagggactgagggagctagttaagcatcacttgaattttgaattcttcagttttttttacaaaaaaaaaaaaaaa

SEQ ID NO: 57901 - DNA, 731 bp, Oryza sativa
  Clone ID: PAT_MRT4530_59669C.1
ccggccgggatagaaagccggccgggcttcttgtgtggcacgtaagaggcagaactccgcgagccggccgggctttcctcccgatcaccccgacgcattctgctttcgtctccagaggcagacaagaactgtggcattaacaaggacaaagatgtcaagcatggcaggcttgggagcttctcagcatggatatcctccccgaagtcatgagccctggactaaacttgtacacagagagagattacccgagtggtttgcatacaatccaaagaccatgaggcctccaccacttagccatgataccaagtgcatgaagattttatcctggaatattaacgggcttcatgatgttgtaacgacaaaggggttttctgcacgtgacttggctcagagagagaattttgatgtgttatgtcttcaagagacacatttggaggaaaaggatgttgaaaagtttaagaatctgatagcagactatgacagctattggtcatgcagcgtctcgaggcttggctattcagggactgcagtaatttcacgggttaaaccaatttctgtccaatacgggattggcatacgtgaacatgatcatgagggcagggttattactctggagtttgatggtttttacttggtaaatgcctatgttccaaattctggtcgttttctacgtagactgaattacagggtcaataactgggatccgtgtttcagcaactatgtaaaatact

SEQ ID NO: 57902 - DNA, 606 bp, Oryza sativa
  Clone ID: PAT_MRT4530_5966C.1
atgacaagtatgagtggcgctcaaaatcagcgataccaacaaggtgcacgtgatgaccgtactttggtgcaacaagtgctaagttctcaaatggagaaagcggagcaatggcagtaccacgaattatttgaaacaaagtttgtggttaaggatagaacatgtcatagtataatcgatagtgagagttgcaataactttgtgagatcagatttggttaagaaacttgagttgcctacacaaccgcatcctcatccatattacatcaaatggttcaactcttgtagtaagttcaaggcatctgagaacaaccaagcgcctacaatttctgaagatgagaaaaaaggtaaagataatggtgctacaactgctcaagagcacaacatgcgtataagttattctctatctagttcctctagttgtttaaatgagttacaggttggtttgcaagaaggggagtgtagtggtttttcgactacaaagatttctggatccaatcatatgaccatcaagaaatgttcctcaccggatgtgatagataaagataagttcaatacgctccatgacaagagttacttgcttgggcgaaagaaaagaaaccgaacataa

SEQ ID NO: 57903 - DNA, 1395 bp, Oryza sativa
  Clone ID: PAT_MRT4530_59670C.1
cccgacgcattctgctttcgtctccagaggttcgtcttcttctccttcccccagctttgcggcctcgagaactccgcgagagattttcgctttcctcccgatcaccccgacgcattctgctttcgtctccagaggcagacaagaactgtggcattaacaaggacaaagatgtcaagcatggcaggcttgggagcttctcagcatggatatcctccccgaagtcatgagccctggactaaacttgtacacagagagagattacccgagtggtttgcatacaatccaaagaccatgaggcctccaccacttagccatgataccaagtgcatgaagattttatcctggaatattaacgggcttcatgatgttgtaacgacaaaggggttttctgcacgtgacttggctcagagagagaattttgatgtgttatgtcttcaagagacacatttggaggcaagtcttggtgtttctgccataagactcttaatttatactgaaaaggatgttgaaaagtttaagaatctgatagcagactatgacagctattggtcatgcagcgtctcgaggcttggctattcagggactgcagtaatttcacgggttaaaccaatttctgtccaatacgggattggcatacgtgaacatgatcatgagggcagggttattactctggagtttgatggtttttacttggtaaatgcctatgttccaaattctggtcgttttctacgtagactgaattacagggtcaataactgggatccgtgtttcagcaactatgtaaaaatactggaaaagtcgaaaccagtgattgttgcaggagaccttaactgtgctcgtcaaagcattgacattcacaatcctccagcaaaaaccaagtctgcaggtttcacaattgaagagagagagtcatttgagacaaacttttctagcaaaggccttgtggatactttcagaaaacagcaccctaatgctgtcggctataccttctggggtgaaaatcagcgcataaccaacaaaggttggcgattagattactttcttgcgtcggaatctattaccgacaaggttcatgattcatacattcttcctgatgtatcattcagcgaccacagtccaattggcctggtactgaagctatagtatcggcgagactctaaaattcgagaccttactgaagccaactgtacataatcacttgacaaatgcttatataaatctttggccagcctgaaatgttgcaagatgtggtagagttagtctccatatccatttgccagtcaatattacgatttgttctgtcagtctgtcaggtgttcgtcctgagaccttctgtatataacgcgatgcatttgtttgctgtctctgggccaaactttcaaaaaaaaaaaaaaa

SEQ ID NO: 57904 - DNA, 1304 bp, Oryza sativa
  Clone ID: PAT_MRT4530_59671C.1
atatatataggccagtatcatcattaatctattgagtcaatacatcaaaatcctgtatacatgtgcatcaatccacctgaaacaaaccctcagtggaatgcattattatgaggtttatacatatgaacacgtaaaaaaaatcaactgaaaaatggcctctctatgacgattcttgtgagtgtgatctatcctctctacaactctacaactcctatagccctacagcaactacaaaaacaaggaagaaaaagaatgtgatcctatgtgtaatcaaatcatcaatacaggataatggagctctgaagctatggtggctggagctgagctgatcagaattcagaattcagagaacgatgaggaataggagaacaatggtggcggaaacgctctgcggttgcagcggtgagcttgctgaaggcatcacattgacctgggtgccgtttggcaaagctcctttggctgcttcaggggtgtagctactcggaccaagaccgggtttcgaaggaacagctgaagggctggggttcaccggaagtctgctcgattcgtcgaagttgtagcagttgaagtttttccagcccaacaccattctctctcggtcaaagacgaccttcagtccagacatgaaattctctcctattaagttaacaccctcactcttcataatagccaagcagtacccaactggattaaaagcattgtccgttatggtaattattggatcgttaacaggaaatatgcttccaccttttgctgtcagacttacatttggatgaacaattccgttggcacttactgagtagcaaaattcaaacggcatggaagagtcaagcatgtttcggctcgaacggatttgtgcatcaaacctgatagtgatttgagtatacattggatcagacagagccgtgaaagacgtgccagagtcaacaatagcactgaactctgtgctgatcgatttacttcccaccgtaattcccgtgatagttatgttgtaatatggattcggttatataaacattcaatggagtttccttctgatccgagcttcctgtgtccccaaaattgatcctaccatgaccgtcatcgccaaagcccgcggagaaagaattagcagcaagtcctttgcttgctagcaagctaggaaccgatttgctgtccatcccaagcccaagcagaccgtttggcgcagcactgcctagaaacgatcctgtctgaacctgtccacagccgaacattatcggagctgtaacgattttcgattgcgcggagtcagatgtcaagtacaagacatcctcccctcgtgc

SEQ ID NO: 57905 - DNA, 158 bp, Oryza sativa
  Clone ID: PAT_MRT4530_59672C.1
catactctcatgtttccaaagtgaaccctttgctgtactacatcacatcattattgccttcatcttttccattcaaggaggaataaaatggctggctggcaagtctcagcttcaatctaggacttgcgttcggagtgccaaaaaaaaaaaaaaaaaaa

SEQ ID NO: 57906 - DNA, 807 bp, Oryza sativa
  Clone ID: PAT_MRT4530_59673C.1
atggctcaattgggtcaactcgacgccgagagcaacgtcgtcgtcgcccctaccgctaccggagacgagggagccgacatcgtcctcgcgtcgcttccgactagggaaggatggtggacggcgttcgtcctctaccacggctgctggatgacgccgcaggccgcgacgagcgtgtcgctggtgcgcgcccagttcgcgccgcgccccgacgacgtgctcctcgccacctacccaaagtgcggcaccacctggctcaaggcgctctccttcgacatcgccaaccgctcccgccaccccgtcgccggcgccggcgaccacccgctgctcacgacccacccgcaggacctcgtgccgttcatcgagacgccattccgccacctccaccctctctctgccctcgacgcgctcccgccttcgagctgttcgtcgatggctgttccctctacgggccgatctgggatcactgcctacacggtgctcttcctcaagtacgacgacatgatggccgacccggccggccacgtcaagaaactcgccgagttcctccgcgtcccgttcactgacgaggaggtcggcaccggcgtcgtcgtggaggttgtgaggctgtgcagcttcgagaagctgagccgcctgccggtgaacttctccggggtggttgatcggatcggcggacgaccgatggagaactcgtcgttttttaggaaggcgaaggttggagactggaagaacaacttgactcaagagatggcgcagaagcttgatgccgttattgcggagaagctgaaaggatctggtctcaccttctga

SEQ ID NO: 57907 - DNA, 204 bp, Oryza sativa
  Clone ID: PAT_MRT4530_59674C.1
atggagaagagcggttgccggccatctctctcttgcacacgctcgccggcgaggtaccgcatcctcgcactctccaacattctcccaccgtcggccgattccgacgtcacggtgctccctgactctgaccgcccggcgcgcgcgcttctttggtcacccaacaagaagcgaggagtcaacgacggtggcgcccaacgagcttga

SEQ ID NO: 57908 - DNA, 3618 bp, Oryza sativa
  Clone ID: PAT_MRT4530_59675C.1
atggaggcggtggaggagcaggtggcgccggagcaggtcatcagcacgaggggaggctcggtgctcgggaagaagaccatcctcaagagcgaccacttccccggctgccagaacaagcgcctctcgccgcaaatcgacggcgcgcccaattatcgccaggcgggttctttacgagttcatggtgttgcaatgccgacaatgaagggaattgtaaatgtgttaaatcacattggagcacaaaagaaaggaaaacaaacccaggttctatggcatagtcttcgcgaggagccggttatctacatcaatggtcgcccttttgttctgcgagatgttgaaaggcccttctcaaaccttgaatatacgggaattaaccgggaaagagtggaacagatggagtttcgcctgaaagaagatattcttcaggaagcttcacgatatggtaataagatcctcgtcactgatgagctgccaaatggtcagatggtggaccagtgggagtcagtggtaactgatacagtcaagacccctcttgaggtatatgaggagttgcagcatcaaggataccttgtagattatgagcgtgttcctattactgatgaaaaggccccaaaagaaggagattttgacaatctggtacgccgaatctcccaagttgatatagaaactgaaatcatatttaattgtcaaatggggaggggaaggacaaccactggtatggttatagcaacattgatttatctgaaccggataggatcatcaggtatccctaggacaagttcaatcgggaaagtcttccattctggaaatgatgtagatgactatatgcctagctcagaagaagctatcctcagaggagaatattctgtcattaggagcttggtacgagttctggagggtggtgttgaaggaaaaaggcaagttgacaaagttattgataaatgtgacacgatgcagtgtgctctgctcaacaatcaaacttttcagaagaagttagttttttctgattggatgagagcaaggcctgaactgtacagcattcttcgaacgctgttgaggagagatccaatgggcgctcttggttattcaagttcgaaaccctctcttgcaaaaattgttgaatatgctgatggacgccctcatgagatggatattgttgctgccatgagaaatggagaagttcttggacgccaaactgtgttaaaaagtgaccactgcccaggttgtcacaaccttcatttacccgaaagagtggagggtgcacctaattttagggaaattcctgaatttccggtttatggtgttgcaaaccctactgttgatggcattcgagctgttattcagcgtattagtacaagcaagggagggcgaccaattctgtggcataatatgagagaagaaccagttatttatataaatgggaagccatttgtactacgtgaagtggaaagaccatacaagaatatgctggagtacacgggaattgatcgtgatagggtggaacgaatggaagctcgtttgaaggaggatattttacgggaagcggaacgctatagtggggccataatggttattcatgaaactgacaatggtgagatatttgatgcatgggaaaatgtaaataatgaagctgtcctgactccattggaggtgtacaaacttctggagtctgaaggtcttccaatcaagtatgctcgagtgccaatcactgatggcaaagcccccaaaagttcagattttgacacaataaccttaaatgtggcagctgctcacaaggatactgcatttgtttttaattgccaggctacaaaggttgagtttaacttactgatttttgtagatgggcaggggaagaacaactacagacctattagattgccagcttgtgaatataaccatgaagatccaaatgaattgggttactcaagtggagaagaaacaacggatcacaatggtcaccttaattcaagttcaccaagacctcatactgtgacagaacaacatcctagatttggaattgatgacatacttgttttgcggaagattacaagattatttgacaacggaatcgagtgtagacaaactttggataatgttattgacaaatgctcggctttacagaatattcgccaggctgttttgcagtacacaaaagtaattaaccaacagcatgtggagcaaagagttaagagggttgcattaaatcgtggtgctgaatatttggagaggtacttgaaattagttgcattctcagcatatctttggagtgaagcatttgatggtttctgcgggcaaggagaggcaaagatgtcatttaaagcatggatacaccagaggccagagatccaaagcatgaaatggagcatacggttacgacctgggcgttttttcactgttaatgatgaatccaaagcatcttttcagccttcacaaggtgacgtaatgatggaagccattgtcaaagctcgtaatggttctgttttgggaaagggatcaatactcaaaatgtacttctttcctggacagaaaaggtcaagcactattaacttctgtggtgcaccacaagttttcaaggttgatggataccctgtgtatagcatggcgacaccaactgttgatggagcaaaagaagttctgtcatatttgggctctaaagatactgggagaagcattcctcaaaaggtggttgtcacggatcttagggaggaagtggttgtttacatcaagggaacaccttttgttttgagagaactagatcagcctgttgatactcttaagcatgttggcataagtgggccaatggttgaaaacatagaggcaagactaaaggaggatatactctccgaagttaaacaacaaggtggtcggctacttctgcaccaagaagaatttaactcgtcaacaggccaaagtagtgttgtaggtttttgggaacatataggtacggaggatgtgatgacaccggctgaagtatatagtgtactgagaaatcaggggtactgtatcgactacaaaagaatacctctcaccagggaaagagaagcattagcttctgatgtagatgcaatacaatcgtcggttgatgagaatgctaggtactacctctttatttcacacacaggatatggtggtgttgcttatgcaatggccattacatgcctgggactgggagcagatgaaaagttcatcatggaacaaacagcagaaacacacttcatatcaacttctcttacaaaaagtgtgtctatcaaaacatcagctgatatagctctcaagcaaggtgactaccgtgacatattaaaccttacaagggtactggtacatggcccaaaatgcaaagaagaggttgacactgttattgacaggtgtgttggtgctgggcatttgcgggaggatattatgcattacagaaaggcactgcaagattgttcacttgatgatgatgagacatggtcatatctaatggatatgggcactaaagctttgaggcggtacttcttcctgatcaccttccgatcctacctctactgttcatctttgcgtgagccaacatttgcatcatggatggaggccaggcctgaacttggccatctctgcgataatctaaaactggataaatag

SEQ ID NO: 57909 - DNA, 3513 bp, Oryza sativa
  Clone ID: PAT_MRT4530_59676C.1
atggaggcggtggaggagcaggtggcgccggagcaggtcatcagcacgaggggaggctcggtgctcgggaagaagaccatcctcaagagcgaccacttccccggctgccagaacaagcgcctctcgccgcaaatcgacggcgcgcccaattatcgccaggcgggttctttacgagttcatggtgttgcaatgccgacaatgaagggaattgtaaatgtgttaaatcacattggagcacaaaagaaaggaaaacaaacccaggttctatggcatagtcttcgcgaggagccggttatctacatcaatggtcgcccttttgttctgcgagatgttgaaaggcccttctcaaaccttgaatatacgggaattaaccgggaaagagtggaacagatggagtttcgcctgaaagaagatattcttcaggaagcttcacgatatggtaataagatcctcgtcactgatgagctgccaaatggtcagatggtggaccagtgggagtcagtggtaactgatacagtcaagacccctcttgaggtatatgaggagttgcagcatcaaggataccttgtagattatgagcgtgttcctattactgatgaaaaggccccaaaagaaggagattttgacaatctggtacgccgaatctcccaagttgatatagaaactgaaatcatatttaattgtcaaatggggaggggaaggacaaccactggtatggttatagcaacattgatttatctgaaccggataggatcatcaggtatccctaggacaagttcaatcgggaaagtcttccattctggaaatgatgtagatgactatatgcctagctcagaagaagctatcctcagaggagaatattctgtcattaggagcttggtacgagttctggagggtggtgttgaaggaaaaaggcaagttgacaaagttattgataaatgtgacacgatgcagaacttaagagaggctattgctacataccgcaatagtattcttcgacaacctgatgagatgaaacgggaggcatcactttccttctttgttgagtacttggaacgttattacttcctcatatgctttgctgtctatgttcattcagtgtgctctgctcaacaatcaaacttttcagaagaagttagtttttctgattggatgagagcaaggcctgaactgtacagcattcttcgaaggctgttgaggagagatccaatgggcgctcttggttattcaagttcgaaaccctctcttgcaaaaattgttgaatatgctgatggacgccctcatgagatggatattgttgctgccatgagaaatggagaagttcttggacgccaaactgtgttaaaaagtgaccactgcccaggttgtcacaaccttcatttacccgaaagagtggagggtgcacctaattttagggaaattcctgaatttccggtttatggtgttgcaaaccctactgttgatggcattcgagctgttattcagcgtattagtacaagcaagggagggcgaccaattctgtggcataatatgagagaagaaccagttatttatataaatgggaagccatttgtactacgtgaagtggaaagaccatacaagaatatgctggagtacacgggaattgatcgtgatagggtggaacgaatggaagctcgtttgaaggaggatattttacgggaagcggaacgctatagtggggccataatggttattcatgaaactgacaatgatgggcaggggaagaacaactacagacctattagattgccagcttgtgaatataaccatgaagatccaaatgaattgggttactcaagtggagaagaaacaacggatcacaatggtcaccttaattcaagttcaccaagacctcatactgtgacagaacaacatcctagatttggaattgatgacatacttgttttgcggaagattacaagattatttgacaacggaatcgagtgtagacaaactttggataatgttattgacaaatgctcggctttacagaatattcgccaggctgttttgcagtacacaaaagtaattaaccaacagcatgtggagcaaagagttaagagggttgcattaaatcgtggtgctgaatatttggagaggtacttgaaattagttgcattctcagcatatctttggagtgaagcatttgatggtttctgcgggcaaggagaggcaaagatgtcatttaaagcatggatacaccagaggccagagatccaaagcatgaaatggagcatacggttacgacctgggcgttttttcactgttaatgatgaatccaaagcatcttttcagccttcacaaggtgacgtaatgatggaagccattgtcaaagctcgtaatggttctgttttgggaaagggatcaatactcaaaatgtacttctttcctggacagaaaaggtcaagcactattaacttctgtggtgcaccacaagttttcaaggttgatggataccctgtgtatagcatggcgacaccaactgttgatggagcaaaagaagttctgtcatatttgggctctaaagatactgggagaagcattcctcaaaaggtggttgtcacggatcttagggaggaagtggttgtttacatcaagggaacaccttttgttttgagagaactagatcagcctgttgatactcttaagcatgttggcataagtgggccaatggttgaaaacatagaggcaagactaaaggaggatatactctccgaagttaaacaacaaggtggtcggctacttctgcaccaagaagaatttaactcgtcaacaggccaaagtagtgttgtaggtttttgggaacatataggtacggaggatgtgatgacaccggctgaagtatatagtgtactgagaaatcaggggtactgtatcgactacaaaagaatacctctcaccagggaaagagaagcattagcttctgatgtagatgcaatacaatcgtcggttgatgagaatgctaggtactacctctttatttcacacacaggatatggtggtgttgcttatgcaatggccattacatgcctgggactgggagcagatgaaaagttcatcatggaacaaacagcagaaacacacttcatatcaacttctcttacaaaaagtgtgtctatcaaaacatcagctgatatagctctcaagcaaggtgactaccgtgacatattaaaccttacaagggtactggtacatggcccaaaatgcaaagaagaggttgacactgttattgacaggtgtgttggtgctgggcatttgcgggaggatattatgcattacagaaaggcactgcaagattgttcacttgatgatgatgagacatggtcatatctaatggatatgggcactaaagctttgaggcggtacttcttcctgatcaccttccgatcctacctctactgttcatctttgcgtgagccaacatttgcatcatggatggaggccaggcctgaacttggccatctctgcgataatctaaaactggataaatag

SEQ ID NO: 57910 - DNA, 192 bp, Oryza sativa
  Clone ID: PAT_MRT4530_59677C.1
atggggtggcgggatagggtgggccgatttggttgggctgggctgggaggtttttgtgaccgacgaacaaagtggcggatgcagcggctgccacaagtggtggggacatcctcctgggcggctcaccggcagggtctctcgatgcagctcaaggctggggagctggaggaagatgatggtccccccacatga

SEQ ID NO: 57911 - DNA, 4070 bp, Oryza sativa
  Clone ID: PAT_MRT4530_59678C.1
cggcacgaggagcctatctatccatccccatcgccacatgcctctgctgcagctgcggcctgcggccaactcgtagtactcctataaggcaaggcctcgctaccccagccgcccccttcggccccggcctttcatctcctcgcctcgcctattggccgcccgctccccgcatcctcccatctcgccgcgctatcgccttccgcctcctcctccgccgccgcctacgcttctcttgttgtgctggttgcatgcgccgcggcgcaggggctgacggagaggggtgcgcgtggaattgagaggagtggcggatggaggcggtggaggagcaggtggcgccggagcaggtcatcagcacgaggggaggctcggtgctcgggaagaagaccatcctcaagagcgaccacttccccggctgccagaacaagcgcctctcgccgcaaatcgacggcgcgcccaattatcgccaggcgggttctttacgagttcatggtgttgcaatgccgacaatgaagggaattgtaaatgtgttaaatcacattggagcacaaaagaaaggaaaacaaacccaggttctatggcatagtcttcgcgaggagccggttatctacatcaatggtcgcccttttgttctgcgagatgttgaaaggcccttctcaaaccttgaatatacgggaattaaccgggaaagagtggaacagatggagtttcgcctgaaagaagatattcttcaggaagcttcacgatatggtaataagatcctcgtcactgatgagctgccaaatggtcagatggtggaccagtgggagtcagtggtaactgatacagtcaagacccctcttgaggtatatgaggagttgcagcatcaaggataccttgtagattatgagcgtgttcctattactgatgaaaaggccccaaaagaaggagattttgacaatctggtacgccgaatctcccaagttgatatagaaactgaaatcatatttaattgtcaaatggggaggggaaggacaaccactggtatggttatagcaacattgatttatctgaaccggataggatcatcaggtatccctaggacaagttcaatcgggaaagtcttccattctggaaatgatgtagatgactatatgcctagctcagaagaagctatcctcagaggagaatattctgtcattaggagcttggtacgagttctggagggtggtgttgaaggaaaaaggcaagttgacaaagttattgataaatgtgacacgatgcagaacttaagagaggctattgctacataccgcaatagtattcttcgacaacctgatgagatgaaacgggaggcatcactttccttctttgttgagtacttggaacgttattacttcctcatatgctttgctgtctatgttcattcagtgtgctctgctcaacaatcaaacttttcagaagaagttagtttttctgattggatgagagcaaggcctgaactgtacagcattcttcgaaggctgttgaggagagatccaatgggcgctcttggttattcaagttcgaaaccctctcttgcaaaaattgttgaatatgctgatggacgccctcatgagatggatattgttgctgccatgagaaatggagaagttcttggacgccaaactgtgttaaaaagtgaccactgcccaggttgtcacaaccttcatttacccgaaagagtggagggtgcacctaattttagggaaattcctgaatttccggtttatggtgttgcaaaccctactgttgatggcattcgagctgttattcagcgtattagtacaagcaagggagggcgaccaattctgtggcataatatgagagaagaaccagttatttatataaatgggaagccatttgtactacgtgaagtggaaagaccatacaagaatatgctggagtacacgggaattgatcgtgatagggtggaacgaatggaagctcgtttgaaggaggatattttacgggaagcggaacgctatagtggggccataatggttattcatgaaactgacaatggtgagatatttgatgcatgggaaaatgtaaataatgaagctgtcctgactccattggaggtgtacaaacttctggagtctgaaggtcttccaatcaagtatgctcgagtgccaatcactgatggcaaagcccccaaaagttcagattttgacacaataaccttaaatgtggcagctgctcacaaggatactgcatttgtttttaattgccaggctacaaaggttgagtttaacttactgatttttgtagatgggcaggggaagaacaactacagacctattagattgccagcttgtgaatataaccatgaagatccaaatgaattgggttactcaagtggagaagaaacaacggatcacaatggtcaccttaattcaagttcaccaagacctcatactgtgacagaacaacatcctagatttggaattgatgacatacttgttttgcggaagattacaagattatttgacaacggaatcgagtgtagacaaactttggataatgttattgacaaatgctcggctttacagaatattcgccaggctgttttgcagtacacaaaagtaattaaccaacagcatgtggagcaaagagttaagagggttgcattaaatcgtggtgctgaatatttggagaggtacttgaaattagttgcattctcagcatatctttggagtgaagcatttgatggtttctgcgggcaaggagaggcaaagatgtcatttaaagcatggatacaccagaggccagagatccaaagcatgaaatggagcatacggttacgacctgggcgttttttcactgttaatgatgaatccaaagcatcttttcagccttcacaaggtgacgtaatgatggaagccattgtcaaagctcgtaatggttctgttttgggaaagggatcaatactcaaaatgtacttctttcctggacagaaaaggtcaagcactattaacttctgtggtgcaccacaagttttcaaggttgatggataccctgtgtatagcatggcgacaccaactgttgatggagcaaaagaagttctgtcatatttgggctctaaagatactgggagaagcattcctcaaaaggtggttgtcacggatcttagggaggaagtggttgtttacatcaagggaacaccttttgttttgagagaactagatcagcctgttgatactcttaagcatgttggcataagtgggccaatggttgaaaacatagaggcaagactaaaggaggatatactctccgaagttaaacaacaaggtggtcggctacttctgcaccaagaagaatttaactcgtcaacaggccaaagtagtgttgtaggtttttgggaacatataggtacggaggatgtgatgacaccggctgaagtatatagtgtactgagaaatcaggggtactgtatcgactacaaaagaatacctctcaccagggaaagagaagcattagcttctgatgtagatgcaatacaatcgtcggttgatgagaatgctaggtactacctctttatttcacacacaggatatggtggtgttgcttatgcaatggccattacatgcctgggactgggagcagatgaaaagttcatcatggaacaaacagcagaaacacacttcatatcaacttctcttacaaaaagtgtgtctatcaaaacatcagctgatatagctctcaagcaaggtgactaccgtgacatattaaaccttacaagggtactggtacatggcccaaaatgcaaagaagaggttgacactgttattgacaggtgtgttggtgctgggcatttgcgggaggatattatgcattacagaaaggcactgcaagattgttcacttgatgatgatgagacatggtcatatctaatggatatgggcactaaagctttgaggcggtacttcttcctgatcaccttccgatcctacctctactgttcatctttgcgtgagccaacatttgcatcatggatggaggccaggcctgaacttggccatctctgcgataatctaaaactggataaatag

SEQ ID NO: 57912 - DNA, 348 bp, Oryza sativa
  Clone ID: PAT_MRT4530_59679C.1
atgaaggggcggagaggcaagcgccagaggggagaggcggccgcagggacccgcggggagagggccgttccgctagatccgtcccgggttgcccggccgcccgagcagcgacagtcgcccggtgctgttgccgctcaggccgtcggcgcccgccgccttcgctgctccgcccggctccgcaaggacgaccgcgccgccgatcttgctcctgccattgagaaggacgctccgaacccgtggggaaaggcagagagaaagagaggagagagaacggttttggctcctcaaaaacctaggacgcactgtgagtgccctatgaagttcatgaaagcagttacagtagggtga

SEQ ID NO: 57913 - DNA, 225 bp, Oryza sativa
  Clone ID: PAT_MRT4530_5967C.1
atggcgtgtggggagggcggccgctatcggatccacgtgggcaatggccaccacgcctccctatcgccggatctgccgccgtcgcgcggtgggagggcggccaccatcggatccacgttatcgcacgcctcctccaccctcccccactgcccacgccctccgccaccgccattgcccaccaccgccactgctgtcgccggagtgggggaacgcagatacttatga

SEQ ID NO: 57914 - DNA, 449 bp, Oryza sativa
  unsure (1)..(449): unsure at all n locations
  Clone ID: PAT_MRT4530_59680C.1
gnaagcananatactatatggtgnnaataaagnatgnnaacttcaatgggttcttctgnnaataaaaaaaaaaaaaaaaaaaaaaaaaaaaaaaaaaaaaaaaaaaaaaaaaaaaaaaaaaaaaaaaaaaaaaaaaaaaaaaaaaaaaaaaaaaaaaaaaaaaaaaaaaaaaaaaaaaaaaaaaaaaataaagggaggggggaaaaaaaaaaaaaaaaaaaagaaccgaaaaaaaaaaaacggggggcagtggtaaaaaccatggggatacgaaaaaaaaatcgggatagcacaaaataaaaattttagaaaaaaaganaggattggtttaaggagaaaagaacaaatgtgacaggcccaaaagggggagcagcctgtaaagggaaagggaacccacaaagaaaagggggattacgctctgagggagtgttagatacgaaaagggtgac

SEQ ID NO: 57915 - DNA, 477 bp, Oryza sativa
  Clone ID: PAT_MRT4530_59681C.1
atggctaaaaaaccaccaccatcacagggaacagggttcaaacctcctgtgaacaaaacaggtgccaaaaatccatcagctgaagtcgactcaaccaatattgtcccaatcacattagataggctgacagctaagcaaagggatgaacttgaacagatgatgagcaacgtgaagggcaagtttatggattcttttcaagagacccgtgacaagggtgacattccccaagatggtacagtggaagaccttggtgcagatggcaaccaagtgcctttgcaattcaataatttccaagataggatcgactatgctgtgcaacatgctttgatcaatcaatttggagtgctagttaatatcttaaccaacatggtgaagactgttgtcgatagctcgatagccgagcaccaagcctcaggaccagtttatctaccaggaggtgtttttccgaattataggcctttggttatagcaaattag

SEQ ID NO: 57916 - DNA, 2545 bp, Oryza sativa
  Clone ID: PAT_MRT4530_59682C.1
ttgcaggatcaaatcaactggcatgctcatgaacctaaaaggcaagattttggacctgcactggagttaagcagatctctcaggcctcgtgtttttacatcaacacgcttttggcatgcccggtgggacccgagttttcgacgacctcatcccgatggctaaaaaaccaccaccatcacagggaacagggttcaaacctcctgtgaacaaaacaggtgccaaaatccatcagctgaagtcgactcaaccaatattgtcccaatcacattagataggctgacagctaagcaaagggatgaacttgaacagatgatgagcaacgtgaagggcaagtttatggattcttttcaagagacccgtagagggaccatcgtacaaaagtacaaactgaaggtggttgcagccgatgaggtcggctcgagttcatcttagggtaactaagatactgcaactggctcaggtgacaagggtgacattccccaagatggtacagtggaagaccttggtgcagatggcaaccaagtgcctttgcaattcaataatttccaagataggatcgactatgctgtgcaacatgctttgatcaatcaatttggagtgctagttaatatcttaaccaacatggtgaagactgttgtcgatagctcgatagccgagcaccaagcctcaggaccagtttatctaccaggaggtgtttttccgaattataggcctttggttatagcaaattagcagaatacatctaatgctttgccggcttggccgacggctccagttttagctactgcgcaagttacatcatcagcaccaaggcagatagttaatcccagattattgactagagagtagccacaacatgctgggcaaaatgtcaatcggctgacccaggatcaagttgctgcaatgtttctgccgaatccaacaatagtcgacccaacacagccgttgccgactcagcaagcacagccgaggcagtagacggttcagccaactcagcaccaaaacttggagccaatgcagcaacaaatacaaggagtaccttagcaaacatcatggactgatatgattgcagatgtaatgagggaacagtttgggctcaagccaaaagatactggaaatttgtatcggcatccttattctgagtggtttgagagggttccattgcctagctgatacaaagtaccagacttctcaaaattctcagggcaggataatatttcaacttatgaacatgtcagccgattcttggatcaatgtggtgaggcatcggctacagaagctttgagagttagattgtttcctttatctttgtcaggatcagcattcacatggttttcttccttgccatacaattctgtcaacagttgagctgatttggagaagcagtttcatagttatttttacagtggaattcatgagatgaaactatccgatttaataacaattaaacaaaggcatgatgagtctgtgcaagattacattcaaaggtttagggagatgagaaacaggtgttacagtttgtctttgacagattctcagttagccgatttagcttttcaggggttgatagcaccaatcaaagaaaagttttcggctcaagattttgagagtttatctcatcttgcacaaaaggtgactctacatgagcaaaggtttgctgaggcaaagaagaacttcaagaaaatcaatcatgtatatccttacatgtatgattctgatgatgaggatgatgatttcgaagtggcggcagccgaatgggtcaagagcgagaaagtcataccttgccaatgggtaaagagctctggaaaagaggagaggtttgacttcgacatcaccaaggctgacaagatttttgacgtattgctttggaagaaacaaattcaacttcctgctggtcatctgatcccatcagccgaagaattgggcaaaagaagatattgcaagtggcataattctggttctcactcaactaatggttgcaaggtctttaggcaacaagtccaggcggccattgagggagggaagatcaaatttgatgattcaaagaagccaatgaaggttgatggcaaccctttccctgttaatatggtgcatacgtctggaaggacggccgatgggggggaataatagaaaatttcaggtgaattcggctaggattatcagcaaatacaagaggaagtatggaaggcaacaagataaatatcatgaagaagatgataagggtatgaggttgccatctattgaggattgccctggatgcagtaatgcagggaattcgagccgatcctattctggaggtaatcggctgagtcagaaaagggttcctgttcatcagaggttgggcccggtgaatcaagattatgaccatgatgagggtgaagataggaaaacacaatggtgtccggcgggtattttcaccaagaatcagaaaagaagggttcaaaggatgagaaatagagaatgtcacaccctgaaaattccttcactattccctcgacctccatagcacgccgcacagttagctctcgggctctgtgtgatccta

SEQ ID NO: 57917 - DNA, 563 bp, Oryza sativa
  Clone ID: PAT_MRT4530_59683C.1
tcactatagggaaagctggcacccgggggggcccctccccaatttcccggtggacacccacgcgtgcggtctcttaaaaagtttcagcagctgtctccagagatagtacagattgaaggaaaggatgggactgctttatatggaactctttatctccctgatgagaaaaaatatggaccacccccatacaaaacactcgttaacgtttatggcggtcccagtgtccagcttgtaagtgactcatggataagtacagttgacatgagagctcagttcctgcgtagtaagggtatattagtttggaaggtaactattctttcctctatttttttttctttgctctttgtttaacaagatagattccgattgaggattttttttttctggtttcactttggtccataatgtcaccaatcttaaggtatgctgtgcaatgcattgcatgggtaaaattctaaactaaaaatgattttaataaacttatggccaagatagcaccatttaattctttttgtttacaagtatgctgtgcatgcatggcatctcatccattaatttttcca

SEQ ID NO: 57918 - DNA, 1440 bp, Oryza sativa
  Clone ID: PAT_MRT4530_59684C.1
atggctgtgctggaggatttgttcagggcgattgagctctggctgcgtattgctaaggagcaggtacccttggtggatccaacccttgacccggttctgcttgtacccggcataggcggctcgattcttgaagccgttgctgaggctgtgaagaaggatagggtgtgggtgggcatcctctctccggcgcgtgaggacgaaacagcacactggcccaagccggagcttccccctgatgttcatgtcacggccgatggggcagccactattgggggccatgaggatcgcttggaagtagacggcataggccgtccgatcctcgttctggcctaggagaacaaaagagaaggctgctatgtgattggtgaggccagttgggagtctacccatgtccggcttagtaaagccctgtctgtacgtacaattctacacggatgtcaaactaagctcagtctgccccactccaatataaagtggtacaatgtagattgcagatgtccctacctattaatgacgagttatatttctgcattgtaagaaccagaactgataatatactgccgatagaaattgaaaacaaatgacaagaaaagtgaaatgttagagtcatatgagccagatgaagcaataaaaatgattagagaagctctttccaagcatgaggcaagtcattttatttatacatttacattgcaatataatttacccaatataataagctgttttcgaaaaaaaaatgatgttggtatattgcagatcatttctgatggtatgcacattccattgccccttgatatggatatattgagatgggcaaaagagacacaggatgttttgtgcaatgcaaagcttccaaaatcagtgaagttctacaatatttacggaactgattatgacactgcccataccgttcgctacgggagtgaacaccatccaatttcaaatctcagtgacctcttgtatactcagggcaactacatctgtgttgatggtgatggatctgtccctgtagaatcagcaaaggcagatggcctcgatgcagtggcaagagttggggttgctgcagaccaccgaggaatcgtctgtgatcgtcacgtgttccggataattcagcactggctccatgccggtgagcctgacccattctacgatcccctcaacgactacgtcatactcccaacagccttcgagatcgagaagtaccacgagaaacacggggatatcacatcggttagagaggactgggagatcatctcccatcgcgatgacgaaagcaagaggccagccgagcttcctcctatgttcaacacgctatcggcgtcccgcgagggtgaagacggctcgctggaagaggcgcaggcgacgatctttgttcatccagagagcaaagggaggcagcatgtggaagttagggcagttggagtcacccatgacggctag

SEQ ID NO: 57919 - DNA, 1542 bp, Oryza sativa
  unsure (1)..(1542): unsure at all n locations
  Clone ID: PAT_MRT4530_59685C.1
tttgttttttttttttttttgttttttttttttttgcacaaacatacaagtttaaaattataagcaaaagtccttgttcattttagttcgcacatcatttcccaagttttatttatcatccaaacttgggggatgggacaagaagaattatagccaacaccatattgcaatggttgggtagcaagcatgacactagctaggggcttgatggggcatgtttgccccacgccataagcaaaaggctgcctgcccgatcaacaacatggcaacataagtgccaaggcagccggcacccgccacacagcaaaccccccccgggcttcccaccacccataaaaagcgggccaacaaaattcccctacagcacaaccacggaccgccccgccaagacgcaagcgggccagagccccaaaacggccaaccccggacccgccccccgccaccaccacccccccccagcccacaggccaactccactccagacccaactcctccggcgtcgaggttgacgcctccgttcccggcgaacccgaggcgagtttcctcggttcctccgcccaacccgtctaaaccctagccgcccgtcctctcctctcccatgcgcgcagcctcaccctcctcccccatcgcgccgcatcctcgccctcctccttccccgcgtgcgtcgtcgccgccgcaactccctcctcctccactccctcagccatcttgccgtgccgccatcaccgcctccactctctcaactagccatctcgccgtgatgccgtcgccgctccctccccgccggatctcccagtgaggaggctagggccgccggatccggtgaccccattctcctcgccggcggatccagcaccctagagaggaacgagagccgccgctgccgccctttctcctctttcatccctgccacgccactgcctccctcgccctctccgaccatttgattcatcagccttggcctccccctccagtggatccggtcgccggccggacggagtcagccggccgccgccacaccctcttctcctctccctctccatgagcacctcgctcagtgccatgagaagggaagggagagcgtaggccgcccggcaatggcatgccacatgccccacaggttccatgagcgcccggcaatggcatgccaccaccatcttcgtctgtgcaacctgaccaacctccgccttcagacgtctctccagctcagtcttcttcttctccagggcggatttcttcacctctagaagacggagattagtattccaaaccgccctccgcggcggcggaggcgcccgcgacggggaggggagggaaaggcggaggcggaggctagggtttgagagagggcgaaggcggcatcgcgtcgaggagacgagggaggcgagagcgaggggaacaccgcgtctttccccccgggtctcaaggagtgtaccgcgngtatatgggggccgcggtgtcggcgggccatacatcctaatcaggaaggntccggcggaaggagggtggtgggggaacaactttatanttaactnccaattt

SEQ ID NO: 57920 - DNA, 566 bp, Oryza sativa
  Clone ID: PAT_MRT4530_59686C.1
gcacaaacatacaagtttaaaattataagcaaaagtacttgttcattttagttcgtacatcatttcccaagttttatttatcatccaaacttgggggatgtgacaagaagaattatagccaacaccatattgcaatggttgggtagcaagcatgacactagctagtggcttgatggggcatgtttgccccacaggttccatgagcgcccggcaatggcatgccacatgccccacaggttccatgagcgcccggcaatggcatgccaccaccatcttcgtctgtgcaacctgaccaacctcagcaccacggatgctcctctttatgcctggtaaggagactggtagttcgcatatccaacccccaagtcagattgctgctcattcactttcttgaactccgccttcagacgtctctccagctcagtcttctttttctccagggcggatttcttcacctctagaagacggagattagtattccaaaccgccctctgagcacgcttgtcacgagaaactgggtcatttctctctgcatctggagggtatgccgcttgatatgggactcg

SEQ ID NO: 57921 - DNA, 405 bp, Oryza sativa
  Clone ID: PAT_MRT4530_59687C.1
atgaggtaccagttttcatccggccgtccattgctaaagggcgccatagccatcccatcccacgaggccacgaccaagcaggcagcaagggctacccacccgcttgaccggaagtgccgccgcggcaggtgcacgggctactgccggagtcaaccgctgccgcaggagcacgtcgcccctgccgccgtggggacacgtcaccaacgccgccccccgcgcccgtcgcggccgctgctggagtcgtcgccgccgttgcaggtgcttgttgcccctgccgccgactcctgcaaactctttatgagtgaagatatggctgacaatttcaggacccttgaggaggaagaggagtatcgtacgattactgctatgagattcaagactgaggatgacggcttcaagttatag

SEQ ID NO: 57922 - DNA, 228 bp, Oryza sativa
  Clone ID: PAT_MRT4530_59688C.1
tttcctagccaaaagcgagaaacaaaaaggagggaagatggatgctggtgcttcggtgaaccaataataatgatggatattggcaacgaagaaaatcataacagcaagaacgtgaccgataatgacgtggtcccgatagagagagaaactacaacggcgagttctgacgatgaacacgacgtgaatacaaccggtacctcgacggttcatgtaaaatataaatgcatg

SEQ ID NO: 57923 - DNA, 1306 bp, Oryza sativa
  Clone ID: PAT_MRT4530_59689C.1
gctcgcagagagttgcaggctaaagcatagagaatcgagaatgtgcacagtggtgaccaagtcgccgccggagatcgtccggccatcggagccggtgacgacgacggcggcgaccagcaaggtcatcttctcacccttggacaggcctctcgccatcgtaccgatcgtagtgttgcaggtgttcgagcatccgatccacgagcccgtggagaccataaggagggggctctcccgagcactggtccactactaccctctcgccggccgcctcgccggcgacgactacgacgacgtgcacatcgactgcaccggcgaaggcgtgaccttcgttgccgcaaacgccgactgcaccgtcaaggagctcgtccgcgacatcgactgccggtcacccgacgccgcgaaggcggttatacgggagctcatcgtcgactacccggcgaatggcttcggccgcgccgaccctctcgtcctaatgcaggtcaccgccttcgcctgcggtggcttcgtcgtcggcgtgacgtggaaccacggcgcggccgatggtttcgggatcgcgcagtttctccaagccgtcggtgagctcgcccgcgggctaccgacgccggccgttacgccggtgaggtgggacgggtgggcgcaggcggtggccccttccacggtcatggcgtccaagcggttcatgttcggcgtcaaggcgccgacgaggctcgccctgcacagcatcaccatcccggcgaggacgatcgacggcgtccgaggtgccacggcgtgcacgatgttcgaggcggtggcggcggcgctgtggcggtgccgcacccgcgtggtgatgtccgaccccgacgcccccaccgtgctcgccatcacggtgaactctcgcaagcacgtcggcgtcaaggacgggtactacggcaactgcgccaccgtgcacatggcggtggcgaggagcggcgcggtggcgggcggcgacatgacggaggcggtgagggcgatacggcgcgccaaggaggagataccggagaggttgaagaagggggacgtgatcggcgagctgagcaaggagcagctgggtgggtacgagagcgtgctgctggtgacgtgctggaggaatatcgggttcgaggcggtggactacggcggcgggaggacggcgagggtgatgacgacgtacgagcagggccgggtgcggccgatgtgcgtggtgtgtttgccatggcaaggggaggaagaggaaggagcccgggtgctgtccggctgtgtcacgcctcaccatgccgacgcatttctccgtgaaatagctacgctctga

SEQ ID NO: 57924 - DNA, 290 bp, Oryza sativa
  Clone ID: PAT_MRT4530_5968C.1
ttcttgtctcgctgctcataatgacacactgctcggcagtttagctagctagaggctggcttgatcacgccatttgtctgctgttggatcgatctagtggtgcgccagccatggcaagaatgctggttgaggcggacgactccggatcggcggaagactcactcaagtaggaccggatcatcatcctctgcaggatgatctgcacgctcatgtagatactccgcctcgggatagtcgaccggtgcgcgtgcacgcgccgctgggcgtgggccgccagccgcggtacagca

SEQ ID NO: 57925 - DNA, 1209 bp, Oryza sativa
  unsure (1)..(1209): unsure at all n locations
  Clone ID: PAT_MRT4530_59690C.1
ggccttggcatccccggggagcggcgctgcgcgcgcagaggagagaagcaaggtgagaagtgaggaggcagcaagggaggaggtttgccggagaggggacatgctccctcctcatctcacagaaaatggcacagtaatgattcagtttggtcataaaatgcctgactacgagtcatcagctacccaatcaactagtggatctcctcgtgaagtgtctggaatgagcgaaggaagcctcaatgagcagaatgatcaatctggtaatcttgatggttacacgaagagtgatgaaggtaagatgatgtcagctttatctctgggcaaatcagaaactgtgtatgcacattcggaacctgaccgtagccaaccctttggcatatcatatccatatgctgattcgttctatggtggtgctgtagcgacttatggcacacatgctattatgcatccccagattgtgggcgtgatgtcatcctcccgagtcccgctaccaatagaaccagccaccgaagagcctatttatgtaaatgcaaagcaataccatgcgattctccgaaggagacagctccgtgcaaagttagaggctgaaaacaagctggtgaaaaaccgcaagccgtacctccatgaatcccggcatcaacacgcgatgaagagagctcggggaacaggggggagattcctcaacacaaagcagcagcctgaagcttcagatggtggcaccccaaggctcgtctctgcaaacggcgttgtgttctcaaagcacgagcacagcttgtcgtccagtgatctccatcatcgtcgtgcgaaagagggcgcttgagatcctcgccgtttctgtcatggcaaatcatccttggcttatgtgtggtgcccagcaaaaaaaaatctgactgaacctgtgtgtaaactgatgggtatgggtgggttttgtgcaactgttacttgggtgcttgaaatctgtttctgtgtttcctctgcctccttagtttggagacggtgcagctgcagctggtaccagtaatctgatcatgctagacttgtgacaaaaaaaaaaaaaaaaccccgttatgtttcctggcttntgaatttggtggtcattcagtaagcaagcactcgacgtcagcgggagggggttgcttcgattgatctagttctttcgcgataaacttatttaattttgaacaaaaaaaaaaaaaaaaaaaaaaaaaa

SEQ ID NO: 57926 - DNA, 2041 bp, Oryza sativa
  Clone ID: PAT_MRT4530_59691C.1
ttggtcacatcaccgtcgatgggtgtctacgtcttcaccgtcggtctgccttcgccgccgccgactggtgtcctcgcctacaaggttggttggtcacaccgccgtcgatgggcatctacgtcttcaccaccggcttgccttcaccgccattgactggtgtctctgcctacacagttggttggtcacactgccgttgatgggcatctacgtcttcaccgccggcctgctttcgccgccgctgactggaagggatcggtcagaacatcaccaccggcttgcctttaccgtcgccgactggtgccttcgcctatacggtcggatggtcacaccaccgttgttgggcgtctacgtcttcaccgccggcctgccatcgccgctgccgattgatgtcctcgcctacatggttggatggtcacaccaccgttgttgggcgtttatgtcttcaccaccggcttgccgtcgtcgccgccgactggtgtctccgcctacacggttgtttggtcacaccatcgttgattggacatctacatcttcaccgccggcctgccatcgccgacgccgactggtgtttctgcctatacggttggttggttacaccaccgttgttgggcgtcatcgtcttcaccgtcggcttgcctccgtcgacgccgattggtgtcctcgcctatacggttgggtggtcacaccgactttgttgggcatcatcgtcttcaccgaccggccgcctcatccgccgccgactagtgtcctcgcctatacggttgggtgtgtcctcgcctatacggttgggtggtcacaccgccgttgttggcgtctacgtcttcatcaccggcttgcctcagctgccgccgactggtgtttcctcgcctccacggttggttggtcacaccaccgtcgatgggcgtcatcgtcttcaccgggtgtccttgcctccacggctggttggtcacaccaccgacgatgggcgtcatcgtcatcaccgccggctcatctccaccgccgtccatggtgtcttcgctttcacgctggccttttatgccgccactcaaggacatcttcgttttcatcatcattttgcttcttccatcaccgactgattatgctgccgccgactggggtttttatcttcacgactacgcgtcttcgccaccggtttgcttcggttgccgccgactcgtgttcacgtcatcatggctatgcaactttgtcaccatggttgagcgacttcatcttcattatctttggcactggcaaactctattgcctctacttcgcaagccttgctagttcaccaaccacgacgtctacaagtgcctcgacatctcggcatgtttcaccaaatatgatgccgtgttattttactacaacaagtggtgttccaatcttcaatatttctactcagacatcaggcgttgcatcaatcttagttatgcagatgccaacatcaagaaaactactcgagcatggatatcttctcaacaatttgatgaattattatcactgacatcatcaccagcaactctacttcatcggcccagacatctccgctgttggtaatgggtgactacatctttgccttcgatttcttccgtcatcgccgactttcattgccgacttattatttcaccttcacggttggcctactacgcaattgctgataggtgacctcgtcgtcatcatcagctattactctgctattgactggatcaccgacatcgtcgtcatcatcaatatcctgtcatgcttcttcgatttagcctattttgcttccattgataggcaacttcgtcatcataaccggccatctctactgctgccaattgtcattaccgtctattgcatctctcatctatcactgactgattattttgccaccatcgctgcacaactttgtcgccgtcgttgggcgccttcgtcttcactgttggctgacttgtctgctgccgactggtttcttcgtctccacggctatgcgacttcatcacctttgattggtgtcattgtctttaccaccactgacatcttcatcggctctgatggg

SEQ ID NO: 57927 - DNA, 1939 bp, Oryza sativa
  Clone ID: PAT_MRT4530_59692C.1
atggcgtccgacgaggcctccccggcggcggcggcggcggcggcggcggcggcggagaggattcgcgtggtcggggcgtgggccggctccctggaggtggagctgggcggctggacggtgccgatgctgcgggcggaggtggcgcggcgcgcgggcggcgtggagcccgaccgcatcaacctcatcttcggcggccgcgtgctcaaggacgatccgcccgcgtcgctccagcaggccggcctcaagggcaacgccaaggtgctctccaccctcctcgcccccgatcgcggcaaggccatcgccgcccaggccgccgcggcggcggccgaggaggagcataataataggctcgtcaggctctggaatgctgcagaagcactatgtcaaaggcatactgatggctcctttcatgaagaagatttcaacttagatcttgaggatcagagtggccagaaagtgatgtttggatctgtagatgatctcaaggcggtaaagatggctttgatgcttcatcaaaaagccaaaacatttatcaagagggacatgcacaaggaggcacttgatgtcttagcaatggctgaggaagctttctctctttgtgaccctaaactcattgagagggttgataatgtgccgatgcttcagctagatatagtttggtgctatttcgtgcttcgtgatgtatcacgcttagaagttgcaggaactcgcttagaaagggctcgctcaggatttgaacgttctcatggtaaagactctgctcgtttcagattactccaagctggccgtcatgcagatcttgcaatatatgtaaggctggagcttttggaaggagtggtagcatatcacaatggaaatactgtaaaggcgcgtgaatcccttacttctgcccaagcaaaatacatgcagcttcaagtaccagatgaagctatatcaatcttaatgagcatgggctatggagcacaagctgcaaaaagagcattaaagatgactggctatgatatccaatcctcagttgatctcttatgtgaagagcgtgaaaagaaaattcgtagagtacaggaagatatggagatgcaaaaagagatcatggaacaaaagaaatatggtaaaactcccatgaacaaggcagtgaatatgcagaagttgaaaggcttggttgcaattgggtttgagaagaaacttgctgctgaagcactccgcataaatgaaaatgatgctgacaaagcactagatctcttgacagatcctgagcaaaattgcatcctacaacacaaaatcatgtcaaaggcgaagcgattatctcgcggctcgggctcagggtcatcaagctccagggctgctgctgccacgactgcttcaggggtaaacaattcacaggctccggttgacacttcagctaatgttccagatggaagcgctatggagagtcatgtgttgcctgtgatcaatgaagaagctgcaaacaacgtagaggctgtgaacgatgacgaaactgtgaaccatgaggaggaagatatgagcgaggagtcagctgagggtgaagaagaagcaaatcctcctccagtcagggatgtggcgatggaaaacgagcttgcccatgaaatgacgggggatgccttggatgactatgatattgatgttagcaacgaagggcaggctatatcagagtacctgagcttactggattctgctgcttaggcttgatgtgcaaacatattactcacctggtctagatagtttttatcaaacctcagaaagaaatatagtcagcctcaatccgagagagtttgcttaatagggtcgatttgtacatgagtttacctttctgccacctggaaacttattaccgtgtgcttaagtaatttctcatggatagcaatctcagctttagaagttaaaaaaaaaaaaaaaaaaaacctgcagcccgggggatcca

SEQ ID NO: 57928 - DNA, 1648 bp, Oryza sativa
  Clone ID: PAT_MRT4530_59693C.1
atggctctggtcacaaatgtgtgcgaatatgaagaacttgcaaagcacaaactgccaaagatggtttatgatttctatgctgttgacgcagaagaccaatggactctcagggagaacagagagcttgctactgccagagctgcagctgctgcagaaactataatgatatacaaggacaggaacttagtgcaacagcttatccaaagggctgaaaaggctggctataaggcaattgtactgactgttgatgctccatggcttggtcgcagggaagctgatgtcaagaacaggttcaccttgcctcaaaatgtcatgttgaagatctttgaggggctggatcaagggaagatagatgagacgaatggttctggtcttgctgcctatgtcgctagccagattgaccgctctttttcttggaaggatatcaagtggttacagacagttacatcattgccggtcttagtgaaaggaattataacagcacaagacacaatcagctgtgtagaagagcacgaatctcaggttgtcagggaagcaaatgggcgtgtgccggtgttcatcgacagcggttttcgccgcggcaccgacgtgttcaaggccctggcattgggagcttcaggggtatttattggtaggccggtgctgttctccctcgccatcgacggcgaggccggcgtgaggaacgcgctgcggatgctgagagacgagctggagatcaccatggcgctcagcggctgcacgtcggtgaaggagatcacgcgcggccacgtcgtcaccgagagcgacaggatccgccgttgttctcggctatggagatggttgtgtttttttagaaacttagtacaatcaggcatgtggagaatggtggtgctgcaaccagatccgtttctgagcgagttgacgagcatgtacgagcggagcacggagaagggatctgtctgggtcaccatgaagcgatcatcgatgaagtgccaggcaaggttgaagaagatggcggcgaagggagaggcagtggagtaccggtgcctcgtccgtgccaccgatggcaagaagaacatctgcaccgcggggtcgatagtgcaattacgagctgagctctctgcaaaggagtacctgaagttccaagcttcatatgccacagttcttaaagcccatatgcacgctttgaagaagagggagaggaaagacaagaagaaggctgcagaggttgagaagataccagagaaggcaccgaagaagcagaagaaagcaccgtcttcaaagaaatctgcagggtccaagtcgtaagttactgaaagaatttgctaagccctttttttggccacaggcctgagtaagatgggtgtagtcaagacattatcctccattttactcttattcatgtctgcgagatgaagcatgtgaatacctttatagagctgtgccgtcgacattagcaatttttgaagcagctttggttgtctagatgtaagcccgccctggaattttctatttctatcatagaaaggcatctcttaaactgtgcctgatctgatcgtcaagttagtgcaactttcaattgacagaattacgtctggaacatgaagttatgcaactaagactgcagaaggaaattgcagaactgttaaaaaaaaaaaaaaaaaaaaaa

SEQ ID NO: 57929 - DNA, 184 bp, Oryza sativa
  Clone ID: PAT_MRT4530_59694C.1
catatatgtgcagcagctacatatccaggatggttcttacttctcagaaggttggtattgagagcaacaaacacaacctttctcctgatgcctctgagggcccacagctttgggaatcgtctggccctgatagaaatgaagcaaaccaataccaattagcagtaaaagatgagctgcaaaggag

SEQ ID NO: 57930 - DNA, 1105 bp, Oryza sativa
  Clone ID: PAT_MRT4530_59695C.1
ccacctcaacccaattaacacgacaaatcatggagagatcagccaccgtctttgtagcgctcaccttgctcgtcgccggcagcgtcgtcgtcgtcgtcgtcgtcgacgcctgcgacggcgtgccgaggatgtcggccgtggaggcgtgcaagcaggcgagcgtgggcccggccatgtcgcggacgtgcgccgagacgctgggaacctcggcggacgagcagggggcgacggacttcatggtggccgccgcgaacgccgcgacggagtcgtacaaggctggcaaggaggccgtcggcaaggtgctctccaacccgctggcgcccgacggcgagcggctgccgtgcctcgtgtgcgcgaacaagtacgacgacgcgtcgatgctcgtcgccagcaccgccgacgacgccaagcgctgcaagctgagcgccgacagcctccccgacctcgtcaccgccgtctctgccgtcgacgagtgcgccacgaagatgttcgaggagagcgggaacacgacgtcggtgtacgccacggccatcaccaatcgggattggaccgtgctcgttctgcgcctcgctacggttggttgtgccgcgccagcaactcagctagttctgggatgcatgaccaatcgtgcgattggattgctggtcgccctcccttgtccttcctcgttctaaggccgtgttttgtttccctcatattcccaactttccatcacatcaaaagctttcctacactcataaactttcaactttttttccaaactcccatttctttaaactttcaactttttttaggaactaaacacaccctaaatatggctgatatcaagcattaaaaactttagctatgaataaattttaaaatacttacgttagaaacgttgagaccatatgtatagaccaaatttttaatatatttgttgatgttttttatatatccccccgccctagaaaagatgcccgtgtgttgcaacgggtgaagctattttaatcttattgttgttcaatgtgattcactatgagaattcgcttggatatttttttttctagaaattaatgtcaagttaacatttgagttttaaaaaaaaaaaacaaccaaaccccag

SEQ ID NO: 57931 - DNA, 509 bp, Oryza sativa
  Clone ID: PAT_MRT4530_59696C.1
gtcgcaatattttggaaatattataagagaggaaacaaatcgttctcaacactcctctccacaaaagtttattcctcccgatcccaaccaaccccaccaaccagataagacacttaggaactgagacgttcgaattttacccaatttcttcagtttcttaagcattgagtctttctttgagctcagcagcgactgcatcgatgaactcctctgtgttcaggtacgtgtccctcgaaagctttgagccgtgaatgatgagtgcaagatctttggtcattttccctgactccactgtgccaacacaagcggtttccagtttttcagtgaaatccaagagttttgcggttgtcatctaacttagccctgtgtgcaagtccacgagtccaagcaaaaataaaggctatgctggtttgtgcttggtctaaccaccttttttgaagaaaccctggaagggacgtgggggaaggcttccatggggccggttttcactttcaaatcgtttttttcca

SEQ ID NO: 57932 - DNA, 159 bp, Oryza sativa
  Clone ID: PAT_MRT4530_59697C.1
ggacaagagccaattttcttttacaaaagctgttaaacttgcttctactttacttgactgtagtttcaacttttcaaagagaaaaagcagaagttaagtggggcaggtttttttgggggtttcagggcagtttttttatttgtgacagaagacaagagc

SEQ ID NO: 57933 - DNA, 243 bp, Oryza sativa
  Clone ID: PAT_MRT4530_59698C.1
gccgccgccagatgcaaggcctcgcgatgcacggatgtcgagcaagcggcggctggcgggccaggcagaatcggctgggtgcgggtccgtatcccgacgcacatgtcgcggcggtgttcacaactccatcaaagtcaccaacgctggtttatgaggacgtgactcgtcagatggacggattgcagtcttcgctaactgagtcgcttctagcaagagcagaccaatcgctgaccagagatcgac

SEQ ID NO: 57934 - DNA, 219 bp, Oryza sativa
  Clone ID: PAT_MRT4530_59699C.1
atggctgttgcagccaacaccgatgcggcggcggcggcggcggcgacggggcgtagctgcatagaaaaatggcatagtcggtggccgctggctcctcgtcctcatcaccaccaccacgccaacatccgttggctccccgtcctcatcctccgcgccaccgttcctgaggcggcatccttcgccgtggcctcaggcctcctacctcatcgcctccgatga

SEQ ID NO: 57935 - DNA, 3339 bp, Oryza sativa
  Clone ID: PAT_MRT4530_5969C.1
tccccgggctgcaggaatcggcacgaggctcgtctcgtgtggccgcccgggccgccggacccgggacggggcgatcgctggattgagggttcagttcacgcgcgacaccagcagcctgcctcatcaccttccgctcccgtccccttccgcctctcgcatcaccggcgtctacattctcctcgcccctcttgaggcgtgataccttggccttctctgcccgccgatctgcctcgccacgcggttcgtcgtgctgctgcggggcggcgtccggcggcgagggggcgcgcggcggggtgtaggtagctatgaagaacggggcgaggaaagacgcgggcggcggcggcggcggagtgttcgtcccgtgcgtcgacatcaagtcgttcgtgctctcgctcgccttcctcacggtgttcgtcgcattgtggcagctccagccgtacggctcgttgctcaccgcggcgcgctccaccgcctctgtctcggcctcgccatgttccctcatcgccacgcccgccgccgccgccgcgagcgcaggcgtcatccggtcggagaactccaccgccgacacggccaagaccgcgccggccgccgttgctagcgcagtccccgcgcggttggctagggcggcgaggccggcgcgggtggaggaccccaacaagcgtgagctccggccgtacggcagcgcggcggcgctgttcgttcagatgggcgcgtaccgcggcgggccgcggacgttcgccatcgtgggattagcgtccaagcccacccatgtgttcagcaacccctacttcaaatgcgagtggctgcccaaccccaccgccggcaacccgtcgccgcgccccgtccgcaccaaggcgtacaagatgctcccggactgggggtacggccgcgtctacaccgtcgtcgtcgtcaactgcaccttcccatccaaccccaacgccgacaacgccggcggcaagctgctcgtccacgcctactactccaccacctcccgccgctacgagcgcttcgtggcgctcgaggaggccccgggctcgtacgacgagtcccgcttcagcccgccgttcccgtacgactacctctactgcggctcgtcgctgtacggcaacctcagcgccagccgcatgcgggagtgggtggcctaccacgcgcacttcttcgggccgaggtcgcacttcgtcttccacgacgccggcggcatcagcccggaggtgaaggcggtgctggatccgtgggtccgcgccggccggctcacggtgcaggacatccgggcgcaggcggagtacgacggctactactacaaccagttcttggtggtgaacgactgcctgcaccggtacaggcacgccgccaattggaccttcttcttcgacgtcgatgagtacatttacctgcccaatgggcagacgctcgaccaggtgctcggcaagctctcgggatactcgcagttcaccatcgagcagaatcccatgtccagcaagctctgcgtgcaggatccaagcaaggattactcaagggaatggggttttgagaagcttgtcttccgcaattcaattaccaaagttaggcgagatcgcaaatatgcgatccaggcccgaaacgcatactctgccggcgtacacatgtcacagaatgtctacgggaggacaacccataagacagaaagcctgatcagatactaccactatcacaattcgatcaatgtcatgggagagccttgtcgggaatttgtgccggtgccggtcaatggtagtaagttgatgttcgaggggatcccttacgtatacgatgataaaatgaagcgtttggctgggcagatcaagcgggaggagctcggcggccttgaagagaaggagggcgagccagtcgtcggcgagcgggtggtcgaggcggcgctgggcggaggtgccgggggcggcagagtcgagggcggagtcgatgtgggagaagagggtgtgggagatggcgatgtggatgaggaagaggagggagagcgggaggacgaaggtggcggcgatgcgggcgaagagagggcggtcggcgacgatgatgatgagcttcgtcggcgatggctggagggagagagcggaggcggaggaggccgggcgccgctgacctcgccggcgagccgccgccgtcgctgcccgaggccagatccggcaagcccaggccggatctggccacctcgccgccactccgacgacgacgaccctgcggtgttctaccttcgcggccggtcggcgcggctcaacttccccgaggagatctccttgctggcttcgccgtcagagggtggcggcgcaggcgagccccgcgagcccgacggcggcacgctgtccgcggcctcgatccggaagaaggccatcgaggtcggctcccatgtcgacgcgctccagaccggcatgatggtcgcgccgacccaccaccgcgagcagcagaagcaccaccaccacccgcacctgcaaccgcacggcgaggagcaacaccaccacgaggattggattagttctaagtatgaagacattcatacttaaaaatctcttgttgatctcttcctctcgcccctgtcttggttggattagttgccatattagagtaagcactaatccatccatacttcttgctcgatcttgatttcgcgtggttaagtaagtcgtattagcctttcaggttaagaaggttgttaaggtttttaagtaagaacctcctgtagcttacttactagtttgtgatgcttgctgtattttcttctagttcttggcttggtcttaaggagtttttgtttgattgtataaagtgttatcttagataatggattgtataagttgttggatggatcagcaagtattaggcctggtccttccttccttgtgtactactattactcccatgtagtactatgtttggttcagttaagcatttttgtgtgtaaaaaaaaaaaaaaaaggaagcaattggatctgctcatacataggcacatagcaactgaactactgaagactgccggtacataactacagtctacatatatacctgatgatattgtttaggatgcctggttgagagttgagacgggctcacgcttctgctgttgcaagccaccgtgtctggctggtaagcagagggaagagcttgcaagtgggttggtccaagtggtgtaaagttttggttctttttattgacatgccattctctacaggagcactgctgtttttgctccattttctcctttctcttttctccttacccccacatctgttattatagatctgtgtaaactgtaaacttatggccctgcctttttacagtagattctctcatagatctccctccggggtt

SEQ ID NO: 57936 - DNA, 210 bp, Oryza sativa
  Clone ID: PAT_MRT4530_596C.1
aggcttcacaggagtttaaatggatatgggaaaattatatggctctatataaaatcatgaaaaatttctcaaaatactacacaacactctaagcccacctggatctttccaagatcttatcacttcatttgttagcttaatagaatccctcaaatatgctgaaaacctgaatataattcttttttagagtacctgaatataattctacta

SEQ ID NO: 57937 - DNA, 393 bp, Oryza sativa
  Clone ID: PAT_MRT4530_59700C.1
ggaatggagggagtattttatctgctctgtatgtgggcgatctggaatcatcgtcatgatgtcattttcaagaaataaaccccctcgattggatcctgcctgcaacgttgcatccgcgaggcagctctctgggcagagaatcttaagattgaagaccgacatgtagtctccgtttggaaagaaattttctcctccccactacaaactctaaatatgttgtaatgaacttttcatcctctatgcaatgacaaaattcaggtggggaagctctcccccctggtgatttagtctaaacaagtttgatggtaaattcaacggtgtaataacacgacaattttgatctcctatcgcagaggcagtaggcaatttcccaccaacaacacaacacatgac

SEQ ID NO: 57938 - DNA, 208 bp, Oryza sativa
  unsure (1)..(208): unsure at all n locations
  Clone ID: PAT_MRT4530_59701C.1
acgtcctcccaggactggagcctggagggccaaaaccccccaaatttcccaagccancccaaccaaaccggccgtctcgtctccttcgtcgttggcaatgnctccactgccagcctagcccacgctgcncaccgccccacccanccaacccaatcctccatnaactnnccctagctttccncctccacctngtcgtngtagtnaaccc

SEQ ID NO: 57939 - DNA, 1494 bp, Oryza sativa
  Clone ID: PAT_MRT4530_59702C.1
ggctgcaggaattcggcacgaggccaaacccacccaccaaccaaccaatcccatcgagaggaggggacgcggcggcggcggcggatcggcggcgggggaaggaaggggatgggcggcggaggcggggagtaggccggcgtcgggggcgaggggcagcgcgaggaggacgaggaggaggaggaggcgaggggcaccatgtctgcggtagtctgtggcaagaggtcctccgccatcttcgccgacgacctcctcccgccgtcccctccctctcctcactcccaccaccatccggccaagaggtcctgccgctcccctcaccgccgccgggaggcccacctccaccacctctcctccttgttcccgggcatggatccccagttgctcgaaggagctcttgatgcttctggagatgatttggattcagcaataaagagtttaaacaatctgcgcttggagtctacagaggctatcttatcagctactggttgcaaatctgaaaatgggctccccacagcagtttatccgtctgttgaaggtattgttaataatggtggtgtgagtacagctaatgaacacccagctgctgcagatagttgccagacaggtaataatggttctgaatgggttgagctatttgtcagagagatgacaaatgcatctgacatgggcgatgcgcgtgctcgcgcctcaagagctttagaagttttggagaagtcaatcgtggagcgtacaggagctgatgcagcacaaaacttgcaaaaggaaaatatgatgcttaaggagcaattgaccgtcgtgctgcgagagaacgctgtcctcaagcgagcggtcgccattcaacatgagcgccaaaaggagttcgacgagaggagccaggaggttcagagtttgaagcaacttgttgtgcagtaccaggagcaactgaggaccctagagataaacaactatgcgctgacgatgcatctgaagcaggctcagcagaacaactccatccccgggcacttcaatcctgacgtcttctaacttttgccgcaagacggtctgtccagaataataatctctgaagatgtcatgtgttgttggtgggaaatgaataataatctctgaagatgtcatgtgttgtgttgttggtgggaaattgcctactgcctctgcgataggagatcaaaattgtcgtgttattacaccgttgaatttaccatcaaacttgtttagactaaatcaccaggggggagagcttccccacctgaattttgtcattgcatagaggatgaaaagttcattacaacataaaaaaaaaaaaaagacgggaggcgagtcgtcttgtgccgacggcgaccagccgggggacttcaatcttaagattctctgcccagagagctgcctcgcggatgcaacgttgcaggcaggatccaatcgagggggtttatttcttgaaaatgacatcatgacgatgattccagatcgccaaaaaaaaaaaaaaaaaaaaaaaaa

SEQ ID NO: 57940 - DNA, 567 bp, Oryza sativa
  Clone ID: PAT_MRT4530_59703C.1
atggacaagaagcagtgcggcgccaagggcggaggcggcggcaatgctcgccggagcgcgacgggcggcggcgcggggaggatgcatcggaaggggaagcatcagggcgacggcggaggcggaggagggaagaggagggagatcaaggtggtgtacatcgccaacccgatgcgggtgaccaccagcgaggagggcttccgcgcgctcgtgcaggagctcaccggccggcacgccgacccgtccaagtaccgcggcggcggcggcggcgcgcccgtcgacgagaccagcggcggtggtggcggcggcggcggcgagatgatgcagggcgcggcggcgatgatgcagcccagcccgggcagcaccgtggactcgtcgtcgacggaccacggcggcgccggcgccggcgggcagggcgccggcctgcaggcggcggcgctggacgacgacgagaacagcttcatcgcgccggagctgatcgacaacaggtactccgtctgcttctcgccgccgacgttcctctacggcggcggctcgcacacctacgacggcgacgactacggtttgtag

SEQ ID NO: 57941 - DNA, 949 bp, Oryza sativa
  Clone ID: PAT_MRT4530_59704C.1
gcacgaggacaaacgtaaggggtgcaagacggagctagaaatggctcccaggctctgctgctcttctcaattcttgctcgccgtctccttcctggccgccttcgcggccgtctccaacgccggcaaggtggccgtctactgggggcagggggcgggcaacggcgacggcaccctcgccgagacatgcgccaccggcctgtacgacttcgtcaacatcgccttcctcaacgtctacggcagcggccttaccccggtgctcaacctcgccgcccactgcaatccggacgcggggacctgcaagtcgctcagctccgagatcagctcctgccagcagagcggcgtgaaggtgctcctctccctcggcggcgagagaggtcagtactccctctcctccgccgacgacgcgcgtggcgtcgccgactacctctggaacaccttcctcggcggcagctcggactcgcgccccctcggcgacgcggtgctcgacggcatcgacttcgacatagagaaggacggtgaccactacgacgagctggcgatggccctctcgtcgaaatgcaacggcgcgtgcgtgctcacggcggcgccgcagtgcccgtacccggacgcccacctcgacgcggcgatcaagaccggggtgttcagccacgtttgggtgcagttctacaacaaccggcagtgccagtacgccagcggcgacgcgagcgcgctgcaggccgcgtgggcgcagtggacgagcggcgtgccggcgcccgcggacgtcttcctgggcctgccgacggcgccggccgctgcaccgagcggaggctacatcgacgcggacacgctgctgtcgcaggtgctaccggcggtggagggcgcggcggcgaactacggcggagtcatgctgtggaatcgctggagagacgtgaccgctggttatggcgccaagttgaaggggaaagtttga

SEQ ID NO: 57942 - DNA, 589 bp, Oryza sativa
  Clone ID: PAT_MRT4530_59705C.1
atggcagttaaggaccgattcgcgggaaaccctggaagaattcctcgtacttaccacaagccagccgcatccaggcaagggtgagcgtgatggagttcggatgggccctgcgacggcctatgcggctttcggattcacctaagcacgagaggggactgcccactgccttgcgaggagtgggggtgaaacctgaggtgtggtgtgtttggttagagggggttatgcgaagggtcctgtcacggcctctttccggtatgtcatgttcaggtggatggttgggcctgttgcaacgtggtgtagcgttggacagtggatggttaatattgattaattattacaaatgttttactgccttcaactactgtttataaatgccgctttgtgcaaatgaaccactctagctatcatttggttatatcctgcatcataccctccgttccggtatgacttgctgagtacaatgggtagtactcagttttgctctacttttccccaaccccagagtttgagtatgcgtcagatggtggctattccgaggagtaggcttcgtccgtgccgttgagataactaacagtggtcctaatcatgg

SEQ ID NO: 57943 - DNA, 843 bp, Oryza sativa
  Clone ID: PAT_MRT4530_59706C.1
atgaagtttcccatctgcatgaactgccattacaatgatcaccaactcaaggagcacacccttcatgttaatgcaaacgcaaatgagaaacaagatgacgacgatgttttgcaacatgagctacaagccttggagtatgacattcaagagtatggtgtgtacgccgatgctatcaatgttgtgttcaatgtagacgagttgctcgactcagatgaagaagaaaatgatgcaaatgcaaatgagccaatcaagtccagaaaattgacaaacccacaaaggcaaggcatttatgaattgttgcttgcaaaaaaactaaacacacccatagatgaaaaatggttcaacgccaccaaaaaggacaagacttactacctacatcctcttgaggaggagctgtataggattgtccaaaacaagaatgcaattgagaaagtaatgttcttgtcggtggttgtgagacctaggtataatgatgaagtagctctaatgggtcttgatattcgcttcgtgaatcaaccaccaaattctcctgatatgaattgtctagaccttggcttctttgcctcacttcagtccttaacatctactagggtctctagcaacatggaggagctagtagagaatgttcacaaggaatataatgactacaatccaaccactcttaatagagtgttcgtggcactacaaagctgctacatcgtggtaatgaaagctagtagagggaataagtacaagatccctcacatgaacaaagagagtctagaggcacttggcattcttcctaaagcgcttttttgtgatcatccgctctatgagagagccatacagcttatagtttactaa

SEQ ID NO: 57944 - DNA, 1626 bp, Oryza sativa
  Clone ID: PAT_MRT4530_59707C.1
atggctatagatttaaacatactagcagatgaagagggagatggaggggctttacctgacctcaatgaagcacaagtcaatctggaggaagaaggagaaggaaggcatgctattgaagcagaaggtggaggggttgtacatccttttgatctcaacttgagggcttttgatcttaacatggaagttgcaggagaacaagaacaagtgcatccagataatgatcagcaaggcatgcagtatgacatggatgttaatgcaaatggaaatgaggaacaagaaattgaactagaggagttgcccgactcagatgaagaagaaaatgatgcaaatgcaaatgagccaatcaatgccagagaattgacaaacccacaaaggcgaagcatttatgaattgttgcttacaaaaagtctggatggatacctagaaaaaggcagcacacgtgtagttgctgaagtgttcaatgtgagcatccgtacagtccaacgtatttggaagagagcacaactttgcattgcacagggagtacaagtcaatgttgactcaaggaagcgttataattgtgggcgcaagaaggttgaaatagatttgtcagttgtagcagcaattccattgcggcaaagaagcactataaggtcacttgctgaagcgctaggtgtgtcaaaaagcacattgcataggttgttcaaagaagggcatctacgacgtcactctaactcattgaagccttatttgaaggaagccaataaaaaagaaaggctgcggtggtgtgttggtatgttagaccatcgtacgttgccaaacaaccccaagtttattgaaatggaaaacattatccacatagatgaaaaatggttcaacgccaccaaaaaggacaagacttactacctacatcctcttgagccggagccgtataggactgtccaaaacaagaatgcaattgagaaggtaatgttcttgtcggcggttgcgagacctaggtttgatgatgaaggtaactgcacttttgatggaaagataggcatttggccttttgttagaaaggaacccgcccaaaggagcagccgcaatagagaaagggggacacttgtaacaaagactattaaggttgatagagacactatgaaatcattcatgatctctaaagttctcccagctattagagcatgttggccccaagaagatgcaagaagaacaatatttattcagcaggataatgctagaacgcatgtcccaatcgatgatgaacaatttggtgttgcagtaggtcaaatgggtcttgatattcgcctcgtgaatcaacctccaaattcccccgatatgaattgtctagaccttggcttttttgcctcacttcagtccttaacatctactagggtctctagcaacatggaggaactaatagagaatgttcacaaggaatataatgactacaatccaaacactcttaatagagtgttcgtgacactacaaagctgctacattgaggtaatgaaagctagtggagggaataagtacaagatccctcacatgaacaaagagaggctagaggcacttggcattcttcctaaagcgctttgttgtgatcatcagctgtatgagagagccatacagcttctagttgactaa

SEQ ID NO: 57945 - DNA, 3390 bp, Oryza sativa
  Clone ID: PAT_MRT4530_59708C.1
atgccgagaactggggggatccagatagttatcacagatggaggaattttaaagaggagggagctggaaggatgctcaagagcatataagcctttgagtattcagaatgctggacacggtcttgtaatgccatctgtgctcaactctcaagctaatgcagatggtcagatgcctggaaatcagggtggcaggtctggcagtccatacccagaggagtcccctcagcagccagttgataagcatgaggcacgctcacacaatttcaatgataacagcacaccttcagattacatggaggatgatcttctacccccctcaaagcgggcaagatcagattgtatttcaaatctggaagatcacatggaagaaactatacatgtttatcctgtggaaaacagacaaatttctggtgaaagtgtgcaggactatgagcttttggaagcttctttgagatcaaggttggtggagagatttgggaagaaatcatatttgaataattctggagaagccactgaagaactctcctttggaaaagtatctgagattgagcgtgagaaggcatatgtgggacctctgctacaggaggctgatgagaatgttatgacaaacattgaaggtatggtggagcttgggaatgatgcacatgaaaagagagctgattctagcaatgcgccttcaattggcaactatgatcatgaggaaaatatttcctcttttggagaattatgcatgccattgagcgtgactcatcccattattccttcttcagctccacaaaatgctgcaagacacatgaagggtttatttcctgatttacacaagaaagcttcagactacaaaaatgactgtcagaccagcaatgcagcctctgtagcaacggttcgtttgccagatgttgccaaggataatgctaagatgcactcaacaactagaaaggatatggacattgtgagtggtgcggttgatcccttctggcctttctgtatgtttgagcttcgaggaaaatgcaatgatgaagaatgtccatggcaacatgttgagcatcatgcttggagaaagtcaaagcacacaaagcattcaaagccctcattttcagggtggattccttatggtctgtttcagcatattctgcccgtgccaacttatcgtgttggttcaaatcttattagggctgatctgaacttgatccagtcggtgttggctagcagcatttggcagtattggcaaagggggttttgtgcttcctttccttttcctttatctgttcaaagggtgcttccatcagatgctccatccttacaggctggtgatgattcgagtgcaaattttgatagggacagacaactattgaatcttcgaatgctggatagtaggaagaataagattgtacagggatctgttgatgctgaactattcttagaaggggcactaattctgtattttggaaaaatcaacaaacctgataggctcaaggctcttttatatctagcacgtgctattgaggccgatccaagcacagttatcttgtgggtgttttatcttcatatttactatcaaaaggatgaaggactagggaaagatgacatgttttcccatgcggttcaacacaatgtttgctcctatgaactatggcttatgtacattaacagcaggttgcgctttgatgatcggttggatgcttacaatgatgctttgagcatgctctgccaaatgacagctgtcacagacatggaattgaaagatagaagttcttttgtcctagatatcttcttacagatggtttacttcttgtgcatgtctggaaatgtggacaaagcaatttccaggatttatgggattctgccgactgcaactcccgactgttctggtgacaagttgctcgctgatgtcatttcttgcttgaccatttctgacagatgcatattttggatttcctgcatatatgtctcaatttacaggaaacttccagaggaaattatagatcaactggaatttcttaaggatttacctaattcgttagtatggtctcctattgaacttacagtagataacagaagtcagattttagtactattgaactatgctgctggtaagattgctgtagatattaatgaaacggttaaaaacggggatccatcttacctgaggctctcacaattcctcgctgttaaccacattaattgtctagctactcttgaaggcttccaatcttgtgctaatctgctggtgaagtatatggaggagtatccaatgtgtcctcatattcttgttttctcagctcggctacatagaaagtacggttcatgtcctggtctgaaaggatttgatgaattgctcctgggttggcctaaagaggtgcaaggaattcagtatctgtggaaccaatgtgctgagcatgctctggcagataatatcgagctagctgagaagttgctgactcgctggtttgaagaatatggaaaagatggtgatattcaaagtggtggtgctactagaccaatggagatcagcaatgaagagtctgtacggtcatcagtttcctctatacaagaagttggttctggtacatctacatcagaggatcaaatcttttggctattaaacctctcattatacaggacgatagagaacaatctacaggaagcaaaagttgctatggacaaagcattgaagttagcacatggggagagctatgagcactgtataaaggaacatgctgcaattcacacactggagaaaacgtcatcatctacagatgttcaaactcaagcaaccttcagtcttatcagtggttatcttgtagatcaacggaacttgcccgtgagggatctgctgtcaagaaggtttatgaagaatgttaagaagcacaggcttaagcggttgatagatgagactataggcccaacttccgcgaatcctgctctgataaactctgtcctcgaggtgtgctacggtccatctctccttccagaaacgataggtgaagttaagtacctggtcgattttgttgaatcagtgatggaggttcttcctgcaaactaccgtctggccttggcggttggtaaattcatggttaagcattgcacaggtgatgactctatttccatgggcacccgattctgggccagctccattctgatcaacgccattttccgagctgttcctgtcgcaccagaatcagtatggttagaaggtgccagtctccttgagaaacttcaggcagcagagaccgtgaagagattctaccagcaggcaacctcagtctacccgttctccttcaagctatggcactcttacttgaactcctgtaaggccagtgggagcagcacagagagcatcgccgaagctgcgaggcaacggggcatcgagctgagcgtaacgcctccctag

SEQ ID NO: 57946 - DNA, 558 bp, Oryza sativa
  Clone ID: PAT_MRT4530_59709C.1
atggagatcgccgaaggtctccgccgcaaccccgtgcccctcctcaagaaccccaagaatggcgcctactacctccgcgtcaccggcatcgccgtcaacctcgaggcggtgcccatcccgccccgcgcgctcgacctcgacgtccgccgtggcacgggcggcgtcacgctgagcaccgtcgcgccgtacaccacgctccggcccgacgtctaccgcgcgctgctcggggcgttcgacgcggccacgtcgggtatcccacgcgcggcggcggtgaggccgttcgagacgtgctaccgggcgtccgcgctcggcacgacgcggctcggcttcgccgtggcgaacatcgacctggtgctgggcggcggccggaactggacgctccccggcggcagctcgctggtgcaggtggacgaacagacggtgtgcttcgcgttcctcgagatgatggggacctcgccggcggcggccgactcgccggcgattgtcatcggaggtttccagatggagaacaatctgctgctgtttgatctggagaaggggacgctggggatcagatga

SEQ ID NO: 57947 - DNA, 578 bp, Oryza sativa
  Clone ID: PAT_MRT4530_5970C.1
acaccaactatgtccactacttatgctacattagagcaacgcatagtggaaacaattgttgaaatacctttgtcataaaacaatttgcttgatgtttcttgtgataaagaatagttgtgtgatgtttcacttctatccatgccacaactagtgaatgaacatgttagttctatagtagagccaccatgtgttgagttcaaacatgttattcacattgctagcgagaataaagagcttaaattgctatcttctttaaatacttggggctatattcaatttgatgatgtttgtccactcaactgcttacagaagaaattatttgctagttgtttaaatgagctacaggttggtttgcaagaagaggagtgttgtggtttttcgactacaaagattttaggatccaaccaaatggccatcaagaaatgttcctcaccagatgttgtgatagataaagataagttcaatacgctccatgacaaggcgaaatcgaggacgatgaggatgatgaggacacaactagcttagatataaccatgaataccttatgtattaatcaaccaaaggtacatatgttctat

SEQ ID NO: 57948 - DNA, 181 bp, Oryza sativa
  Clone ID: PAT_MRT4530_59710C.1
cccacttatgggtattaatcaacgtgtaccatgggatgagactcattgtacagctgctggtgcatctttccacatgctcccacttatgtattagctcaacgtgtaaatggatagactcattgtacactctgcccatctttgttctgtcatcccaattttaaaaaaaaaaaaaaaaaaaaaa

SEQ ID NO: 57949 - DNA, 897 bp, Oryza sativa
  Clone ID: PAT_MRT4530_59711C.1
atggacagcgcgcgcgagcggggcagaggggagcggcggaccggggtcggcttgacccggtcttggccgagctggcgccgacgtggcgcctacgtggctgccacgcgggccggtgggaggttgaagaaggcgccagccggaacggacttcggacggcggctgcgaacggcggggcgaaccacggcgatacaggcgaaagcgagcacaccggtgatgatggccgatggcacggggcgtgatcgctccggcctcgggccggggaagaggaaggagagggtgtgcccggagtccacgtcacgcgtcctcgctcgtgccggctccttcgtcacgcacgacgacgaacggcgacggcgaacagggcagggcgcggcaatggcgaggccgaaaatggggaagattggtttggggaggggctcgggcttcacgggcgcggtcaaacggcgcggaggacgggctggcgcggcgcggctgctcctctgccctggcgctagctccgagcggagggagagcagaggccgggccgagagaggaaagtgggaaacggagggggagaaagaaggctcgcgctatgccggtttggggaggaagagggatgggagtgggaggcactgcctcgcggggcagggcgcggcgctggcggcgcagcgcggcgcggggccggacggcgcaggcacgggcagcaggcggctgacgacggcggcgaccgcacgggcgcgcgcgcgcgagatagtcttcgccttgcacccttcgcccgagacgcccctggcctggcaaggcactcgtgcgactcttcgcctcatgccgttcttgctccatagccttcgccacgggtttcggcagatttggtcgaagggcctcatgccatccgccaacaagcccctcacgggcaaggggtga

SEQ ID NO: 57950 - DNA, 396 bp, Oryza sativa
  Clone ID: PAT_MRT4530_59712C.1
atggccgacggcgcgaggcgtgatcgctccggcctcgggccggggaagaggaaggagagggtgcgcccggagtccacgtcacgcgtcctcgctcgtgccggctcctccgacacgcgcgacgacgaacggcgatggcgaacagggcagggcggcaatggcgagggcgaaaacgggggagattggtttggggaggggctcgggtttatagggcggcaatgtcagttcggaaaccaaccttggacggcactaggggcgagggagcttcgaggggaagggataggcttcacgggcgcggcgcgacggaacgggcgctacaggcacgcgatgtccggcggggacgtaccgatcttcactgccgccggcaacattttggaggaaccccagcaggggaggtag

SEQ ID NO: 57951 - DNA, 1003 bp, Oryza sativa
  Clone ID: PAT_MRT4530_59713C.1
aaactcatcgtagccgacttgctcctcgaagaactcctcatcagcaggatccacatcatcttcttcagcaacttggtcacctagcccgtgtggatcagacacgtctggtgacttggggctttcacgacaaggcatttcaaaagccgacacaggttcaccatatgccaacgagaggggtcccagacctacatcaggttaagtcccagaccataatctaaacgtgccattaaatagatctcgagatttgaggaattttggaagttgaatggagtcaaacggacatacggttgagaagatattgaatttctaagattattggatttttggtctcgcgtggtcccgagcgggacccgcttgtcggtggctcggctcaccgtgagcgaggagcacgcgacgcggggttcgcgatggcacagcgcgcgcgagcggggcagaggggagcggcggaccggggtcggcttgacccggtcttggccgagctggcgccgacgtggcgcgcgaacggcggggcgaaccacggcgatacaggcgaaagcgagcacaccgggtggttgcacgagacgaggggagacgagccaatggcttggatttgccggagggagttcgacggaggcagattgcggcggcggcaaccggcggcgagaaaagagggaaacgacaacgacgcgactagtgttcgattcctccggactagagcatctacgcggccaccggagtccgtttctagcgtaggattagacggagacactacgagagaggccggtgacatgcgggccttgggcggcactagggggcgagggagcttcgaggggaagggataggcttcacgggcgcggtcaaacggcgcggaggacgggctggcgcggcgcggctgctcctctgccctggcgctagctccgagcggagggagagcagaggccgggccgagagaggaaagtgggaaacggagggggagaaagaaggctcgcgctatgccggtttggggaggaagagggatgggagt

SEQ ID NO: 57952 - DNA, 1569 bp, Oryza sativa
  Clone ID: PAT_MRT4530_59714C.1
atggcggcatcggaggccccacagggggaggtaggccatcaagctgggacagggtgggacaccgccatctccataggaaaaagaaagagggtaatagagctacctgataggatggcattcgtagagactggtggcggcggcagagggtcacgtcggagcgagagattggaagtaacagcgaaagaaggccggcctaaatcctctctgaatatgcaaccagaggcggcccaaataacgaagtgggccaataggatggaaatggagagcttgggccgagatcagatggcgatgtcccatgccgctgccactgccactaccctgcgcgccgcccacatggctcccccggccaccaccctctccgacgcgctcgaccatgaccgccgccgcgacgcccgacgctaccgtaccttcctgccgccgtcgcagctcgtgctcggtctccaccgcttgggcttcgcttgcatccccagaagcggcgcccccctcacccgcccccgcaccgcccctagctccgtgccccaccaaccgccgccgcgccgggaggcgccccagccgcaggtagccaatgccgccgtcgccgagaggaggcctttgagggagagagaggaagccgccgccgccgccgccgccgccgccaaacgcatccacgaccaccacacgccggctgaatccaaagctgaagctgcttctgagccacaagtgtccgccggcgaccacagcacgcagagctccgaccacagcgcctccgccgtcgccgtcgggagaggagggagcatctgggtccgggttttgcccaaatcggtcgccatggtggattcgccacagacttctgaagaatccacacccacggcagaggacaagtacatctgggcagacaagtatcgccccaatttcctcaacgatttcatctgcaacaaggacgctgcccttgagctctacaaccaggggtttaccccccaggttaccgcacaagaatgcaaccatatcatatttgaaggcccgacctccgtcggaaagaggagcatggtgtcggcactcatatgggatgcttttgctactgataatctcaagatagaggaacagacaaagagattcgagctgaagggagaaattgcaaaacacattgatatcagagtgaagatttcaagtcatcatgtggaggctgtcaggcatctctgcaaggttgtgacacttaagccaccttcatctgatgagataatcaaggtcctagagtacattgcagtgcaagagagcatagatctgcctcgtgatattgctaggagaataacaatgagctcaggcaataatctccgacaggcaatacgttcttttgaagctacttggaaagcaaagctgtatgtcattaggggtaagatcagaaaactgattgaacataatgtgtcaccttacttcattttctctaatctggttgctgaactgaaaagggacagggatgaggagttccaaaatagcattgatcaactagcatcggagttgaaccatgttagcatgactactgcatcttcagtaacagttgtttcaattcatgatctaattgctgtatactaa

SEQ ID NO: 57953 - DNA, 1471 bp, Oryza sativa
  Clone ID: PAT_MRT4530_59715C.1
atgggccggccggcccgagaaggcggcccaaggcacgtgcgggaggggaggaaagaggtagccggtgggccgggtccatctcgcgtggtcccgagtgggacccgcttgttggcggctcgactcaccgtgagcgaggagcacgtgatgcggcgctagggtttggagcggggcgcggtgcacgcgcgcggcttgcggtggatgcggatgcggcgggcccacgcgcagcctcacggctcgcggtggaccgcgcgcgcgagcggggcagaggggagcggcggaccggggtcggcttgacccggtcttggccgagctggcgccgacgtggcacctacgtggctgccacacgggccggcggaaggttgaagaaggcgccggccggaacggacggcggacggcggctgcgaacggcggggcgaaccacggcgatacaggcgaaatcgagcacaccgggtggttgcacgagatgaggggagacgagccaacggctcggattcgccggagggagttcgacggcggcggattgcggcggcggcaaccggctgcgagaaaagaaggaaacggcaacgacgcgactagggttcaattcctccggactagagcatctacgcggccaccggtgtccgtttctaccgtcggattagacggagacactacgagagaggccggcgacgtgcgggcgctacgaagcacgggcggcgacggcggcgagcacacagcgagcggcggcagcagtcagggcggcgccagctagctacggggaggctttacgcactaccgtgcggggtgaaggggcgcagtgacgatggccgacggcgcggggcgtgatcgctctggcctcgggccggggaagaggaaggagagggtgcgcccggagtccacgtcacgcgtcctcgctcgtgccggctcctccgacacgcgcgacgacgaacggcgacggcgaacagggcagggcgcggcaatggcgagggcgaaaatggggaagattggtttggggaggggctcgggcttcacgggcgcggtcaaacggcgtggaggacgggctggcgcggcgcggccgctcgtctgccctggcgctagctccgagcggagggagagcagaggtcgggccgagagaggaaagcgggaaacggagggggagaaagaaggctcgcgctatgctggtttggggaggaagagggatgggagcgggaggcgctgcctctggtttttggacggatgcgggcggcgcggctcggggacgcgcgctggctcgctgggcaaggcgcggcgcaagcggcgcaacgcggtagggcgcggggccagacagcgcaagcacgggcagcaagctgctgacgacggccgcgaccgcgcgcgcaaagttgcaaattggattgctgctatgcacttgtattacagtattcactccactgcggcgtggtcggccaagcacgtgcagggtggagaagtgcgtcttgttcttggagtgtggtaa

SEQ ID NO: 57954 - DNA, 159 bp, Oryza sativa
  Clone ID: PAT_MRT4530_59716C.1
atggcggcggtgagtggcgacgacaaccacagcgagatggggatttggggcagctctgacgtgggagccgtgagaccacaggtcagagtggagcgttgtacatggcctatggacggcatggatgtggagcccgaggacgaggtcctggtcacggtgtga

SEQ ID NO: 57955 - DNA, 286 bp, Oryza sativa
  Clone ID: PAT_MRT4530_59717C.1
ccaaacccttttttttcccctggttttctatttaatttcattccgatagataccaccaagcatttaaaaccccataaccaaagggaactcaattcatgggaacatcacgggcaaaaaacccctaacactggagggatggaaagagggctttccgactcgagagagccactggacacaataaccactccgacttgataaaaaaaagattttgccccggttagctaaggataactggccacaaggggccccaccaaacagtccctccagatccccccggaatcccccc

SEQ ID NO: 57956 - DNA, 178 bp, Oryza sativa
  Clone ID: PAT_MRT4530_59718C.1
tggacactcaagctaatcagacgggcacaatgttcgtatgggcttattttgtagaggaaggtacgcacaggcatctatcagactggaacatttatagttatcaaagtacaattgttaaaggtaaaatactgtgtatatatttattctatattgtcatacataagattcctgttttata

SEQ ID NO: 57957 - DNA, 1137 bp, Oryza sativa
  Clone ID: PAT_MRT4530_59719C.1
atgaagtctttatgcggcatagtaattgtgaactttgacaaaataaaagggtgtcaattgaaagaaatagaggtggaagtacagtgccatgagctgggaagatgggtaggaggatttggtctggaaatgcttaaactgccattggaagagcgcctgaagaaatggtttaccgaggtttcacaagtgaatcgatttgatgctctgatgcatcttgctccactctattcagaggatgatgttctcaaagtgcttccagtgtatgcggatttggtgcgtggtttgtgggtctgcaaaagttctttactgtttgatgatggatatgcttggaaaagagatagaattcttcttgaatttaggaaaaaggattccatccctttgaaggacatacacagaattattaaggttaagttagatgataacctaaagaaaaagtttctatatccattgtgtaaaataagggcaaaacttgaagactgcaaatttgtattaccagtggattcttccttcataagacgctatccccatatagtcaaggagcaagatcatgcttggtctgtacgtgagacaactatgcgtgaatctcaagagacatccagcaatactgaggcaaggaaaaccaagaacacaaccaagtctaacattccttcaaaagggcctgatccaaatatgaacaaggccagggatggtccagtgcaaggaaatgaaaacctcgtgcactctgttttggatactattttcactgccaacaaagtccgcagtattcaagcaattcgtagagacttgaggcagttggcagctaaatatgcttctgacagaaaggatggaccaaaactgcaagctctgtcaaacgctgcaacaaattgtgcttcatttcctcttgtagatctccaaaagtcactaaaccaagttgctgttcctgttcatggtgtgtacgttgcaaagcctgcgaagccgaatagtccacgaaatattcttattaagctcttccgtgataaagatccagattcgaaattaaccaagcaagaaatccttgattgtgcagcgaatcatctaaagaaaggtctaaatgaaaaagactaccatcaggtgtggagggaatcagttattgtctttaagttttgtcctgttactgcataa

SEQ ID NO: 57958 - DNA, 337 bp, Oryza sativa
  unsure (1)..(337): unsure at all n locations
  Clone ID: PAT_MRT4530_5971C.1
ctgtcggtgatatgggaccgggagtatcgtgaccagaggcttgaggcagacacaatcgcccatgtggcctggcaccctcggggacgtcgggcccgagggtgaggtgtccgccctcctcactgatttccccgaggggggtcgggtgacacctatcctggccccgagggccgaggcgccccgacccctcgcgtttcttctccacacacaatcgcccatgtggcctggcaccctcggggacgtcgggcccgagggtgaggtgtccgccctcctcactgatttccccgaggggggtcggnnnacnncnatnntggcncnnaaggccnaggcgcccccgccc

SEQ ID NO: 57959 - DNA, 591 bp, Oryza sativa
  Clone ID: PAT_MRT4530_59720C.1
ttttttttttttttttttttggctcgacaagaaatcatttataatagatagcttctagttttatttcaaaggtacaaatatcacaatcctatacaatagtggtactataatgaatacatgctgcataaaacgatccatatagctctaagcttaatctggtgccaccataagtagggcgcaaagttcattatacttgtgtgcatgagtgtatgacagagcgagctcaagctccaagtgttgaagaatcatacacaacgccatcttggtctcaagcaatgcgaagttttggccaatacagattctcgggccccaactaaatggtaggaacgcgcctggatccttggatgcctgggaatcccctcaggaacctctctggattaaacttgtgcacatcacttccccatatgtctgggtcactgtggatgagcagcaaggggagctcgatgatcacgccagcggggtaagtgacgcctccgatctcaatctgcttatatgttcgccgagtcaaggtcacggccagtggatacagcgaagaacctcgtagaggatcatggtcacgatttgacggcggctcagaccttcgtatcaggt

SEQ ID NO: 57960 - DNA, 317 bp, Oryza sativa
  Clone ID: PAT_MRT4530_59721C.1
cacgtttccttgacaacgagaacatcggcatggcggtggaggaagtagcggtgctcgcgttcctcgtcgccgcggcggcagcggcgtcgccagcgcctgcggtggtggcgacactggtggagggcggcgtggacgtgcgcccgacggtggagatgaccccgagagggaggacgtgcctacaacgcaggaggagagcatggagatcctcggcgtcactgcgagggggaggacaagctggctgaggcggccaccggcaagccgtagttgatgaagggccgatcggggcacattgaatgcgacgcgctacaacgcgacag

SEQ ID NO: 57961 - DNA, 1057 bp, Oryza sativa
  Clone ID: PAT_MRT4530_59722C.1
gaactagtggatccccgggctgcaggttcctctcttctgcggccgcgcgcgggctccacacctcccctgccgaggcaaggaaggagaggcgcccctccacacgcggagcagaagagagccatgggcctccaggtcgcggccgtcgcgccatccccgtgcgcgcgctcctccgcctcgtcttcgccgccctcgacatcctcctcgcgtcccgccctcggcggtgcggggctcgcgagatcccgcgccccggttaattggggcgccggtgttatggcgcggcgccgcgggttgcggcagccggcgaggtgcgccctgagcgccagtttggatggcgtggggggcggggacgcggagttcttgcggcggatcgaggagctcgcggcggcggtgggtgtgcagcccacgggttgcgggtggccggcgagcgtggagcgcagcgcgagcagcgccgggatgcctctgtcgctccggatgctgaagcggaagaagcagcagcagcagctggtggcgcggcagacgcggtgggacgagcggctgctgggctccgccggcgactcggtggggcgcgccttctcgtcgatggtgctcatcgtgcgggagctgcagagcttcgcgctgcagcagatgcgggaggcaatgctgggcgacgacctgcagagcgtcctggcgcgagtccatggcgagatgcacgcctccttcgtctggctcttccagcacatcttcgccggcaccccggctctcatggtctccctcatgctcctcctcgccaacttcaccgtccactccatgggtcacagtgtcgccgccgccgcagccatccctcccgctccacctacctccgcggctgtcgcggtggtcgacacccagcacgccgacccatccctcccgcggttcgacgcggcctcggtcaagacgttctctattgggcgtgccgcctcggtcggcgggagcagcggcggtggcggggaaggttcggcccgtcgcgggcgccactggcgacgaccggtgggacgaatccctagctcggctgagcggtgtcgcgccgcagcaaccagcg

SEQ ID NO: 57962 - DNA, 270 bp, Oryza sativa
  Clone ID: PAT_MRT4530_59723C.1
atgttccaagccgtcctcgtctccgtgcagctgctgccggctgccctcgtcgccttctcgccggtcccggtcatcgtcctcatcgtcgtggcctccttcttcgtcttcgtcctcagctccgcgtcgtcaagcgttgcaccggccgcgtctcgccttcgtccaaggatcgccgccgaagtcgtcccctcgccgttcgtctccgtcgttcccgtccgtctctgccgcgcccgttcgtcgtcgtcgttctcacacctcgttgcgtggtggtaa

SEQ ID NO: 57963 - DNA, 387 bp, Oryza sativa
  Clone ID: PAT_MRT4530_59724C.1
atgcctttatcgctccagatgctgaagcggaagaagcagcagcagctggtggtgtggcagacgcggtgggacgagcggctactggactccgccggcgactcgatggggcgcaccttcttgtcgatggtgctcatcgtgcaggagctgcagagcttcgcgctgcagcagatgcgggaggcaatgctgggcgacaaccaacagggcgtcctggcgcgagtccatggcgagatgcacgcctccttcgtctggctcttccaggacatcttcgccagcaccctggctctcatggtctcccccatgctcctcctcgccaacttcatcgtccactccatggctataacgatcgatacaaacattatcattgacatggttatacttgaaaagtag

SEQ ID NO: 57964 - DNA, 1383 bp, Oryza sativa
  Clone ID: PAT_MRT4530_59725C.1
atggagggctacgcatgttgggtgaagcgtggagagcaagaagttacttctgcagatagaagtggtgcaaaaaatcaggaagaagaagatgagcatgatatgtttgtaccttctccattgggcagtgaaatggttgatgtggatcacgatctgctgcaggacatgttacgtgacgttgaggacccagcttacaacaagagagattctatgaagttcagaaggttggtcagtgactcggagacacctctatacgctggatgcagggcaaaacacaccaaattgtcagctaccttggacctaatgaagctgaaggcaagtagtggatggacagacaagagtttcacacaaattttgggaatattgaaggccatgcttcctgatgatatcctaaccaaccggacaaggaattgggcaagggcaagggtgaagaagaatagcgacggaacacttacgttcccaaatgccgaagatcaagcagtgtatcagaaaattagacagttctcgcaagaggtctcctcacaaagatgggatgatgacatcctcacggtagcgttgggaaacgaagaacaccgtggatggataagcggcattggctccgatattccatggaagcatgggtttccccaatacgcgtggcagtacaagaagaacaaactgacaaaggcggagaaagatgcacgcctcaaggaacaacttatggaggacatcagagctgagctaagctctgaattcgatgagaagttgtcacgggtggaggcacgcatcaggggtgagcaccagcaagggaacgtcgaccccgccgacgctcccagagtagaagtgagccccacggaaaggcgtagcagctgcgcatcaactgaagcggcggaagaacaaccaccagtccctaccgcagtggaccacacaatgggtcccatagagtgcaccctagtcgttagggtgacacaagcatttacacttcctaccgccaaggattttggggatgagggtttggaagtcgacagcatggcgtactttccccctcctgccaaaaagagcaagaaggcccaatcttctccaccacagcatgaaacaaaaaagaaagctgttgggagggggagaggaagaggaaaggtagaagcctcgcttctagttcccaataagccaaatcttggcaaggcaccatcagctcgtcccacggctccgaccgacttcacattaggcatgccactggttggagacgacatgttagcgaagatgggccctgcttgcaaggagttgcacgggtactacatggagatgtccaacacaaggaggaagcatagagagacctgcatgacgggccatcacgatagacagccattccttgggcctccaagctttattgctgttggtatttcttaa

SEQ ID NO: 57965 - DNA, 587 bp, Oryza sativa
  unsure (1)..(587): unsure at all n locations
  Clone ID: PAT_MRT4530_59726C.1
gattgtntngtnnanttattcccacggnataannctnaagcctctgttagggaattcctgatccnnncaatntatctgncncatanantgaagnattncctgacttaaatactgttcnctatanggacnctttgtgnacngtcngangtnnctacgtnnaatgtgattgactactnaccacttctcncanggactgnngctgaangccatggaagggacaagatctganagattganttcacgncccngctacgagcaacactgacatctataatttcctgnaccgagntntnntgatatctccaatgtcctatgtgatcatctcncgganctatanggntacngatganatgctcaaacaacaactncccatggattctgttcncaanatcgatattgnctgctggcgtnccattggaagnggaanttctcntgattttcaagtagcntcnattcgagantncacaaataagntcggantnttattntctnttccttgagaantngncnttntcttgtttggcctntagaagntgtctnaaaatcnattgggcctctnctntcttttcccagggtttgntcgctct

SEQ ID NO: 57966 - DNA, 205 bp, Oryza sativa
  Clone ID: PAT_MRT4530_59727C.1
atggactccaacccagctgattggagcaattgtcgcacaagggcatcgatcaagccacttctgtccaagccatacatgcaggtgcatgatctacctagacagatacatgcacgcagcgacctttttgctggagtctctgattcatcaagcaagccatacaccgctgatgacatacatgcattaaaaatcttggattacaagccag

SEQ ID NO: 57967 - DNA, 1330 bp, Oryza sativa
  unsure (1)..(1330): unsure at all n locations
  Clone ID: PAT_MRT4530_59728C.1
acgcgtcctcccccacctccgccgccgccgccaccgccaccgccgtcaccacccaccgccttaccaagtctggaggggcaggaacgtattcctgtgcggcgggcggctcatcttcggcccggacgccagctccatcgtgctcaccgtgtcgctcatcatgacgccgctcgcgctctttgtcgccttcgtctccttccacctcgccgccctcatcgggaagccgctcggccaggccgtcccggccgtcgccatcgccgtcggcgtattcgacgtgatcgtgctggtgatgacgtcggggcgggacccggggatcatcccgcggaacgtgcggccgccggagcccgaggacatcggcgtgtcgtcgccggcgttcggcggcggcgggtcgctcccgccgacgcgcgacgtgtacgtgaacggcgtggtggtgaaggtgaaatactgccacacctgcctcctctaccgcccccctcgctgctcccactgctccgtctgcaacaactgcgtcgatcgcttcgaccaccactgcccctgggtcggccagtgcatcggcaagaggaactacaggttcttcttcatgttcatctcgtcgacgacgttcctgtgcctgtacgtgttcgtcttctgctgggtgaacctggcgatgaccgcgaggcagttcggctgcagcatggggcgcgcggtggtggagtcgccggtgtcggggatcctcatcgtgtacacgttcgtgacggcgtggttcgtcggcggcctcaccgcgttccactcctacctcgtctgcaccaaccagaccacgtacgagaacttccgctacaggtacgagcggaaggcgaacccgcacaaccgcggcgtcgccaagaacgtcgccgagatcttcctctcgccgatcccgccgagccggaacgacttccggtcaagggtcgccgtcgagcactactacgccgccggcgccggggcggcgtcggggcagtacttctactcctactcgatcgggccgctctcgtcggagtccaaggcggccagcttcaacacgcgggggagcctcggccgagctcgatcactggnnnnnnnnnnnnnnnnnnnnnnnnnnnnnnnnnnnnnnnnnnnnnnnnnnnnnnnnnnnnnnnnnnnnnnnnnnnnnnnnnnnnnnnnnnnnnnnnnnnngtgtctctgctctatggtgtctgttggtgatgcgtgtcggatgtctggcggatggtgggatggaggaatggggatgatggtgggtggtggcggcgaggaggaggtgggagagggaggcggcgaggagggcgagggagaggaggaggtggcaggcgaggaggaggag

SEQ ID NO: 57968 - DNA, 230 bp, Oryza sativa
  Clone ID: PAT_MRT4530_59729C.1
aaaaaaacaactttttccaattaaacccaagaaccccccccccaaaataaaacacagggtctgggccccccttaaagcgacatattgccccccctcatttatccccctccggagacaacaccttacaaaacccgtcttaccatcttttaaaacttcctgccaggttgcgcggcgcaaaaccccatgtgattcaccctttaaaaaaaaaaactatatccctcttccccccc

SEQ ID NO: 57969 - DNA, 462 bp, Oryza sativa
  Clone ID: PAT_MRT4530_5972C.1
atggctaagcaatccctagtcctaactctaatcatgttagaaccccaagttgacaaagaaacatgggctgacgtcatcaaggcggggcgcggcgccggcaagcgggccccaccggtcagcggctcgggagagggaggaaggggcgccggcaagcgggacccgcatggcagtgactcggggagggcggtccacggcggatcgggtccacggaccggggaggagcggcgcacctctcggcggccacgcgacagccgaaccgatggccccaatctagccaagggtagatcggacggcggcgggagctcgtggccggtgcgcgcgggcacggcgcaaaccggcccggcggccatggcgcgcgacggcgcggcgcgcatgcggcagcggcgcaagacggcggccggcggcgaccgaccggcggcggagagcggcggcgtctcggcgaagcggcagctacgcggctaa

SEQ ID NO: 57970 - DNA, 1500 bp, Oryza sativa
  Clone ID: PAT_MRT4530_59730C.1
atgttgaaggtgaggtggttgccgttcaagaagacccatctcgcccgcagcaacgcctccgacgcgtcctcccccacctccgccgccgccgccaccgccaccgccgtcaccacccaccgcctctaccaagtctggaggggcaggaacagattcctgtgcggcgggcggctcatcttcggcccggacgccagctccatcgtgctcaccgtgtcgctcatcatgacgccgctcgcgctctttgtcgccttcgtctccttccacctcgccgccctcatcgggaagccgctcggccaggccgtcccggccgtcgccatcgccgtcggcgtattcgtaagcccggccaccaccatttctgcgtcgctcgagcaaaatgaagcaattgaccgatcactttgcgtgcatgcgtgcgtgaaggacgtgatcgtgctggtgatgacgtcggggcgggacccggggatcatcccgcggaacgtgcggccgccggagcccgaggacatcggcgtgtcgtcgccggcgttcggcggcggcgggtcgctcccgccgacgcgcgacgtgtacgtgaacggcgtggtggtgaaggtgaaatactgccacacctgcctcctctaccgcccccctcgctgctcccactgctccgtctgcaacaactgcgtcgatcgcttcgaccaccactgcccctgggtcggccagtgcatcggcaagaggaactacaggttcttcttcatgttcatctcgtcgacgacgttcctgtgcctgtacgtgttcgtcttctgctgggtgaacctggcgatgaccgcgaggcagttcggctgcagcatggggcgcgcggtggtggagtcgccggtgtcggggatcctcatcgtgtacacgttcgtgacggcgtggttcgtcggcggcctcaccgcgttccactcctacctcgtctgcaccaaccagaccacgtacgagaacttccgctacaggtacgagcggaaggcgaacccgcacaaccgcggcgtcgccaagaacgtcgccgagatcttcctctcgccgatcccgccgagccggaacgacttccggtcaagggtcgccgtcgagcactactacgccgccggcgccggggcggcgtcggggcagtacttctactcctactcgatcgggccgctctcgtcggagtccaaggcggccagcttcaacacgcgggggagcctcagcttcgacatggccacggcgagcttcgacctcggcggcgtcggcgtcggcggcggcgtcggaggatactccgccaagcgcaccagcgtcgacgtctgctccaactcctccgacttcggcgacatctacggcggcgagcagcagccgccgcggcactccatcttcggcggcgacggcggaggagggaggacgagcgtcaggaaggccgacgacgtcccgacggagttcgggcactacggcgccgccgctgccgccgccgccggcggcggcggcggccggcctcgcgggagggagttcgaggccgtgtga

SEQ ID NO: 57971 - DNA, 279 bp, Oryza sativa
  Clone ID: PAT_MRT4530_59731C.1
atgtcgtgtcgcgcacttgtcacgtcctatcgtatccctcaacaatcaacggacggattaagattggggcgggacggggcggcaacgcgtggggcgaagcttgctgggcagcacacggcgcacgggacggagccatatttattaagaccggaccggatcgggaaaaactggaaccagagcccttaccgctcgcggacgggtggcggtgcacggggcggagctcactactcatcgacgctcgttgacactcgtggctcgcggacatggggcggcacatag

SEQ ID NO: 57972 - DNA, 184 bp, Oryza sativa
  Clone ID: PAT_MRT4530_59732C.1
gtgaacaaaacttttgaactttttttggggtttttgttttttatttcagacccgggggaagacccggaaaagccggacagacaccggaaggaaagcgaacttaccttatggggagacaaatgagagctaagagaaacactggaaaaagggtagacggggtgaaaacgggagcgagtcaaaggca

SEQ ID NO: 57973 - DNA, 478 bp, Oryza sativa
  Clone ID: PAT_MRT4530_59733C.1
cccgggctgcaggaattcggcacgagggcgagttctatgatggcaagctgagcaatgttctagattcgggtagggttgctgccttgcgcagggatcttttctacaagctcctgactatggaagggaacagcgctgagctgccaagtcacattgcgagatacttggagtagttgtaccaagtgtcatgctggtcgtttagccttttgctagtatgtttatgctgcaagtatctgacgagaacttaggaagttgtcttgtgaccaggataattcccaagaaatctcctttatctaaaaaaatattctaggcgtctagataagccagtgttttctattgataatagcttgcactgaataaaggtatagcagcaagttgtttactagtagcatgtagcaaaagccttttgtatggcttccggcatgttaggactctttgggaagtgcatcactgaatgaatgagttttctgagtaactcttt

SEQ ID NO: 57974 - DNA, 392 bp, Oryza sativa
  unsure (1)..(392): unsure at all n locations
  Clone ID: PAT_MRT4530_59734C.1
cgtaccggaatcgcgcacagggtccgacccacgccgtccgcggacgcgtgggttagcttctncctccccctctttaccttttcctcctcggttcggttccgtgggtcgtctagggtttagtgggttgagatggcggcncccgatgtcgagtaccgctgcttcgtccgcggcctagcctgggccaccgacgaccaggtcctttaggcctgcttccacaactactgcgagatctccaacttcaagatcaccaacgatagggagacttgttggttgccttgatttgtactaaaggtcatccgcttattagattgcatgttgatttccattttgatattgaactagaagaatcttatcttgatagaatattatcgatttgtcatgttattttttat

SEQ ID NO: 57975 - DNA, 825 bp, Oryza sativa
  Clone ID: PAT_MRT4530_59735C.1
atgaactgcaagtacggcaagctccggatgctggaggacgccggtgccgggtacgaggtgacgaggtgtcgaccagcggccgcgcccagctgggccgggtacgtcgctgtgtccaccgacgagacgacgcggcggctcgggcggtgcgacgtgcttgtctcattccgtggcaccgtcacccccgccgagtggatggccaaccacaggagctccctcgtgctggcgcgcctcgccccacgccgcggcgacggcggcggcggctacgtgaaggtcgagtcggggttgctcaacatctacacctccgccgacgagacatgccgcttcggctgcaccgacagctgccgcaaccagctccttcgcgaggtgtcccgactcgtcgcctcccgctccggtggtgaggacgtgagcgtcacgctcgccaaccacagcatgggcggcgcgcttgcgctgctcctggcatacgacctcgccgtcgccagcgtctcggcggcgacgccgccgccgcccggtcaccgtcttctcctacggcgggccgaggatgggcaacgcggcgttcaaggcgcggtgcaacgagctcggcgtgaaggtcctccgcatggcaaaggggaaggcggcggctgtggaggaggaggtgaacgggttttttgtggaggaggaggggacggcggtgtcggacgtgtcgttgatcggggtggcatcgtcggacagctcgacgggagaactcgtcgttggagaaggaggggcattctcgtctcttcaagccgctttgcagagaaaataatatccaaaatagtaaaaatggagaaaatggcaaagtggctgtga

SEQ ID NO: 57976 - DNA, 189 bp, Oryza sativa
  Clone ID: PAT_MRT4530_59736C.1
atggggctgtcctggtctcacccccacctcgatctgcggtcgctcggcggatatgacgtcgcaaagctacgcggcggcgtcgtggaggtctcacccctctcaatccaaggctgcgcgccggcggcggtggccagggcaagcatggtcgcaaaggatgcgcccaactgtgtcgccgctgcggcggcgtag

SEQ ID NO: 57977 - DNA, 975 bp, Oryza sativa
  Clone ID: PAT_MRT4530_59737C.1
atgacatgctcgccgctgcacccgttgctccgcggagaggtggcgcggtacggcgagctcgtcggtgcatgctacgcggcattggaggacccttcgtcgccgaggtacatgaactgcaagtacggcaagctccggatgctggaggacgccggtgccgggtacgaggtgacgaggtacatctactcgtcgccggacgccgctgtgccgggcatggaggtgtcgaccagcggccgcgccagctgggccgggtacgtcgctgtgtccaccgacgagacgacgcggcggctcgggcggtgcgacgtgcttgtctcattccgtggcaccgtcacccccgccgagtggatggccaaccacaggagctccctcgtgctggcgcgcctcgccccacgccgcggcgacggcggcggcggctacgtgaaggtcgagtcggggttgctcaacatctacacctccgccgacgagacatgccgcttcggctgcaccgacagctgccgcaaccagctccttcgcgaggtgtcccgactcgtcgcctcccgctccggtggtgaggacgtgagcgtcacgctcgccaaccacagcatgggcggcgcgcttgcgctgctcctggcatacgacctcgccgtcgccagcgtctcggcggcgacgccgccgccgcccggtcaccgtcttctcctacggcgggccgaggatgggcaacgcggcgttcaaggcgcggtgcaacgagctcggcgtgaaggtcctccgcatggcaaaggggaaggcggcggctgtggaggaggaggtgaacgggttttttgtggaggaggaggggacggcggtgtcggacgtgtcgttgatcggggtggcatcgtcggacagctcgacgggagaactcgtcgttggagaaggaggggcattctcgtctcttcaagccgctttgcagagaaaataatatccaaaatagtaaaaatggagaaaatggcaaagtggctgtga

SEQ ID NO: 57978 - DNA, 546 bp, Oryza sativa
  Clone ID: PAT_MRT4530_59738C.1
atggcccggtcacctgctgctcctccactccttgaaggtgaagatcgaacgggaagcctcggcttttgcttctggggatacgttctgtctcttaggacgaaaaggcacacagactgcagaccaatcaagaagatgcgtggtcaggttatgcccgaacctattgtcgtttttgccccttcttcagcaacctctgcataccacatcccaggctttgtcatatcagaatcaaccgctgcactcgaccttcgacgcaaccatatcaatggttctgagtgctacttcctgggaacgtgccactatgccgagaagggtttcaatgggcattgcagattagtgggttctccggtcttcagcctaaaaggaaaagttatgggactaatcgctgggacttgtgtgaaagagctcaatttgtaccttggtggctatgagatcaaggtggcactgttaacatctcatatggatggtatgctgaatgcgatgctgccgaagtcagatgcagccaagaagaagattgcttcaaggaagaagggagggaagttcccatag

SEQ ID NO: 57979 - DNA, 348 bp, Oryza sativa
  Clone ID: PAT_MRT4530_59739C.1
atggccgaagaagaagaagaagaagatcacaagatgaaggaggaggaaaagaagaagaagctggacggcgaccgggtggggcaccctcctgcgcgtgggatcgatgagccgccgcctcgagcccacctcaccacttccctgctgtcttcgacgtcctcctcgttagtgccccgtcgtatccaacccccaccgcgccgtccctgtcgcacccgccgtatcctcccggccatcggccgccggccgcctactcgccatgaccgggatagccgagctcatgcagcccccttcctccccttcccgttcagactgaccctcgccgtcggcgctctgtcctcctctcaccaatag

SEQ ID NO: 57980 - DNA, 611 bp, Oryza sativa
  unsure (1)..(611): unsure at all n locations
  Clone ID: PAT_MRT4530_5973C.1
atggccgcccgcgcccgctccatcatacgctggctcggtcaccaccgctcccgccgcgtctcctcctcttccttccatctgaccaccaccggtgacgacaccgtcaaggatctccacgacccgcggcgagagaacgcgaaggccgacgggtggaagnaggtccacgagggccccgagtccgaccccgaggagtacattgcgttggtgtcgaagaacgcgggcacgcacctgccggaacctgacttcttcactgaatatggtgaagcaaaccggtataaagtcagtgaagtcattggcaaagggagttatggtgttgtggctgccgctgtcgacacccagaccggcgagcgagtggcgatcaagaagatcaatgatgttttcgatcatgtctctgatgccacccgcatccttagggagattaagttgctccggttgctgcgtcacccagacatagttgagatcaagcacataatgcttcctccttcaaggagggaattcagggacatttatgtaatctttgagctaatggagtcagatctccatcagcaagtgttttccatcgggatcttaagcccaagaatattctatccaatgctgattgcaagcttaag

SEQ ID NO: 57981 - DNA, 880 bp, Oryza sativa
  unsure (1)..(880): unsure at all n locations
  Clone ID: PAT_MRT4530_59740C.1
cctagtagcaagtcatgctagcacatagtaagctagtttgcgtcgtcacaatganggatcgtcgctnctagacgtaagcgtacnnctttgacagtagctcntcgctccatgcctagtccctaaaggctggccgtggagcctaatcctgaatctgctcgctgctgcctcagatctatcgcttcagttagagtatccgttccgnatnctgatgagggctngtgtgtgtaggctttccagcctgnctcnctcaacgaaagcagtgagttgcatgtgtccgggaacttttccattggggtcangcgtccggtcaatactgcngcccctacctccaagtcagtttggtgtattcggtcgtgctctctcaaatcgggtgtcgagtttcctggatgttgtaatgctctctctatagtctgggtccctgtgtttcgctgactgattagggnagcnggtttccaaaggctgtccagtccaagcctagtttactgggaatcgtgaccacgctccaggtaaaactcctcggtgccggggatttgccctttgttcgggattcgatgaaaggattgcgtgtnnngagcacttgctgagagnagagcgnttataannagcgcgtttcgattcttgcaactgantaagggttctcttgggtgactcccctcntgacttgcgacgcgaccncccaaaacccggcgccgtcgaagggtataggcgtccccctttccggatccntggaactcctganctgagtngtccagtcatcccagtgagtgggttggcttcttttcgccgattcggaaagttgggtggtgtgggggtccttgtnctcgcngtcaaactagttcaaaagggtccaaggtttcccactctggtggaaattcgggct

SEQ ID NO: 57982 - DNA, 352 bp, Oryza sativa
  Clone ID: PAT_MRT4530_59741C.1
tttgttgtgaactgacacgtgggtcccactgggttttattattttttcgagctcgaattgtcacgtaagcgccacgtcaatgccacatcagatgagaccgagtcacaattagccacgtaggcgtcacgtcagcccaaaccgcccttaaaatcaccgagggacctcatttgcacctgttttgatagttgagagacccgttgtgtctggttttggttgagggacgaaaatcggattcattgaccaggtaagggacctcagatgaacttattcctttgtgtggatgtccctgtgctagcgtataaccatactctcggccttctgggcttttctttaaaaaaaaaaaaaaaaaaaa

SEQ ID NO: 57983 - DNA, 3403 bp, Oryza sativa
  Clone ID: PAT_MRT4530_59742C.1
atggtttcgagatcctactccaacttgctggagctcgccgccggcggaggaggaggaggcggcggcgaagggccgctgccgtcgctggggcggcgacggattccgcgggtggtgacggcgtcgggcattgtcccggacctggactactccgacgacgacgcggcgtcggcggcgtcgtcgtccgaccactcctccgcccactcccacgcgccgcgcgagcgcgccatcatcgtcgccaaccagctgcccatccgcgcgtctcgccgcggcggcggcggcggcgggtgggagttctcctgggacgaggacagcctcctcctgcagctcagggacagcctccgcgcccacgccgaccgcgccgacgacatggagttcgtctacgtcggcggcctccgcgacgacgtgcccgcggcggagcacgacgaggtggcgcaccacctcctcgagggcttccgctgcgtgcccaccttcctccccgccgacctccggtcgcggttctaccacggattctgcaagcagcagctgtggccactgttccattacatgctcccgctgtcgccggagctcggcggccgcttcgaccgcgcgctgtggcaggcgtacgtgtccgtcaacaagatcttcgccgacaagatactggaggtgatcagccccgacgaggactacgtctgggtgcacgactaccatctcatgatcttgccgacgttcctgcggaagcggttcaaccgcgtcaagctcggcttcttcctccacagcccgttcccgtcgtcggagatctacaagaccctgcccgtccgcgaggagctgctccggtcgctcctgaacgccgatttgatcgggttccacaccttcgattatgccaggcatttcctgtcctgctgtggaaggatgctcgggttgaagtatgagtcgcagaggggctacattgcgctggagtattatggtcggacggttaccatcaagatattgccggtgggagttcatttggagcagctgcggtcggtgctcaatcttccggagacgggggtcaaggtggccgagcttctcaagcaattctgcgatcagaaccggctgatgttgcttggcgtagatgatatggacatctttaaaggaattagcttgaagcttttggcatttgagcagctcctgatgcaacatcccgaatggcgaggaagggtggttctagtacagattgccaatccagcgaggggacgggggaaagatgtgaaagaggtgcaggatgagagctatgcaatggtgaggcgtatcaatgaggcatttgggcagccaggttaccagccggttatattgatcgatcggccacttcagttctatgagagaatggcttactatgttgtcgctgagtgctgcctggtgaccgcagtgagagatggcatgaatcttatcccgtatgagtatgtaattgctaggcagggcaatgaaaaactagacgggatcttaggtcttggcccatcggcacggaagaagagcatgcttgttgtgtcagagttcatcggctgttcaccttccctaagtggtgcgattcgggtaaacccttggaacatcgatgctgtggctgatgcaatggactctgctttagagatgcctgaaggggagaaggtgctgagacatgagaagcaccacaaatatgtgagcacacatgatgttggatactgggcaaacagcttcttgcaagatctggagaggacttgtctggaccatagcaggaggcgttgttgggggataggattcgggctaaggtttagggttgtagcccttgatccaaacttcaagaagcttgcagttgagcaccttgtctcagcctaccggaggacgaccacgcgaatcattcttttggactatgacgggacgctgatgcctcaaacatcatttggtaagagcccaagctctaaaacgatagatatgctgaacagcctgtcccgtgatcagaacaacatggtcttccttgtgagcacaaagaagcggtcgactctagaagaatggttctcatcatgcgacaacctaggcttagctgctgagcatggatactttctcaggctgaagagagatgcagaatgggagacgtgtgtcccagtgacagacagaagctggaagcaaatcgcagagcctgtgatgaaaacatacaccgagacaacagatgggtcaacaattgaggacaaggagaccgcgatagtgtggagctacgaggatgctgatcctgattttggatcttgccaagccaaggagctccatgaccatctggagagtgtccttgcaaatgagccagttacagtaaaagctggcctgaaccatgtcgaggtgaagccacagggtgtaagcaagggccttgtggcaaaacggcttttgtcgataatacgggagaacagcctccttccggactttgtcctctgcatcggtgatgaccgctccgatgaagacatgttcgaggtgatcaccactgcagcacaggacaactgcctaagcccagacgccgaggtcttcgcctgcaccgttggtcgcaagcccagcaaggccaagtactacctggatgacctggccgacattgtgaggctgatccagggcctcgccaatgtctctgacgagatgcacagcacaatgcccacacctgtcgacgccgcagacaccgccctgaggtgaaaacacacctgccccagctccacccccaataaggcatgccatcttggaagaagggatcatcgatcgctgctccccccaggtgtacatactcgaagggatgcaacaaaaatgcaatcaaaacacatcatccaccatcttcatccctgcgtgttttcgcatcaaaataccaaacctttcaccggtgtgtacagaaactcggccgagaaattaaccccccccccccatgttcttctatcaaaaactcagatccatctcaccatcacagtcagatcaggctccaaagtttggccgggatgaatccgcaaccactggagccggagccactccttttgctggcatggtgcaggtgtcaaatggttggtgcgtactaccctttggtggaggcgctaattatttcatcttctttctttcttttctttcgggctcgtgctgtactgtgcccatgtactgctgctgcacattgctgtgggggctttggattggattaggtctcttccgttccagcttgtgtggtagcagcagtagttcttgctgccaatgatggatggcaatagtggaggcttgtgtttttcttggtgttatgccgtttgggggttaaaaaacaaagaggctatgatcatgctggtgatgagataaggctataatgctgtctatgttgaattgtagtaaccggctgtaaagagattaatgtgttcctggctgaattgagcaaaaaaaacatttcttcgtctgctccggctgggct

SEQ ID NO: 57984 - DNA, 441 bp, Oryza sativa
  Clone ID: PAT_MRT4530_59743C.1
atgactctgcgagtcctcgcttcggtgacggtggcgcggcggcggtcggcgttggcgcacggcagcctcagctccatgcggcggcggtggaggcgtgggatccagcggacggtagtcgtccccgcacagatccggcggccgtccgtcctccccccgcatgggatccgctccgctcccctccctagatccggcggaggggagggatgtcggcggcggtccggccggaggagagtggatctggtgggcggcagcgcagaggctggcgatgcggaggcgggcggctcggaggccgccaccgacgatgaggaggaggaggaggcggcgccgccgattctaggattgccgcagatgaggatgatggagaactgcgcgtgggaaggagagacgagccaccctaattttgatccgatctaccctcatgaattggatagccagatttga

SEQ ID NO: 57985 - DNA, 1032 bp, Oryza sativa
  Clone ID: PAT_MRT4530_59744C.1
atgtcgccgccggtggcggaagaatcagaagggggtggcggtcgaatgcctgagtcgatggatcatcctccggtggtggaggaatcagaagccagacggcaacagcgacggccgggcgacgggaaacttcaccagcacggccagatcgacggcgccgtcgacgtggagtggagagcggatgaaaagagcaacgcggatttttcggtgcaggcgaagtaccagattagtttcgctaaccaggtgaagatgcaaccttcgttaaaatacattatggtaagaacttttattcgtgggtgttcttggacttggggctataagaagttcatcaaaagggaagatttcgagaagtctgacgatctcagggatgactcgttcaccatccggtgcgacattctcatcctccgcaagatccgcgccgaggagacgaccgagatactccccgctgctgaatcctttgtatccgtgcccccgtctgacatgaaccagcagttcggtgacctgctggagaccgagaagggcgcggatgtggtgttcgaggtcggcggccagacgttcgcggcgcaccggtgcgtgctcgcggcgcggtcgccggtcttcagagcggagctctacggcctgatgaaggaaggcgacactgctggagtcgtgcgcgttgaagaaatggaggcgcaagtgttcaaggtgttgctccgctttctgtacactgactctttgccggagatgaaggaggaagacgtcatgtgccagcatctgctcgtcgcggcggaccggtacaacctggagaggctcaaactgatctgcgaggagaagctgtgcaagtacattagcgtgggcaccgtgtcgaacatcctggcgctggctgatcagcaccgctgtgacgggctgaagaaagcgtgcttcaattttcttggctcaccggcgaacctgagtgctgtcgtcgccggtgacggcttcaagcatctgtccaagatttgcccctctcttatggaagagctggttgtcaaactggcacttccagctactcaagcttag

SEQ ID NO: 57986 - DNA, 173 bp, Oryza sativa
  unsure (1)..(173): unsure at all n locations
  Clone ID: PAT_MRT4530_59745C.1
tgtttttacacccttccccatatataactggggtccacaacagtgggtagtagtgggtagccaacnttaacagggaantccaccaagtctgtaccaaccagcaaccaaccaagtggttggggcttcgaaatacacatgacaattaccataacagaggcgttccaacacacact

SEQ ID NO: 57987 - DNA, 446 bp, Oryza sativa
  Clone ID: PAT_MRT4530_59746C.1
ttttgtttattagtatgattttttttttttgttgttgttttttttttttattttttagctagccttattggttgaaatagaagaatttaacttacgttgaaaagtgatatactatgtagatgctttttgacatctttccagacgaggcggagaggacggggcctctactaggagaggaggacagcgtgtacactacaaagaaatacacgagctaccatgacttatttgacgtgacaccattccgctagcgcagcgacgtgggttaaaacgcacgattttaaaagcttgcgagcaattgtttgtggagatatgaaatgaccacaccttcactactgataatagaggcacggtcttgtgcgtgggcgaaatggaaaaacgtatggattcgatggaagagtgacgtaggggggaacttacaaattcgattttttagtacacagagggaa

SEQ ID NO: 57988 - DNA, 2217 bp, Oryza sativa
  Clone ID: PAT_MRT4530_59747C.1
tcactcgtcattaagcttctcacatatacagcccggcaacggatttgcaaagaaagactcttctagcttggggaattccccaggctccctgagatttggagtcgctattcgctctccatcccgatgaatacgttgcacctcagagctgttgtcatccgaagacacccatccctcctcagcttcagcaatcaggtgaaccaaactgatcctctacgggccgatggtcttcctaattggcacgacacgcctatgagcgtaatctgcttcgccgtatttaccttcagtatagtgattgaagttgctccgatggtccgcccctctcagatcgcatgctccggccgctggaagatggattcgcagcggccagagttctcacatggttttcgtgtttgcaagagctgaatgatcttcatgcacaaaaattttggcctgtaaacttgcattgcgaagagctgcacctgcaatcaagtagattctggttcttcgtgtaagagacaatgcctagagtaaagacgaaatttccgtgggcgccataggacgaccacgcatagttcttctctctgttccatttatttctttctctttccaatgactaacctcataacgcattttacgcaattcttcttcttcttctgatgtcaggctatggctgcaaccagtaaaagctagcatatccttctcaaacctagtttcaacctttgaccaagatattggagctttagccacaggctcaatatgcttgtatgctgggggcagcatttcaacaatatcaatgtcttctttgagtgactcaatgaagtgtctccaattgaaaaggtccttaaattcactgtcatctgcccagaaagatgtatgatcaagtgaaggtagaaccaatgtagccttcaggatcttagcaacagcaaccatatcgcatatcccaaaccgcatttgattcaaacctccatttgcgttaatgagaatgtatccatttgtgtgagaatcttcctttttatgagaattcgaaataatgcattgtctgaactttccgctgcttggctgggaccagacatcgggggctgtcatcaacatcctgtcactctctttccctccaacatgtccaaagtggctatcaaattgataccctccatcactggagaatgagattgagagatcctgcaaatcagcgtccttgtcgtcgccggggagggcgaaccagccgcccgcccagatcttggcgacgccgaggagcaggcacacgccgcagaacgcgaggaacagcaggttcccaatccgcctcctctcccggatccccagcccgagcacgacctccccggcgccggaccccggccgcttgaagaggcggaaccggagctgctgctgctggctctggtggtggtggtggtggaccgcgccgccgccgcccgcggacgcctcggacgccgacgacgactcggcgagggggctcccgacgccgtcgccgcggggcgagcgcggcgagccgatctggagctcgatctccccgcgcttgaacgagttggcacgccgggtcatcgacccgcccccggatatccgcgggctgtgcaaccgcgggtggtgatgctgatgcaggtggtcgccgccgccaccgccgccactcccgccggcaccggccgcggcgccgccgtgtacgggctggtggtagcccatacctttgaccaagatattggagctttagccacaggctcaatatgcttgtatgctgggggcagcatttcaacaatatcaatgtcttctttgagtgactcaatgaagtgtctccaattgaaaaggtccttaaattcactgtcatctgcccagaaagatgtatgatcaagtgaaggtagaaccaatgtagccttcaggatcttagcaacagcaaccatatcgcatatcccaaaccgcatttgattcaaacctccatttgcgttaatgagaatgtatccatttgtgtgagaatcttcctttttatgagagcttcgaaataatgcattgtctgaactttccgctgcttggctggaaccagaaaattggtgtctcgtctctgaactctcatcagcacgaattcactggtcaagtgatcatgactaaataattgtgcatattgctgctgacccactgtcaaggagcagaggggcactatatatcctgaactcctgacctgtggcgtagatggttaaagaatcgtcaaatatatacatattcactcgtcattaagct

SEQ ID NO: 57989 - DNA, 502 bp, Oryza sativa
  Clone ID: PAT_MRT4530_59748C.1
ttccatttatttctttctctttccaatgactaacctcataacgcattttacgcaattcttcttcttcttctgatgtcaggctatggctgcaaccagtaaaagctagcatatccttctcaaaccttagatggagagcaagatatgggcttccatcctgatgcatccgtgaaaccaaggtagcaccaagatcttcaattgtttgggaatacttcaaagacctatagttaactcggcatcttaatttctgaatataactaggaagaccattgttggcaaggcgagaatctgtatgcgtaaagtaaataactttgtgttttttcaaaagagggagaatttcatctctataataattcacctttgaccaagatattggagctttagccacaggctcaatatgcttgtatgctgggggcagcatttcaacaatatcaatgtcttctttgagtgactcaatgaagtgtctccaattgaaaaggtccttaaattcactacagaaatacga

SEQ ID NO: 57990 - DNA, 303 bp, Oryza sativa
  Clone ID: PAT_MRT4530_59749C.1
atgtgctcgcaccagagcgttttacgcggctttaggggtgatgtgttcgctcccgccactatccacgtcgtcgaggcgacggcgtgtgaagaatggctgttatgccgccccgtcatctcttgtccaaaaagtcaaaaaggcgtgggcgtcgacgcctttatggtcccacatatcagttggtgcgtgcctttggctggtgggtgggtttaccattctgcccagtggctggttgcgaccttccgctctgatggcgatggcaaggtgattgcccttgctcagcatggtgttgcattgtttttctag

SEQ ID NO: 57991 - DNA, 918 bp, Oryza sativa
  Clone ID: PAT_MRT4530_5974C.1
atggcgactgacaggggcaccccccgtgtcaagcggcaagatttgacgggccccatcatcaagatcacgctcagctccctccccgaccccgagagagatagcgtagcttcaattcgctactgctccccgcgcgtgctcctccaagctactagcagtctcccgcctccgtttacccggtccggctccggcatggacgacgccacgtcgtcgtcgtcgcgggcgccgcggcccaagacggaggagctggacgcggcgctccacgccatggggttcgagatcgagcgggtctcccccgcggaggtcaccggccgcctcctcgtcacccccacctgctgccagccgttcaaggtgctgcacggcggcgtgtcggcgctgatagcggaggggttggcgagcatgggggcgcacatggcgtcgggctacagccgcgtcgccggcgtgcagctcagcatcaaccacttccgcagcgccgccctcggcgacaccgtcctcgtccgcgccgccccgctccacgtcggccgctccacccaggtgtgggcggtgaagctgtggaaattggatccatccacgaaggagaagggggctcagatctctgaatccagggtgactcttctctgcaatctgccggtgccggagagcgtgaaaaatgcaggggaggcgctcaagaaatactctaaactgtaaacataataataattaaaagtacaaagcttcatttcgatgctggaaatgaaatggtttgatctcacgataatgtgacatattgtaagtctgttgtaataatgtatatgtcagaggagtcgaggtgtttggtttgggacaattttattgttcttcatgaccaaatttggtcgtgcgccaaaattaaatgtgtcaaaaaaaaaaagaaagggtggaatggtgaaaaaaaaaaaaaaa

SEQ ID NO: 57992 - DNA, 1938 bp, Oryza sativa
  Clone ID: PAT_MRT4530_59750C.1
atggagaagcttgacgagagcaagttcgagcagcggctgcagctctgggcgctccgcatcccccgcgagctcgcctccgcggtcgccggcattctccgctccgagaagcttgacgagagcaagttcgagcagcggctgcagctctgggcgctccgcatcccctgcgagctcgcctccaccgtcacccgcctgctccgctccgggtacctactggacaagccgcgggtgaagccagtcgtggaggatcccgagagcgacaagaaccggctcgtcgtgttgtcggagaagatccagaaccccgacctgtctgatattgaggagaaggtttacgattcactgaagcaaatttgcaacattgatgttgtaccttacagtttgacccttggttattcttactggagtgcagatcatattctgaagcagatcttgcctgctggagtggaggtaccctcttcttttgaaacaattggccatgttgcacatctgaacatacctgatgacttgcttccatacaaagatgtcatagcaaaggtcatctatgataaaaattatccaaggattcagactgtggtaaataaagttgggaccattacaaacgagtttcgagttccgcagtttgaaatcttagcagggaaaaacgatatggtaactgaagtaaaacaatatggcgctacatttaaacttgattatggattagtctactggaattttcaagaaaggagatgttatatgtgacatgtttgctggtattggcccattttcgattccagctgcacagaaaggatgtattgtatatgcaaatgatttaaatccagacagtgttcgttatctaagaacaaatgcacagattaacaaggtggacgattatatatttacatataacatggatgccagagtgttcatgcaaaatttattggaagtgccttgttcagaaaataagtcagactctcaagttgctgctaattgttctagtgaagacattgaccctgctaatgaaagttcgattctagtgaagactttgaccctggtaatgaaggtctgccataaggatgtaattgacgcatcgttcataagcgctgcgacaaagatgcaacaagaacactcaaagggaggtgatgggtactgccaagaagatgctagtcatacaaagaagaggaacaacaaaagagtaaaaggctcaggaccaccacctgtcaagccatgggaacactttgaccatgtcgtaatgaatttacctgcttctgctctgcagtttcttgattgtttcagtggtcttgtccaaaagaaatactggaccggaccattaccttggatccactgttattgtttcatccgttcaagtgaatctgaagaattgatattatccgaagcacaaaataaattgaatgcgaagatagcagagcccatattccatagggttcgtgatgttgcacctaacaaggctatgttctgtttaagttttcagctacctagcgaatgtctcaaggatgaaactgaagatcacatacaatcagttgactgttagcctcttctatacagtactcttgaagttgtattagttttgcctccagttttggaggttctataaaagaaatggcgatcatccgatgtctcctgccaagatggaacccagttgcatctcatggtgaaggggaatcaatgcgatatttttgtagactttaaggtgctttgcatggttgaaatcaattcggagccctatccgattcagaaatctgctcccgtagtttgcatatctgttcaggccttttcatgtctgcgctgcttctggattccaatcccttatcagttttttctagattggtggagttcatgtaaaacgggaaaggatagtagttcggaaaattatactgtccatttatcgttgttctctgtatttttagttccagattaatcctattgtttaaaaaaaaaaaaaaa

SEQ ID NO: 57993 - DNA, 240 bp, Oryza sativa
  Clone ID: PAT_MRT4530_59751C.1
atgaggaacaccgccaatcctagaaaaacaatgcaacaccatgctgagcaagggcaatcaccttgccatcgccatcagagcggaaggtcgcaaccagccactgggcagactgaaggaaagggaagaaccgaggagaggggaaaacgggatggaagaacacacatggtaaacccacccaccagccaaaggcacgcaccaactgatatgtgggaccataaaggcgtcgacgcccacgcctga

SEQ ID NO: 57994 - DNA, 1044 bp, Oryza sativa
  Clone ID: PAT_MRT4530_59752C.1
atggagaagtacgagctgctcaaggacatcgggtcgggcaacttcggtgtggcgcggctgatgcggaacagggagaccaaggagctcgtcgccatgaagtacataccgcgtggcctcaagattgacgagaatgtggcgagggagatcataaaccaccgctcgctgcggcacccaaacatcatccggttcaaggaggtcgtgctcacgcctacccacctcgcgatcgtcatggagtacgccgccggcggcgagctgttcgaccggatctgcagcgccgggagattcagcgaggacgagcaaatttgccaccgggatttgaagctggagaacacgctgctggatggcagccctgcgccgcgcctcaagatctgcgactttggctactccaagtcatcactgctgcactcaaagccgaagtcgacggtcgggactcccgcgtacatcgctccggaggtgctctctcgccgggagtatgacggcaagatggcagatgtatggtcttgtggggtgaccctttatgtgatgctcgtcggtgcttacccttttgaggacccagatgatcccaagaatttcagaaaaacaatcgggagaatcgtatcaattcagtacaaaataccagagtacgtccatatatcccaagattgtagacaactcctctctcgaatctttgtcgcgaatcctgcaaagagaataacaataagagagatcagaaaccacccttggtttatgaagaacttgccgcgggagcttacagaagcggcgcaagcgaagtactacaagaaggacaacagtgcccgtacattctcggatcagaccgtcgacgagatcatgaagattgtacaagaggcaaagacaccacctccatcgtcgactccagtggccggtttcggttggaccgaggaagaagagcaggaggacggtaagaatcccgacgacgacgagggagacagggatgaggaggagggcgaggaaggcgatagcgaggacgagtacaccaagcaggtgaagcaagcccatgccagctgtgacttgcagaagagctga

SEQ ID NO: 57995 - DNA, 521 bp, Oryza sativa
  Clone ID: PAT_MRT4530_59753C.1
gaagcttcagctccactcccacaggcagctcaactgggatctaagccaaaggtcttctccttctggatcctttttcttcaactgaggtttgatgattattgcaagaatgagcatatgacatactcaacaagctacacagcaaatatgcaagtgcacaagcatatcaaaggatggcataatataggattcatttgcgaaagcagcatttagcaaagagttgagacaacgaacgaacgatcctctgaaacaacagaaaactaaacctagaacacaaaatgagaaagatggtgacggctttccggcgacgggcggcggcaatggaggggtggacgagtttctcctcacagctacgaatccaatggaaacaacggcgaccgaaggcgacgatggacgacgacgaacagcgcggccggagatagattagatcggcttcacggtgacggcgaattccggtggggtttggcgcaaaggaaggagtggccggggtagctctcgcccttgcgaagccgagggaggtgacg

SEQ ID NO: 57996 - DNA, 402 bp, Oryza sativa
  Clone ID: PAT_MRT4530_59754C.1
ccggccgtcgctcgtccggctcgccctcgcgcgcgtctccccgtagcccccgtcgaccgtcgcaccgcgctgcgccgcactgtctcgcccttccaccacgcccccggactccaacgtcgccgctccagccccgatccacgccgccgcagccgcatcaccgtctatttccgccatgggggcgtgattccgcgcgacggctggaggaggcgaggtcgggcctgccctccatcgatggcggactccgcgtgacggctggaggaggtgaggtcgggcctgccctccagccccgatccacgccgccgcagccgcatcaccgtctgtttccgccatgctggacgaggtgaggtcgggcctgccctccatcgatggcggactccgcgtgacggctggaggaggcgaggt

SEQ ID NO: 57997 - DNA, 430 bp, Oryza sativa
  Clone ID: PAT_MRT4530_59755C.1
cactgaatagtggtttgttaacatacttgcaccatactgactggatgcagaggaacacctatatcaggcatgctgggtttctacgcgaaccatttggaaaaggagacggtttatgaacaaacatgcgggatttaggaaaaggactggacttgaccctgccaaaacatggacctcgggtaactgcaccacgggctcaagcttaaagggtctattcacagccaccctgttcagcatacacccgatgtaatacagcgtgaggccccgtgctgacaccttcctttaaaagcatggtgctgatgcacaggcacactagcacattttgcagacagctgccacccagggaacttgagaagcccgatgtactccaaagcggctagcgattggatggacgcaatggattcatgactgaatggtccacgagcctggggcc

SEQ ID NO: 57998 - DNA, 232 bp, Oryza sativa
  Clone ID: PAT_MRT4530_59756C.1
gtatgttcgagagagggaggaagggaggcggcgccggcacccttttacttctaccgtgacagggaggacgcggcgccgccgacattcggccccgggggaggcggtgccatggcggtgtacgacttcagctacgtgacggactcggtgaagacatacgtgatcaacctataccgtcacatccgagaccgcagcgtgtacgagacgcaccatatgtacgagggcgggttcaccc

SEQ ID NO: 57999 - DNA, 678 bp, Oryza sativa
  Clone ID: PAT_MRT4530_59757C.1
tcactgtgctcgggagacggcggtggcgactgcttcaagtacagattgaaggctccatccgtcgaatgcttttgtgaagtctgaactggcctgagaatctgtgttgaggacaccctcgtcctcgcggcggagcggcggcatgagaatgccggcggacagagcggcaggggtggcggcagtggcaggccgcgggcggagcaacagtggaggtggccggaggaggaagaggcaaaggaagaggtcgctggcggagcgacggcaggccgcgggcggcggaggtggccggaggtggaagaggcagagaaggaggtcgcccgcgagcgcggtagctccacgccgtcggccgctccgcccgcgatgcccaacagaacggcgccgcccctcctcgcccggtcgtcgagcgccgcttccctcctcgcccggccgccgcaggccccctccctcctcgcccgaccgccgcccgcggcttctcctcgcccggccgctgccgccgacgtcctcgatggtcacatccgggtcggagccctccctcctttcccggtagccgcgcaccgcctccctccttgcccgctgccgcgcgccgctccgcccacctcccccctctgcgggaacgcctgggaacatgcacctcccgctgtggcagggcagcggcggtacaaagcagccgaacaggcccat

SEQ ID NO: 58000 - DNA, 561 bp, Oryza sativa
  Clone ID: PAT_MRT4530_59758C.1
cccacgcgtccctactgatcttagctgagctagagttccagtgatcattaaggaaagaattagcacttggtcaatcacacataggtaattaagattaattgcgatcgagatcatatcactagctagctagctgtgtgtacggagtacggtgccatggcttccaggacttggcattgctggttgttgctcgtcttcttcctcctctccgacgacgcctccgggcagctgtcgacgtcgtactacgcagatagctgcccgtcggtggagaaggtcgtgcacgccaccgtggcgagcgccatccaggccgagcgccggatgggcgcctccctcatccgcctcttcttccacgactgcttcgtccagggctgcgacgcgtccatccttctggacgacgtgccggcgaccgggttcgtcggcgagaagaccgccgccccgaacaacaactccgtgcgcgggtacgaggtcatcgaccagatcaaggccaacgtcgaggacgtctgccccggcgttgtctcctgcgccgacatcgtcgccctcgccgcgcgcgacagcaccgccctg

SEQ ID NO: 58001 - DNA, 312 bp, Oryza sativa
  Clone ID: PAT_MRT4530_59759C.1
atggcccgcgacagcgatgacgggcgggcccacgcgcagtggacaggagatgctggtagacgattgacgacgacgacgacgacggcgagagtgaacgggtggtgcgcgtcgcgggtgggaggagcagtcaacgatgtgctacgacgtgagctgagcccggtcgatcgtcctcgtgccacgcatgggttcagactttcagactccggccgcgacgtcgggatgggggcgtcgctgtggccgtgtgggacgcgctcagcaaacctgcttgccgatgatgcagtgcagaagtggaggctgtcctccatccgctga

SEQ ID NO: 58002 - DNA, 6338 bp, Oryza sativa
  Clone ID: PAT_MRT4530_5975C.1
atggtgaacactcgcagcaacaggaatggtcccaatctcaacaaccccaataacaataacaatggagagaatccaacccttgctcaagttcttgctcaacagactcagcttatgaacatgatgatgcagcaacttcagaaccagcagaaccaaggaaataaccatgcaccccctcagaataagttagcagaatttcttcgtgtaaggccgcctgttttctctagtaccactaatcctgttgaagctggcgattggttgcatgccatagagaagaagttggatttgcttcagtgcactgatcaggagaaggtctcatttgcatcacatcagttgcatggccctgcctctgaatggtgggatcacttccgcctgaataggactactgctgaacctatcacttggcttgaattcaccgctgctttccggaagacacatataccatcgggagtggtgtctctcaagaagaaggagttcaggtcgctcactcaaggatctcgctctgttacggagtatttgcacgagttcaatcgtctagctcgttatgctccggaagatgtacgcaatgatgaagagcgtcaagagaagttcttggaaggacttaatgatgagctttcttacccactcatgactggagattatcatgatttccagaagttagtggataaggctattcgtcaggaggacaagtataaccgcatggagcagaagaaacgccggattgctcacttcaaggcacaacaggggagtagtcagaagccgcgtcttactttaggaccccagtccatgccacaaggagcttcgacacagcaacaacctgccaagagggagcaaggcagcaagcctatggtatgcttcaactgtggagacccaggacattatgctgacaagtgtccgaagccccgacgcgtgaaggttgtccctgcccagagcaactctgctgtaccagcatcaaaggcccgtgtcaatcatgttgcagctgcagaagctcaagatgctccagatgtgattttggtccgggagtatcctgatgtgttcccagatgatttacctgaaaggatacatcagaccgagttcatctccatggggagctccgtgaagttccttggtcacgtcatctcagcaggaggagttgccgttgatcctagtaatgtggaatccgtaaccaactggaaacaaccaaagacagtttcagagatccgcagtttcctaggcctcgcaggatattatcggaggtttatagagaatttttccaagattgctaagcccatgacacgactgcttcagaaagatgtgaagtacaagtggtcagaagaatccgtcgccgtcgctcgggaaggacgtcatcgtggtcgccaagtcgtcgccgtcctcgtccgccgcttcgccatcgtcggagaccgccggagcatcgtcgccgtcgtcaagccgaagaactccgccgtttcctcttcgtcgccggcgccgtccgttgcttctccgccgtcgttttggtcgtcgctcctggtttggaatggtatattcctggtttggagatagaactgtgcagccgggatggttgttcagaatggttgggcctatgcaacaggattcgtcatgatcgtcatgaagagaagtgccgagtcaaagttaccttgaacagtaacagtgaagatatcccatcagtgatgttcgaagctggaggaaggaactacatccatgcatgtcaggaagtggcaaggatcgccataggagagctccgtgatcgctacagtgatcagttggccgacactgagtatcgttaccatcctcgtcaaccgcagggaagtgaccgtggcagttaccttgagactgaaggaattgagaatgatgctaccacaagacatttggttgagatgctatgggctatggatgaaagtcgtgcggagactgtgttagcagctcaagatcgtgaagatcggaatcgtggtaagatttgcgagctagaagacaaggtggatcgtttggagaaggaactagccgcattgaagggagaagcaccgccgcagaaggccaggattcgtcttaccgcaaggaagagagctctatttgtccctcgctatcaattggcgccaaaggtccgtgtggtggagaaagaagttgccccagcagatcctccgatcatcatcataagtagtgatgaagaagaagaatccaagcgcaaccattccaagattgagtgggtagcaactcaagatgatgaagacgagccgaacgagccttcaatcgaccttcgatgctcggaagaacaagattttcccccggtttctcttcttgtgccctatccatgccagatggtgaacactcgcagcaacaggaatggtcccaatctcaacaaccccaataacaataacaatggagagaatccaacccttgctcaagttcttgctcaacagactcagcttatgaacatgatgatgcagcaacttcagaaccagcagaaccaaggaaataaccatgcaccccctcagaataagttagcagaatttcttcgtgtaaggccgcctgttttctctagtaccactaatcctgttgaagctggcgattggttgcatgccatagagaagaagttggatttgcttcagtgcactgatcaggagaaggtctcatttgcatcacatcagttgcatggccctgcctctgaatggtgggatcacttccgcctgaataggactactgctgaacctatcacttggcttgaattcaccgctgctttccggaagacacatataccatcgggagtggtgtctctcaagaagaaggagttcaggtcgctcactcaaggatctcgctctgttacggagtatttgcacgagttcaatcgtctagctcgttatgctccggaagatgtacgcaatgatgaagagcgtcaagagaagttcttggaaggacttaatgatgagctttcttacccactcatgactggagattatcatgatttccagaagttagtggataaggctattcgtcaggaggacaagtataaccgcatggagcagaagaaacgccggattgctcacttcaaggcacaacaggggagtagtcagaagccgcgtcttactttaggaccccagtccatgccacaaggagcttcgacacagcaacaacctgccaagagggagcaaggcagcaagcctatggtatgcttcaactgtggagacccaggacattatgctgacaagtgtccgaagccccgacgcgtgaaggttgtccctgcccagagcaactctgctgtaccagcatcaaaggcccgtgtcaatcatgttgcagctgcagaagctcaagatgctccagatgtgattttgggtacgttccttgttaactcagttcctgcaacagtacttttcgattctggtgctacacattcatttctatctatgagttttgcgggaaatcatgggatggaagtagaagatcttagacgtcctttgatggttagtaccccaagcaatcaagcactctctttgcaacgtagcccctatgtcagaatagaaattcaaggggtaccatttctggccaatcttatattgttagaatccaaagaccttgatgtcattctagggatggactggttagctagacataaaggtgtgatagactgtgctaacagaaaagtaactctcaccagcaatgatggtcgagttgtaactgttcatgcattgtcttctgagtttttaaggtcaagactgaaccagataactttggaagagattcctatagtccgggagtatcctgatgtgttcccagatgatttacctggtatgccgcctaaaagggatatagagttcagaatagatttggtacctggaacaactccgatccataagagaccttatagaatggtagccaatgagttggcagaagtcaagaggcaagtagatgatttgcttcagaaaggatacatcagaccgagttcatctccatggggagctccggttattttttgtggaaaagaaagatcatacccagaggatcttaaaggtgccaccgttttctccaagatagatcttcgatcagggtatcaccagttgaggatcaaagaggaagatatacctaagacagcttttaccactaggtacaggttgttcgaatgtactgttatgtcttttggacttaccaatgcccccgctttcttcatgaacttgatgaataaagtgtttatggaatacctagacaagtttgtggtggtctttattgatgacattcttatctactctaagaccaaagaagagcatgaagaacatcttcgccttgcattggaaaacaagtgtgaattttggttgtctgaagtgaagttccttggtcacgtcatctcagcaggaggagttgccgttgatcctagtaatgtggaatccgtaaccaactggaaacaaccaaagacagtttcagagatccgcagtttcctaggcctcgcaggatattatcggaggtttatagagaatttttccaagattgctaagcccatgacacgactgcttcagaaagatgtgaagtacaagtggtcagaagaatgtgagcagagttttcaagagttgaaaagtcgcttgatatcagctcctattttgattttgcctgatccaaagaagggtttccaagtgtattgcgatgcatccaaacttgggttaggttgtgttctgatgcaagatgggaaggtggttgcctatgcatctcgtcagttacgtccgcatgagaaaaactaccctactcatgatcttgaattggctgcagtagttcatgcgttgaagatttggcgtcattatcttttcggtactcgtacagaggtatatatcgatcacaagagcttaaagtatatctttactcagtcggatctgaacatgagacaaaggagatggttggaattaattaaggattatgacatgggaattcattatcacccgggaaaggctaatgtagtagcagacgctcttagcaggaaaggctattgcaatgctacggaaggacgacagttgccattggaattatgcaaggaatttgaaagattgaatttgggaattgtcagtataggtttcgttgcagccttagaagcgaagcccactctaattgatcaagttagagaagctcaaactaatgatcctgatatccaagaaattaagaagaatatgagaagaggaaaagctattggtttcttggaggatgagcacggaactcgagtcaaggcagaacatcagaaacccgccggtttgttgcagccttcaaagattcctgaatggaaatgggaagaaatcggtatggattttatcactggtttgcccagaacgtcattaggccaggactctatttgggtgatagtcgatagacttactaaagtggcacacttcattccggtaaagacaacttattccggaagtcgcttagcggaattgtatatggcaaggattgtgtgtttgcatggcgttcctaagaagatagtgtctgatcgaggtagtcaatttacttcaaatttttggaagaaacttcaggaagagatgggttctaagctgaactttagtactgcttatcatccgcagacagacggacaaactgaaagggtgaatcagattttggaagacatgttgagagcttgtgctttagatttcggtggaagttgggataagaatctaccttatgcagaattttcatacaacaacagttatcaagctagtcttcagatggctccttacgaagcactgtatggtcggaagtgccgcactccgcttttgtgggatcaaacgggagaacgtcaggttttcgggacggatatcgtaagggaagcagaagaaaaggtaaagatcattcaagaaagattgcgtgtggctcagtcgcgtcataagagttatgccgacaatcgccgcagagatttgagttttgaagaaggagattatgtgtatcttcgtgtcacgcctctacggggagttcatcgttttcataccaaaggaaaattggcactgcgttttgtgggaccttataagattgtcagtagaagaggagaggttgcttatcagttagagttacctcaatctttggcaggagtccataatgtgttccatgtgtcgcaattgaaaaagtgtttaagggtacctaccgaagaagctaatcttgaacagatagaagtccaagaggatctgacctatgtggagaaaccaatccgtatcttggaaacaaatgagagaaaaaccaggaatcgagttatccgtttttgcaaagtccagtggagtaatcactcggaagaagagtcaacttgggaacgagaagatgaattgaagtcagctcatccgtatctgttcgccagttcttccgaatctcgaggacgagattctgtttaa

SEQ ID NO: 58003 - DNA, 453 bp, Oryza sativa
  Clone ID: PAT_MRT4530_59760C.1
atggatcccttatctcccctaaatttggtcctgccattagctatactactgtcctcactccttgcccctcctgccattgccatgccatccatcgaagagcaagctggagcgctgatcgcctggaaggccaccctgcaaacccaggaacccctgcagtcctgggatcgcaaggcatggccatgccacagctggcgtggcattgggtgcggtgctcgacaagggaaatttgtgatcaccaagatttctctgcgtggaatgaggctgagaggctcacttgaggtcctcaacttctctgcactgacgatgctgacaagcgtcgatctctcacacaataagcttacggggaggatcccttggagtggtgcgtccctcaaagagctcagatccctgctcctgcagaacgatcaatatcaatatgttaacagagctcaagtccttggatctttcagataa

SEQ ID NO: 58004 - DNA, 181 bp, Oryza sativa
  unsure (1)..(181): unsure at all n locations
  Clone ID: PAT_MRT4530_59761C.1
atttgaaaacctcaaaacaacaaatcgtaactgaggcaatagtcatggattctagtagatcctccaccaaagatgcaagatcatgtcgtatatcggctgcaaaagaaangataaaacatgaaccttatggacaccgacttcattagaatatnaacatagtgttagttcataatggactaac

SEQ ID NO: 58005 - DNA, 156 bp, Oryza sativa
  Clone ID: PAT_MRT4530_59762C.1
tctacgttttaagccaagccaaccgaactcacagcccgatctatttcaaacaccactcgggttagcttccctatctgttgccatggcggctgctggtcagcagattctgctgctgaggaagagggcgccacgggttggggctgcaagcttgtgcca

SEQ ID NO: 58006 - DNA, 133 bp, Oryza sativa
  Clone ID: PAT_MRT4530_59763C.1
acgaaaacttaactacttgacgattttttttcatatagtagcagagctcacacagtcgtcacatcttgtgacatgactaactacctacggtactggtggcacaccaacaccaactttatattcccactagagt

SEQ ID NO: 58007 - DNA, 255 bp, Oryza sativa
  Clone ID: PAT_MRT4530_59764C.1
atggcccgtgggggcgcgttccgtttctccagcgagacccccgtgggacccacgtggggcccacatcggagaggggctgttgctggcctccttcccccttctcttctctccctagatgcaattggcgaatggcagaagaggaacaagacgacgccgaccttcccggccttctccttccttgagctcctcaccgatgcccatgtccacccgccttcctcttcctccacggcgcagctcgcagccgtgctcgcctga

SEQ ID NO: 58008 - DNA, 1034 bp, Oryza sativa
  unsure (1)..(1034): unsure at all n locations
  Clone ID: PAT_MRT4530_59765C.1
ataaatccctcatcccattgccatgcatagaggcagcacatcaacgatcgaacgaacaacgcactctgcagctagctatacaatctctgtttaattagctaggtagctagcgagtcataaatcaagaagccatggacttttacgggcggcgcgagcagtacggcgggtatggcgggtacggtggcggcggcgccctggcgacgccggggtacgcgccggcggcgccgtacgggatgtcgcaggtgaacatcgaggggaacgggtgtggcaggacgctgccgccgcagccgacggtgaaggtgtactgccgggcgaacccgaactacgcgatgacggcgcggaacggcgcggtggtgctggcgccggcgaaccccaaggacgagtaccagcattggatcaaggacatgaggtggagcaccagcatcaaggacgaggagggctaccctgccttcgccctcgtcaacaaggccaccggccaggccatcaagcactccctcggccagtcacaccctgtgaggctggtgccgtacaacccggaggtgatggacgagtcggtgctgtggacggagagccgcgacgtggggaacgggttcaggtgcatccgcatggtgaacaacatctacctcaacttcgacgccttccacggcgacaagtaccacggcggcgtccgcgacggcaccgacatcgtgctctggaagtggtgcgagggcgacaaccagcgctggaagatccagccctactactgagctgatcgatacatcgatccagctctctatcaaggctcaagttgatatcaacgaatctggtgcagaataattattctctgctagctacccacctactccgtatatacgtagctaagagtaacttatgctcgtccgtaccgtatgattatcgtgtggtgtgcttgtatcttgtacaagttaattaattacctggcaataagagctcctctcgctgggcgacacatatataaacacatacagttggggcttgattcaanttgcaaaaaaaaaaaaaaaaaaaaaaaaaaa

SEQ ID NO: 58009 - DNA, 1531 bp, Oryza sativa
  Clone ID: PAT_MRT4530_59766C.1
cccggggaattttctgtcgaaaaattgtataggtaatccctaataaatttctaaatgtgcttggctgattccttttcttctcgatcgatcccgttattcctttttaatcttttcttgtgcggaattgcagcactttttctctgcttgatcacaacgcagcaaggacatgagaatacgtgagattctccgggcgatggagctgcaccgtggctttgctatcgtctcgcgtcggctcgcctgcaataatacggcagccagatcgagatggttcccaaaacgactagaaacggaatcacgtaaagcaccatggatggatggaatcaccttttccccaggaaagcgcaagtgtggaatggcatcatctatcctaccaagttcctaagcccctgaccatgcagtgcacgaataatgcacatcgatcagctatctagagagagagagagagagagagagagagatagatagcatctcgatcagtgctactgatcaatcgatcatcccctataaatcccccatcccattgccatgcatagaggcagcacatcaacgatcgaacgaacaacgcactctgcagctagctatacaatctctgtttaattagctaggtagctagcgagtcataaatcaagaagccatggacttttacgggcggcgcgagcagtacggcgggtatggcgggtacggtggcggcggcgccctggcgacgccggggtacgcgccggcggcgccgtacgggatgtcgcaggtgaacatcgaggggaacgggtgtggcaggacgctgccgccgcagccgacggtgaaggtgtactgccgggcgaacccgaactacgcgatgacggcgcggaacggcgcggtggtgctggcgccggcgaaccccaaggacgagtaccagcattggatcaaggacatgaggtggagcaccagcatcaaggacgaggagggctaccctgccttcgccctcgtcaacaaggccaccggccaggccatcaagcactccctcggccagtcacaccctgtaagctagtctcagcgttctttctctgaatctgaatccgccggccattgatggcgatcgacgacgatgctcttgcgtgcaggtgaggctggtgccgtacaacccggaggtgatggacgagtcggtgctgtggacggagagccgcgacgtggggaacgggttcaggtgcatccgcatggtgaacaacatctacctcaacttcgacgccttccacggcgacaagtaccacggcggcgtccgcgacggcaccgacatcgtgctctggaagtggtgcgagggcgacaaccagcgctggaagatccagccctactactgagctgatcgatacatcgatccagctctctatcaaggctcaagttgatatcaacgaatctggtgcagaataattattctctgctagctacccacctatatacgtagctaagagtaacttatgctcgtccgtaccgtatgattatcgtgtggtgtgcttgtatcttgtacaagttaattaattacctggcaataagagctcct

SEQ ID NO: 58010 - DNA, 159 bp, Oryza sativa
  Clone ID: PAT_MRT4530_59767C.1
atggtgttcgtgtacgacgaggagggagcatcccgcggcgagagctgggtcctagtgcacggcttgtcccgtctcactcctcgcaaaagcggctgcctgcctgcctgcctgcacacgcggtgcggcaatttgtgtgcacaaccggtgagcttggggcta

SEQ ID NO: 58011 - DNA, 473 bp, Oryza sativa
  Clone ID: PAT_MRT4530_59768C.1
atgaatcagaaagagaatgtgaatgctcaccaagatcccctcccctccccagctctcctccccggatggagatcggcgcctctcggagagagggagagcgaaagctgcagcatcggggattcgctcgcagttgaaaaggaaaaccacccagaaaaccaaaccgtcgccgccgccagaaacgcccagcgcgtggaggccaggagcagcacaggaagaagacgagctcagagcacaacaatggtttgggacctccacgcgactccgctacacggccaccgctcgcgcctccccacccgcacgcggcacgtcaccgacattggcaacgcggggtacacgccctcgcaggttgcgagtacttcgccggatgaggaattaaatggcggcatctgtggaacactgacactgggcaagcgggcccgagagatccgagccatttcgcggtacggcctcgccttgggccatgaggcgcaatg

SEQ ID NO: 58012 - DNA, 411 bp, Oryza sativa
  Clone ID: PAT_MRT4530_59769C.1
atgcatatcggggatctacaagaaaaaaagagagtttcctgtgtttttgtaaaggagatggccggagctcgggggtgcaaccagaaattgagagacggaagatttctcaacaagaacaaaattgttgtacattatacagcggcatattcggccacaatttatacaacatgggtacgtggtccagcgtccacgtacatggcatgcacgcacgtacgcgtacggatcatgatgcgcctgctgtcttctctgcaacgtctactacaggaaacagtccaaatcgcacagcaagatttcggagggctatttaatagctctccgaatccaaacggggccactatgaagtgcaacctagtaagctttcaagcttttggaatgaaaagctcatacaccgttatcgtactatacgaccac

SEQ ID NO: 58013 - DNA, 1452 bp, Oryza sativa
  Clone ID: PAT_MRT4530_5976C.1
atggagttgcgatctctgtttcatgagattgcgttgttgccggaacctgacttcttcactgaatatggtgaagcaaaccggtataaagtcagtgaagtcattggcaaagggagttatggtgttgtggctgccgctgtcgacacccagaccggcgagcgagtggcgatcaagaagatcaatgatgttttcgatcatgtctctgatgccacccgcatccttagggagattaagttgctccggttgctgcgtcacccagacatagttgagatcaagcacataatgcttcctccttcaaggagggaattcagggacatttatgtaatctttgagctaatggagtcagatctccatcaggtaataaaagcaaatgatgatctcacaccagagcatcaccagtttttcttgtatcagctgctccggggaatgaagtacattcatgcagcaagtgttttccatcgggatcttaagcccaagaatattctagccaatgctgattgcaagctgaaggattatgtggcaactagatggtatcgtgccccagagttgtgtggctcctttttttcaaagtacacccctgcaattgatatttggagtgtaggatgtatatttgcagagctgcttacaggaaagccactctttccagggaaaaatgttgtgcatcaattggatctcatgactgatctacttggcactccttcagcagaatcccttgctaagatacggaatgagaaagctcgacgatacctgagcaacatgaggaaaaagcctcgggttccttttactaaaaaatttccaggtgtggatcctatggctctccatttgcttgaacgccttcttgcttttgatcccaaagatcgtccaagtgcagaagaggccctgacagacccctactttaatgggctagcaaactctgaacgcgaaccaatagcacagcctatctcaaagcttgagtttgagttcgagaagaggaaattggccaaagatgatgtccgggaattaatttaccgagagattttagagtatcatccccatatgctgcaagaatatttgcgcgggggagaccagatgagtttcatgtatcctagtggggtggatcgcttcaagcgtcaattcgctcatttggaggaaggagtttcaaagggtgaaaaatccagtccacagcttcggcagaatgcttccttaccaagggaaagagcaattggtaacaagcatggagatgacgagtaccacgcaaagctgaatgtaggcgagaagccatgccatgcatcagtgacagacggcattagcaaaccgctcatgagtgctcggagcttgttgaagagtgaaagcataagcgcttccaagtgtattggtgaaaaaccaaagcaagacagagatgaggattcccttacagagagcatggacgaaacagctgatgaggtctcagaaaaggttgctcaactgaaaacctga

SEQ ID NO: 58014 - DNA, 404 bp, Oryza sativa
  Clone ID: PAT_MRT4530_59770C.1
caacagacaacagagaaagttcatttctggctggcttctattatactacaaacgaacaacatatgtatatgaatgtacacgaaattgtttgcattttgacagtagccattcttgtttagttaactagctctgcaagtgagcaacttctctcaaaggtttcacctcagcaggttttccttcccaaccctttttaaggtagctaaagaagagattctggatttgtacaggttcaccaatcactgcctctccaaccatacctctctcaggaatgtgtatctggcattctccatggaaactcctctttgagcagtaaaatgcgcgctacctttagacagcaaaggcggagcgcttttgtcgataagggatgcgaggggagaatccaggtcatccaaatcatcatcact

SEQ ID NO: 58015 - DNA, 402 bp, Oryza sativa
  Clone ID: PAT_MRT4530_59771C.1
ctcacgcttactgccgtgcatacaatacgccatttcacacaatcagttgcatacgcggtagccattgggatacaaatgcttgagtacagatgactggtgtggaacaatcgggtgtgcaatgatgcccacttactcgagcttgtaatgtactaccagggactcttctaccacatgcacatgaaccacttggtcacacacttgaatctacgagagatctagccagtcgagcaccaccttcaccttcataagttgtggcgatgctatcatagttcaatatgtagctgatatctggcagctttaccgcatgtcgaagctttattgaacctatatgatgagaagcaactccttgaggcacttatagactcattaccaaaaacaggatccactaatgacgagattgtt

SEQ ID NO: 58016 - DNA, 114 bp, Oryza sativa
  Clone ID: PAT_MRT4530_59772C.1
gtttccggccacagaggatccggattgaccgagcagatggtcgttgactggtccgaattaatggaggaggtggttagtaaccagatcgggtcaacagaggggttgggtgtttaa

SEQ ID NO: 58017 - DNA, 2219 bp, Oryza sativa
  Clone ID: PAT_MRT4530_59773C.1
atgggtgccaaagataatggggaagtaagagacgagaagggggttggatcagattatgaaccggccagagtttcaggagtttccaagaaactcatgagaaaggatacaagagaaaatagccctcgcatggcaaaaagcagtggcagccgtcaagttcagaacaagctgcaacataaagcttcaaacaacattcagagtagatctccaaaacccaggaaagttgttaacgctgcgaaatctgctgaagttagaaggtcagatactgtaagagttccttctcgtgctccatcagagctttctgaggaaacagacgatatagttagcgaggctggaaccgttgatgatagtaaaggcaatgaagaggccaaggagattgatgtgctagatgaagctccacattgtgatcagagcactggtactgacgatgaaattcctgaaattgaagaaaagatagttgatgatgagaaaccagttgtgtatcaaaggaatgaggagttacaatcaaagattgacaagttggaacaagaacttggtgaagtagatgcgtttgtagttcctctctactctgtattaaccaagcacgaaagttccgtacataatcagaataccccagctcggcgtctttctaggatgtacattcatgcatcaaagttttggtcctcagataagatagcttcggtggcaaaaagcactgtgtctggcctagtgcttgttgcgaaatcatgcagtaacgatgcatcaagattgacattctggctgtccaatacagttgtgctaagggagataattgcacaaactattggtatctcatgccaatcgtcttcaaccattacagccatcaacatgaatggtagtgcaaaaagtcttgatgggagatcgatgccaatgctatggacaaatagctccagtggcaaacaaaccaaatttactggcatgcaggtaccggatgattggcatgaaacaagtacacttttggctgcattggagaagattgaatcatggatattttctcggatagtagaaacagtgtggtggcaggtgatggagcaatgtgtaggccgtttagatgttgcaatgtttaatgcaatccttcgtgaatcggctagtgagatacccactgatcctatatctgacccaattgttgacccaaaagtcctgccgattccagctggtgatctaagctttgggtcaggcgctcagctgaagaattctatcggaaattggtcgagatggttaacagataactttggaatcgacgctgatgactcagaggaggatggtaccgacacaggaagtgaaagaagtgcagctgaatcaaagtcttttcaactgcttaatgaattgagtgatctccttatgctcccaaaggacatgcttatagaaaaatctatcaggaaagagatctgcccttcgattggcctcccgttagtaacaagaatcctatgcaacttcactcctgatgagttctgtcctgatcctgttcctagcatagtcctagaggagctgaattctgagagtttgctggagcgatgcaccgacaaaagtgcaaccagcgcatttccatgtatcgctgctcctgttgtgtaccgccctccatccctactggatgtggcagagaaagtggcggacactggtggcaatgcaaagctagacaggagagcgtcaatggtccagaggagaggatacaccagtgatgatgatctggatgacctggattctcccctcgcatcccttatcgacaaaagcgctccgcctttgctgtctaaaggtagcgcgcattttactgctcaaagaggagtttccatggagaatgccagatacacattcctgagagagtgcacaaccttccttgctcatattcatgcttttgctgaaatggacattgatggcaaggcccgttctgtaaatacatttattcctcttcataaaaaatgcgcatctcgtgtattcccaaaatggccaaggtcttataatttaggacagatggagtaaggttggagaggcagtgattggtgaacctgtacaaatccagaatctcttctttagctaccttaaaaagggttgggaaggaaaacctgctgaggtgaaacctttgagagaagttgctcacttgcagagctagttaactaaacaagaatggctactgtcaaaatgcaaacaatttcgtgtacattcatatacatatgttgttcgtttgtagtataatagaagcaagccag

SEQ ID NO: 58018 - DNA, 548 bp, Oryza sativa
  Clone ID: PAT_MRT4530_59774C.1
gtcttttctaccaaatttactggcatgcaggtaccggatgattggcatgaaacaagtacacttttggctgcattggagaagattgaatcatggatattttctcggatagtagaaacagtgtggtggcaggcactaactcctcacatgcaaactccggtggaaggatcgtcaaccccaaagactgggagagtgttaggtccttctttgggtgatcagcagcaaggcaccttttctgttaacctgtggaaggctgcatttcacgatgcattcaacagaatatgccccctccgtgctggtggacatgaatgtggctgtttaccagtattggcaaaattggtgatggagcaatgtgtaggccgtttagatgttgcaatgtttaatgtgcattcctgtgaatcggctagtgagatacccactgatcctatttctgacccaattgttgacccaaaagtcctgtcgattccagctggtgatctaagctttgggtcaggcgctcagtttaagaattttatcggaatgggtcagatgtttacagataactttggaat

SEQ ID NO: 58019 - DNA, 570 bp, Oryza sativa
  Clone ID: PAT_MRT4530_59775C.1
caccagctaaccccgggggggtccccccttttttttttttttttcaaggtaaatatgagcatctcggataaaatattcccaagcaacacacaagcaaacatttgactccacaaaacaagattacaccgagacaacttcttatctgcttccacaagatacaattgcaatgacctttgtaagggggaacaatagaaagttgaaacaactggaataaggttacaagggaatgaaactaaatttgataaactgaggagtaagatccagtcggagctcactattgccgatttatgacttgccggtttgttcatacctccctaagccacccagagattctggaatccagggaattatgccatgaaaggcatggacaaactgaagagttcttgagaaggaggaggagaaggaacagcacagccattcttctccatcctcatactgcttatgctgctcccgatctcaagaaccatgaagatgctcctgccatgcacccaccatgatctgattgaagttgcaaatgctcagctgttgatgaggcaaaagctaggcgcccccccggcctgcagcccgggg

SEQ ID NO: 58020 - DNA, 490 bp, Oryza sativa
  Clone ID: PAT_MRT4530_59776C.1
cgattcggtctcctcctcctctgctccgaccaggattctgcagcggcagcggcagctgctgcggttggtttttcaggctcggtggcggcaggcagcggcatgtgcgtggaggaactcgaaggcgcagagaggctcgattttggtggggttgcggagctcgagacaacaccggcagacttcgaggtgagtagagtaaactcccggatttcggaagctccctgttctttcttgctttctttctttctcgtgttcttgatgcattcgtttgtgatttgatttcgcaaccggatgcttttctttgggtgttgggatgatcggttgaggggaaatccaactgaggtggttgcgttgggtatactcttcgcgtgcccgaatgcttctattttcttattttcttttcttgtctggaaatctggagaaagtaggagagattagttagtttattagtaccactgaaataaatgaactcccttatcaattaatataatat

SEQ ID NO: 58021 - DNA, 396 bp, Oryza sativa
  Clone ID: PAT_MRT4530_59777C.1
ctttccaaggggccgcccttagcggccgcccttaagggaaccacatctgaaaagaacgctgcctttgacaggagagttccaattcttacattccttattgatgtttgttgaaaatatatcctacagaactgcatgatttattagccccctacattcaaaaatataaggaggatttggatggactagcactatgcttagacccttggtaataaacaaatatatgggttctgctatacaaaaatatatttgctggattcatgttcgaaactcctatttaatgactatgatttcgtaacagtaagaaatttacggtgaaagcttgcctttggagtaaatattaagaaatccagacctccattgctttgttttccacaaaaattctctgagggttctacg

SEQ ID NO: 58022 - DNA, 633 bp, Oryza sativa
  unsure (1)..(633): unsure at all n locations
  Clone ID: PAT_MRT4530_59778C.1
gcaggatncggcncgngtccnctccncgngcncgngntcncnaccnccnccncgntcgcgtccatccntggcggcggncaannaagaaaangaagaagaagaagaagcctctaacctccanctgnagccggcggggagcaaggtgtnctccaagctgctgtccnngagngcgccgccgcggcgccgtcntncnnggtgtacnncggcgtcgcctccgcgggctccgtgcccnnnctgtnggagtcncagncnggcacgcccangaacgcnatgtncgncnccgtgntgccgccgctcacnccgccgcngnccnncnacacngccggcnaagtgtccccngcngccgcngcngcngaagaagaangaattattggnagcanngcntccncnggttgtncgtgctgcccggnatcangctgcggaaaagcggccggccggtgtccggctcnccgncgtcgnccngcgccncctccnccnngncgtngtcntcgacnggctcgtncnacncntcgtncncgcngtcgnncgggngcacgtggtcccnncntgctctcnatnaagaacctgccangggcacggcggcngcggcgcccttccgngacncnncacnannacacaacgcgcnacaacact

SEQ ID NO: 58023 - DNA, 747 bp, Oryza sativa
  Clone ID: PAT_MRT4530_59779C.1
gaagaatctatctattcttttgtttacttttccattgaggatgtcatggtactaatcatatcatattgtgctgaggtctgaggcttgtattcatagcctatccttctgaagacatagcctcgtatgcactcgctatttctgaagacagaaaatagaatttaggtagggttaactatacaagttgtcttatggactgttatgcaaggagctagcaatgtttatcatgttctgttagattgacaaaagttttgaggatcaacatagtgagttattttctactctttggctgctatttatgatagcatatacataaatgggcaatggggaaattgattaaattggttttcatagcttggtgtaaatcaatgaggtattgcctctagttttcctaactcgagagctttcaacaagcagccaacttctggcggccgatttcttatttagtcatttctaaatcatgcatctacagatattaggatgcacctgaaaagaggaaattggttttgagcaattagctgaagctatttgtgcatactctggtgatattacaaacggacctgctaaaacttcttttgacatcattccaatatattttgcttcatccatattgaaggcagttctctaaaacaataaacagaacctaatttcagctcgttaccctagcatgcaccatctggcaaggtggggtgtaaaaattagttaaggagctagcaattcacttctttttgatttaataaaactgggttt

SEQ ID NO: 58024 - DNA, 377 bp, Oryza sativa
  Clone ID: PAT_MRT4530_5977C.1
cgatgtgaagcttgtcaattccacagtaaacacacaaagctaccggcgcaagtgctccagactatccctctacttgggccattctcgtgctgggcgctagatatactcgggccattccaacgagacagggcggtaacagggttcctattcgtggcgatcgacaaattcactaagtagatcgaagcagtacccacggggaaatcaaggccgacaacgccatcaaattcatcaaggggatattttgcagatacggactatcgcaccgcatcataaccgacaacggctcccagttcatcagcaccgatttccaggattactgcatcgggctgggaatcaagatatgcttcgcctcgatctcttactatttccaagcgtgt

SEQ ID NO: 58025 - DNA, 2157 bp, Oryza sativa
  Clone ID: PAT_MRT4530_59780C.1
atggcgccgccgtccgtggcaccctgtcccgcgcgtgtcctcctcgtctcgaccccatccccgccttctctctcccgccgccgcccggcaggtcgccgctgcggtggcggggacgggggcgcgcgcctccggaccatccgatgcggcgcggcgaccgaggaggaggacggggaccggcggggtgagcgggtggaggcggcctgggaggaggaggtggcggcgcccggccgtgacctcgtcacgctcgccgcctgcctcgtcgggctcctcagtggcgtctccgtcgtcctcttcaacctctcggttcatgaaatacgtgatctcttttgggacggcataccattgagaggcgcttcatggctaagggaggagtccatcggtgaaatctggcagagagtgatacttgttccagtcagtggaggcattatagttggagtgtttaacacattaagaagttctatagcaaccaactcaaatgacactatgtctaagataaaaggtgcctttaggccatttttgaaagccatggcagcatcttttactcttggaactggaaattctttggggcctgagggtccaagtgtggagattggttcatctatagccaaaggatttggaaatgtgtttaaattggaaggagggaaaaaactttctcttgtggcagctggatcagcagctggaatcgcatcaggttttaatgctgctgttgccgggtgctttttcgccgtggaatctgttttgtggcctacttctgttgactcttcatccctttccaactcaacacctatggtgatactcagtgcagtgatagcgtctgttgtttcagagattggtcttggttctgatcctgcttttaccgttccagaatatgatttccgctcgccaacagaacttcctctatatcttttgctgggcatcttctgtgggttggtgtctactacactatctaggtgtacagcactttctatggagatagttcaaagtttacaaacggcaaccggattaccaaaggctgcatctcctgccttgggtggccttattgttggtcttctagcccttgtataccctgaagttctttattggggctttgaaaatgttgatattttgctggaatcacgaccattcacaagtggactctcagcagctgtattggttcagctcattggagtaaaagtattggcgacatctttgtgcagggcttttggattggttggaggctattatgcaccatccctttttattggtgcagctacaggcatggcgtatggaaaggtcatgaggtttacatttactggcccggattcactgttccaaatcccgttcctagatgtggcgtcacctcaagcatatggcctggtaggtatggcagccacgcttgctggtgtatgcaaggtgcctcttacatctgtcctcctactgtttgagcttactcaggactatcgtatagttttacctttgcttggtgctgttggagtatcatcttggattgcttctccccagaggttctctaggagcaataggagtaagccggattcctcagaggtgaaatcaagtaattttaaacaggaaaaaagtgtgccctcccagacacaaggagcttctgtggatacagataagcctattaccgacctatgtaagcttgaaagttcactgtgtgtctatgatgccaagcatgagaattttcaggaaaatcttactgttgcagaggctatgaagactaaatatatttctgtttcaaagacaactccagtagttgaggcactaaatcttatgcttgtggaaaagcaaccgtttgttatgataattgagagcaacagatctctaataggcttggtaactctcaaagatatccaggatttctgcagaactgcgaaaactaccagggtacagactgaggaacctgtacaaacttatgtttgtggagccgttaagtgtaaaatgtggcctgtgacacctcagacatctctaactactgttgaaaagatcatggattcttatggagtggatcaacttccagtagtttcagaacatgttgatcgtcaagatagaggactcttggttggttttgtagataaagaaggcattgccattgctcgaagagctgtagcaacaaaagatcttttgagttttacatctgagataaagggggatagatga

SEQ ID NO: 58026 - DNA, 267 bp, Oryza sativa
  Clone ID: PAT_MRT4530_59781C.1
atggcgtccatatctggtgaacggtggtacgtcatcatcttcgctgcatccgggcagcggtggcggcacgaccatatcgcggcggcggtcaagggaagttgggacggtgcccatgctggcagaaagtgggatggccacgccggcggtgctagtgacgacagaggcggggctaataacgctcgacgcaggcatggcggtggcttcgtgtttttcggctggtgtacgactacacaatatgacgacatgacgggagatgtggggatttag

SEQ ID NO: 58027 - DNA, 466 bp, Oryza sativa
  Clone ID: PAT_MRT4530_59782C.1
gttaaaaaaagacaaacccccccaaattaaatttaaagaccaccccagaaggctagggctaacggaacgaacaaaggtgtttttaaggggcgaaaaagggagcgaaagggggggggtttttcctgcaacgaccacaaaatttctgaaaaaatacaaaaaaacgaacccgttcctttttaataaggggcctagagatgcaagaaaatcataaaggggaaaaggggaagggaaaacgacccagttgaagaggacctggcagccaagaaaaaaaaaacagggtggggggcttcccccgggggggtccccccccccttgggggccggggcaacatctgcggccttaaaggcctgatacaaaaaaaagggcgtttccttccagctcttgacaatttccgtgaaaaaaaaaaaatggacccctgttcgtgggggcccggtgatagaccctgccaatttgccaggggagacag

SEQ ID NO: 58028 - DNA, 567 bp, Oryza sativa
  Clone ID: PAT_MRT4530_59783C.1
atggcgtgcttcgatttaaatgcagagaagcagcgccgggtggcctcgtcggattggccgacgatggcagttttgttggtcggcgacgcgtggcggcggcggattggcgcgggagagcacctcaataacgcgggcgacgaagctcttgtttgccgacaggagtggtacagggtggcatcgaaggtggaggtcactagcaagtgtgttgtacatggtagtggagccatggccatgggtagtgcttgcagaagtgaagtagaactcgtcatagacacacgcacggtaggaacaccgggaggcaggagaagctcccgaggaggtagccatcaagctcgtcgaagggttccagtgactgagcctccggaggaaggtgccgacaaagatgacgaaggcgaggctaaggacgtgcgagagctggagcgcatgcatgtcaacgttgagagagaaaacgaagctgaaagggatccggtgttcagtgtggcattgagagggagcctgtgggcgaccacgatccgtcggggcgctttgcttcagctgcggcagcgagatggggaagaaggaagataa

SEQ ID NO: 58029 - DNA, 115 bp, Oryza sativa
  Clone ID: PAT_MRT4530_59784C.1
gttgtacattatttggacaaatttattccagttataacaaggcttgttacaaaattagagacaaactaaccaaggcactacttgatacataagccggcagatcaaaattacagta

SEQ ID NO: 58030 - DNA, 624 bp, Oryza sativa
  Clone ID: PAT_MRT4530_59785C.1
atggccgccgctcggcgtcgtccttccctaccttcttcaactcttagtctctcccttttctccactaatgagcataactggaagacgaaggcaaaggcgctcatagcgctcttgctcgagttctccatcgacgggctcccacgcgccaccgtcggcttcgcagaaaacatgtgctacaagaagagagcatgcaagagcttcgttttctctctcaacgttgacatgcatgcgctccagctctcgcacgtccttagcctcgccttcgtcatctttgtcggcaccttcctccggaggctcagtcactggaacccttcgacgagcttgatggctacctcctcgggagcttctcctgcctcccggtgttcctaccgtgcgtgtgtctatgacgagttctacttcacttctgcaagcactacccatggccatggctccactaccatgtacaacacacttgctagtgacctccaccttcgatgccaccctgtaccactcctgtcggcaaacaagagcttcgtcgcccgcgttattgaggtgctctccctagaagacagtgacatcatgttcatccacgattaccacctctggctcctcgcttcctttctccacgtcgcgatagagagatag

SEQ ID NO: 58031 - DNA, 426 bp, Oryza sativa
  Clone ID: PAT_MRT4530_59786C.1
atgggcggcagtggcgagcctcggctgacgaagggcgtgggcgtcggcatggtgatggctagcgtgagggctgcgatgacgttgactacacgtgaggaggccggggccgctggatccggtgaccccgttctcctcgccggcggatccggcgctccagagaaaggaacgagaaccgccggtaccggcggatccggcgtcctaaagaggaatgagagccgccgttgccgcccggacgggcgagctagcggcggctgctgcccccttcttgcgagttcgatgtccactgtcgccgccatttcgtctctttctccatcccacgagaacttggttctgcaagatctgttccgcatcgagcgcctacaagcacgcggcaaccaacaggtgaaactcgacatgggtggcagcagccaaatctcctcctgctga

SEQ ID NO: 58032 - DNA, 1275 bp, Oryza sativa
  Clone ID: PAT_MRT4530_59787C.1
atgccggcgttcgagccgtccacctggctgcgcgcggcggctgagaacacgtacagcaagccggaggtcgccgtcgacgaccggccggcgcaggcggacatatggaatgctatccaggccgacgtggtggacaagtcggccaccaccggcgccaagaaagccgccgccaagccgtacgtccacccgctggtgcggcgatcttcgagcctgatgagccagaagagcctcgaggtctgcaccgagagcctcggctccgagaccggctccggcgacttcaccgcgtcgctggatgacgtcgacatggccagcctcttcggcgcgccggctgcgccggcgtcgaagcgcgcggatcaggcggcggaggactcgttctggcagcagagcgcggcgccggaggaggcgtgggagaggaaggagctcgcggcggtgaactaccactgctcgggcgggacgcggtcgccgccacgctcgttcccgccgccgctcccgtccatgtcgagccgcgacgcgccgtgcctgcagatgcgccctcgccgccaggacggtcgcctcatcgtcgacgccgtggttgtcaggccccgcgggtacctccacgcgaggcgccagggcggccgcctcctcctctccttcgtcgactgctctgctcgcgagcagagcgcggcgagcaaggccgccgtggccaccgagaaggcgccctacttcccggtcgtggacgccaagctcgatcaggacgaggaggtcgccgccgaagtcgaggaggacgacgaggtcgaggaggaggaggaggaggtggaggtggtcgacaggggcaccgtggtcgaggtcaaggtgagcacgcagccgcagacgcccaccgcggccaaggtgcaccgctcgacgctcgtcatcaacaagttcgtcggcagcacgccgctgaccgtcgccgacctgcagccccggtgcaacgccgacgcggcatgcgcagccgccgccgccgccgaagcgacgacagacgcgccggccccggcgcttcgccgcgtgccgtcctccacctccaccacgacgctggcggccgcggtcgccgtggcgtcgacctccaccgacggcgacgacgacgacgacgagccgcaccacccgcccggcgccgccgcccccgccgccgacaccaagcagctcctcctcttcacctcccgctgccgcgacaagcaggagcttctccagagcgtgcgccagtgccggcagctgcggcagaagcccctcttcatcctcgagccctactgcattgccacctcctaa

SEQ ID NO: 58033 - DNA, 227 bp, Oryza sativa
  Clone ID: PAT_MRT4530_59788C.1
ttcataacaaccactccaagtttggactgtgtataagctcttcaccctacacggctgctaagtaaccagaaacggacatatctacagacacgaatgcacattctcatctagaacaccagctgtttatatcccatattgtcgatcaagagacacacgtctatcataattatgtatatataatctagaataagcatgactatcttcaccaatttgtatagctgctatta

SEQ ID NO: 58034 - DNA, 427 bp, Oryza sativa
  Clone ID: PAT_MRT4530_59789C.1
atggagtgggtgcgcgggaaatgcgtcggcaggggggcgttcggcgcggtgcacgtggcggtggacagggccaccgggcgggccttcgcggtgaagtcggtggaggccaagggcggcgcgccggcggcggcgatggcgtgcctcgagagcgagataaggatcttgaggcggctcagctcgccctacgtcgtggagtatctcggggacgacggggacgcggcgacgacgaggaatttgcacatggagctggtccccggcgggagcgccgcggcggcggcggccatgggagggcttggtgagcgcggggctcgtggcgtcgtgcggcgggtggcggccgcgctgcggtacctgcacgacgtggctggcgtggtgcacggggacgtcaaggggaggaacgtgctcgtcggctgcgacggcgacggccgcg

SEQ ID NO: 58035 - DNA, 1175 bp, Oryza sativa
  unsure (1)..(1175): unsure at all n locations
  Clone ID: PAT_MRT4530_5978C.1
ccacgcgtccggctgattgcaagctgaaggtttgcgatttcggccttgcccgagtgtcatttaacgataccccatcagccatattctggacggattatgtggcaactagatggtatcgtgccccagagttgtgtggctcctttttttcaaagtacacccctgcaattgatatttggagtgtaggatgtatatttgcagagctgcttacaggaaagccactctttccagggaaaaatgttgtgcatcaattggatctcatgactgatctacttggcactccttcagcagaatcccttgctaagatacggaatgagaaagctcgacgatacctgagcaacatgaggaaaaagcctcgggttccttttactaaaaaatttccaggtgtggatcctatggctctccatttgcttgaacgccttcttgcttttgatcccaaagatcgtccaagtgcagaagagcaaactctgaacgcgaaccaatagcacagcctatctcaaagcttgagtttgagttcgagaagaggaaattggccaaagatgatgtccgggaattaatttaccgagagattttagagtatcatccccatatgctgcaagaatatttgcgcggnggagaccagatgagtttcatgtatcctagtgggggtggatcgcttcaagcgtcaattcgctcatttggaggaaggagtttcaatacgtgaagttgaaggagagtatgcagatgaaaatcagtgtcaattccttacttgtttgttctatcaatgtcgccgacatggagcagccgctggtttttgctattggcccaggtgaacacctccttgctagttaaggtgctgcccagcgttcggtagcgaggccccaagcagtgtcgtcgcctcaacagccgccgatcaccgccatcaaccgccaaggtgtcattgtcctccttcatgtaattaatcacgtgctaatggaccattccgttttccgtgccggagggttacgttcccaacccaggggaacccaggggaacgatcgcagcctaagattgtttttgtctatcccctttctattcagctgactaagagagataaagttaggtacaacttcacctggattcactacagaaaattcaaatcccagtctctgtgctgctaaatggaatatctttttaacacttgatgctttagacaatgg

SEQ ID NO: 58036 - DNA, 276 bp, Oryza sativa
  Clone ID: PAT_MRT4530_59790C.1
atgacggcgccggcccttcatccgattggtcgatcatgtcggtttggcttggcgtatacggttgctgacgtcgggcggcgtgagatggcgctgacgtcgggcggcagtggaggagaagggatggaacacggtgacgacgtgtcagctcggcagtctgcagcggcggcggcggcgcgtacacgcgcgccacgcacgcggccatggtgctcggtggtggcggcgcccacagggagagaggaggcggctcagctaactgggccggcctgggccgagtaa

SEQ ID NO: 58037 - DNA, 197 bp, Oryza sativa
  Clone ID: PAT_MRT4530_59791C.1
gactatagttggccatatgggccgcccggcacggcacggcccaggcacgaccgggcctaggccgaggtcagtcgggccggcacggcccgacgaacaagctgtgccgtgccgtgccgtgccagcccacgggctacaaccacggcccaggcacggcccaagtagcctccggccatgccgggctggcccgacggcccggc

SEQ ID NO: 58038 - DNA, 1612 bp, Oryza sativa
  Clone ID: PAT_MRT4530_59792C.1
cccacgcgtccgcaaagattcttatcgattgaagaaaaaaaaaagccggagaaaaggatagagagggaaagcaaccagccatggagtcgctgactctccgggcatcgccgtcgacggccgcgccgttgcgccgcgtccccgggcggcggcacgcggcggtgtccgtccgcgcctccgccggcgccggcgagccggacctctccgtgcgcgtgaacgggctgaagatgcccaacccgttcgtgatcgggtcggggcccccgggcaccaactacaccgtcatgaagcgcgcgttcgacgaggggtggggcggcgtcatcgccaaaaccgtatccttggatgctgagaaagttatcaacgtaacccctcgctatgcccggctcagggcggaccccaatggatctactaagagtcctatcatcggatggcagaacattgaacttatcagtgatcggcctctagaaactatgctgaatgaattcaagcaactgaagaaagagtatcctgacaggatactcattggctcaataatggaggagtacaacaaagctgcatggcatgagcttattgaacgcgttgaagagagcggagtggatgctcttgagattaatttctcatgcccacatggcatgccagagcgaaaaatgggtgctgccgtgggacaagactgtgacttgttagaggaggtctgcggttggataaatgagaaggctacagtgcctgtttgggcaaagatgactcctaacattacagatattacaaagcctgcaagaatttctcttaagtcaggatgtgaaggagtttctgctattaacacaatcatgagtgtgatgggaattaacctcaaaactttgcgaccagaaccttgtgtggagggttattccacgcctggaggctattctgcgagagccgtgcaccctatagcacttgcgaaagtcatgcagatagcaaggatgatgaaagaagaatttgctgatggacagtcactctctgctattggaggcgtggagactggcaatgatgctgctgagtttattctacttggcgcagatacagtacaggtatgtacgggcgtaatgatgcatggttatggccttgtaaagaagctttgtgcagagctgcaggattttatgagacaacacaacttttcctcaatagaagatttccggggggcctctctcccgtatttcaccacacacaccgatttggtacatcggcaaagggaggcgatcaaccagaggaaggctattaggaagggcctggaatcagacaaggactggaccggtgatggattcgtcaaggagacagaaagcatggtgtccaactgattcgactctgaactcacacccccttccaccatacttccaacttgtgattaaacagggaccatgttcagcccaaaacagcagaaacttttgcatcatctcgttcaaataaaaagcataccaaattacttccaaaaaaaaaaaaaaaaaaaaaaaaaaaaaaaacatgccgtgctcataaactgttccatgtgaacataaagtcagggtcactgagctttgggatatctggacttgaccttgtaaagcctcaagacttcaagtctctgctggaccgtgtgcctgagtaa

SEQ ID NO: 58039 - DNA, 618 bp, Oryza sativa
  Clone ID: PAT_MRT4530_59793C.1
ttggtttttttattttttgggggcatttaaaacatattatttatcaaattattgtcacgagttaaactcttgatcatatatataaattaaatagtttaataactaaatttaaagtaataatgtagaacgagtaggatgcaaagtaggagtacatcaatccatcaaaagttatatagtttatcatataggcgcgtacagatgagacaaatattttgtctcttaagtgtaaacagctatagggcagtcgacataggcacacgaacagttggaacgagataaagatcattcttttttcgaatagttgcacccaactcctccatcatgtccaccttggtcggcgagatcccatcaggaagctcccaatcaaagtgatagagaagcgaggctagaacgagctccatgattgcttctgcaaatgccataccagggcacatccttcgcccagctccaaacggtataaattcaaaatctgttcctttgaagtctatatgtccatcctcaaatcgctcgggtctaaatgtctcagcgtcctcccaatacttagggtctctaccgattgcccacacgttaacaagcatagtagtacctatggggatatcgtaccccatgaccttacat

SEQ ID NO: 58040 - DNA, 471 bp, Oryza sativa
  unsure (1)..(471): unsure at all n locations
  Clone ID: PAT_MRT4530_59794C.1
ttngggatttttaatttttggtggttatttttttttttttttttttttttttttttttttttttttttttttttttttttttttttttaagcaacaacaacaaacccttttttatattcacccccgggttaattttaccggggaggggggacccccttacaaaatccaaaagggcttggaccaaaacttctgaggctacggggaaaactggtgattcagttttaaaacaaggaagaaaaaaccggccttcttaactggggggttaaatgcaaaagggggggggggattaaacacccaaacccgaaaaacttcaattgggctgagggggtttagcccaaaaacaaaaaactatagctggggccttcactcaaggggggcccctccggttttatttatttaggtaaacaccatggagaagggggggggggttttttttatatgggaaaaaaaaagggaagccttttcccccct

SEQ ID NO: 58041 - DNA, 1320 bp, Oryza sativa
  Clone ID: PAT_MRT4530_59795C.1
tagtggatcccccgggctgcaggcgcgcctcgccgccgccgggaagtacacctgtgcgctggttgcggcgacaccgcgagcgaggccgaggaggcgcgggggcgggggagtgagggtgaggccggggttgggcaccaccagcaagccagcaagccagccagccgccgtcccttagatccgggccggggccacgttctccggcgatctctcggccatggcgtcccgccgcctcttcgcctccctcctccggtccaccgcggcgccgcgccccacgcccacgcccgggtacctcttcaaccgcgccgccgccgcctactcctcgtccgccccctacaacggccagggttttccacctcctcagtctgaaactgcttcacgtctgggtttgttctccaggcccggcgacacacgccagccttcatacggagaccgtctcatgcagtcacaacagctgagtcaagactaccgtgctaggacacaggccaataatgcgccacgttttggtgacacaatgtccaggatagctggtggcgataactcttcctactttgggaccccatcacgcatctttgacgaacacaaacaatctttggtgaaaggaaagagagattttgtccatgtcttgctgaagagaaataagacctttgtgaccgtgacagacgttagggggaacaaaaagaccggggcatccgctggttgtttggaggacaggaaagggcgctctcgtctttccaaatatgctgctgaagcaactgcagaacatgtcgggcgtgctgccaggaagatgggtttaaaatctgtggtcatgaaagtgaagggaactacatttttcaataagaagaagaaagtgatcctgagctttagagaaggctttcggggtgaaagagtaagggagcaatctcctgtggtgctcatccacgatgtgacccaacttccacacaacggatgccgactccccaaacaacgccgggtttaggtctcagcgagctggaatcgaacctgagttgagaggagtcgaagcattcaaggtgatctggaagctctatttaagctgtgtgatgttggtctagttgacctaagacagatatgtattgtttctcttggctctgctacttgaattggttttggcatgacttatgttactcagttagttaagttatcatcaatttcgccccttctttttatcaaattgcagataggaactgaaaccccaaccgttgtatggtatgttatgacttatgaggaacatatatatggttgattttccttcaataaatagcaaagccctcgcccctttttcttgaaaaaaaaaaaaaaaaa

SEQ ID NO: 58042 - DNA, 291 bp, Oryza sativa
  Clone ID: PAT_MRT4530_59796C.1
tagatgttaggggttagtcgttcaaagttagtcattctcacactgatcaatggcgcggcggacttcctgtcctcttgctcaactgaggcccagccggacccggccacggcggagcaagcgcagagggttatttttgaaataagttttggtgacggttcatttgtaaaaatagtttttgcaaagggtcaaattgtgaaaatttttgttggtgttgtggttgtctgcatgggaggcaagggtcaaattgtgaaattttttgctggtgttgtggttgtctgcatgggaggcaag

SEQ ID NO: 58043 - DNA, 713 bp, Oryza sativa
  Clone ID: PAT_MRT4530_59797C.1
ccggccgggacgcccgcccgccgcctccaccgtctccgctcgccgcgcgctcccgccgccgcgcagctcatcttcccctaggcttcttcccttccggcggggccatccagattactgggtcctctctgtccagaaggcctcgcctcgcctcgccggtgacagccatgggggaaccgagcaaggagctcctggacctcccctccgagcccaagccgccatccctcatcgagtcgattctcgtggggaggagagaacagcagcagcacaaggaggggaagcgcaaggcggggcctcccaccgatccactccccaagagccaagttctaggaagagtgaaagatttcttgggagagatggcaaaggcgaacgagaaattgcatctcgatgtaaaaaataagcgtcctgaagagtatgatatcgaagcgcttacagggaacgagaaggaatatattgagatggatttgcttcttggtgtagctgatttgcattcagagaaagctgtagaagtagctgaagcaacaatgaacggcttcccaccttcaggaaggtcattcgcttgcagctcatctgactctgaagatgatagtgatggtagtgacgaagacagcggtgatgaaacaaacatgtctagcaaagatgcggatgaaccggaggctcaagcatcaaaaggaaagaagcccaataaacggcagaagatcgttgttcttaactag

SEQ ID NO: 58044 - DNA, 543 bp, Oryza sativa
  Clone ID: PAT_MRT4530_59798C.1
atgcccaccaccgcagaggatcagaaacagtggaaggtggtggaagtccagcggatcaatgcggagtcccatccccctcctcggcgtgacgataggtgtgacgacctccgcaacgacgaggagttccagcgtgtcatggacaacgtcgtcttcggccggggttatgatcccacaagagatgacctcaggatcagcactgaccctactgcgatggtcgagctcatagagtactaccacaagatgggtctgatagaagtcccggttcgaataggaaccgggattattgtggattttggacgaccgaccaaaaatggtttctctaccagtgatcctgtagttgactgcgaaggtagagacgacgccacccctgatcgcgctgatgagcaggtgaagaaacagtgcttgatgagcctcgagctggatatcaaccgtgaccagggtgcctcatcaactcttgctagctttatcgctagtttttggaagttgctcaaagaggactggcaattggcacctgaatctccagatggatgtgaaatttggtaa

SEQ ID NO: 58045 - DNA, 2112 bp, Oryza sativa
  unsure (1)..(2112): unsure at all n locations
  Clone ID: PAT_MRT4530_59799C.1
tggacggcgcgggtgggcagcggagcaggcgagttccggcggtggcggagggcgtggtcggcgccgcctcctgacaggagcgccaccggtccgcgtgaaggcagatctggggaggtccggcagccagcgctacggcagaagctcatcaagatgctgctcgaccccaacccgggcacccgcatcaccgtccccggcctcctcgagacgccgtggttccagaagacggcgcctgtcctgcgccccatcatcgccgatctcgtgccagcgccggtagacacgcatggcaatgccacccgagcgcgcgcggggtgcggctcgccgtggcgactgatcgacgtcttcagcgtggcgccgtcgttgctcgtggtggacgtcaagaaggatggcggcgacgccatggagtaccgatcgttctgcagcgaagagctctggccggcgctcaaggacatcgtctggtcagtatcaagatcatgggccttttcatctccaaacggcgagggcggggacacggcggtggaggcggcgaagcaggccatcgccaccgggcacgtggaggccgagagcgtggcgaacggcgtaggcctcaccatcggggagaagggcggcggacggctagacgagcggtgcaagagagagatggccgccaccaccccacacgcctcgcgcgccgtcgcccgccgccggccatgcgctgtccgtcgccgcgccgcccgccgctgccgcagttcgccgccgctcaccatgctggacaccgcctggcgagaggagggtggagagatggggagagccggagagaggaagaagaagaggattggatttggtcatttgagaatgacatgtggggcccacaatattcccttccgacaccacctccgcttcaccctcgcatcgccctcaccgatcacccgccccaaaaccctcgccgtcgcggccgccatgtccggcgcggtggcgacccatgcggcggagcccccccgcccatccgcagcagcagcggaggtggcggtggcggggggagggggagggtgcggggcggcgaggaagccggcggcgacgatggagcacgtgctgctggcgctgcacgagacggaggcggagagggaggcgcggatccgcgccatgttcggcttcttcgacgccgcggggcggggccacctcgaccacgcgcagatcgaggccggcctcgccgcgctccacctcccgccgccgccnccgcccgaggagggcggcggcggctacgcccgcgagctgctccgcgcgtgcgaccgcgaccgcgacggccgcgtcggctacgacgacttccgcaggtacatggacgacaaggagctggagctctaccgcatcttccaggccatcgacgtcgagcacaacggctgcatcctccccgaggagctctggcacgccctcgtcaaggctggcatagaaattgatgacgaggagcttgcaagatttgttgagcatgtggataaggataataatggaattattacttttgaagaatggagggactttcttttgctttaccctcatgaggcaaccattgagaacatctaccatcattgggaaagaacttttgcatgtggtagtggtaaaattcctagccttggtgcactatcaagagacatttggatgcaggaaggtcctcgagcattttacagaggcctcgttccatcattgcttggtatggttccgtatgctggaattgatcttactgtttatgaaacactgaaagaaatgtccaagacatatgtcctcaaggatagcgcgtttgctgcgcacatcgcccgcgcgcgccgcgcgccgtctcgaatgctgcctccgctgcgcggcgtcgcgcacgcggcgcgcggctgggcacctgacagcgacggcggcgcaggcgccaaagtgattggtgctgaggttgttcctgtcagcgccaacgggactagcgctaacatcgtgccagcgtggcggccgagccgtgaggtggcaggacctcagcgtttggcgctgatcccttttacacgctaaaaaaagtcaatgcctactgtatgtaataatctgccagctttaccaatataacttccttatggttaccctgttaaaacctgcagcccgggggatccacta

SEQ ID NO: 58046 - DNA, 1086 bp, Oryza sativa
  Clone ID: PAT_MRT4530_5979C.1
atgccatgccacatgttgacccaaaagaagcaagggcactacgcaaggaactgtcctcagcagaaaagaaaagcaccaatgcgaaccgaagatgaagtccgtaagatgatcattaccagcacagaatggcctccaccaggaatgacaaaatgtcagagaagaaattcctcccgaggtgcacaacagttgacagagcatcttttagctaatggaggtagagtgtctggtagtgaagattcagatcaagtctcctcagatgatgaagatgcgaagtctccccaaggttttaaccagaataaaatagaacttaaggcatgctctcgttgtggagaaatcggtcatgttgccagctcgtgtgcctttacatgcgttcgttgtgaggaagaccatccacccgataggtgccctatgagcaggatcacttgtttcttgtgtgaaggaactgatcatgtaccaaaagattgtcaactcagttttctgctgacgaagaagatggccgaccaacacgcccattctaacggagagaagcatcaaggaaacacaaatcctcgccaacattacagtttcagcctaactccagtgccaggacagaggaatcaaaatgagaaaagaaaatgccgagttcgggaagatatctgttgcttcaattgtcaaggaatgggtcatttcgccgacaagtgcccaaaaccgagaaacatagctgccggcacgtcagtccacgcaactccctgcaatcagaagcttgctcctcaacgaattgtcatccatgcatcccgaagcagtcctatagcccgcgttgcaacagctccaattccaatgagtgcactaccacaaggtgtcaatgctcaatttcagccccagccaccagctggcaagacagaggccagtatctgcgttgtacctttggaagttccaatacaccagctgagaaatcaagtacaagatgaagaacccgagttgaagaagggcattactccaaaaactgtccccaaccaaggcaaaatcggcctccacattaccgccaatttacacgaagcggacattcccatcgtattgtggtcactggagcaaacgccgtgcccgtaa

SEQ ID NO: 58047 - DNA, 1613 bp, Oryza sativa
  Clone ID: PAT_MRT4530_597C.1
cctcaaaaaggcaggagagctgcatttcatttcattaaggggaagaaaaaacaatacaaaaaacacaacacaaagaaaaaacaaagtaggagggcccgagccctcctaccaagacccacacacactaaacaactcggggagcttagttgcctaggttagccgccccactaaggagcttttgaaggggacaagctccagcaacactccaaagatggccctcattttctattcgctactctaggatgggcattattttctatcacttacaaaattcacgctggatctgagcattttttgaggttggcgttgtactttgccacagccagggtataactatttgtttttgatactagatatagtattctgaatcatcacaaatgaagagacgggtaaaaggcaggtgatgattcctacaacactcaacccttctctcaagtctcaacgatgaagggacacattgacattatactacagttgccaatgtaaaatgcatttcattctgtttatgcttaacagagttacaaaatcagcacgcttcagttgtacaattttcactggccacctcgcactcggcaagatcatgcttattagaattcctgatcatcagaagacatcaattcctgatcttcagaagacatcacgcggtttcttgggtctcgttggttttggaaatttggatactggtgatttctgaaacttgattcctattggaaaggtgatccgtgctggttcctgaaacttggatcatgtcggaaacttctaccagattgggttccaaaatctgagtcatttgaaccaaatttattttccatgtttctaggggcatagtttgaatcatgtcggttcctgaatctcgagtcatgctgcccaaagttgttctccatattcatgggagcaaatgctcgttccctcattcttctctctctgtcatattcaaacttgtcacgaatttgagtaaccctttcccatgtttcaccttgtttgcttgccgtaaaaccaatgtccttgtttggctctacattggtgtgccttctcctgctgtaaggtgagaagtctagatcatcttcttcagcagaatcataattagcatgatcttcagcaatctttttggaataaccttcatcccaatataacctttcccaattctctctaagttcttggtatagttccatatattttttacaccaagcttcatgttctgcattaagatacaatagcatcttgagtttcattccatgtttctcaatttttcctatcccatgattccaaatttctgctagcttattagcaaggagatttatcctacttcccaatgaaaacgtgtccttgaggacgaggcgcgtgcggcgcatgaactgctcccgcatctgcttccggcggcggttggggaggttgtcgcgcgggatggcgaagcgctcgcggtgcggcacgccctccccgatctcgtgcatctcgccgtccaccgcccaccactccgacttcttcgcgcccgcgcccgcgccaacagccgccgccgcggcgggggcgcgccgctgcgaccagccggtcccgccggtgacgaagcctccccgccggtgcgcccaccgccgctgcgtgtacacgcagcgcagcat

SEQ ID NO: 58048 - DNA, 335 bp, Oryza sativa
  unsure (1)..(335): unsure at all n locations
  Clone ID: PAT_MRT4530_59800C.1
acagggcgagattaagggtntatcaaaactctggaatgccgntcaggataagaggccagggtancctgttctactgactactgaacaaatgctgccatgcgtatgaacatttttgatgattntattttttttcgtaatttttntanccattttcagaactgagaagtgtgtgtgcttagatctagtacatgtgcaatatgttcagttgactaccatatgtaggtagtagaattatggattaatttcgccatgtaacaagttagtgaattagtgggatgtacatccaactctacaaaatgnaattcattacatttgtnttttttccaaantanaaa

SEQ ID NO: 58049 - DNA, 548 bp, Oryza sativa
  unsure (1)..(548): unsure at all n locations
  Clone ID: PAT_MRT4530_59801C.1
aaaaaaaagagaaaaaagagggggggggagacgcggccanggcggggacggggagcgncaaggggacgaggancncggagggggcggngaagccggcggcggcgacgccggaggagacgcngccgcnggcgngggnggaccggnacccgacccaccgcgggcngggggaggcgaggcacagcnnccggncgggcgccgacgcggccccgggcggcanccgcgacgcgcncgccagggcgcgggncnncncnacccgcncgccgggcgcancgnggagcccgaggccgggncccccgccanccggngcaccgccgacggcgncaaccccgccgaggccgccgccgacggcagcccggaggacgnccgcnnccnggagcgcccccccccccnccccaaggaggaccncggccccnaccccggcgacgaccgcnggggcgncgagccccacaacaccancangaagaggcagancaccaaanncaccngcggcgggcnccgggacgggggccccggnncaaccacgccgnncggcggacggccaggggcgc

SEQ ID NO: 58050 - DNA, 2939 bp, Oryza sativa
  Clone ID: PAT_MRT4530_59802C.1
gctccttcccctccacgccttatcgcttccgagctcccatggccgcacgccccgcgcgctagctgaagcagccagcctcgggccccacccacgcagccgccggcgccggcgccgccgctccccatgaggcagccgcacctcctctcgccgcagcagctctccccgtccccggtcctctcctcccacttctcgccgccggcgcccgggggctcgccggcgtggcggcggggccgacaccaccaccaccggcgggcgttccacccgccgctctcgtcgctgcgtgaccccgacaaggccacgctccgcaaggcctcgcccaacgtccccttccgcctcggcggcggcggtcagggcggcggcagcagcaaggaccggcgacccgccgctgaccaggaggaggaggaggaggaggaggcggcggaggataagggagacggcggcgcgggggccatcaccgggacgctcctcgccggggcgctgctggttggagtcgtaggggggttcggggcggcgggatacgtgtacaaggaccagatcaacaccttcctcacccagttctccgggttcattgatggttatggccctgctggatatgctttatttgtactagtgtatgcaggattggaggtccttgcgattccagcgataccattaacaatgtcagcaggtctattgtttggtagtattactggtacagttattgtctcaatcagcgggacactagctgcagcagtggcctttcttattgctagatactttgccagagagcgaattctcaaattggttgaaggaaacaagaagtttctggcaattgacaaagcaataggtgaaaatggatttaaggttgttactctgctgcggcttagtcccctattacctttctctcttgggaactacttgtatggcttgacttcagtgaagttcttgccttatgtcttgggaagttggttgggaatgcttccaggatcatgggcctatgtcagtgctggtgcatttggacgagctataattcaagatgagtcagagatcggtttgggaggaaacagccagctactgacactgggcatcgggctattattcacagccattgctgctacatatgtaacacgacttgcaaaggatgctgtaaaggagatcgatgaatagaatggtaggattctctagtaaaatgcggccttctgatactagcatactagcccattgtacatcatcactgtcatctttgatgcaatctgatctactagaaattcaagcaatttttcaaaggacttccagatgcaagttggaatgcaatgctggttctctctcttatgcacatgcctaattgcctatagagtgaatcaaccaaaaatggtcaaagacaacacaatcgtactaagctccagttaccagtaatctccacaagaacatgaaccatccttcatgtgatggaagcagttggagtctctcagtatgatctccctgccgtacacctcggcgaccatcttgatcgcggcgtggcagtcgccgcacacccggaggttcttgtacacgcggatgggcgcggcggctggcacggcgaggaggccgaacgcgacggcgagcctctcgccgtggtgagccagccccatctccctcccctccggcgcctcgtcctgcagcgcccactcggtgtccggcacgtgcccccgagcccggatcctcgccgccatctcctccgccttccggtagatctccgccgcccgctggtgatccctgtccccggcgtggaacacgtgcgtcacgccggcgaccaccacccagctgcacccgggctccttgctgatgccccgcgacctcatcagcgcgcgcaccctcgccacgtcgccccaccgccgcgcccgcgagtagaggttggacagcatgacgtacggcatggcgtccgtcggatccagcctccacaccatcccggccgcgcgctcggcgagcgccgcgttccggtgagtccggcacgcggcgaggagggccttccagaccgtggcgtccagctcggccgccgggctccggtcgagcaggtcgacggcctcgccgaggcggccggcgcggccgagcaggtcgaccatgcaggcgtagtggtccggccccggggagatgccgtgctcggattgcatggactggaagtgggcgcggccggcgtcgagcagcccggcgtggctgcaggcgaagagcaggccgacgaaggtgacgtagtccggcctgcagccggagcgggccatgtcggcgtagacggcgagggactccctgccccggccgttctgcgcgtacccgacgatcagcgccgtccacgtgatggcgcaccgggagcgcatcgcgtcgaacaccgtgcgcgcgtcgcggagcgagccggtcttggcgtacatggacacgagcgagttgccgaccgagaggaacggctcgtgcccggaccggaccgccgcggcgtgcaccgaccggcccagctcgagcgcggtcgagccggcgcacgagctgagcacggccgcgacggcgaactcgtcggtggcgaccccagcggcgaccatgtcgcggtaggcgcgaacggccaggccgtgggatccggcgcgggcgagcccggtgacgagggaggtccaggtgaccacgtcccggcgcggcatttcgtcgaacaccgcccgcgcggctccgaggcgggacagcttggcgtaggcgtcgacgagggcgttggcgacatggaggtgcgacgcgagccccgcgcggaggaggagcgcgtggagcgccgccgcgggcggggcgcggagcagcgcggcggagttgaggatcggcgggagggtgtactcgtcggcgcggagtccccgcgcgcgcatctcggtgaacagcgccagcgcccgccggtgcagccccgcgcgcgagcagcgggagatggccgcgttgcacgcgaccagccccttcccgcccggcgacgccat

SEQ ID NO: 58051 - DNA, 1048 bp, Oryza sativa
  Clone ID: PAT_MRT4530_59803C.1
cccggacgcgtgggcgcacgcgtggtttcttccttaggtttcttctcctgagaggcagtagcaggggttcttcccatcatggggactcgcttagttcctcgggaaactgcagctcttctcggtgctttcgttgcgcttctggccgtcagcttcggcgccgtggcggcgccggcgccgctcgtggttggctccatcaagtgcttggattgctctcccgacgacgtcaaagctgaggatgcgttcagagggcttcaagtaggcatcatgtgcaactccggcgccggcgaggcctacgagacgaagatgctcagcggcctcgacgagaacggcggcttcagcatcccgctcgccgccgacctcctccgcgacgacggcgagctggacaaggactgcttcgcacagctccacagcgcgccggagacgccgtgcgccggacagaccccgcccaggatcgccaaggccgggcctggcaacgacaccatcgccgccgccgccgctgacgccgcgccgacctacctcgcggtctccgacgacacgttattctctcccgtcgcgtgcaagtgcggcaagtacaagaagaagttcatgttcgccccgccgccgccgccgccgcccaggccaccggccccggagtacaagcccccgacaccgacactgactccgattccgacgccggagccatcgtacgggccaccggcgccgaagccaccagctccgccggtggaggacgagccgcagccgttcttccacaagcacccgaagctcaagttcatgcacaagaagaagccgtgcccgccgctcgtcgacgtggacattccccggcccaacaactgagctgcacgcgacacgacgcagcaaagctcgatctaattaaggatgccgtcgagtcgttgtagtttgtgtttgtcacgtcgcagttttcgttagtgttttgtttggtttggttcgtgctgtttgtgctggcattgcagtttcagactttcagttcgttgctttgtttgtgaaataaagattgtggtctattcagagggtatcgatctctctagcc

SEQ ID NO: 58052 - DNA, 1387 bp, Oryza sativa
  Clone ID: PAT_MRT4530_59804C.1
gttaccaaccattactctctcataaagaactcggagaatgcatgcttttacatccatctaacaaatctagtcctctcatcgttcttcctcttctaatttgcacccaaaacatgatcaaagaaaaagaaaaagaagaaaaaagagaaaacaatggagatgcatcccatattcccataccaccaaatctaatcaacgaacaaaagaaaaaagatcagagcagaacgcgatcagacaatctgcgacgtccatctccgtctctccgtctcatcccagccgtccgtgcttaccttattcttccagaagcgaaagagagcaggacagaatccggcggctactgcgtgtgcggcggcggcgggtggtggtgatagctcgactccgaccatgacgccgccgtcgccgggtagaccagggcgttctcccagttccactcctccgccgccgacatgctctggtgcgagccgccgtgggacgagtagtagttgcccggcgcggaggaggtggaggaggggacggtggccacggaaacagagggggtagggaaagagtagtaggagccgaggaagccgctcatggcgccgccgccaccgcctccgtagggattggtcatggagccaccgccgccgccgccgccgtagaacggaagaagggtgccttggttgggggtggcggtggtaagcctcccctgcagaagcatctggtagcgcaggtactcggcgctctgggaggcgccggggtagatggccgcggaaggcgatgccgccgcgaccggcgccgggggcggcgccgcggtggtggtggtggcggcggtcgggtagaggcgcgcgtcctcggggaagttgagcttggcgcggctgccgcggaaccggagcgcggcctcgtcgtaggcccgcgccgcggcctccgccgtctcgaacgtgccgagccacacccgcgccgccttgtgcgggtcccggatctccgccgcccacttcccccacggccgctgccgcaccccgcggtaccgccgccgcggcgtgtcgggcccctccgcgttcccgccgccgcccaccggcgagtggtgctcgtccatggtcgccgcgctcgcgctctgggtgtccgagctctgctccgatcctgcgaactccggcgatggcgcgcccccgcaggcgtatcccgccagctcgtgcattgcctgctcctcccgcctcctctcctgcacgccacgcgccgccgccgccgccgctgacgacgacggcgacggcgacgaccacgcccactggtcgccgtcgccgtcgccgccgccgccgccgccgcccgccacgacgcgcgccagcgccgacaccatcgtcgacatctcctgcgcctggtaataccccgacatgagctccgacgcccccgccaccgtcat

SEQ ID NO: 58053 - DNA, 285 bp, Oryza sativa
  Clone ID: PAT_MRT4530_59805C.1
atggtgcgcatggctggtgtggatccggagtggtcacacagcatggcacatgcgctggcactggacgcacggacgtggccaggatgggacgttcctgacctggggttgaccgacgaggacgtcgatgtcttaagggggactgttggccatgtggccaacagccgcgcgcgtgtcttgccgcttgctggagcggcggagccagcgacggcgttaactagcggtgtcggcggcacggagaaggagcgcgcagtagccggcggaaacgacggcgctgggaaggagtag

SEQ ID NO: 58054 - DNA, 1136 bp, Oryza sativa
  Clone ID: PAT_MRT4530_59806C.1
ttctaagccgctatcccatcctaccgcgcgcgtgcgccatcgccatgtcatccttcgactccgtcgcggccgtcgccggcgacggcgacgccgacgacgacgacgtgctccctcccgctcccttcgaccccgccgccgacggcgcccagggcggcctcggcgccctgcgccgtggccaccgcttcgccacgtcctactcgtccttcggcaccgccgcctccgaggacgacctggctggcgccggcgccgggaccgacggcggcgtcggcgccggcattcccctgggctcgagctcgaacggcggcgccgcgtatgggtacggcgggtcgggggacgtgatgaatggccacgtggaccagatcggcgacgtcatgggtggcggcgtggtggtcggcgacggcggtggcatcgacgacgacctcttcgccggcgccggagacggcgacgacgggcccgtcctgccgccgcccgaggccatgaaggaggagggcatcctccggcgtgagtggcgccgccaaaacgcgctgatgctggaggagaaggagcggaaggagagggagcggcgcggcgagatcatcgcggaagccgacgagttcaagcgatccttcgccgagaagcgcaagctcaacggcgacaccaaccgggctcagaacagagaccgggagaagctgttcttggcgaagcaggagaagttccacggggaggcggagaagcagtactggaaggcgatcgcggagatggtgccgcacgagatcccggggctggagaagcggggcaagaggagggagaagcagtcggcggaggccaacgccaaggcgaagcagcccggcgtggtggtcgtccagggcaccaagcccggcaagcccaccgacctctcccggatgcgccaggtcctcatgaagctcaagcagaccccgccgccgcacatggcgcctcctccgccgcagccagcgaaggacaccggcggcgacacggacgccaacaaggacggcgaggcagagaaggcagctggagagattgagaagaaggcggccggaggcgagaaggaggccgcggctggtccgccggtgaccgccgcggcggcggcggatgcgcaggcgaacaaggcggcagccgaggagacggccaagaagtga

SEQ ID NO: 58055 - DNA, 1431 bp, Oryza sativa
  Clone ID: PAT_MRT4530_59807C.1
atggctgagttgccgccggtgcagatcgtcgcagccaaggacgacgtcccgccgccgtacctgaccgacaacgtcgtccacaacctgctgctctgcctggcgccggagccggcatacctcgccgtggcgacggccgtgtccaccaagtggcggagcgtcgtccacagcgaggcctgcttcggccgccgcttccgcctggactacgacgggccgacgccgctgctcggcttcttctccaacaacgccgcggggccgttcttcaccgccaccggcgccggcgtggtgggcctggcgccgccggaggaggccgtctcggccggcgacggcagcgtgcagcacatctacgacgcgcgccacggccgcgtcctgatggacggccgggaggacaaggagctcctcgtctgggaccctctgtcccgccgcaaggacttcatccccatgccgcccggctacttcgtcggagagggctacggcggcggcgcgttgatctgcgaagccgaccacggcgccggcgacgactgccatgccgcgccgtaccgcgtcgtattcgtgtactgcggctcggatcggccccccaccaccatggctagcgtgtacagctccaggaccaacacctggggccccgtggccaccatggatgctcgcgtcactttcgagctcaagcaacccgctgtgctcgactataccgtctactggttggtaaatgggaggacccaaatcattgagttcgagttcgataccaacagcctagcactattcagaacaccggtggatctcccggacatcgtcgtcttccccatggaagacgggcggctaggctacactggtatgatgggcccaatcgtcagggttttcgccatcgaagatatctatgaagacggtgatgccacctggacaaaagttactactcttcatctagatgctatgcggccaagccagtcatatcagcaagttcttgattcggacacagactctgactccgatgatgaggaggaggttgtattattgttggcacatcagtttggtcccaaggcgaagaaggatagcaaaatcattccctcgcacccgccaactattaagagtgataacgacgaatataaccatgtcgtgatcaggccaagagttatcgggttcatagaggatcctaactcaatcttagttcgaaatgagctaggtgtattcatggttgatattgaatcaaacgaatacgagcagttatctcagaggatctacttcaccactgtctacccttacgagagcttctacaccacagttggcaaagcaaatttcaatgatccggtgctgattgatcatgagaacaacgatgaacaaggtttacaacagcttgaacccctcaatgatacaatacttccagatcaggagaacattggtggagggattagtgcttcaggtgatggagacgagcagtaa

SEQ ID NO: 58056 - DNA, 131 bp, Oryza sativa
  Clone ID: PAT_MRT4530_59808C.1
cggccctatgcgacggtcagaccgccgtcttgcggccggtcagaccggccatggcacgccggtcagaccgccactatgtggccggtctgaccgtccctggtcaggcggaacccagtcattacccctcttaa

SEQ ID NO: 58057 - DNA, 813 bp, Oryza sativa
  Clone ID: PAT_MRT4530_59809C.1
atggcggcggggaaggaagggactgtaaataggaccaaccgaggctggctagtcgacgtggcgggggtggtggatgaggaagctaaggaggtgcaggccgtggaagcggcgaaagcagtagaggaaggcagcgttacgggagtggtcgggctggtgaaggagctggtggtgtcgaggttttcagctgtcggggtcaggtcgacgagtgcggtgaagttgtcgtcgttggtcagcacggtggctggcaggagaggagcagcaagtgacggtgttcgggggtggagcggctgcccattgttcaccgcgagaaaggatgatggaccacaggctactaggctagtcaggtcacgcttcgcacgagtgcttctccctcacgtgctcctcaacgtttacacagaggtgacagagcagaacagaaaaatgaaacaacagagcaccggtgttgcgttcttccattcactgagaatttgtttcgtggagggagacgcgacgcaagcggcgttacgggtcgagagggaaagcctccccgccgttggtttccttttcctctcctcttcctccccaacccgcgccgtgccgcacggcccgcgccacgccaactcgatcggtggtgactccgcctgcctccccgcgcgcgcgcgcgccgctgccctccaccttccacctggcagcagcggctggcatggcatggacgcgctcctctcctctcccttcccccgcaacgcaacgcgacgcccgggcgcgcacgggaaaccgacgctttcaccgcgaggggggaggggaaaagcctcgccctccgccctcgccgcctga

SEQ ID NO: 58058 - DNA, 2053 bp, Oryza sativa
  Clone ID: PAT_MRT4530_5980C.1
tttcgtctccgccgcgtccgctcctcttccttccatctgaccaccaccggtgacgacaccgtcaaggatctccacgacccgcggcgagaggacgcggagggcgacgggtgggaggaggtccacgagggccccgagtccgaccccgaggagtacattgcgttggtgtcggaggacgcgggcacgcacctgccggtgcgcacggagccgcgacgcatggatccgagcaagaaggaacctgacttcttcactgaatatggtgaagcaaaccggtataaagtcagtgaagtcattggcaaagggagttatggtgttgtggctgccgctgtcgacacccagaccggcgagcgagtggcgatcaagaagatcaatgatgttttcgatcatgtctctgatgccacccgcatccttagggagattaagttgctccggttgctgcgtcacccagacatagttgagatcaagcacataatgcttcctccttcaaggagggaattcagggacatttatgtaatctttgagctaatggagtcagatctccatcaggtaataaaagcaaatgatgatctcacaccagagcatcaccagtttttcttgtatcagctgctccggggaatgaagtacattcatgcagcaagtgttttccatcgggatcttaagcccaagaatattctagccaatgctgattgcaagctgaaggtttgcgatttcggccttgcccgagtgtcatttaacgataccccatcagccatattctggacggattatgtggcaactagatggtatcgtgccccagagttgtgtggctcctttttttcaaagtacacccctgcaattgatatttggagtgtaggatgtatatttgcagagctgcttacaggaaagccactctttccagggaaaaatgttgtgcatcaattggatctcatgactgatctacttggcactccttcagcagaatcccttgctaagatacggaatgagaaagctcgacgatacctgagcaacatgaggaaaaagcctcgggttccttttactaaaaagtttccaggtgtggatcctatggctctccatttgcttgaacgccttcttgcttttgatcccaaagatcgtccaagtgcagaagaggccctgacagacccctactttaatgggctagcaaactctgaacgcgaaccaatagcacagcctatctcaaagcttgagtttgagttcgagaagaggaaattggccaaagatgatgtccgggaattaatttaccgagagattttagagtatcatccccatatgctgcaagaatatttgcgcgggggagaccagatgagtttcatgtatcctagtggggtggatcgccacaagcgtcaattcgctcatttggaggaaggagttttaaagggtgaaaaatccagtccacagcttcggcagaatgctttcttaccaagggaaagagcaattggtaacaagcatggagatgacgagtaccacgcaaagctgaatgtaggcgagaagccatgccatgcatcagtgacagacggcattagcaaaccgctcatgagtgctcggagcttgttgaagagtgaaagcataagcgcttccaagtgtattggtgaaaaaccaaagcaagacagagatcaggaggattcccttacagagaacatggacgaaacagctgatgaggtctcagaaaaggttgctcaactgaaaacctgatgattcccgtcaaggtcacagaatcgatcggagttagtacaacagcatgtgtatagatgcccttccccagaagacgagaatcccagatcaggacggtcttaaccatgataaagagtctacaactaataataccacaagttgttttggtaacctctgttgtactgtaaatttttcccccttcagttttgtgttttgacagcaaacaactgtctaactgactggttagttcctcgtcttttcctcgatgggacaatcaccgatcctgtaaaatttcctttcttttgatgacagaatcatacactgtttctatgatatattttaaaattttgccgtcctaatacttatc

SEQ ID NO: 58059 - DNA, 202 bp, Oryza sativa
  Clone ID: PAT_MRT4530_59810C.1
aagtcacaacgcacgcctagaacccggcggagtgggggtgggtatgacccgtcacgtccgagcatcactcaaggaagggctgtcactggcggggggcggcacctggttccactcgagaaccggttgttgcttagcttccgggagaaggcacggtttaaagcccaggaaaagtgtagtgggatccccctccgatagagggtag

SEQ ID NO: 58060 - DNA, 395 bp, Oryza sativa
  Clone ID: PAT_MRT4530_59811C.1
attatatattttttatttctaatatgaagaaaacaaaaaagataatgtgttatcctaacaggaaagagggaaaacacaaaaggggggggggggccgggggggaatggggcggggggcaaaagcgcaaccagggccggagccggggggaggaccgccggcgggagcaaacagaaaaggggcgcgcgccagattccggggagaggcaagagcaccaaaccgtaccccgcgggcgagaagccctaggccggggacccgggcaaccacccacaacccgggaggggcggcggaccagaccgacagcggccacgagccaggggcaagggagcatcaaagcgggtagttgcaagaaggggagcagcgggaggccgaacggccgccggaccaaccgattaaag

SEQ ID NO: 58061 - DNA, 515 bp, Oryza sativa
  unsure (1)..(515): unsure at all n locations
  Clone ID: PAT_MRT4530_59812C.1
acagaccacaaccaacggggacacaggtttattccatatataaacagaacaggggagaacagttcacattaggggggagacacgggtaaaaacccccaaccgagcaggcgcatggccgctacccgcggacggggctgcccatgcccacaaagaacccgtcgatgtccctgacgaacccgaccttttggccccagtttttttggtccggggggctaaccggcacggggccgttgtccacggcccgccggtaccccgcgtcaacgtccgggtagtcaaagaaaatttccaggggcccccgttcgccggccgagtccggaagttgcaccgggcccgtaagggcgtccgtttccctttggggcagggggggaaacgcaaacgttgtngtcccgttttccagctccgcccacttgggggaatggtnaaggggggggacggtgtagccgaacgcgggggaataaaaggggggcgaattggaaaagtccttgaaataaaaaagggggaggggaacgccgggc

SEQ ID NO: 58062 - DNA, 272 bp, Oryza sativa
  Clone ID: PAT_MRT4530_59813C.1
acccaaaacaaaaaaagaaaactagtgagaaatgctacaactaaaagaagacttttccttaggccactatagaaggttttctatcacctgtcctccttggtccaactatgtcgagaatcgatgaagagcgggcccagcgtcaccaaacgggtgtatggtgtgtattcttctcctccaaagttgcaatcttgcctctgtgtgtgtggtactgtagcggtgctctttctttggtgggtgccacgtaggagaaacccagcaggagtcatttccaa

SEQ ID NO: 58063 - DNA, 171 bp, Oryza sativa
  Clone ID: PAT_MRT4530_59814C.1
atggcggttgtggagtgggcacgacaagcccggcggggaaggagcgcggcggtggctcacagcaaacgcggcctcgagctcgacgactgcccaattcacttgcgcaagggagaggacgaggacggtgccggacggagccacgcccacacgcttcaactgtgccggtcctag

SEQ ID NO: 58064 - DNA, 1771 bp, Oryza sativa
  Clone ID: PAT_MRT4530_59815C.1
aaactccctcgcctccccaccatcctccgccgccgccgccccccgccctcgccgccgctccgttggaatccggatcttccttcgtcgagggggtcgcgtcgcctcgccggcggccgtcgcgagcatgtcggatgaggaggtatctgacccgaaggcactcctagaggatcgatcgaaggctaagtgtgtgtaccaggggagatgccctatgaatatttcgtcagtcgtcttccggcaggcgaaaaaacaaaaaagaaaaagacccccggccgggacgcagcgatctgaagtgaaacagcaaaaaaaatcaaacaaaaagaaaaaatattccccatctgtgaaattcgcaaaaccctagcgcggcggcgatgtcgaacacgagggtgttcttcgacatgaccgtcggcggagctccggcggggcggatcgtgatggagctgtacgcgaaggacgtgccgcggacggcggagaacttccgcgcgctctgcaccggcgagaagggcgtgggcaagagcggcaagccgctgcactacaaggggagcaccttccaccgcgtgatcccggagttcatgtgccagggcggcgacttcacccgcggcaacggcacgggaggggagtcgatctacggcgagaagttcgccgacgaggtgttcaagttcaagcacgacagccccggcatcctgtccatggcgaacgccgggcccaacactaacgggtcccagttcttcatctgcaccgtgccctgcagctggctggacgggaagcacgtcgtgttcggccgcgtcgtcgagggcatggacgtcgtcaaggccatcgagaaggtgggatcccgcggcgggagcaccgccaagccggtcgtcatcgccgactgcggccagctctcctagatctgtgctgttccccttcgcctttcgccagtatcagtcgtcttgagtcgtcgagtccctaaataaggaggaggtggtggtggtgttagtctttttatgagttcgtgtcgtgttggtgagatgagatcgcccatggtttggttggattaggcggagttcttggatcgattcggtggagttggatctgcgatccttcttggggttggttttaaatcttaattcgtgtcgctgcttctatgatatcgctatcaatcaatgagaacatttgggatccgtggattttctgtgatcaaaaaaaaaaaaaaaaaaaaaaaaaaaaaaaaaaaaaaaaaaaaaaaaaaaaaacaaccaaaaaaacaagacaacggactcaatctgcccctccggtgggtcccggtcgactccgccctaacctccccctctcctcccctctgctcctttcctcacgacgttttatctcacttttctattatttatttgcttcgtttctatgtctgtcgttctctgatctgtattttccgatagaccgcgctatattttctttaactctccctatccttttataatcatttctccccagatattcgagctctccaccgttctttctctcttattatcccatatcctcttatggacgcgtcctccctctgccctttgctattttctcccctcgtccccgctgtgatttgtgtttgcttatcggttttgttaattaatgcccttttatctgctttttcttctttttttcttctgctctactaattgtatttcgcccgcattatattgttgttactgcgccaatatactatgggatcaaaaaaaaaaaaaaaaaaagcgctctacgagtgatacagagctcacgtcatgccgtgcagcgtgcgtca

SEQ ID NO: 58065 - DNA, 856 bp, Oryza sativa
  Clone ID: PAT_MRT4530_59816C.1
cggcgcggcgcaggggacacgacgcacctctggcatctcgccgtcaccggtcgacctctcccctcccctcccctcatctcccctccgggctcccgtcctgtcccctcgacctctccttcccgagtcccgagctcgtcccctccacctctccctccggcggtgcaaacgacgcacggggcggcgcacaggcccggacgcccgatcacgcggcaaggacgcggcggccggtgaggttgcggcaagggctcagcaactggcgaggttgcagcaagggcgcgacggccggcgagacagggaagggcgcggcggccggcgaggttccggcaagggcgtgccggccggcgaggttgcggcaaaggcgtggtggccggcgagggtgcagacgcggcggagcagaggtgatctcagggcggtcggaccaatcgatctacaccggtcaaaccgacggcatcaggacggtcagatcggcggatcaatctcggtcagaccgatcttcatcgagtttgaggatgaaattaaaaaggaagacaacgaccccggcgcgttctaccttgtctataaaatggcaaccatcctaagccggcctctgagcacaaggcttgtcctgctcagcttcgcggccttcggccgatctcgcacgccgagatgtgatggcgatggcaatggcagccgcgcagtggctggaatattagctggagcaccttgtcaagggggcaaggcggacatgatgacatgggagaaggcggcgatgtttcgattggattaccatagaggcctatgctctacacaaaagtgtaggacggccatgttccagccgtcagtaccgtctggtggcttcggcggcaagaagtcatga

SEQ ID NO: 58066 - DNA, 577 bp, Oryza sativa
  unsure (1)..(577): unsure at all n locations
  Clone ID: PAT_MRT4530_59817C.1
gcgcgttggccgattcagtaatgcagctggcacgacaggtttcccgactggaaaccgggcagtgagcgcaacgcaagttaatgtgagttagctcactcacttaggcaccccaggctttacacgtgttatgcttccggctcgtatgttgtgtggaaattgtgagcgcgataacnatttcagcacacggaaatcagctatgaaccaatgattacgccaatgcttctaattcagacatcactaataagggataagacctgcgtacgcctgacacggtatccggtccnggaattcccgggtcgacccacgcgtccgaaaatacggtacgctaggtgggtaggcgaacttagcccccacgtttccctgtcctagattactaattactatatagagagggnttgcaaataataatagtacaaggtaatagtgatacgtacttaggaggtgttatatctgtgatacgtaccatcagaattgtaatactgtacaatttgtacaccgtacgttcgaggtattttgcctcacgtaggcgtttgagaaaaaaaagannaaatttaaaagattttaaaaaaaaaaaaaa

SEQ ID NO: 58067 - DNA, 342 bp, Oryza sativa
  Clone ID: PAT_MRT4530_59819C.1
atggcgttgacaaatggggtggagcagctgctgtcgatgcgtcgttctggtgccggaaagggtggccgggatgggcatgcggctgggggaaggatgacgcggatgcagcccagggagcaggtgaggctccgcggcctccgcttcctcgacaagacgtccgacgggaaggaggggtggaagtttgtcaagcgctgcttggacgagatggccgccaccccaaggagagcttcggcaagtgcattgctaccagaacgacggtgtgatccagaaaccgtaaattcaattcccaaaaagcgattagctgttgctaacaagaacagcaaaaatatcttgggtaaatag

SEQ ID NO: 58068 - DNA, 354 bp, Oryza sativa
  Clone ID: PAT_MRT4530_5981C.1
tttggggttgtttaattatttcttttttttctccattttttttttttttttcctttaatttctaattttcaactttgggggtcctcttaagccttttttttttttccccccaaaacaagggggaacaaaaaaaaaaaaagccccctaaaaagcccccccaacccccggaaaaaaaaacaactgcgggggggtttgccaccccgccccgtttttttccaagcccaaaataaaaaaagaagaaaaaaaaagggagaggaaatacggatgtcccacagggggctgggctcttgagatccgatcatcaggtccggaacttggagtccctttaagtgcagccgaacctgagagcccccc

SEQ ID NO: 58069 - DNA, 572 bp, Oryza sativa
  Clone ID: PAT_MRT4530_59820C.1
ccgggctgcaggaattcggcacgaggccaaccaacccactctcctttcctcctatccattacccccacatttctccccaccgagaccaccacaatttgccatatgcacccacacatctcaatcgatattagccccaatacatccatttgctgtagcaaccaacccaatacagctgcagcctgcagcagcagcagtagtggcgtagtgtaggagtatagtagtagtgggagtggtagtaccagtattctttcggctgtggctagctgctcgtgtttgctataccaaaccctgccaatcagttcgttcttgcacctactgcactagctttctcctccgattaaggctggctcgccgcgagtcagccaggcaggcaggcagatcagttcgtcaaccacgagctaggttgattggtagctagcagctagctccagccggcgaggaggaggagcagacattgattcgattccaagatcgtatcagcttagctagcagtggctagctagctagtcatgagtagtagcggcaaggagcagcggcggatggaccggttcatcgtgatccccttctcctcc

SEQ ID NO: 58070 - DNA, 624 bp, Oryza sativa
  Clone ID: PAT_MRT4530_59821C.1
atgggaggagcaggagcgctgctttgtttgtcgtcgtcgctcgcgtctcctctcctgctgcacccctgcacagcagcgtcgactcgaggtcatcgtcgtcgcttcgcctgtgtttaccacgacctggtccaaagacacgatgctctagctctactcgccgccgtcactgacaccgagggtcacatccacgtcttcgtcctcgtggtgataaagttttaccgtccccgcccccgtcaaccacgacggggctatattttctccggccctgatccctacgtggtgaatttatccccgcggttatcccgtccccgtcaaacaacatattcatctgtaggggaatgggcaatcggcatggagaatcggtggcggcggacggcatgctggcggtggacggcgctggcggtggagggcgtgctagcggcggagggcacttgcgacgaagggcgctggcggcggacgacgctcgcgatgacggctgcaggctccgggcggcgcaacgacagcggcagacatcgcgcccgcgtcgtacggttgggacgggatagcgcccgcgtgagaggaggcggcggcgcacgtgcctggtggcgctggtgcgatatggaactagggattggggagattgac

SEQ ID NO: 58071 - DNA, 1797 bp, Oryza sativa
  Clone ID: PAT_MRT4530_59822C.1
cccactcttccgataatctctctcctcctcaccgccttatccccttcatttccctcttcccgcctcctcatccacctccttcctcgccgccggcgaatgcctccaccggcggggctgctcccctggccggcgccgtccgccgcgcgcctggccgccccgacccggacgcgccctcctcctcgcactcgcgttcgccctccaccccctcccgctcctcccccgccgccaccgcctcggctcgagcccgtcgtcgtcgtcgcgccgagcacaaccacggccaccgcgacgctgcctcccatcatcacccccaccttgtccccctccacctccacgtgcctcgaatgcgtccacttcaactcgtgttcgggttgcacgcacgaggtggatctggacaagccgccggtgctgcaggaggtggagaatttcttcaagggtcacggagttggagatttcaccttcagcagaggcaggctgagggagtggcggtgccgagcaaagctagctatacgtggaacaccacagaacgttgctatgtccctacataaggcatatacggccaaaagtacacatataaaggtgaaaaatgataagaggccatggaaccttagaccaagtgaggcagctgctaaggctgataatacagcaatgtaaggaagtagtgaaacatggctagaaactcttatatactttatctgagaatgggacagttttaagaaggagtttcgtaggtttggaatccaaaagattagcgattcgcaaattcagagaacttgtgcttgttgtcataaataatttatggtcgtaattgtagacatctcattggggagaacgacttatgggagcgttatggtggagttgatatttctctggatccttatagctttgggcaggctaatactttgtcttttaatgcgttactgcatacgttgcacaaatatgtaccacgtgggtcaacagttgttgacctgtattctggtgctggtgttattggattatctcttgctgcttcgaagaaatgtaggtctgtgaaatgtgttgagattaacaaattgtcaaaaatgtcttttgaaaaatcagcaagccgacttcccccaaacctgggttgtaccataacttggcacaacactgatgcttcagttgaacctgttcattggctcgaagggtcaagtgttgttattgtggatccacccaggaaaggattgcacccctctgttatctgtgctttacagaaagttgctttgtccgaacgcaaggcatataaggcgaaaagtacacttacaaaggtcaaagatgagaagaggccatggatcctaagagcaagagaggcagctgttcaggttgatagtacaccattggaaggaagtagtgaaacgtggccagaaactcttatatacattagctgcggatgggacagttttaagaaggactgcaaaagcttgatgtccagtaaggcttggcatttgcagaatgctcatgcttttaatttcttccctggcactgataggtattctgggctctaagtgctggcaatcttcaaacgagaatcggaagcagttcaaaagaaaaagaagaaagctaagaagaagaaagcccagtagacccccgaaaagctaaccttacagaaacaattttgctagatttggaaggctggaagtgacaagatctggtatacgtttacctgtgtaattaacgtgggtcctgaaaaatttaacaccctccaaccaggcatcaatttaatacccggaagattcatgtaattcaaagaacttgcccaattatctggtttagtttgtctcc

SEQ ID NO: 58072 - DNA, 444 bp, Oryza sativa
  Clone ID: PAT_MRT4530_59823C.1
tcttccgaagagggtcctgactgttctgaatgagcccagctgcaatggatcctcccgacccttgaccctggatcataatagcagagccctgtcattccccgtgaagatagttgagcatcgcatatactagaataatccggcacatggcagcacacatgatcagagcgctcatacccacgaaggcacctgcggttctcctcgagagcgatacaaggttcaaccttggagaatcaatcgtagatgaggatactgcttgcatgcttagcaatttccgtctcggatgtgtgtaaaacttggctcgggctctggcaataaaaggataccgacgcactatcgctggaccatgcacttcgcttccaatgagcattagttttttatctcggtctcgcacaactcggcatagacttgcctgcaaccctgtactttagacttatagattttctg

SEQ ID NO: 58073 - DNA, 533 bp, Oryza sativa
  Clone ID: PAT_MRT4530_59824C.1
ttgtttgggaaaatttgtaacctgaaaccaaacaattttgagcaacggcacaccagcaacactcgggatatcatctagtttgtttttttttacacttgcaaccttaaactgcataatctatggcttgaacattggaggcattctcactttggtaacctgctcgaaggcataagccatctcaattagcctcggctcgtaccccttcaatccaccgaagcagacaccaaaggggactcctttctcgtcgtaccctgccggcacaaccacgccggggaggccatggaaggcgaggacgacggcggcggcggagtccggcgtcacgatggcgtccagctgatgatcggtcatgagcttctcgaccccattcactgacagctcgttgagacgacggatcgcagccttatctgcagggccgatcccggctgtgttttcagacatcagcaagatgctctgtccatgctcttttagctcctcttcgacaggatgtgcattggtgaatgcaattttttcagcgagagaacgaactggcgagt

SEQ ID NO: 58074 - DNA, 304 bp, Oryza sativa
  Clone ID: PAT_MRT4530_59825C.1
ccggccgggatttccagttcactcattttctatagtgggcctgggctccattgccggcccattgactgcgcgtcgatccccattcccccatggcgccgccgccgtcggggagcctcgccgcggcggcgaggtgagctgctgcgcccgcacctcctgcctcacgccccggcgacgcggcgtacttcgccgccggcggcaagcacctcgcgcgttcgatctggccgtgctcgccgcgctacggcgtgttcttcttggtcgccgacttgccgccggtggaagcagttgaattgtatgacggcgcctc

SEQ ID NO: 58075 - DNA, 230 bp, Oryza sativa
  unsure (1)..(230): unsure at all n locations
  Clone ID: PAT_MRT4530_59826C.1
tatgacttcgcattcactcttacgtgagcttaaatcctctacatctaccccccttttttttttttttttttaaatatatatatcctnatcttttgtgtatttcataaacatatgccccacccaacaacatatactcatatcaaatactactcttacataaattcccatttatatcaatttaaacaaaaacaaaatcatttcacaccctttaaaatcaaaaaaccatgaac

SEQ ID NO: 58076 - DNA, 331 bp, Oryza sativa
  Clone ID: PAT_MRT4530_59827C.1
atggcacgggccagacctggtcgtgtccggtacaagatttgtcgggccggcacatcccaacctatatgtcgggccagcccacgtgctccacctctgtgccgtgccgggctggcccgaaggtacgggcaacccatctgcgaggcaggagaggaggagggtatcggcagccggcgacgggcgacacgacggcggtgggggatgagctgcggggtgggcggcgagggaggggcggcgtgcgggtggcggcggagcaacgcgcgggagcgggggaaggagcggtgcgcgggctcccccatcggctgccgccctcaaggcccacgaggcggcggcg

SEQ ID NO: 58077 - DNA, 1235 bp, Oryza sativa
  Clone ID: PAT_MRT4530_59828C.1
ttttgggttttgttgatagtgtagtatttattcacttattacttcattgaatccaaattatgtgcagaaacacacatattttaacacaacgaattgaacaagaccgatcgatcgatgtacaaacagaaaactggcaaacccaacgaatcactcctttgcaatttatatacgtgtcaacacacacattttcaatcgatcgtgtatacacaatctacaaatggtccgtagtcgtcgccgtcgtagtgccatttttctcagttgaagacgtcacactgcttccggatgttgcccttgccgccggacttgaccccgacgcggccgagcttgacgatggcgtcggcgaaggccttgtagaagtccggcgtgctggccgccagcgagtccaccgtcggccgcgtgcggttgtcggtgtagagcagctcgtcggaggcgagcaagccgccgccgtcctgcaggttccggtagtactggttgtcgaagagcgccggcgtggcctggtccatgagcaccatcatgtccggcccgccgtcggggcacttgcccttgaggaacgccgcgtacttctcgttcagcgtcgggtccgtcggctgcgacggcgggttgtagcggtacagccggtccgagaacttgctgcagtgcgccagcccgacgctgtgcgccgctgagagcgcgaccatgtcagacatgttgaggccgttggatttgaagatggcgacgagctcgctgagggtgttgttcggctgcggcagcttgccggcgacgttgctggcgctggacctcatgccgtccagcctgcccagctccaccgggaagaatggcccaccgctcagggcgatggcgtcgcgcgtggcgatggcgagcacgtcggtgcaggagacctggtcggggcacgcggcctcgacggcggccttggcgctcctcaccgtctcgaatccctcgaacgccagcgagaggttgtcgggcgcgtccctctccgccgtgttgcccgccgtcgacgtgatcagcaccgagccgtcacacccatcgacgaagcagtcgtggaagaagaggcggacggtggagccgatggtgcggatggtggcctgcatcttgtccttcaccacgccgagcacgatgctctcgacgttggggcacgtgctgttgtagtagtccgtcctcaggtcggacgcgccgagctgcgccacggcggcgacgacgagcagcgccatccaccacgacgacgacggccgagccat

SEQ ID NO: 58078 - DNA, 684 bp, Oryza sativa
  unsure (1)..(684): unsure at all n locations
  Clone ID: PAT_MRT4530_59829C.1
cggnaattcccggcctcgacccacgcgtccggcacaacactacagggacacccaaaaacggaaaaacccaatcagatcacttcacccacagcacacggcaaaatttctccatcgatcgatcgatcctttgcaattgcaagagcggcaggcatgtcgagcaccaataccacaagcaacgaccccaagacgaccaaggatgaattagctccgccggcaccgacggcagcggagcatggaggcggcaaggacgcggtgacgaagacggtgcagacggtggaggtgaaggagtcggtggggcaggagccggtgctcaagcccaccaaggtggtgcaccagatccccgccgaccaggccaaggacgcgcccaagcaggattaatccagtctgcatctactgcaactctactagtactagtacctttgcaccttgcagttgcagtcggtcttgcagatatgttcatggacacgccgagtttggtttagttagttttctgcgaatgcgtgatacccacccacctcttgttcttgaaaatgttttgtattacatctgcttagcacttacgtgccgcagctaagtgtctgtattgtttgttacatatcgattaactaatgtggcccccaataataatataataatatactgtcaaaaaataatataatataatatacaaaaaaaacgaaaaaa

SEQ ID NO: 58079 - DNA, 1948 bp, Oryza sativa
  Clone ID: PAT_MRT4530_5982C.1
cctagctcgctccctcctccaaatccgcctcattcaaaccggggattccaaaattaagtggggggttttttctcccccctccagtaagagaagcttttgagaagaggtcttaggtggagtcctggcttataccccagttgagcgcctgtgaagatggagccataggcccgctagtccgctgctgtttatttttgattgtcaggccttaagtgcctttgtaataacgtaaatattatcgaccccgtgacacagccggaggagaggacgacgctgcgacgtcgacggaggagacagcgacgtcggtcggtgctcgggcacggcggaaggggctgccggaggtggtgcagtggcagcaacgccactgtttaccggcgaggacgcgtctccgatggtttccccacgaaacagaggcgacgtcggggaagaggatgcacttgacttatccctggttgcacctctagctgacttcgactgggttgcggcacttgaagatggggcttcagttcgagaacttctcatagttcatatcttgggtgtcaactttctcaaccaagtactcttcactctgagagttgtggatgcttctggtggcaatgtggtccttgggcttgctgcctttcagagaaacaggtatggcgtttgctccagtgaccacaaggcgagtgacttgtcttcttcttgcataatgcccggagtgatggcgcaggttacgcttcggttgtggacaatctctagagaaatgacctggttctttgcagttgtaacaaatcaacttcttctttactgagctgtccgtctgggaacgatcattctgacttggagttggaattggtggttggaaatccttgctaacattggcatcagtggtaccatagttgctatcaccattggattctttctcagagtcacaattgctagggttgtcattctgggtgccttcattgatactatcgtcgacatcttggtgaatgttgttgacattgcacgcttgattcgagtggtcactaatggggcaagaaccatggttggtggtggtatcatcatcattagtattgctaatgttgttgtctgcattgtatccatcttcttggggcaggaactcttgatgcgcaacagaagatccggtgatctgaagtggctcagttcgctgtctttggttaccacatggaattactgggatgttgacaatccttctcttgcagttcttcatctgattatgctcactttcgagttgtatggctttgtccagaagtttctcaaaatcttcataatcctctaggagtagttgcactgcaagctcatcttttaacccctggagaaacttctcttgtttatcttcatccgtttccacatcttctggtgcatagtgagccaaacgatggaactcgtgcaggtactctatgacggtcaaatattcttgctttaggtagcggaactctcattttcttagtgtgatcattcctgcgggaacatgtgatctcttgaatacagctaaaaactcgtcccaagtgatggtatgtccttctggccgtgatacttcgtagctatcccaccattctgaagctagcccaaccaactgatgagttgcgaagacaacccgctcctggtctgtgcactgaatcaaccccagattcttctcgactgtgcgcaaccaatcattggcttccataggatcgacggcaatggcaaaggttggaggcccagttttgagaaattctgataacttgcactgttgctggactataggtacttgaacgttggttgcccatgctgggttgttccgattctgtaatagttgaaatgctgttgccaacatgttggtttggttaaccacaatttggattagctatggtaaggtttcgttgatgcttttctcattcccattggcttgggttcttgagtcatcggatccatcattcccatagcctttgttaccagtgttatccat

SEQ ID NO: 58080 - DNA, 282 bp, Oryza sativa
  Clone ID: PAT_MRT4530_59830C.1
gaatatatgtagtagataatatataggtataagaccaatcatatcactggtggcttggttccaataataatagtgtgcagttttaaaatggactatgtcaccaatatataaagatctaacatattatatatcggacgcgacttgcgtccacctaatcaccgtccgtgacctggacgcatacgaaattgccttatgctgcgtaaagtaaaagctagacctgatcattgatatagctcaaatcggaaggagagcacactacctgcactggctgacacaaactac

SEQ ID NO: 58081 - DNA, 440 bp, Oryza sativa
  unsure (1)..(440): unsure at all n locations
  Clone ID: PAT_MRT4530_59831C.1
gacggtcnatgacgcttcgccgcagcgcgcctctccccgtccccgaacgcgccgctcaccggcgcacagggggaggtcagaaaagactgcaggtccgtcaactctagctaagctcgactagctagtagtacacatatacatacatatatgatcgatgtaaaaataattgaggtacgttctatgagatcgatcggtctgtgaactaatcgatcggcggcctctatctgttggcatcgactcctccattggatctttgtatttttctcaacttgtatgtacgtacgtatgtatgtggggttccgtcgagtcgtgtgtgtccgtgaccgtaactggactcaattattatggagtaacataatatatattgtatgcgtggcgttccatcgttaaaaaaaaaaaaaaaaaaaaaaaaaaaaaaaaaaaaaaaaaaaaaaaaaaaa

SEQ ID NO: 58082 - DNA, 524 bp, Oryza sativa
  Clone ID: PAT_MRT4530_59832C.1
cccctgtcacacattatgcctcacaagattcaaacagcattataaggtctgaacatacatctggactgccagtgtgagtggctatgatcttactgttctgtggaagttccctgattctgttaacctgtttgcaaggtcaagacataaaatgcatcaaccatccggatgaacaaattagacaaagtgtcatataactacagttcaagtacgaaatcaaactgaggaacaggattaagaagcctatacatagttgcaaacatgtaaaaaagagactaacatgcgaataggccatcttcaatataaaataaccattacctcaccaggatgaactatagttttgtacttatttacaaaaggtgaccgtgcttcctcattgaactgcaaaaaaaaatgtaagtatctggtgggtaccatcatactcccccccccccccaaaaaaaaggagatgcagctgtgatgcctaaccgagctggtgacggatcaatgtaacactaaggacactctgaacacagagtaacattact

SEQ ID NO: 58083 - DNA, 201 bp, Oryza sativa
  Clone ID: PAT_MRT4530_59833C.1
tgggcagaggcacagtgcagggtggtcagttctgaggggtggtaatgcaacttatcacagtcaggggtgatggcaagcagcacagtgggggcaaaagttccaccagttcaggagattcagggacacacaggcacaagaacaggcagcagcagcagtgtggctatcaggcaacagttcagactcacagcacgaggaggcaca

SEQ ID NO: 58084 - DNA, 336 bp, Oryza sativa
  unsure (1)..(336): unsure at all n locations
  Clone ID: PAT_MRT4530_59834C.1
ctgataggctaggagcactggtaccttgtggtactgatggcttggcccttgccattcctcaatgngttctntgatccttaacaatctgcaaatcttggttttggagccacttcttcccttgtcctactctaaagaagcaatgatcattaaanacccntntgatggagaacatgaggactctattgcattgatacaaggaagcagccataactacaccagtcttatctgattgaatgatgtactgaggaccatgtaacatagtgaatgatgtagcctgtgaccctgggtattgtatattctcataaccccanccatttgcaaaaaaaaaaaaaaaaa

SEQ ID NO: 58085 - DNA, 377 bp, Oryza sativa
  Clone ID: PAT_MRT4530_59835C.1
ataagaacatgggagtggattatttattgagcaggtgtatatattctttctgacaaatgaaagctctattttttattttccccacagaaaaaaacacacaggtagctttattttcccccgaccagttatcgcccccccaaaaaaaccaacccatttttttacaccacccccacaattatcaacccccccttttctttagcatccacagacacctggttcgaccccggaaaaaaaccaccgcgacctgcaaaacccacccgctccccctagagagaaccccattacagcccgccggaaccacccccatagctcccccctaaattaaagcgcgatcccttgacaattccacaccttttacttagggggaagcataaaaa

SEQ ID NO: 58086 - DNA, 1344 bp, Oryza sativa
  Clone ID: PAT_MRT4530_59836C.1
atgccgtgcttctccagctgcccacgcagtccgacgccgctcaacatcagcagctgcaggccactcagcatcagcagctgcaggctccccagcgtcccggtgtggtcgcgtgcgccgatgggagcgccgggagagggctcggcggcgagcgggagaatgggcagggaagggtcgagctacggcctgcgggtggctgcggccgccgcccgccgcaggctccgctctccgccgctccgcgtgcctgctcgcccgtcttcgccgctagtagccgcgctcacccgtcgctgcctcccgcctgctccgctctccaacgctccacctgcctgcttgtccgccgtcggcactcgcagccacgctcacccgccgctgccccgtcctgcctgcttcgcagccgccgactccgctctccaccgccgccactccggccgctttgccgccgcggcgactgctgcagctctcccctccgcggcaagaaaatggaaaagagaagaggatgatgctgacaactgggcccttactatttccttctcacttactccagctcggcaagcagcagagaagcgacgacggaggctcgacacgaagtgtaggcaactgcgacggtggctcctcatgtggaggaagtgacggcggttgctcggtgctgcggtggaggcaatggctggaggtggctccgcgcggtgatgggcggaaggcagctcgccgcgggttggagacgacggtgacgagcaggccaagaggcgacgatggaggcctgacccggcttggctgcgagcaggcgactgggaggagttgcttgagccatacaacatccacatcctttttgcgccgcgccccagacaagcaggcagcggctccgcacgaggaggcaactacggtggctccgcttgaggaggaggcgacggtagctcggcatgggaaagaggtgacggtaggggctcggcttaggcagcagctccgcgtgaggaggagacaacggcagcgcctagtggggatcaggcagacgaggcggcgaacaggcaagaccgcagacaggcggctgccagctgcaacaggccactgccacactcccatcgcgcttggcctccgcctgaccgcctctaccgcgccacctccagcctccaccgcctccgcctccgcctctgcctccgcctccacctccaccgcgccgcctccagcctccaccgcgtcgccgccgcctccgctctccactgcgcggcgacgcctcttcatcttagtccccacgccgtgaagcgtgaagcggcggcgccgtaagcgtccagcattcttcctgactttactcgaggcgtgaagcggcagcgccgccggttgtgcccctggcat

SEQ ID NO: 58087 - DNA, 195 bp, Oryza sativa
  Clone ID: PAT_MRT4530_59837C.1
tttgtgtgcatagaagcagcattgatcaggaatcttgtggtgtacaaaactctttgtaacacttttgagagcacacgcattcacttttcacgggccaccattctgcataatctattccatttgccaaattcatgcataaaaggctcgccctgatttgtgctctagcatgaaaagcaacccccaaaccccaatatc

SEQ ID NO: 58088 - DNA, 423 bp, Oryza sativa
  Clone ID: PAT_MRT4530_59838C.1
atgaggtcaaggaaccccgggttgttcgcctcgacgccggcgaccgcgtcggcgaggccgtgggcgagtagcgagcgccgccgcgaacgtcgcaggtgggggcgaacaggacaacagcagcgtgcgacatgccattctggttctgccggggaattgctgaatggcacgctacaaaagatcaacggagatttgaaccacatgatttacgtaaagattcgtgtgcccaagttcttctcctccagctcccatgaagcaccggctactggtgacgacccgatgaacactagtggagttagggcaatgaggcaccaaagccatggggatggtggagggcagtcggccggggttggtggcaaggacaaagtgagcttatggttaggaggagatggtcggttgtggacgaatacaacggtggggagatag

SEQ ID NO: 58089 - DNA, 951 bp, Oryza sativa
  Clone ID: PAT_MRT4530_59839C.1
gagtagcaactaatatcacgcctttttcagtaataagttacagacttacagtaaagatcagctactgtataatgaatacaagtattatgattcatggccaaatctacacctatctgctgtctctcggtctctaagtgataacagctctcatttttggccttgctgatatttttacaacaattttacaaacaacgtaaaatacgaacccctaccataatgaataaatcaattgcaacccagactttcaacttctcagcagccagcacaacgaaaatataaaactcttgaggagaacaggggacctgtcgagatgaaaactcaggttcccatacgcttgcaaaaattgggtaaatcatgacctatatgcctgattgccagctcttggcgcaatggcaccttgattgtgagggcggaatgtaaaaccaagcagtgaaccagcagcaaatagtcggttatcagcattctatgcgcaatcttctcatctctgattgaagagtggggctggaagtcaatgtccggtacgctagcatccttatgtcctcacgagaacaatcccttgaaatccgaacaagttcccataaagcaccttcactaatgatatcctttgaatttacttcatgttgcgccaaatggcacagtgcaagctcaatgtgcctcctaattggagcagcttcattatttgcattttttacaatccagggaagcgcaccatcatcaattaataacgattttcccaccttatttccttgcgtagctgctctagattcacatttagcaaagtttgcgatgccacgtgcaacttgagcaaggacatcagggtgcccgcatttgaccattcccagcaatgctttgatgccaccttctcctctcaaccgtgtttgccagtttgtcattgcccaccaaggttggcgatggcccccggccaccattcttagagtttgtgcctcgtgc

SEQ ID NO: 58090 - DNA, 1200 bp, Oryza sativa
  Clone ID: PAT_MRT4530_5983C.1
atgccgcccccaatcgccgggaacggccgcgccaagtccggccgccttccattgccgccggccggattttccaccgccgttccgacctcccccgtggccggctccctcttctctcatataaaatgggatccccgcactccgttctaccgttttaaccccatcccgagcctccccgtggtctctagccccgttcccgccgtcgccctcctctttccttcgcgccggccacctccagccgccttcctctcctcgccggagcatcgtccggccgtgccgtcgcctccctcggctctgcaacaccgtccccttcaccggcctcaccgtctcctcgccggaaactcgccggaacggtgcccccgccggcaaccagtggcattggtgccactgtactccctccagccggctgctgttcatcgccggtgcgccgatcgacgccgccgtctcctccttcgacaccgcggcatcgccttcttccccggcatcacctcctcctcgcccgaatttcgccggaacgccgtcgcccgcgccggcctctccttcctcctcggcggcatctcctccggctgcccctttcgccatgcccgtgcatcagccggcgctgccgtcccctccctcggcatgccgcgacgtcgtcctcggcctcgcctcccctccgaccgaacaccgccggtgtccgtcgtcgtcttcaccgttccctctcgccggctcgtcgtctcgcggcgccgcctccgtcatcgtcatcatagcggcgtgttccacgtcatcctcgtccccgtgcagccgctgccggctgtcctcgtcgcctcctcgccggccccggtcgtcgtcgccctcgtcctctcgtcgttcccgatcgtcgtggcgttcgtccctccgtcaagccgttctcgtccgtcgtccgcgttcgtcaagcgagtcgctgcagccccgtcctcgtgttcgtcctcggctccgcgtcgtcaagcctcgtgccggccgcgtctcgccttcgcccaaggatcgccgccgaagccgtcccctcgccgttcgtctccgttgtgcccgtctgtctccgccgcgcccgttcgtcgttgtcgttcccacgcctcgtcgcgtggtggtaaggtttcctcccctcgctgccccgtcctcgccctttcggtgtcgcccgtgctcgttgtgcggtcgtcgaccccggtacccgtgtaccggtgtcggtag

SEQ ID NO: 58091 - DNA, 523 bp, Oryza sativa
  Clone ID: PAT_MRT4530_59840C.1
ctcgcattctccacgcgaataggagcagaatttgccaccgcaatcttcttctccttcttcttcttctcacctttttctgttcttgaatcccagtttcttgctcctctgaatcttcgatctttgattccttccttctcctccaatcctttgcttcttggactaagattatcccgtccaatcttttttttcttcttttcttcgcttcttgaaactatctctcgcgtcgatcgattcctcctccctcattccctgcctcgcgtggtcgagagctaagaaaacaaaattctcctcttttttttttctactttctcgccgatctttttttccttccagggcgatttgattgaattccatccgagatcaggaagaggaatgcagccggggcacggcggcgcgctgtaccacttcggcaccagcggcgccgccgtcgccgccgccactgccgtcacgcacccgctcgatgttatcaaagttaggctccaaatgcagcttgctgggcaaagaggaaacttagttggaatgg

SEQ ID NO: 58092 - DNA, 534 bp, Oryza sativa
  Clone ID: PAT_MRT4530_59841C.1
atggctgccgtccatggcaatggtgtcggagtaggcgctcttcagcatagaaacaacccgctcgctatcgaactcgactatggcatgtcggaggaggctttcgagctcggcggagcgatcgccggcggcgacacggcggcgccgtcgcccttccccttcgccggtgcgcgcacggccgtcgagtggctcctcggcggtgcctctttgcctctccccccctccgtggccgacgtcatcgacggccggcgacgagtcgttgttgaggaggaggaagtctggctggccatcgtcgttgtcgtcgcacgcttgacgttgacggcgggtttatggggtggagtggcggcggcggtaaacctcgtgtcttgtgccgtcccgtcctccacccctctttatatggcacagtgtgacaggggcccactagccattgggctgggcgcccccgatcaggcttccctagcgtcgacggcgagggcgcaggcggtcgcgcgcggaggcggcggcggccgtgggcatgcgctgaggcagcggcggtag

SEQ ID NO: 58093 - DNA, 549 bp, Oryza sativa
  Clone ID: PAT_MRT4530_59842C.1
atggcgtcgtctgaactgcggaggcgagaaagattttttagtccaaaaaataagaacctaagaccaagaccgtatcataaccctattaagcgttgcagctatgctgcagcagcagcaaccaacaagccgttgttctctgcagcaccgatcggctgggctagacagctgcagcccaaaacgctgtacccagttgaaccgatcagcccgtatattctaccagatgccgagcgatgcgggaaagaacaatgcgaccgcgccgctatgggggttgtggcctcacgcttggtggcctcgtgcgacgccggagagagctgtatcgtgctggagaaggaacctcctcgtcggagagagctgctaccgtgctggagagggaacctcgtcggtgcccctgcttgtcgttctctccgcgccgctaagctcgtctctccgatctgcgacggagagggacgtcacgccagcaccggtagagagaagggcgaggccgccgcgggctgtcacaccccaatttggcaccgccgtacaacggcacctgacaggagcgtgtcatag

SEQ ID NO: 58094 - DNA, 178 bp, Oryza sativa
  Clone ID: PAT_MRT4530_59843C.1
ccgcgcttttactattgccaatgcggggttggagtcgacacctacctttctcagatgatttttggagaaagcgcggttaagggcgtataaaaaatatcataatattggctccaacctcattctctagaagaacatctacggagtgctcgtgggggtgcaccatcgggcactgtattct

SEQ ID NO: 58095 - DNA, 855 bp, Oryza sativa
  Clone ID: PAT_MRT4530_59844C.1
atggctactgccgtcagccgcggcaccgcctcctccattgtggccgacgcggtgaccgggtaccacctcctcaagatcgacggctactcgcgaaccaagggcactcccaacggtgcagccctcacgtccgaccagttcgtcgtcggcggccaccgttggcgcatcagatactaccccaacggggacatcgccatgttcgccgattacatatcatttcacctcatgctagatgaaaatgccaccagcacgaagggtgtgaaggttaaagcccagtttcagatttgtttcgccgatcagaagctcggcaaacttctggacaccgagaagggtgcggatgtggttttcggggtcggaggcgagacgttcgccgcgcaccggtgcgtgctcgctgcgcagtcgccggtgttcagcgcggagctctttggtccgatgaaggatagcgacagggcaggcgttgtccgcatcgacgacatggaggcgcaggtgttcaaggcgttgctccgcttcatgtacaccgactcattgccggagatggaggaggaggaagacaccatgtgccagcatctgctcgtcgcggcggatcggtacaacctggagaggctcaagctgatctgcgaggacagattgtgcaagcacgtcggcgttggcacggtggtgaacatcctcacgctggctggtcagcaccactgcgacgggctgaagaaggcgtgcttacattttctcggctcaccagcgaacctgagtgctgtcctcgccggcgacggcttcgagcagctgagcaggagctgcccctctcttgtgaatgagctggttgccatgctggcgcctccaatccctccatcgagtcatgcttaa

SEQ ID NO: 58096 - DNA, 372 bp, Oryza sativa
  Clone ID: PAT_MRT4530_59845C.1
atggcgagggcggtggcgcgcacgcacggtcgccggcgacggcaaccggaggcgcgggaagcggcggcggatgacggcggcgcaaaggcggcggcacacagccgaagcggcggctcggcccggcacggcgctaggagggagaggaaggggaaaagagggggaggggcgcctcaccgcgagcggcggccatgggggtactcaccggcgcgcgaggagaagcaagctccggcggcgggatggaccggggaaacggcggacggggtggcgcacaagcttgcgaacccggcggcgtcgacggtgcggtgcggcgacggctctagcggtggcggagtgcggccggagcttggcggcgagcggcggatggcgggatga

SEQ ID NO: 58097 - DNA, 1048 bp, Oryza sativa
  Clone ID: PAT_MRT4530_59846C.1
caggctgcacagcccacccccgaccacccctcgatccgcctccgcctccgcctcgtcgtcgccgtcgacgcccccacccaccatggcggcgctcctcgcccggcaggcagcgcaggcgctccgcgcgcgccagatggcgcagctcgggccgtccgcgacggcgatgcaggggcacatccggacctacatgggcgcagggaagcccacgaggttcaaagaggatgaggagaaagagaagcttgcaaaggagatagcgaaagattggaatgctgtatttgaaaggagcatcaacacattgtttttgactgaaatggtccgcggtttgatgctgacactcaagtacttcttcgagaagaatgttacaatcaactatccatttgagaagggtcctttgagccctcgcttccgaggagagcatgctctcagacgctatccaactggagaagagcgttgcatcgcctgtaaactatgtgaagctatatgcccagctcaggcaatcacaattgaggcagaagaacgtgaagacggtagtcgtagaactacaagatatgatattgatatgaccaaatgcatctattgtggcttctgccaagaagcttgtcctgttgatgccatcgttgagggtcctaactttgagtttgctactgaaacccatgaggaactgctatacgacaaggaaaaattgcttgagaacggcgatcgttgggagactgagattgctgcaaacttggagtccgagagtctttaccgttgatttttgttactcatgataaggattcagcatttccctgttttactcaactagctgataaataagcaaactttgtatcataacctaaatacctggtaccatgcttttgtaccttggtccatcatttgttattttgtgccagggtaaaggtgcattaccatgtttttttcgatatcattgtactgttgtcgactcagatggcattttgaacaaaatattgtggttcagaatgcaccttttgttagtaaattgcttgcatctagacaatgcaggaccgatgcttctgtttttaaaaaa

SEQ ID NO: 58098 - DNA, 255 bp, Oryza sativa
  Clone ID: PAT_MRT4530_59847C.1
cggacgcgtgggcggacgcgtgggttctcctccccctctttaccttttcctcctcggttcggttccgtggttcgtctagggtttagtgggttgagatggcggcgccggatgtcgagtaccgctgcttcgtcggcggcctcgcctgggccaccgacgaccgctccctcgaggacttcttatacacctacggcgagagcctagacttcaagatcattaacgacagggagacaatgaggtcacaaccattaggcttca

SEQ ID NO: 58099 - DNA, 534 bp, Oryza sativa
  unsure (1)..(534): unsure at all n locations
  Clone ID: PAT_MRT4530_59848C.1
ccgggtcgacctagcgtccgaaaaatttaaaaaaaaaaaaaaaaaaaaaaaaaaaagaaaaaaaaaaaaaaaaaaaaaaaaaaaaaaaaaaaaaaaaaaaaaaaaaaaaaaaaaaaaaaaaaaaaaaaaaaaaaaaaaaaaaaaaaaaaaaaaaaaaaaaaaaaaaaaaaaaaaaaaaannaaaaacccttttaaaaacaaaaggggggggacttncancacattcccaaaaaaaaaaaaaacnnaacacaaaaaaaaacccaaccaatcccccttccaaacaatttcncacactaaaaacanaatnncaccccacatataccctccaataaaaccccactaatnncatcaatacccacaaaaaaaccnctacactacccaaccccctacaaacctctcattacccctatattccattcctttccccccactttcnccntctttcccccnaaaaatctaaatnnccccctccctnaaaaaccccaaattaacnctnnaaccaaacctcaaccccaaaaaactnnattannccca

SEQ ID NO: 58100 - DNA, 684 bp, Oryza sativa
  Clone ID: PAT_MRT4530_59849C.1
atggaggtggtccaattggcggtcagatcggcgatgtgcagggagtcagaccggcgagagtactgcggtggagaggaggggggaggtgacccctggccgccgcacgaccgagccccgcgctgccgcatagccccaccatgccatgccaacctccgcatcgcaccgagccgccgcacgaccttgtcctcgccgtcgcccggccgcgacgcccacggctggccgcagtgcctcactagtctctgcacccgccgcgccgccaccggccgcctgatcggccactgtggacgtgccgccgccgccgtctacaaccacggcgccgtcgccgtctcgccaattcccgatgccgctgccgttttgcgcccgcccagccacccgctgccgccacgtcgccaccttaccgaaaccgggggcacctcatgtctcccccacagccaccgctgccagcgccattccgcggccgccgctgctcagccgccgtcgcccaccgtcttcaccgccgccgcacaacgccgcgccgcatcactagccacgcgccaccgcaagccgacgccgactaccgagccgcccctttgtcgccaatcggagctcgacacccggcgccgccatttttattccattcgacgccgagccgtgccgtattcagggctgtttggttcattacttcaacttgccacacctccttag

SEQ ID NO: 58101 - DNA, 6213 bp, Oryza sativa
  Clone ID: PAT_MRT4530_5984C.1
tacataaaatttacgtaattgatcaatgttccaggaatttgctaactcacaaccatcgccgtctgcaatcttgaatgcacctggccgcaagacttgcgtgatcgtgtatggtccttcccacttaggtgagagctcgttacgccctgcttggctttgaacccgtcggaggacgtaatcgccgatcgaaagcgtgtgtgctctgatgcgcttctcgtggtattggcgaagggcctgttggtagctggctactctgacggcaactctttctcgatgctcctcgagtagattcacattgtcgctttgctgctcctcttgatcctcgtcagagtacttttgtactagtgttctctcgatgtcagagcatggcttctgaaccatacatgtggaagaagggtgtgtccttgttggatgtcgtcggtgtggtacacacggcccatagcagggtcttgattccttgtagtattatgccgttagccctttcgacctgtccattactctgagggtaagagaccgaggcaaagcagatcttgactcccagcccaatgcaataatcctggaagtcggcactgatgaactgggagatgttgtctgttatgatgcggtgaggcaatccatatctgcagaatatccctttaatgaatttgatggcgttgtcggccttgatttcccccgtgggcgtcgcttcgatccacttggtgaacttgtcgatcgccacgaataggaacctatatccgccctgtcctcgtgggaatggtccgagtatgtcgagcccccagcatgagaacggccaagtaagagggatagtcaggagcgcttgtgctgatagccttgtgtttttacatgtcgcaagagtctttgagggcggtcggccaaaagaacccctgttggaaagctttttcgactaaggtctggccagcggtgtgtgacccgcagatcccttcgtgtatgtccaggaggagatgtttgccgtcgtcggacgagatacatttgagaagtaccccgtttggcgcctttttgtatagatcgttgccgatcatacagtagatcttgacttgtctggataacttctcggcttctgtatcatcctcgggcaactcgtcgctacttaggaatttaatgagtgggatccgccagtcgtctgtagtctcgatgttggcaacggcgcgttctgcctctgtagcccctgagctgatgtcggggacgaccatgctatcttcgtcgtttgccactttcaccaatggctttgtcaggacgtctaggaaggtgccgggttcgagtggctctcgtctggacgcacgccgtgctaggtcgtctggtttgatgttgtccttgcggtatacgtgtcggaccttgattccatgaaaccttttttccagcttcctgacttctgcgaggtacttggataactcagggctagagcacttgtagtctttgtgcacctggtttgcgactagttcggaatcccctttcacaatcaatcgcttgactccaagtacggcttccagccgcgtcgcgccgccgcggtagccgtgtccgttgccagccgtcgccgccgttgggtgcgcacggaggaggggaaccccggcctccccttcgcagccgccgaagaccgccggagcgccgtcgcccctgctccttgactgttgagccgccgtcgaacctcgtcgccggccgtcgttcgtcgtcgtcagtcgttgttctttgcaccggtgagttcgcgttgttctcctctacgcgtaggtaccctccaaaagtccggccgagtcttctagcgccggcgaggtcgtcgcctgcccctgctccttgactgttgagtgcgccatcgaacgccattgtccatgtttcgctgtcggtttgactgtccgacctattttcaggcatagtccagtcagctacaaaatcggcgaggagctgggacttgatggctgttcgtggcacaaagcagcttttcgatctggcttagctcgactacccatttcgcgatgaggccgacagcatctttgtttctcacgacttcaccaagagggaaggaggaaacaactgtgaccctgtgggtttggaagtagtggtgtagctttcttgatgtcatgattacttctctctcgacaacaatgacggtactcacagaatatggtgtggcggcaatatagaggaataattctttatcaggttggggagcaacaagtacagggggatttgacaagtagcgcttgagtgcgatgaatgcctctttggcttcctgctcagtgccgccatgcatccagttaggatttgccttgatcttctccggatttgcctcgatccctcttccagagacgaggaacctgagcagcttgcccgatggtactccgaatgtgcacttctctggattgagcatgaggcgatatcgtcggaggttgtcgaacgtttcccggagatcatcaatcaatgagtcgcttgtcttggtcttgacaacaatgtcatcgacgtaggcctcgacattgttcccaggctgatcgttaagtgccgcttggaccgtgcgttggaaagtatttcctgcggttatcagtccaaacagcatcttaacgtaacagaatacactgaacggcatgatgaatgctgtcttctcctcgtcctcttttgccatgctgatctggtggtagccagagtagacatcaagaaagcttaacaactcacaaccagctgttgagtccaccaattggtctattcgaggaagagggaagtgatccttgggacacgccttgttgaggtcggtgaagtcgacacacatcctccacttcccgttagccttgtgcaccatgactggattggctagctactctggatggataacctctctgatgaagctagctttgagaagcttgtcgagttcttctcgtatggcttgtttccggtttggtgcaaatctgcgcagtttttgttttactggcttggcatcgggtcgcaccatgagtttgtgctcaatcacctccctagggaccccgggtatgtcggacggctgccaagcgaacatgtctacattgtcgcggaggaaggtgataagcgcgagttcggtcttgtcgaggttggcgctggagagtggaacgatcttgattgcgctgtctggcttcggcgtcttgtttgttttgctcactttcttgggtggctcagctgtggcaggtgggttgggcgtgtgttcgaccatgtcgaggctccgcatgtcgcactgcaccgccagctttgcgttcccctgaatagtgattgttccctttggcccgggcatcttgagcacttggtacgcgtaatgagatgcggccatgaacttcgcgagtgcagttctcccgatgatagcattgtatgctgtatcaaattcagcgacaaaggtgatctgctctgttcggaagttgtttgcttggccgaaagtcacaagcaacgtaatcttgcccaatggcttggacgatgactgaggagtaattccatggaagggttgatcagtgggcgtcaagtcacttcgtgggatccccatcacgtccaaggtgctggcgaagagtaggttgatggagctgccgccatcgatgagaactcgtgcgaccttgatattccgaatagtgggtcgaccacgatcagatatcgacgccgtggaacctccgaagatgtgcgaaacatggagatcggaatttgggtatgctgagtccgagtcctgagtagctgcttcagcggccttctcgactacatgtactcgcttgcccttctccaatgcaagttgctttgcgagtgactttttgaaaacgaaacaagcttctagggagtgcttgtccgacttgtgtatagggcaccatattttcttcgtatcgtcgccttgtgagtctgggtacttgggtgggtccgcatattctgctgcgaggacttccatttgagctttccttttcccactcttgcaactcttcttcttgcttgactcaggtgtgtccttggctggttttttctctccccccgtctttggcttgtcgttattgcgtctcagtgcgtcgtccgcgtgagcgcatcgatcgacaatctcgaatagctttcgagcagttgtgatctgtcttgtcaccaactcctgggtggtgtagcgatctctgacaccagtcttaaaagcgcggatcatggaagcgttggtgatctcggggatcgtatttctgcactcattaaagcgccgaatgtagtccctcaatgattcgcccggattctgtgtcaacgcgtgtaggtcgtcttcgatcgcgtggcgcttgtatgttccttggaagttagcgacgaactgttgccacaaatctacccatgaagaaatcaagtatggtgggaggtggactagccatgaacgtgcagatcctttcaacgccgccggcaaataattcgctaacgcgttgtcgtctgcttcggcagcgtagagtactatggaatagacctgaaggaactcctcagggtcggtgctcccatcgtacttctctattgctcccggtcggaatatctcaggccatcaaacatctcgtagagcacgactgaaagctctacacccaccaccgggggcggtgggttgtcggcgattgtatgtcctccgtggatgtctgtatgacgacgaggatgatgaggatgatgacgatgacaatgagtcacttggttccggggtacgattacgaggatgacgtctgggttctcgagaatcctgtcatcgcccaccgttgttgtcccgacgccgatctccgtcgtcgtcatcgttatggcggcgtcctcgaccattatcgcctggcatccgttgtttgcgatcatcgcgttcgtggtggttgtggcggttatcaccgttctctcgatgtcgtgaagagacgcgatgccgggaacgatttttgttgtctcgcgcgcgtcgtgcttctcggcggccattcaaatggtcacggagatcgttggtgccgcgaggtggtggagtggcttgacgatgtgattctgctcaggtagttcgccattggcaccgccaattggcggttgttctagcagtactccagcggcggtctcctcgaacgcgttgctgaggttagccacttattctcgtagtcgttctgtccattgtgcgagatcattgttcagaacgggatcataagaggtttccctcaatattgcgttgatggccctgatgtgctgggccggtgtaatcacttgatcctccgcttctgtgttagcgcgcgcagacgtgctggtcccatcgatagcaaacacatcgcgtggtgtactcgtcgacgatgtgccctggtcttcaagcaagtgtagaactgacaactcgtggggatcgatgtcgattaccccaacaaatcgatctgagataactgtcgctcctcgttccttgttcgcatctttaagagagatttgtgactgctggaccttaggaggtgacgtcctcatggcgctgagaagaaccttgcagcttgagaggtcgtgattctttgtcttgtgaatagggcaatagacatcacgggttggagaagtacgttgaattccacgctctttgcaggcacggatctcagcttgtacatcgagaaaaacccagcaagtttgcaaggtgtgtttcctggttttgtagataggacaccaggaccttgttgcctcggaagttctccttgtcggctcgtgattctcatcggaaggacaagatttggctgcattaggatccttatcgggctcaaacgtcgtcgatgttccgctctccacgtccgcgggaggatccttcgacatagagccgtccggggtcgtaaccacgacgttctcgcttccggtcattgatggaccagccgagatcggcaccgtggtgaaaactgggaagacgatttcaccgacttgagtccacaccagcattgttgaaggttaaactccttggttgatgctggtgttgacgttattgttgatgaggcttgatggcatagtagtagaaccttgagcaccaagtccccgtacctagcgcgcaactgtcgacggtggatacccgcagaccggatatagagggtattggggtacgctggtatgaggatttcgtaggctgaggtggatgtgttggcggtgagattcgatgccttaggacctcctggggggtcccttttatatcacgggtcagttgatctccaagtaggactcggagatatcggacccttcatgatacagtgacgacccagtcttgtccgagtaggacttctctcatatgtggatact

SEQ ID NO: 58102 - DNA, 2052 bp, Oryza sativa
  Clone ID: PAT_MRT4530_59850C.1
atggaggaaggaggtgggagtggcgtgggtgggatgcagggagcggcgtcgaatcttctggacgccggagctcaggcgttctaccctgccgtcggcgcgccgttcccgttccagcagcttccgcaccagctgtactgcccgcagccgccgccgccgccgtaccaggtcatgccggtgccgccgccgccgccgccggtgggcttgcctgtaccgccgctgccggcgacgatggcgccgcagccgggctactgcgtgccggcggccgcgacggtggtggacggtccggccagccgcgccgtcgtgctgagcctggtgccgccgcacgcgccggaggacgagatcgcccgcgcgatggctccgttcggtgcggtgcgcgccgtggacgcgtcggcggtggcgtccgagggcgtcgcgaccgtctacttcttcgatctccgctccgccgagcacgccgtcacgggggtccgcgagcagcacatccggcagcagtgccggctcggccagctctacgccgccgccgccgccgccgccgcctcgtccccgacctggcccccgccggcgtgggactggccccacgacgacaaccgcgggctcgtcctcggccaggccgtctgggcccacttcgccgccgcctccaccgtccccgacgacggcgccagccgcggctccctcgtcgtgctcaattccctccccgccatgtccgtgttcgaactccgcgaaatcttccaagcatacggtgacgtgaaggacgtgagggagtcggcgctgcggccgagcaacaagttcgtcgagttcttcgacacgcgcgacgccgaccgcgcgctccacgagctcaacggcaaggagctcttcggccgccgcctcgtcgtcgagtacacgcgcccttccctccccggcccacgcaggcgcgggcacgtgtcgcaccagcccttggccccgacgccgccgaggctgcaggcggcttggcggccggcgccggcgccgtcgcagtctgcgcagccgtcgtcgtctggctccggcaaggcgagggaaggcgtggtgcttctgcgcaggagctccgggaaaggtagctcgggtagccagtccaagggcggtggcaatgctggccacgagcggaagagcaagggcggcaagagcgccgcggcggcgtgttcgacggcggcttcagcatcgtcgtctaccgcaacggcgcccagcaagcaaagccagaaaggcggcggcggcggcggcggccgtggcgggagctggagaggccagaagagcgggtgggaggctcgcttcctgttcaaagaacccgaggccgcggccgccgccgccggcgacgctgccgcctccgagacgcatgagccggcgagctgcaaggacacgagaaccaccgtgatgatcaggaacatcccaaacaagtacagccagaagctgctgctcaacatgctggacaaccactgcatcctctccaaccagcagatcgaggcgagctgcgaagacgaagcccagccattctcctcctacgatttcctctacctccccatagatttcaacaacaagtgcaacgtgggctatggcttcgtcaacctcacctcgccggaggctgccgtgcggctgtacaaggcgttccacaagcaaccgtgggaggtgttcaactcgcgcaagatttgccaagtgacatacgcacgcgtgcaaggcctggacgcgctcaaggagcacttcaagaactccaagttcccgtgcgacagcgacgagtacctgcccgtggtgttctcgccgccgcgggacggcaagctgctcacggagccggtgccgctggtcggccgctcgccggcaccgtcgtcggcgtccggggcgtcgtcgccgcccaagagctgcgccgcgagcgtcgacccactcgcgcaggagctcatgacagcgccgtcttcctccggcgacggcgcctcctccgcctcctcgtccaatgcccacgccgacgaggatgacgtccatggcgaaaccggtggtgaccgtggcgacgacgcggggctcgatctggagctacagcgcctaggctacactgactag

SEQ ID NO: 58103 - DNA, 373 bp, Oryza sativa
  Clone ID: PAT_MRT4530_59851C.1
gtggtgaattattttttttcttttttttttttttttttttttttattattttaatagggttgattttattttgttttattttttttaaaaattatcattgatataattggggaaaaaaaaatggcgaaaagtaaaggttaggatgaaacacaattttgggtgagaacacaaaggaggcggagtctaccatggtctataatgggagaagcccttaatgcttacatggcgcacttgaaaaaaaaacaacagggtagggctaaacttccttgaaacaaaaacggtgggatgcttatttgcaacgatagacggcacgatcggattatttattgacaaaaagagaactcatggcgctgcacacagacgaaacacattt

SEQ ID NO: 58104 - DNA, 449 bp, Oryza sativa
  Clone ID: PAT_MRT4530_59852C.1
gatgctaataaacaatttcccaattgaaatgtttgttctttttctttttaaaagaaaaaaactagatcagttgaattatttcaaccctcatgcgtgacagattgacaatgataagcacagtttggactttggaccaacatgaaaagcaaacgagaactcaggctgcaaatccaaaatcagcagaaatccttccagaatgcatgagaaaagctttgcacagcatgtcaattcactagccagcatctcccaaaaagcatttgctcggatggttcaaaatatcaaagggaatcctgcatctttccgatggctttatgcagatatgattcccagagagagatctccggtggcctggtccatgctgcaggaaggaatcaaagatgctgcttgcaagcacttgctgctctccaatggccatttgcatccgatggaccaggatcctttgcagttct

SEQ ID NO: 58105 - DNA, 292 bp, Oryza sativa
  Clone ID: PAT_MRT4530_59853C.1
ctctactccactctgccccgccgcccatggccgccgccgccgcggcgctcgcgtagctccccctatggtccacctcacagcctcccggctccgcctccccaggccctccaggtcccccgcgtgctgcgtcagccctcgccctctcccgcgtccgccgcgtgctgctcgcaggggcgcggcctgcggcttggcatggcagcaccaagtctgggctgcagggccctgcagcggtgcgcaggcacggctgcggtgcttctcccatcgcacgggggcagggggtgggggcgggggt

SEQ ID NO: 58106 - DNA, 206 bp, Oryza sativa
  Clone ID: PAT_MRT4530_59854C.1
gaatcctatagttcagtgataccacgtacatcaggggacttgttatagggataggcggacagggtccgaggaggagcaccaagcccaagcccaagccgggtactgttgttgaacccgcgccggcatgctcctgcttgaggagttggccgtggctagcgacttcaccgacgatgggcccgccgacgcacgcgcgctcggtcatggcg

SEQ ID NO: 58107 - DNA, 105 bp, Oryza sativa
  Clone ID: PAT_MRT4530_59855C.1
taccgatcacagtgctcaaccgtcgcgtccggtctgggttcttttacacagcaggtcccactactcaaacagaagattaagatagccaaagtccagataatgaat

SEQ ID NO: 58108 - DNA, 421 bp, Oryza sativa
  Clone ID: PAT_MRT4530_59857C.1
cccgccgatgccgaccccgacctcgatgcggccgccaccgccgacgacgtcgcgccggcactgccgatgacgccgacgccactgctacgccgccgcgccacgccgctgggccgcgcctcgctgccgccgcgcaacgccgcagctgcgctgccacgccaccgccgcgccacgccgctgctccgctgccgccacgtgaacgaaacaaaagacgtcgtcatcgtcgtccctcaagccggagtgggttctaatatacgacacttgaacgaggaagggaacgtggagagggatgcggaggggaaccaggagggaaacgtggagagggatgcggaggggaacgaggaggaggaggctagtgaaagtcaaccctccgctggacagaagagagcccacggacaacgaggtgccgcgaagaagctagagg

SEQ ID NO: 58109 - DNA, 580 bp, Oryza sativa
  Clone ID: PAT_MRT4530_59859C.1
aatagaaacttgggttaatatatagattttccatatatatcatcacaagatcttcttttagaaaaaaaattactattaccccaatctaaacataacatatggatttggccaaaaaaattttttagaacccaagttactattaccccgaggatttttaaggtcttttagaaactaaattactattacaggcccgaatccaacaaacaaaacggggctggggccacatatggatgttgacccgacaaagcactataaatccttaggcctcccatggacagatttccttcacccacaaacatttaaaggggcttcccacagccacaaatggacatccatccttccatgggtcctgaccgccatccccatgcctgttttggggggccagggtttccagcgcctgttgccgaccggaacgagggcaaacctaattatcatggggcataaaaaataatgaccccaccgttgggggagggaggcaccgatgggaggcctgatccgggccaaatccttcgagggaggaatcagggggggggcaaacgcagccggttgctcctccccgaatcccgccgtaaaccgcccc

SEQ ID NO: 58110 - DNA, 2892 bp, Oryza sativa
  Clone ID: PAT_MRT4530_5985C.1
ctatcgctttagccccctcccgcggtctcccgaggtccctagccacctccccgccgtcgccctctctctcccacgccgccggcgacctccagccgcctgtgccgcctcgcccgtgcgccggccggccgcgccatcgcctcctccagcgtcgccgccacctcctccacgccggcctgccctccgtttcgcgaggtgacccccggagctgcgtttccgccgtcgcccatccatttcctccgcgccggccgcctccagtcgcctccatctccctgcctgaacgccggtcgacgtcgccaccacctccctcggctccacgacgccgctctcatccccggcatcacctcctcctcgcccgaacatcaccggaacaccgtcgcccgcgccggcctcaccttcctcctcgtcgacatctcctccggctgcccctttcgccatgcccccgcgacgtcgtcctcggcctcgcctccccttcgaccgaaccccgccggtgttcgtcatcatcatcccgttcatcctcgccggctcgtcgtctcgcggcgccgcctccgtcatcgtcatcgctgcggcgtgttccacgccgtcctcgcctccgtgcagccgttgccggctgccctcgtcgtctcctcgccggctgccctcgtcgccttctcgccggccccggtcgtcgtcgtcctcgtcctctcgtcgttcccgatcgtcgtggcgttcgtccctccgtcaagccgttctcgttcgtcatcctcgcttcgtcaaagtcgctgcagcccccgtcctcgtcttcgtcctcgcctccgcgtcatcaagccccgtgccggccgcgtctcgccttcgtccaaggatcgccgccgaagtcgttccctcgccgtccgtctccgccgcgccagttcgtcgttggcgttcccacgcctcgtcgcgtggtgggcaaatgaaggctacacgagctgcggcccggtagtcgagatgtcatggcagagggttggtgccctgctgctaggggctcagtctcgcctgcctgtcccgggggttccggccgtaggcgggattgggtcgaattggaacaacccagcaggggcaaccaacgttcaagtgcctacagtccagcaacagtgcaagttatcagaatttctcaaaactgagcctccaacctttgccattgccgtcgatcctatggaagccagtgattggttgcgcacaatcgagaagaagctagggttgattcagtgcaccgaccaggagcgggttggcttcgcaactcatcagctggttggaccggcttccgagtggtgggataactacgaagcatcacagccagaaggacataccatcacctggaacgagttttcatctgtattcaggagatcatatgttcccgcgggaatgatcacactaagaaaacgagagtttcgctacctgaagcaaggagatttgaccgtcacagagtacctgcatgagttctatcgtttggctcactatgcaccagaagatgtggaaacggatgaagacaaacaagagaagtttctccaggggttaaaagatgagcttgcagtgcaactactcctagaggattatgaagattttgagaaacttgtggacaaagccatgcaactcgaaagtgagcataatcggatgacgaactgcaagagaaggattgtcaacatcccagtatttccatggggtaaccaaagacagcgcactgagccacttcagatcaccggatcttctggtgtgcatcaagagttcctgccccaagaagatgaatgcaatgcagacaacaacactagcaatactaatgatgatgataccaccaacaaccatggttcttgccccattagtgaccactcgaataaagcgtgcaatgtcagtagcattcaccaagatgtcaacgatagtatcaatgttggaacccagaatgacaaccttagcaattttgactctgagaaagactccaatggtgacagcaataatggcaccactgatgccaatgtcatttctccagagattgtccacagccgaagcgtaacctgcgtcatcactccggccattatgcaagaagaagacaaccgcctgtgccgcctcgcccgtgcgccggccggccgcgccatcgcctcctccagcgtcgccgccacctcctccacgccggcctgccctccgtttcgcgaggtgacccccggagctgcgtttccgccgtcgcccatccatttcctccgcgccggccgcctccagtcgcctccatctccctgcctgaacgccggtcgacgtcgccaccacctccctcggctccacgacgccgctctcatccccggcatcacctcctcctcgcccgaacatcaccggaacaccgtcgcccgcgccggcctcaccttcctcctcgtcgacatctcctccggctgcccctttcgccatgcccccgcgacgtcgtcctcggcctcgcctccccttcgaccgaaccccgccggtgttcgtcgtcatcatcccgttcatcctcgccggctcgtcgtctcgcggcgccgcctccgtcatcgtcatcgctgcggcgtgttccacgccgtcctcgcctccgtgcagccgttgccggctgccctcgtcgtctcctcgccggctgccctcgtcgccttctcgccggccccggtcgtcgtcgtcctcgtcctctcgtcgttcccgatcgtcgtggcgttcgtccctccgtcaagccgttctcgttcgtcatcctcgcttcgtcaaagtcgctgcagcccccgtcctcgtcttcgtcctcgcctccgcgtcatcaagccccgtgccggccgcgtctcgccttcgtccaaggatcgccgccgaagtcgttccctcgccgtccgtctccgccgcgccagttcgtcgttggcgttcccacgcctcgtcgcgtggtggtaa

SEQ ID NO: 58111 - DNA, 438 bp, Oryza sativa
  Clone ID: PAT_MRT4530_59860C.1
gaaaacaaataatccatgtgacaatgtatttggtaagatttacaccattgaaacaagatgagtgacttaattgagcaatttgctagatgagtgactaaactgcactcacctcgcaagttgtgataccaacggtatattttactctatgattattatcaagtagtacaaataatcactaaactaatgatcccagaaactgtccagtggataatcaagtagagatcagcagttttgtatgctgcagaatgtggtgtcgatatccgctcagaaaaaagaaaaagcaaatgtggtgtggatagacaaaccttttttcctcaatacaaaagaaactagctttatgtaacgagaacaaatgaatcaattaaaaaatacatgataatccttaataaagctccctcactttaggcaaaagttcagctttaggaatatgcacattta

SEQ ID NO: 58112 - DNA, 1132 bp, Oryza sativa
  Clone ID: PAT_MRT4530_59861C.1
actagtggatccccgggctgcagctccgtccgtccgacccacccaatcgcccaccacccacccaccgccaccgtcccgatctccggccaccgtcatgccgtccgccggtgccggcgccgccttcctactccgtccaatctccgctaccacccaccctctcatcagcttatcctgtaccggcgccggcgacagcgcgaaccacaagtctcacctcctcttccgcctccaccattcgtgccgccgcctgcccgtgccccgcctctccctcaccccggcccccaccggcagcaataattctccgccctcgcctccgccggcgtccccggagcccccgccccctcccttctccaggtggtccccgccgcgcgcgatctggcgggggctctcggcgctgcttctcgcggggcaggtcttccaccgcgtcctcaccggccgcgtccaccgccgcaacctcctcgcgcagctccgccgcgtgggccccgggagcgcgggggtctcgctcctcaccgcggcattcgtcggcatggccttcaccatccagttcgtgcgcgagttcactcgcctcggcctccaccgctccgtcggcggcgtcctcgccctcgcgctctcccgcgagctctccccggtcgtcaccgccgtcgtcgccgcgggccgggtcggctccgcgtttgctgcagagctggggaccatgcaggtgtcggagcagaccgacaccctccgcgtccttggtgcgcagcccgtcgattacctcgtggtccctcgcgtcgtcgcttgtgtgcttgcgctgcccgtgctaaccctcatgagcttcgcgctcggtctggcgtcctcggcattcttagctgattcgatcttcggtgtcagtaccagcatcattctggagtcagcgcgaagggcgctgcggccatgggacttgatcagttccttgctaaaatctcaggtgtttggcgccattattgctgttgtgagctgtgcttggggtgtcaccacccatggtggagccaagggcgttggagagtccaccacatctgcagtggtcgtttctttagttgggattttcgttgcggatttcgctctatcatgcctgttcttccaaggagctggtgattctctcaaatatgcaatgggttga

SEQ ID NO: 58113 - DNA, 283 bp, Oryza sativa
  unsure (1)..(283): unsure at all n locations
  Clone ID: PAT_MRT4530_59862C.1
gcacgagggttctcggacgccgacgctgccacggacaagtacgcgttcgcgctgcccaagcgccagagcgggggggtcgcgcacgtgacggccaagtgcggcaagaaggccgccatctgcgaggtcgtgcgcgtcgacacggaagagtcggcgctcgtggaccagtacgctgtcgtgatgcaacacgccgtgccggcgggcgaaccgggccacatcaagctcggggnctactacacgcgcgtgctcacgccgttccccaccgaggtcacgcagtcggacgacc

SEQ ID NO: 58114 - DNA, 327 bp, Oryza sativa
  Clone ID: PAT_MRT4530_59863C.1
atggaggaggcgaggcagggcgcgcgggggagcaaggagaccatcaaggatggagactggagagatgcatggacagaagaaaggaacacgcacagaattattaatcatccatggcgccgctacctccgcgcgtccgccggctgtggcaccgccgtagctggcgccgagcgaggagaagatgaatgggcaggatgcctgccagtagggctcgtctcggagacgggacagcgatcgcagagcgccgagctcgtgagggcgatggcggcgggggcggagcacagcaagaatgcaggatcggcggcgggggcggagatgaccggcgattag

SEQ ID NO: 58115 - DNA, 332 bp, Oryza sativa
  Clone ID: PAT_MRT4530_59864C.1
attcaggagttgcatttgtggttggctccttgcttcatgtggtgttgcacatgaatcattttttaaaaaatcacacatggttttacacctttttgtatgaactgtaaagtatctatctaccactactagatctcgctaccttacaacctttttctgtatttttttttggttaactccttgatgtactcatgaaaactgtccttgctcctatcagagaaagatgcccatactttgatttgtagttgcttgtttcgaataattttcgttcactgtggcaccttatgttctcaagcacactagcttgtgatatcagcatggtacttacttcctcc

SEQ ID NO: 58116 - DNA, 745 bp, Oryza sativa
  unsure (1)..(745): unsure at all n locations
  Clone ID: PAT_MRT4530_59865C.1
cccacgcgtccgcccacgcgtccggttctagatcgcgagcggccgccccttttttttttttttttttttttttttttttnactctcgtacgaagttgattttattttcggaacagagggaataggaggctagctagatctccatgcataaggatgaagatacatgtaagcggcagaacattttcacaaacgggtcgaatctgcacgaaactgaacatgcagatcacagagacggaggatggagcaatcaagcaagcgatcgatcgagatgcaacacagctaaaagagaagagaagagcactacactgcacagagatcagaggaagacgacgagacgagtggcatatgttcttcaggaagatgtgagatgagtatatataatataaatcagttggggccccagcagacgaggtggtggaccttgcgcagcctcacgtcggcggcctcctccgccggcggccgcgcggcggcggcggcgctgttggagaggggggaacgcagcctgggcgaggaggcggcggcccggaggtagagggagcggagggcgtagtcccagcggcagaggcccgcctggtccttgagcgcctcgacggcgcccatgctcgccgccaccaccagcgacggcgccgccgccttcgccccgcagatcgccatcccaagttcccgacccggctactccgcctccgcctccgctcggtcacagtgcgcggcgcttgcgcttgctagtgccgcccgccggcccctgc

SEQ ID NO: 58117 - DNA, 273 bp, Oryza sativa
  Clone ID: PAT_MRT4530_59866C.1
atgccgacgagcccagtgaccaccacggcggacggcgacgggctagctcagcttgacatcgccatttcgcgccggcccagcctgcttcaccccgcgctcctccgcgacgaccgcgcgctcctcgctctcgctagcccgcgtgtgccgccaccgctcgcgaggtcgggccagtatggcctgaccaacacccaggccaggctgggactgcccatgggctgcacccctggcccaacaagactcgggctatgccgggctggcccaaaggcacgatag

SEQ ID NO: 58118 - DNA, 292 bp, Oryza sativa
  unsure (1)..(292): unsure at all n locations
  Clone ID: PAT_MRT4530_59867C.1
aacggagaacggcctcgtcatgtgcgcgctttgcttgtagtagcaaagtaaaaattaattagcggttaattgncaattaccacctcccttttcactcactctaatctgcttatatctttttagtagtaattaattacccctcttgatggttttgagtgtgtgtctggacttagtggttggcctgtcatgtacataaactaccactactgctactagtacttgcttcagttaaactacatatgtgaatgtgatgtatatatncttagtttagatgtcaaaaaaaaaaaaaaaa

SEQ ID NO: 58119 - DNA, 465 bp, Oryza sativa
  Clone ID: PAT_MRT4530_59868C.1
atgagggaggggccatttgatttcaccatggatggcgtcagggctcccgacgtttctccccatcggcgcatcgctacatggatcgctccagtcgtttctcccgcgactgaggcgaacgaatgccgcaccactctccccattggcgcatcgctgcatggatcgctcccgatgtttctcccgcgacccaggcgaacggatgccgcaccacacctcgccgtgcactgtccctaccaactcctgcgcgcgaccgtgcgcgccgcaccaggcggttcgccgcactacgccgtcgccgctccgattcaggaagtcgggctcgggaggatgagagagacacatcgaaccctaaatcactcattgggccgcgggctgcgatacactgatatgggtctccttcgctgcctcacgcctgtgaagtccctcgcttcctcacgtctgcgaagtcagccttttcatgaaaacgactga

SEQ ID NO: 58120 - DNA, 482 bp, Oryza sativa
  Clone ID: PAT_MRT4530_59869C.1
acgacctcctccttgttcggactttggagcaagcaaaagcaatcgcaattagcaacacatcaatcaaatcctttgttagatttgatgcgagcgtcctccaatccaagattaatttccatctattattagggtactcctacgaaacaacaagtagctagctattagtgagtgagtggagattgagaattggatggggattccgaatcccagcgacgaggtggtgcaagtccggcacggcgatgtcgccggcgagccaaccgtggtgaccattagctgccccgacaagacgggcctcggctgcgacctctgccgccttgtcctcctcttcggcctcaacatcgtcaagggagacgtgacacgagtgctgtgcgaactggaactcacaattcgtagagtgaaggtctccaccacacctgatgggagagtgctggatcttttcttcatcacagatgctagggaacttctacatacaaagagcagaa

SEQ ID NO: 58121 - DNA, 979 bp, Oryza sativa
  Clone ID: PAT_MRT4530_5986C.1
atggatcaacgatgggtgtttgatgcgacgcactactctatggagtatataaggggagtaacatctcttgttgccgaggtgacgagcacaaaataagtgaatggtccggattattgcctgtagtgtctatgcattaattgcaagaaagactgacaatttctagcacaactagtccatgcacatctacttacaagggctcttatgacaaacttcagatgtccttacaatcatgatgaacgagggaagtgcaggcaagaccgacgttccgaatgaggatgtgggctatgagcatgatgaccaaacatgaattgatcacggtgaagctgatctaaaccagatattgcacgacggggagagggcttacactgataatagggactattccaagttcaataccatggtgaactcaaaactatagtttacaatggttctaaggtggagcacaacaagttgcctgtggtcctatctctaattcaattgaaggcaaccaatggatggtcggataagagcttcagtgagttgttacagctcttggcagacattctttcagcgggtaatgtaatgctgaaaacagcgtaccaagcgaagaagattatctgtccccttggctttgaaacacgaaaaattcacgcttgttgaaatcattgcatattgtaccagggtgagtatgctgatttggatgattgtcccgtgtgcaaggaatctcaatataattgtggagatggtgatggtggaaataatggtacaatgaagaagaaaagagtaccttagaagttgttgtggtattttcctatcttccctcgtttgaaacatatgtgcgcaaacaagaaccatgctcagttgatgcattagcaccacgatgagcgtaagagagatggaatagcactcatatgatggatctcaatggagaaaggtagacgacaagtacataaagtatttttcatatgatgtaaggtttgcactcaacgtagatggtatt

SEQ ID NO: 58122 - DNA, 1604 bp, Oryza sativa
  Clone ID: PAT_MRT4530_59870C.1
atgtcgtggttgtcgcaggcagaagctggtggtggtgggcgcagcaagaagtcagcagcaggtgagttgacgacgacaagtgaaaagaagaagaagacgaggaggaggaaggtggcggtggtgtactatctgtgccgaagccggcagggagggctggagcacccacacctgatggaggtggaggtgggcgacggcgaggagcaagtgcatgtgcagctgcggctgcgagacgtgacgcggcggctggacgccctgcgaggtaaggggatggcggccatgtactcgtggtcgtgcaagcggagctaccgcggcggctacgtgtggcatgacctctcccacccggacgacctcctgctccctacaggaccccacgactacgtcctcaaggcctcccttctccatctccaccacctcatcgatcctcctcctcgccaccatcccttgatcacctccaccagcagcagcgctcatcactctttgccacctcatgctgccgctgctgctcacgtctctcttgtatcctcttcttccaccgacgccaacgccaacagcgtcgtcgttggcgatgaccaatgcacctcctcctggagcggcaggaggaagaggcagcagcagcagcagcagccggagcctcgagtcactgataatggccgaatattccggcttcaggaggtgaagccggccaacctgctcatgcgtctcatcgcttgcggttgcggctcctccattcccattccagcggctgcggctgcggctgctaagcagcagctacagcaggttgagtctttgccattgtcgccggtgctgtctcctctgtctcatctcgtcaataagcagcagctgcctcatgagcaggatcgtttttccggtggtacaatcagtactagtaatgctaatgcagcacggcagcttaatgtggcttttgataaagcaaaaccaatagtaaattcccaaatagaaagctaaaacgttcctaggcttgaggattttgttcgcccagccgaagctgattttcgtaatattataagggaactcgcacaaacaaggacggtagtcgtagtattccgtcttgagaaactcgacaatagggtgggcatgctcaagccgagcgacgaggtggtgcaagtccggcacggcgatgtcgccggcgagccaaccgtggtgaccattagctgccccgacaagacgggcctcggctgcgacctctgccgccttgtcctcctcttcggcctcaacatcgtcaagggagacatgagcactgatgggaggtggtgctacatcgtgctgtgggtggttgcaaggcccggccgcgccatggcaatgagatgggacctcctcaaggacaggttgatccagctctgccctgtcgccgcgccattcggcctcgacaaccaccacctcgccgccgctggtctccacctccacgaccacgatgcacctgccccctctcccaacatcttcttgctcaaattcttctgctacgaccacgtgacacgagtgctgtgcgaactggaactcacaattcgtagagtgaaggtctccaccacacctgatgggagagtgctggatcttttcttcatcacagatgctagggaacttctaca

SEQ ID NO: 58123 - DNA, 535 bp, Oryza sativa
  Clone ID: PAT_MRT4530_59871C.1
ctagagcgtggtctcgcccctccccgagtcattgccctgtgctggtgctgctcccgcgccggggaagaagatggagagggtttggactggagagaagggcctaccagggaagctccgccggcaaccgacgacccgatctgccaccccgagtgccgccgcatcgatccctaccgccgccacgttgatccccaccttcagcggctccatctgccgttgtcgtgttgatccccacagtcgctgcgtcgatccacgttgtcactgcatcgatccaccaccgccgcatcgatccccacctccggcgcctccatccgccgtcgccacgtcaatccgccgccgtcgcgtcaatccacgccttactgctgcatcgatcccctcctccggcgcctccatccaccgtcgtcgcgtcgattggggagggagagtggagctcaagcggagagagagagagaggtggaagaagagggaagggtgtggtttcatcccacttggcatcaacttttttgtggggcaataccttccgttggcctggccttag

SEQ ID NO: 58124 - DNA, 141 bp, Oryza sativa
  Clone ID: PAT_MRT4530_59872C.1
atggcgaacaaccagcagcccacgacgaagaagctcgggcacgtccgttcatgcaacggcttgtcgacggagaatctcgccgacgtcgtccggcggcgtagcatcatggagtcgaaacaacaacaatataatgatcgatag

SEQ ID NO: 58125 - DNA, 735 bp, Oryza sativa
  Clone ID: PAT_MRT4530_59873C.1
atgtcctactggctcggcctcaacaagttcgccgacatgacttccgaggagttcatggccaaatacaccggcgccaaggtagacgacaccggcgtctccggcgccggcgctgcaagcgaggccgatcgaggaggagcagctgctgggagctgctgggcgttctcggcggtgggcgcggtggaggggataaacgcgatcatgacagggaacctgctgacgctgtcggaacagcaggtgctcgactgcttcggcgccggcgactgctccggcggttggcccgaccaggcgcagcagtacatcgtcaagaacgggatcaccctggatcggtgcgggaaggaaccgtactacccggcctacgatgccacgaagcatccgtgcagaacggtggcaggcaaacaacccatcatcacggtggacgatgtaaagtgggtgaacaaaagcgaggccgccctgctgctcaaagtctaccagcagcccatctctgtggcactcgacgccagcgggtggcagttctaccaagggggcgtgttcactgggccttgccaaacgccaccaccgttgaaccatgctgtgctgaattcatggggcgcaaactgggccgagagcggctacatccgcatgaaacgtgacgtgggaaccccagatggcctatgtggcatcgccacgcacgccacatatcctataaagaagtgtccctgccccccaaaaaccccaactgctatcgcatcctactag

SEQ ID NO: 58126 - DNA, 387 bp, Oryza sativa
  Clone ID: PAT_MRT4530_59874C.1
gaaagaaatagaaaactttatttcacgaataaacatattggaggtagatcgatcactggattacatatgtgatttatactacatatttttttcgaacaaacatatcctgagagtctaaataggacctggtctcataagatttttttttcctctccaccaccgccaagcaccaattaaaacacctagctgacagaccaagctatctgtaccaatgtaccatacagtgatcgttcaacactggctactgttatcactactagctagtgccacccatgaacatatatggaataagagacaacgatgaccacacttccacacaattaagggcggcgacgacattcttcgcgcggaaccaacttgggatagatgagaatacagtactacaat

SEQ ID NO: 58127 - DNA, 319 bp, Oryza sativa
  Clone ID: PAT_MRT4530_59875C.1
ttcaaatctaactctagtctattcgattgtggcatccacctggcttactccggcatggcagcgctcccctacttcgatgagatcgattcctccaccattgatgtcctcctaatcacccactttcacttggaccatgccgcttctctgccctacttcttggaaaagacgacattcaaggggcgcgtgttcatgacccattgccacaaaggccatttataggctactcctttccgattatgtcaaagtcagcaaagtttctgtggaggatatgctgtttgacgagcaagacattcttcgttccatggataaaattgaggta

SEQ ID NO: 58128 - DNA, 203 bp, Oryza sativa
  unsure (1)..(203): unsure at all n locations
  Clone ID: PAT_MRT4530_59876C.1
tttataaaatatcatcncactcaatttcccaataaatataatatctctatttcatctccccttaactttcttgctatagaaacattttatccatttcatctatctattaattactatttaatttattcccttactatatacatcttctctcttgaataaatgttctttctcatatcaatcataaactttcaactacatttttt

SEQ ID NO: 58129 - DNA, 694 bp, Oryza sativa
  unsure (1)..(694): unsure at all n locations
  Clone ID: PAT_MRT4530_59877C.1
attcggctcgagcaataatattttttagaagaggagtgagatcctcatagagaacccgntcttctttttttccattaacatggtcaatctctttcacctaagacacgttcctctttccattcctttcttcctccgtcccattctcgaattggcgtgtgcctcttgctatccctcaaaggtcttttgaagcagaagaatggacttctttactagagacataaatgaggactctatgcttagatgtccattcttgaggaacatcaatgagcctactaacttctcattcttttcacctttggctttaccaatgcctgttcgtggagctaaaggtccaatttttgaagatggtcccaattttgatttggcatttaggcttttccacgggagtgatggtgtagtacccttatctgacagatcttttcggccttctgagaagaaagtacaggcagaacctcccaaatcccaattcaatcctttagctgcaaaggcagcaactattagtctgtcatcatttggatttggcggagctttcggttttgatgcattttctgagaagtggaacaaccagaaaagaaaatccaaatcatcaaaaaatgaaccttcttcacaggatggttcaaagcatgaggccaacaatgattggcttcaaaatggtaactggcccattgcatagtcataccgagcaggtaggaat

SEQ ID NO: 58130 - DNA, 339 bp, Oryza sativa
  Clone ID: PAT_MRT4530_59878C.1
atggcgagctcggcggtggagaggagcggcaggagaggatgcgccggcggtagcagctggtgccgcggtggagggggtggcatcaaccggtcgaccggcgtcctcaacatcccgctctcccgaggtggccctcccttccgtgccgccgcctcgctcgtccttacttcggccaaaaccctcaccataagccccaattggccaatcccctacaccgttgtctcctttctgccccgccagttgtccggctccaccgtgtcggcctgcgacaaccgcgtatctatgccggcggggccgcgcggctggaaccggttgtaccagatgccaaagaggaagacgtag

SEQ ID NO: 58131 - DNA, 429 bp, Oryza sativa
  Clone ID: PAT_MRT4530_59879C.1
gcggaactttcatatccatcatcggagagaaccacctcgccgccggcctttcatccagcgagtgagggagggagaaccagaactcggacaaccagacaggaagaaggcgacaacactgacggagccgaacaccgacggcggacgggcgcgtcggcgggggtcttccgcccgggggccgaccagggcgtcgacgccgaccgctgcccggtggctgatgacgaagaatcggagagcggcgcgcgcaacgcggggacggcgatcgccgacagcatcctgacccgggacaaggcgcacgagagcgcacagggggacgcggagccaaacaagaagggcggagagacgctggaccagcagcacgcggaggcataccacccccgcgaccaccacgacaacgacagcgacccgaaccaaacgcacggatacgccctg

SEQ ID NO: 58132 - DNA, 1081 bp, Oryza sativa
  Clone ID: PAT_MRT4530_5987C.1
taaaaagaaaaaccctaaaagaagtcttctttcccccccttcccttcttgggccggctcggcccaacttcctccctccctctcctctcccccgcggcccatcggccttcccccgcgcgcgcgccgctgatgggcgggcccgcccgccaccctcgctgacgggtggggcccacctgtcatcccctacctcgcgccgcgcccgccgcccgcccgtgccctagcgccgccgccgccgccgaatccgccgcatcccgccgtccccgcgcgccataaagagggggaaatcactccccgtgattccctccctcttttcccccgcttttccctctctctctacctcggattcgtccggatttgctcccgcgatcctcgccggcgcatcaatggcggccgagatttccgcggccgattccttcccctccggccgctctctccccctcccgacgctatataatcgctccccgtgcctctctcctccgtttccgccactcgccgcactctctccccgtcggattcgagctcgcgccgttgtcctccctctccgccgtcgccgccgagctccggttcgccgccgtcgtcgccccggacctcctcccgcttcggcatcgcctccttcggcttcgccgcgttctcgtcgacctcgtccgctcctccgtttcgcccgccgaccgccggagcatcgccgtcctcgtcgacccgagccgcgccgccgcctctctccgcttcggtcgccgttcccgtcgtcgccgtcgacccggggtgagccgaggaccgccgcttcgcttccctcttctctccttctctctcggccgccgctccgccgtacctatggccgccgccggcgaccataggggcacgggcgcgccgcctcccgtcggctgtgccggcgtggccgccttcgggcgcgccccgcggctgccgtgtggggcccggctcggccatataaggaccggtcttcgggcctctgttgcaaagcactaccgtacttccacatgtctagtgggtaaggcttagtttgtggctcagtctggttataaacaaagtacacggatggagatggacgaagtcgggggttgatggac

SEQ ID NO: 58133 - DNA, 292 bp, Oryza sativa
  Clone ID: PAT_MRT4530_59880C.1
cttactcgtccggtcgagaaagattgctgtgttgggattgatcaatacagcctacatgtttgtggaatttggctgtgggtttgtgagtgatagtcttgggctgatctctgatgcttgccatatgttgtttgattgtgctgcactggcaattggtctctatgcgtcctacattgcgagattgcctgcaaatgggatgcacaactttggaaggggcaggtttgaggttctgtcagggtatgtcaatgcagtgttcttggctcttgctgctgtgatatctgtgttatcttccctt

SEQ ID NO: 58134 - DNA, 522 bp, Oryza sativa
  Clone ID: PAT_MRT4530_59881C.1
atgtcaagggatccacttgttgtaggcaatgtggttggggatatcttggacccatttatcaaatcagcatcactcagagtgctttacagcaatagggaactgactaatggatctgagctcaagccttcacaagtagcgaacgagccaaggattgagattgctggtcgtgacatgaggacactttacactttggtgatggtggatcctgactcaccaagtccaagcaatccaaccaaaagagaataccttcattggttggtgacggacattccagaaacaacaaatgcgagctttggaaatgagatagtcagctatgaaagtccaaagccaacagcgggaatacatcgctttgtctttgtgcttttccgtcaatctgtccaacagaccatttatgcacctggatggcgacaaaattttaacacaagggatttctcggcactttacaacctaggaccaccggtggctgccgtgttcttcaactgccaaagagagaatggttgtggtggcagacgatacattaga

SEQ ID NO: 58135 - DNA, 560 bp, Oryza sativa
  Clone ID: PAT_MRT4530_59882C.1
aaaaagtataaaagtgggaagccaatttaaatggggcataactgcttttaatatccccagggccccctttttttagggggccccaaattataaatttaatcccctcacgtccatgcaacccacccgtcctacctaaaaaaaaaacccggggcccattgttaaaaaagaccccgggggggtcccccccccgcccccccctcaggggggggcttttttttggccaagtgttttttgtaaaaatgccccctatttttcccctcctggccatttgccccccccctaataaagccctaacgggggggcccccccgtttgggaggccacccgcccccattttttgtagctaagttcccttagaacgccccggggggcccctcctttcccctaccattatttccctagaaaccggcggaatcttttccttccccttggactcgggcccccgtttgggggccccggccccctccgtaaaaataacgggtttttccccctttttggaaaaaagcggcccaccccccttgggccccccgggcccgaagtttttgaacccccaattccccc

SEQ ID NO: 58136 - DNA, 2783 bp, Oryza sativa
  Clone ID: PAT_MRT4530_59883C.1
atggcgcgccccgccatggcctttcaagggattccgtgcaagccccaccccatcccaaccgccgcctcagatagccttcgacggccgccagccgccccgctctgcccagacctgcctgattggcgtctaatggcaaaccggatggtaagggcgatggatgttgcgaggtgtttgacttcgaacaggtccagccaaaagcagtatgagggtggtcacaaaacctgtgcttgtgctgagctgctgatccgccgacattaccggcgtttgaaagctgaaatgcttcagtgttgtgacctgtgaacagatccaagcgcagacagttctgagtctgatccccgaagtcgaaaagcaggttaacacacgtaactcatgcaccctcgtttctacgagatgaactggattagagatgttgtaaatcgaacgctgttgttttctgaatttacagttttgacgatttgatgtaaatttccatttgagcagaaaatgcaagcagcatcagagacaaaaaacagcataggaagaatttttcctgtgaaacatgcttgtaaaggagtttgtagtagatctgtagaacatctttgcaaccaatgatacaagcagcttcatcttttacacatgaaacaacaaaacagatgcgggagcgggtgttcgcgctgatcgggaagggagcgattcccaagtggatcaaggcagctagccttcacaatttggtgttcccttatgacgatttggataagatgattcggaaggaccgggagccaccagcaaaggctgtattctgggcactgtttggagctatatatttgtgctttggaatgcctgaagtctaccgtgttctttttgaggcgtttggcatggaccctgaagatgagagctgccagccaaagctgcggcgccaactagaagatgttgactatgtatcagtggagtttgaaaagagacaactcacatggcaagatgttgctgcctatcggccaccaccagatgccctctttgctcaccctaggctatttcgagcatgcgtgccaccaggcatgcatcgtttcagaggaaatatttgggattttgacaatagacccaaggtcatgaacacactgggatatccattgcctatgaatgatagaattccagaaatcacagaagcaaggaacatagagcttggacttggtcttcagttgtgcttcttgcatccctcaaagcataagtttgagcatccaagattttgtttagaacgcctggagtatgttggacagaaaattcaggatctagtgatggcggagaggctgctcatgaagcatctcgatgcacccggtaggtggttggcagagaagcatcggaggttgctaatgaacaaatactgcggacgatacctccgggacaagcacctgcaccactacattatctacggggagtcggtgcaagacagatttgaacacaaccgccggctgagaaatccttccacgaccgccgtccagcaagcaatacacggccttgcttactgcgtctatggcaaaccggatgtaaggcgattgatgttcgaggtgtttgacttcgaacagatccaagcgcagacagttctgagtctgatccccgaagtcgaaaagcaggagtttgtaatagatctgcagaacatctttgcaaccaatgatacaagcagcttcatcttttacatatcagtgcgcaattcttcatcgttggtcatggaattaatcggtaatcggtttggttgcaacgaagcgagtaattctaatatgggccgtcaggcccaatttataagaggaggacgacgaggaggaggtttgcgaggcagcggcagggagaggaagatgtcttcgctgcggaacgcgatccagcggcgcgctcacaaggagcgcgcccagccggagtcgaggaagaagttcgggcttctggagaagcacaaggactacatcgttcgggcgaaggctttccaccagaaggaggaaaccatcaggaaattgaaggagaaggcatcatttagaaaccctgatgagttctattttaagatgatcaacagcaagactgttgatggaattcataggcctaagcctgaagcaaacaagtatactgaagatgaactcatgctgctaaaaactaaagatatgggatacatccttcagggtattcagagtgaaaagaagaaaattgaaaaattaagctccatgcttcatgaactagacaacaagcgaccaaacaagcatgtttactttgctgaagacagagaagaggtcaaagaaatacaatctagaatagaacaaaagagcagttcacttggtttggacaacatcccttcccgtataaagaggaaaactgcttcgtcctatagggagttagaggagaggaaacagagggttcaaaagcttgagaaactgtatgcagacatggccttgcagaaagagttgaagaaacctggacggaaaagaaaactccgtgaggatgagattgagaatcaaacatcccggcctgtttataagtggcgagcacaacggaagcggtaagatgatgtgaatggcttacaatggaatcattgagaatatatggagtaaccagtagatcctaaagcaaacggagactattgtttattttcttgaattctaatgcatttacatgtagcagtgcccctccacaaccgtctctcttcatagccttcacttgattgtatttgtggatccatgttggataccactttctgctacctgctactgatgtgatgtacctctgctttttacaaaatgttgggtaactacatcaacaattgagaacct

SEQ ID NO: 58137 - DNA, 273 bp, Oryza sativa
  Clone ID: PAT_MRT4530_59884C.1
ccgcttcccaccctccactgcttggttcgatttacccggatgaccttttaatcacagataggtcctcggatcgagcgggctgagatattcgagggggtctgctggaatgtgtcgagttcgacggcggcgagcgagagagagagagatggggatctccagcatggcggcgccgaaggatagcctcgtgctgtacgtgctgtacaacgcggtggtgtcggtggcggcccttgcccgcgttgtgccggacgccctttcgttcctggggctccccac

SEQ ID NO: 58138 - DNA, 327 bp, Oryza sativa
  Clone ID: PAT_MRT4530_59885C.1
gaggatccgcgtaccatgcaagaacatgaacacgggtacctcccaggctgactgtgccgtgctcatcattgactccaccactaggttcttgaggctggtatctccaaggatggccagacccgtgagcaccctcttcttgctttcactcttggagtgaagcagatgacctgctgctgcaacaagatggatgccaccactcccaagtaccccaaggcccccatgatgaaacgttgaaggagtttcatcctacctgaaggagggacggctacaacccctgacaagagtccttttaagccatctttaggtttttaggggacaacattgaat

SEQ ID NO: 58139 - DNA, 222 bp, Oryza sativa
  Clone ID: PAT_MRT4530_59886C.1
aacctctgcagagggggtacactttacccacacggcattactaacccggatcacccagcccgcaattcgaaagccgacacaggtttaccatatgccaacgagaggggtcccagaccaacacccggttaggtcccagaccatactatgccaggaagcccgagggttctccccgataccaccccgttgaatccacatgtctcttggcatcatggctcccctgat

SEQ ID NO: 58140 - DNA, 531 bp, Oryza sativa
  Clone ID: PAT_MRT4530_59887C.1
cctgtccctcaaggacggctgcgagccttggctgtgtgtacaacgtggaaagcctgcctcgacccccggcggggccctgtggaaggcgaccttaggttgaactcgtacgacgatgaggaccagcgtattgtttgttgggttgcctccaccgggccagccctgcgggccctgagtctgtccgatcatgaatgtagagccgaggtgccccgtaccttgcttgggataccgtcaaagaccttgaaggagctctccctgcatctagactggcaggtgttacagaactccctcgcagcgatacggtccttcactgggctggaggggcttggactggatgtgggggacagtagggatagcgaagccctagaccttgcagcgctgcagcccctcttggccctgaagcgcctccactgctcctacgggactgtggagttgaggggcggcccgttgcttccccagctcactcgccttgaatttttcgagaccaatagtgtagtcatggaggcaacactggccagcctgcagcacttgctt

SEQ ID NO: 58141 - DNA, 471 bp, Oryza sativa
  Clone ID: PAT_MRT4530_59888C.1
atggcagaggcgaaaggcataggggatagctggagctgctttcccaaggccaaattcggcatttccccaaacaaatctgatgatagtgaggctgtccacgattgcagaggtgacgatggcatagactgcgttggtgcaagtggtcattggccgacgaggcactggcggaacatgcccgctagagaggtcgcaaggagaggctgcacagagagggacacaatgagcaacagtgtggatggcggcctagacaacagcgagcggggagcgtcgccgatccgtgggtcgctgctcaccctcccgtcatcggctgccaccctgcgtctatcgccgtcgctgttggatgcaggtcgttgtccggcgtttgactgctctcgctatcggatcaaggccagcacccatctccagcgcccaccaggtgaaccaggtatagaggatgtggtggaggcgtgggggctaatcactatcagttag

SEQ ID NO: 58142 - DNA, 378 bp, Oryza sativa
  Clone ID: PAT_MRT4530_59889C.1
atggcggttgtgacagttatgacggtttccgggacggttacacacgacaaaaaaattgatggtcaaaattggtttataatgaccgtcaacaacaccgaccttcaagcctctgctgcaaagcgcattccgtacaaccacctatctaatggctacgcgcacaatggcttcactcggggacctcatcctgcacaacttccaagaaaaaggttcatgtcgcgggcgtgctacgatgccaggatatactcgaccaccttgaggacgccacctcatgtacatgagcaggcagcccgacaagccgttcttatggcggtcagctccatgatgcggtggctgattgagccaatgtccatggtagaacaacgcatgtgccctaggtag

SEQ ID NO: 58143 - DNA, 182 bp, Oryza sativa
  Clone ID: PAT_MRT4530_5988C.1
tagtgtgtagctagtatggtttcccggggataacatatcatagaggttatggtacttggacaccccgcactgcatggtttgggtatgctgatggatgtaagtacccttttccatgggacatatcccctattttaaatgtggttttattttcctggggctgttaaaaaaaaaaaaaaaaaaaa

SEQ ID NO: 58144 - DNA, 2895 bp, Oryza sativa
  Clone ID: PAT_MRT4530_59890C.1
atggagcgttcactgctgccgtggttgcttcttcttctctgcttcgccgacggcgtattccaatctcgtgcacagccagacagcaaaggtttcattagcatagactgtggtatccagccgaacacgagctacgtgcacaacacgaccaagatatcctacgtcgccgacgacgacttcaccgacggcggctccaactacaacgtttcgccggagtacatcaaaccgcagctctcgcagcggtactacaacttgcgtgccttccccgacggtgcgcgcaactgctacacggcccggtcgctggcgcctgggatcaagtacctcatccgcgcctctttcttgtatggcaactacgacggcctcaacaagctgccggtgtttcatctctacattggcgtcaacttctggaccatggtgaacatcacgagcctcggcctcggcggctctcgttatgaggaggccatcgtggtggtgcccgatgactttgtgcaggtctgcctgatcaacactggcaccggcacgcccttcatctcctcgctggagctgaggcctctggacaaaaggctctatccgcaggtgaacgccacgctgggcctcctccagctcaaccgcctcaactttggcccgactgataacagcctcgtcaggtacccagatgacccacatgacagattttggggaaactgggacagctatacatcgagcttatggaaggagatatccacggcgtcgagggtagataacttagacggagacatattcgatgcgccgacggcggtgatgcagacggcagtgacgccgcgcaacgcgtcaggtaacatctacttcttttgggagccttggccgcagccaaacgacccgacgccgccgtacactgtcatcttccacttctccgagctggagatcctcaccaacaacgcctcgcgccagttctacatcaatctcaacggcgaaccgttgatcgatactgcttacgagccgacataccttacagcgagatacttatatggcttggagccccttgaaagaacctccaggtacaatatcaccatcaacgctaccgccaactcgacgctgccgccgctcatcaacgccgccgagattttctcgatcatctccaccgcagtcatcggcacggactcgcaggatgcatcttccatgatggcgatcaaggacaagtaccaagtcaagaagaattggatgggtgacccgtgtatgccaaagacatttgcgtgggacaagctgacctgcagctatcccaattcgagcggtgcaagaatcataagcttaaatctgtcctccagtggtttgagtgctgacatatcatccgcttttgggaatctcaaggctcttcaatacttggatctatcaaacaacagtttgaccggctcaattccggatgtcctctcacaattaccttccttgagagttttagatctgacaggaaatcaactcagtggatcaattccatctggaattctcaagaggattcaagatggctccttaaatgtaagatatggaaataatccaaacctatgcatcaacggcaattcatgcaaggcagctaaaaagaagagcaagctagccatctacacagttattcctgcagttctggttgtattgatagcatcagttacaacactcttttgcctgctgagacgaaaaaagcaaggaccaatgaacaattctctagagcagcaaaacgagatgtcgacatcaacaagccacgtgctgataaatagtggatatggtgacaatgtatcgctgcggcttgagaaccgtcggtttacatataaagaactagagaagataaccaacaaattcaaacgagtgctcggacggggagggttcggatatgtctaccatggcttcttggaggatggcacagaagtggcggtcaagttgcgatctgaatcctcaagccaaggtgctaaggagttcctcatagaggctcaaattttgacccggattcaccataagaatcttgtatctatgatcagttactgcaaggatgggatatacatggctcttgtctacgagtacatgccagaaggaaccctagaagaacatattgtaggggaaaacaaaaaagggaaaatacttaacatggagagagaggctcaatatcgcattggaatctgcacaaggtgtataattctcactataccaatggatccatatgcactgcaacaaacccttttagggctagagtacctacataaagggtgcaatccgcctattattcacagggatgtgaaggcgaccaacatcctactaaacacaaggttggaggcaaagattgccgattttggcttgtccaaggcatccagctatgacaacatcacccatgtatccacgaacgctctcgttggcacacttggatatgtcgatccagagtaccagatgacaatgcaagcaacaacaaagagcgatgtctatagctttggcgtcgtcttattggagctggtcactgggaagccggctatcttgcatgaaccaaaccccatcagcgtcatccactggacacgacaacgtctagcacggggtaacatcgaggatgttgtggacacatgcatgcctagtgattatgatgtaaatggtgtgtggaaggctatggacattgcgttcacgtgcactgcacaagcatcgacacaacgactcactatgactgaagtggtgatgcagttgcaagagtgtctcgagcttgaggatgcacgttgtgctattggcgatgcacacaacgagttctaccctgaccctcggagcgaccacaatttaagttataacacgtatgtctcggaccggtccaacgatgtgagtcaaaatagtggcgtgtctatgatggagcataattttgggagggtgcctacaatggcctccggtcctgctgcacgataa

SEQ ID NO: 58145 - DNA, 393 bp, Oryza sativa
  Clone ID: PAT_MRT4530_59891C.1
atggagctgccgccgctgcattggccctcggatctcctctcagtcgcgctcctccttcgccagccgccggccgcgccggtgtcgccgcctcaccccgacgacgaccgccgcgctcctccccgtgcgacggcagccatcggcggcgccgcccgtcccatcggccctcctctccgcgccgctccttccccgtcagccgccggccacaccagccctcctccacgcgacgctgccgtcatccacgcccagaggaaagaggaagagagagaagaggggaaaaagagaaagggtgatgacgtggtctatctgacatgtggggcccacatgggtcccatgctgagtcagccgtcacgtgggataaaaccggggtcaaaaccgccaatggaccttttctga

SEQ ID NO: 58146 - DNA, 177 bp, Oryza sativa
  Clone ID: PAT_MRT4530_59892C.1
atggacgagtgcggcggaggcggcgctgctgcaaatgtggtgcccggcggctgtgcagcacaacagccgcagcacgcgctccgccacgaggacaatcttccgcgcgcggggtacaagatttcatctattttgatttggtccaacacattgaacaatgtacagaacatggccatctag

SEQ ID NO: 58147 - DNA, 347 bp, Oryza sativa
  Clone ID: PAT_MRT4530_59893C.1
tcggatgatgaggcggcacaagatcgttaaagacgtagtggtaccaagtgaggtcagattctcgaagaacgcggcagtgttgatgacgaacatcagcgctggcggtcttgaacaagactgtttgaatgattcatggactgacgcctatggtccacattatggtgttcggttgacttgcactgcactcatggttcataggcagcaagcttgagatctggcgggatgatcaccactggttgtcccatgacttcatgttctgtgcctatgagctatgaagcttgttgacggatgctgatgatcataaggtgggtaataggcttatgtcactgattaactgatgactgaac

SEQ ID NO: 58148 - DNA, 465 bp, Oryza sativa
  unsure (1)..(465): unsure at all n locations
  Clone ID: PAT_MRT4530_59894C.1
tttagaaattattattttaatgggtgcggtgtgcaccagcaaatatccaacttttgaaagtgtcttcacccaaaagtcactttgcgtggtgtcctacagctaaaactgcaaagtcacgatgccctgtagaaagatttgccaaaataaaaaatatgtgataggaggagcaaacatttgcaccattccagcctgataagattaatcaaacacaacgcccaaagaaagcagcagtaactctgaatcaaattgatgtcgctgaattggagctagtcattctgaatacagcatgaggtattgaagacatgataaacctgtacaaaattaacaatctcacaggtttctttgtacattatccaaatcttctctacactgggcaacagctaccaatccttgcatcccatgcctaagtaggagacaggtatgcgaaccgaagttggaccggatctcatgtnctcaagaatgaag

SEQ ID NO: 58149 - DNA, 280 bp, Oryza sativa
  Clone ID: PAT_MRT4530_59895C.1
atagaaaaattgaattttttcacgtttttttactacaacaaacatgacacaaccactgcctgaattccactgcatttacttcacgaaactatgttactgtacaatatttacaaggatcatctttcacatttgttcgattcatgtttaagatatactcattttaagctccataactccgaagaagaactcgatttacaaggctcattttactatacatacatacagaacttcaacaacgcctatatatcctatacataacagaaaaaatctcacaaactgt

SEQ ID NO: 58150 - DNA, 1127 bp, Oryza sativa
  Clone ID: PAT_MRT4530_59896C.1
tttttgtgcgtatccctcctcgtcagtttgcccttgtccaccgcctccgcctccgcctccgccgatccccatccatcccgcgagcgagcagggacgccgtcgttagtcctgctgcttccgccgcatccatcctgtgcagtgcggtgcctcgaggatatttccctgttccctcggtgttgactcctcgtgaattcgcccgccgcctgtgccgccgccgatcaccatccatcccacgggcaagcaggggcgccgtcaccgcatcctgaagggaagaggaagatggatcagcaccacgtgcagcagcagcagtatgttgacccttatcggacaatggtgctgtcaccacagcctgaccacctcaatgccctccagtacaatcaccagcagcagccacagccaccaccgcaagcaactccaccaccaccacaacatcaccatgcctcactcgcctcccacttccatctcctccatttgacgacaattgtagctgatacaagtggaaagggttaagggatcctggttgaggtgttgacgttgaagatttgtaggtgtcatttactagtaaactccatatcgggaacactaagtcgggaacattaagcagtaaaaggacaaaagaaaagtttgaaagaaacacaacagctccttgatcagaggaaggatttgatcacaaagtacagaagctccgttgaagacctgctcaagggggatacaagaagatagtaacatggtgactgtatggtagagttggaatgttaaagaggagctcgttgctacatgtgatcgttttctaatcagcatcggctacttttgtaatcgaggtagccttgaagttggtctggcttaggaacatactttcagtttgtgctatctcatattgttggtgggtaatgggttcatgggtttctgagacgagcatgctgcccagcttatattgaaggtttactgaggaccagtcattttgtttaatgggtaaatttgatccatgccattgcaaactcattgtattggaaaattgccattagtatttatctatttggaatttcacgcttaaaaaaaaaaaaaaaaaaaactcgggggggagactagttctctctctctctccctcgtgccgattcctgcagccc

SEQ ID NO: 58151 - DNA, 1263 bp, Oryza sativa
  Clone ID: PAT_MRT4530_59897C.1
atggattccaacgagggctctcatcgtataacacgaagtgggattgttagggcaaaacctgctgtcacggccgatgctgtcaacatccgcaatgtgatggagcaagttaatgaacaacctttctgcaacacaattctaatatcaggacatgttcgattctatattgatccaaccaatatgtatgaatttcgttctcaaaaggatgttcaacggtatcttgaatctggagatgttactaattgtgtaatgatacaaaataagaggaaaatggaagacctgcacactgcaagaaaccaatctcatcatacacgaagaccatctgatcacagacaacttgatgctggtgaaggggctactcaatgtgatctaccaatagcaagaggtaatagtgcacggagtgattttttggtaaatgcaaacagttcagacaattctgaagatatgtcatcatcagtgcccaagggtgtgtccgaagggaaacttacacggttaaagcttcagaaggcaagggttccgaatcaatccgtggagcatgaatcttccacaggagaagtagcaaatatggagcataagcccaaggaaaagaaacagaaaactaaacctgtcaaacagatctctacacctcttcgagcgtcacctcgtttagctgcgctgaagattaaccaagaaggcaataatgagcccaaagatgaagctctcagcacaaacacagacactgctaatcagtcacaaccaaagttgaccaaaagtcctaaagcaaaggctaattcctctgtacttcctgagaagagtgatggagcacatacttcaaatgcttctgaaattcctcaaaacaagtatccatcagctaccgagcaaatgcaaggatcatctgttcatcctcaacaggctggaacagctgatgctatgcctgggtccgccctttcatcgttattgcgaagtatctgtcagatccatgcctcaagtttgcgatcaagactcttgcaggacatgaacaaagggacgacaccgaattgttcctcttctgcttatgatggtagtagaaaccatgcgcaagtcgaccatgtcggcatgccaatgccaaggccatcagataagttctacggcagtggctggtttcctccccagaattctacagaattttcacaggaaacagttcagttcccgcataattcctccgttccaaagaaggccttcaagtactcaaatgttgttcctgtgcacatattttgtcgattcttcgcacacctttggaacatatga

SEQ ID NO: 58152 - DNA, 425 bp, Oryza sativa
  Clone ID: PAT_MRT4530_59898C.1
actaattgtgtaatgatacaaaataagaggaaaatggaagacctgcacactgcaagaaaccaatctcatcatacacgaagaccatctgatcacagacaacttgatgctggtgaaggggctactcaatgtgatctaccaatagcaagagtgcccaagggtgtgtccgaagggaaacttacacggttaaagcttcagaaggcaagggttccgaatcaatccgtggagcatgaatcttccacaggagaagtagcaaatatggagcataagcccaaggaaaagaaacagaaaactaaacctgtcaaacagatctctacacctcttcgagcgtcacctcgtttagctgcgctgaagattaaccaagaaggcaataatgagcccaaagatgaagctctcagcacaaacacagacactgctaatcagtcaca

SEQ ID NO: 58153 - DNA, 1645 bp, Oryza sativa
  Clone ID: PAT_MRT4530_59899C.1
ctgcaggaattcggccgcggggaaagagatagagatagaagactgtagtgtagtgggagagagagtgcgagagagagagacagaaatccttctgctttttctttcctctccctagtccctagtgcgtggaggagtagaggtagagcaaaccactgaaccacatcgccttctttctactggtttctaccgtgttcttgctgctgctgctgctgttcttcgtgagcctcctcgacgacctcgatctgcttgtttcttcccggctccatggcggcagcggccgggccgtagtggattttgtggatttcattatcaaaacgggaaatagactatggattccaacgagggctctcatcgtataacacgaagtgggattgttagggcaaaacctgctgtcacggccgatggtaagattgagcctgctggggaggggttacctcatggatggttgaaagaatacaggcctcggaagaaccaatctgggtctagagtcaagggtgatacgttctatattgatccaaccaatatgtatgaatttcgttctcaaaaggatgttcaacggtatcttgaatctggagatgttactaattgtgtaatgatacaaaataagaggaaaatggaagacctgcacactgcaagaaaccaatctcatcatacacgaagaccatctgatcacagacaacttgatgctggtgaaggggctactcaatgtgatctaccaatagcaagaggtaatagtgcacggagtgattttttggtaaatgcaaacagttcagacaattctgaagatatgtcatcatcagtgcccaagggtgtgtccgaagggaaacttacacggttaaagcttcagaaggcaagggttccgaatcaatccgtggagcatgaatcttccacaggagaagtagcaaatatggagcataagcccaaggaaaagaaacagaaaactaaacctgtcaaacagatctctacacctcttcgagcgtcacctcgtttagctgcgctgaagattaaccaagaaggcaataatgagcccaaagatgaagctctcagcacaaacacagacactgctaatcagtcacaaccaaagttgaccaaaagtcctaaagcaaaggctaattcctctgtacttcctgagaagagtgatggagcacatacttcaaatgcttctgaaattcctcaaaacaagtatccatcagctaccgagcaaatgcaaggatcatctgttcatcctcaacaggctggaacagctgatgctatgcctgggtccgccctttcatcgttattgcgaagtatctggtcagatccatgcctcaagtttgcgatcaagactcttgcaggtgacatccctgctctagacttcattccatcacaggacatgaacaaagggacgacaccgaattgttcctcttctgcttatgatggtagtagaaaccatgcgcaagtcgaccatgtcggcatgccaatgccaaggccatcagataagttctacggcagtggctggtttcctccccagaattctacagaattttcacaggaaacagttcagttcccgcataattcctccgttccaaagaaggccttcaagtactcaaatgttgttcctgtgcacatattttgtcgattcttcgcacacctttggaacatatga

SEQ ID NO: 58154 - DNA, 232 bp, Oryza sativa
  Clone ID: PAT_MRT4530_5989C.1
aaggagatggagttccggtcgccattccactcccgaagcccaataccacagagcctacccacagaccgtttaataatggccgccccagaatccctcttaggtccggccttcgccggataaagaataactagaataaataaatttcccacaccacattgttttctgctatgtactgtccagtctttcgactaatgatgataaaccctctctttaaaaaaaaaaaaaaaaaaaa

SEQ ID NO: 58155 - DNA, 606 bp, Oryza sativa
  Clone ID: PAT_MRT4530_598C.1
atggcgttgtcggagccggacctcgcggcggagacggaggcgatcgtgtcggcgctcacgcacgtcgtcgcgtacggcggcggcggcccgccgccgagcgaggagaccgccgcgtcgcgggcggcgcgggtgtggctcgggacgttcgccaccgccgaggacgcggcgcgcgcctacgacgccgcggcgctccgcttccgcggggggcgcgccaggctcaacttccccgaggacgccgccgcggccgacgagcgacgcgccacggacgccgcggccgccgcggcggcggcgtcgtcggcgcccgccgcgctgctggagtcgcagccgggcgacgtcgcggactgcctcgactactccaggatcctggcgggggcgccggagcggccgacgagctccaccgtcccggacgggttcttcggcggcggcgggaacggccgcttcttgcactcgtggagcattggcacgtcgccgtcgccgtcgggctcgggctcgggcggagccggcggtggcggtggcggtggcggtggcggcgcccctgttcgtcctctgtttcatggcggtaacggctgggagcaacgcggtgacagtgcatacaacggtttctag

SEQ ID NO: 58156 - DNA, 3017 bp, Oryza sativa
  Clone ID: PAT_MRT4530_59900C.1
atggcacccatgctcctcttcgctgcactcatgttagcctcactatccgaagcagcggctgacgatgggatcggcggccagtcaggttttgtgagcatcgactgcggcagggaggccaactacagcgactacaaggaccccaagaccggcatcgtctacgtctccgacgagccgtacatcgacgccggcgcaggggagaatcaccggatctccgccactgccacggccaccgccgccgacagctacctcctccagacgctccggagcttcccctccggcccgcgcaactgctacgcgctccccaccgtcgccgggaccaagtacctggtccggctggggttcctgtacggcaactacgacggcgagaacagctcgtcgtcgtcggcgtcgtcgctgcggttcgatctgcatctcggtgcgcaacgctgggccaccgtggacgacgtggttgtgcagaccggcgggattagccggatgtacgaggtggtgttcatggggtgggcgaggtgggcgccggcgtgcctggtgaacgtcggcggcggcacgccgttcgtgtcgtcggtggagctgaggccgatcgacgacgagctttacccgtccgtcaagaccagcgagtcgctgtctttgtttaaacggtcggatatgggggcggacactactactcttacccggtaccctgccgatgagcacgaccgcatctggaaagggactggaaacccaggatcgacagacatttccacccaagaaaaaatccagtcggagaacagcttcgaggtgcccctccctgttcttcagacagcgatcacgacgcccggtggcaacgacacgacgctcaccgtggcatggcaagacaccaggtcgtcgagcgaatacatggtgttccttcacttcgccgactttcagaagattcagcccaggcagttcaatgtcacactcaacgacatcccgatcggatccaatggccggtcgctcatgttcagcccttcgcccctggactcttcctctgtatacagctccgatgggtacagagctgatgatggcaattacaacctcgtcctcaggagaacagctgcctcggcgctgcctccgatgctcaatgcgatggagatctatactgtcatcacacatgatagtccaaggacattccacaaagactttgacgcaatcatggacattaaatatgagtatgggatcaagaaaaactggatgggtgatccgtgtttcccgtccgaatttatttgggatggcatcaaatgcagcactgcaggtgatgataacacttcaagaataatatcacttgatctctcccagagcaacttgcaaggggtggtatctattaacttcacttttctcaccgcgctcaactatttaaatttgtcaggtaaccaactgaatgggccagttccagactcgctctgtaaaaatattgcaggattatacattttcagttacacgtctgacggagatatctgcaacaatagaacctcttcgtctcggtcaacaaacagatcaacaactatcttagcaatttcaatagttactcccgtattggcagtggctatacttcttgcatttcttctctggagagcaaaaggaaagcacaacgggttaacctcattcggtatttctttaatttcatataactggtttatgcaaaaaccagtttctacatttgatcctcccagagtaccggatcccaagaaagctccaggaagtacaacagatcactggagccatttgccaataaatggaagtcgccaattcacatatgaggaactgaagaattttactcttaactttcaacggtttattggacaaggaggttttggacatgtgtattatggttgtttagaagatggctctgaggttgctgtcaagatgcgatccgaatcatcattgcatgggcttgatgagtttttagctgaggtccagagcttgacaaaggtgcatcacagaaatctagtttctttggttggatactgctgggaagagcactatttagcactggtctatgagtacatgcctagtggcagtctatgtgatcatctgagaggtaaacgtgatgttggtgaaaccttgaactgggcaaaacgtgtgcgaatcatgcttgaagctgcacaaggcctggaatacctacacaagggttgcaatttgccaataattcacggggatgtgaaaaccaataatgttctcttgggtgaaaatctgaaagctaaactagcggattttgggctctctaaaatgtatattagtgactcgcagactcacatatcagtcaccgcagctggaacagtgggttacattgacccagagtactatcagaccggacggctaactgagagcagtgatgtttatagctttggtgttgttctactggaggtagtcaccggtgagcttccgatactagctggccatggtcacatcgtccagcgtgtggaacgtaaggttacctccggtagtatcggcttagttgccgatgcacggcttaatgattcctacgacattagctctatgtggaaggtggtggataccgcaatgctgtgcacaacagatgttgctattcaaaggccaactatgtccaccgttgttttacagttgaaggaatgccttgcattggaagaagctcgtgaggataggaatagggcaggcccaacaaatgatgccgtggatgtggtatccacatttggtccatcggcaagatgaactaagaagctggatatatatgtacatagatgtggtatttattttttggtcaaacatgtgttttggtgaagtgtttgtcatattaaggcatgatatttagagatgatatttagagaaaatatacatgcaaacataaatcctattataggattcagaaaagggcgtctgatatttgtctgtgttaccatcggtaaaaatttactccgagaaaaattagacgtggacatcctttttagatcctatagtagtttcaggtttgcagtacatatttttcttgatatttaaaaaaaaaaaaaaaacaaaaaaaaaaaaaa

SEQ ID NO: 58157 - DNA, 360 bp, Oryza sativa
  Clone ID: PAT_MRT4530_59901C.1
gagaaatctcaagatattcaagtacctattgaagatgcggcgaaaactatacaagcggagaagactgaagccgacgccgttgctgtcgacatcggcagtctgaccgagccagccggccggtctaaccgccagactacggccggtctgactgaccctcctagccggggtggtctgaccggcattgcacagcggtctgaccggtggtacctgcggtctgaccggctctgcatggccggtctgaccgggcagacagggtggtctgaccggcattgcgtggccgacgtcatcgacaagcgtttgaagactttgaaggagatgaagatgcttcaagatgagttggacgtggagaagggcctgtag

SEQ ID NO: 58158 - DNA, 243 bp, Oryza sativa
  Clone ID: PAT_MRT4530_59902C.1
cgttcagacttttactaactataaaataagttaccaagaataaagatcacaaacgtgtgctatcatacgttgtggaataatgatctcatgtacattggttgcaaactagttgttgttgttggtgtccttctctcaaccttcaactgtccccggtacaacgtgtacataacgtacacgtagcggtagaagtagtagacgacgacgggctcagtcgtgtttattgaacaacgtacgagacgtagt

SEQ ID NO: 58159 - DNA, 3502 bp, Oryza sativa
  Clone ID: PAT_MRT4530_59903C.1
atgggtactgacgccgttcgcaccccctctgcgcgccgcgcagcccgaacccgcagcgcatcgtcgggtggggaaacaccaacggagagctccggccgtaggcgctccaagcaagccgccgtaactggcgagcgcggtggtcggcgccgacccgctgccggcggtgaggggggcagagatgaagagggtaggaatggatatgtagtggcgcagcttctcaaaagcccttctgcgcgccgcgcagcccgaacccgcagcgcatcgtcgggtggggaaacaccaggcggagagctccggccgtaggagctccaagcaagccgccgtaactggcgagcgcaggtggtcggcgccgacccgctgccggcggtgagcttctcaaaagccctcgctctggccgccccaagaaccaaccatcaccgccaccgcatgaggaggaagaggggaaccatggaagcgcacgctatgactgcacttttcaggatgagggaggccataatttttgcaccgccagagcttgtctggggcaacgtgcggagtcacccatggtggccgggccaggtgtttgatgctgcagatgcttccgagcttgcgctgaagcataccagggcaggcgctccccttgtcgcctatttctgggacaagaccttcgcttggagcgatgcctccgcacttctgccattctgcagcaacttcacgcgcctggccagtgttgtagatggtgcgtacatgaggggcgcatatcatggtagaccatttcttgactacatcttagctctgggaatgaatccactggctggtgccgaccgtctcgaacttacaactgccaaagcacagcttagggcattcaattgctcaaggggtagtaggcacctccctgagtttgtgacctttgaggggattgaggatgtttctgtggcgatcccacacaccaagaggaaaaggatggataaaagtggtggggatgatgtgatggacatggagaagaagccaaggcgtggtgagagttcatcacgcaagaaaaaggttttgccggaggctggaaagaaggagattatggatggggaaggttctgtgccaagtataggggcaacagaagatacattaagtaaaacaaagaagtcgaagaaccagaactgtgcagcaaagaagaacagaaacacctcaaaagatgcagatgggcttgatatggatgacaaaggttctgtgccaagtaaaggggcaacagttgatacatcgagacaaataaagaagtcaaagaaccagaacagtgcagtaaataagaataaaaacacctcaaaagatgcagatgggcttgatatggatggcgaaggttctgtgccaagtaaaggggcaacagatgatgcatcgagtaaaacaaagaagtcaaagaaccagaacaattcagcaaagaagaacaaaaacacctcaaaagatgcagatgggcttgatatggatgacaaaggttctgtgccaaggaaaggggcaactgatgatacatcgattaaaacaaagaagtcaaagaacaagaacagatcagcaaagaagaacaaaaacacctcaaaagatgcagatgggcttgaaacagttggtgcaagcaaaaaactgtccaagaaggctgtggatgaaaccttgagtgacagcaaatcagcacgcagaacaagatcaacacgcatgaagggaggcaccccggtagccttgaaaggcaggggaaaggatagtggtgctgaatccttaaaggtggaagagaagaatactgctttgctcaaggagaataaggtggggcgtagagctggctctgcacgcaagaagtataaaaccacaggggatggggacggacttgaagatggcaatgccaatgtttctgtttcttctggcaagaggtcaacgcgtggtgaaacctcggtagcttcagaagcgcgaatctcagagcagggtaggaagaagaagaaactttctgaacttatggcagtgacagatgtgcctaatccttcttctggtggtaaaagcaaggctcgaggcaagcgttctatggatgcatcaactgagaaacttgaggatcctgatcgtgatttggaggatacaatgaagactaggaaaagaaagaaacttgacacattgggggatttgtcttcccagccacagcctgtctcccgcaagagcactacaaaggttggagaattgatgcacaaagctgctggacaaatgtcacagacacgacccgttcgcaaagctaatggcgcagtatctcagaagaattctcgtagcactaaagaaagacaagtaaatgctccagacaagtctgcacattctctgaaggtgaaaaagggcaagactgataccttgacagaaaattccctgtcttgttctgaaatgctgtcacagctctccctagcagtatttaatcttaagaaaaaggagagattttccagtgcaggcatgaacttctttactgatttcaggaagtactcgtatgcttctaggtctgatgttgagaaggagatatatgggaaggcaactaacactggatcctgtgcttcattttctgatgttgatgaggatattcctgagaaagctgccggcactgagcccactcctttggaacagcccttggctgatcatatgcaggatgattattgggctgacattctgattaatgtggaggaaccactgtctagtctcagaaaaaagaaagataagggtgtgaacagaacaagaaagaaggaacatgttaaaaaacctgccatgaaatcatcatcactgggaaatatagagggaccaactgttgaaggttcagagaacaagcaaccgaatgcagaaacacaactgagtgttgcaaatggaactaaagtaagttctgaagaaacggaaagttcctcatttgctggactagtgctgcacttcagcaggccaggtgctgttccgtcacgcagtgaccttatcaaaatctttagccaatatggacccgtcaatgaagccaaggcagagactgcaaacaatgctaactgcgctcaggtgatcttcaagaggcgcatggatgctgaggcagcatttgcaggcgcagggaaaatcggtgctcttggaccagctcttgttagctttcgcctctccgacttcccagccgctgcctcaggaaatgatcctcggcagggtgcatcgaagagtgactagagagtgtttacccacctgttgaacctgttgatactcggtgaggtgaaggagctgagttagtcagaaaaatgtctgttaggcggtagattgttacaggattaagcattcataggaacaaaaggttgtgcatttgtcatgtaaacatgtgattgttaagctgtccgcaggtcagatcagtgaccaataaaataggctggctctgtaagaacatgttgtaagctgatctatacctaaaaagttgagcttaatttgtcaatgtgagtagcgataaaaaaaaaaaaaaaaaaaaaaaaaaaacccgaacccagggctctcccccggggggggcccggta

SEQ ID NO: 58160 - DNA, 483 bp, Oryza sativa
  Clone ID: PAT_MRT4530_59904C.1
atgtcgtctgcgagttctgttgcgtcgccttccgcggcgcgagaaggcggaagctcgtcaacgcgtgatgtcgagcagcagaagtcggtggcggccgtaggcgcgtcgtcgccgaaattaaatggagcagaatcctttggtggtagatggcgaacctcgtctgcgagttctgttgcctctccttccacggaggcagaaggcgagacctcatcgatgcgtgatgtcgctgagcagaagccgatggaaatcaataccagtacagaagttgctaccgcaaagcaacatggatttgattggggataccctggatttttgatgattgggaaggacaatgaccaaaacccccctggccccaaattgcttgaagagaaacaaccttctgttgatcaccgagaaaaatatacgggtaagagaaaacgggtgaaaatattggattcattaaacccgttaatggtcattaccattaccagggcaaacgattga

SEQ ID NO: 58161 - DNA, 375 bp, Oryza sativa
  Clone ID: PAT_MRT4530_59905C.1
gtggctggcgcacgccttctcgccgcgcgcgctcgccgcggcgcgcgccgtccacgatgcgcaaggtgagggacctcgtggcgtacctccgcgggcgcgccgggcgggaggtggacgtcaaggacgccgtgtacggctggcgtgctgaacctggtgtccagcgcgctcttctccgccgacgtggtggacgtgggcggcgagtcggcgcaggggttccgggagctcgtggaggagctgatcgagtccatagccaagcccaacgtatccgacctcttcccgttcctccgtccgttcgacctgcaagggtggcgtcgctggacatccgggcacctggccaaaatctacaaggtcctggacgacataatcgaccgccgg

SEQ ID NO: 58162 - DNA, 402 bp, Oryza sativa
  Clone ID: PAT_MRT4530_59906C.1
aaaggggaaaaaacccttggggggaatctgggattctttgaaaatcccccccttgaaaaaaaggggtttgaaagggaaaattgccaaaaattacaaaaatggtgggtgacaaaaaaaaaaattttttaggaaaaaaaaaactaacccctgggcctatgaaacaaccacctttttttgaaaggggaaaaaagaacctaaaaaaaattgggagggttacaaaaccaacactccaagggagggggagcccgccccaagggggtttgctacaaccggaagggttggaaccccgggaccaaaatggaagggggtgtttggtaaaccccctctttggggaggaaaaagatttttaaagggccccaatttttaaaccagggtggcaccacaagggtgggggaaacaaac

SEQ ID NO: 58163 - DNA, 536 bp, Oryza sativa
  unsure (1)..(536): unsure at all n locations
  Clone ID: PAT_MRT4530_59907C.1
tctcgggggncgcccgcgacacattnnccntggngaaggcggctgttgcgcctggcagcagtgagagcgccaagggcactacccaccttgtccaagagggagatggccccaccaccgcgaccggaagtgcccccggcctcaagcccggcccccatgggtcccatattcatgcacccggcgacaccaccaatggccgcatgtcaaccgggccacactacaatcccgccggaaaggagcatggagcaccacaagatgagacccgccacgccggcgaccctggaaaaggcaccgccggagaagaaggcgtcgccaaaatccatgccgctgacagtcagattccacccaccggaccaaattcaaacattggcagagccgtcgccgtgcacgccgaccccgaagaccccggaaagggtgggcaccaagccgagcaagaccaccggaaacgctggtggccgggccgcccgcgggaacatcggaccccacgggcgaaacccggaggtgagaacccaccctccatcccccagcaccagaagccc

SEQ ID NO: 58164 - DNA, 1468 bp, Oryza sativa
  Clone ID: PAT_MRT4530_59908C.1
ccggccggcacaaaaacagtcgaaatgaagcgagagagagatagatagggaggctgcagcagcaacagcatcagcagcggcggcagcatcttctcttccccccctcgcagcctcgcgtctcgactcccttttcaaccctcctcccctccagtctccttccctctcttctcgtctcctctcccaccaccaccgcgccacctaccctcgccgcagcggcagccgcggttttaatgaaaagtagcacttgttaaagctactagttttgttagaaaatctaacatggggtcaggaaacctgatgatgaagaaggtggtgaggcccagctcttttgatttcgacatacagcttgataaaagttggacagaggatgttacttgcccaatctgtcttgattaccctcacaatgctgtcctgctaagatgtacatcttatgagaaaggttgcaggccatttgtctgtgatacagatcaaacccgctcaaactgtcttgagaggtttaaaggtgcatatgagctccctgccaatatgaaagtttcaaccattgcggtggctcctcttgatagtatccatattgtggctcctaatgtgaacaaccgcccaagctgcccattgtgtagaggagatgtcattggatggattgttatcggtgaggctcgtctacatcttaaccagaagaaaagatgctgtgaagaggattgttgttcattcgttggcaacttcaatgaacttcagaagcacacacaacaaaagcatccagactcacgcccttcggaaattgatcctgctaggcaagttgattgggagaacttccagcaatcttctgatattgttgatgtgctgagcacgattcatgcacaagttcctaatggaattgttctgggagattatgtcattgagtatggggatgatgaaactggagaagaatatgaagttttcaggcgggtcagaaggcactggtggtcttttatgtttttcaggggattctctagatcttcaagaagacgaagaagagcaagggcaagggaaagaagaggcagtggaaggaggaacagcaatcaggcacatctcgaaagctttaacctcgaggttcccacacaatctgttgacttgagagaaatcagatttgatgaaattgatgatgaatacatagtcacaggggccatacctagtattgcaacacctggaagaatggctagtttccattacaggtctgtagaaacagtctactgttaatcttccttagttattggagctatatctatcatttttgtaagaacaaagaacacatgctagtccaatgaaaaaatattcaggttgtagagaatatggaatacaaacataccgcacttttggaatcttcttgttcctgatgcacttacttttacagtacctacttgagctgccatgttatgcatagaaaatacagccgtttacattttttactctttgtcatgttccctgttttctt

SEQ ID NO: 58165 - DNA, 288 bp, Oryza sativa
  Clone ID: PAT_MRT4530_59909C.1
atgatgaacaagcaaccggtcgtgcggttagatcagaaacccccgaatctttggattcgcactcgtaagcagatcgtcgacttcccgccaaaaaacacacatcgtctcctccatagtcctttccctgcctccaatgatcagcaacagagcaatgcttttgctcccttttgctacacagttacacttgacatcatccccctaatcaccactgacaaccctgccccacatggctgggacccactcgacagtgaaaatggttggccaaagcgtgagtacgcttgggtttaa

SEQ ID NO: 58166 - DNA, 1527 bp, Oryza sativa
  Clone ID: PAT_MRT4530_5990C.1
atggagcacgccttctctgcccgtgactgccgtgaggccatgacatcaccactacgcagaaaactccgtgcaccgagtccacaaacacccacagtccctcacatctctcctcttgtcctcgaaaagcacaagtgcagaaccctctcggcctcctttctctctctgtctctctactccaaaatgctctgccaccgtggcctctccgccgtcgcctccggccgtctccgccgcgccctcaccaccgccgcctcgcgtcctccgtgggcgctgatccaccggatctcgacagcggacgggtccaccggagccggcgtgtcgctcgccctcgcgccgcccccgcgcgcctcccgcgtcaccatcccggcgaaggccatagcgctcaacgaccgcccgatcagcgccgacgagagccgcgtcgccctccgcggccgcggcgtcctcgccgcgagcggcgacggcctcctcctcgtctacaccttcaaggcctgcttccgtggcccggctcaccccgtcccggagcttccgcttgacgtcatcatcccagagctcgccaggaccaccgtcgagaccacctacgagcacttcgcgagcttcgtctgcaacccgctcaccggcgagctcttccggctgccggacttcgacggcacggagaacaccgtggacgtccaccacaccggcatcctcacccaacgcgacggcggcggcgaggacgggccgccgaagaggtacgccgcagcgcagctcagcaacgtcgacggcgacgacgagggccggcgattcctgctgcgcaggtactcctcggagacaagggaatggagcaagctggtcatgccgtctccgctgccgcccgggcgggcaatgggaatgaaccacgaggtggtggcattcggtggccggctgtggtgggtggacgtgagctggggcgccgtcgctgtcgacccgttcagccaccggcctgagccccgttccatcaagctgccggcaggtagcatcctctctgagaaaccgtgctcgagagagatggaacgaatcgtcaagcaccggcgaatgggggtcagcaacggcaagctgcgctacgtcgaggtctccgatcaggagccgttcgttgtcatgtcgttcacgctggacgacgagagtggccactggacgctggatcaccaggtggcgctgtctacgctcggggccaaagggggatctcctaaggggataccgtacatcggtgccattgatccgtttaacgcggatgtcctgtacctcgcgattgagagggttagtgttagcgtggacatgcgcttgaagaaggtgattcagtgctctgagctatgcagcgacgttttcccgacagtgagctcgtcaggtgtcttgcttccatgtgtgctcccaccgtggctcgattctttcccgatccctaatgcagttttgtgcttacattcaaagatcaacctttcaggcaagaacaatatgaaaaatgagacgctggctgacattctggttattaatattaagacaggaattttgatggattag

SEQ ID NO: 58167 - DNA, 420 bp, Oryza sativa
  Clone ID: PAT_MRT4530_59910C.1
atggcgtcgtcgtcggcgatggtgagggtggtggtggtggccgtgctgctgatgcaatgctgcaacgcgatcatggcggcgaggctgctggaaggtgacttgtttggcagcagctggctgcagggcctgcagggcggcgtcgccaccggcgagctcatcttgcagctgaattcgatcatggcttcgtcgtcggcggcgatggtgagggtggtgctggtggccgtgctgctgatgcagtgctgcaatgcgatcatggcggcgaggctgctggaaggcgacttgggcagctggttgcagggccagggcggcgtcgccggcgagctcatcttgcaggtgctcaagggagggtcgccaccggtaggcaatgattgccaccaaggtcccggaggcggctccggagccacctgctacccgccgtaa

SEQ ID NO: 58168 - DNA, 1214 bp, Oryza sativa
  Clone ID: PAT_MRT4530_59911C.1
atggaggcggcggcggcggcggaggaggaggaggaggaggcggtgtgggcgtggagttggggcgcgggaacggacgggcagctcgggaacggcggcttccaggaccaccatctcccgcagccgctcctcctgccacctcgctgccgcggtctggtttccttcgtcgccggcggtggcgcccacgctatcgccctcacaagtgatggtgaagtatttacttggggaagaggtacacatggtcagcttggtcatggggacgtggagaacatccctcatccaaagcttgtaaagttctttgagaactacatgataacctgtgtgtctgctggatggaaccattctggatttgctacagattctggacagcttttcatgtgtggagatggttcatttggacagctcggtgctggtgataaccacccaagaaacttaccttttgaagtggcatactttaccacaaagcatgttgtgaggcttgcacttgggatgcgtcattctcttgtccttttgaaagataattctgtctatggatttggctcaacaagacggggacaaattggtagatgcactaggaaccaaaagttctatgatgttccaagaataattgatggttttccagactgtaagatagggaatatatatgccaatggagatcacagtgctgcattggatgaatctggtcagttgtacatctggggaagagcattaattggtgaacatgatgatgatcaacctcggccagtctttccttctttgggtatttctcaagtggcattaggatggcatcatgcattagttttatctgaatcatcctcatcatcaacactggtgaaggttccctgtgttgatggagaacaggtggtgcacatagctgctggcactgaacattctgcttcggtaacagataaaggaacagtcttcacctggggttggggagagcatggacagcttggtttgggagatacttgtgatcaagtgactccacagagagttaatataggtgataagaggccatgttcttctgcttcagttaacgtctattgtgggagtggatttaccattgcggtgaattctggcttagagtctgattagttagtatcatgctggattcccctttatggctagtacagaagccaaacatcagatcctttcttgtgttgtcattggagtaaaaattaagtgtgcacatgatttggtcaaaaaaaaaaaaaaaa

SEQ ID NO: 58169 - DNA, 941 bp, Oryza sativa
  Clone ID: PAT_MRT4530_59912C.1
gcacagtcacatatatgtcacctgagagaattcgtaacgagaactactcttatgctgctgatatttggagtcttggactagcaatattggagtgtgctactggtaaatttccatataatgtgaatgaaggcccagccaacctcatgctgcagattctggatgatccatcaccaacaccaccaaaagattcttattcatctgagttttgttcgttcatcaatgactgcttgcaaaaagacgctgatgcaaggccttcgtgtgagcagcttttgtcacacccattcatcaagaggtatgaaaacactaccgtggacttggtagcttatgtcaaaagtattgttgatccaacagaaagattaaagcaaatagcagaggtacaaatatttgtacagcccacgattaatgttatgggctccaggaagagatcgaattggataggtatgggaggtaggaggacgtggatgcttgccgtacattactacctcctctttaacggcactgatgggatttggcattatatgaagacattctacatggaagaatcaactttcagtttctcagggaatgtgtatgttggccaaagtgacatatttgatactttatcaaatatacgaaagaagttaaaaggtgattgtcctcgagagaaaattgttcatgttgttgagaagctacactgtcgtgctcacggagaaacaggaatagctatacgtgtgtctggatcgttcattgtgggaaaccaatttctaatatgtggtgaagggttgcaagctgaagggatgccaagcttggaggaactctccatcgatattccaagcaagcggttaaatcctatttatgctgtcatggtgccacggtgggattcagatggttcaggattgttgaaagttgctgatgaagactatacaatccacgtctcaagacacttaactttctctaagtaa

SEQ ID NO: 58170 - DNA, 316 bp, Oryza sativa
  Clone ID: PAT_MRT4530_59913C.1
atggtcggggtcggactcgggacaaggcgctggatcccacaccggggaggagtttggcctgcaaagctcaccagcaccttcatcggcctcctcaccatcctcatcgacagcggcctagtccgcctggaagctgggccaccaccacggatcaaggagcgcgtcctccagatccgccctcctccacgctgcagacggctgctcatcgcttcaagagctgttggagtaaaccaccgggcaacctcgtcggtgcacgtgctggtcaccggccgctgtcaccgaattgctgccatggccagcgacgagcttgatctcgtcg

SEQ ID NO: 58171 - DNA, 172 bp, Oryza sativa
  Clone ID: PAT_MRT4530_59914C.1
atgaacaagctagggttttgcgggagcggagaagatgaggagcgcttagagactgaaaagttctttcgcaacaggcggacttcaaaatggatccccaaaactcttttaaaggcgcactaccggcggtgcgatttccaaggaaagaggagagatgcccgccgaaaatttctgg

SEQ ID NO: 58172 - DNA, 374 bp, Oryza sativa
  Clone ID: PAT_MRT4530_59915C.1
tgttccctgggttccttttgaaccggtcgatgaccttaacgcaaatcatcagcttaacattcatctgccaccgaaggtcctcccaagcctattatcccggttgaagaggcgatcttgggtacggttgggaagtttacctggatgtagcaccccaaagcaaagacaaatgcacagctgtttccttcaagtatctaagatttccaggaaccacaatggaatcccccacatacgacatagcaaaaatacagaagaggtgcaatttcaaaccacttcaaaagttcaatattgttttcctttcccaaggaagttttggaaattgaatggtaacctggaatgcctttccaagttgggtttcttcccacgggaaccaaaaa

SEQ ID NO: 58173 - DNA, 255 bp, Oryza sativa
  unsure (1)..(255): unsure at all n locations
  Clone ID: PAT_MRT4530_59916C.1
atggaggtgaacgcgaccgatacggcgttgtactcctgcggcggtgtcgcctactggttttgctctgcggtggcgtcggctgctgcttttgcttcgcgcgcaagtgtggtcggctcctcgtcgtggcttacgtacgtccgtcccgcgccggcggggtctccttgtgccccgccgccgccgnctccacgtcacccttatgccccgcggtcgtcgtcgtcacggctccatgttcaccgccacctgcgacccgcgact

SEQ ID NO: 58174 - DNA, 264 bp, Oryza sativa
  Clone ID: PAT_MRT4530_59917C.1
atgattcatatcgtctccgacgacgcgaggccagccgagtactcctacggtgcacgtactctactcttctattacaccctgcccatgagtgctcttgactgccgcgtgcgcatgtgccgtgtgctcgtcatgtgctcgcgccgttatcgtactaagatcggaactaaacggggccttaacttcggtggaacaaactcgccgaatcgatactacagctgccataagaccttcacaggcatgcccaacccgactgatgactcaaaa

SEQ ID NO: 58175 - DNA, 680 bp, Oryza sativa
  Clone ID: PAT_MRT4530_59918C.1
caccaagaaactgtctgtagggataaccacattggctgcatcaaccccaccccagaccacgttgctcccttaggtttaggttcacattagatggattaactacgaatactgcatccaaggttatacggtgggttgggaatgttctgggacagcactgcgaaaaggactcttgaggatgaaaatgtgctgaacactgccgttgagcttcgagattcctaccgggaccacggacaccgcgaggggtttgtgatgcacactgtgtggatgccgcaccaccttgctgatggatcccccgtgagctgtgccacggacagctcctgggatgtgcacttgcgaagaaattctgatccacactgaagaacccgagaactggttgtctgccaagtgaattatggcactaatccacgccacgcgtggaatccgtaaatcgctcatgcgtgataatctcatcgacaaggggagaaaattcgccgggcccacacatgtccactttacggaatagctatcactttcaacctacctgagaaatatgatatgtagttattagttttgatacattgcatcgagcgcccaccacgccctcaccccatgatgagatcatgtcggaacttcgaatgctcagtatttgggtgttaactgggaatatgaatacccttatcattagcgtaaataagtccata

SEQ ID NO: 58176 - DNA, 627 bp, Oryza sativa
  Clone ID: PAT_MRT4530_59919C.1
atgaacgcagataagcgccgccgaccatttgatgagagcgaccgttttgtgttccatcgacgcgctgaagaaatgtcctgcactgcttcacagtatgatccgtcagttacagtgttacttctgcaaattacttcgcccaaccttacgtcggtcagtctaccccaagatgcagacagagtgacaaatgcaggggtagaaaaaagaggatcaccagttcttatggcaaccacgcgcgctcgcttggatcggagcttcttgtggacgcagaggaagttgatcactgccatgcggacgacgtcgtcgcgtgcgcggatgctcgcggggacaccgaagatgaaggcgacccgcttcttggactccctggcgcggacgccgatgtgccaggcgcggaagaaggaagggggggtggagcgcccagcggaggaaggccggccgcgtcctgctgcggctgcagacgttgttcctgcagcttgcagcgctcgccatcaggccgccagcagctgggtcggggagctcgccgtcgatatctcatcctgcaagcacacgcaacgcaacacacagggtggctcaatcttgatcgccatgcagaagcagccattgatgcatgcaagctatctagctggctag

SEQ ID NO: 58177 - DNA, 457 bp, Oryza sativa
  Clone ID: PAT_MRT4530_5991C.1
gaaagctggtgcgcccgccggtaccggtcctttatctccggggggacccaccgcgtcccgtcccgtactctgatacttcccgtgttacgcctgtcacagcttacttacattggtcgccaatggcgtccgacatggacaccacacgagcgctggccatcttagcggccacaagctttgttgcaatgctagcatgtgtacaggcggcaggagacgagagctacacgttcatgaaggacgcggtgcagtccccgcaggtgtcgtactacgactacatcatcgtgggcggcggcacggccgggtgcccgctcgcggcgacgctgtcgcagcgcttccgcgtgctcctgcttgagcgcggcggctcgccgtacgacgacgagcggatcgggaacatgacggccttcgcggaccccccccccgacacgtccccctcgtcgcccgcgcagcggttcgtgtccga

SEQ ID NO: 58178 - DNA, 232 bp, Oryza sativa
  Clone ID: PAT_MRT4530_59920C.1
aaaaagggaagaggaaaacgccagtcaaaattgaaaaaaaaaaaagaggaccaccttctaatcacagaatcttacctaaaagaacaaactcccggacccgcggggggacacctgggcggacccgggggcggcccccagggttcccaccggaacctcggacgcggccctggaagcgaccagatttccctataaaggtggtttcagagcggggcggaaatacggccacaactgc

SEQ ID NO: 58179 - DNA, 303 bp, Oryza sativa
  Clone ID: PAT_MRT4530_59921C.1
atgggagaggaaggtaggcgagcagatcaggagggccacaggcaagagaggaagcgtcgtgagaagaccgaggggcagcggtggggcgagttggggcacctgcacgggaaggcctgccacctggggaagggagaggggcagggggagggggaggagaagcgccggagtgggggagtggaggagaagcgccggggggagggggttggaggagaagcggcgcggctgggatgcgtgatgcgagcgcgtcgcgcgggctggtggggaagggaggagtcgcgcgcacgctttgaaactgctatgtaa

SEQ ID NO: 58180 - DNA, 654 bp, Oryza sativa
  Clone ID: PAT_MRT4530_59922C.1
atggcggcggcggcctcctcgtcgacgacctccgccgccgccgccccggccacggccaccaccaccgtcgccttctccttccagcatcccacgcccacgccgtctcaccaccaccaccaccatggcgtcctaggttacagccccctcgtcctcgaccaccaccacccaaccaccgccgccgcctcctcgcacgcgccctctcctcccaccctccaccaccaccacggcggcggcctccacgccgccgcgcctcctccgagatcgtcgccgccgcatccatggtcttgcgaggaaggcgatcatcgagggaggccgcagatggggaataagggcgaggcggcggcggcgatgggcgccatggggatcaacgacgccggcaacaacacggcggcggcggcggcggcgcagcatcatctgggggttggcgcggtgaggatgaagaaggttgggggaggaggaggaggaggagggaaggcgcggcggaaggtgcgggagccgagattctgcttcaagacgatgagcgacgtggacgtgctcgacgacggctacaagtggcgcaagtacggccagaaggtcgtcaagaacacccagcacccaagggcttttgaactgccattcttcccatgcatggtgtgtgacacttttgctagatag

SEQ ID NO: 58181 - DNA, 733 bp, Oryza sativa
  Clone ID: PAT_MRT4530_59923C.1
cggcatgggtcttgcatttagtgccttcggcctgccagggtggagcagtataccaaccggacaagtttatgatcagtatttcaaggacaagaaaaccgacagctttgaagcttttcatgttgcctatgttgagttctgcaaagatttcaacaccgtgctacctggtcaagattttgataccccatcactcgaaaaaattcagaaattctatgatgatacttggaaactgatcaacgaagaccaagaaaagaagaaagcgttcatggattacatccgcgacaacgtcaaggaggcggcggtcgacgacagcctcttcatcatggccgggctggcggcgccggcgggagccatcgtcctcaagaggacagggcagagcatcccgcagctgaagaggctggacctcctccccaacgtcctcttcgtcccgctcttcactctcgctgccatcatgggagcaactgcagtccagatgaagcagaggagcagacacacctgatctcctcatcataatcatctacattgcgtcggcagttataatttacaaataataacatggatgaatgtcgatcaaatctgcactgcaatgtcagcgtcaaatatatacacacgttttcttttgtaatcttctttattgttactgtccatactgataataatatcacacaccgggatacgcctttgccaagctgccatcatctgagtgttgtatacatggtgaattattattattttt

SEQ ID NO: 58182 - DNA, 519 bp, Oryza sativa
  Clone ID: PAT_MRT4530_59924C.1
tggggagggatttttgtgatgcttgccagggggggaagcctttgaaaagcgcaagcgatgggcctttatccggttccggccctttgcgggcttttggtcgcatgttattcctggaggaatccctgtttcctcacggcgtgaaatccccctcccccagaggattgcccgatcctttatttcaggaggctggtcaggttttttgtctgggaccccggacatggggggtacgcattccatgtgcgtcagtcctgtccttggtccaacgggtagcatccctccccgttcaggctggggtagctggtgttcttcgttatcgggacgccggcgtagttcgtcaagcacgaacgcgattgtcgcaccactcatgttccggattgcccgcccgccggggcgcccggcccacaagaggtcgttccagttaggattgtctatttccgaccggtcgaaaggtatcgagcaaagtctgttggatgttatccttgatcaatgtcggcacctggatggacaggtggaaatcgg

SEQ ID NO: 58183 - DNA, 790 bp, Oryza sativa
  unsure (1)..(790): unsure at all n locations
  Clone ID: PAT_MRT4530_59925C.1
cccacgcgtccggttctagatcgcgagcgggggcgctttttttttttttttacatgagtgaaacaaacattggtacataacgtccgagcatagcatttgcatgagctgatcagaagtcctcaagcatgtatcaagtgtaacaacagcctcgaggcaaacaaaaatcaagggaaatggagaaaaagtgaaacaaaaactcaaccatgtataacactacttattccttacaatcagtaaacatcctggtaaaatatatcatagcgaagtcttaagagagactagaaagaatataagggagcatatctaccgacgcttatctcgactgcgtaggggagcagaggaggcctgaagcatctgcaccaaccacggcaagctcacatatggtacaaagctgcccttcgatcgaaggaacaaaccgggagccacagtacgggcaggaaacatccttctggccacggtagattggaacatacgtggcgccacagacaacaaatggatttctgtagtcatagttcagctcagagctatccttcttgccactgcactgctgctgcacctgtcgagccctgcttgcttgggcctgattagggttggtctccagaagcatgcttgcaaagngctctgcgcgagcgaaggtgtttggcttgggggcagacccgtggggctggcaagcgcaggcctggtgtgaactctctgctcctcgcctcgggcgagagggggcgggggtggttggggggggggggcgtggtggggtgaggtgcttgctgtgggcgggggtggcggggggggg

SEQ ID NO: 58184 - DNA, 279 bp, Oryza sativa
  Clone ID: PAT_MRT4530_59926C.1
atgaatcagaaagaggacgcaccaggatcccctcccctccgctgctcgccggatggagatcgccgcccggccctcccctgctcgtcttggcggcggcgcaacgagcggagcggaggagacgacgagaacgagacgggagatttttctttttcttttacgcgactcaaggtggaagacgagtgcgccacagatagcccacctgatctggcccgtaggcgaacgatgaaggtgacatcactcgtggacggcggcatagcaacctggaggctgggggtcgaa

SEQ ID NO: 58185 - DNA, 240 bp, Oryza sativa
  Clone ID: PAT_MRT4530_59927C.1
atggcgcttgcgagcggaggaggtgggcatctgggcgccggatccaccggcgaggagaccggggtcaccggatccggcggccccggcctcctcactgggagatccggcggctcattgggagggagcggcggcggcagcacggatctcatgaaaaacgaggcaatccagacagaaaaagggaataaagcatggcctgaagctacaaaacaaaaggacggtacggtgttaagaaaaaagtga

SEQ ID NO: 58186 - DNA, 264 bp, Oryza sativa
  Clone ID: PAT_MRT4530_59928C.1
gatggggccccgattatctaataaatttcagaaattttacttacaaagacaaccgggtaaacttggacgaaaacgtgagtggtggcgaacattttaagccggcggggtttatactaaaacaaaaacacaataaaacacatccacaaggaccgggaaggataccggctacacttttggaaaaagaccccagaaagataataaactctacggccgggcgcaagcaccagaaaaaaaaaacaacagggacttacaaaccaaacctgc

SEQ ID NO: 58187 - DNA, 324 bp, Oryza sativa
  Clone ID: PAT_MRT4530_59929C.1
atggagatggcaccgacacggtggcgctacgaagtaggtgctcatggcgatggtgtccctctcatgctatggctccaaggtggtggatggccagggtcggcggcccgagcttcagggaggggtcagatccatggccgccttggccagatttggccagtgacggtccaggtgtgcagtaagtcgttcacccctctgttggccaacattctcccctccatgttgctcctccccttctatggtcgatctgcttccatattgggtcattgggagctccgtggcaagggtagatgtggtgcctttgttgagctcacgacgtcgagatga

SEQ ID NO: 58188 - DNA, 349 bp, Oryza sativa
  Clone ID: PAT_MRT4530_5992C.1
taacagaaaacacgtggcctgggagatctgcttaactccaatgtaggtccaaagctcgccttcgaatgtatgagcgtgccagttgatttgatcctgtaatcaacaagaaataaatagaagcaaagaaaccgcggttaaatatataaatgatagccgatcggctaggactctatccatgtgcggcaatcaccttgaagcaccacgatccaacccgacatcacacatcaagttgtattgtcgggatcggctacatcggcttacctagcccgactcagactcagccgatcttatcgtagccgatctggactccagccgattcctgctctgttatcgaactcgatctctgcct

SEQ ID NO: 58189 - DNA, 118 bp, Oryza sativa
  Clone ID: PAT_MRT4530_59930C.1
cgttttgtagctgttattccagtgtgcccttctaaaagtcaacttgtgtgcattggccctgcaaactactgtaattagaacgataattgatgcaaccaattgtatatttgcctgaggc

SEQ ID NO: 58190 - DNA, 381 bp, Oryza sativa
  unsure (1)..(381): unsure at all n locations
  Clone ID: PAT_MRT4530_59931C.1
gataccctgtggcattcctccatattattttattcgatgtgccgtgttnaaaaaaaaaaaaaaaacngaattaaaaaaggaaaatataatttttttttatataagaaaaatcgcaagggtttaaaaaaaaaagggccgcccttttaaaagaaccaaatttaactaagcggggattgaaaataataatttttttattagggcaactaaaataaatttaattggcggctttttaaaaactgggaaattgaaaaaaccttgggttaaccaaattaattcgctttgaagaaaatccccttttcccaagttggaaaaaaaacaaaaaggccccaaacaatcgcctttccaaaaatttgccaaccttaaagggaaaatggaaccccc

SEQ ID NO: 58191 - DNA, 528 bp, Oryza sativa
  Clone ID: PAT_MRT4530_59932C.1
gctctcccgtatcccgtcatcagggcctacgtcgggccccagcccaccgcccactttcgccgacgacttcttccgcgacttcgccgactccatggtgaagatgagcaccattgacgtgctcaccggggcgcagggcgagatcaggaacaagtgctacgccatcaacatataataaagtaactgcatctgcatgcatgcgcactaatcaaaggttcgatttatttggtttcttccgtcaattttttttaattggtttcagtttatttgcaaaaaagatcgtgttaatttggtttgggtacagtacagatgaacgaatccatcactgcgtactatgtatatgtgtgtaactgatgtactatgtacgtagattgcatgccaatgggtttcttgttttgctactttttaatttgttttttggggtgcgtggcatctatgttcaactcttgtgaattcattcatgatatatgtaataagttcaaacgagacaataactaaaatatactctctttcacaaaaaaaaaaaaaaaa

SEQ ID NO: 58192 - DNA, 876 bp, Oryza sativa
  Clone ID: PAT_MRT4530_59933C.1
atggggatcgatttcaacccgccctccactccgaggttggggccgggtggacccgcagaggagcggaaagggggtcgttccagcccaacccaggcctaccctgccctgttgccatcgctacccaaccctccaaaaaaacataatggaaccgctaaccttttgtcgacggaaaatgcatccccaaaacttgtagattgtagatttagatcactggatgtgcttcataattcgtgctccatgtgcgtcttctccaactccgatgacctcctcttcttctccggcgctgtgtttgacatatttgatctgtcatttgcaacatttgtgtatggagtggaaagttggtttggttcctgcactattgggtatggaaatgaaattgtgattaagctcatccttgtgctgctgctttccgcagtagaattcggctgggtgcagaacgcgtccgggcgggcagaaggcacaatcgttgccattggcggcggcggcggtgagatcggcatcggccggcagctgctggagcacggtgcatgtgtcgacgaagaagctgtcaaggacatagggggtgaagcggagctccgcgaaaaccaggcaacgctgcttctgccagtggctgttcctcgcgcgagtgcgagccacgaagttgatgtggaggtagatttcgcctctgaatcgggcgcagcaggcgttgatgggaggcggcagggggatgagcttgctgtcctccacgggatcgaactccaactcatcctctgctctgctgcagaagaaggcgtggtaaaaggggaggacgtccatgatgtactccacgcgccgctctttctccgtcactggcatcgtccttcttgtaccccgacgaccaactgctctcaaaactga

SEQ ID NO: 58193 - DNA, 149 bp, Oryza sativa
  Clone ID: PAT_MRT4530_59934C.1
aggggcgcgtgggcacaatttgtgtcttcccctaatttctgcccgcaatttcgtcccttctggggtctggaatttgtcgcccttcttcctcgcgatctgtcgcgcttaatcgccatcggcgacctcgcgcgcgcgccgccggcgctggg

SEQ ID NO: 58194 - DNA, 518 bp, Oryza sativa
  Clone ID: PAT_MRT4530_59935C.1
cagtccactactccactctcttctccacttggcggcgcgcggcggtggcggctcgatcgatggaggcggaggaggccgccggcggcggcgagcggaagcggaagagggacggggatgcggtgcgggatgacgaggaggaggaggaggagggggtgtatgagggcattgcggaggagtcggtggcggagctgatgcggtggctggagatggagatctcggatgcggcgccggagacggagacgaagacggagacggagtccggcgacgatcctgccggcgccgccgctccggggttcgtcaccatcaacggcaacgaggagagctgcgggccgtccttctccgccgcggcgtcgacggtcatggcctccgtcgacacccgcgccggcgcgccgcccgcaccgcccgtcccctggcccctccctccggcggcggacgtggtaccggccgaggtcgtcgtcgacggcgtgggggaggagtggctggtcgagctactgacaagtgggcccgcggtggcctag

SEQ ID NO: 58195 - DNA, 235 bp, Oryza sativa
  unsure (1)..(235): unsure at all n locations
  Clone ID: PAT_MRT4530_59936C.1
gcacgagctttgagaaatctttccctgaattagaattactttccttggctcatgggccataccatcactgctccgttgtcctagcccaccactacccttccccctacatcctctttcatcggcaagcgacgttacttctcctttgtgtgcttgccgcactgggcggtgggcgggccattgacggctgtgacacgcgcgagcaggctgagggggctacactagatctttagctcgn

SEQ ID NO: 58196 - DNA, 427 bp, Oryza sativa
  Clone ID: PAT_MRT4530_59937C.1
tacattgatatcattggaccacttgaacacaatggatcttcttgacaggaaacattgcaaacctcccagtgcttctctcctatgtcaatcctgtcaagctgggcaaagggagactatggaacatctcttctccagctgccacttcagttctgcttgctggaattatattggctttcaatgggacttcaacttgaattttcatgatatgattttgcatcagtggctactgtttggacatctttgtttcatggaagtttttcttcttgctgcctggaatatttggaaacacctgaataacttagttttcaacaacgttttacctaccacttcaagctggaagcgagctttcaaggcagacctaagtctacatttagttggacttagagatgataaaaaactttttgttcaatcatggatagacattttg

SEQ ID NO: 58197 - DNA, 362 bp, Oryza sativa
  Clone ID: PAT_MRT4530_59938C.1
gccattgttagccatggcgccactccccgccgccgtcggggggccggccttcctgtacctgtgccctaccggcaaactgcccggcggcaaacccaggctgaaaccctactgtgccgcctccaccatgtccttgagggcgtcgtcaccctcgctcgccgagcagctggagcccctgtcccgcaggctcctgcacgggaagcccacgcgcacccagcacgcgccggagccaacctgggtgaacccgtccaagcacacgcgcacggtcacggtgctccgctggcaccgcagacgatgaatgcctcccacgcctgctgggtccctctggaggcgttcaacgcgctcgacatgaagctcacggacga

SEQ ID NO: 58198 - DNA, 260 bp, Oryza sativa
  Clone ID: PAT_MRT4530_59939C.1
ctatctatctgttgtcaacttggtggccataaaatcatcccgtagtcgacaacagagtagtctttctcctcgaatccgtgtccggcgatatcagagacaacgctatgtctctcctgacagtatccttagacaccgtaggggactagccatacttatctctgatgtcgatacccggcgtcttgtcttggcgtataactctattcatcctttcttatgcggaactcctcctatatccgaaggttgtttccgtataagacatg

SEQ ID NO: 58199 - DNA, 214 bp, Oryza sativa
  Clone ID: PAT_MRT4530_5993C.1
gcttgactagagggtcatcgcggacgctggcggcacggcgcatgacgcgcggctagggcgggttacaacaacggcggacggccctggcagcacaggtttctgctgggtgtcagcggggggaggcaggtccagcgttacaggtgtgtgctggcccagcactcctggtagccatggtgcgcgactgggacgggtaggtgggcagtgcctatgcttt

SEQ ID NO: 58200 - DNA, 4785 bp, Oryza sativa
  Clone ID: PAT_MRT4530_59940C.1
atgagatgggctgcccctgcaaggaaatctggcatgaccgttcttggaaaaattccaaaacctattaatttgccaagtcagaggttggaaaatcatggtcttgaccccaatgtggaaattgttccaaagggcacccttacatggggtagcaaacccacacctacaaccccaaatgcatggaattcctcttcactcctttctcccaagaatgatggaagttccaattcacccagccactttaatggccgaccgtcttctggtggaggatcaagaccttccacagctggtagtgaatcccttgactcacctaatgcttggggttcaagttctcgaccatcgacagcatcgggcacacttccatccaatcatttacaaacaacaacaaatcgtcctcgaagtgcagagacaagaccaggaagctcacaactttcccggtttgcagacaattcttcagagaatatgaaagtatcaataagaactattgacaaatcgggatcttcatcacatggacatgggtttactctaagtaccggtgatttcccaacacttggctccgagtcaaacagtcaacgaggtcatagctctaagggccgcccgacttctagttctggtaaagagacagcgcaaaatgaacaaggaaagagcataacagctggacctgctgaagaaatattgtcctccaatagccagtctgcggataacataaagacagatcagcatgtgtatgatggaggtgctcccttcccgggtacaagtctgccaaacaaagctcagcagccacagccttaccctggcaacttttgtgtggccccaccacattttgattcatggcatgcgcctccaggtcatcctcctgatggaatgtggcacagaggagcagcaccaggtgggccatacagaccactaggcccccctggtggtggtttccctgttgaaccattcgcttattatggtcagttccagcccagctcagaagcagcagcaaggcagggcccaggacacggtggatatcaacctaaaaatggagacgcgtatctttctgtgcctcctagttcctacatgatgaaccagcctgtcattccagttagaccagtttaccaaggtccaatgtcttacgacggatattatggtcctccgcgagcaaatttcaacaatcccaatcacgagaagttccatcctggacatcctcagaacagacctggcaaacatgaaacagctcccaatgagcatttcgaatctgatagagtacatgttatccagcgaggacagcctaggattttgcatgataacttaagaggtccccgtgaagtcgagaggaatgctcaacctgcaccaccacttcttccacatccaaatggaaataggattgatgtgaacaagaggtcagatataagagaatcctttaatgagaagaataggatccttatgaagtcagcacctgaccatagaggtccagctggtacaagccatttatctattccagaaaatgtacattcccacccccgggaagctgatgatggtactctccggaagaagttcaaggaagataattcagttgttcctgatcagcagcctgtcattaagaagaatgtggcattaatagagaaaatagagagtttgaataacaaagctagaaatgttgatgcacgtaatattacagaaccattcccatccaaacaagccaaggagatgcaaaaaagtacaagttcaaaggaagatcagaaactaccaaatgaacctgttcttgaaccttcacagtctgaattaactgaaatcatcacagctggaaagcttggcgaatcaactcgtgatcgaacacataggagaggtgattcttcaagaagcagtcaccatggttcttctaaagacaggaatagccaacatgaacaacctcctgaggatgctttgaaactggcacctgtgatggtcactgatgacacttcactagattttgaatctcagcgtgcaaaaatgagggagctggctgcacaacgtgcaaaacagttgcaagctgaggaggaggaacggacaaaacaacaaagagcaaaagctcttgtgaagttggaagaactgaataggcgttcatcagtacatcagaagagctcaaatgatgtaccaccagatattgctgatgtgcaacaaaagcaaaaggttggatttgaagagactgccaaacctgctaatttgtctgctgaatcttgtgatgtggcatgtgatggtcacaattctcttcagccaccaaatgatcctaagcatactgaattttctgtacagcccaagcctactgtgctaacacatactctaggtgttggtaaagaccctactattcataatactacaacgttggccaggaactcagagcatgaagcccagaaaggtgtagcgcaatcacatgacattaatgttccaaagcctaagcagggctacagaagaaggcaagctgtgtcagaggaaaaaaatcctagtgagaagtccagtggagcgataagcacggaaagtggtaagaaaattgctgaggccttttcaaacacttcaactgctgttgttacatcacatgatgacaccctggcccacaacaagaagagtgcccgtcactctagaaataagaaaaaggttgacgaagctccagttacttctaagcatccaccagtagcgctcaatgagcagaatgcagtcaaagtccctaatgagccaaaaccacaaactgctggtgttatcatcagtagttccatagttcctactgaaggtactgttgtcactgtgggaagtataatggtgggtggtatttcatttggatctttgaaccaggagtgtgtcaaaccgcaggagagtgtcaaaccggcagatgaagttcatagtagtacctcaaacagccacccaaaacgtcagcaggcaaaaagatcaggaaagaaccagcagtccatccagcctattgagagaccacatgggaatgagggcgctgtatgggcaccagttaagccatcaggacacagcgaacaatctggcgaagccatgtggagcacaggagtagttgctcccactcaaccagctgggctgaacaccaacgatggagagaatgttacaaaaacaaaaagagctgaaatggagaggtatgtacccaagcctctgtccaaagagcttcagcagcagaatttgaggcaaattttaccatcagaaaaatcctgtgaggagaacaagattcgtgacaaggaaatagttgaaaggtctactggtgctaaacctgagactgcacctgaggccaagaaatgggagggcaagaaaactagtaaggggcatggaaagtctcatccttcatggcgtagaaggaatacagatgaatcaactttggtaggaccaaaagctactgagctagcagacaactatcaagagtcacatgaacttcagaagcatactgtgcatcagccacctgaacctgacaagcaagcagatgctcctgccaggaacagttcagttccagctgaaacagtttcatcagtagtcactgttgccaaagaacatggtgcagctaacaagcaaaggcgtcagcatgttaaggctcagagaaatgagggaagtaactacccgaatgagaataaggatcaaatggcagcaccaccagcaccgggcattgattcaaactcatatgaacgtagaaacatgtcaagatctgatgtgaagcacagtggaacagtaccacaacctagatctcattggaaacctaaaaccatccctcagtcccagggaaattcgcatggcaataatgctaaggatgggcatgtggatagtgctactccacaagacagcagcaacaacaaccttgctgaaaacattggttggaacgatgaaaatcatgcacacagtgaagaagttaaaggagaaaagaggcatgtagacgattaccagaagagcgagagccatgaaaatgcagaacagcagcagcagcttagtcatgcgccacgccgacagggccaccacaatggtgggaggtaccacagaggaggtggcacaaacaggggaaggggttatgatgttgggaagcccagccatgtcacaaacgcagaaaggcggaggggtggcactcatctcgaataccagccagttggatcctataacaaaacagcagacttccagcagaacccaggtaccgatgagcgaaccgaaggggctccagtgcacagggagcgcgtccacaacaggggtccacgccctgctggccagttcgtcaagaggaaccctgcctccaccccagctgctaactcttaccgagatgaataaataactttcctccacccccaagatcgctaaaactgcaggctatcttttgttgggtgattcacagcaggtagatgaatggagtatctggatcaaaacctgatgccagtgactggtgtgatgcccgatgtcatctcgaccccgtcgtgtctaacatgttcagagattagcaggtcaaaagctatggctgccgttcgccgtctttgacggcggagagtagtagtaggatgtaatggattttgtctgtgcagggccgtttggccctttacgtgtgattgttaattgttctcaggagcatccctcccttgcttcggtgagatgtgatgtgatgttgatgttggaatgtactaacttggagttgattgagaaccggagttgattgagaaccggggttatattagttagtagtatgtaaacagaaaaaatagttcgttttgggcgatctgttgtggggattctgcaggacagactctgatattatcatatcatgttcatataaaaaaaaaaaaaaaa

SEQ ID NO: 58201 - DNA, 240 bp, Oryza sativa
  unsure (1)..(240): unsure at all n locations
  Clone ID: PAT_MRT4530_59941C.1
gtgtattgtgtggatattgtggccctactgtgcacgtgctagcctatgcgcgactgcatgggtgtgtgggagactacnacgcagggagtgactatggaccttgagtgtgtggctgcgaacctatgacttggatggattggacgctgcatatggacctgggnctgtgccgagtgttgacctgagatgtgtgtgtgcacccgtgtgcacctgtgggagcagcctggtggctgatgatgactg

SEQ ID NO: 58202 - DNA, 933 bp, Oryza sativa
  Clone ID: PAT_MRT4530_59942C.1
atgaaagccacgcgagcaaagcgctccaccctctccagatcctccatggcatcgtcgtcgcggtctcgctacctctacatggctaccgacgacgtcgtcccggccgttggtcccactacttcgccttcgtcttcatccagcatgtctcatcactagcgttgttgtatcttcctcgactacacttcgctcctctctgacaacaccgcgctgctccggcaattctccttctatgccgttctcgtttgtccccaggtctggcaaacccggcatgacgtctcatcctccacggttcgacagcatagactctttggtgtcatcttcctcaacgattgccttgatcgcgtcaccgtcatcatcttcagcgcgtcctcacgcacgactactctatggcgccccatgcgcaccttgtagctcggctatctcgacatcaacacacccgatttcggctacatcgaccatggctactttacgcacggcttcatcgactacggctccctcgcaccctttgcttcgactacgtaaactatggcacaaagggctatcatccttattgagcactcttgtcggtttcttctccagtccaagtgtccacgctgctcacgtttggacgtctgcattgctcatgtttggactgcggagggatattagagtatatgtactcctatatgtaccggccctttgagactcaatacaataatccacgttacgcagtatacctctcctcttatattccaactgtggtggcccttccgcacccgtgaaatcgttggatccgcaacggacggtgcggatttcgctggcatgtaccaaaccctagcctctgcgcatcgccacgctctcctccctctgtgcaccaccatgctctcctcctcagctcctcccctcacatgcgccgccgccctattcctggcagtgggttggggaagcagatgg

SEQ ID NO: 58203 - DNA, 531 bp, Oryza sativa
  Clone ID: PAT_MRT4530_59943C.1
atggaatgtcatgctaaggagggtgtccatgtgtcggccgcatggtggcactacctgcagggctgcgatggccagaggatcgccagcacggtgtatatgttgacggagtatggctatcgttactacgaaaacccctttttgcatacgggcgagaaggagcggttgccaaccgcatgggcaagaagatctgccaaaatgacgctcttcgcatgtggccggcgcaaccgcatgcgaaatgggattttcgcatgtggtcgcttataccagccgcatgcgaaaataaaatcacggaaaaaaaaaccaacaaacccgaaccctagcccgccgccggagcgccgtatccccgctgcacgccatcaccggatcgactaccccaccacccgccgtcgacgccgaccgccggccccactgttcgcgcgggtgagaagagcccttggcgccggatctgcgcgggacggcgccgccgcccgcgtcgccgcccactcgccggatctatccgccgcccccgctgtgcgcccgccgtcgtcgtag

SEQ ID NO: 58204 - DNA, 652 bp, Oryza sativa
  Clone ID: PAT_MRT4530_59944C.1
ccggcggtggcgatggtgaccgggaacggggaaggcggcacggcggcgcgactgggaacggggaaggcgtcggcgtggacgaggacgacggttctccaagggagaagattgaaggatgtcgcaccgctagtccacgcggcctctaggaaaaagagcaggtccctcaaacatgccgctttagcataccaatggctgcacgaccttgctctaccaacaaacgaaggatggacaacggatctgattgacgagctcatcactatttggagcgccgttcggaatgtacacttcacggaacatgaagaccagatcacctggaagctcaacaaccacggcgaatacacagccacctcagcctataaggcgcagctgttgggtacaacaacatcgtcgaatttcgacacattgatatggaggccttgggcaccgcgcaagtgcaagacctttgcctggctgatactccaaaacagagtgtggacatcagacagactagcaaccagaggctggcccaacggatccacatgccctttatgtcgccagactcaagagacagctctccacctgctagcggaatgtagatacacaagaagaatccggaatgaaatcgcgcagtggacaggcaatgaccattgcccatctaagaccttctagctgg

SEQ ID NO: 58205 - DNA, 225 bp, Oryza sativa
  Clone ID: PAT_MRT4530_59945C.1
atggttagtactcgaagaattgaaccgccggagatggacatggccctggtcgcctgcggccatggttgggatggcgcgtcagatgctgcatgctctgtgcagcgaaggatgtgggtcgggggtgtttcctctcgaggaggcgggtacggccgccggcggccggagccacgatttgtcgaggttttggggaggtgggagaggaggataggctcaccgttcgattag

SEQ ID NO: 58206 - DNA, 354 bp, Oryza sativa
  unsure (1)..(354): unsure at all n locations
  Clone ID: PAT_MRT4530_59946C.1
ttctgcaaaaaaagcctggcttccaacaggtagtgttctcggngttgctcctcatcatcgcctccgtgctcgccgcgacggcgaccatggcggaccaccacaaagaccaggtggtgtacagcctcggcgagcgttttttttctggatgggcntctcgntgtactcggggggcgctgccgggcggtggtgaagcgcctgtgcgtgggccacggggcgcccggcggcgccggggccgngcnnctccggcnggtctgctgccggttgntcgncgcggtcgtcgtccgctggtgctggtgctcggcgctcnccccntggttgttggtttctcngggcgctcggggccgccgttgttgg

SEQ ID NO: 58207 - DNA, 412 bp, Oryza sativa
  Clone ID: PAT_MRT4530_59947C.1
cctaatgcacaaagagctgcacgatcccccaaaccatcaaattgtctgcattgcacctttgtcagccatggaatcaaaatggcttcatgctgttgctgttttatcagatggcaagagactgttcctttctacatcaggtgggaatagttcagttggacttaacactggtttgcagaggccaagctgtctaaaaattgttgctaccaggccttccccacctctaggggttggtggtggtctcacatttggtgctgtttcagctgctggcagagctcagcctgaggatcttgctttaaaagtggagtccgctttctattctgccggtgctcttataatgtcagattcatctgctacagctatgtcctcccttcttgctgtgcagaaagattcagctgcccaattatcccttccc

SEQ ID NO: 58208 - DNA, 208 bp, Oryza sativa
  unsure (1)..(208): unsure at all n locations
  Clone ID: PAT_MRT4530_59948C.1
gaatnattccgtcccaagtcccancgtcccctnggnttatncccccttcttcccggncttccttcggcaanggcngcggaggccgtnggcggaggaaacttncagggaaggacgccgtngncggacacatatcggggttgggctttccagatagnttttctcttgctgcactaangtctttcaanttttaaaaatgggagatcccaag

SEQ ID NO: 58209 - DNA, 295 bp, Oryza sativa
  Clone ID: PAT_MRT4530_59949C.1
gcacgagggcccgctcgctctccacacaccactcctctgctctccactcctcgcatggccgctgcgcacgctgcctccaccccacctccgcctcgacctctgctcgccccgcctcccgccgctccgctcccccggctggcgccgccaccgccgccgtggacgtgtcctctccgcgctctcctccccatccccgtccccgtcctcggcctcgcggctcgcagagcgtctccaccgcgccactcgagcgaggggttgggcccgggccggccacctcccgcgagcagccgcgcggcgg

SEQ ID NO: 58210 - DNA, 213 bp, Oryza sativa
  Clone ID: PAT_MRT4530_5994C.1
gaaacgaagcagctgcgaaaaactatcagcgccttgcaaaatgatgttgcttcattaaagcagaagatgaaatctcttgatgaagacatactgcttaaggagggtgaaatactgcttaaagagggtgagatttcgatactacgtgacagtatcggcaggccatctgacatcatctgcagccctcggccatcgaagctgttcgaatcggagtaa

SEQ ID NO: 58211 - DNA, 1473 bp, Oryza sativa
  Clone ID: PAT_MRT4530_59950C.1
tttttagaccatttttttattcacaacaaatcacgattcatttggcccttgattgacgtccgtccggccacagttacaacaatcggagatttcatctcccaagatacaaatttgtccctttggaaattaagtaaacaaacaagggttataaccctgcacacatgacaaattaaaagaaaatcaaggaaaaatcattggtttttgtaaaacaaatccagaaatgacgacgaaacgacgtacgaacaatcagtacaacagtttgtccaatttgcacgcacgcatgcatgtaaaatgtgtgagatcgatcgatggatcgatcagaagagcagcacgaggacccccgcgaggaggaagagaagcgagccggcgagcgaggtggcgagcatggaggcggcggcggaggacggcggcgacggcgggttgacagcagagcacttgtgcctgatctcgccgtgggagtgggtgagcacgccgatcttgctcatgttgacgaaggagacgatgaagtcggcgaagaactcgtcgtcggaggtggcgttggcctggcggaggacgtaggccttggtgtcggcgttgaggagaagcgcggcgtcggtggcgaggaggccccgctgcgcggccacctgcttgtagtagtcggtgtcgaaggtggtcggggttggggggtcgaggtcgacgagggtgtccacgtcgccgaccttgcactgcccgcggagcgccgtcgtgtagttggcgtccagcgtggggccgccgttggaggaggagttgctgtagaggcgggtggagaaggcggagcagtgggccttgccgatcgtgtgcgcacctgagaggacggcaagatccttggcggtgaagttgaacttggcgaagatggtgaggaggtcgttgacggtggcgccgggggcaggagagttggcggccacatcggcggcgttagagctgttgccatctctccgacctgtcggaagtgggatgtacggccctttcgtcaggcgcacgacgtcgcgggcggcgagggcgagggtgtcggcgcaggagacgatgccggggcaggcggcgtcgagcttggccttgatggcgtccaccacctcgtaccctttcactcccttgttcagcggcgagtccttctccgccttgttccccggcgtcgagtccagcaggatggacccctcgcagccgcccacgaagcagtccacggagaagagcctcagcaccggcccggcgagctccggcgacttggcgaggatgctggtcatctccttgtacacgatgtcctccgcgttcgggcacgtcgtgttgtacgcccccacgaacacgtgcgccgacgacgtcgacaccatgcccagcaccaccaccaccaccatcaccactgctgcagctcgcaattcatgatccgccgccattgtttgctagctagctagctatctgctgctgctgcggggcggactggatcgatggatagatgtgggcgtg

SEQ ID NO: 58212 - DNA, 610 bp, Oryza sativa
  Clone ID: PAT_MRT4530_59951C.1
cccgggctgcaggcgggcatgtgtatgcgctgcaggagagatgcaaggggcattaaacatatgccatgttgagctacgagggagtatggcgagctcttgtcggctagcctaatttctcagccggagacggaaccccggggcgtcaggattgaggaggcagaggcaaccagcagcaggaacttgtcatgatcatcgacttggcttgttaaggtctatcctctcttcaccacaaggtctgtatatttctacccataatcttggttttcttgtaggattcttggagataaactttgtatatcttggtcttgtccgagtaggcctttcaaagtcttgccatatgaggtgatcatatcctaatagaacctttgccttaggttgtattcttttcatacccatccatcgtaccaggtgtggtaggttgtattcttttcatacccatccatcgtaccaggtgtggtatatataggaaattctgtatttagatatgtttccatacttgaagggtatcatatatttagtacaacgacaaaaactacatcctctatctccaaatctcgcgtccactaggagataggacctccatggcctctccgatgattcaaaacacttc

SEQ ID NO: 58213 - DNA, 456 bp, Oryza sativa
  Clone ID: PAT_MRT4530_59952C.1
atggccaccgcagcagctgccttggcttgtcgcattggtgtagccgtcgcgccgttggctagaatacatccatccctaccggaacgctgccgcaagcggggacgctatgctgatgatcacggcgagtggacatggtgcacgccgccagtggatggaacgcgcgctgcctgcaggtggaagaagtaccgcgtcggcgaattggactggccgccgccgccgcctggaacgaggggatgggatagcgggatagtcaatcgaggcaagctgcggatgaacggtagatggagcgggagtacatactcccaggactcaagactcgagagcgaggtgacggcgaaggggaagagggtggggctggcggtgctactcagtttgcgagtaagtggaagagcacaaggcaggatgtcgatcaagatctcacgccagcaccaccgcccgctcgttgccgacaactga

SEQ ID NO: 58214 - DNA, 4869 bp, Oryza sativa
  Clone ID: PAT_MRT4530_59953C.1
tccgaggacactggagcggcggcggcaccttcggcacgcacacgaagggccggcggatcgaccaccatatggatagagtgcatagggtacgtgcgagccgacaaaggagggctgtaaatctgctctctcgagaaaatgctatgcgtatagaacatgacataatcacgccgaaccaatcgaggccggaaaatgagcgcaagagaacaagttcgttgatggattttgggcctgagttgtctagagtgaataggcaaagacggtccttgctgcgttcaaaagcaatcccgtcgcctcctttggggaacattgccaatgctgaggggcgcggtagttcatcacgggtggataagcagtatattcaatcactaaaggcgtcatacccaggcaggtcatattatggtccaccaacatatgaatgcccatattgccgtgctgtattttggtaccaagagagagtcaaaagttcttctgccatttcaaaaaggaaaatagtttataatctttgttgcaaaggtggtcgcatacagttaccaaaaatacgtgcccctcctgaacctctcgcgtccttactaaactttaatggcgatgcacgagcaaaaaaattcctgaggcaaatacgatcatataactcattgtttgcttttagttcgatgggtgcagctattgacaaatcgattaatactgggaatgcaccttatgtgtttaagattaatggagttgtccaccataggattggtactcttgtgccatctcatggttcacctcctaaatttgcgcagttatatatctatgatcaagaaaatgaactacaaaatcgactaaacatatttgaaaccgatggtgaccatgcagacaggccagatcctgaaatactcctttccctttcatcaatgcttgacactgaaaatagcttggtccagaccttcaggtatgctagagaacgcgttttagagcatggcgatcaacgaataactctttgccttttaggctgcaatgcaaaggacgatgtccaatacaatttaccaacaaacggtgagatagctggcatcatagttggtgatttttctgcgaaagagtacaagtttgacgtgcttgtgtatgatagaaaccgtgggttacaccagatttctccgttgcatccattttatatggccttgcaatatcctttgttgtttccgtatggtgaacgtggatttcatttaggcactaaatacaacaattatgatggtactgggaagaaatatgtgacgatgccagaatactataggtatgaaatgcactataggctaaatgaaccaaatcctttcacatgctatggtcgcttaagtgatcaaagtgctgttgatatattctcgacaattgaggctaatagattacagtatttcattgaccatcaaaaagaattgcgaaccgagtctgtggatggaatagtggatgcgattgataaaggtgtcactgatggtgattcagttggcaagcgcgttatacttcctgctagctttactggagggagaagatatatggtcatgaattatcaggatgccatggcaatatgtcgtgtgtatggatcacctgatctctttgtgacatatacatgcaactccaaatggcaggaaattgctgaagcaattcgatttgagcctggccaacaaccatctgatagagctgatatgatagtgcgtgtgtttaatatgaaggtcaatgaattcataacagatattagggaaggcaggacttttggaaaagttattgcagtcctgtacaccgttgagtttcagaaacgtggcctcccacacatacattgcttagtttggcttgctgctgccactgctgatgtctcggcatcaatcatagatggctttatttgtgccaaaatacctgactatgatgatgtccactcattatttgataagtactggatatacatgacagatgatataaaaaataggctaaaaaaagctctggataacccacgtttcgtcattccacaggatcacttgcttaatttacttttgcataagcttgttgctgtatttgcgaatagcggtggtaatataaaggattttaacctgccacatccaacatctattccagatgttcctggtagtaataggctaattgatgaagagctcgcaatcgatccactcatgctggctgtacatgcagattctttagtgcagcaattgaacgatgaccaatcaaatatttttaacattatatcttctcgtgttgctgctaataggcctggatttttctttgtgtctggtcatggtgggacaggcaaaacattcctgtggaatgcaatcatcgcaaaacttagatcgcaaaacaaaattgttcttgctgttgcgtcatcaggggtagcgtctctgctattgcctagaggaactatgcttgctgagcttttaactgaggcttcactaatcatatgggatgaagctccgatgacgcacagacgatgctttgaagcactagatcgcactctatgagatattcttttagaaacatatcctgcaaattctattataccttttggaggaaaacctgttgtcctaggtggtgatttcaggcaaatattgccagttattcctaagggatctcgttagagcatagtgaatgcatctatcacaaactcagaattatggaaacatgtaacaatattaactctgaacataaacatgaggttacttaatccaatcctaccagagagtgaaaggaaggacatatatgattttagtcaatgggttttagctgttggcaatggttctttgcctatgatagcaagggaaaatgagagctgtccaacatggatcacaattcccgatgatttgcttgttatgactaatggtgacaagatatcagctattgtcaatgaggtgtatcctgattttcttcattcttacaaggatattgaatacttagccagccgtgcgattgtttgtcctaataatataacagttgatgagatcaatgactatgttattggtttaatcccaggagatccaaggatatacctcagctgtgataccatatcaaaatgctctgagttaatcccagattttgacttgctatatccacctgagttccttaactcaataaatgccactaacttccctacacataagctcattcttaaagaaggtgctgtggtcatgctgctgcgaaatcttaaccaatcaattggattatgtaatggaacaaggctattagtcacaggtttaggagatagaatcctacagtgcaccatactaactggatcaaacattggcgagattgcttatatacctcgaataacattaagcacaacaaagatgaaatggccttttacactgcaaagaagacaattccctgttcgagtttgttattcaatgactatcaataaaagccagggccaaacactccagcgaggaaaaagcattcatgcccagatttaccaccctgtgattggagtactgaagcctcttctccaggaacagaaggtttactacattgactcattcactgtgagatacgcgaacaggtcatataggccagttgaaaacaacctgattatcctgttcactaaatggccgacgcttgaagaatacattgacccccctgctgatttccctagcgtaacattttcattaacatcctttggagatattcctcccttagtggacaagaccttattctatgttgacgtcatgggtgtcatcacagaggtcggtgcaccagctattgtgcgtcctaagtcaagaaatactgatagtttaaagaggacgatacagatatgcgatgcaagtacaccaatgtctctaatattgactcacaccattttggttctgctgtttgtaaacaaaattagcaattctacgcttcctgtcacattgtggggagacaaggcagctattttcgatgctgacaccatatacaatgctggccaaactcaacctcaagttattgtctttgttggaatgcttgtgaaagactatccaggattgggtctgatagtgactggtagctcaccatgccaatggtatcttaatctagatattcctgaagtgctggagctaaaagaaagaacttccagaccatacggttccacctacaaatgctctggctgttccaacataggcataccagacccaaggattgcacatcgtcttatcagaaggccggtcgaatctctgattgaagacaatccaccaaacagtgaatacattccaagtgaaatcgcagcacttattgatggcaagtttgtatggaatgtcagcttcacgcgtaatactgtgaaacgaagtcaggaatcacttcaggtcaacagcattgtgtccactgcctcctcaggtcacagcctgctgctcatgcccccagatacttcacaggcaacatcagctattgtatcagcaggctcaagtagctcagttcaaatagcaccaccagtaagtgaaacaagcactggatcacaccaagctattgagccaggccacaatgcttcgaccccaacaaagctagctatcggttccacaacacatgacacgccaactagcaaaccatgccattcaacaccaagcaagaaaaacatagttgtttcgatgtgccatgtgcaatctgccagccctagccttcccactgatactaaggtaagaacagatgcaaaggttgaagaggacacctcacagcatgcttcttctacacctcttgtggctcactctgctgaacataagggaaaaacagccagccaaacatgaagagaacatcccacagactagcccatcatcgcttgcaagcgcaatagcaaagaaaagatccaaacctacagtcgtagctccagcttctaagaaactcttcaaggacactgctgaataatagcaggatatcaggttt

SEQ ID NO: 58215 - DNA, 344 bp, Oryza sativa
  Clone ID: PAT_MRT4530_59954C.1
gcacgaggcaaaaacatttctctcgcgagtcgcgagttgcaccgatcgaattaagggtcgaagatgtgggggttcgggcaccaccatcggcggcgtccccgtccacaccgtccgcgtcttctccgccgcaggcgaggactactgcctcaccgtccgcaacggcaccgcctgcctcgcccccaagaaccccagggacgactaccagcactggatcaaggacatgaggcacagcaacaagatcagggacgaggaaggctacccggcgttcgcgctggtcaacaaggtcaccggcgaagccatcaagcactccaccggacagggccacccggtgaagctggttccct

SEQ ID NO: 58216 - DNA, 314 bp, Oryza sativa
  Clone ID: PAT_MRT4530_59955C.1
cgtctcctcgcttcctcctcccgcagctcaccttaactccggaagcgagagctcactgggggcatccccatggcttccaccgcgctctccttcgccttctccctcctctccctcccctcctcctcctcccccgcctccgccatcgcctccgccccaaggtccttcaccgtccccagccatgccctcccactcctcgccgtctccattgtggcgtccacctcctcctgattctccattgtccttaatctctataactccatctcgtctctcaccctctaacttgctcttatgcctcttttaccctccttcatata

SEQ ID NO: 58217 - DNA, 569 bp, Oryza sativa
  Clone ID: PAT_MRT4530_59956C.1
cgagggcacaaaaacatttctctcgcgagtcgcgagtgcaccgatcgaattaagggtcgaggaggtgtgggttcgggcaccaccacaaccaggcaccggcggcgccgtcggacccgaaccagatcttcaagatcttctgccgcgccgtcgtcctcgcccccgtcaaccccaaggacgagcaccagcactggttcaaggacatgaggttcaggagccaaggtgaaggacggggagggcatgccggcgttcgccctcgtcaacaaggccaccggactcgccgtcaagcactccctcggccagtcccaccccgtgaagcttgtgccgttcaacccggagtacgaggacgcgtcggtgctgtggacggagagcaaggacgtcggcaagggcttccgctgcatccgcatggtcaacaacacccgcctcaacttggacgccttccacggcgacaaggaccacggcggcgtccgcgacggcaccaccgtcgtcctctgggagtggtgcaagggcgacaaccagagctggaagatcctcccctggggccccgaggctcactcctcctcccccggcgc

SEQ ID NO: 58218 - DNA, 2244 bp, Oryza sativa
  Clone ID: PAT_MRT4530_59957C.1
ggatccacattctctatcataatggcagcactaccattacaagcactgacgtgtggaacaataggagtatatgacccacatacctgtcacggtaatggtagtgatattatgttatccggttgtaagaaatcaggctgctccaaaaatactcaatgaagttggtgtactgctctagtcttccactgagtaagtagacaattaactgtgcaccagtaatcaaatctttgcatttactcgcacatttagtaatgcaaatctcagcacaatgaattactggtactagcatccaagtcaagttcatggaaccgaatctgagagtacattaaacaccaaagatatatcatatcatatcaaatatcaaatcaaacggctagaatgcaaaacatacacgcacgcatgtcacgcgtttgagccagtcgaggaccaccggtgggcccagctgtcagcgaacgtgggagttggcacaggagagcgcgtcatcgagccgagccgatcgatcagtgggtgagggtgagagtggccggccttggccttctataaaacgtggcacctctcgctcctcctcgcatcatcgctcgcagtcgcagcacaaaaacatttctctcgcgagtcgcgagttgcaccgatcgaattaagggtcgaagatgtttgggttcgggcaccaccacaaccaggcaccggcggcgccgtcggacccgaaccagatcttcaagatcttctgccgcgccaacgagaactactgcctcaccgtccgcgacagcgccgtcgtcctcgcccccgtcaaccccaaggacgagcaccaggtcaggtcccccttcttatatatgccttttcttttgtttctatattcgatcggattttgatgtatactgaaatggaatgaattgaaatgcagcactggttcaaggacatgaggttcagcaccaaggtgaaggacggggagggcatgccggcgttcgccctcgtcaacaaggccaccggactcgccgtcaagcactccctcggccagtcccaccccgtaatactatatttctattttgctgctagctttgtgcgtgctgccatggaagatcgaagaacgttgacttcgatgtcatggactcatggcgggtgatgggtgtgcaggtgaagcttgtgccgttcaacccggagtacgaggacgcgtcggtgctgtggacggagagcaaggacgtcggcaagggcttccgctgcatccgcatggtcaacaacacccgcctcaacttggacgccttccacggcgacaaggaccacggcggcgtccgcgacggcaccaccgtcgtgctctgggagtggtgcaagggcgacaaccagagctggaagatcctcccctggggccccgaggctcactcctcctcccccggcgccgccaccgcctgcaccatcggcggcgtccccgtccacaccgtccgcgtcttctccgccgcaggcgaggactactgcctcaccgtccgcaacggcaccgcctgcctcgcccccaagaaccccagggacgactaccagcactggatcaaggacatgaggcacagcaacaagatcagggacgaggaaggctacccggcgttcgcgctggtcaacaaggtcaccggcgaagccatcaagcactccaccggacagggccacccggtgaagctggttccctacaacccagagtaccaggacgagtctgtgctgtggacggagagcaaggatgtgggcaagggcttccgctgcatccgcatggtgaacaacatctacctcaacttcgacgccttccatggcgacaaggatcacggcggcatccacgatggcaccgagatcgtgctgtggaagtggtgcgagggtgacaaccagcgctggaagatcctcccctggtagattccggggagggggagctgcattgcattgccatcgtcgtcgcgtctgctctgcttctactctagctaataatttgatcgatctgctaccgaaataagaccgtgttcgttcgttcgatcgatcggagtatggcagtcaatggtgtccgtccgtcctcgagtttgtgtcagtgtgtgtccttttgcgagccagtgattgctatgagatgaaacagtgggtgatgtaagtgcaggaggaggggccatatgattcagaaatctgatgcaactcatcttgctttcccctgtactctctacttttcgtatgcctaatgaatgaattatgaatggctcatttgtctcgaaaaaaaaaaaaaaaaaacccgcggcc

SEQ ID NO: 58219 - DNA, 651 bp, Oryza sativa
  unsure (1)..(651): unsure at all n locations
  Clone ID: PAT_MRT4530_59958C.1
cggacgcgtgggctttgaaaggaggcaccacattcgttgtgggggctaaaaatttccagggtaggaggaatacaatagggggggtggctgaaattcggaattagaaataagcaatattgaaagaagagtccatataagaacctaatacgagattaatcaaaattcggaataaaaataaaataaaatccgaaattagaaaaaaaaaaagaagattccaagtaggaatacaatttaaaaataactgaaatttggaattaaaaataaggaatattgaaagaagagtccatacaagaatccaatacgagattaattaaaattcagaataaaaaataaaaaaagaaaaaagaaaagaaaataatagttcaagtaggaatacaatttaaaattaattggaattcggaattaaatataagcaatattgatatgagagtagatataagaacctaatagtagattaattaaaattcagaataaaaataaaataaaatntgaaattaggcaaattaaaaagagagtgaaagtaggaaaataattttgaaacaactgaaattgaaaataaaaaataaaatatcaaaagaacccaatacgagattaatcaaaattcggaataaaaataaaataaaatccgaaattagaaaaaaaaaaaaaaaa

SEQ ID NO: 58220 - DNA, 3732 bp, Oryza sativa
  Clone ID: PAT_MRT4530_59959C.1
ctatgttacaatgaggtgggttccattacataagccctttgatggatctagattcctaagaagcatgatggggacaccaatctttagctgtaaatggtgatccggcaaaccactcatgtgtactgtattgaggaattctgcaggataaagggactgcacattgcagtagtttggtgtggcatcatcaatggtatcaaagctatagtatgacatttcttcagtggctgtgtggctaataatttgtgcatttatagcagcagtaatctcattcgttggtgccaaaattgcatgttcacataagtaggttggtagctgtgatagatgcggtattgaatcatacacaaaagaaatcaaacatgcaaggttcctttctttagccggtagtaagagatatgatggaatctccacccaagtggcgtctggtcgatcagtgggtgcactatcatggacaacaccatcacctaaagatagaagccatgttgcaaacagctcaagcctaaacttgtcttgctgagaaaaggttggacaattgagcctcatgttttcagttaattcaagtaccacacaatttttccataagcgggagcgagtgatcgaggcattcaggatctgttgctttcttgcattaggaataaccggtagagtttgcctaaagtctccatccaagacaactgttataccaccaaattgcatgttcactaaatcatgattgatcgatgacatgatatctctaagggtgcgatcaaatgcttcaaagaaatgcctatggttgacagatgcctcatcccatataatgagagatgtttgttgaatcaattcagcaagatgggtgttcttcttaatagcacacatagaatcctcctggatgtctagaggtatcctaaagcgtgaatgtggtgtacgacctcctggaagtaacaaagctactataccagaagatgccactgccaagactattttccctttgtttctaatgttggccaacagggtattccatagaaatgtcttcccaggtgtatgttgggacacacgatacgcaaagtcctcacccatcagctgaacatgattgtcaaacagtttggctgggtctgatacttgacaaaacagaagcatcatgacaaataactgccgaagttgatatggaagcgcccactgtgctgcatcagtgatagcatgagaccattcatgatcatcaccaagtaaccccattgcttcgcatgcagattgaaaagttgggtattgaatgccaccaacaatgcgtacatcagaaaaaaattgagcacctttgataacatgcaataatatacgcaagtagaatcgctcaccctggttaggtccaacattggcaatgcgaccaaccttacccttatggctctgagagcgttgtttccaatatttaccatcagcatgccatgtccaaaactcaggaaattccacatacgtgtgctggtaagcatgtgggtatatccaacaagttgcaacttcctttccggaagctgatcttgaaagaactctgaggttaagcgtgcttggcctgtagcaattttgggatgggtgaccgaccgggaaattcttcccgggtgcgcacatgcttggcttagcatagccaggacctttggttgagtacttaaataggtacttctccattccagagtacttgaataggtacttctccattccatcacaattaacaatctcaacattgatgtgtgcttgatacttaaccaagagatcaacattatcccgaatcccaatcttagcatagtcaggacctttggttgagtacttgaataggtacttttccattccatcacgattaacaatctcaacattgatgtgtgcttgatacttaaccaagagatcaacattatgggctttctctgtggtaatgttgttatttggccgagcatatataacacgcccactgggcagcaccatagttttctctataaattctttaggataaaacttacataaacttggagaagcttcataaccaatacgatcaacagatgggtccggtagctgtgcagatatgaaggcatcaatccaatcaacatcaagaggcccatccttttcaagccatacgattatatggacatggggtaatccacgtttttggaactcaattgtatagacaactccagatataggaccgaaaaactggtattttgttatgtcatctataaatattcttagcttcatttggaaaacacgatcaacaatatcaagtcgatcagaggagtgctgccttggaatgagggctaaagcttgtgttatttctgaccatgaagcgttgcatgtcaaagtgatgaaaagatgtgggcatccaaacctgagatctttatggaagccatcttccccatatgggaacaatagagggtattgcatagccataaacttgcaatgagattcttttatcctttgtagatgagaagccttgtcttgtattattaaatcacagccttcattagtggttcctaaatcattaaccaccaccaacccaacaacctcagatgcaacaggggcactatacacaccaccatgttgattgggcacaacaaatagcttgacataatacctgtcttctgattggtcagacaatctatcccgagcagtccggaacacttgcacaattgggttgtgatcatcaaacatcctcatcagagacgaaatgacattttcatttggtttaaaaccaccactaatgcatggaacttccatcctattctgaacctcattttcagtataaaaaatgtatagctgacaatattctggtctagcgccatctcttggaattagagatccaatccaatgacatagctgcccactaatcttgaaaacataaggtcctcctccatcattaatagaccctatgatgttcaagcccatagatctcatagcaaacatagagttgtaacgcctaatattatcaaagaagtgggcagataatgcagggttttgtccagtcaacaaactgagcaatggttctggaggtggcttgtatggtgctaagtgaacacttcctccccatacataagcgccattggcatgtatcagctgagccgtggcaattatcattacgacgaaacattggtggcgaccagcaaatggttgcctaggatcttggtgagaagccgaggacagattctgctgctgtagctgtgtatggcattgttggcgtacaacattatcatttgggattatgcgacgccaaacagatcgagatgaaggggagtaaatagcaggacataacttttcgcctctcttgtgaatcatggccgccttacgttttctacgcgactcggcagcaacacatggttgtggccgtggcaaaccacaaaaggtttcatcggcagcaagagttgggccaccagaaatgagattgataataccgggagaactatcacttgtcgtgttgggtgcattatcagaaccaaacatcagcctgtgcctaactgctcgccttgatggtaggttaaatgttgagacaaatttatctctgcatacatttggaacaaagggtgttgtctgactaaattgtccagcacaaaaggcacctttaatatagaccaaaattgcaagatcaggttctttggattgctggtctaacatagggacctttcgcttgcgtcctggatcacaaagaatagattggactggactcggacatgatgctgagactatgcactcatccaaaaccaacgggttcttgctactattctcagccat

SEQ ID NO: 58221 - DNA, 230 bp, Oryza sativa
  Clone ID: PAT_MRT4530_5995C.1
gtgggctatttttttttgtttttttattttttacagctaaacccgtcaggaatttttccaaatcccccgccccaaaatggcccaaacaaatggtagaaaaggtttttcaaaattatgaacaaaaggtccccagtctgtccgctatatacagaggaataattggcaatgcatttgggtcgatcacaatcacccgctctggccatggaagaaagcgcccgcggggttctacc

SEQ ID NO: 58222 - DNA, 1061 bp, Oryza sativa
  Clone ID: PAT_MRT4530_59960C.1
ttagtggaatcggcagccggtgatggtgaggggatggatggtgtcggtggtggcggctgacgaatttgaaggtcggggcggcgagggtggatagaggaggcagcgacgcataggcggagcagatcgaggcgacagtggtccggcggcggagaacggtggcgatgtggggtgccggtggcgcttgaggcagagtggatagcagcgcatcattgatggaggaggttgcgacgcgtgggctgaggtggtctggtgacggagtacaataacggcgaggaggagatcgggcgtggagcggagacgcacgacgaggcggagatcaggggttgagcggaggagacgtcctcccctcgatctgacaacgatggcgttgagagggcttccttgatccgacgacggtgacgctcgatccgatgatgcatgggcacggagaaggggaacggagggagtagctaggaaattagaaaaacatattccctccagacacaatcaatcatcctattatcaaaatgtcgatatggggtacccgtaaaccggatatagagggtattggggtacgctggtacgaggatctacgtagtacgacatcaagcaaataaaagacaatgattatactggttcaggtcccttgataggtaatagccctaatccagttgatataggattatatggtggaagtcacagattacaaagggaatatggaactcgatgataccgacgagaccgtagtcgagttggttcgactagatcacccggcggcttggctcccgtaggctccgacttcgtaggctgaggtggatgtgtcagcggtgaaattcaatgccttaggtccttccggggggtcccttttagatcgcgggttagttatcctccaagctggactcggaagtaccggacccctcacgatatagtaacgacccagtcttgcctgagtaggatttcttccacatgcggattctgcttctatcatgtgatagatttccttaacgtgtacaagaaacattcgtatacgcgcagatataccgtatcggtatacaacatatatccaagtgtagagggtatat

SEQ ID NO: 58223 - DNA, 577 bp, Oryza sativa
  Clone ID: PAT_MRT4530_59961C.1
gcacgagggccgcttcgccctcgcccccctccctccccctcccccccgccgccccaccccccgccgctgcctccccccccccgccccccccccccccccccgcgtccgtgcatcgcctcctccccatcgcctccgcgtcgtcctccttcacactcaccgctgctgcattgcctcctccacaccgcctccgcgttgtcctcctcctcacccaccgccgtcgcgtcctcctcctccccatcacccgccattgcccgccattgcctcgccgatctcctctctcagcgccaccatcacgccacgcggcggtcaccatccccgagtccccttcgccggctcaacagtcgtcgtcagatccgccgacggggtgaactcggcaacggtggtccagctctcgatccctaacacatgtcgcgccgtcctgtccaccgccgccgcgtccgcctccccatcacccaccgcgtcgtccttcgcctcgccgatatcctctctccgcgctgccttccttctcgcgacggtcacccccgtgatgatcaccgtcgctgccgtgcagccgtcgtcgtcagatcctcctccaccg

SEQ ID NO: 58224 - DNA, 558 bp, Oryza sativa
  unsure (1)..(558): unsure at all n locations
  Clone ID: PAT_MRT4530_59962C.1
ttctgttccagcgtgcaacatttacttgttttggtatgggctattattttctattagatatcgcttggctcatgtttcaggctgctcatcagtaattctttccctccatcttttcaagatatctacccaaggaattaaatctcagtcattcgaattgagtatggtaccttgctccttccctcttggtatttagattttactttcatagaatgcacaagcaccatcaggtagcagtaagccagtaacatgcaatcatggtgataaaccttgaactcctaaatcaatcaaataggttatattgtaagatcaacctttgttgaaaatcctagtaaagtgaatgggagaatgggttaacatgtaaccacggggataaaccttgaattcctaaatcgatcatatgggttatattgtaagatcagcctttgatgaaagaaaaaagttcatttcattgaaagaaaaaggtccattttaatgagctgcaaaattgtttaggcggctaagtggtcaggcgaaatagttccgggaagaanaatgcactttcttttcttggtaaagatg

SEQ ID NO: 58225 - DNA, 773 bp, Oryza sativa
  Clone ID: PAT_MRT4530_59963C.1
caaccggggactaaagatcccgggggggcctgacaggccctgacagcattcgaaccgggaccaagactatccttgtacgtcgttcgtctcgatttctgagccacgaacaatatggcggaatacgaaggactcctagcgggactgagggccgcggcaggaatgggcatccactgcctcctagttctgggcgactcctagctggtcgtgaaccccactcccccaggggcctttgaagaaaatctcacacagccgtcggcgcactcggaccccccgagggtgcctaacgccgcgacccccaccctgacgcctggtgagccacaggcctcggggcccgagggggtcaaccccgaccccccatgtcaggtcgcctggatggccgacatccgggcatacctcgacaatcacactcttcctaaggatcgcgccgaagccgaaaagctcgcgcacatctccaaacggtacatgcttgtagaagggaccctctaccggagcggcgccaatggggtcctcttgaaatgtatctctcgggagcaaggcgtagagcttatcaccgacgcccgcgagggaaaatgcggggcccactcggcctcgcgcactttggtcggtaaagccttccgtcaaggattttagtggccagctacactccaggatgcccaggactgggtcaggtgatgcaaggcttgccagttctatgccaagcaaacccatcagttggcccaagctttgcaggtcatccccttctcttggttgggaaccatcatggacttggatct

SEQ ID NO: 58226 - DNA, 857 bp, Oryza sativa
  Clone ID: PAT_MRT4530_59964C.1
atctgaaaattgtcgtgctctcaagtttccctgcaatgtatgagagagccacgaacaatatggcggaatacgaaggactcctagcgggactgagggccgcggcaggaatgggcatccactgcctcctagttctgggcgactcctagctggtcgtgaactagctatctaaggagtaccaatgcaccaaccagcagatggacgcctacgtccacgaagttcgacgcatggaccgccacttcgatgggctcgagctccgacacgttcccaggcgcgacaatgcagtcgccgatgagttgtcgcgcatggcgtcagcacgagccccactcccccaggggcctttgaagaaaatctcacacagccgtcggcgcactcggaccccccgagggtgcctaacgccgcgacccccaccctgacgcctggtgagccacaggcctcggggcccgagggggtcaaccccgaccccccatgtcaggtcgcctggatggccgacatccgggcatacctcgacaatcacactcttcctaaggatcgcgccgaagccgaaaagctcgcgcacatctccaaacggtacatgcttgtagaagggaccctctaccggagcggcgccaatggggtcctcttgaaatgtatctctcgggagcaaggcgtagagcttatcaccgacgcccgcgagggaaaatgcggggcccactcggcctcgcgcactttggtcggtaaagccttccgtcaaggattttagtggccagctacactccaggatgcccaggactgggtcaggtgatgcaaggcttgccagttctatgccaagcaaacccatcagttggcccaagctttgcaggtcatccccttctcttggt

SEQ ID NO: 58227 - DNA, 2175 bp, Oryza sativa
  Clone ID: PAT_MRT4530_59965C.1
atggaggaggatgggggaggcgcggggaggaggaaggagcgggtggtgctgatgtgggggtacctgcccggggtgtcgcagcagcggtcgccgctgctggggccggtgcccgtgaggatgccggacgcggccgcggcggccggtgatgcgtggagggatgtggccggcggcgggtgcggcttcgcgatggccgtctccgagcaaggaaaactcttcacttggggctctaccgatgatatgggacaaagttacgtgactgctgggaagcatgaggaaactccggaggcatttcctcttcctagtgatattgcaattgtaagggctgacgctggatgggcacattgtgttgcaataacaggtaaaggtgatgtctacacatggggttggaaagaatgcgttccaactggaagggtcattgcagaccattctgcaactggggctatggattgtgataaaaggcaaagtggggttgccactgaccaaggtaatataggaaactcgattacagtgagccccaggtcaaaggtgtctaggacaagcaccaaggcagcatctggtcctgctgaaagccgaagttctgaggatagcacaaagcgacggaggttatcttcatcgaaacacggggctgaaagtgaatcatctagtgatgaaaatctttcagcaccaccttgtgttgtgacatttaatacaggagtgaagatagtggaagtagctgcaggtggccgtcatacattagtgctgtcagaaaaaaatcaggtatagggatggggctatggtggggaaggacaactaggtttaggctctaggatccggacagtttcctccccacatcccataccttgtgttcaatcggcgttctacagcaaggaccgtacaggaattgtgatgggtagcagaactttggaaggaacaaatgatagagcagcaacttgcgtgaaagcaattgcctgtggaggccgtcatagtgctgtggtgacagattcaggaacacttcttacatttggatggggattatatggacagtgtggacaagggaacacggatgatattttaagcccaacgtgtgtttcggctattatgggagtgaagatacaacgtgtagcagctgggctatggcatactgtatgtacatctgctgatggtgatgtatattcctttggaggtaaccagtttgggcagctgggaactggatcagatcaagctgagattgttccaaagttggtagaagcctcgaaattggaaaataatcatgcaagaggtgtttcgtgtggagcccgacacagtgcagtcataacagataaaggagatgtcttctgctggggttggaacaagtacggtcagtccggttcatgtatctgttacataactgtttcttccatcctccatccatcagccaacatccaacaggcagtatccggcgtcctgttagttgggacaaacacatcagtgccaattttaaaatgccatctagcttctcagatgcagctatccagtacagagcttctgaagattctgatcatggaaggcttcatcccgttcatctacaaggccatcgtgcagtacaggaaagaagggcaggtctccgtcggtgacctcttcttcgacgagccgtcgccgtcgtcctatttccgcctccccggcgactccggtcggtaccagcagcagcagcaggcggcgatgagcgtcctcttctctcaggcgacgacggctgattccgacgcggtggcgccgcgtcggtccccgctgcggtgcacggtgcatcaccgtcggccggcgactgcaacaccatgaaacgtaccatgccaagtgcccgtggaagcgtacaacccgctaaacgtttcatgcggttggtggcacacgttggttctcgcggaatatcctacctgatgaaagattgaagatgcatgctttcggttctcctaggaatttggtaggtttgaggtctgtctgtccatgctgcccgactgccccaatgcgcatacatggcagtgcttgcaatatcattcttttcattgtctttttacaatgcaatgtaaacaagcttgtgttgctgtgcatatgcaaagagtagcaactagaagtaataacctctgtagaccttgttgaacgctagggtgaatgtatgatgctctgttgttgtacataaaacggttacaaaagcaactaacatagtag

SEQ ID NO: 58228 - DNA, 369 bp, Oryza sativa
  Clone ID: PAT_MRT4530_59966C.1
atgcttgcgctgcctgcctccgtcgccaactcccgcggccaccggaccaccgccctcgccggcgctgacgcatggccaccttcgtcctgcggcccagccgccaccatctccgatgcccgccgtcctcttccgcctccgccgctcggcccggccgccgccgtctccgacgcccgccgcacggccgccgccctcttccgcccgccgccgcccggttcacacggtcgccgcccgactacaactggaccacttggccccttgttgcgtctttgccagcgggtaatagtggaggatgtcctcatcattaatgataacgatccggcccaggtgaggttggccgaggcccaactgtcgaggggtgatcctctctag

SEQ ID NO: 58229 - DNA, 190 bp, Oryza sativa
  Clone ID: PAT_MRT4530_59967C.1
tcgtgcaaacaaaggtagaaagcctcaaaagcaggaggtgtacaaagcgagatacctagatccaccaacgacgaagagctatagcaagatcgtcttatctacgttcgttaatcgatcacgatgccgctgagaaagaaaaagaaaaaaaaaataacgcgccttaaagaaggcttattgatgtgagtattaa

SEQ ID NO: 58230 - DNA, 327 bp, Oryza sativa
  Clone ID: PAT_MRT4530_59968C.1
atgaacggctcggatgagggttcttcccggctgcgcgtgctggatggacggacaggattcgaccgctgccccgcgcctgggctccgctccagccgagccgccctgggcagcgaacagtcgcgccacgtgcatggcaagtcgcttcgccgcgcgcggcgcgccgaggcgtcaatggagaccggcggctgcagccggttgcttctcggcggctcggcgcccatgctcgacccgttgcgctttgcgttccccgtgccgccgagtgagggcctcagggtgacgcagccccttgggcccgtggggcgcgacaggataccccgaggcccctag

SEQ ID NO: 58231 - DNA, 177 bp, Oryza sativa
  Clone ID: PAT_MRT4530_59969C.1
atggcgcgctcaccaaggtccatggcgccacggcgaaaaagccagtttcgtcgtccacgactactggtcgacgtcccagatacattctgcgacgtgccgacctcgcgtggcggcggcggtgacggtggcggcggctcgggggttcggtgtgtccaacgccgcgacggccggcggtag

SEQ ID NO: 58232 - DNA, 343 bp, Oryza sativa
  Clone ID: PAT_MRT4530_5996C.1
aaaaaaagaaatgccctgattaccggttggggccttgaagcattttcaatcaaagttcaaacagaggggggcattatatatgtttttgtagcacaatttgattcctttttggtaggcaaaaaaggggttcatcaaacaaaaataggtaccggtttgattccctgggggtgtgggattcccacaatttagggccgataaaaaaaaggggggggtggggaaacacaaagagggggaaagccggggggagcttatttacaacttacaaaccaagctttgatcgaacaaattttatttgattggtgccccttaaaaagaaaaggaaaaaaacccccattattattcc

SEQ ID NO: 58233 - DNA, 237 bp, Oryza sativa
  Clone ID: PAT_MRT4530_59970C.1
atggcgcatgaatggaagcaagatcttctgttgagaactatggaggagaacgagaggaaaagggaggaggaggaggagagggcgagaagtgattttgcaaatctaaagaaaatcacgggcatcacacataatctcgaatgggagtgtcccatcaggaggttggatgattggggcagaaacgggcacacgatgtctaaggacaatctcttcatggaccatgaaatggcaattttcccg

SEQ ID NO: 58234 - DNA, 1162 bp, Oryza sativa
  Clone ID: PAT_MRT4530_59971C.1
tcacgggaaccccgtcggcccgtccactcgttcctcccctcccctgtcagtctgccacgacggcaccaccccgatcgtctcgcccctcttctcgtttccactccacccgtcctcctcgcagcgcatcctcctcgcacgcggtccgaggcctactcgctcgcttgcttttgagccccagatcctcctcctcccctccctccgtgccttctcgaacaaaccgacgcggcgacgccttccgggagcgaccgccacctgttcggcggattgccgttgaggaggatcaatgacgtcgctgcggcccctcgaaacctcgctctccataggcggcaggccgcgccgtggtctcgtcctcccgccgcccggagtcggtgcgggtgtgctgctccgccgggaagcgatggcgctccctgggcggcgcggcttcgcgtgccgcgggagatccgcggcctcggcggcagagagaacaaaggagaaaaagagaagagattcttcaaagcagccattggtgcatctccaggtttgtctagagcaccaggttaagtttggtgagcatgtaggcattatcggttccacaaaggagcttggttcatgggaggagcaggttgaactggaatggactacaaatggttgggtctgccagcttaagctccctggagaaacacttgtggagtttaaatttgttatatttttggtgggaggaaaagataaaatatgggaagatggtaataaccgtgttgttgagctgccgaaggatggtaagtttgatatagtatgccactggaatagaacagaagagccattagaacttttaggaacaccaaagtttgagttggtcggagaagctgaaaagaatactggcgaggatgcttcagcatctgtaacttttgcacctgaaaaagttcaagatatttcagttgttgagaatggtgatccagcaccagaggccgagtcaagcaaatttggtgggcaatggcaaggaagtaaaactgttttcatgagatcaaatgagcatctgaataaggaggctgataggatgtgggatacaactgggcttgatggaatagcactgaaactggtggagggcgataaagcactccaggaactggtggcggaaggaatgtaccctttgctcagatccagcctcaaaggcattgagctataa

SEQ ID NO: 58235 - DNA, 3157 bp, Oryza sativa
  Clone ID: PAT_MRT4530_59972C.1
ggggcaaaatggtttgcattagaaaagaacgactgtaatcgataaattagtgccatttacagggatggaagctcgcgcttctgagctatagctaaacttattttctaaatgctatgttaaagaatggggaagcaacaaagaacaaggtaaagcatataccaccagccaacccagaaaaaagaaagaaagaaagaaagaacagtaaactaatggccaatttgacatctacagtaaactaattcatgaatttacgacaattagccgtttggcagaggcaaggaactttgcgatcatcagcctcgtcagggtcaaataagtagtcatacgttagctcttcgccggctgagacatttttcttggttattaggacaatacggctcaggtcatgccccacactcataagccttgcatggaagtttggagtgcaggactgaccaatcaagagtgccaagtatcgtttatctgtggcatcaacgactacttcctcgctgattttgaaaagataccaatctttgccttgtacacgatattgttcttcccttaaatcagcaacacttcgtctgacctgctcacctctatactcgagcaccatttctccttcttgaatgcccctacgagcaaaaagtccccatctatgaattcctgacctaccaaagcatactctggtatgctctgttttctgcagatagtgtagacgctccttaaaagtagaaaaggactctggatccctctcttccctaggtggattcaaactgtcgatttcatcccatcgatgttgacaggatccccttacacggtgtgcaattgctccctcccgagatctctttagttctttcttaacataaaaccgacatcttgctgcagataagttctctgaaatttcaacttctgacactgaatccttgggaagatctttcctaatcagccttgaagcagctacagtgccattgctctgaacaagtttttttgaagagatagttccagcaggagtttgaattatcaaaacattgtcaggattaggggcccgatgatgagcacaatatgaaatcttgtttgttgtctgtttgccgtttttttccaagcagcgtatctccatcctatagcctgcccttgatgcacagatggcatggtaataagttgagcacctgtagcactgtgtacacgaaccatgtatttgcctacaaatgacacacatcttcatgaatagcaaaggcgtaatattcaatatcccaatagcaggttccatcagctcatcactagcaaaagcaacttgtggctgaaaccatgcacatgtcacatgtacccacaagttatcaacatttgttggcttcagtgcaccaccttttacagggcaaagacaacactcccttttttgatcaggtgtttcacaagccctacaaacccatgaggtgaagtcttgctttcccctcacgccatagcattcctgatgaactgctatctggcatctgttacagattacaattttgttgtaatcccagtcttcaacccatctacagactgcacatctttctgttgtccattttacatttacagtatcatatggttcacttagcaaatcaagaagcttttgtttcttcattttctgagaggagcgctttgcaggatttgtggaatatgaacttgattgatgttgctctatccattttccaaacggcataagcgtgtccttgattttaatacttgacttccagtttttacttctgcagccagcatgccgttcccattcattgaacaaaaatttttgtcccttgcatggaccacaatggcaagaaattagttcaagatctcgtaggtaagttccttccatgccaaaacagataactgcaactttgtcaggcttgctacttttccatcttcctccacatttatgttgccagcttttcaaacatacaccacaatactctttggaccgcagtatcttagcacactgtctgcaagcaagttgttccattacatacaccatcatgcttgggtctttatttggaaagcaatttccacaactctcacattgaagtgctcttttgtaacgtgcaggctgtcctgttgtgttgccatccattggaacttcgaagaatccctgatcagccaaaaatgcctcttctaatgccctctggaaatcaccaggtttgcaactgcttagttctgtctgcccttgaaatcggtccatgtagtccacaaatggaaatatccctccttgcctcacccagatgaacttcttctcatcaccgaattctgcagcccagccgaacagcatcacacaaagcacagcaccgctgcgtggctgtggtggcaatgcctgggcagcagctggctgtgctggatcgaccaccacccccggccacaccggctgccgcttcccgagccttgcccacacaatgtcgccatacacaaaatcattcctccagtaagatagctcttcctcctcctcctcctcctcttcttcttcctcctccgcctcctcgtcctcgtcatcgtcatcgtcatcgtcatcgtcatcgtcatcgtcatcgtcatcgtattgccttttcatcagtccctttctatggtaatagctgtatggttcaccgtgtacagaagtgaccgtgctgagggacatggagtacttcctggaggcaacaaagttgtggccttcctcataatcatcatcgccattttcatctaactctgacattgttagactcctatcagcaattgcacctttgcgatataacacctcgcttttgggcactagctgcacagccttggccggaacaggtggcttcgccggcttatccttcttccaggggtcgatgagcaccgagtcgttgaaccgcgagggcagcacctgggccctcccgcgcgacgtgcgcaccaccggcggtcgagacgccgccgcggcggcggctgctgcccgcgaggcagcggccggggacgcgacctcggcctcctcgcaccagcggaacccgaaggcggcgtaggggatgccggcgaccggcacgtcgccgagcagctccacggggaagaactcgtcgcccctccgcctcttgggccgccgctcgccgccgtccccatcgtcctccccgaccccggcgccgcccccggcattgcaccgcctcagcgagaggatctccgaccgctggttccgcttaaagatcat

SEQ ID NO: 58236 - DNA, 597 bp, Oryza sativa
  Clone ID: PAT_MRT4530_59973C.1
cccggccgggatcatcactcagcgagtattgttctaccaccattcgtagagaccttaggtccaccttctactgatctgcggaatctcgacctgtccccgttagacacctcccagatcttttgcacccgcttgtcctactctgctccgtctgcgacggccactcaccgccctcactacctattcctcatactcccaccacatgtagctcacgcgcacctggctacctggtcgacagaatgtgacgcgaacactgcttatgaccagctccacgttcatgatcatggcacagcgatgccgactccatgacagatcgtgtggaatgctcatagcaagaacatagcactgccatcttgcgccactgtgcccaccatcccgacttatgatgctgacttgcttgagattatttgtgcatgtagctcatgccattacacatgatcaacatgctgaaggagatctcatacatgtgcaatgtgcatcctgatgacttgcagctctcttcctgctctggtggataagcacatgatgctaacatggactctaataatattaagccggatactatcgtgccactgcactgccatcctgaacattatcctc

SEQ ID NO: 58237 - DNA, 1458 bp, Oryza sativa
  Clone ID: PAT_MRT4530_59974C.1
atggcgacgacgaccggcaggcaccgacacgaccggctgagcgctctcccggacggaatactagtgcgcgtcctctctcacctcggctccgtcgacgcggctagcaccgccgcgctgtcccaccggtggcgccacatccacgcagccgtccccgtcgtcgacctcgtcgaccccgagagcgaccagatctcaagcgccatcgtcgccaagaactcggcggcgcccatccgcacgctccggctcgtcgatctctggccgccgcacgacgcgctccaccaggcggtcgccaccgccaccgccgccggcctccaggagttcgacgtcaagctcaggcacggggactgctccaaccgcaagctctgccccttccgccgccaccccgatgcctccgccgacttcgacgactccatgcgcggctcgttcaccgccacgccgccacacatcttccggtgcgacacgctgcgccgcctgcggctcaccaacttccagctcgacgtgccggagggcggcgtctccatgccgtcgctggagatcctctccctcaagaggatcatggcgacgacggacgaggcggtgcagcagctcgtctccggctgcccgaacctcgccgacctgacgctggagcagtgccccagcgtggcggacctcgtcgttgccagcccgcgcctcgagagcttcgccatgatctgctgccacaacgccgcccacgtcgtgctccacacccaacgcctccggacgctgcgctacaaggacggccttcccgccggcgagaacttcttgatgatcgccgactgcaccaacgtcctggccatgacgatcgacatctgcgagagcctcgtcgggaaatccgcccccgccgtcgtgcccatcacgaagctcatcacccggtgcgccagcctcaccttcctccacctccacctccgcccggcgatggcgtaccacagcggcgccttcacgcgcgccctccgccaccatccccacctccggcagctcgcgctcaagggcctcctcaaggacgaccagaccatccgctcagtctccacattgctccgcaacacgccggagctcgacgtgctctcgctgttccctctccgtactcagcctgcaaagccatactacctcggcgtcgactccgacgacgactacgactccgaggaggaggaggaggaggacggcggcgcctcggatgataaccaaggtgtgcgtgtgccgctgagcttgtgggagagcaacatcgagtgcttgcacaagctgaggaagatcaaattgcacaactacaaagggaagcccaacgagagattgctcgcaaagtatcttctatccaaggcaacatctttggagcaattcttcgttaccctaccagctaaaaccacggcagatcgtcaattgaagttgaccaacgagcttaaatactggcgtgccaacaaacgcgctatagtctcttgtacattattatga

SEQ ID NO: 58238 - DNA, 178 bp, Oryza sativa
  Clone ID: PAT_MRT4530_59975C.1
taggtaggcggtagtggtggggtagggcgagcgaaaagcacgcgcgaggaggcggcggcgtagggggagcggaaaccgtggacgtgcgctccaaaatagcgttaaacacaatactggatacacattttccccgcgaactttcttgtttacacatattcctaagtggaaatgttttaat

SEQ ID NO: 58239 - DNA, 1572 bp, Oryza sativa
  Clone ID: PAT_MRT4530_59976C.1
atggctacgaatctgagatttgcttctataagttttcgaacttgtccgaaaatgcttttcggaaactccgaaaattacagtcttggcctccaatggctagtttttgaggggctcgggaacgcctattcatccctccctctagacgacattaaggtcctttcaattggtatcagagcaaggtctctcattccgggcttcaccgtcttgagagaagatgtcgacaagagggccatgggtcctaatatagagcgagttgtagatgtgagtatttctcctcctaatgatatggagctatcatttgaagaggaagagaaatgcacacatctcaatgctcaagctactaatgttttgtttagtgctttgagtgaagatgtgttcaaaaccatcatgccacttgaagatgcttatctaatttggacaacattaaaggaaagatatgacaagtccaaatgtgatggagaggatgctcttagggaaacatcatttggtgattgctctactttatcgtctcatcatgacaagtcccaagtgattatctcctccgaccaagaagatcatgtctttatgggtgatgatgatgatgacgactccgtggttgatcacttgaacaaggacacaacaatggtcatcaagctcatgagggttattgagaagcaacaagcatgcctcattaagaagaatgaagaaatcaaggatctagccgatgaacacaagaaactcaagggatataattcttcattgattatgaggtatgaacaattggaaaatgaatttgcttgtgccactaattctattgcttgtgtagcatctttgaagaaggaaaatcaagagcttaaatctcaacttgaggagatcactagcaaggagaagcacatggatcatggacttatgggcaatgctcaaccttctcaagataaccatgagagcatggtgaagaagcttgagaagggatcaaccgtagcttgcactaagttctatcaagaaaacaagtccaataacaagaggacgccggtcgccgctgcctcccctcccactggatccggcggaggggaggacgccgccgccgctgggccgccaggccgccaccgcctctccttctctcccactagatctggtggagggcaggaatcgcccctgcacgccacctcccgccgccggtcgttgctgatgggcagggggagtccagcgccgccgccgcgcggaagacgaggtcacgaaggggagacgacggggaggggtgccggggcaaggccactcgacggcggcgcactcacccacgggcgacgtcacgcggccgtggagctggagctctcgctgggcggcgtgatctcccccaatgtcacatcgttcgacctaaaggcggcggtgtgcagccacgggttattcatgattgcgcccaaccattgggaccggacgtcacgcgcgctagtgcgccccctccgcgtcaccttcgaccgtaccaccttcatcgccgtctgcatctcccgccacccccacgtgcctcttcgatgtgttcctcgtttctgtcgtcagtgcgctcgatgccccctccccgctcgaccagactgttga

SEQ ID NO: 58240 - DNA, 2371 bp, Oryza sativa
  Clone ID: PAT_MRT4530_59977C.1
ttacttccttccattgcccgtaaagagcttctggccccctccatttttccaaacacctcgcataggcaaccctacctgtgggccttgcgattccctttctggtcgttcagggctcatggtaggacgactcaaatcaagtgtagctaaggagttatcacctaatcgggctcttagaaactttgatgacctcttagtgggtttgttgatgttgctgttgctgttacctcctcccttgcctacatcaactttcgcacacaattcaagtgaaagggcagaaagatcaaaatctagacatgatgtactagatgatgaacttccagttattagttggccctttcccttggaggttcgatacccatcccatgacatatcctcagcctctccttactgactgctgtttcactgaagccagctcgtttcgtaagtcaaactgcctgctagtgaatccttcatatccttagcaggagcagcactagtttctgtaacatcatgagattttcccttgccctttttcttggggcccccacccgttgaggtaatggttaaaccatcactgttctcttgcaggtttcagaagcgtctattggtatgataggcctaagcaggttcttactgattctgaggatcaggtaacagcctagccatttcaggcacaaggtgtgacagaccaaattgctcaacatatgaaagatattctgaagtaccaatgatgccttgacggtattcaccagcgatttctttaaatgcagagtacctatcttcatccatgcctaaagcactgcgcattctttcccttgatgcaagtgtgttctccgctagactttgtagccccgtgttgagttgacgtagatcccctgtcgctacttgacccaggtagtggagggattaatatctcatccccaaagattacccagcaagggaactctgactaaagagcatgagcatatctggtttgctgctctgagagggaagggaatgaggtttcatcaggagcagagtccatcctcgattctctcttatactgcgaagctgggaagaactagaacaagtgttcaaacacacgtccattgcctgagctttggccagattctcctcgcccagaactagaactgacactcacgatcgctgtaacattatcaactcgacttggaaaaccgttgcctataattgcactgccattttgcatagagggggtatcccggtcagatccatcacggtgagaattccgtcccctacctctaccacgcctttcatcttgctcgtttcttcgatatataaagctggttggtatctgaagtgcggcattcctctgagcacgagacatccgcccaccatgctccatagcattatgtctcttgagctctgcttcgctctggaagactacaaacttcttcgccaaacatgcttcatcttcacagaggaaatgatctttacggaaatgcaactccaagtcatcataattccggaaataatcatactgcccaggatgttgcctttgacatatgtgacatgaatagtgttctcgggacatatgtgtgtaaagctcgttatctccataaaatgaacttctgcagaactcgcacataggatgtcctgcaaaacagaattccgtcccctacctctaccacgcctttcatcttgctcgtttcttcgatatataaagctggttggtatctgaagtgcggcattcctctgagcacgagacatccgcccaccatgctccatagcattatgtctctccaagtcatcataattccggaaataatcatactgcccaggatgttgcctttgacatatgtgacatgaatagtgttctcgggacatatgtgtgtaaagctcgttatctccataaaatgaacttctgcagaactcgcacataggatgtcctgcaaaaccactgcgctcaacctcagagccatccacctcagagtcaccagtttttacatgctgatttaactgtgtccttgtataaagcttctgttcacaaatgaacacttgtgctgcctggccagcctgatcttcagctttgtcacacacactacaagaaagccgacacattgctcgtatcacctatgttgtgctcagcatcgtcaaaaaatgcctggctatcctcatggtaccagtactcccccacctttccctcagttgccacaggggggaaaatattgaaatcatttatcacttttgtgtaatcgcccatagccttggtgacgaatacggaggagcactcggtcttgcagatgcagcagtgcttgtcgcccatcacgaagcggaggcgaacgacgcaggtcgagcaaacctcgcggtggccgcaggccccgtaggccacccactccagcgcgtccgcgcacaccgcgcagctgtcgtccat

SEQ ID NO: 58241 - DNA, 792 bp, Oryza sativa
  Clone ID: PAT_MRT4530_59978C.1
cagaaaagttggaagtttgtgtgtaggaaagttttgattgatggaaaagttggaagtttgaagaaaaattttggaactaaactcggccaaaatgagttggaccaagatattaatgatttaaatatatgtgcagacttcttgccgattaaagggaaaatagaatcagaaacggatctgatcaccgcccgatcgacagtgagcacgaatacctacgacttgaaaaagggttacccgtgggcatcgccagcgaactcctgttcccctgccggcgagctcctcctcccccacaccggcgagcttcttcacgcacgacggcgagctcctcctcccccatgcctgcgagctccagatgcgcatgcggggagcggcacgtggaggacctcggcggccagaccgaccggccgatccatccacgccgccaacgatggtggaccccgcgccacggcggcgttgacccgcggtggaggaagaggcgccgcggaggtcgcactcgtgttgctcgccctggtggcgctctacggtgccatgtccctcgtcgcctaccgcgtcattcacatgcgccacgttcccctgggcgccgacgcgccgctcggggacttctccgagggctgcgtgctccaccacctccgccgtctctccgttgacatccccggccgccagcggctgtcgatcttgtccgccaccgcgcccgagcagccgtcgacaacggaattgctggcgctggcacgaaatgatggtggaagaacaggagtgtcacggaacgaagaaaattcgcgtccaaatggcatgttc

SEQ ID NO: 58242 - DNA, 1005 bp, Oryza sativa
  unsure (1)..(1005): unsure at all n locations
  Clone ID: PAT_MRT4530_59979C.1
cagccacgagcctcacgatttattgtgnagttagtttagagagtacaaagagccaaagccattgnagggggaaattttgtcaatacacctggttgcgccatcgaaantgcctgaggtctttcgctagttcttgcccatcgccgctctgtcctgctgcctgagcctctgatggggaggggagggggggcatggcgggtaaaccttggcgttgaagaggaagaccccggcgaggccggcggtggcggcgccgccccagatgaggatggtggaggagagcagcgaccacttgcggtagatcatcttcactttgctccttcccttccggcgccggtcgatgaggagaggacagggcagacggcgttgggggaggagaacgggacgacgtgtcaggtggtggaggtggtggtggacaaatgggccgggcccaaccttgccggcccaggggcgcgccagcaattccgttgtcgacggctgctcgggcgcggtggcggacaagatcgacagccgctacgcgggaggaggaggaggaggaggaagaggtgggacctggcggccggggatgtcaacggagagacggcggaggtggtggagcacgcagccctcggagaagtccccgagcggcgcgtcggcgcccaggggaacgtggcgcatgtgaatgacgcggtaggcgacgagggacatggcaccgtagagcgccaccagggcgagcaacacgagtgcgacctccgcggcgcctcttcctccaccgcgggtcaacgccgccgtggcgcggggtccaccatcgttggcggcgtggatggatcggccggtcggtctggccgccgaggtcctccacgtgccgctccccgcatgcgcatctggagctcgcaggcatgggggaggaggagctcgccgtcgtgcgtgaagaagctcgccggtgtgggggaggaggagctcgccggcaggggaacaggagttcgctggcgatgcccacgcttgcaaatggcgcgagagaagaggaactga

SEQ ID NO: 58243 - DNA, 395 bp, Oryza sativa
  unsure (1)..(395): unsure at all n locations
  Clone ID: PAT_MRT4530_5997C.1
cttgttttgccgctgcgactcgccgttcctagcctcgccgccgacatatccactcacgagctcgcacccgccaccgtcgtcgccatcgcctgttctcggccagggttaggattggagcagcatagagaacaagcgacgactacttaacctagtatatatagtagtatttttctttcaactacttgcaagcgtgagcttcttcagttgacccaaattgaacaacatattatggaatttatcaggatgtacgatccttcattatttctacatcctccatttcaaaatgagttaacctattgttcagatttgcagtactagcatattcaatattagattaacttattttggtacgaaaaaaaaaaaaaaaaaanttnaaaaaaannaaaaaaaaaaaa

SEQ ID NO: 58244 - DNA, 664 bp, Oryza sativa
  Clone ID: PAT_MRT4530_59980C.1
attccattggtagagtggcatatgataatattgaagtatttgttagatatacatatttcagttcttccaaatttagcccatgcttgctgcaagactttgcatgatacaaagcaggcgtcatatgctagcaaccagcgggggggggtgaatgaaaaaattcactaaatatctactgtggcttcagcattcgccaaagcccaaaacgatcggttgttctcttaatgcccagttaatgctgcttcttagttcctctgatctgtacatggtttatagcttcaatttgtccatataggagctgagcttcaaaaggctcagaaaacagagaatttctggaatgcatccaagctgtttgacagtaaaccacttagccctaaactgtctgtaccactcaaaagtctagagcaatacgctccaagctctggctcaccaaattcaggacgagagtggtatatgagggcttggttcctcttcccaaacttcagtaaagcattgctggtcaacatctgtgacacattctggaattgtgccaaggatggatgaggtaatagcaccactatggttaggacctgaaccaaatgtcctgattgaaagttgactctgcaaaggaaatgcatgacaagcttcttcagcatcccaaagggaatggggtttgacaccttcattt

SEQ ID NO: 58245 - DNA, 1932 bp, Oryza sativa
  Clone ID: PAT_MRT4530_59981C.1
taacccaaggcgtatcagagcgtaaagcgcaatcgtcaaatcattttacgcaagggttgcacagcagccagaatctagagttaaagctcatttccatgtttcagccacgagcctcacgatttattgtggagttagtttagagagtacaaagagccaaagccattggagggggaaaatttgtcaaatacacctgttgcgccatcgaaattgcctgaggtctttcgctagttcttgcccatcgccgctctgtcctgctgcctgagcctctggccttcaccggaaagatacttctggaacttctccttggcgttgaagaggaagaccccggcgaggccggcggtggcggcgctcccccagatgaggatggtggaggagagcagcgaccacttgcggtagatcatcttcactttgctccttcccttccggcgccggtcgatgaggagggtacagggcatgccgcccaacgggaggagaactaaagcgacttttcccctggtggaggtggtggtggacaaatgaatcatgaggagttctactctgcccaagggcgtctctacaaaaacaccagacaaatctagaaacggggcatttgaacaaactagaaataactgcgcgctacggtgcacccgtccaatatcaaaggagaaataaatttaacagcatataatttttttatatagcatgtatttggatcatttacacctcacccatgagcaaggagaaacagtaattgatggaatagaattgtcttacaaatttcataaattaaacagtgcacatgataaatatcaccaaatgttaaagtgtcaacaaatagtgttggttctaatatgggagccaagagaggagtgagcagttgccagttagtgttgtgaccacaagatagaacggagaatcacacaacagagcatgttagtggagaattcttacaaaatggggacattaagaataaaaaaactaagaaaaaaaacatatcctccggattagcccacgcgtccgcccacgcgtccgcgaacgggtcatacttgcatttgggttcatgagctcgtccatttacaaattgcaaaggctaaaggcatatagttgccaaatgagaaataattgatcgaactcaagcagtttgaagtatttttggcataccaaccctctagatgactcagagaaaacgatgatgcgagcataaacaacagatgtacacactacagctgttacgaaaaaaaaaatggagaggtactatgagatcataagaaagcctggatagtagatgatttacccatattgttcatagtgttgcttttacagtgttaattaatgatcaaaagtcgtgccccaaattcctccaggagggatcgatggtttgattcctgggattcttggtaacctcgactaaagaaaagaatgaggagcagtcagtgaaaatcttgccctgtcagctgtgactcattgttctttataagcatgcacgacggcataaaccaaacctgcacgctgaggcgtagccagagcctcactcgcacgcaaggcagagaagatccgggagggatgagagatcaccgggggattaccgatgagcgtgacgaacgcgacggcggcggcgacgacctagcacctgacggggtcgcggtcctcggcgaggtactcgttcatgaagctaaggcgctccctcacggccacggcggggcccctgagccgccgtgcgagctcgctgtcctcggcgccagtgaagctctgagcggccagatccaccggggggagacgaagcgccgtatcgacggcctgctagcggatctggcactacacaaagcagggtggagaagatggtggtggtggctcacgaccctttcgtccgggcggccagaatcgcctgtagagaggagggggtcaccggattcgacgcccctggtctcctcgctggcagatgaagtggcctga

SEQ ID NO: 58246 - DNA, 1662 bp, Oryza sativa
  Clone ID: PAT_MRT4530_59982C.1
tcagaaaacagagaatttctggaatgcatccaagctgtttgacagtaaaccacttagccctaaactgtctgtaccactcaaaagtctagagcaatacgctccaagctctggctcaccaaattcaggcagtgatatgtatggtgccacattgtccttacacgagagtggtatatgagggcttggttcctcttcccaaacttcagtaaagcattgctggtcaacatctgtgacacattctggaattgtgccaaggatggatgaggtaatagcaccactatggttaggacctgaaccaaatgtcctgattgaagtttgactctgcaaaggaaatgcatgacaagcttcttcagcatcccaaagggatgggtttgacaccttcatttggttacttgcttgttgctgaccaatcacagaagcaatagcagcgtcgaatgaatcgaaattaatagggatctgtgagaaactcgtattattttgagaaagcaattgcttgttgtctgcagaaggtgcagcttcagataacaattcttcaaagcttatattagatatgcaatcaatccatgaaagcggcgttactttgctttgattacccacagtctgtactgcattgtccccaacagactgcgcagcaaagtcattcgggaactcactcaaatgaaccgtttgtttctgttccatgagaacaggatccagaggcttgttgtcaatgatcttgtctacagagtgcacatcttgtaaatttggtccatggctttgttgctcaaaatcaggttcaaaccaaccatatcttaatcgaaatctcaaagggctgccaactgcagcatgcacatcagcagccgtgcaagaatcactatgagtccattttccactaccagctatgttatccagttgagcatcataaggaaagagcatgagttcgcctcttgcacactgagaattgccccattttatgttcagatgctgcacaactgaagatatcttctttcgtggagctaaagtcaattccaggtaaggattgtggttttcctgctgcagaaccttttgaattgccttatctatcgggaataattcaagcttgatctttccagaatgatttggttgtcggttagagaaattcttagaatcacaaaattgtgcttccattgtactaccacccttcaacgccatttgattttcagtgtacaattgaggcggtgtgaccgctactctgcactttgtgttagcatttcctgatggtttgttgatatatttgccaggtttcaggctttgcatcttactacagcctagttttatatttgctcctgtttcagttgctttacgatgctgctgaggcttcatgctttctgttattcagcagcaaatagatatccggtgaaatattgacttcgcctaagaaatgttaactcctgatctcgaaaccctagatgtcgcagaccccccgaccaccggtaatccggagaagaagacgggggcggagatggcggaccggacactgaatgccgccgcgggaggcccacccgccgcctgctccgccgcggcgccacacgcaatgctcgagaactccggcggcgtcaggcggcgaggaggaggagagcgcgggaggaggcggcgaggcgacggaaaatttttgcgcggggaaacttgaacaccggttgcttcgct

SEQ ID NO: 58247 - DNA, 291 bp, Oryza sativa
  Clone ID: PAT_MRT4530_59983C.1
atggtctttggcatgcagatacaggtggagccggcgcacctcgtcccccgccgacgagggctcacgcttgctctacataaatcaagggctcgccggaacgaggaggttagggtagcggatgtggcctgcctgtcgctggccgatttcctcaatcacgccggccccgcctccgtgcgacctgctcctgacatccatctgcgcctgcgcgtgctcctgctcatgttcacttcctcctccagagcctccaccggcgtccaggccagatgggaggggcggaggacggagaggtag

SEQ ID NO: 58248 - DNA, 582 bp, Oryza sativa
  Clone ID: PAT_MRT4530_59984C.1
atggcggcggcgagtctcctatccctggtagcgcggctgtctctacgcgaaggggcagcgcggaccgtcgggaaggccgcacggcgacgaggcgttgtggcggcagatccagcaccgccaccgctggatctggcacccccgcggcgcagcgccggcgtcgaggcgcgggaggctgcgtgcaggcgcggcgtcgtagcgaaggcgcggacgacggcgacagcggtggaggcgcaacaggcactacggcggcggaggcacggcggcaggcgcgacagcggcggaggtgcgggtggccgtggtagccgtggaggcgtgggtgacctcggcagttgcggaggcacggctattgttgctgggggcgaacggttgtggctgcctggcccgcggctgtgcctggccagcgagtggctgaccggcgcggtggctggtcagcggggccggtggccggccggcgcggtggctagtcagcgaggccggtggccggcacggcgaaggagacgcggcttgcggccgggcggcgcaaagagtgctgccggaggccgtgtagtacaaggaggagcattgcaagctggcacggcgtga

SEQ ID NO: 58249 - DNA, 660 bp, Oryza sativa
  Clone ID: PAT_MRT4530_59985C.1
cgggctgcaggaatcggcacgagggtagttatatatttatttctgcagcataatggcttaccgatgcatggctaggttccaaaatcacttgattttcttgatttacgagatggagttttgcctgttctgtggaatgaaccatattaaagcggtccaaaaaataggcatcagtttagtctcatatttaacttaaggtttagcatgtaagctagatgtctctttttgtttgactttgcctctcttgatgagtgtaccatcatattttcctactgatcttggataactgactcatgaagggaaatgttgtttattcaatgcacataaggatacctatttcttgttgccagaaaggtcctaatcctactgcaggtactgtaaactgttcaagatggggttatctcatgctttaggctactaatatgaagccatatacatcaatggcttccccaaaagggtataatgatgagcactaacaatttacctatccgtatgggcagtacaacttatctgtagagttccaagacaatgccagtttatgttactcccctactcggtaattgtgggtgcgtcaacttgatttcagttttggcaaggtagtatagaatggaatcatattactgttgaaggattctttaatgtcaagctaaacaatgggcccat

SEQ ID NO: 58250 - DNA, 459 bp, Oryza sativa
  unsure (1)..(459): unsure at all n locations
  Clone ID: PAT_MRT4530_59986C.1
gcacgancatttgcaaatgtgtaagttgcattgtantaccaacttctttggctttaaaaggtcatttgatccttgcaaacatntgtaccaagttctttggntttaaaangtcatttgatccttgctgatgatctggggaaaaactggtggatgtagctgtgttgggccacaattagcccgaactgggccttgttattgggccggatcatatgccctcctaccctacatggctgggacctggggaggccaccaattcatgaacttacgaatctctaacaaatttaatttaccgtaaaaaaattaatttagacagcacganttaattaatggtcacatcttgtccagctcaatgatgggcagtttatacggttttgctgtttgcattaactatatttgctaaatgttgtgtgatctgaatgcatatatttttctcttcttttgtttgaaaaaaaaaaaaaa

SEQ ID NO: 58251 - DNA, 1180 bp, Oryza sativa
  Clone ID: PAT_MRT4530_59987C.1
gtgcgtgcgtgcgtgacgcgagaggctgagaggagcattttggcccttggtttctttcggttcttctgctcttttttgctggcgatggggtggtcgtcgtcaagggctatgctcgtggcgcgcgctgtggccttggcggtggtgttcctcgcggcggaggctcagctgtcgccggggtactacaacgcgacgtgccccggggtggtgtccatcgtgcgccgcggcatggcgcaggcagtgcagaaggagtcgcgcatgggcgcctccatcctccgcctcttcttccacgactgcttcgtcaacgggtgcgacgcctccatcttgctcgacgacacggcgaacttcaccggggagaagaacgccgggccgaacgccaactcggtgcgcgggtacgaggtcatcgacgccatcaaggcgcagctcgaggcctcctgcaaggccaccgtctcctgcgccgacatcatcacgctcgccgcgcgcgacgccgtcaacctgctcgggggcccgaactggacggtgctgctggggcggcgtgacgcgcgcacgacgagccagagcgcggcgaacaccaacctgccgccgcccggcgcgagcctcgcgtcgctcctgtcgatgttcagcgccaagggcctcgacgcgcgggacctcaccgcgctgtcgggcgcgcacaccgtcgggtgggcgcgctgctccaccttccgcacgcacatctacaacgacaccggcgtgaacgccaccttcgcctcgcagctgcgcaccaagtcctgcccgaccaccggcggcgacggcaacctcgcgccgctcgagctgcaggcgcccaacaccttcgacaacgcctacttcacggacctcctcagccgccgcgtcctgctgcgctccgaccaggagctcttcggcagcggcgccggcaatggcaccacggacgcgttcgtgcgcgcgtacgccgccaacgcgacgacgttcgcggcggacttcgccgccgcgatggtgaggctgggcaacctgagcccgctcaccgggaagaacggcgaggtacggatcaactgccggcgagtgaactcatcatgaacatgaaatggattcttgatgtacgcttcgtgaacgccataaacttattatcaaatcttgtttttaccaaaagcaaatggaaaaaatgctgttcttgcactgatttttctcc

SEQ ID NO: 58252 - DNA, 408 bp, Oryza sativa
  Clone ID: PAT_MRT4530_59988C.1
atggttctgaaatctatcgtgatgtttgcttgtccaaagtgttacctgggaattggcaaatttgcacaggttggccagaaagaagctctctgtctgctgcagctcaccatcatcttccccgagctgaacggcagggggaacacgcccggccgtgcgcacagagacgatcttttcgctgtattcagtcggggtggtccgagccggaagcgcggcgcgcggaccgacctaggagtagaagagggcgaggcgtacctgctctccacggaagccggcggcgagggcgccgccaatctggccggagctaaaagtttcccgccggccggccgccgtcgccgtcaccgatgccgcggagactacgcccgtgggacccagatcgtccgcccaaagggcacacccgcagccggctga

SEQ ID NO: 58253 - DNA, 1350 bp, Oryza sativa
  Clone ID: PAT_MRT4530_59989C.1
gcgcgcacgcgtccggaagctactgatcttagctgagctagagttccagtgatcattaaggaaagaattagcacttggtcaatcacacggacgcgtggacgagtgcgtgcgtgcgtgacgcgagaggctgagaggagcattttggcccttggtttctttcggttcttctgctcttttttgctggcgatggggtggtcgtcgtcaagggctatgctcgtggcgcgcgctgtggccttggcggtggtgttcctcgcggcggaggctcagctgtcgccggggtactacaacgcgacgtgccccggggtggtgtccatcgtgcgccgcggcatggcgcaggcagtgcagaaggagtcgcgcatgggcgcctccatcctccgcctcttcttccacgactgcttcgtcaacgggtgcgacgcctccatcttgctcgacgacacggcgaacttcaccggggagaagaacgccgggccgaacgccaactcggtgcgcgggtacgaggtcatcgacgccatcaaggcgcagctcgaggcctcctgcaaggccaccgtctcctgcgccgacatcatcacgctcgccgcgcgcgacgccgtcaacctggtcagtatctgcctcgtgtttttctgcacccatgtaatgctggcattaatggcggggcgcgtgcagctcgggggcccgaactggacggtgccgctggggcggcgtgacgcgcgcacgacgagccagagcgcggcgaacaccaacctgccgccgcccggcgcgagcctcgcgtcgctcctgtcgatgttcagcgccaagggcctcgacgcgcgggacctcaccgcgctgtcgggcgcgcacaccgtcgggtgggcgcgctgctccaccttccgcacgcacatctacaacgacaccggcgtgaacgccaccttcgcctcgcagctgcgcaccaagtcctgcccgaccaccggcggcgacggcaacctcgcgccgctcgagctgcaggcgcccaacaccttcgacaacgcctacttcacggacctcctcagccgccgcgtcctgctgcgctccgaccaggagctcttcggcagcggcgccggcaatggcaccacggacgcgttcgtgcgcgcgtacgccgccaacgcgacgacgttcgcggcggacttcgccgccgcgatggtgaggctgggcaacctgagcccgctcaccgggaagaacggcgaggctaatcatcatctcactctgctcacccatcattgcagattaagcatcacaggaatgagaaagaaaatcctctggtcctcgacatcctcaagagtctcggaacctcatcaggattcaggacaaggggaagcgaagttagaatttgaataa

SEQ ID NO: 58254 - DNA, 1917 bp, Oryza sativa
  Clone ID: PAT_MRT4530_5998C.1
atggccaccggcgccggcgtcctcgagaggtctctcagcttcaagaactgggagcccactgccgccgaggaggccgccgtcgccgctccgccgccgcacgatgaggcggccagccggtgcatcaacggcgcgcggccggggatcctgctgctgcagcagagccccaaagccaagcagggcgacgccgcgacgtcgccggcgcaggccgcgctgatcgagttcatctcgccgaagccgcggtcggagctggaccaggcggcgaccaaggtgcagaagctgttcaaggggcaccgcacccggcggaacctcgccgactgcgccattgtcgtggaggagctgtggtggaaggcctacgactccgcctgcctaaacatcaagtccatctccttcttcgacgaggccaagcaggagaccgcggcgtcccgctggtccagggccggcaagcgcatcgccaaggtcggcaagggcctctccaagaacgagaaagcccagaagctcgcgctccagcactggctcgaagctatcgacccgcgccaccgctacggccacaacttgcatctgtactacgacatctggtctgcgagctcgagcactgagccattcttttactggctggatgtaggagctgggagagacatgcatcaccaaaagtgcccgagaagcaagctttattcacagctgatcatgtaccttggaccaaacgagagggaagcttttgaagttgttgtggagggtgggaagctgatgtacaggaagagtggagttcttgtgaacaccactgaagattccaagtggatatttgtgttgagcacaacaagatcattgtatgttggacagaagaagaagggtaaatttcagcactcaagtttcctagctggggcagctacaacggctgctggaagattggttgccaaagatggtgttcttcaggcgatatggccatacagcggtcactacctcccaacagaagagaacttcagagagttcatcagcttcttggaggagaacagtgttgatcttgccgatgtcaagagatgttcggtcgatgacgatgaattcccgtcattcaagaagacagaggagaaaccagaggaagctgagaagcctactgaacccacacatgatgagatcatggacagctcacaaattgagctgcctgaggtagacatagtgaaggaagcggttgtcgaaaacagcgaggacaccaaggtggcaccgatcatggccagccgcccatccttcaaatgggcaaccgcgaatggtgctcgcattggctgtgtccgggactacccggctgatctacagagcatggctcttgagcatgtcaatctttcaccaagagtggtgccctctcctactacaaacaggctgccgataccgtctcctcggccaagcccgaagatcaggctgtcacctaggctgcactacatgggtctcccgacgcctaccggttgcaagctcccgatcccgagcccggagatcaggaggtcaccaagggatcagttcatggggtttcagacaccgtcagtgtctctcacactcccaaagcttgggaagtgaatcaagtgatcatgccatggcattgttcatgcagcggtctcatgatatcaatactgctgttatggaagctataacagcaaaaatttttagttagttgtagcttagatcagagatgacaccatttttgtcgtttgttttgtttgttcataagtgtgctgccattctttagtatgttcatcctctttgacctgaggtgaatccagggcacggtgtaaacaacgagctgtatagcctggattcgcaaactttcaagtacagaatgtgactggatttttttgaaataaaagagattattttgctcaaaaaaaaaaaaaaaaaaaaaaaaaaaaaaactcgaaactagttctctcctcgtgc

SEQ ID NO: 58255 - DNA, 295 bp, Oryza sativa
  Clone ID: PAT_MRT4530_59990C.1
tttatgcgtccttcaagaggtacttacactggggggggagctcattacatcgctcgactataaggctaatcaaacgcatagggttgcgaaatgaggagcggtcgtatgatcgatcatatcggttctcagttgctgtcttataatctgttccattagctgttccatgggtgatccctagataggatctcacttaagagggagactaatggggactcattcctagacttattactcgcaatcttatgcttattcgtgaagatgtacgttatgtttgggtatattgattggataatgt

SEQ ID NO: 58256 - DNA, 2388 bp, Oryza sativa
  Clone ID: PAT_MRT4530_59991C.1
atggaagagccaccactccttgcctccacctcacgcgccaccgcctccgtcgcctcctcctcctccgcaaactgccccgaccccatggacgagggaccctccgtgtcagttcccggcctgcccttcgccgagcagcttagggctgcggggcggggcgcgtccagcggctctccgggggggcccgaggcgcaggtccaggcgctcgcctcgatatcccgcgggatctacccgttggcgagggccgaggcgctccgcggccttgccgcggtcctcgagacggcggacgcccccggcggggttgtggagctgtgccacggatgcgcggtggggctgatgagggacgaagacgagggcgtcaggttggcctccgtgcgattgatagctctatgtgcggataagttgaatacgagagaaggatcggatggaaatggcgataaccaaacagacattatgttccttcagagagtttctgagggtgttttgcttcagtcactgtctaagaaggtcataaaacccaacactgggagtggttctatcatcaagggagaaaaagtacctcctaaattaatatatccctgcgctgccggcatttttgcgcatggtattgaagatgagttccatcaggtgcggacagctgcctgtaaatcattgggagcactttcaaaactctctgctcaatacgcacagaaagccctggacttattgatgggcatgatgaatgatgatacagaagcagttaggctgcagactttgcaggccttattccatatggcaacatatggatgtttgactgtgcaggagatgcacatgcatatgttccttggtttgttggttgacatgaatgcctcgatccgagatgcaacacgcaagatcctaggtttagtcaatctgcctaaacttcaaatgttcaaatctgcaatcgatgttctcattacaagtttggaaaaacatcaagaggaacaagaaatatacagtgttcttttttccgttggtaagaatcatgggaatttttcagccaatatagctaagcatttggccaaagagatcagtatgccatctgatggagagctgatcttggacaaacccaggataaaagcattgttaatagtgtctatctctgtagctttctctgatgataaacacaacaaacgggatatacctgaggttatcttttcacatgcaatttccctactgggaaagatctcttgtgcaataggagaagtagttgatcagaattcactcttatcctacttttgtcaaagaactggaattccattttgggaaacaaagttgccgtctagagaatctgaaggatgtagtgttgagacagtggctgacattcgtcctcggatagaaaaaactgtaaagtcaactaaatgtttagatgaagttctgacgatgcaatcagttaagtccataatagaaacagttgaaaggacttggactatcagaaagtcgtgcaatattcgtgatgttcgaaatattctaagaacatgcaaggaggaactaagaatattagcttcaaattcttctggatcaactggagcattcttgagctttttgtgtgagtatcttgatgcagtacaatttattgtagaaatattacgatcgtttcaattggataattcatatgaccttggcccaacttcacctgatattttactggagaagttagatacatctataagaaggatgaagtgttgttatgctggattcaataggggaatggagattcaagtctgtgagcttgctttgttggcgaatttatttggactttcaaaggttgggattcagtcgaaactagtgctggataagttgcattggatgattaatcgtttagattgtctgtgtgctgatggatcatgcgagctttcttacttcagcagagaaattaagaaagcctttgatgctaactttgttggccatgatattttcactttgctcgagctctttcatccaaaaccaacaacagattatggaatgctgaaaacaataagcgcggatttgcaagtaagagacaatgaccctgaaaattcatcaacatatgtttgtggattacctgtggctgtgagcttatacatatctctctgcaacatctctagtcaggacagattgtggctccgcatgattgttggtgagtctatccagcacaccttcttagagttgtccagttttggaggtaatgatgaggtgaagagctgctctacgattattcctttctatgctaccccaatggcatgctcgttcgttctgaggacatgtctggtaatggaatgcccatacggaagcgtcagcattcgtcaagaatgcaacagagggccaagtggttctataatcgaactctctgatgaattggatgtctattttgtctgtactaaacgaaggtga

SEQ ID NO: 58257 - DNA, 1014 bp, Oryza sativa
  Clone ID: PAT_MRT4530_59992C.1
atgacacagaaacaagtgccgccaatgatgacaaggccaaaggcgacaatcgggaggaagaactcgaggcactcaagcttttgcaggaccaggttgattacaccgttcatcatgctttggtcaaccaatcgggaatgctggtcaatacctttgacctacatgatcaaatctatggttgacggcacgatagctgagcatcaaactcagggcccagtttttctgcctgggggtgtttttccgaactacagaactctcagcacagacaagcagcaacccatcgcgtgtgccgtggcagctgtggggtacacgatacccagggagatcgagatcaagccattcaccgcagcacagtgggctttggccgtgccgctaatcgagcgtgtcctgcacaaagtccagtccgtctgcggaagccgggcgcacgcgactacacccgggaaacgacgcagcacacctgggggcttcggccctcgcgtgactaacgcggctcgacttcgtctggtgcacgcctacgttctctgggcgctctacaccgacctcaccacggactcaaggatttcgcctccctcgacatccgggtgttcttcgccgacccgccacggacttgggggctttgcctcccttgttgtccaggcgctctacgccgacccaccaacggattcgggggcttcgcctcccttgctgcccaggcgttctacaccgacctcaccacggactcagggattttgcctccctcgatgtccgggtgttctttgccgacccgccacggacttgggggcttcgcctccctcgttgtccgggcgctctgcaccgacaccgccacaggctcgggagcttcgcctcccccgtcgtccgggtgctctacgccgacctcgccacggactcgggggcttcgcctccctcatcgtccgggtgccctttgccgacctcgccacggactcgggggcttcgcctcattcatcgtccgggtggtcttcgccgacttcgccactggctcgggggcttgactgttga

SEQ ID NO: 58258 - DNA, 375 bp, Oryza sativa
  Clone ID: PAT_MRT4530_59993C.1
atgcgccgccgtcagctcgaaacccagcgattactctcaccgccgcagtccgcaggaccccttgaacctccccggcgcgccgccgcggccgcccgcctcgccggccgcgcccgcgccgtgccacccatcccgccgccgcacggctgccgtcgccagccgccgccgcgccgcctctccctcatctggaccgttgaattagctccccttgatccccgctttccttccggtgtatgccgacccctccctgtttgcccgcccccccgcgagtatgagccgctcttccgcaaccgtacgccttggccgacccgtccttacctcccttttcgccatcccaaggggcctgttcattgtgggctccgaccgcggtcaagttga

SEQ ID NO: 58259 - DNA, 212 bp, Oryza sativa
  Clone ID: PAT_MRT4530_59994C.1
atgaggagatactgaggacgtcgaatggaaacaacaggatatgggcacaagaggtctctgattggcgaggtcacgcatggcggatcgctgctgccaacgttctgaaagcagacgttgagaccttcaggggattaggactaaacctgaagcagatcgagcactggaccaccttagtgaaagatccacagctgtgcatgaaaaaatggacctga

SEQ ID NO: 58260 - DNA, 1260 bp, Oryza sativa
  Clone ID: PAT_MRT4530_59995C.1
atgaggtcaatccgagcggcgcaagctctggcctcccgctcgctgctcctctcctcgcgcgctctccatggggacgccgcctccacggcggcggccgcggcgggcggcgggagattgggcgtccagccgtcgcccccatcccaggcatcatcatcatcatcctcgcgggccatgccagctggaatcgctggggcggtctccttctccctgaccttcgcgacgatggcggcggcggaggccaaggaaaggccgcccatggatctgctgccgcagaacgtggtgctgtaccagtaccaggcctgccccttctgcaacaaagtcagaggcaaacttggccttgagcttgtagtcaagcgttgttggtttcccccagctaggcaaaccatccctcctgaaatagctcaagctttcctagactatcatgatataccctacaaggttgtggaagttaatccattgagcaagaaggaaatcaagtggtctgagtacaagaaggtcccaatactgatgcaaagggtccgccctgatgataaagccactaatgaagaggaagaaaaatggcgcaggtgggttgatgagcaccttgtgcatgtcttgtcgccaaatatatatcggacaacttcagaggccttggaatcttttgattatatttcaaaacatggcaacttcagttttactgagcggtttgctgtgaagtatgctggtgctgcagcaatgtacatggtgtctaagaagctaaagaagaagtacaatataactgatgcgcgtgcttcattatacgatgctgccaacacatggatggaagcccttgatggaagggattttctaggtggctccaagcctaacttggcagatcttgcagtatttggtgttttgagacctatccgatacttgacagctggaaaagatatggttgagcatacacaaattggtgactggtaccaacgtatggaagatgcaattggagaaccatcaagaatccaggagtagaacgaagttagtagaatttctattggcctcttcaagtctttgaccatttcaaacggaaggaagtatatgctttagacattaaaattattggagttttgcagaatgtgtgacaatgtaataatgtgacctcatatatttagtacacagagaattgaacatgaaaaagaagcgaactcgaacttcctgatttggttttaaagcagaagacaaatgattgaatcaaacttttccaagttggtctgtctacaagtcgttcctggtttagacggt

SEQ ID NO: 58261 - DNA, 2370 bp, Oryza sativa
  Clone ID: PAT_MRT4530_59996C.1
atgatggcatttgatgtcaacagtgaaccagttgacatgaataatacttccagcaaagcgaatctggaaaatagtgaaccttttgttgggatggagtttgaatcagaagaggctgcaaaggtgttctacatggcttatgctagtcgagtaggtttctctgtgcgcattagcaagtcccgacgctcaaggaatgatgagtctattatcatgcgccgttttgtgtgttcaaaggaaggtttccaccacaagaagcaaactgacactggcaagagaaagagaaagcgtgcaataataagggagggttgccatgcgatgatcgaggttagtcagaaatattatgggcggtgggttgtgatcaagctcatcaaggaacacaatcatgctgttgcagctccaagcatagtgagatacgttgcgcctgaagaatatgcacaactagaaccttttgcaggaatggaattcccttcttatgaatctgcccaaacattctactatgcgtatgctagccgtatgggctttgatgtacgtatcagattatcccgccgttcaccaaaggatgagacatttgtaatgcggcgctttgtttgcacaagggagggggctacaccgtgcgaagaaaatgagaacaggagaaagagaaaccggggtgttccaagggaaggttgccaagcgatgtttgagatagtgaagaaggatcaagataaatgggttgtttcgaagcttttcttggcacatacacatgagctggccaatgtaccaaacaaggtgcactacattcagtcaaacagtgaggtagttgttcttgcaaaaagtagtgttcttcgagagaattcaattgctccaaccttgaattcacctctagcagacctagggaggaattttgaaaagcaggcgacaaatgatcaagaaataagagaaccacgccgtaatgcatttgggttggatgatacgcaaaagcttcttggatacttcaagcggctgaatgccgagaatcccacattttcatatgcatttcaagtcgagagacatgattgcttaacccatgccttctgggctgatgccaaagcaagaacatcgtattactattttggagatgccgtaacactcgagacatcttttgttgagaataatgaccttttgccattagttatgttttctggtgtcaatcatcacttgcaacgtgaaatgtttggttgtgcattattaactgatttcacagaggcttcctacatttggctctttcagaactggattgcagcaatgggttcacaccatcctacgtcactaacaacggtttataatgaagcaattggttcagcaatagcaaaaatatttccacaaacgcaccatctgtattttactgcagacatattaaagagatccaaggacattttggctgacatatattttaggcatgtttcttttgaaagagaattttatgtgtgcatcaatgagcctgaaacaattgaaatgtttgagttaagttggaagaaagtccttgataagtatgacttgcatgacaactcatggctccagtctctgtacagaattcggcaaaaatgggttcctgtatatttcaaaggtgtatttactgctgatctttcagcatctcagagacctgaaagcttgagaaacatctttgagaagtacttcaacagaagaacagctttaccagttttcatttcattgtttgagcatctgatggccggttggtcagaaagagaagctgtggaggatctggccacatcttttaccagacctgtcctaagaaccccctcaaacatgatgaaacaagtgtcagaaatatacacaacaactgtgttcaacattcttgaggaagaattcattggatctttaggctattatatctctagtcttgacaatgatgggttgattgctgtgtatagtgtcacaaaggaggatactgaagccacatgcagagtcaggtatgatacttctggcaatatagctaagtgcagctgctgcaagtttgagagttgtggtatcttgtgccggcatatactaagagtattcttggcccttgatgtacgcaccataccagatgtatacatattgaaacggtggacaaaagaagcaaagaatggctttgtgttggacgaatgcttgcggtacagtgagcttcaccgtgatgcccttagatatgcaagggaaggatcaacgtctggggaagtttttacctttgcacaacaaactcttcaggttgcttttgctgaggtggttcaaatgaaacaggaaacttttagccaatgtacaatccgatgaactttgatgctatacagatccactaaaagataactcttccagtaaaaaaaaaaaaaaaaaacgcgagactagttctcctcctcgtgc

SEQ ID NO: 58262 - DNA, 396 bp, Oryza sativa
  unsure (1)..(396): unsure at all n locations
  Clone ID: PAT_MRT4530_59997C.1
atccccctttcnccagctggcgttnntaaccaaaaaaggcccgcaccaatttcccttcccnacanttgcgncacccngaaattgngaaatggcaaattgtttaaccttaatattttgtttaaaattccccctttaattttngnttnaatcacctcntttttttaccccattanggcccaaatccggcaaatccctttttnnttcnnnaaaaatnnaaccaaaatagggttgaaatnttttttccnnttttgggaanaaaaattcccctattaaaaaaacntttnactcccnncntcnaaagggcnaaaaaaccctcttatcatgggcgaataggncccctncctttaaancatccccccccntccaattttttttgggggtccaagtncccttaaa

SEQ ID NO: 58263 - DNA, 952 bp, Oryza sativa
  Clone ID: PAT_MRT4530_59998C.1
atggcgcaccgggtggacaacgagtacgactacctgttcaagatcgtcctcatcggcgattccggcgtcggcaagtccaacatcctctcccgcttcacccgcaacgagttcttcctcgagtccaagtccaccatcggcgtcgagttcgccacccgcaccctgcagatagcgtcgaagactatcaaggctcagatatgggacacggcaggtcaagagagataccgtgcaatcacgagtgcttattacaggggtgcagttggagcacttcttgtattcgacataacaaagaggcaaaccttcgacaatgttcagaggtggctgcgggagctccgggaccatgcagacgccaacattgttgtcatgatggtcggaaacaagtctgacttaaaccatctacgatcagtccccgaggaagatggccatgcgttctctgagaaagaaggtctctccttccttgagacgtctgctctggaagcgattaatgtggagaaagcattccatactgtattgagtgaaattcaccagattgtaagcaagaaagcacttgcagctcaggaatccgcgtctacaaatgggcgttccatgcaaggaactacgatcaacgttgctgaagctccagccgccacaaaaggttcttgctgttctagttaaaaaagacttttctaaaggaaaagatctttcgaagcgtttgtttttgcagaactgcagaaccaaataggctaatactggtttcacataatctgtcttctcataccgaagcccatgactggtactccttatcacaaggaacatttctaccgtacactataacctgcctgaatcaaaacatttccattttgtatttatgaattaacttaccatggcatccgcttgtaatactttgggggaattgaagagcattgtactatgtaacactgattctttcctagtaacaaaatattctttccagcac

SEQ ID NO: 58264 - DNA, 210 bp, Oryza sativa
  Clone ID: PAT_MRT4530_59999C.1
aaaacaaagaactcgcaatgcctcacttggtgacgaaaatcatggatgaaatcaacacatggataggatgtggggcaaaagatttagcgagattagtgctgtagccttcctgcaatccttgtagctctgcttttttctctgctccctcttgtctgtccgtcgtctcctctgttttgcttttgctccttctcttttcctcaccgttttcgg

SEQ ID NO: 58265 - DNA, 462 bp, Oryza sativa
  Clone ID: PAT_MRT4530_5999C.1
aatatgaaacagcttttgtaattttttatttcatgtgtacattacacaaaaaggaaaaaaaatctaatgagtcgtactgaaggggatagagccagagtcatggattgggatcccatgcagtttgaatagggactgcaagtttagcagtcttatatcttcagtttagcagtcttatatcttcactaccatcagatcaaaggtttcaacggcctggatttaggagcaatactgtttgtcagcattggtgcgatctgagtccttgttatttgatccaaagatggttatatgactgctaaagttacagtcatacaagcaaaggtgatctcaattccagtcatggtgtataacatcacgtcgggaaaatataaaggcaaaataatagagtacttaagcatcaacttgcagtaccgttttggttataggacaatagaacattaacagaaccaagggtgacagaacctt

SEQ ID NO: 58266 - DNA, 735 bp, Oryza sativa
  Clone ID: PAT_MRT4530_599C.1
atggcgttgtcggagccggacctcgcggcggagacggaggcgatcgtgtcggcgctcacgcacgtcgtcgcgtacggcggcggcggcccgccgccgagcgaggagaccgccgcgtccgcggtgacaaggacagcgccgtggcgcgcggacggcgcgcggcagggggcggtgccggcggcgaggaagtacaggggggtgaggcggcggccgtgggggaagtgggcggcggagatcagggacccgcacagggcggcgcgggtgtggctcgggacgttcgccaccgccgaggacgcggcgcgcgcctacgacgccgcggcgctccgcttccgcggggggcgcgccaggctcaacttccccgaggacgccgccgcggccgacgagcgacgcgccacggacgccgcggccgccgcggcggcggcgtcgtcggcgcccgccgcgctgctggagtcgcagccgggcgacgtcgcggactgcctcgactactccaggatcctggcgggggcgccggagcggccgacgagctccaccgtcccggacgggttcttcggcggcggcgggaacggccgcttcttgcactcgtggagcattggcacgtcgccgtcgccgtcgggctcgggctcgggcggagccggcggtggcggtggcggtggcggtggcggcgcccctgttcgtcctctgtttcatggcggtaacggctgggagcaacgcggtgacagtgcatacaacggtttctag

SEQ ID NO: 58267 - DNA, 225 bp, Oryza sativa
  unsure (1)..(225): unsure at all n locations
  Clone ID: PAT_MRT4530_59C.1
cgcgcacgcgagcgcgggtcccctagagcgggcgccccctnnnnnnnnnnnnnnggagggaaaaattagaggngccaggaancacaaaaccaacagaanagacaaanccangncnggnaggcanggangaaacggngaaaccacaaaagcacaacnaggnncggggccccagacagcggaaggcacanccanaggaaaaaaagangaaaaaacaccnacgaaagc

SEQ ID NO: 58268 - DNA, 238 bp, Oryza sativa
  unsure (1)..(238): unsure at all n locations
  Clone ID: PAT_MRT4530_5C.1
gttaattttnancttacccgggaagaagaanggaggnntttganannggtggnanaatgtgttaaatgtccntgtaaattancgncgagttgggngatgaatttgaaaacctgttcattctgatcttctgatnggnaggaccnagtgtttggatttgtggctnngaaatatttgctncctgngtaaattgtcncgaaaaaaaaaaaaaaaaaaaaaaaaaaaaaaaaaaaaaaaaaaa

SEQ ID NO: 58269 - DNA, 229 bp, Oryza sativa
  Clone ID: PAT_MRT4530_60000C.1
gcggaggtgaatcacggcgccatcaatccgaggctggcgagacaagcttggccctctttgggcgtggcgccatggctggagagccatagcagtggacgtgtctatctccgccattgcttcgtcgacactggacgtgcagacggcatggccatgagggctttgcacgatgggatgagcttcacttccttgaaggagctcagcccgtttctcgttctggatgcattaaaga

SEQ ID NO: 58270 - DNA, 2058 bp, Oryza sativa
  Clone ID: PAT_MRT4530_60001C.1
atggccaaccgcaatgtaccaatgcttctgcccctcgccgtcctcttcctcctcggcagcggcggcgtcgccaccgccgcgaacgtgatcgaccggtgctggcgcggccagcgcaactgggccgccgaccggcagcgtctggccgtgtgctcggtgggcttcgccggcaagatgcggcagaaccgcggcgccggcgtggtcgcctacacggtcaccgacccgagcgacgaccccgtccggccgcggcccggcacgctccggtacggcgcgacggtgctgccggcgaaggtgtggatcaccttcgcgcgcgacatgcgcatcaggctggcccagccgctgtacgtcaagaacttcaccaccatcgacggccgcggcgccgacgtgcacgtcgccggcggggccggcatcgtgctgtaccacgcgagggacgtgatcgtccacggcctccacgtgcacgactgccgcgcgcagccgccgggacgggtggtcgtcccgggtggcgccgtgcagccctccggcagcggcgacggcgacgccatccgcctggtggcgagctccaaggtgtggatcgaccacaacacgctgtcccgctgcgaggacggcctgctcgacgtcacggtcggctccaccgacgtcaccgtctccaacaactggttccacgaccacgacaaggtgatgctcctcggccacgacgacggcttcaccaccgaccgccgcatgcgcgtcaccgtcgccttcaaccgcttcggcccaaacgtcaaccagcgcatgccaaggataaggcacgggtacgcgcacgtggtgaacaacctgtacgatgggtggagggactacgccattggagggagcatggggccgagcgtgaagagccagggcaacctgttcgcggcgtcgggcggcgccggcgacaacaagaaggtgacgaggaggatgccggccgtggcgcgcggcggcggcggcggcgggaaggatcagtggcacttgcactcggtcggcgacgccttcgagaacggcgcgttcttccggcaggtgggcaacagggtgcggcccaactacaatcggcaccaggccttctcggcggcgagcgccggcgacgaaagggtgagtgtgacagagtttggatgggctctgcgacagtctttgtggcttccagattcacctgggcagaagagggggctgcttaccttggttttaagggtgctgcctgccggaatcaacatgtcgagtttccttaagttcagcctctctttaatctccattgctctcagtagctgctctaggtggcagcaggagctcgggccggcgtatcttagtacaaaggctctgagaggcagtggccgtgggcacatctgggctttttatcgagggcgccagcgccgcctcggaccgccgcctccgttgccggcgcgtcggaggctcggacccccgcctccggtgctggtgcctcacacccctgcctccgctgccgccgcctcgcacccccgccttcgctgccgctgcgagccacgcggttgctcgtctgggcgcatcgagggcgccggcgccgcctcggaccgccgcctccggtgccggcgcctcggacccccgcctccgctgccgctgcgagccgcgcggttgctcgtgacagcggggatggacagaagttggatcaatagtaggctatttagcaagccgcatcttgatggggtcaatgagttcatgaaatttgttttagaaagatttgatgagaatgcagagatactttgtccatgtcgatggtgtttgaatcggattcatcgacagaaaggacatgtggaggatcacttatatatttatgggatagccagcacttacactagatggatataccatggagaacaatccgatgccggaattaatgaaaatgaagaccatctggatgaacatactagttttagtgaggatgttggtataaatgaggatgaagaagagaaccctcccgacagaattcctgacatggtagatgagttgtacatagcagaaggtcaagatggagggaagtctatgtttgcagctatattagatgagatgaagcagtaa

SEQ ID NO: 58271 - DNA, 1836 bp, Oryza sativa
  Clone ID: PAT_MRT4530_60002C.1
ccgcgcgggggggtcgcctcgccccagctcggggggtgtcctccgcttcggctccgcccggccggccggcgcccggttccctcttgcttccggccgtgccttatggaagtggctttcctccggatcgaaggggggggtgctggttccttccctccggatcacgcttggcgtcttgcgctcaccccgcccggttccgttttccccgcccgcttgcggtggtgcccgtctcggtggttgtggtgtgtttcctacccttgccctgatgcgcttctatggtaatcgaccgaaacaaaaatggaaatggtaaaaaatatggatttgaaaacggcaatggctttgctgttagaccgatctgttccgtatttattgtattcttgctgtaagtaccgtttcatatatttaggtgcttttctgggaggtgtaaccaactaaattcctatgctaccttctggttgatggccgtccctcctgttgaatcagaaacaagaagtgaagaaacagataatttccctttacttgcagaccacatggaaaatactggacatcatgcacatgcagttgatatcccatgggattcttcaccatcgacatctcgccgagataatcataatggatttgatcaattacctcgtatcttagaaggttctcctgggacatctactccatctaactctcagaatggtcctctagcaagaagagatgataatcgtggtcgtcgtcagcctagtcccttgaattctggttgctggatctcagttgagctagttgtaaatgttagccagatcatagcagctatttgtgttctgtcagtatcaaggaatgagcatccacactctccgttatttgagtgggtcattggttatacagtaggttgtactgccacgctgcctcatctttactggcgctatctccatcgcaacctcccaaccactgggcaagagccaacagttcagaatatccctccaaacaacacccctgaagctaattcatatggagtaaccggcacaaatggagtctcaagaaacaatgaggcaacagtaaatccaaggttccaagcttttgctgatcacttcaaaatggctctggactgtttctttgctgtgtggttcgttgtgggaaatgtatgggtatttggtggacattcttctgctcacgacgcgcccaacttgtacaggttgtgtattgccttcctcacattcagctgcatcggctatgctatgcctttcatcctctgcgcattgatatgttgctgcctaccctgcataatctctatcttgggatttcgggaagatctaaaccaaaacagaggagctagtgcggaaacaatcaatgccttgggaacatgcaagttcaagtcaaagaaaactcgtgatggagatggaaacgaagttggtgtcggtgttgtggctgctggaacaaacaaggagcgagtcatttctgcagaagatgctgtctgctgcatctgcttggccagatatgtcgataacgatgatctccgagagctcccttgtgcgcacttcttccacaaggattgtgtggacaaatggctcaagataaacgcgctgtgccccctttgcaaggctgagatagatggtgtctccacaagtgctccagccattggctttgggcgtcgccacagcgacaacagggtaggaaacgacattgaatcacaactataactctcttcccacttcgttggcagcgtggatcacgcctttgatgaggccttccacacatcaacctgtaaattatagaggtagacatcaagatgtaaagggtcctcttacgatccaacaaagttcttttctgaatgactactgcctccactgtcagtat

SEQ ID NO: 58272 - DNA, 178 bp, Oryza sativa
  Clone ID: PAT_MRT4530_60003C.1
ggaaaatacataaaatgcggtctgcgtttggcataaaatctcagtccagacaagcacaattgctgcaatacataaattactatggctagaaccatataattcgctcgcccctacatataccataagcgtcctgactgacgtgtgctggtacaaccgcagctgcaaggttgcaccgtgg

SEQ ID NO: 58273 - DNA, 255 bp, Oryza sativa
  Clone ID: PAT_MRT4530_60004C.1
atggcacgacattttagcccggcccaagcacggaacggcccgaccaccgggccgttcctgggcccctccaccggcactgtcgtgacgggagccaccaccgggtggcgccgtgacgaacggatctgccgccgctgcccctgcaaagggtggatctgccatcactggcatcgggatgggggaggatcagcagcggaggccctgatggcaagggagctgttgggcctcagcgacgacaacaacgacgcccaccaatag

SEQ ID NO: 58274 - DNA, 2926 bp, Oryza sativa
  Clone ID: PAT_MRT4530_60005C.1
cggacgcgtgggcggacgcgtgggcggacgcgtgggcggacgcgtgggctccccctttctgaacacagcaccaccccttctgctgcatctcccacctccctctgaattgtgggcctgaggcgatggcggcgctcgccccgtccaagatgctcggcacccggctcaacttcgccggctcctcccgctacgccaccgcggcaccgaccaccggagcgcagaagatcgtctccctcttcagcaagaagcccgccccgaagcccaagcccgccgccgtcacctcctcgagccccgacatcggcgatgagctcgccaagtggtacggccctgacaggaggatcttcttgccggagggtctcctggaccgctcagaggtgccggactacctcaacggagaggtccccggagactacggctacgacccttttggcctcagcaagaagccagaggacttctccaagtaccaggcctatgagctgatccatgccaggtgggcgatgctcggcgccgctgggttcatcatccccgaggcctgcaacaagtttggcgcaaactgcggccccgaggccgtctggttcaagaccggcgccctcctcctggacggcaacaccctcaactacttcggcaacagcatccccatcaacctcatcgtcgccgtcgccgccgaggtcgtcctcgtcggcggcgccgagtactaccggatcatcaacggcctggtcagtcaactgcacaatctacacgccctactcttacaccttttggttttcggtagcacgctttccaatttattaaatgctatatctcgtacgaaaactttgtatatgaaaattgctttcaaatctcggagaaggcaacgtcgccctcgccgccgcagcggccggatccggcggatggcgaactcgagcggctcccgtactccacggccgctgccccgctgcggcggcggaggaggaggaggcgggggggcgcccggctcagttctccacggagggccgcgacaatcaacgcccaaatcaccgccccgcgcccggtggaggacctatcgcaacccccttttttgattcccctagcacaacatgacatcagttaaatcctagcgtggtagactatcgtctaaggatgttaaaattcttcccggcgttggcgggaggcccgcttagaaatgctgaaaatttacctgcttatgagagggaccaagtgtttggcggtgtgacggcacattttttgcttggtggtataattttttcggaaagtttacatgatgaacgcaaacatttgagccctagtcctcgcctgtgagagcgaacacgccgtcccgggcggcttccaaccccgacctcttccgcaagtaagtcgccatccacgtcaaatatgaacaaagaaaaaaaaataaaaaacctccccggcccggccccccacagtctccccctttctgaacacagcaccaccccttctgctgcatctcccacctccctctgaattgtgggcctgaggcgatggcggcgctcgccccgtccaagatgctcggcacccggctcaacttcgccggctcctcccgctacgccaccgcggcaccgaccaccggagcgcagaagatcgtctccctcttcagcaagaagcccgccccgaagcccaagcccgccgccgtcacctcctcgagccccgacatcggcgatgagctcgccaagtggtacggccctgacaggaggatcttcttgccggagggtctcctggaccgctcagaggtgccggactacctcaacggagaggtccccggagactacggctacgacccttttggcctcagcaagaagccagaggacttctccaagtaccaggcctatgagctgatccatgccaggtgggcgatgctcggcgccgctgggttcatcatccccgaggcctgcaacaagtttggcgcaaactgcggccccgaggccgtctggttcaagaccggcgccctcctcctggacggcaacaccctcaactacttcggcaacagcatccccatcaacctcatcgtcgccgtcgccgccgaggtcgtcctcgtcggcggcgccgagtactaccggatcatcaacggcctggatctggaggacaagctccacccaggtggcccattcgacccgctggggctggcgagcgacccggaccaggcggcgctgctgaaggtgaaggagatcaagaacgggcggctggccatgttctccatgctggggttcttcatccaggcctacgtcaccggcgagggccccgtcgagaacctctccaagcacctcagcgaccccttcggcaacaacctgctcaccgtcatctccggcgccgccgagaggacgcccagcctgtaaacatctcgccgccggcgacgctggctggcctcaagttaattttaatcttacccgggaagaagaagggaggagtttgagaagggtggaagaatgtgttaaatgtacgtgtaaattatcgtcgagttgggagatgaatttgaaaacctgttcattctgatcttctgataggaaggaccaagtgtttggatttgtggctgagaaatatttgctacctgagtaaattgtctcgaagtggttttcatcaaaaaaaaaaaaaaaaaaaaaaaaaaaaaaaaaaaaaaaaaaaaaaaaaaaaaacacgtcaggccatgcgaggccagcctgtaaacatccctacctgccggcggggaagctggctcggtagcgcctcaagttaattttaatcttacccgggaagaagaagggaggagtttgagaagggtggaagaatgtgttaaatgtacgtgtaaattatcgtcgagttgggagatgaatttgaaaacctgttcattctgatcttctgataggaaggaccaagtgtttggatttgtggctgagaaatatttgctacctgagtaaattgtctcgaagtggttttcatc

SEQ ID NO: 58275 - DNA, 1693 bp, Oryza sativa
  Clone ID: PAT_MRT4530_60006C.1
ccacgcgtccgcatcgatcgatctcgtgcgggaagcgatcgatctcgtgcgggaatctttgggggaggtcgtgcgcgatgatccgctgagcggggggcggccaccagatcagcccgcgcatccaactccggcgagaggaggaggaggaagaagaagatgtcttgctgcggaggcgccgaggaggacagctacggcccgccggcgaaccaggccgctccgccgcccaacgtcaatgctcccgggaatagaggcgggccgagagggccgggggcggcgcggccgggcgggccgccgaagccggtgaacatcgacgtgccggcgataccgttcgaggagctgaagaagatcaccagcaacttcagcgaccgcgccctcatcggcgagggctcctacggccgcgtctacaacggcacgctcagcgacggccgcgccgccgtcatcaagaagctcgaccccggcgcctcccaggagaccgactccgagttctccgcccagatagcgatggtgtccaagctcaagaacgagtacttcctggagctcttgggctactgcttggaagacggcaaccgcatgctggcctaccagtttgcaaccatgggttctttacacaacattcttcacggtaagaagggagtccagggcgcggagcccggcccggttctgaactgggcgcaacgggtcaagatagcttatggggcggcgagagggctggagtacctccatgagaaagtgcagccatcgatcgttcatcgagatgttcggtctagcaatgttcttatattcgacgagttcagctcgaagatcgccgatttcaacctgacgaaccagggcaccgacaccgctgcccggttgcattcgactagggtgctaggaacatttggataccatgctccagaatatgccatgacagggcaaataaatcagaagagcgatgtttacagctttggcgtgattctattggagctactaaccggaaggaaaccagttgatcacaccatgccaaaagggcaacaaagtcttgtcacttgggctactccaagattgagcgaagataaagttaagcagtgcgtcgatccaaagctcaacaatgattaccctccgaaggctgtcgcaaagctagcagcagttgcagcattgtgcgttcagtacgaagccgacttccgaccgaacatgacgatcgtcgtgaaggcaatccagcctcttctgaatacaaaaccagctgggcctgcagagccaccacctgcctgatcagattgtatgggagttctgctctaggcagacaggggaaaaaaaaccacacaaactttgcatggtttcctgtgttttcccatcaggcagtgtatgttttaagaagccatgcaacttggaggagcaccaattcggcatgattttttgtaaaacactgatccattggtaccccagggtatattacatatagagggggtattttgctaactggtgtaatgaattaagttattctttgtcgtgtcatggggtaattttaaggtccttcaaaagcttgcatagaaccaaggattgcatgatgcattcccaagaacttccagggcggcccctttttcttatttttgtatagacccttggaattaatagtagtttttcttcttcccaaaaaaaaaaaaaaaaaaaaaaaaaaaaaaaaaaaaaaaaaaaccaaaaaaaaaaaaaaaacaaa

SEQ ID NO: 58276 - DNA, 1386 bp, Oryza sativa
  Clone ID: PAT_MRT4530_60007C.1
atggcgcttctccgagcggcagcgcgggcacgcgtgcgccgcttggtcggatctggccccccggccctcgccacctttgccggcgccgacagagcgacgggcgggcggggcggcgcagccggggagcgcgctctccaggcgatgaggctatgctgcgctaccccctccgtcgccagcgtcggccgcgacgtcaaagcgccggtctctccgcccgccggcgcctccgtgacgctggtggtcgagcaggcgacgaggttcgccacggccacgacggcgcttccgcttccgcttgccaagattccagccgccggcagaggcggaggcccaagatccgccgggatcctcgttgccacggtcgccgtgggctcgaaaggggcacactttgcgaccgccagcgctccagagcgtgctctgctcacgctagagcgcgcccagcaggccacgtcgccatgcccgcctctcgcggcaccgaggatcctttgccgcgggctctccctctccaccgtcgcgggcgacaagaaagcgcggcgcttttcgagcaccagcagcgccggtgacgaccagtccaagtcgctggagaagaaggagccactgagccgtcgcgctcgcgccgacgacccggcgccggcggtggaggagccactcgagccgctgaaggagatggagcactcggtcctccgtgctctcaaggccatacaaaaggtcatcttgaggtcgttcagcgaacaggaggctttcatggaggatctgatgaagagggcatccacacaaatacttcgagccggcggcttctacaacgccaataccacagttggcttcatcattgccgtcttgctgtgttttgccatcatcctgggggttttactcttcatgagtgtgctgtttgcagagtggagagccaagcaattcctgcacagtgaagagtgtgacaggctgacggatgggatgatggataaagctgagatgaagacccaggagtttctcaggaacaacaattttcatcagattgtcgagggctacgtgagcgaggggttggaattggcgactggggaggaggtgcgcgcgatccggaagcgcttcttgaaggaagctcttcaagataccggggagtacatcgtccacaagaccacatttggttctcagagggacaagattgccagctggtttcgccgcgacaagcagcaagaggcgccatcaccatcagcaacagcactgaccaaggacagcgagtccactgtgggcgtggtggagaaggtgaggatgagggatcgagtggctgcctggttccgccgcaacaaggagacgaagccagccgagccagcgccgagccagcagcagaagatcgccggcaccgaggggagcggcacgccgccgccgccgcagtga

SEQ ID NO: 58277 - DNA, 579 bp, Oryza sativa
  Clone ID: PAT_MRT4530_60008C.1
atgatcaccaactcctcccgctaccgccgccgccgccacccttgccagccccagattcgggcgcacccacgccggatccgtgggctccaccactgcctctgtccaggcccatgccgtccccgccaccgccgccgtgaaccgttgccttgctccgaggcgccggtcggtcctctccgctcgctgccgaaatggcaccaccgaccttcacctgagtccacccacgccggatctggagaggaggaagttgtgagccccgttgccgccgtcctggcgagccaccagcttttgccgacacttcgctcgagcagcagcgagggaagggatctgggcggcctgaggcccgccgccgccgaccacgtcgccgcccacatcgtcatcgaccgctcccgccgccggtcgccctggttccgccgccggccacccccgctgccgcccgccacccccacccccgccgcctccagatccaggcagccccgccgcctccagatccggtgcggcccgccacccctgccacctccagattcaggcgggaggaggtccgccgccaccgaccatgtcgccgaccactcccgccgctag

SEQ ID NO: 58278 - DNA, 648 bp, Oryza sativa
  Clone ID: PAT_MRT4530_60009C.1
cgccgtgcagagcgcctgggacgccttcggccgcatcgacgtcctcatcaacaacgctggccttcgaggaggtgtgcactcaccattggattggcctgaggatgaatgggagacacttatcaagacaaacctcacaggatcatggctcgtcgccaagcatgtatgtagacgcatgcgtgatgccaagctaaagggttcagtaattaacatttcctctgtttctggtcttaaccgtggtcatctgcctggctccactggatacgcagcttccaagtctgccatgcattatgccacaaagctaatggctttggaattaggagcatatggcattagagtgaactcaatagcacctggaatcttcaagtcagagataaccgctcctctattgcaaaagaaatggttgagcactgttgtttcaaagatagtgccacttaagactcatggcactactgatccagcattgacgtcgctggttcgttttctgatccatgaaacatcatcatatgtgactggcaacatcttcattgtagattctggtgccaccttacctggtgttccaatattctcttctctgtaatattcatcattagaatttgctttcaaaaagtcatcggatctattgatttggcatcaaataaaaatcgaaac

SEQ ID NO: 58279 - DNA, 442 bp, Oryza sativa
  Clone ID: PAT_MRT4530_6000C.1
cccaaatgtgccaaatcctatccagatgaccgaggacctgcgctgtgtggatgcgacgacgtgcagcagtgagagagagacgacttgcgactgagtctgcggaagagatgcccaacgcggctatgagcctacgccgcccgtgggacggcagcgactgcaggctagtctgcagcgtgctcatccaccgctgccagagaagctttcgggtgcaagatgcgcagatgccttggcggctggaagcgccgaggctgtgcatgcaggacgtccacagctgtggtcgcgctgctttggggctcgatcacgcgtgcaggccgtcagtccgtcatgccaccacacagattgacaagtcgatattgattcacataaccattggtggatggcaacggtggtcactgtgctctaaggtgtgaatctgaatatacaactgagtggcgtatatata

SEQ ID NO: 58280 - DNA, 334 bp, Oryza sativa
  Clone ID: PAT_MRT4530_60010C.1
ggggggcccaaagatttttttgaatttttatgggggaaaaaaaaaacttttgggggaatttttggatacaacttttttataaaacccaaagggggggggaaaaattaataggggaaatttcaggtgtttttaataaataaaaagctcccttggggaatacatgcttttttggggaaaaacaatattttttgggaacagtttaaatttgttctaaaaaacctttttatttgaatcaaattaagcaaacgagggggaaaaattaattgaaagaaaaaacttctttttttttggttagctaggtggctataagcctttgatgataatgccaccattt

SEQ ID NO: 58281 - DNA, 552 bp, Oryza sativa
  Clone ID: PAT_MRT4530_60011C.1
atgctggtcggcctctgggtgaaaaacccgagccgccagagccgcagctggtcagaccgagccagcagcggtctgactgagccttggccggtcatcgcttgttactcttggaggttgccacctcctaaacggctcgtgaaggtgtttcccggtaacctctccaaggagattgtgcagaaggcccggcgcctgttggtcagggacaaggaggaggaggcgttgttcccttcgcgcggcgagggcttgacaataaggctgttgatgaggggggcgcaagtgggggaaggtggcggcggttgctgcagcacggtgtcggcgtcgatctcggcactggtggcgggggtcggggatgagcacgccgctgccacggcggcatccgaggaggaggaggcgtcgttccccttgcgcggcgagggcttgacgacaaggctgctgaggggggcgcgagcgggggaggcggtgttggtctcggactccagcttcggctccggcatcggacttcctcgctcccccgccgccagcgtgaccgctcgcctccgccgccgccgctaa

SEQ ID NO: 58282 - DNA, 231 bp, Oryza sativa
  Clone ID: PAT_MRT4530_60012C.1
atggtgctcgacatgaaatcaaagtcgctgccgcatttcatgtactttatctcccaccacccaccagcactccttcatatccgagctccagactcacgtgctgatgcggttggcctcgggaacatcgtcgaaggcatgagcgggcaccaggatctagtgcagctcgtgtatcttgagtttgaaggcgatgatgctgtgggagatgaggtgctaatagaggatttaagctaa

SEQ ID NO: 58283 - DNA, 441 bp, Oryza sativa
  Clone ID: PAT_MRT4530_60013C.1
atcaccgctcacatattcatggcatcagcttcagacaagctgtttctctgaggccatcgtgctcagcaggctcgccgtcgtggtggcagcgctcatgggctacagcgacgtcagctagtactgccacgtgaggaaggcggtgttccggaacccggtccggtcgtgccagaactacatgcagcagaggtgcgtcgacgcctgcggccgcatggactaccgcaagctgaccgcgcgggagttgctgcagccgagctgccgggagctcggcgccctgccgatgcagatgcagtgctacccgctgatcgtgctggtgcgccgcgtgtgcacctaggacggcgaccgcctgttcgggatgatctaccagcacacagtaccgatgtgcgacgaccaaactatctctcggatggcgagcgcgctgacagactacggtcggtgcaacct

SEQ ID NO: 58284 - DNA, 2590 bp, Oryza sativa
  Clone ID: PAT_MRT4530_60014C.1
cttttccctcctccgttactaatcccacatcccaccccctcccgacttcgaccaccctcccgccatctcccccctcccccccctctccccccacccccccccctactctcccaccgactcccctaacccccggccatcatgtctactatcccctcccccctgccttcaccccctctccgccccgcctcccagctccctccctcccccctccgccccccccccccccccctccccctcccccccccccgcccttcaccccccatcacccaccccctcgcactcccgctactccccctatccccagcttttacccccccccccccacccaccgcatgccggattgcccgccctgctaccaccccgcgcccacgccggccccgtgccccccgcctcctcccaatcctttcaccgcccccctccgcccgcccctcatctgcgccgcccctcgtctgcaaccgcaggcgctgcgcgctgctgcctcctcctccgctcgcccccactgcccgtccacgccgccgtcacacgctcccacctcgttgccgtcttcgctcccacgacgaccggcgcatctcgccgggggctcatcctagccggcgactgcgaggagcccgtccgccgccgccaaatcctaaaaaaaaaaaacctaaatcggcgcctacgcccgctcccgcgccgcccgctgccatgtccccacgacgccgcccggccctccgcgaggcggcccggtgcgccgccacgctggccatccggccctccgcacccggccgccgcgagcgccgccaaccccgggatctccgacgactccgccgccgagcccggccgccggatgctgggagctgccgaggaagccgtaaacaggtgggtatcccgggaggcggccgccgatggcggctacggcgtctccgatttccccgcgctcgcggcggcggtcaaggatctcatctccctcggctcacacggcggcgcctacagccaacgcgctaagcttgccttggagtctgcaatgggacaccttgaggacgacttctgccaagttcttatttcaggcacatactttcatccccctgacaacctccaagcatcactatatgacagcattgccctccctgtccgatcctcctcgttctcatcaataaccaacttggaggctgccagcttatcctcattcacaacaagctctagtgatgatagatggacatactgtactggacacagcagagattctttctccctggagaaggtacacctgtatctcatcgaccctgaagcttcaacattgctaaaggagatcgctgagctcatgatgcttgctggacatgaatcaaacctttctcatgcctatggtgagatccgtaatagcacattgatgcagtgtctttgtctgttcggtgttcaaatcgatcttaacagctataatccaagagcttctccttctgaaagtgggttcaacatgctactagatctagatggacaaaagatggaaatatggatccaagctctcagagtcattattggcacagtacttcctgaagagcgtcaggcttgcacacagatttttgggtccgacagcaaggtggaggaggactgctttgccagagccactatgcgttttattcaacaattatttgcatttggaagcctgatagccaatgtgaaagacgaacagtatgagaaagtgcccctgctcgtacaaatgcttgaggaatttctaaagcttaaaccgagcatagaagccctcaggtatggtgatgccaaggacgcaatcagccaggaggctgacatgcttcttgaaaagctcagggaagaagcagttcgcctactattgaagttttcagaagcacagatcaaccatgagtcctatgataatgaaacgatagtgctcaacggcagcgtcctatcgtttcctcagtataccatgggtgttatcaaacttcttgctggttacagtgacacgctcaatattattttaccagtagaggtgggtggtgttggcactgtgactacaagcccctggaagagctacgttctcactctgctcactcgtctacagctaaatattgaggagaaatccaaatcttacaaagacgaatgcctgcggaatgtattcctgatgaacaatgcgatgtatgtgcttgaaaaggcacgatctccggatctgaagatattgttaggagataactgggtcactaaacagcttgtccaggtggaacagcatgcaacggcttatctccgagcttcttggactgaacctctgtttcagttgaaagacaaagggatcaactacacagagagaagtttgatattgacaaaaaaattcaagaacttcaattcaatattcggagaaataagcagggtccagacgacgtggaaagtccccaaccctcagcttcgacaacacttgcgccttgttatattacagcaggttattccagcatatcgggcattcgtgggacgatttgtgagttacaagtatattgatcaacggaaggatgagtgccctcgtggccgggttgacgcgcaccacaagttcgcggtgaccattggagaaggtgtatcggttgctaagggcagcgtctttggacggttgtag

SEQ ID NO: 58285 - DNA, 564 bp, Oryza sativa
  Clone ID: PAT_MRT4530_60015C.1
atggactttcgacgacggaagccgccgaaggacggcagggtgttcgtccgcggtctcgccgcgggcaccgccggcgaggcggacctcctccgccacttcgatcgttacggagtggtggacgaagtctccatcccgagggtcgtcggcgaggtcgacagcctcaccggcctcccggccctccgcttcgccatcgtcaagttcggccaccccgagttcgccggcctcgccctcaacgatcgggagcaggtcatcgacggccagatggtagccatcgtgctgcggctgctgctgaaatgggaagccctgctgcaggtggacatcgtcgtgctgcggcggctgcaacggcaagtcctcctggtgcgaagcctgatcagtcaaccggtggagcttggtgttctccaggaacagagcatgcgcaagagagatgacgtcctccagatactgccacgaggttcctcgtggagggtagattccttccatgtcttttcccaagttcttgagagcaagacttgccatatggattcgggattggattttaatccctcgtgcgtgtcactaaaatag

SEQ ID NO: 58286 - DNA, 571 bp, Oryza sativa
  Clone ID: PAT_MRT4530_60016C.1
ccggccggggttaccctggcgctggacacactcttactcgacctatttatccgtcgtacgacgacgcgcgaggggctgaagggacagcagcgtatggagggagcctgacagcaatgcacgggcgtggccactggtcgtgtcatgctgcaggaacgcaactgaactagtatcgccacggatcgtctcattgtacgagaagggctacattgccagctttagacaccatacctaaattagctacagaaggtgtgagcaggttcacgaaaaagagatcggatgctcatgctcaagggatacgcacggacaaggctctacacacggacgaaccgttcgtgaataaatcgtcaccgatcgagacatgacgaaaccaaatatcatgctatttgtgaaccgcattattatgaagaggattcattttcatgaggcgcatgcacttacatacaggggcactgatgaggctcggatggggaatatcaagaatgaccatgccaagggagatgccacggctagcgcggaggccatcacaacgagtacgcagatctttattgctacagcagaactcatggatgag

SEQ ID NO: 58287 - DNA, 354 bp, Oryza sativa
  unsure (1)..(354): unsure at all n locations
  Clone ID: PAT_MRT4530_60017C.1
ctttcccggccgccgaggcgcntnanccggaggggtgcgagagggtggaccacgtcccctcgccggacatggtgccgagcttcttcgacgccgccatgcagttcggcgacgcagtggcgcanactncnggcgcctcacggggccgcgccggctgagctgcctcatcgccgggatatctcacacgtgggcgcacgtcctggcgcgcnactcggcgctccgtgcttcatcttccacggtttctgcgcgttctccctgctctgctgcnagtacctgcacgcgcacaggccgcacgaggcggtctcctcgccggacgagctctttgacgtccctgtcctgccgnctttcgagttcagg

SEQ ID NO: 58288 - DNA, 1383 bp, Oryza sativa
  unsure (1)..(1383): unsure at all n locations
  Clone ID: PAT_MRT4530_60018C.1
tcctcctcctcccggcggcgaccgcctcggctgcgcccactccggcggcgcgcggcgacgaatcaccgggccgcactatccggcaaggatggcgcccgccgcctccgcctccgcctccgccgtcgtcacaccgtcctctttcagatgcgtccccacggcgtcgtgcggtttgggggcccggggtaaagcccccgcgccgcgccggcttctccacgaccacgcgcaaggtaaaaaacgggctgcggcaacttggtccttgaaggctggtctgtgggactcccttagatccggatttttgaagagtaataacagtacagagacagtagagccaccatcagcaccaattgaagaggaagaacctttgcccgaggaactagtactcctagaaaggacacttgctgatggcagcacagagcagatcatattttcttcagctggagatgttaatgtgtatgatctccaagctttatgcgacaaggtgggatggccacgcagacccctaaccaaaatagcagcatccttaagaaacagttacctggttgctacactacattcagttactatgccttcaaaagcagagggagaagagaggaagcaactaattggtatggcgcgagcaacttcagaccatgcctttaatgctaccatttgggatgttctcgttgacccttcatatcagggtcaaggtcttggtaaagcgttaatggagaaagtaatccgaactttgctccagagagacatcagcaatattacgctgtttgcagataacaaagttgtagatttctacaagaacttgggattcgaagctgaccctcaaggcatcaagggcatgttctggtaccccagattttagtgccagcggcctgacaccttcctgttcatcagtaatgcctggttctcaccgcccagggaccatagttttgtccagttgagtcgagctcagctgtgtaacagcaactctaactgaatggtggtgatatctgcaatatcttgttgtctgcaccacgagccatacaaattcagctgaattttcgagtcaaccttgtactgaaccaaacaaaacacttcttattgtcactagcaaaactgcaaagatccctgaaaaattcacctacagcaacgggtcgcgccatggtgcacattgaacacatacacagcggagagataatgtccacaacttttataaggtttttctactgtaacgcacactgctgcgttcttctgtagaatttccactgcaaaagatgtgtnngcgcgcgtcttctgtttcagtaaacgcgacatcgtccgtggcagcgtgcatgaccgtgggacaaagcacgtcgccgttgcagttttgtttttgtttgtttgtttttgtttttgtttaaaaaaaaaaaaaaa

SEQ ID NO: 58289 - DNA, 864 bp, Oryza sativa
  Clone ID: PAT_MRT4530_60019C.1
atgaagccactgaaggacgcggacgcgcaggagaaggcggcgccgccgccgacggagtggtacgacccgctgtcgtcgccggggcggccggtcagggtgtacgccgatggcatctacgacctcttccacttcggccatgcccgcgccctcgagcaggccaagaaatcgtgggtggatgaggtgataccagatgctccatgggttatcaatcaggagttcctagacaagcaccgcatcgactacgtcgctcatgatgctcttccgtatgcggacaccagtggagctgccaatgatgtctatgaatttgtcaggatctctgaatcttctcatgtgaaggccgttgggaagttcaaggagacgaagcgcaccgagggcgtctcgacgtctgacatcatcatgaggatcttgaaggactacaaccagtacatcatgcgaaatctgacccggggatactcccgcaaagacctcggtgtgagctatgtcaaggagaagcaacttagagtaaacatggggatcagcaagctaagggagaaggtgaaggagcatcaagagaagtttcacagcgcggcaaagatagctggaagcaatcctgtggagtggatggagaatgccgaccgttggatcgttgggtttcttgaaaagtttgaggaaggttgccacatgatggaaaccgcgattaaagatcggattcaggaggggctgaagaggcaaagcaggtcggaccccaacctttctggggaggattccgactcataatggatcctgtaatatccagatcaaactgggaagagaaacaatcgtggagatcatttctagccttgtgtgacattagccctcatgtcgtacgacaaattaaagtgaccg

SEQ ID NO: 58290 - DNA, 718 bp, Oryza sativa
  Clone ID: PAT_MRT4530_6001C.1
tgtggtaaaggcctctgtaccgcgcaataagaactgatagcgcattcagcttgggatggtttttcctttgctacatgcttcacattgccttctgtgtatttgctgccatcgctccaccagttatatttcgtggaaaatcattaactggtatattggctgcaattgacaccttctctgatcatgcaatagtcgggatcttttactttgtcggatttgccttgttttgcttgaagacacttgtgagcatttgggttcttcagaaagtatacatgtatttcagagggcacaagtgaaatgggccgtggaagaaatattacaaaagcccaccaaatactatctgattgagctgcagttctgtgcatacatatatgtacatgtcgatcttgtatgttatgtagtgatggagatgttctaagtacatgtcaatctatagtgttattttttttaacaggaatactattttatagtgttgttttctgggctgatcggtctgttgtgttgaacctcaattctttacctatacaaattgcactttcttcactcttttgtttgatgctcaattttacggttgattggcctgttggccttacacaagagccatgctcgttggaaccagtagacagctccccatctgtctggggatctcatttgtgccttgagacttggaaggaatcttgcacttctggagattacagtatccccgaactgggatcaggtg

SEQ ID NO: 58291 - DNA, 738 bp, Oryza sativa
  unsure (1)..(738): unsure at all n locations
  Clone ID: PAT_MRT4530_60020C.1
cggaattcccgggtcgacccacgcgtccgcttttttcgtcgtcttctccatttccgtttcgtggtccccgttttcccgcccccgccaaaaccgctgccacgtcgtcgtctcccgccaaaaaaaaaaaaagtaggctttgggatcgccgccggtgacgatgaagccactgaaggacgcggacgcgcaggagaaggcggcgccgccgccgacggagtggtacgacccgctgtcgtcgccggggcggccggtcagggtgtacgccgatggcatctacgacctcttccacttcggccatgcccgcgccctcgagcaggccaagaaatcattccccaacacatatttgctcgtgggctgctgcagcgacgagatcaccaacctttacaaaggcaagaccgtcatgactgaagacgagcgctacgaatcgcttcgccattgcaagtgggtggatgaggtgataccagatgctccatgggttatcaatcaggagttcctagacaagcaccgcatcgactacgtcgctcatgatgctcttccgtatgcggacaccagtggagctgccaatgatgtctatgaatttgtaaaggccgctgggaagttcaaggagacgaagcgcaccgagggcgtctcgacgtctgacatcatcatgaggatcttgaaggactacaaccagtacatcatgcgaaatctgacccggggatactccccccaagacctcggtgtgagctatgtnaaggagaa

SEQ ID NO: 58292 - DNA, 755 bp, Oryza sativa
  unsure (1)..(755): unsure at all n locations
  Clone ID: PAT_MRT4530_60021C.1
ggtgtctggatgcgaatttctatgctttaattttattcatgcagaacacaccaagactagagaagctaccactgaaactccatccgtttcgnttatcagcaacaaagaatcattggtgagcttactgaaagatcatttacatgtggtcatcttaagattgttgaagtcatatgctcggagaatgatcccctgatcaaccacttggttgacttctttgttagtagcggtatgaccactgctcagattcatatcaaacactaaagccagatgcagcatcaagggcctctaattttctggcctgagtagatatgaaatatcaaaggatctcttctcttgttgtcccatcgaaaaataatattctttttgggatggatatacatacattggttgattccagctgagttcgatggcacataagactagtttatcttccgctcttgtttggtgctacgacttgagtgcacccaatcagttgtcttggatcttgacttcttgagttgctccattgcttgtaccttgtaatgtcactcagtgttgttctattcgcggatattcgttctgcctgtttggttacattgtttgctagaaaaccattgatcacatgatcagaacactgcatgttacatgtttgagtatcccatatgggattcatgttttttttttctgatagttttgttacaaaaaaaaaaaaaaattcctcgtgacttgtgctctctcccgcctttccccttgtccaaaaaaaaaaaaaaaaaaaa

SEQ ID NO: 58293 - DNA, 1566 bp, Oryza sativa
  Clone ID: PAT_MRT4530_60022C.1
cacgcgtccggaagacagaaacgcctgccccgatccccatggcggggctcgccggcgacgactcctcattcttcggggacgacggcgacggcgatgagttctgctacgggccgttcgacgtcgaggatctctgctacggcgcctccgatgtcgacgacgattgggaggagttctgcgacggccccttcggcggcggcggcgtggaggagttctgcgtctccggtttctccgtccgcgacctctccgacgcgtcatcctccggcgcccgcgagacgggcgacccccacgacgacgatcccctcccccaaaccctagcccgctccctcgactccgacggcgacctctccgccaccctccaccagatcgtgtccgcgatgcgcctctccgaggacgaagaggaggaggaggaggaggagctactggtcctcggccacggccacggcgtcggcatcggcggcggcggcgacgtagatgggttcatggtgagcgccttcgatctcgacacagcgatggccattgggggcatcctcgaggacatccacgaggtgatgggcgccgatgaggtacgggaagaggtggtggtggaggaggaggaggccggcaatggcggggggatcatgccgaatggattcgagttcgggccgccgccgcgggccatcagtggcaccgccgcgggattccggatgatggtggacgccgatgacactgactccgatgacttccagtttgtcgaggtactcggaggaggacaggtcagggaggccggtgccggcatgagcatgcggccctcgcgtgcgtcccaattggtggtggagagcttgccggaggcgacgctcagtgaagaggaggcctctcgtggctgcgccgtgtgcaaggactcttttgcgtcggggcagatcgtcgccttgctcccgtgcaagcattacttccatggggactgtatctggccatggttaactatcaggaccacttgccctgtctgccggcaccaagttcgcactgaagatgacgattatgaacaacgtatggctcggcgcgtgattgttctagcagcagtggagcatcagggtgcaccggcacagggctgtggagacagcgcaaccatgggtgctgaaggcgcaagtgaatgtgtggtagaaaatggacctgagaaaacttcattttgatgcggtcccagtatttggtatgatgatcaggcagctaagacaagaaactgaactgacgtaggtagagggaccccccaactcccttggaatgttggcaggaaaactgtaccggcatccaacattttggctaacactcagcatattgttgtcctatgatatgctgtaaatgtacaaaactaagtagttcgatccactcattttctcgtttttcggctggtatgaatgatgagttgtcggttatcttcaaggctcttgccctaatctgattagctacagttcctttttcttgtttttgaagctgaaaacagaattccccttcgaatgcatgatttgtaatggttgggatttgttgaatcttttatcagatcgcccaggagattgcttttgacatgtgatagct

SEQ ID NO: 58294 - DNA, 175 bp, Oryza sativa
  Clone ID: PAT_MRT4530_60023C.1
ccctccttttttttttttcttgttgctttataaaactttggtggcaccacccaccacattaatacccacaacaaacactgtctataaatctcaataaacaaaatatcctttctacccatacaccaaccattattgacccaacaaaattaagacatcaaaagagcatcaacaaaaa

SEQ ID NO: 58295 - DNA, 319 bp, Oryza sativa
  Clone ID: PAT_MRT4530_60024C.1
gatccccgggctgcaggttaactgatggaaaggcttgtttgaattggtggggcttaggcttaatgcctttggatgggctataaatggaattaaagttcccactatctgaaggaattgggtctaatctcttcctatccaaacaatgatgatgaggggtggcatttgggagagaattgctgtttcgagagagagggatggatctcagcctatatccttaggtttgtttggatatgagggaatatctatatccccatcagtccaaacctatccgaagcgattagaagggtttctttgtttgccaaacaaacccggggatgtg

SEQ ID NO: 58296 - DNA, 564 bp, Oryza sativa
  Clone ID: PAT_MRT4530_60025C.1
tcaatcatataactcttgatgactttgcatcaacattagcagccgcactaaccagtaaccactagaattgctagatgcactagcacttgtatccggccaggcactcaagcaaacaatgaaaaagctccttgctttgatgttgccagcggccagcctgccaccggcctccgctatgcccggcaacggtcgtggcctccgaggttggcggcgaaggagatgcgccaccgcccagccgcggcagctcttccgtctcgcggagaggacgttgtggcccgcgcacggcaaccaagcgcgctgctgcagccgcgtctctggtggcatcgccgggcacgcacgagagacagccatcaggatgggagcgtatggggcggcgcatccctgatgcgagcgaagacggaggcacgtcgcggccgtatcgctggcatatctcgatttattttgtttttttaaatcgcgaatatgtgggatacgtacggaatatgtatcggaacatatccgatatgtatccgtatccgttgccgtatcagatacggatacgtcgctctgtagccgtaccaggataac

SEQ ID NO: 58297 - DNA, 211 bp, Oryza sativa
  unsure (1)..(211): unsure at all n locations
  Clone ID: PAT_MRT4530_60026C.1
cagtaccaaaattcantattcccttttcccacctaagngttacgngtacagaaaaactccgcaaatttanattnccccaaatcaaancanaaanggggttcaangnntaaggnaaaaccntntgnatacaccntnggnaaaactncccatttnntggtatagggnttntacaataggcaagaagtaacgtttttttggcctngttcaaaag

SEQ ID NO: 58298 - DNA, 354 bp, Oryza sativa
  Clone ID: PAT_MRT4530_60027C.1
gcgtgacagtgaccatggctactatggatacaaccatagctcacatcatggatgaaccagaagatatcaagatcaagtcctccaagtgttgaaatccgattcggccaactgctacactgctgacttcaaacggtcgccgaatctgcatacgacctccgttttcggtccgcgagtacttgatggaaatatctcggagccctctttccaacggatctagcctcatcaccaaattccatgtagtttggccgcaatcacataaacaaggtgttgtgtcacttgtcttgggcctctgggcttgtaactttgtttaggaccccagcccaggtggggcccatgtaagggtgcatcccatcc

SEQ ID NO: 58299 - DNA, 171 bp, Oryza sativa
  Clone ID: PAT_MRT4530_60028C.1
tgccgccaaagccggggtgcgagcccgtggcggagcgggctgtcggtgcagatcttgagttcgtagtagcagattattcacacatgctaactttgaagtgcgcgaagagtgacaacaggttccactgttgaactgtgcacttgctacaatggtctaaggcccgatcgcgta

SEQ ID NO: 58300 - DNA, 619 bp, Oryza sativa
  unsure (1)..(619): unsure at all n locations
  Clone ID: PAT_MRT4530_60029C.1
gctcttggtggtttttgccgtgatacacgatgctactgaatattgataagattggctccaaggaatggattggttgtcaaaattaattgtcacactcacatgttttgtcttggtctgaaatctgatgagttggccattcttgacatgcagtacaagggtggtgcagctgagggtggcagaagaccaatcatctggaacatntttgaacaacgaagcacgcccgccccgtgtgcgtctttcacgacatgctctggtcccgggtttcttcctgtggtcttctagcgttagaagaagtcgtgtccgtcccggacatctgcaacgtcctctcacgcctttttttggggggacaaacaaagatcaggaaaagacggaccgaacccattcggtgactttcgcggttgccctcactgaaccgacttggatctgaactacgattcagatcaagtcttaccgaaattggatttccttttcgtgccatatgtcgcttagactttactttttcccctttctgtcctttcctctatttgttcgatagggtcttcaatctggacccaggcatgttaattacatctctgtttggctctgccttctagctgtgcaaaaaaaaaaaaaaaaaaaa

SEQ ID NO: 58301 - DNA, 1016 bp, Oryza sativa
  Clone ID: PAT_MRT4530_6002C.1
cgcccccggcttcccccccccgcgctcctctcgccccggccggccatgctccaggcgagctcggagttgcagcagcagccgtcggcggcggcggcggcggccgggatgtgggtgcccgggatgagcccgcaggcggtggacgccgggctgtcggcgagggcgcaggagatcgcgcggaggccggaggagaggctcgggatgctgcatgacctccccgagtccgagtacgagctctcgctcacggacctcgtcgagaaggccggcggtgtcggcgtggcgccgccttcgccttcgccgtcggaggggaaggcagagccgggcccggcgcggacggcgtccggcaggcagtcggagcagcagcagcaggcggcggcggcggcggggaggccggagatgagtgtgtcggcgaggcggtgggacagcgcgggcggcagcagcttccgcagcagcagcgacggcgtcctgctcaacttctacatgccacgctccttcacccgcagcttcaccgcgccgcgcaccactggccccggccggccgccgtcggtctccggcggccggaccgccagtatctgctcctatcgcaacaagagggagagagatggcgagaccgtgcggtgctggtcgctgctgtgggatcggcggtggcgcaagtcgagccggggagatcacggcaacgagtccgccatccgggccgcgatcctcaaggcggcgaaacacaacgcttcttccccaaagaaaatctgaatgctgctgctagcgtccatcgttttggtcttagatagctagcgcagacttatctgcctgccaccactgggtgtatcaatactaatgtatggttttgtacatacttatgagtgtccattttgtgcttgtgaactgattgtgtgtgaaaaactgaagataggcatattggaaatgattccataattgcgtgcacatccagggtatcgttgtgaactcaagtccggtttaaaaaaaaaaaaaaaaaaaaaaaaaaaaaaaaaaaaaaaaaaaaa

SEQ ID NO: 58302 - DNA, 337 bp, Oryza sativa
  Clone ID: PAT_MRT4530_60030C.1
ggtcgcccccacccactcacaggctcaactcaactccacccgaatccgcaagagagagagagagagacgatggcggcggcggcgggaggagggacgagggaggagatggtgtacatggcgaagctggcggagcaggcggagaggtacgaggagatggtggagttcatggagaaggtggtgacggcgggggccctgtgcggacctcgccagctcactgcgccggacatggagctgctgtcttctgcctacggccacgcgactgtgacgaccctttcctcggtttgcgtgctccgcgtccttgctcgccatgggtgccgccgcttaccagttctctagg

SEQ ID NO: 58303 - DNA, 1126 bp, Oryza sativa
  Clone ID: PAT_MRT4530_60031C.1
atgcaaccgcgcgcccactccgccgcaacatcacctacgcaccacacccaaggcgaaatcatcaccatctgcaccgcaagctcgcgtcctccaccacccgccccgagaagagcgagggcagacgctcgcgtacgatgtctcgacccgacgtccgccgaccagcaggcggaggcgcgcgcctgcgccctcgaggagatcttggccgcgctggtcgtcttcttcccgctcgacgaggagtccaggcgctgcattgcctccccgccgtcgctggacgccctcgtctcgatcctctctcacggcgagcaggtcacgcgtgtcagcgccgtcgttgtgctccgggagatcgcctcgtcgtgcgacaaccagtgcctcgaggcaatgtccaaggcgaacgccatgtacgacgcgctcgtcaacctcgtcgcgaagccggtctcgccgcaggccacgaaggccgcgctggtcaccgcctactacctcgtcaagaacgacatcgagcacgccgcctcccgcctcgtcgacctcggcacggtggagctcctcgtcgagctcctggccgacgccgacaagggcacgacggagaaggcgctcgcggtgctcgacaccgtcctcgtcgcggccaaggcccgcgacagggcgtacgcgcacgcgctggccgtgccggtgctcgccaagaagacgatgcacgtgtccgacatggcgacggagttcgccgtgtcggcgctgtggcggctgtgcaagaactcgccggcggacggcgggtgcaaggccgaggcgctgcaggtcggcgcgttccagaagcttctgctgctgctccagctcggctgcgacggcgtcaccaaggagcgcgccagcgagctgctcaggcttctcaacgcgtcgcgagacagcaccgagtgcatcgagacggcagatttcaaggggctgaagagacccttcatttgagtgtgcagagagatcgattaattagctaggtcaagaacacaatcaaagatgtggatactaagatgcacatacaattaggtttagatatcatccttcatttgaaaatgagtacagaccgtatttggcagtggtacaaatacatgccagaattaactgagaaaaaaaaaaaaaaaaaaaaaaa

SEQ ID NO: 58304 - DNA, 2012 bp, Oryza sativa
  Clone ID: PAT_MRT4530_60032C.1
ttttttttttttttttttttttctttttgtttgttttttttttttaactagctgtccaaccaggaaactggttcaagtatatgttggtggtacaagtatatgattgtacaatttctctttaccaaaaaactattgacaaagaggtgtgcatatatggaacacaataattcattacagcactgagcaacaatagcatacttttgttcatgcttcttcatgctgtggcatgacaaggataacgtgaaggtcagcaccagccattaccaggtggcattcataatagtgaaacatatatacaatggttttaataaagacgtgaggcttccaaaagaacacgagagaaatagagagaacttttggatgctagacaaagtgggtcttcctacaagaggtccttccagccaaaggcccctggcttatgtggaagtcaaaagtctcaaaaccttaaggaggaaaacagcttgtggactgctccaaagatttcttcttcagttccggttgcatttatcttgtgaacctttcctcttgaagtgtagtagtcaacaacaggaatatttagactctcaaacacctttaggcgcttcttgattgtttcaatgttatcatccactcgtccctggttacggcctagtaaacgtttaaccatctcatcctcagggcagtcaaagaaaatcacaaggtctggttctgttccagttattctttcaaaggcgatcctgttttcctcacaccttgggaaaccatcaataagaacccttttagcatcgctcgattccatagcttttctaatcagttcaacagtaatctctgatggaacaatcttcccttcttttattatatttaagatcaactcccctttctcactgccagttgaaatttcactccgtagaaggtcaccagcactcaaatgagcaaacccaaaatcagaagcgatccggacacattgcgtacctttcccactcccgggaccccctaagacgaaagcaatgaagggcttggtggcaccatcacccccctctccagattgagaagtgaagaggcggagcagaagattggaagcgagaggtgggctctggtcggggacggggagggggagatggtggcggagggtggaggaaggcgtggatcggtgccggagaagaagggcacccacttgccgccgccacatcgctgcctcctcccctcgcaatcgcaggtgatctctgctctgctgcttcttcggttcttccagtctctgtgctaggtttgtaatatatttcaggatggatgagcgaacattctccatgaaagccacagcttcttcctgattgttggtcttggcgcttgctatattttcatcgaggagtgttagtatggacatgttgagctcattccgttcaaccatttcaagaagtgtcgattttttgtcgcttgattgcaggatctttgtgaggcgttctttcgcgctgacaaggtcattttgcaacttgtcataggcctccactccctcaagcagaaccttttgcatcgcttccaactcgatcaatcggtcctccatttccgctgttcgggtgattgagaacttgatctgggcgatctcgcgctggatgtagtcgaagaagggctggttgagcctggggcggagcctgccgatctctacctcgatctcgcgcgcctccgtgtcgaggaagaactcgacgaggccggcgtccgtgtcagggatgacccgcgcctcgcgctcctggcggcgtcgctcgtgctcctcgcggacctggcgctcgaaggcctcgcgggcgtcggagtccctctcgaggcggcggcggaactcgaggcgcacgatgtggccgccctgcggcgggccgaggacgccctcggggtcccatccgatgcaggagatcttggtggcgacggcgcggcgcctggtgggcgcgcggcggacggcggggcgaggcgggaggagggggcacccgctctggaagatggcgccaaggccaagaaaggaggaagaggaagccatgagcacagtgggtgtg

SEQ ID NO: 58305 - DNA, 883 bp, Oryza sativa
  Clone ID: PAT_MRT4530_60033C.1
ggcggcggcggcggcggcggctgcggctttccgattccaatccaacaagaagaagattcggagagattgccggccatgtcttccaccggtcgcccctacggccgtcgcggcggcgccgctccctcctacgtgccgcgcccccgcgcacccaacccctcgccatccgctcccgctcccgcacggccgccgcagcaactgcgtaaaccggtgttcaccaccgtggagcggctgcggccccagagccacggccacaccctcaccgcccgcgtcctctccgcccgcatcatcctcgacaaccctcctccccgcgctcgtctcgctgagtgcctcgtcggcgacaacaccggcaccgtcctcttcaccgcccgcaaccaacaagttgacttggtgaagccaggcaccacggtcatcttccgcaatgccaagattgacatgttcaaggggaccatgaggctggcagttgacaaatggggccggatcgaggtgacggaccctgccagctttcaagttaaggaagacaacaacgtgtcgctggtcgagtatgagctggtggatgtcgtcgacgaggattgactactttagactttgatttggcttctcgggctgtggaacattaagatttttgaagccaccgttaaccacttaaggttcaatctttatgtccttgggaaagccttaattggaaaaatttggaacttggtttaatacctaagtaataagggaaagtgtccacttgaagcctttgggccaagacccggtttaaccattaagtttggtttaatgaaagtgaattcccgttgtacctaatttaaatggccaaccttatggacctggtttcaggccaattaaggtaatgaatttgattcttggccaaaaaaaaaaa

SEQ ID NO: 58306 - DNA, 297 bp, Oryza sativa
  unsure (1)..(297): unsure at all n locations
  Clone ID: PAT_MRT4530_60034C.1
atttgctttgcttccccgctctgtagcttctgtgctctcttggattccctgggatttgngctctttcttgcgctttccctttattgggatggaaacctacgcggcatcgatcgccctctcttttccgggagtttatttatcttcagttcttgagtggttgtgtggttgaatcgagttcttggggctgtgaactggtagtgattccatctgttcgagaaacgttgacgaggaggagactctgtgtgctgcagtttctgggttttatttttctttttagnaagcnatctgccgacagtt

SEQ ID NO: 58307 - DNA, 461 bp, Oryza sativa
  Clone ID: PAT_MRT4530_60035C.1
gctattcctaaaactcactgtctcactgtgagcttcccccttttttgtgtgtgggtgaacttactgtgagcggaggaggggagttaaaaagcaaaaaagccccccgcgtcgctttcgcgtcgggtggctcgggggctaaaaaccctagccgcccgcgccttctctccctccctccccccacctcgctgtcgctggagcccgccggcggcgaaaccggcagcgctcagggaaggcggtagccaggccttcttctcttcgtagcgtctccctcctcgccgcgaaggaccaagacgaccatactctccaccggtgtggttctgagcaactacagcggatatgtggcgtagatacagcggattcagtgccgccatggcctgatccctacctccattgcctggatctgtacgctaaaaaatcgaggaggcctggcgcgtctcgacgatatgcggtctagatctgcg

SEQ ID NO: 58308 - DNA, 564 bp, Oryza sativa
  Clone ID: PAT_MRT4530_60036C.1
atggcaggattgcgcaagggaatacgagatggtcatgctcaacatcgacttcttcaccatcaacgagatatagcgacttcttcacgcatcacatatgagggagctcagaacattcaccatgaggagaagagcaatatgctcgagatatcatctccatcactcacgaaggaagaagagaagactgatgcgcctacattatctgaagagggcataaaaggtaaattaaatggtgctggtattactcaaggaatagggttgatctgcaccgacaagatcaacaacccacggagagccttgagtgtcgagaggaactcacggttcataattgttactcttggaggatgccacctcctagatggtttggtggagttgcccggtgacctctccaagaaggttgtggaggaggcccggagctactctggagattatgggtaccatatacccatagagctacgttacccgactggttatcggggcgactttgcaggtgttccttttgccttcgacgactctcggcattccgacgatggcctccgccaatccctcaagtgcctcggtggctga

SEQ ID NO: 58309 - DNA, 514 bp, Oryza sativa
  Clone ID: PAT_MRT4530_60037C.1
tttacataggtaaagtgtctgaattgaaagtaataatggaaaaaaatttaccacgaagtggtggtcccagattcttggcagcgtcaaatgccaatgaagttggtactttggtcggccatgaaaacgagcggataatttccgtccactcaagagaaaaaatacggatacttttcggagcggataattctcgcatagtttgcatacggatatgaataggatattttctcccggatacgaatacgcacatggtattagggttttcgacggatacagataataatacgcacatgcagaaaaaatgtctcagtattcgtgtccggtcatattcgattcttatttgtattcgatataattcgtatttgcgtccgtatatgagctatttgtattcgttttcgtatctgacaaagaatatggaatccgtgtcatctagtcgcacaaacttcggcgaaactctagcaaggtcctccgctcactaatagcacatttatcttcctcctcttcaagcaccatcgtg

SEQ ID NO: 58310 - DNA, 474 bp, Oryza sativa
  Clone ID: PAT_MRT4530_60038C.1
ttgatacagagcatgccagtaatggcacgagcagcaacgataatggccatgctatgtcagttgagaataatgcttctgaagttgcagatactgacaacaaggaagattgcaatttggatggccagaacactagtggaaggatcgaaggcccttctgaagaaataccacccaatgcaaatggcatggatatcgattccgacagagaggaaacctacaatgtggaaggaattgctgagaattcagaggattgcagggtaagaggaggtggagatattgatacagaatgcaacctgagtttacctgagcacgaattgcccttacatcaggagagcaagtcagactccgagctgaaggaagcaaccaaaaccgaagacgaggcaaccaagaaaggccatcttgtgagggtgcaatcccgttcttgcgatcttcgagagtcgcatcgcgcgtcggccggtagctcaatggatttccact

SEQ ID NO: 58311 - DNA, 102 bp, Oryza sativa
  Clone ID: PAT_MRT4530_60039C.1
atgaggggtggtctcaccggagttgtgagggaagcaatcaggggagccctgcacgccatgttcgccctctggcgagaagctgatagccgcttcaacccttag

SEQ ID NO: 58312 - DNA, 4398 bp, Oryza sativa
  Clone ID: PAT_MRT4530_6003C.1
ttatacatagaaattacgtaattgatcaatgttcaaagaatttgtcaactcgcgaccatcgccatctgcaattttgaatgcgcctggccgcacaacttgtgtgatcgtgtacggtccttcccatttgggtgagagtttgttccgccctgcttggctttgaacccgtcggaggacgtagtcgccgatcgaaagcgtgcgtgctcggatgcgcttctcgtggtaacggcgaagggactgttggtagctggctgctcgaacggcaactcgttcgcgatgttcctcgagtagattcacatcgtcatttcgccgctcctcctgatcctcatcggaatacttctgtactcgtgtactttgatgtcgtagctcggtggggagcatggcctctaagccgtacacgaggaagaagggtgtctccttgttggatgttgtcggtgtggtacgcacggcccatagtactgatggaagttcttcgacccatttcttgtcatgcgacatgagcctgtcgtagacgcgggtcttgattccttgtagtactatgccgtttgccctctcgacttgtccattgctctgagggtgagaaaccgaggcgaagcagatcttgactcctagcctgatgcagtaatcctggaaatcggcactgatgaactgggagccgttgtccgttatgatacggtggggcaatccgaatcgctgaaccatgtcacaggcgtctatgagggcggttggccagaagaacccttgtagaaaagcttttccgactaatgtccgaccggcggcatgtgacccacagatcccttcatgtatgtcgaggaggaggtgtctgccgtcgtcggacgagacgcattttaggagaaccccgtttggtgccttcttgtgtagatcgttgccgatcatacagtagactcttgcttttcgggatattttctcagcttctgcgtcgtcctcgggcaactcttcgctgcctatgaatttaatgagtggggtgcgccagtcgtctgtggtctcgatatcgggaacggcgcgctctgcctcaatagccctcgagctgatgctgggggcgaccaggctatcttcgtcgcttgcctctttcactgatggcctggtcagcatgtccagaaaggtgccaggttcaagtggctcttgtctggacgcacgccctgctagatcatccggttcgatgttgtctttgcggtatacatgccggacctcgatcccatcgaaccttttttccagcttcctgacttctgcgagatacttggataactcggggctagagcacttgtaatctttatgcacctggtttgcgactagttcggaatcgcctttcacgatcagtctcctgactccgagtgcagctgcaacttttatcccggcgagtagtccttcgtactcggctatgttattagtcgccctgaagttgaggtgaattgtatgcttgaattgatctcccaaaggtgatgtcaagatgaatcctgcccctactccttggttgttgagtgtgccgttgaacgccattgtccacgttttgttgtcgatttggttgtctgacctgcttagtgccgccatgcatccggttagcttctgtacttccttgagtcttgtaggcgacttcatgttctcgattgccttgatcttcttgggatttgcttctattcctctgctagagacgaggaagccgagaagcttgcccgatggtactccgaacgtgcacttctctggattgagcatgaggcgatatcgccggaggttgtcgaacgtttccccgaacggcgtgatgaatgctgtcttctcctcgtcctctttcgccatgctgatttggtggtagccggagtaagcgtcgagaaagctcaacaactcacaaccggctgttgagtccaccagttggtctattcgaggaagagggaagtgatccttgggacacgccatgactgggtttgctagccactctggatggagtatctctctgatgaaactggctttgagaagcttgtcgagttcttctcgtatggcttgttttcgatctggtgcaaatctccatagtttttgctttactggcttggcatcgggtcgcaccatgggtttgtgctcaatcacctccctgggtacccccggcatgtcggacggcttgacggtcttgttggggtttgcactggagagtggaacgatcttgattgcaccgtccggtttcggcatcttgtttgttttgctcactttcttgggtggctcagctgtggcaggtgggttgggcgtgtgctcgaccatgtcgacgctccgcttgtcgcattgcactgccagcttagcatttccttgaatagtgattgttcccttcggtcccggcatcttgagtacttgatacgcgtagtgagatgcggccatgaacttcgcgagtgcagttctcccgatgatggcattgtatgatgtatcgaattcagcgacatcaaaggtgatcttcttgtattctcgctttgaggagtatgccgtggaacccccgaagatgtgcgagacatggagatcggagtctggatatgttgagtctgattcctgagtagctggctcagcgtccttctcgaccacacgtactcgcttgcctttttccaatgccatatgttttgcgagcgactttttgaagacgaggcaatcttctaaagagtgtatgtctgacttgtgtatagggcaccatgttttcttcgcgtcgctaccttgtgggtctgggcgcttgggagggtccgcgtattctgttgcgaggacttccgattgagctttcctttttccacttttgcgatttttcttcttacttgactcaggtgcacccttggctggtttcttctctcctccggttttcggtttgtcgttcttgcgtctcagtgcgtcgtccgcatgggcgcatcgatcgacaatttcaaataatctccgagtagtcgtgacgtgtctcgttgccaactcctgagtagtgtagcgatctctgacaccggatttgaaggcgcgaattacagaagtatcggtgatttcggggattgtttttccgggttctatgtcaatgcatgtaggtcgtcttcgatgcgtggcgcttgtaagttccttggaagttggcgacgaaatgctgccataggtctgcccacgaagaaatggagtaggggggagatgcatcagccatgaacgtgcagagcctttcaatgccgttggcaagtaattcgccaatgcgttgttgtccgctctggcagcgtagagtaccgtggagtaaacctgaaggaattcttctgggtcggtgctcccatcgtatttctctattgctccaggtcggaatctttcaggccatcggacatcattagcatcgccagttggtggctgttccgggtgcgctacagcagcggcctcttcgaacgcgttgctgaggttggtcactgattcccgtaaacgctctgtccatcgtgcgagatcgtcgttcagaacgggatcatagagggtttccctcaatattgcgttgacggctccaatgtgctgggccggtgtagtcacttgattttccgcttccgcatttgcgtgtgctgacgtgccgacatcgtcgatagccaatacctcgcgcggcgtactcgttgtcaatgaaccatagtctttgagcaggtgcaagactgatggttcgtggggatcgatgtcgactaccctaacaaatcgatctgaaatcggcgtcgctccttgttccttgtcctcatccctaagggcgacgcgtgactgctggaccttaggaggtggcgtcttcatggcgctgagaaagaccttgcagctcgagaggtcatgattctttgacttgtgaataggacaatagacatcacgagttggagaagtacgctgaattccgcgctttttgccggcacgaatttcagcgtggacgttgagaaaaacccaataggcttgcaaggcatgttttctggttttgtggataggacaccaggaccttgtcacctcagaagtcatcctcgtcggctcgtgattcttgtcagaaggacaaggcttggccgcactaggttccttctcgagctcggatatcgtcgacgttccgatctccgcttcggcgggaggatccttcgacatagagtcgtcctgggttgtagccactgcgttctcatttccggccatcggcgggccagctgagatcggcactgtggtgtaaaccgggaagacgatttcgccgacttgagtccacaccagcgttgttgaagtaggaactacttggttgaagttggtgttgatgctgttgtcgacgaagcaggatgtcataatagtagaaccttgagcaccaagtccccctacctggcgcgccactatcgacgggagatacacgtagaccggatatagagggtattggggtacgctggtacgaggatctacgtagtacgacat

SEQ ID NO: 58313 - DNA, 251 bp, Oryza sativa
  Clone ID: PAT_MRT4530_60040C.1
ttgcttttaaggattaattacttctcgtctccaccggaggagatatccagcggcgatggcgagcccgatgaaccgctgccgcggtggaggcggatgacgccgccgcagcgtgatgaaaaggatgggcctttttcgtgtgcagtactactgcgtgatgggcttcgtcgccgcacgcgtcgtgctcgccacgctccgatacatgcctgcccccgacaccgcgccccccaccgtagacggaggcggcgcaaccg

SEQ ID NO: 58314 - DNA, 598 bp, Oryza sativa
  Clone ID: PAT_MRT4530_60041C.1
ccggccgggaaaccgtcggagagttggaggcggcgtccctatcccatccgtcgtccgtccccgtacgtccgccacccagtcgccttcccccctccctccgtctccaccgcttctcccgccgcctcttctcctccaaccaccagacggcgaccaccgcggcacacacacagagacccccagatgcttccgccgactccgatcagcagccgctcgccaccagcccaccaccagtgagtgacgcgacgcgaccggcggcggcggcgatgggcagcgtggacttcggcctcgtcgagatccaccccggggagatccggttcgaatttgaggtgaagaagaaaagttcatgttatgtctgtctagtgagcaaatcagaggaatatgttgcattcaaggtcaaaacaacttctccaaaaaggtattgtgttcgaccaaatgtaggagtcattcttccaagggcaacatgtgtttttacagaccacagttgttccttttggtacagctgacgaagacattgctcctgcttttttttccaaagaagtgggaagatatatcgaggagaataagctgagagttgttcttgtcagggcgactccacttg

SEQ ID NO: 58315 - DNA, 253 bp, Oryza sativa
  unsure (1)..(253): unsure at all n locations
  Clone ID: PAT_MRT4530_60042C.1
aaaagtcctcgcatcccgccgccgccnccgccccgcctcctcctcccatgcgccgccacgtaggatcgcncgatcagatctagggtcgagcactccactctcccgcctcccacgcgatgcgtggtggccggcnctggctgctcctcctcgccgtcgccgtcgccggtgccnnnnnntcccgtntgcacgcggccgtccgctgaggcgatcgtgggatcccccgaggcgtgcgtcgcngctgnccgcccgctcg

SEQ ID NO: 58316 - DNA, 575 bp, Oryza sativa
  unsure (1)..(575): unsure at all n locations
  Clone ID: PAT_MRT4530_60043C.1
tttttttttttttggtgaaatgaaataccatttctttccactgttgcctcagtgtaaagcttctaattaatttaaacagtttacagcatacagcatacatatttggtgcttttttataaaaaaataaaacaaaaattggacaatttccgagcttgccaaggaggaacatcaagctggaactctaattgcacatctatatgtctgcacagttatccacatttcacacacaaacataggaacatctgatatatttcgagtattaaatcctttggattaaattttgtataccttcattggagcatgaaatgaaagaattttggggacaaaactcaccaaatgtaaccatccatataatccagggtagaaacctttcacctagggcacctgcactgatatcgaaatcgggtttgacaattctccactgccaaagctcgcagcacgccttaatgtgttgttccctaccaatgaacgatcaacgactgtcaatgtgctccctagtgccattgctgatggcattgggcttctcgtggcacatctngacaatcaggcttgctttcttctgggcacgcttggtt

SEQ ID NO: 58317 - DNA, 2097 bp, Oryza sativa
  unsure (1)..(2097): unsure at all n locations
  Clone ID: PAT_MRT4530_60044C.1
agtggatccccgggcgcaggatcggcgcggcgccctccctccgtctccaccgcttctcccgccgcctcttctcctccaaccaccagacggcgaccaccgcggcacacacacagagacccccagatgcttccgccgactccgaccagcagccgctcgccaccagcccaccaccagtgagtgacgcgacgcgaccggcggcggcggcgatgggcagcgtggacttcggcctcgtcgagatccaccccggggagatccggttcgaatttgaggtgaagaagaaaagttcatgttctgtctgtctagtgaacaaatcagaggaatatgttgcattcaaggtcaaaacaacttctccaaaaaggtattgtgttcgaccaaatgtaggagtcattcttccaagggcaacatgtgtttttacagttattatgcaagcacaattgattgctccaccagatctgcaaataagagacaagtttcttgtgcagaccacagttgttccttttggtacagctgacgaagacattgctcctgcttttttttccaatgaagcggaaagataaatcgaggagaattagctgaggcagaccacagttgttccttttggtacagctgacgaagacattgctcctgcttttttttccaaagaagtgggaagatatatcgaggagaataagctgagagttgttcttgtcagtgcgactcaacttgaagaacagcaactcattgcaggagttcccagtgctaagactggtgttgaggttcgtgtggcaaaagagacactgaatattgagagtgaagcatctaatgtcatgaacgaagttcatcattccttgaaaacaaacttcccccctctgagagaaaatccagctactttgaacgaaatgcccttccctgtaaaacaaacaactattctggccccatcaaaagaagttccagctatttcagcagaaagtgctcaccattggaaagaaacccctgctgaaagcttgttttcaagtaatgcagttcatcattcgctgaaaacaagtttcccccctctcagagaaaatccagctactttgaatgaaatgcccttccctgtaaaacaaacaactattctgcccccatcagaagaagttccagctatttcagcagaaagtggtcaccattggaaagaaacccctgctgaaagcttgtttgcaacgaatgcacttcctcattccctgaaaacaagctgtcttctcagagaaaatccagctattttgaatgaaattcccttccctgtaagacaaacaactattttgcccccattaaaagaagttccagttatttcagcagaaagtgctcaccattggaaagaaacccttaatgtttctctagaatctcatttttcatcaacagaaacaaatgttgtctcgagtgagtgccctgaaacattggaaaatacttctccttcaaaagaatttgccatcttaagagatacacttgtcaatgcagagaatcttcactatgtaactgatgatgttcagaatctaatgacaaaactcagtaacctagaagcaaaactagaagaggctgaaagtgtgatagttaaactgagggaggacaccagaactaccattagggagcgggataagctaaagcacgaaatggtcgtcttgacaaggaagggcgcttcacggagccaggctggtttccctttgctgtttgtggtctacatggcgatccttggcgcgtcactcggttacctgttgcacctatgattctgattgattggtgcagctggagacgaagtaacagtatcacagggagtacgtgctgagctttctcacagcagctggagtaggaaaagaaaagaaatcagaggcaggtagcctcctcttggtactgaatcagggatgaactcttgtcacgtgacgatcgtcacaacaattagttcaggcgtccacttactaggtgattaaccaattaaacggagtacataaaacagcatgattttttatttacgctgtacataacctctttatataagtttcctgcccgtggaccgtggtcgctagagataatccaggatgttgttcagagttaaaacctttgttactaaaaaanaaaaaaaaaaaa

SEQ ID NO: 58318 - DNA, 2396 bp, Oryza sativa
  Clone ID: PAT_MRT4530_60045C.1
ctagggcatccccgcgccgacgccgccgtcgtatctcgccgtcgtctcgcgggcgtcgtcgtcaccacctccgccgccgccgcatccgtcgacgcggccggccccgactccgcctcccgctgatgccgaccccgacctcgatgcggccgccaccgccaacgacgtcgcgctggcactgccgacgacgccgacgccactgccacgccgccgcccccgcctcggcacgccgccgcgccacgccgccgcgacgcaacgccaccgctgcgccacacagccgccgcaccacgccgcagccacgccgccgctccgctgccgccactgctgccccgtcagtgaacgaaacacgaagggctcgtaacaatcatgcatcgtgtatgtaacgcggccaatgacataggttttcagatacttaggcaggagagtgaccaccccatatttcaacctgtcagtatcaagagacccctgatgcagttcatcaagcatttctttgactaaaactctaaattctggccacatgttcttgtagaaacccacagggaacccatctgggccaggtgcagtgtttgatttcatcccttttattacctcatcaatctcatccacaaccccattggacttatctgagctatatctgtacatgttgaaatctccccccatcaatagagggtacacacactttgagattgcatctcctttccctggctttaatttcactaaaccctcaccaattggttcctcatcaaccacagtcaacccatcacttgcaaccccctcctgatgggttgtctcatcagttacagccccctctatttcctccctaccagtcgagtcatccacagctgccatacttatcaagttctgttcagcctcaaatagggcagcctgagctggattcagattgaccttggactttctgatctcagccttgagttgcacaggtacattcttgtccctcacccttaagccttgtctcttggcaggtatcactcccttcttcttgttcttcctttctacctttagaaaagcctcttcttctataatctgtcccatcacatcttcacatgccccctgctcatgctcttcatcttccccttcattttcttcctccctcattttttctatatcagaatcagttggtatagcacattttccatcttcctcatcttcatatccccttatggcatatttcttctgaagatcaatatccatcagatcccctttatccccctcttccttcttttcctgatccttcttgtcttcatctctgtcatcttcctcctcatcatcattcccatcaggaggaagaagatcagttccttttagtgaatctttttccacttcccatagttcatccacagtcatctttgattcagttacactggccttgataggaaacttatcaaaatcaaagctcttaaccagggtcagcttgctcctagcttcaggattagggaaatccactagaaagtcattatcattaatttgtctcaccttccaatcccatttgaggcccttaaacagagaagataattcagccatcactttaggaaccgagcccttgcctctaataacagacaaaattcccctgcaagcagttttagacccttcccctgctggaacatctattttcatgatccagcccttccctttgttcaccttgccagactctccccttttcaccttgccagttgcgacccccctctctgcgctcatccggccgccatcttccttcgggtcttcgctgattctgtccaagcaggcgcccacggagctcctcctcctcccgctcccatggtgcccgatccccccaatccctctgctcctcatccacagccctcctcttgtttgattgccactgatcagggcgaggattcggtggcctcctctccatggaatcaccccgtacaacctcagcaaacgatatgtcaccatcgccatggaagcccacactaccaagctgcgagagcccagtgctacagcattgggctgcttgagtatccccgcgccgcctcctcttgaccgcctccccgccgccgccgccgccgccgacgacgactgtctgttgttctcgtccggcggccgcgccagggcgagatgctcggacgatggcggtggccctggcggcttctcccgatcgatccatgggccgtgaatcccggtctggtttcttgtcctgttatgagtgagatagatctgcattttttttcttctgttggtcggtttcttcttctccgtgaatggatgtgcgaaatgataacgagaagaaacggagtacgaggaggaagcctggaataaccatccttaagaatagcggacaccgtgatggttctatatttaagggcaaccgtggctggaaaatagacttccgtattgcaaaccctaatgagattcgaggc

SEQ ID NO: 58319 - DNA, 1301 bp, Oryza sativa
  Clone ID: PAT_MRT4530_60046C.1
caggaaaggaaacgaggatatacaacatcctcctcccgacgcaaaccggttgcaaggcaggcagcagcgaccagacgaagcagagagagcgcccgcgccgcgccggccatggctgccgccgtgaccaccaccaccaccgccacaaccacccatctctgccgtggcctctcctcctcctccgccgccgccgccaagccgcggcgagcgacgacgctcagatgcggcgccgctgctcgggtggaagggctggggcggagggaggcgttgctcggcgtgctcctctccacggcgacggcggcgtccgcgcccgtcgccgccgtggccgcgaccgccgagttgcaggaggggttccgcacgtacgaggatgaggccaacaagttcagcatcgccattccacaagactggctgatcggcgccggcgaggtcagcggcttcaagtccgtcacggcgttctaccctgaccaagtcgccgactccaatgtcagcgtagccatcaccggaatcggccccgatttcaccagcctcaagtcgttcggcgacgtcgacgccttcgcagagaccctggtgaacggcctggacaggagctggaaacggccgccgggggtcgccgcgaagctcatcaactccagggcagccaacgggttttactacatcgagtacacgctgcagaaccccggcgagcagcgccggcacattgtctcggccatcgggatggcgttcaacggctggtacaaccggctctacacggtgacaggccagtacatcgatgaggacggggatgtagacaagtacagggctcagatagagaagttcaaccaactaaatgtacaccaattgttccgagattttgacgatgcggccttgccgaggccaacatgattcaggttcacatgaaagaggagcatccctacacaacatcccaacaaggcgaggacgaaaaacattttgtaaaccaacgtatttcgttataattgtaaatcaatcagtatattcatgtcatcagttcaaccaactaaatgtacacccattgttccgagattttgacgatgcggccttgccgaggccaacatgagctaattatgttgtgcccagtcataagcattgttttctatgcatttttaagggagaaaaaacaggggggggcctcgggccgcaggccgccagcccggggtaaaatttcaatcacccaaagttgcacattgctatattttagttcattttaacatcccagtttaaatatgtttgtatgtaattttgtttttttaatgaagttcatgtttatggataaaaaaaaaaaaaaa

SEQ ID NO: 58320 - DNA, 654 bp, Oryza sativa
  Clone ID: PAT_MRT4530_60047C.1
atggacgactcccacgacctggcctccccgacctcccctgacacggcgtcctcgtcgtcttcgtctacgtcgacatcatcgtcctccgccaccgtcgccccgaagaagcggccgcgcaacgacggccggcacccgacgtaccgcggcgtgcgcatgcggagctgggggaagtgggtgtccgagatcagggagccccgcaagaagtcgcgcatctggctgggcacgttcgccaccgcggagatggccgcgcgcgcgcacgacgtggccgcgctcgccatcaagggccgcaccgcgcacctcaacttcccggacctcgcgcacctgctcccgcgcccggccaccgcggcgcccaaggacgtgcaggcggcggcgctgctcgccgccgccgcagccgacttcccctccgtctccgtcgacgccaatgccaagagccccgacacctgctccgtcgccagcgccgcctcgccgcagccgccaccgccggacgccgaagcggaccctgacagcacgctgttcgacctcccggacctgctcctggacctgagatacgagacgtcctcgagcctctcgtgcggggcgtcgtgggccgtcgatgacgacgtggccggcggcgtcgtgttccgcctcgaggagcccatgctgtgggattactga

SEQ ID NO: 58321 - DNA, 938 bp, Oryza sativa
  Clone ID: PAT_MRT4530_60048C.1
cggacgcgtgggcggacgcgtgggcggacgcgtgggctagttctagatcgcgagcggccgctcgcgatctagacgaccgccgagttgcaggaggggttccgcacgtacgaggatgaggccaacaagttcagcatcgccattccacaagactggctgatcggcgccggcgaggtcagcggcttcaagtccgtcacggcgttctaccctgaccaagtcgccgactccaatgtcagcgtagccatcaccggaatcggccccgatttcaccagcctcaagtcgttcggcgacgtcgacgccttcgcagagaccctggtgaacggcctggacaggagctggaaacggccgccgggggtcgccgcgaagctcatcaactccagggcagccaacgggttttactacatcgagtacacgctgcagaaccccggcgagcagcgccggcacattgtctcggccatcgggatggcgttcaacggctggtacaaccggctctacacggtgacaggccagtacatcgatgaggacggggatgtagacaagtacagggctcagatagagaagtgtgttcagtcattcaggttcacatgaaagaggagcatcctacacaacatccaacaaggcgaggacgaaaaacattttgtaaaccaacgtatttcgttataattgtaaatcaatcagtatattcatgtcatcagttcaaccaactaaatgtacaccaattgttccgagattttgacgatgcggccttgccgaggccaacatgagctaattatgttgtggcaagtcataagcattgttttctatgcatttttaagggagaaaaaacaggtgtatttgttagatttcaggcggccaaaattttgtaaaatttcaatcacccaaagttgcacattgctatattttagttcattttaacatcccagaggaaataaaaaaattaa

SEQ ID NO: 58322 - DNA, 323 bp, Oryza sativa
  unsure (1)..(323): unsure at all n locations
  Clone ID: PAT_MRT4530_60049C.1
cgaagcagagagagcgcccgcgccgcgcctgccatggctgccgccgtgaccaccaccaccaccgccacaaccacccatctctgccgtggcctctcctccttctccgccgccgccgccaagccgcggcgagcgacgacgctcagatgcggcgccgctgctcgggtggaagggctggggcggagggaggcgttgctcggcgtgctcctctccacggcgacggcggcgtncgcgcccgtcgccgtcgtggccgctaccgtcgagatgcatgaggtgttccacacgttcgaggatgtggccaacaagttcagcatccgctatttcac

SEQ ID NO: 58323 - DNA, 1059 bp, Oryza sativa
  Clone ID: PAT_MRT4530_6004C.1
ttagatttattgcgtcagccgaggggaggggcgcgcggaccgggtccacgggagtggggcccacgcggcagcctcacggtccacggtggaccgggtgcacccggctcacaccggccggcgccgtgggtcccatgcgtcagccgtacccgagggcgcgggcggctgacggccgggccccacatggcagccgcgggacacgcccgaaggcggccacgccggcacagccgacgcactgcggagcggcggccgagagaggggagggaagggggaaacgaaacggcggtccacggctcaccccgggtcgacggcgacgacgggaacggcgaccggagcggaggaaggcggtggtgcggcacgggtcgacggggacggcggcgttccggcggtcggcgaccggaacggagaggtggacaaggtcggcgaggatgcggcgaagccgaaggaggcgacgccgaagcgggagaaggtccggggcgacgacggcggcggaccggagctcggcggtgacggcggagagagagagcgacggcgcgagctcgattccggcggagagagagagcggcgagtggcgaaaacggcgtagggaggcactgggagtgtttatatagggttgggagggggagagagcggccggatgagggggaaacgagcgcggaagatccggccgccattgatgcgccggcgaggtttagggggaaatatttcgaacgaatccgagggagagagagagagagggaaaaatggggggaaagagggagggaatcacggggaatatttcccccctcttgattgcacgcgggacggacgggagcggcgggattcgcggcggcggcggcgctagggcacgggcgaggcggcgggagcggcgggaggtaggggatgacgggtgggccccacccgtcagcgagggtggtgggcgggcccgcccgtcaacggcgcgcgcgcggggaggaagccggatgggccgcgggggagaggggagagagggagagagatgggccgagacggcccaagagggggagggggggggaaaaagactttttagggtttttcttttta

SEQ ID NO: 58324 - DNA, 324 bp, Oryza sativa
  Clone ID: PAT_MRT4530_60050C.1
atgactcaacacggatgtacgaacggacacggggcgacaccttgttcgaacgaacgagcgaacgactcaacaacggctgcggctaaaccagcgggccagacacgatccacggtaaagccccggcagtggcggcggctcggcaaagacgcacggtggcggcacacggcgacacaacggcacgacggcaacggcgacagcggctcggcgaagcaaatacatcaacggactaggagagcggagtaccagcgacgctacggcgatggcggcgacggcaacctgcagcggcgacacaaggcggcagcgacagcaaggcggcgcggctag

SEQ ID NO: 58325 - DNA, 779 bp, Oryza sativa
  Clone ID: PAT_MRT4530_60051C.1
acattatttttttcttttttttttttttttttttttttttttttttttttttttttttttttttttttttttttttttttatttttttttttttttttttttttaggccaaaaaaaaacttttttctttgggaggggggaacaaccaactttttggggttttacaaaaaattttttctttaaaaaacccccttttttttttagggggggggaaaaaagtccccctctcctttttacaggggggcctttttttttttttggagggaaaacacccccataaaaaaacccctgggtggggtttttcctaaagcccaccaaaggggccttaaaaaccccccatttggtaagggggctttcccaaaaacccaaaaaaaggggctggggcccctagggttttttttattcccaaaaaaactccctgtttttgggtttgaaaaggtggttttaaaacctgttcccagggggggcccccccattttcattcccgggtccctttttggtgtgggccccacacaaaggggttgttacccacaaaaaaaaatagggggggggggcccaaccccccttttgtattttatgttggaccggccattttttttccaaaaaaaattataattttaaagggctctttaaggcccacaattttttttttgggggggggcctctgcggctgaagaccaaaaaccccttttttttttaaaaaagatataggggggccccaccccccccgtggcaaaagagaccccttcctcccctaaaaaaaaaaaagccctctttttt

SEQ ID NO: 58326 - DNA, 981 bp, Oryza sativa
  Clone ID: PAT_MRT4530_60052C.1
atgctcatgccggagacgctcgcgctcgccgccgcctccagcacaaacctgagcccccgcaaacgctattccaggtgcaggagcgccatctccgcgcaccagcacacgatcgggaggtggttccaccacagggacgggagcagcagcagcagcagcagcagggtcgacaaggcccgcgccgagcgggcgcgcgtgcacgccgcggtcaccgtggcgagcgtggcggccgccgtcgcggccgtggcctccggcgcggcgaacgacccggacgacctcgacgacgccaagatggacgccgcgctggcgtccgccacacagctgctggcctcgcactgcatcgagatcgccgagctcgccggcgccgaccacgaccaggtcgcctccgcggtggaggccgccgtcgacgtgcggagccccggcgatctcatgaccctgaccgcctccgcagccacagctctgagaggagcgacggcgctgaggctgagagcgcagcgggaggcgaggagcaaggtggcggcggtggcgccctacgagaagaccggcagctgccgcggcgacatatggtgcaaggaagggacgctcctgaaacgcagccggaaaggcgctttgcaccggaagcgcgtggccgtctacatcaacaagaagtcgcaggtgatcgtgaaactgaagagcaagcacatcggcggcgccttctccaagaagaagaagagcgtcgtgtacggcgtcgacgacgacgtgcaggcgtggccggcgccgcacgcgtgcggcggcggcgccgtgcctcctgctccggagacggcgtcgtcggagaagtgccagttcgggctgaggacggcgcagggcgtggtcgagttccagtgcgagagcagggcgcagaagcaggactgggtggagtcggtgaagaatctgctccggcaggcggccggcgggacggctcagctcgagcactccttcgaatctctccggcttagcgcctcgtaa

SEQ ID NO: 58327 - DNA, 3485 bp, Oryza sativa
  Clone ID: PAT_MRT4530_60053C.1
ccgggctgcaggaattcggcacgagggagagaactagttcgagttttttttttttttttttagacatatatataaattatatagattcagtcttctctgtctagcccgaacttgcggtcgaggtagcggccgacggcctggaacgtcgggccgtaaaacccgccttcgctgcttcctgttcctgatccggatctctccctctcgctggcttcagtactttcgtcctgcgacgacgtcgtcgtagacgaacgtgggggcgagtagtagatgacattgatgtactcgccttcattgatgtacaccggcggcatcgtcgtcccggagccctcctcccacggcggagccggccagccgccggtgaagttcttgacgggaacagtttgggctccagatatgatgcggccgccgccgccgccgtcgtcagctctgctttcggcatatttatcaaaacgcttgaactggggctgcctacgccaccctgatcccgccgttaagactccgcgcctttcttcttcgacggatttacatgctcctgccccgtggtccttctgcagagccacagatttctcatgcaagccttctttcacaataaggtgttgtttttcagtagtcctatgttcttcatctcgtgtcctgacattgttattatctttatcatcaaaggtccaatctacacaccgtatgttgacaattggacgtcccggatgcatcctaatggcatcagtcaaagctgactctgcaaatcttctacaaagatcaccagcagtaaaatcgaccttaatttttgcagtgatctcttcaagtcctgacaaattttcgattccaacgggtatagcatcatgctgatctgctctgtggacatcaaaacctagcttgagcttccggagattaggcattgcacctgcctcaaatttcatccacgctaagctgcatctgaactttaagtatttgaggactgagaaccttgcattatcaaagacaatactttctgcaggctttgtgtggacataaagtgacaaaacagtgagagcaggtaatcctccaagaacatcaacatcatagcttgttacttccctaatcccaatcattaaaatacagagatttccaagctgcccaatccaattcggaaggctagaaaagatgcaaacacatggtaacaactcaagcctctgaagaagagctggtggggaggacacactgctccagccataaacagatacactcgtgcttgtagcactgtgaatatgcagagtatttgcataagaagagcctacaggtgatagagttatagatttgagattagggagtttccccagaatggatccaaggtattgcatattattcttcagattgtcagaatgtatggcagaataggtgagctgaagatcctggagattggtcagctcaccaaggctccatagattctctgatgtgttacagctgagatcaatatatccaagtgttcgaagcgatgacatgtgagcaattccattgggcgggtttgtcctagcaggtagactaagatgcagcaagcctgggagatgaacgatgtctgatggaactgcatctatttttccatctattttcagtgcctccaaatattgtagaccttgcatatgggttggcatttttaaggtgatattggaggtgaccttcaaatatctcagtcggacaagttccgaaatttcagtgagatcaaaactgatgctgtcctcatcaccgcagaaatgtagaattagaactttaagaagttgaaaccccgtaatagaaggcatacaattcaagaccccgcaaaaggcaagtgtccgaacttgagacagtctcatattagttggtggagttgcatcctctacattaccgaagtgaatagataatcgtcgaaccttgtcagcgagccttgtagtcgcttgtgtgtggtctattgcaatagcaaaattttcttctgttgacatgtatgtaataagattgagtaccatatggtgaaccacacaagacaaaacctcaccattgtcattgatatgtacaggctggataaattttctatcaacaagctcactgaaataggctcttgaaatttcttccttttcatgcccttcactaggacagatgaaaccttcagctatccattgattcaccaaatcatccttccaaattatgctattctcttggtacattctgagatataacatgcatgccttcaaatgctgaggaagactgttgtaacaaaggttcaatagttgtttcatcccttccaaattaggatttgccatcaaactgtaacctaaggtctcgtttatataatcccattgctcatgtttctcaagctgagttgctaagaggcttgcaatagtgacaacggctagcggcaaaccaccacatttccttacaatatcatacgaaacttcacagagttctggaggacaattagaatgagaaccaaaaactgtactgaaaaataaatttcttgagtcatcctcactaagtggtttcatcttgaaaatatagttcgactcataaccacaagattgcagagctagatcttcaatttctgtcgtgatcagtattctgctgcaactattaccatctggtagtgtgcacttaataatatcccatgtgcatatatcccataaatcatcaattatgatcaagtacctcttatcttgcagatgtgtccttatactggaaatcaggctatgcaacttccaattgtcaggtggctgctgcaggcgaacctgtgagagcatgctgatgagaagcctcctcatatcaaccttctgagaagaacgcacaaatgcctggcactcgaactgccgtccaagtttgcggtacagctcgttggcaagcgtggtcttgccaactcctccaactcccacgatggataccacctttagcttcttctctccatcagccagccactcctggaccttgttaatggcggcatcgagaccgacatgccggacgccatcggcacgctttctgcaaagcgtgggatgcccagcactagtattggctatgccaccgaggtcgctgctgtacaagatggcgtggcgttgaagcgcctcctgcacgcgaaggctgaattctctgatcttgtttgccatccacaggcgctgctttagcttctctggaaccagaggagtcttgctccccacaggtcgccggctgaacttacggcggcgaatcgtagatacgcttggataccggccgacggtggcagcgtgctcgtactgctcgactgcatcctcgtactggtcgatgcagtcctcgatgtcgtaggacagctcacgcacctccttcgtccagcacctgaccaccatgtcatggtagtcctccagttccgtggcatcgctgtggtgaccatggaggatggaggttatttcctcaatatcttgcctgatgagcggtatctcctggtctgctcccttgggcaggatgttgccgtgacgacgcaggagttcatcaagcctccctgggaggttgaccat

SEQ ID NO: 58328 - DNA, 338 bp, Oryza sativa
  Clone ID: PAT_MRT4530_60054C.1
tccttcccacctccccacctccctctgcaacggtggggcgcggagtgccggccggcccgcttggcggcgtggggcgcggagggccggccggccggcgcggcggcgcggcgagcggagggcgggcgaagcgacgcggcggcgtactggcggctggcggcctcgcggcggcggccgaggacgcgccgggcggtgcgcggcggcgcggtgcacggagggctgggcgagacggcgtggcggtcctctggcggatggcggccttccggcggagcttgggacgtcgggggcggtgctccttctgccgacttggcagtgggcccgacggcttttttctttatttt

SEQ ID NO: 58329 - DNA, 620 bp, Oryza sativa
  Clone ID: PAT_MRT4530_60055C.1
atgtgcgcccacctaattccaacgctgaggtcgattttgcctctaccacggatgaaactgccaaatttcgccgcgcgtttgagttaaagtgtggcagtaacttttccctctcatgaatcgaaccaaccgctgttgaaccaaccgtttccttcctcgccgccgccgtgcgtcgagcccggaacggcactagcacgccgccaaccattttcacccccggtaaagccacgcagccactgtattccgaaaccaagccgaagctctgcaatgactttcacctcgtcgcattcgatcgagctccgccaccgccgccgtgccttgtttttgccgccatgaagtttttccggccgcatctcaccgtttcaaccaccctagccgtcatgccacttacacagtaaattaacccctccgccgccgctcaccgtcgccggagaaccctagcaacctcccctctccgcccgcaagcacttccccctccaatcgccgccgcaatccccaaccctagtgccgcgaagaagaagaagaagagagagagactgaccggtcttgaggactcttatgagattttgaatattaccaatcaatctcaggacatcgagcaaggcaagttattgttcacctct

SEQ ID NO: 58330 - DNA, 1061 bp, Oryza sativa
  Clone ID: PAT_MRT4530_60056C.1
gacaaagatgagttaagagagaagttgagcagtcaaagggaaaccacaaaagaatgcatattccacaccatctctatcaacttggtttagagaagactacaatcaataggcgaatagccaatattttttgaggaatacaaatatacaataacaaaacactgggaactacaaaagaaattgtaggtggcatccttccagcatttgataataatgctgatacgataatatgacagcaaaaggaaaactataaggaatatgaaagagcttaccagctgctctgtcaaaaatgatatgccagagccagaaactccaattgccaaagcaaatctctttgaatgaatacctaggttgtgtatatttctccttcagtaactataatgatagttgtcaaagtttggccatgaagtttcctgcctttcttttggcatattcgtgaactatgccagctgtgctctgtctgtggcgcaaataaaactccgcaagcaatattctactttcttcaggcaagagatcaccatgatgaccgatgcgggaaattcgatcacagacagcatggtgcataaggattccagctgcaacagatacattaaaagaatccaccatgcctttcataggaacactgcagtgcaagtctgacaactttaaagcatcatcacttatgcccctgccttcattgcccacaacaatagcggtaggttgcgaccaatccatgtcgtacacacaaaccgaatcatttcccaaataagtagttgcaatgcgataaccacgcttttttaaagcatcaaagcattctgcagttgagctccataattcgatatcaagccatttctcagcacccatgctcacatgcctattgtctctataccttttgttgttgtcgcaggagatgacgtgcacggactgcacgcctagcgcgtcggcggaccggaacgccgcggagacgttcccgaagtcagagagcccctccacgacgaggcaaacggagtagctccggttctcgacggcgcggcggatccgctcccgccgcgcctccatgatgtgcggctccagcacctccagca

SEQ ID NO: 58331 - DNA, 529 bp, Oryza sativa
  Clone ID: PAT_MRT4530_60057C.1
gtcggattgccagccatggtggtgaacaacttcacgggccccgggattgggctggggttcggcatcgggtgcgggttcggcgtcggatgggggttcggaggaatgcctctgaatatgtttggcttgggcatcggtgggggatgtggagttggtcttgggctagggtggggcttcggcaaagcgtatggttgtcagtatcgctcgtctagagtccagtttcagggcattgagtttcagaagaagaccgaaggagatgaagcatcaagccttgtttctccagagcgtgttgaaaaatctcgtccttatggatagtatggttgtgccttataattcacatatgctatgttaccttccttccctcaattgtgccttagttgcatacctgcatgtttcttcggtaacatttgatgcttatgctcagctttgtcatttttgttgtaatcagaatgatgttaatggacaggattgttatctatgttgtcaacttatgttctctggattcaatgcactttgccagtatttggttgtt

SEQ ID NO: 58332 - DNA, 996 bp, Oryza sativa
  Clone ID: PAT_MRT4530_60058C.1
atggacccttcctctctctcccttaccatgctcacaggaggcggtggcaatggcaaagtggagatgcggtggtgttggaggatgcggatgcgccatcacggcacttggaagaagtggatctaccagcggcttggttgggaactccttcccttcttcctttgcaaccactgtgacaccgatcgacaagctttgctgaggcggattcatcggcaacaaccttggaaacaccggatctatctgttgtgggctgcggagtggaggtcggcggcaaaggaggacctcgtctttgccctcgaggaggacctccatgcaaaacagctgatcacctcatcgaacttcaagcggcgcggacaagttctcggtggcggatccggaggcgggctcgacgccgccgtcctcctcccccacgacggtgcggacgagctcgccgacggcgtggcgagcttggtggcgtctggctcgccgaattcgggcgcgagctcgctggatctggcggcgggggccacaacggcggcggttcctcttccccttccttcttctcgagcgttggcagcggatccggatgcgggctcgacgccgccgtcctcctctccccacgacgacgcggaagagctcatcgatggcgggctcgccggatccaggtgcaggctcgccggattgcggcgagggccacaacgcggcggttcctctccccctcccttcttcacgagcgtcggcggcgaggagcaacggtggcggcgatgcgaccggacgaggcaacgcacggggctccggctccgccaacgcgtggcctcgggctgtggcttcgcccttctcgagcccaagcgcgacgcttcgagcggttcctctgcaagcgcgaaatcggtctgcggagccacggtccccactgccatggatgcgcgtgtccgacatggagggttaagaccacaagccagagccacgctttgtacatggcctgacaagaaatcgaaagttttatcacctgcattgacatga

SEQ ID NO: 58333 - DNA, 627 bp, Oryza sativa
  Clone ID: PAT_MRT4530_60059C.1
atgtcggacacgcgcatccatggcagtggggaccgtggctccgcagaccgatttcgcgcttgcagaggaaccgctcgaagcgtcgcgcttgggctcgagaagggcgaagccacagcccgaggccacgcgttggcggagccggagccccgtgcgttgcctcgtccggtcgcatcgccgccaccgttgctcctcgccgccgacgctcgtgaagaagggagggggagaggaaccgccgcgttgtggccctcgccgcaatccggcgagcctgcacctggatccggcgagcccgccatcgatgagctcttccgcgtcgtcgtggggagaggaggacggcggcgtcgagcccgcatccggatccgctgccaacgctcgagaagaaggaaggggaagaggaaccgccgccgttgtggcccccgccgccagatccagcgagctcgcgcccgaattcggcgagccagacgccaccaagctcgccacgccgtcggcgagctcgtccgcaccgtcgtgggggaggaggacggcggcgtcgagcccgcctccggatccgccaccgagaacttggctcccccagcttcattgtcttggatgacccttgcctcatttggatccatccgccgacgccattaa

SEQ ID NO: 58334 - DNA, 4209 bp, Oryza sativa
  Clone ID: PAT_MRT4530_6005C.1
atggcgtcgaagcggatcctcaaggaactaaaggacctgcagaaagatcctccaacatcatgcagtgcaggtcctgctggtgaggatatgttccattggcaggcaaccattatgggccctccagatagtccctatgctggtggtgttttcttggtgaatattcatttccccccggactaccccttcaaacctccaaaggtgtcttttaagacaaaggtcttccatccaaacatcaatagcaatggaagcatatgcctcgacattcttaaggaacagtggagccctgctttgacaatatctaaggtcttgctttcgatctgctcgctgctcactgaccccaacccggacgaccctcttgtccctgagattgcccacatgtacaagacggaccgtccaaagagagagagagccgccgccgcccgacgccggcgccgctccaagtcgtccgctcgtcggcgccgagatccgcccggccgcctctccgccgggtgccacgccgtggtggaaggctgcctctccgtcccgccgctcgaccgccccctgcctctccgcccggcgtcgtggcccctcgtgccgccggcgaagtcgccgcgggatctgcctcaccgcccgggctgccccgccggccgccgccactgctcgaccaccccgcccgccgccaccgctcacgacgcggaggccggatccgagcgtcggcgcgccggccgcctctccgcctggccggctgtgctccgccgccagccaccgccgctcgaccccgccatcgccgctcagagagctcactaccgtgggcctttgccgccgcctccgagcccctttaaaaggctccccgcttcgccgtcgccgccgtcgctccagccgtgcgccgccgtcgctccagccgtcgccgtcgctcgggaagaccgccgtcgtggtcgccaagtcgccgccgtcctcgtccgcctcttcgctgccgtcggagatcgccggagcttcatcgccgtcgacaacccgaaggtttccgccgtttcctcctcgtcgccgtcgtcgttcgttgttcctccgccgtcgctttggtcgccgatgccgcgctacaagcctgagtacttgtttggtgttgagggttttgtccaggagttgcgtacgatgtcctttgtcattggatttgggaatgcccctttttatacccagattcctcattatcgtcatgaagagaagtgccgagtcaaagtcaccttgaacagcaatagtgaagaggtcccctcagtgatgttcgaagctggaggaagaaattacatccatgcatgtcaggaggtggcaaggatcgccataggagagctccgtgatcgctacagtgatcagttggccgacactgagtatcgctaccatcctcgtcaacctcagggaagtgaccgtggcagctaccttgagactgaaggaattgagaatgatgctaccacaaggcatttggttgagatgctgtgggctatggatgaaagtcgtgcggagactgtgttagcggctcaagatcgtgaagaccggaatcgtggtaagatttgcaagttagaagacaaggtggatcgtttggagaaggaattagctgcgttgaagggagaagcaccgccgcagaaggccagggttcgtctcaccgcaaggaagagagctctatttgtccctcgctatcaattggcgccaaaggttcgtgtggtggaaaaagaagttgccccaaccctagcagatcctccggtcatcatcataagtgatgatgaagaagaaggatccaagcgcacccgttccaagattgagtgggtagcaactcaagatgatgaagacgagccgaatgagccttcaatcgacctccgatgctcggaagaactagacaacgggaatggtcccaacaatcccaataataacaatggagagaaccccactcttgctcaagttcttgctcaacagactcagcttatgaacatgatgatgcaacaacttcagaatcagcagaaccaaggaaataaccatgtacctcctcagaataagttagcagaatttcttcgtgtgaggccgcctgttttctctagtaccactaatcctgttgaagctggtgattggctgcatgccatagagaagaagttggatttacttcagtgcactgatcaggagaaggtttcatttgcatcgcatcagttgcatggccctgcctctgaatggtgggatcacttccgcctgaataggattactgctgaacctatcacttggcttgaattcgccgctgctttccgaaagacgcatataccatcaggagtagtgtctctcaagaagaaggagttcaggtcgcttactcagggatctcgctctgttacggagtatctgcacgagttcaatcgtcttgctcgttatgctccggaagatgtgcgcaatgatgaagagcgccaggagaagttcttggaaggacttaatgatgagctttcttacccactcatgactggagattatcctgatttccagaagttagtggataaggctattcgtcaggaggacaagtacaatcgcatggagcagaagaaacgccggattgctcacttcaaggcacaacaggggagtaatcagaagccgcgtcttactttaggaccccagcctatgccacagggaggttcttcgtctgttgttcatccgcaacgtcagttcttcaacaacaatgctggcaacaacatccgcaatcaagctccacgccctgttgcagcttcaacacagcaacagcctgccaagagggagcaaggcagcaagcttgtggtgtgtttcaactgtggagacccaggacattatgctgacaagtgtccgaagcctcgacgtgtgaaggttgtccctgcccagaacaactctactgtaccagcatcaaaggctcgtgtcaatcatgtcgctgctgcagaagctcaagatgctccagatgtgattttggtccgggagtatcctgatgtgttcccagatgatttacctgaaaggatacatcagaccaagttcgtcaccatggggagctccagttatttttgtggaaaagaaagaccatacccagagaatcttaaaggtgccactgttttctccaagatagatcttcgatcagggtatcaccagttgagaatcaaagaggaagatatatctaagacagcttttaccactagagccctagcgccgtgtgccctagcttcgccgtcgccgccgtcgctccagccgtgcgccgccgtcgctccagccgtcgccgtcgctcgggaagaccgccgtcgtggtcgccaagtcgccgccgtcctcgtccgcctcttcgctgccgtcggagatcgccggagcttcgtcgccgtcgacaacccgaaggtttccgccgtttccttctcgtcgccgtcgtcgttcgttgttcctccgccgtcgctttggtcgccgatgccgcgctacaagcctgagtacttgtttggtgttgagggttttgtccaggagttgcgtacgatgtcctttgtcattggatttgggaatgcccctttttatacccagattcctcattatcgtcatgaagagaagtgccgagtcaaagtcaccttgaacagcaatagtgaagaggtcccctcagtgatgttcgaagctggaggaagaaattacatccatgcatgtcaggaggtggcaaggatcgccataggagagctccgtgatcgctacagtgatcagttggccgacactgagtatcgctaccatcctcgtcaacctcagggaagtgaccgtggcagctaccttgagactgaaggaattgagaatgatgctaccacaaggcatttggttgagatgctgtgggctatggatgaaagtcgtgcggagactgtgttagcggctcaagatcgtgaagaccggaatcgtggtaagatttgcaagttagaagacaaggtggatcgtttggagaaggaattagctgcgttgaagggagaagcaccgccgcagaaggccagggttcgtctcaccgcaaggaagagagctctatttgtccctcgctatcaattggcgccaaaggttcgtgtggtggaaaaagaagttgccccaaccctagcagatcctccggtcatcatcataagtgatgatgaagaagaaggatccaagcgcacccgttccaagattgagtgggtagcaactcaagatgatgaagacgagccgaatgagccttcaatcgacctccgatgctcggaagaactagagtga

SEQ ID NO: 58335 - DNA, 741 bp, Oryza sativa
  unsure (1)..(741): unsure at all n locations
  Clone ID: PAT_MRT4530_60060C.1
nnttggggganttngggantgggtaaangggaaccgaacggnnaggngngttnngnnaccngcgtntgantnggaattaattagggcccccacttcggcttctccttgccctccccgttgccatgcaaccgcgggcttctccccaggcgggcttccccctggccattccgcgctgccgccctgttgggggctccggcccggcccgttctgcctggcggcgaggtgcgggacgaccccgggggtatcgtgtccccgcgtccatgcccccccctccccccccccctcccccttcccccccgcacctctcgttgcaaccccgcagcaacccgccgcgccgcgggccccgcaccccctgcgccgccagcctcctcgccaccgcccgcgcccgccacgcgtaccgcccccaccacacccacgccgccgccgccgccgccacggccagcagcagcaaggtcgccatggccgcagctagcttgagccaatctacgacagctacagtaacctagctgccaattattagtagatactgtactaccagctcaagagtgtagccacctagccagcaagtcagtgtgattaatacttgcacttatcttgtaattttgacaagtcaaaaactgaagctgcaggacaagcctgacaagttcttggatttcaggagtgaaaacgaaattcagatcgagagacgatcgatcagtaataaaccacttttgatccagtacaattttgcagtcttttttt

SEQ ID NO: 58336 - DNA, 1005 bp, Oryza sativa
  Clone ID: PAT_MRT4530_60061C.1
atggccatggagaagcagcagcttcgcttctccgtgcgccggcgagagcccgagctcgtcggccccgccgcgccgacacctcgcgagaccaagcggctgtccgacctcgacgaccacgagacgctgcgtgtccaggtcaagttcgctttcttctaccgcgccggcggcgagcacgacgcggcgggcgtcgtccggcgcgcgctcggcgaggcgctggtgccgtactacccactcgccgggcgcgtccgggaggtggaggagcggaagcttgtcgtcgactgcaccggcgagggcgtgctgttcgtcgaggccgacgccgacgtgcggctggaggagctggaggaggacggtgacggcggcggtgagctgaggccgccgttcccgtccatggaccagctgctgctcgacgtcgagggctccggcggcggcgtgctcggctcgccgttgctgctcgtgcaggtgacccggctgctctgcggcggcttcgtcctcgcggtccgcgtcaaccacaccatgtgcgacgccatcggcgccgcgcagttcctgctcgccgtcggcgagctcgcccgcgggctccccgccccgacggtgcggcctgcatggtgccgcgagctcctcgacgcgcgtagcccaccggcgccgtcgtttcctcaccgcgagttcgacgtcgtgccgccgccgccgccgcccggcgacctcgtgacacgcaccttcaccttcacggccgccgacgtcgccgcgatcagggaaggcctcccaccgcgcctccgcggcacggcgaagacgttcgaggcgctcacggcgttcctctggagagcccgcacggcggcgctggagctccccgacggcgaggacgcgcgcctggtggtgatcgcgaacctcaggggcgtcgccgagctgaacctccccggcggctactacggcaacgcgtgcgtcgccccgacggcgatcaccaccggcgaggcgctgctgccgcgcgggtcgctgggcgacgcggcggagatg

SEQ ID NO: 58337 - DNA, 1859 bp, Oryza sativa
  Clone ID: PAT_MRT4530_60062C.1
atttcttctcctcccatctcccaatcccccaccggggcgcccaatgcagcacaaaccctagccctccctccccttgatctcgcgcgagcatggggaactgctgccgctcgccggccgccgcggcgcgggaggacgtcaagtcgtctcacttccccgcatcggccgggaagaagaagccccaccaagcgcggaacggcggcgtggggggaggcggcggcgggggcggcggcggcggaggaggaggaggagcggggcagaagcggctccccgtgctcggggaggaagggtgcgagctgatcggagggatcgacgacaagtacgcgctggaccgggagctcgggcggggggagttcggggtgacgtacctgtgcatggatcgggacaccaaggagctgctcgcctgcaagtccatctccaagcggaagctgaggacggcggtcgacgtggaggacgtgcgccgggaggtcgccatcatgcgccacctccccaagagcgccagcatcgtgtcgctgcgggaggcgtgcgaggacgagggcgccgtgcacctcgtcatggagctctgcgaaggcggggagctcttcgaccgcatcgtcgcgcggggccactacacggagcgcgccgccgccaatgtcacccgcaccatcgtggaggtcgtccagctctgccaccgccacggcgttatccaccgggacctcaagcccgagaacttcctcttcgccaacaagaaggagaactcgccgctcaaggccatcgatttcggcctctccatcttcttcaagcccggtgagaagttttctgaaattgtgggaagcccatattacatggctccagaggtattgaagagaaactatggtccggaaatagatatttggagtgcaggagttatcttgtatattttgttatgtggagttcctccattttgggctgagactgagcaaggggtggcacaagccattcttcgtggaaatatcgatttcaaacgcgaaccctggccaaatgtttcagaaaatgctaaagatttggttcgacgcatgttggagcctgatccaaaactcaggttaactgcaaagcaagttcttgaacatccatggcttcaaaatgctaagaaagctccaaatgttcctcttggagatattgtgaagtcaaggctcaaacaattttctagaatgaatagattcaaaagaagagcactaagggtcattgccgatcatttatctgctgaggaagttgaggacataaaggagatgttcaaggctatggacactgataacgatggcattgtatcttatgaagaattaaagagcgggatagcaaaatttggttctcatctggcagaatcggaagtgcagatgcttatcgaagcttgttgcttaggtgtaggagctgaacctgcacttgtagattgtaggactaggaaactagctgcaataggagtggttttacttttcaccatatgtgtatcaagaaacttatgtgtagtggatacaaatggtaaggatgctctagattatggtgaatttttggctgtctctcttcatttgcaaaggatggcaaatgatgagcacctccggcgagccttcctattttttgacaaggatggcaatggctacatagagcctgaagagcttcgagaggctctagtggacgatggagcaggtgacagcatggaagtggtgaacgacatattgcaagaagttgacactgataaggatggcaagattagctatgacgaatttgtagcaatgatgaagacgggcacagattggagaaaggcgtcccggcattactctagaggaagattcaacagccttagcatgaagcttataaaggatgggtccgtaaaactggtcaatgagtga

SEQ ID NO: 58338 - DNA, 365 bp, Oryza sativa
  Clone ID: PAT_MRT4530_60063C.1
caggtactgctatgaggggaaaatttctataaatccagtcatgttcttcaatcttacatggtgattatatcctacctgataacacattgttacaagctaaaactctacgtatgggcttttgcagcagcctgaaattgcaggagaagataggaggttgcaacctctgaactctggtccatcttctcagaattccaaggcaccttccaactacttaagctacctgcctggcttgctgacacgcgccttgcgaacggcttcttggatctgcctctcgtgctccttgagcatgtcctcaacgttccctcctggcggcatcaatggccctgagtgggggatccttctggacttcctcccatgggtcatgc

SEQ ID NO: 58339 - DNA, 1688 bp, Oryza sativa
  Clone ID: PAT_MRT4530_60064C.1
ccacgcgtccgcccacgcgtccgaagatgaagaaggcgctcaggctgaggtcgttgtgtgtcgttcaagggtggaagccctaggagcggcggctgcggtggggcgaagtcggcgccgccgcggtggccggcgaccgtcggggagttgacgcgtgtgcagatgcggatttcggagcccgccgccccctccatatcactcggcggacacacagggtgatagagagagagagattcagatccacccgcgtcttctcttctcccctctcgtccacccatccctcgatcgatccggcgatctccgccgccgccgccgccgccgctagcagcagcaactgcactaggtaaagaggaggagaggagaggagagggcgcgcggtacagaggaggaagaggcgtggggagagaagatgttcctgtgggactggttctacggcgtgctcgcgtcgctggggctgtggcagaaggaggccaagatcctcttcctcggcctcgacaacgccggcaagaccaccctcctccacatgctcaaggacgagaggttggtgcagcaccagccgacgcagcacccgacgtcggaggagctcagcatcgggaagatcaagttcaaggccttcgatctcggcggccaccagatcgcccgccgcgtctggaaggactactacgccaaggttgatgctgtggtatatttggtagatgcttatgataaggaacgttttgctgagtcaaaaaaggagcttgatgcactcctatctgatgattcattggcagctgtcccgtttcttatccttggcaacaagattgacattccatatgctgcttctgaagaggagctgcggtatcatctaggccttagcaacttcacaactgggaagggcaaggtcagcctaggtgaatccaatgtccggcccctcgaagtgttcatgtgcagtgttgtccgcaagatgggctatggtgacgggttcaagtgggtctcccagtacatcaagtagatcccttgtcaagacatacttgcatactctgcccagcgattttttttccttctcgtttgtttcagttggttgttcttcacgacaacaatcatcatgacggtatggagggtatgaagagaaaacagtgctttaacaattggggacgatgttccatgttggatatttagcctcaaaccatttgttatgtcgagcttctaaaatttttttgcttttccatagggcgtttactaaggacttggaagatgatgaattataagattattggtttcttaaaaaaaaaaaaaaaaaaaaaaaaaaaaaaaaaaaaatgttctaattctataccgctctttctttttttccccctctcctgctgcagcttttgtgctacttgttgatggatttatgattttattccttgagggacggatggggtgatttgggtcggaagcagctcttgtttgattggaacaaactagggtttaggcatgggggacggatgggatgatttgggtcagaagcagctcttgtttgattggaacaaactaggtttaggcatgggggacggatggggtgatttgggtcagaagcagctcttgtttgattggaacaaactagggtttaggcatggggagtattggggattagacatgcacctgggttaatgaagaatcgggcatcttactcgaatcatgcaaatcaataatcagtgctttcattc

SEQ ID NO: 58340 - DNA, 633 bp, Oryza sativa
  Clone ID: PAT_MRT4530_60065C.1
atggcgacggccggtgtggataagccgtactggttcgaggacaccgacgacgacggcggcgtccttttagcctcatcccgtcgccatctccaggagctcgcctgccactcgccccctctctgcccgccgcccctctgctgtgcccgccacctctcggcgccgcggtgccgccgccccttgcccgtcgcttgtgccagcttgctccagccgccgccgcttagctccaccggccagccactccgctcagacctgctccgcccagccgacggcgacgcggccgcgctgcgtgcgttcgttcgtgtgtacgtcgatcgagacgcgggggcagtgttccttcgtttacgtggggcgacagccatggccaacgtcgccgtccgccgtgtcgcccggcccaacgccgctttcctcccctttccccgcagccacctcttgatcgatatcgcttaggctagagagctttatcccttcatttgtttctgcacttcgttttacgtgaaatacctcattttcatcttcatcttcaggagattcaaacaccacattaatctcttttagtcccttgttcggctttctcgcaagacaccgcagtagatatgacaacggggaattcctcgccggagaatgcatccccat

SEQ ID NO: 58341 - DNA, 2797 bp, Oryza sativa
  Clone ID: PAT_MRT4530_60066C.1
tatggagctcctggacttggatgtatcctgattcaaaatgtcaagtctgccccacctagagaacatatgaatcccatggccatggtcaagattatctatggggagggtctcactgaaactaagttggaagaggggttcaaacaacaattcagatggaactgggaatggagggccaagaagcagacaaatggtactttccagattagattcccaaacaagttaagactgtctgaattatcaaactttgatcatttcaatgtgaaaggcacaaaggtggaagtcaatgtctctgaatggactagtgaatctgcagccatagggaagatgcatgtggtgtgggtggtaatagaaggtctgcctgatgaaatgaaggggtatcaggctctctttgaggtgggatccaatctaggagttgtcatggaagtggatatgccaatgttagctgcaaaagacattgtcagaatgaaggttggaatgatggacgtcaaacaatttccattatgatcctatctacacctgaagccctgttgtatgaagcttgttttaatctggagtcagtagtagaaatgggatggcttaagggacaacagcttgataagcaataggaaactactctaagagttgaagagaaggaagaacagaaggtgctcaccaaaggtaaacaagtggaagagatgaaagaattgactcaacatgtggttggggctcaacagaaaggagattgtagtcaggctcagatggaatcagttcataggttggttgaagaagacagaatcaaagccattcagatcctgcaagacagtcagttggctttggccttgcaagaagaggatataaagggacatctcaatgaagataaggggtgtgatgaaaatcaaactgctcttctgattctgaaagatgatgataagatggtttctcaggaggtatcaacagccaaagaggtgcaaaggagtcagctggttgctagtagtgaggatgatatagaaggagaaggtgaagaggggaaagtgtagctgggggaaagtgaggagttatttgactctcaagattctgaaaatgcatttgctaagagcttgggagttgtgttgcctgaagaagaattgggaagtcaagaggaggaaagaagagcaagcaaaaggttcagagatagggaagacaagtgctcgattgatgcggttgattctaatataaaactgattaatgatttagaggaagcaagagtgaatcttttccttaaagaacaacaaaaaactggtgataacggcagccttgaaaataaaaaaggagatggtagtgaaatagatgatgtctttaaaattctgaatgagtctgattctgatgatatgtggtctgattttgatttcactgaaacctttttatctcaatcacataaaggaaagagaagagctgatagaggaaaccttgctattgtcaagcacaaggttggttttattggattacaagaaacaatgaaacaagatttctctgtctattttctaaaaactttagggcaagggagggagtttatttgggattggatcccagcttctgggaggtctggagggattcttttgggtctagatggagaaaaatttaaaatgctggctgtgagaaaaggtcactttttcttgaaagctaccgtggagaatttggaagataaacaggagtgggatttaatggttgtatatggtgctgcacaaaaagaacataaagaagaattcctaagaaaacttgcacaggaattgaatttacagaaaaaacctctaattttggggggtgactttaatattattagaagggagagtgaaaaaaacaaaccagggggttgcaacagatggagttttgttttcaatgccattattgaacaagctaacctaagagagattgacatgggaccaagcacatttacttgggcagttgtcatgaaaatcctacttttgaaaaattagatagaatcatgataacgagtgagattgaacaaaaatatcctttgctgacagtccaatgcctagaaagagttttctcagatcataaccctctgttggtggtcctgaagaataattgcagcaagaatactcctttcaaatttgaaattagttggttcatgagggaggatttggataagattgtcagtgaagtttggtcttcttataatgataatgggtccagtttagatgtctagcaggggaaactgagggctgttaggaagaggcttaagggctggaacataaattgggaaggcaaatatagaagagaaaaggctgaaattttaactcaaattgacttgttagacaaaaaaatcgagatgaatgggatgacttgtcttgatagagaggaaagaagggtttgggagctaaaattaaagtataccattaacttaatgagggtaattgaggattttcaaagagggaacattgacattgaaagactaaattatggagtaatcactttggtgccaaaaacaaaggatgcaatgcaaaaacaaaaatttagaccaatatgtctattaaatgcaaaacttttccctgagatttggtgtgattggattatgaaaacagtaaggggaggtaaagttgcagtaaaagtcaatgatcaaattgggccctactttcagactcacaaaggggtaaggcaaggagaccctttgtccccacttctctttaacctagctgttgaagctttaacaattatgatacaaagggctgagagagaacagttaattcaggggttggggactggtgttgatagcagaattgcaatcctccaatatgctgatgacacgatttttttgatc

SEQ ID NO: 58342 - DNA, 2492 bp, Oryza sativa
  Clone ID: PAT_MRT4530_60067C.1
ctagccacatcgccgtgaaggagagcgccgacctggggaatgagcccgtggggccccgcgccgccctgccgggcgccggtggctcttgccgcaccggcttggcggtggtggtcgtcgacgctgccagcaccgccgccgcgtagttgccaggattcgcagtcggcggcgaaggagcatatcgccgggatttgcagtgctagcccgacgccgttcaacgccgccgtcaccgccatctgcatcgcaccatgtacgcaaaagcatgtcaaccatggaggagccgtcgtcggcgcctccagtgagctggtgcaggaagcccaagaactttgccatgatcatttggttggtgttcgtcgccgccgggctgctgctgctgttcatgctcatgaccggcatgctcgactccaccatcccgacgacgagcagcggaagaagtggacggaggtgatcgaccagatggtccagaacctcaacacgctcttcaccatcatgtgcctgcaccagcacgccaagatcttccaccacctcgtgctgctccgccggtggcgccccgacaccggcgacgaccgcgaggagatccacaaggtgtactgcaaggacggcgcaccgcggccgcacgaccacgcgcacatgctcgtcgtggcagtgctgcttcatgtcactgcttggcgctgtacttctgctgcgctctcttctggagctacgcgcgcaaggaacggccggactgggctctcaacatcggctacggccttggcaccggctgccccgtcatcgccggcctctacgcggcgtacggcccgctgggacggaagcagcacgaggattccgacgaggagtcagcggcggcgcagaacgaccgtgaggtggagatcaagatatacaaccggcgcgtggtggtgagcagcccggagtggagcggcgggctgttcgactgctgcgacgacgggacggtgtgcgcgctgtcggcgacgtgcacgttctgcgtgttcgggtggaacatggagcggctcgggttcggaaacatgtacgtgcacgccttcaccttcatcctgctctgcgtcgcgccgttcctcatcttcagcgtgacggcgctcaacgtccacgacgacgacatccgcgacaccgtcgtctccgtgggcgtgctcctgggcctctgcggcttcctctacggcggcttctggcggacgcagatgcggaagcggtacaagctcccggcctccggctgcgggtgcggccgcgcggcggtgagcgactgcgccaagtggctcttctgctggagctgcgcgctggcgcaggaggtgcggacggccaacttctacgacgtggaggacgaccggttcgtgttccacggcgcccgcaacgaggacggggagctggctaaccacaggcagggaacggcggcggcggcgcgcgaggcgtcggcgtcggtgtcggagctggcagagctggacggcgcaagggatcagccggaggagcaggacgcctagttcctggtgctggtgctgtgcgaggtgctcaactccggggacgcgcgcagggcgcaggagctgctcgcgccggacctcgagtggtggttccatgggccgccggcgcaccagcacatgatgcgcttctctaccggcgccgaccacggcgagtcaaggttctctttctccccctcctcagcggccaccttcctcgcgatctagagctcgcttcctcgccttggtgccaaacagcgggaggagcggaggccgatggcagccgaaccggggctcgcaaccagcgctgctaagcacaggcagggaaccggcggcacggtgcgcccgaggcctgggtccgccgccaagaccaccgcagccataccgtcctccaatcccacgcacgcgccggctgccgcgcccccgccgccgccgtccaagcccaagtgcctgtggcagagccgccgcgccgaccgcgcgcacaagtcgctgccgggcctcgtcctcgccatctaagaacgaactcaaaagacatcaagaactcaaggcgcaaaaagcttccctaaattaatcacatataaaaaaaatcaagcgatacttatcaatagtgattagctaaataaataaaaacggaagcgcacgcactgagtgaagtcactagctatagtttattgcttatgggctaaagccgctcagctcaactgagctgcttcaggtttgcgtgattaatcccactaccactactgcaactagccagccagttaagtagtgttgcttttgcttgcttgtctgaaagctgaatcagcagtgtgaccagtagcatcagtagctttggtccaagtcattatggattatgtaagtgtgtactccttccacggtaaagctaaaccgtggctgaatatgaatgatggtctgttgttgttgcataaaaaaaaaaaaaaaaaaaaaaaaaggaaacaaccagaagcaacacggaccccgcgccccgtgctgcccccggctcgctcgcgccggcttcggcacgcggcccggggg

SEQ ID NO: 58343 - DNA, 356 bp, Oryza sativa
  Clone ID: PAT_MRT4530_60068C.1
ttggggttttttttttttttttttttttttttttttttttttttttttttttttttttttttttggaaaagggatcaatgcccttaagttaaaaaagatctaaatccatcaggttacaaggccaatttttccaaaacacttattttacaaacatgttatgccaaaagggccaataaagcaaaagggtgcttttaaagaaagccccactttagttttgcttttcacttttgggaatttttaaggacgacataattggggccataaggcttttgaattttcgaaattttcttcaaaatttcagcaaaagcatttttggcccctggacctcgtagtctaaacttaaatttaaaaaccaa

SEQ ID NO: 58344 - DNA, 270 bp, Oryza sativa
  Clone ID: PAT_MRT4530_60069C.1
atggccgccaccgcgagaggcaccgccttgttcgcccaagaggtgccgccgccggagacgcttgacgtcgtccgtaggcagcgacagctactccgccgcgcggccgacctctgcctccaccccatcgccgaggaagaagacgacgacaccaacgaccatgtctcctcctcctccttttccttgttgagcagcagcagcagcaccaccaccaccatctccggctgccgccgtccaaaggttgatgagatgcgggcgtgccagtcagtttga

SEQ ID NO: 58345 - DNA, 636 bp, Oryza sativa
  Clone ID: PAT_MRT4530_6006C.1
ccggccggcgaccgcctccctgggaaaccgacgcatccgccgccgcccggctccctcccgcgcttcgccgcttcagctcctctcgtgccagcgatgccggcggcgaagaagatcacgctcctgcagacggtggcgttcgccggagtcttctccgccgtctcctgctggtatggattcatgtttgggagggagtctgcgcggcgtgagcttggtggaatcattgaagacctccgcagcggcggcggcagtggctgctccaccaactccgcggcttcccccgattctgacgctcattccaaaccctagctcggtataccagaagtactgatgagttgtactgctaactgtgacaagatttttatgcctataagtttgttgaactcctcactctgatcatgagggctatctcttctgctaagaacttgactttgatggtgcatttttttctgtttattgaagtcccatctgtccatggctgcctacacaagcaagaataattttagtatgaacaagccatccataggtcgagagatatcttgtaagtacctgcaatcttttttctgttctatgggctgtacccttttaaatacagatcttgtcttcaggacaataatttgatcttactcagtttcttgc

SEQ ID NO: 58346 - DNA, 1198 bp, Oryza sativa
  Clone ID: PAT_MRT4530_60070C.1
ctacatgacagttgattcagcgtgggacctatgtaactcccacatgtcaggttgccaaatcatctctctcccttcctcctctctctctctcttctcttctcctcttgtctgtccaagccgtccggcggctggggaggaggccgtcggggcaaggcggaagaggaggagcgcagcgccgcgacggcggccggcgccggcgccggcgggcgccgcagtggggaggcagaggagggcccgcttcgcggcatggacgagtgcggcgctgcacaagttcgacttcggggccgctcgcccgctccccacacggcgcttcctcctccgcagccgctgccgaatccgagcacgtcgacggttgccgcgccgccgccgaagccagcgatgagctcggaacagatggacttggcgctcccggggcgcgccgcgccggcgaaggagaagagccatgggccctcgaggcggcggatcttgcctggccaccaacccgaatttactctcgtcttgccaagcagaaaacgcacgatctatcactgaaaccatgcttgcatcatctaacccagacgtcacagatcgaccaacaaactttgcaaaatttgtcgggacaggtggtttctgttctccatcaatcttcgacccttcttcgttcgttgcaagttcatccgaggatacggcgacggaggcaacaccgtccaccaccgcgagcgcgcgcgcgaacgggtgcgccgccgccggcagcgaggatgacgccgacgatggctcgcctccaccgtcagactccgtgccggtagaagaatcggacgttgccgacttgtggtcgacggtgaccggcttcgcgcttccagagtcgggcggcttggtgtggtcgacagtgacttgctccaacgacgcccttgcgccgctgtcgtgcggaggctcgggcttcgcgctttcggcgtcgggcgacgacagtgaatggccagagaacgacgggccgccgccaccgctactgtcaaccataggcttcatgccaccggcgacgggcggcgaaggggaagagccagagaacgaggcctcctcctacggtgaatgcccagagaatacctacggcggccgcctcctcctctccgccgtgcttccccactacagccgccgccgacagcgccggctgccgtcggcgccccagcggcctactccccagccgccggacggcttgcacagataa

SEQ ID NO: 58347 - DNA, 204 bp, Oryza sativa
  Clone ID: PAT_MRT4530_60071C.1
atgccacgcccacctgtcgcacctacgaattacaccacacgcacgccgccaagctctgatccaaccatcaccgtggaaatcgccatcgtcttctccgccaccgttgagggcgccaatggcaacggcgccatcgccagtcccagcggcgaggtcgaagatgcactgccactcccggacttggcaccgccggaagaggaaacatga

SEQ ID NO: 58348 - DNA, 397 bp, Oryza sativa
  Clone ID: PAT_MRT4530_60072C.1
tgcggcccaagacccgggttgcatagggcaagacgaaaaggtgctgtcttgagatgcctggttaccacatggacagagagtgggtgtactaccggatggcttttagtgtcacacgaggaccctggactctcaactattatgctgatggtgctggcaaaagttggcaaggatgcaaccaggggacagctgccccaactgatgaccatctgacgtgagaccaccacccaggataccacgcctaggaatggaacctgtgtgacccctggatttgcatgctgtgacaaccgtgtgtggtgaaattggtgtgatgaattgtgtgactagatgcaaaatggatggtggatgctgtccccaccctgtgtggcccacgcccacaaggatgcaacgggcctgtgtg

SEQ ID NO: 58349 - DNA, 968 bp, Oryza sativa
  Clone ID: PAT_MRT4530_60073C.1
atgaggacgggggaggtggcggaggcggtgccgagggtggtggcgatcctgtcgtcgctgctgcagcgggtggcggagcggaacgacgcggcggcggcggcggcggcggtgggggaggaggcggcggcggtgtcggcgttccaggggctgacgaagccggcgatatccatcggagggtacctggagcggatcttccggttcgccaactgcagcccgtcgtgctacgtcgtcgcctacatctacctcgaccgcttcctccgccgccgccctgccctcgccgtcgactccttcaacgtccaccgcctcctcatcacatccgtcctcaccgccgtcaagttcgtcgacgacatatgctacaacaatgcctacttcgcgagggtgggaggcatcagcttgatggagatgaattatcttgaggtggacttcctctttggcatcgccttcgacctcaatgtcacgccggctgccttcgcctcctactgcgccgtgctgcagagcgagatgacctacctggagcagccgcccgccgtcgatctccccaggctgcactgctgtccgtccgatcaggacgatgccggctgccatcacaagcagcagcagcagcagcaacaacagcagcagcatcagctcgccgtctgaatgttcaggagttcagaatcaatgagaagttcagagctcttcttttttgtcactggatgtggtgtcaatttgcctttcttttttcttttctttaatcttttttttaccgtgcttggtacataggtgttagttaattgtggttagtgaaagaattgagctttgattagataggtggatcatggttcatggatgggtcagcttcttgggatatttttttcgccattgttcgttcgatggatggatggatcatggataggtggatcagctttgggatcttgccattgtttaagtgatgctaacttgtgcgcatgtgagtcacagcacattgc

SEQ ID NO: 58350 - DNA, 281 bp, Oryza sativa
  Clone ID: PAT_MRT4530_60074C.1
aatcataatccatttgaccccccctttttttgcaccacttttttttttgccaaatagcgataaggagcacctttttgacacaagttctttaaaaaaaaatggtcacaatccatcagtggcaactctaaattaggaaaaaacaagggggagcttattttacccaataaacaccgcccccgggtttatcccagggggggaaaaaaagcaaaaaaaacataaccctgcatacacaaaagggggcgcgcccccccccgccctgggaaaaaaaacttgaacaaaac

SEQ ID NO: 58351 - DNA, 803 bp, Oryza sativa
  Clone ID: PAT_MRT4530_60075C.1
gcggtaggagtggcacgtttagggcttccgccgccgcctcctcctccaaaacctcgtcggcgcgccgccgcggccaagccgctgtgctgtacaagaaccggttcggcgacaacgtaagttccgtgcccgacgagccaccaggtagatggggaaggcaaagcgtgcgtcgatttttatcaggcttgtttcagcagctggaaccgggtttttctatgtgaagcgcaagaatcctcgtcggatcacagagaagcttgaatttaggaagtatgatccacgagttaacaagcatgttctctttacagaagcaaagatgaagtgagatggtgctgggcaaatcttctccacaatgtgcaaagctgaataacctgcaaaaaaaactcgtgtcaggattcaggaacctgtctactgttaagaatgctatgatcagtttatcaccctgttctggttccagcgttttatgcagacaatttcaacaagtatgagtttgatcttgattagcactggaattctgatgttatgcatgttggttttgttttttggaatgggctgtaagcctgcaaactaggaatgctttgattgttttaccatatccccgttaaagcaaaattctatcatggcaacttgtagataggattcaccatactgaatttgactgtatgtattcctttaaacatgtttgtcaatacctggaagttatcttgaatttggccatgatctgacctggcgatatctgctgttaagcaacactgggacttctccgggcttctcttcatcacacggatcactggacctggcttgctcat

SEQ ID NO: 58352 - DNA, 609 bp, Oryza sativa
  Clone ID: PAT_MRT4530_60076C.1
atgtgggccccactttatggtattgacgacgttattttggcacttaacagccgtcaacatactatacaaaaattcatcaggataaaccaccgatttcatccacttgactactccataataaatcatcagaataacaaacgatttcaagaacagatcgtcaacaatgaactcccggcgtacgagttctactgctaccgaggaaaggtgggaaacacagtgaaatatcacctgctgaacgggctcagacaaggaggcacagccgcgtcaatggagaggcgtcgcggcaatggacgcgcgggtggagagtcggagttatcggtgaagaggcggcagtggcggaggtgcacgggaagaaccggaggcgtcaacgaccaagaatgggggcgtttgttgatgcaatcacgcgcggaggtcgtcctcgcacgcgaaacaggaaatagcgccgatggagttgtcgacggcgaggtggcagctacggagttggtggagagcgtgtcgcgcgcgttgccgatggtgaaggccgatgctgttgtgcggagaaaatggacattaagccattctcaaaacgtggttccgctagaatgccatcctgaaacaacaattcgctaa

SEQ ID NO: 58353 - DNA, 530 bp, Oryza sativa
  unsure (1)..(530): unsure at all n locations
  Clone ID: PAT_MRT4530_60077C.1
tttcttttttttttttntttttttttttttttttttttttttttttttttttttttttttaaacagcagcatcaaccctagaaaaacggccacccttaaacttcttttttttccccctaggaagaaaaaagggaaaaaaaaccggaaaaaaacgggggggaaaaaagccggggagctaggagcccaaaaagggcatcggggggggaaaaatcttgttcaaaccccccaaaaagcttctctcctttttaaaaaccgcttccccgccccgttacccgcccccgggggaagaccccccggggggggcgcgcgcccgccccctcactcgccgggggggaatcccaggggggccgggctgacttttcacacgggggccgggggggggccccaaaggggggcgtcctccatgctcgcccaaaagctatcgacgtaaaaccccccgatcttaaatcccccaacggggaggtcgggaaaggggaggccaggcanngaaaacttggacggtnnccacgtttgccccccctgacacgggg

SEQ ID NO: 58354 - DNA, 1041 bp, Oryza sativa
  Clone ID: PAT_MRT4530_60078C.1
atggatcaaaaacaagatgaaatattgaagaaagatagagcggagcttctgcaagctcaggcagagctctggtgccacacttttggctatctcaaatccatagcactcaggtgcgccgtagagcttggcatccccaacgccatccaccgcaatggaggctctgcttcactgcccgagctgcttggcactctccctctcgcggcaaacaaacgatcatgcttgcctcgcctcatgagattcctagtctctttcggaatcttcaaagaagacatctcaagggagggaacaacaacaacaacaagcgtgtatcagctcacaccggtatctcgcctccttgttgatgcttcaagtaggggcatctttgtgcttgggaattggctcacgagcagcgatgagaacaccccatttggaatggcgcatggcatggatttctgggatttcaccggccatgatgccgagtatagcatgctgttcaacaaagggatggcgtccgacagccacttcgtggtgaacatagtcatccatgagtgcgccgaggtgtttgtgggggtaaggtcgctagttgatgtcggtggtaggaatggcgcgatggcgaaggcaattgctgatgcctttccacacataaagtgctatgttttggacctccctcatgttatccatggcaccccaactgatggtattgttgagtttgttgcaggggacatgatgcactttgttccgtcagcagatgttgtgttactcaagtttgtactacatgattggagcgatgaggattgcgtaagaatcttgacacgatgcaaacaagctataactaacaaggaagaaggaggcaaagtgataattatagatacagtgattggatcaccatctcaacagatacttgaagctcaactttcaatggatatatgcatgatgacgttgacaacaggcaaagaacgagaagagagagattggcataagatattcttggaggcgggctttacacgatacaagattatgcccatcttaggggttagagcacttattgaggtttatccataa

SEQ ID NO: 58355 - DNA, 408 bp, Oryza sativa
  Clone ID: PAT_MRT4530_60079C.1
tctagatcgcgagcgcggcctttttttttttttttttttttttttttttttttttttttttttttttttttttttttttttttttttttttttttggggttgggtttttttttttttttggggccaacaaaaggggcttcccccctcaaatttcttttttgatcgatccctttacacataacgtttgattgcctctttttttttttttgggtccctggaaaaaatggtttgaattccaaattaaaaaaaaaaaaaactttcttttttttttctttaaccaaagtcccaacagttgtttttcttatgggggctttctttaaaaacatggaactccccttaacttgtttttgcttccctgccccccggcaaaactttgaaaactttgtttaaaaaaccttcccacccccc

SEQ ID NO: 58356 - DNA, 379 bp, Oryza sativa
  Clone ID: PAT_MRT4530_6007C.1
gttaacagctgaaggacctttgatgtctgttgaaagactcgtgatacttttaccgatcttttttctttacgagattcctttccttccgcattggattcagaacttggtaactgttgatgttttgacccttgcattacttattgacctctatgcttttccatgtcagaattatattttgcttagttgagcccaattgcctggtctccccttaatattacacgtatatttaaaaatcaaatttgacaaattaattgccgtgctgcttccacttgttatccagtttttcttcctttaactgtttgtagatgtaattttaagctgggtgcctttttgcttccctttcttttccctctccgtccgtcctcgcccctttcctttc

SEQ ID NO: 58357 - DNA, 1776 bp, Oryza sativa
  Clone ID: PAT_MRT4530_60080C.1
atggcggcgctgcgtgacgtgctgctgtcgatcgcgcagacgccgcaccggctgcggcggcgggcgctggtgacgtggacgccggcgcaggagacgagcgaggtgagggacaggtcgggggcgcggatgaagcggcggctggagtggtacgacctcgtggggctcggcgtcggcgggatgctgggcgccggcgtcttcgtcaccaccggccgcgtcgcgcgcgacaccgccggccccgccgtgttcgcctcctacgtcatcgccggcgtctccgcgctcctctcctccttctgctacgccgagttctccgtccgcgtccccgccgccggcggcgccttcagctacctccgcgtaacgttcggtgagctggtggggttcttcgggggagccaacatcctgatggagtacgtgctgtcgaacgcggcggtggcgaggagcttcacggactacctggcctcgacgtgcgggatcacggagccggacgcgtggaggatccaggtcgacggcatcgccaagggctacaacgcgctcgacttcccggccgtcgcgctcatccttgtcctaactctctgcttgtgctacagcaccaaggagagcgcgatgctgaacatggtgatcacggtgttccacctgctcttcttcgtgttcatcatcctggccggcctgtggaacggcagcgcgcggaacctggtgtcgccgcacggcctggcgccctacggcgtccgcggcgtcctcgacggcgccgccatcgtctacttcagctacatcggctacgactcggcgtccaccatggccgaggaaatccgcgaccccgcccgcgccctccccgtcggcatcgccggctcagtcctcgtcgtctccgcgctctactgcctcatgtccctcgccctctgcgccatgcttccctacaccgagatagcggagagcgcgccgttctcggcggtgttcagggagaaggcggggtgggagtgggcggggagcgtcgtcggggccggggcgagcctggggatcgtggcgtcgctgctggtggcgatgctggggcaggcgaggtacctgtgcgtcatcgccagagcgcggctggtgccggcgtggctggccaaggtgcacccttccaccggcactcctatgaacgccaccatctttctagatagagcaaacggaagcataaaatacactaataacttcaccgaagtcaaggtccttaccactgtatcagatcatgaaaactgcaatgcaggattgtgcacagcatcaatcgcactcttcacagagctgcaggtagtgttcgagatgatatcaatcggaacactcctggtcttctacctggtcgccaacgcgctcatctaccaccgatacgcgaagctgggtgccaaccgatctctgcatgtcctcctcttcctgctcatccttacactgagctcccttggcttctccctctcgaggaggatccatgggcaatgccgatggggaatggctttgttcggcgccacctccgtgacgattaccgccatgttccactgcgcggtacggcgagacatgccagagccaccatcagagtggatggtccctctgatgccatggccggcggctgcatccgtcttcctgaatgtgttcctgatgaccactctcaaggtgatgtcatttcagaggtttggcctctggagctttgtgatcatagtcttctatgtctgctatggggtgcactccacatactctgcagaagaaaatgaggctgtcaatgctatgattcatcatgccaatatggacatatcttag

SEQ ID NO: 58358 - DNA, 119 bp, Oryza sativa
  Clone ID: PAT_MRT4530_60081C.1
ggaatagtgaagctccgaccactgtacacatcaaggcgtggggtgccaggagcagcacttcgaccttgggtttggttctgctggattttacaaccaacggtccgacgtggggcccgtag

SEQ ID NO: 58359 - DNA, 207 bp, Oryza sativa
  Clone ID: PAT_MRT4530_60082C.1
atggaggagcccaaggatgcgaaaacgacggagtggacactatgggaggatggcgtgctgctcccactgagcaggaggaggacaagccacttggccgtggtgaggacaagccactttgcagtggcaaggtcgtgcaccgtgattgatcctgcgatagccatcgtcggtgcattcatcttcttcttcgccattgcccagcagacatga

SEQ ID NO: 58360 - DNA, 716 bp, Oryza sativa
  unsure (1)..(716): unsure at all n locations
  Clone ID: PAT_MRT4530_60083C.1
ggtcgacggcatcgccaagggctacaacgcgctcgacttcccggccgtcgcgctcatccttgtcctaactctctgcttgtgctacagtatagtttggaagaagatgagaaatgcgtttcaaatgtgcaattcatcaacaaccagcagcattgatggttggttggtacttggtttttgatggatggattcgtgtgatgctaagtgaagcaccaaggagagcgcgatgctgaacatggtgatcacggtgttccacctgctcttcttcgtgttcatcatcctggccggcctgtggaacggcagcgcgcggaacctggtgtcgccgcacggcctggcgccctacggcgtccgcggcgtcctcgacggcgccgccatcgtctacttcagctacatcggctacgactcggcgtccaccatggccgaggaaatccgcgaccccgcccgcgccctccccgtcggcatcgccggctcagtcctcgtcgtctccgcgctctactgcctcatgtccctcgccctctgcgccatgcttccctacaccgagatagcggagagcgcgccgttctcggcggtgttcaaggagaaggcggngtgggagtgggcggngagcgtcntcggggccggggcgagcctggggatcgtggcgtcgctgctggtggcgatgctggggcaggcgaggtacctgtgcgtcatcgccagagcgccggctgtgccggcgtggc

SEQ ID NO: 58361 - DNA, 364 bp, Oryza sativa
  Clone ID: PAT_MRT4530_60084C.1
gaagagaacagagaaacattttaattcatgttcttgctgagaagaaacatttgcacatacaagtagtgggatcgacgggcaccaaatctgaacctactacaattggacagatgcactggtgtctcaattacaggttgacaactaaatgcattcatcgggaacttgtttcgattgagggttgtacaaggtacaaattccaagctgcaaattgaatgaggaagatttacctaagggtgaccagggacggatgcgctgccacatctactttattgaaccacgcggaacatctgaaatggcaaaaagaaaggcacatatttcccattatgcgaatctgggttttatggcattgggggaagccaatatc

SEQ ID NO: 58362 - DNA, 582 bp, Oryza sativa
  Clone ID: PAT_MRT4530_60085C.1
atggcgaagaagaagatgaatgcaccgacgatggctatcgcaggatcaatcacggtgcacgaccttgccactgcaaagtggcttgtcctactcagcgggagcagcacgccatcgaccggtagtgtccactccgtcgtttccgcatctctatataaagcaagtatgagtatatctaccggtgcaaaccaagtgtcctttgggttggagctgatgaccatgccatttctaagcactcctagaaagctaaaaaataatgggcctaaaagcaacctttcatacacatttttctttgccaagacgcctctatacaaagaaagtatgagtataccaccctatgcaaaccaaactttctttggtctggagtggatcaccatgtcgttggtcgtgccccttcctaccaagaatttcagcaacgatgattgggaaagtcatgagcgggagatgctcgggattcatcgaagaacagggctctcacacctcatgtttgagatctaccacgtgatgaaaccaaagaggaagaagaaactaacaacaaaaaagaacatcaagaactcggggacaatgacaaagacagagacatag

SEQ ID NO: 58363 - DNA, 345 bp, Oryza sativa
  Clone ID: PAT_MRT4530_60086C.1
atggggggtcgccatggaagaaccaagatgcgcctccgacagagcgcgaagcggatcgaggtcgatggctgcgaggctcgagcttggagggcggggggcggacgcgggcgtttgcggatcaatggaggccccggaagctgcctcctcactctgtccccgtccggccgggtcgccaccacgccgtcgccgtcgtcgtgccatggccgcctccgccaaccgtcggcccacatcaactccttccggcgccccctcgctctgtgcctcctccacctcaccgccctccaccgtcgccgcgctgaccgccgccctgatccagccgccatcgccgcgcccatcgccgcctag

SEQ ID NO: 58364 - DNA, 603 bp, Oryza sativa
  Clone ID: PAT_MRT4530_60087C.1
ctaggcggcgatgggcgcggcgatggcggctggatcagggcggcggtcagcgcggcgacggtggagggcggtgaggtggaggaggcacagagcgagggggcgccggaaggagttgatgtgggccgacggttggcggaggcggccatggcacgacgacggcgacggcgtggtggcgacccggccggacggggacagagtgaggaggcagcttccggggcctgcgattggtgctagggagggaggcggcctcgtgggcggcgctcggcctggtgcggcggcggcccggagtaggatgaagtcggcgtcgacgacagcttcggtggccttcggccaagggaaggcggaggcggtgggtggcgaagaccggagagagcggagcggcggaccggaggaccggcggtgccgcccgaccttgacccgcgccgtcgcgtcgccttcggaatccaagaacgatgctcgccgccgtcccggatcgacctccattgatccgcaaacgccgcgtccgccccccgccctccaagctcgagcctcgcagccatcgacctcgatccgcttcgcgctctgtcggaggcgcatcttggttcttccatggcgaccccccat

SEQ ID NO: 58365 - DNA, 1053 bp, Oryza sativa
  Clone ID: PAT_MRT4530_60088C.1
atgcgtcggctagaggaaagctacactacaagcccagccgttgcccacgctggcttgtgggctgacgtcagcacggggcgcggcgccgacatgcggggcccaccggtcagcgactcgggagagggaggaaggggcgccggcacgcgggcccactggtcagcggcgcgggagagaaagggcggcggcaccggctcggcttggctcacggccggccgaccgaccgcggcgacggcgacggcgcacgcgcgaacgggttgccggcgacggcaaccggcggcgaaggcgacggcgcaaaggcgatgcggaggcggctgcgctaaaggagaggaaggggaaaaagaagggaggggtgcctcaccgagggtggccggcgcggaggaagacgatggcgaacggcgacggcaagccacgggaggacgacgtcggcgagcggacgagcttcggggtgccctaaggaaggagaagagagggattagagagaggatgataaaccacggcgaccggaaaccatggccgaacgcggcggtggaggtgatgctcacccgtgcgcgagggggtgagggctccggcgacgaacctcgacggaggagagggggagagggaaccggacgtggccgggagaggcgggaatcgccggccgacgtgagggagtggggaagagagagaggcgggattcgattttcgaatcccggccatctcgggcgcgggcgcgagcgggagagagaggggagtgggcgcgggagacgcggcgcacgcgcgggcgtggtcgacgtggcccgggggaggcggaggcgagggcgcggcggcggttgcggcgcggcggcgcgagcgagatcggcgggaggtgggagacgggcccgacaggtgggccccacctgtcggcgacccggagaggagggcggcgggcggcctggctgggcctcggcctgcggccggcccagtaagggggagggggaaggaaggagggaatgggccggcggcccattcggaaaaaggaggaaaaagggagggaaaagaaaaaagaaaaaaaggaaaaaggattttccctggaat

SEQ ID NO: 58366 - DNA, 347 bp, Oryza sativa
  Clone ID: PAT_MRT4530_60089C.1
atgagacggaggagcaacgccaagcccgggagaccgaagaacgtcgccgactggaggaggagcatcaagcacaagaacaagaatggctacggcgtgagcagcaggaccgtgagcggaccgcgaaggaggctgaggatctgtcacgcccagaaattcccgaatagaattccaagcagaatgtgcattaaaatccccgtccaggaccagccggggtacacaaacgacaatgttgacattcagatccaccgggaacaccactccacaggcatcctcgacggcacggacgaagcctactcctcggggaaaccttcatctgacacatacctgtcctctggggttgggaaaaa

SEQ ID NO: 58367 - DNA, 578 bp, Oryza sativa
  Clone ID: PAT_MRT4530_6008C.1
aagctttattgcgtcagccgaggggagggggcgcgcggactgggtccacgggagtggggcccacgagacagcctcacggtccacggtggaccgggcgcacccgggctcgcaccggccggcgtcgtgggccccacgcgtcagccgcacccgaggacgtgggcggctgacggccgggccccacgcggcggccactcggcgcggccggcgggagacggcgcccgcgcccctatggtcgccggcggcggccataggcacggcggagcggcggccgagagaggggaagggaagggggaaaagaggcggcggtcctcggctcaccctaggtcgacagcgacgacgaaaaaggcggccggagcggaggaaggcggcggcgcggctcgggtcaacgggtcgacggcggtgcggcgaagccggaggaggcgacgccggggcaggagacggtcccggcgagcggagaaggccagccggaggtcgtcgacgacggaggagagagagggcgacggcacgaactcgattccggtggggagacggtgcggcaagggcggaaacgggcgagggaggcgcggggagggtttata

SEQ ID NO: 58368 - DNA, 720 bp, Oryza sativa
  Clone ID: PAT_MRT4530_60090C.1
atgtcggacgccggatttgacccgacccgagcacagcacagcgccacagggcggaagaccgataacgctgtcggtcatacgtgcgcctccttgctttcggttcggcgcatgcccccccctgccgcctgccggctgccgccatccacctcgatccctccctcccccaccaacagcagcaccaacccgacgcgtgccggtggcggtcgatctcgcgcgccggtggaactcggctgtcaggttagctcgcgagtcgcgaggcgcacggggcgagccgtccgtccgtctctcgatcggatgggtgtgcgcggcccaagagaggcgcactgctgctgggccgcgtcgtcgcccgcctcgatgaggccacctaccgtcgcgctggggttcggggttttcccccgtgacgacgcgtcgtcgtcgtcgtcgtacgagtatggagtagtagtatatcgacgttctcctactacttgtaccggtagtagcaccgtaggctggcctatggagagtggtggagtacgcggcgagggttcggagtccgagcttaaaatttgcatcgaggtgctctccgccgtagccatcacgtacttccgtcggtgctcctcacgaggtcatcttgtcattcccgctcctcctattactaccaccttggttttgcgaactgtacttgatttgcctgttactctactcccggctacgactggagtatactggagcacagtttga

SEQ ID NO: 58369 - DNA, 751 bp, Oryza sativa
  Clone ID: PAT_MRT4530_60091C.1
atggcgaacggcgacggcaagccacgggaggacgacgtcggcgagcggacgagcttcgggaggtggtgctcacccgtgcgcgaggggatgagggctccggcgacgaaccttgacggaggagaggtggacggggtggatctcggccacgcgaatccgacggcggtgacggcgcggcctggcggcgaccctaacggcggctagcggcggccggagaagcggaaaatggcggctgcggaggttgcacgacgcgggggcgatgggaggctcgagagagtgcggcgaaatggggaaaaagtgagagggggcgacggcggtgcttaaaaaggggaagagagaaccgcacatggccgggagaggcggaaatcgccggccgacgtgggggaatggggaagagagagaggcgggattcgattttcgaatcccggccatctcgggcgcgggcgcgagtgggagatagaggggagtgggcgctggagacgcggcgcacgcgcgggcgtggtcgacgtggcccggggaaggcggggacgtgggcgcggcggtggtttcggcgcggcggcgcgagcgcgagatcggcgggaggagggagacgggcccgacaggtgggccccacctgtcggcgaccccgagagaggagcggcggggctgcctggctgggcctcggcctgcggccggcccagtaagggggagggaaggaaggagggaatgggccggcggcccattcgaaagaaaggaggaaaaagagaggaaaaag

SEQ ID NO: 58370 - DNA, 696 bp, Oryza sativa
  Clone ID: PAT_MRT4530_60092C.1
atggcggggttgcgccgccgccatagggattcgatggtgccggtggaggcaaccgcattgccgggcaccgaccaccatgcgcctctccccaccacacgccaccccctgctcgtcttcagccgcgcggagagaagtaggatgggagatgaggggagagaagatcgaggtgctaacatggcgagcggcggtcgacagaagcgggagacgggcagagcggagaggctggccggcgaagcggggcgagcaacggccgacggcgggctaggtcaggtccgcggcacatggggccatagagcgcagacggcggcgactgctggcgttgtggagaagggcgtcaacggcatcgtcgggaggagggaggaggtggagcgaccacgggggaggcctgcttcattgcggcagcgatgctgtcgaaggtgtctccaggcgacggtcgcgatggtgggcggaacccggagatggaggcagcagtcgcgggggagtctggccttcccgcccctctcgctggcctccttcctcccccgcccactcacctcctccctcttcgcgcgcttggctggctttggttcgccgacggagagggagaagagcaacggccagccattctcccacagcgcctccttcgtggggagggcagcgaaggcggcctccatctcccatatcgtcattcggattgccagcaacggcggcggctag

SEQ ID NO: 58371 - DNA, 453 bp, Oryza sativa
  Clone ID: PAT_MRT4530_60093C.1
atggcggagctcgctgctcgggaaccaggcagcccgcagcttgattccctgcagatttccatgcgcagccagcatcttggctgcgccgacgatggccggacggctgatgcgtcgatagcttgtggcatcgagctccacggccttgcctggccgcgccgcacgcctccatgcgcagctactactgaagccaggcgttgcgcgagccacccgtgcggcgccgcgcggagctcggcggcacgcgccatggccatcggctgccgcaaccccgccgtcgcccgtccgtcgccaccatcggcgcacgcggtggagggccggaggagaggggagcagcggtggagggcggagggcgtcgagctccggcggcggaggttggaccggcgccggctctgggcgcggtggcggcagcctggtgcggcggcggcggcggctgagctcggggacgacacgagctag

SEQ ID NO: 58372 - DNA, 592 bp, Oryza sativa
  Clone ID: PAT_MRT4530_60094C.1
ttgcgcaataaatcccagggctgacgtcatcaaggcggggcgtggcgccagcaagcggggcccaccggtcagcggcttgggagagggaggaaggggcggttcaccgtggaccgggaccacgcgggtggtccaccgccggtccacgggaccgacggcccagatcgccctcggggccgatcggacgggcggtggcgacccggctcggctcaagaccggccaagcagccacggccatggcgacggcgcgcgcacacgcgttgccggcgacggcaacgcgcggcggagacggcggcgcaaacgacggctaacgggcggcggcgctaaagcgacggctaggagggagagggaggggaatagaagggagaggatgcctcaccgagggtggccggcgcggaggaagacgatggcgaacggcaacggtgagccacgggaggacgacggccaccggcggacaggggttgaactcaccggagcgcgaggggatgcgaatttcggcgacgaaactcaacggggaaggggcggccggggtggagcttagcctcgcgaacccgacggcggcgacggcgcggtgcggcggtgaccctagcggcggc

SEQ ID NO: 58373 - DNA, 579 bp, Oryza sativa
  Clone ID: PAT_MRT4530_60095C.1
cggacgcgtgggccgcgacgcgagagccaccggcgccgccgtcctcgcccgccgcatcctcgccgcagctttgtttcgaacgaaatttgttcagctgaggctccatccatgccgcccgttaggtccgcaccagtggctcctcctccgcctccgccgccgccgcagcagaagaagccggcggtcccggtgtcgaggccgtggccgatgtccttcacaccgcacccaccaccaccaccgccaccgccgaagccagctgttgaagtaaaaaatgccagtccaaagaaaaggaaacactgtaactgtaaaaactcacgatgtttgaagctgtattgtgagtgttttgcagcacgtgtatattgtgatggatgccattgttcaccatgtggaaacaagattgagaatgaaaacataaggaaggaagctattgaaacaattctgctgcgtaatccacttgcatttcaggccaaaattgaaaatagtccaaatactgggactggtcgaaaggataattgtgaagcaatacctgcgataccaaaggacaataagggctgccactgcaggaagagacagtgcttaaaa

SEQ ID NO: 58374 - DNA, 1090 bp, Oryza sativa
  Clone ID: PAT_MRT4530_60096C.1
atgcgtcggctagaggaaagctacactacaagcccagccgttgcccacgctggcttgtgggctggcgtcagcacggggggggggggggggaggaggctcggttccgacatgcagggcccaccggtcagcggctcggggggggacggttcaccgtggaccgggaccacgcgggtggtccaccgccggtccacgggaccgacggcccagatcgcccccggggttgatcggacgggcggcggcgacccggctcggcttggctcaaggccggcccgccggccacggcgatggcgacggcgcgcgcgtgcgaacgcgttgccggcgacggcaaccggcggcggaggcgacggcgcaaaggcgacgcgaaggcggcggcgctaagcggcggctaggaaggagagggaggggaatagatgggagaggaagcctcaccgagggtggccggcgcggaggaagaccacggggaacggcgacggcaagccacgggaggacgacggcaaccggcggacgggcttcggggtgccctaaggaagggagagagagagagattagagagagggagatgaaccacggcgaccggtattcatggcggtagaggttgaactcaccggagcgcgagggaatgcgaattccggcgacgaaactcgacggggaaggggcggccagggtgccggacgtggccgggagaggcgggaatcgccggccaacgtggggaagtgggggaggagagagaggcgggattcgaaaatcgaatcccggccatctcgggcgcgggcgcgggcgggagagagaggggagtgggcgcgagggacgcggcgcacgcgcgggcgtggccgacgtggcccggaggaggcggaggcatgggcgcagcggcgcggcgcgaggtgggagacgggtccgacaggtgggccccacctgtcggtgaccccgggagagaggagggggcgcgggctgagctggggcgtggcctccggccggcccagcaaggcgcgaggagagaggagaggaagtgggccggcggcccactaagggaaaaggaaaaagaaaaaaaagaaaaaggaagaaaggaatttccagggatttaaatattgct

SEQ ID NO: 58375 - DNA, 1104 bp, Oryza sativa
  Clone ID: PAT_MRT4530_60097C.1
atgcgtcggctagaggaaagctacactacaagcccagccgttgcccacgctggcttgtgggctgacatcagcacggaggggggggggtgcggtgccgacaagcggggcccgcatgtcagcggcgcacgggtggccggtctaccgtggaccgggaccacgcgggtgatccaccgccggtccacgggatcgacggcccggatcggcccggggccgatcggacggtgcggcggcggccaggctaggctcggctcggcacaaagccagccgaccggtcacggcgacggcgcgcgcacgcgcacgcgcgttgccgacgacggcaaccgccggcggagacggcggcgcaaggcggcgccgaagggcgcggcggctaggagggagagggaggggaaaagaggggagggagtgcctcaccgagggtggccggcgcggaggaagacgatgacgaacggcgacggcaagccacgggaggacgacgtcggtgggcggacgagcttcggggtgccctaaggaaggagaagagagggattagagagagggagatggaccacggcgaccggaaaccatggccgaaggcggcggtggaggtggtgctcacccgagtgcgggggaacgagggctccggcgacgaacctcgacggaggaggggtggacggggtggatctcggccacgcgaacccaacggcggcgacggcgcggtctggcggcgaccctaacggcggctagcggcagccggaagaggggacgacggcgatgcttaaatagggggagagggaaccggacgtggccgggagacgcggcgcacgcgcgtgcgtggtcgacgtggcccggaggaggcggagacgagggcgcggcggcggttgcgggcgcgacggcgcgagcgagatcggtgggaggtgggggaaggacccgacaggtgggccccacctgtcggcgaccccgagagaggaggcggcggggcgtcctggctgggcctcggcctgcggccggcctagcaaggaggaggggagaggaaggagggaatgggccggcggcccattcgaaaaaaaaaagaggaaaaagagaggaaaaagaaaaagaaaaaggaaaaaggattttccctggaat

SEQ ID NO: 58376 - DNA, 114 bp, Oryza sativa
  Clone ID: PAT_MRT4530_60098C.1
aagagattgggaggagagctgaactgaagtgggcgtccccttcttggagaagcgaagcccggctatctacccgaccgtggagagggagcatctcgtcggtgaggagagggggag

SEQ ID NO: 58377 - DNA, 453 bp, Oryza sativa
  Clone ID: PAT_MRT4530_60099C.1
atggcgccggcggcgcggcgctcacacggcggcggcgcgcatgcggcagcggcgcaaagcgacgaccgacggcgatcgtccggcggcggagagcggcggctagcggctctaggaggagaggaaggggaaaaggagggaggggatgcctcaccgagggtggccggcgcggaggaaggcgatggcggacggcgacggcaagccacgggaggacggcgtcggctagcggacgagctccggcgtgccctaaggaaggagaagagaggaattagagagagagagatggaccatggcgatcgggatccatggccgaaggcggcggtagaggtggcgctcacccgtgcgcgtggagatgagggctccggcgacgaacctcgacggaggaggggcggacgaggtggacctcggccacgcgaagctaacggcggcgacggcgtgagacggcggcgagcctag

SEQ ID NO: 58378 - DNA, 473 bp, Oryza sativa
  Clone ID: PAT_MRT4530_6009C.1
ggattgttcttctgccgcagcacgctggaaggggaacaaacactccagggtgtctagcaaccgccgtctaaacacaagggcgtaagacgcaatatgtacaacaggtcactcagcacagcaggtcaatgttgggagcctgtgccagtaagcatggtcatcttgaagaccatcaggggagcaactgtttacacccatccataaatcccaagggagataagcaggaccagagccacagagagaaccagccaaatgatgtacgatgggaatcccctcttattccctggtgctctcacatgtgaagcaagaacaccctcctcttcctcctgcttgttctccttgtcgcttccctctgctgtcttccgcagcctcagaacagatttagcatttgctgctgaagcatcatgctccttctggtcatcctcacacgcgtccgcaccttcagccaaggtacttcctgcattctcttcaatctc

SEQ ID NO: 58379 - DNA, 445 bp, Oryza sativa
  Clone ID: PAT_MRT4530_600C.1
ctgatcggctatgctatgaacatatatagtcttgttgttaatatatatttctatctaagtgatttatacttgttggtgatatgggcctgggggtctcaagactagagggaggaggccgccccccaatgccacgtggccctcccccgaggggagtcaggccccgggtcaccacgtgcggtgggttaggtggccaccttcgagcgctcacctacccgcattaatggcgacctgagtaggcgcgccacgctgcatttaatgtagcgtgcagcgcgcgctaaattggtctgtgactggtcgaatgaccgacgggacccggggtgtcaggcgtactactgcatgggtcagggggcgtgcaccctgtcttgtcccatcagtcatgatgacgagaggtctaaggaagaggtcaccctttaagagttgcctccaagtgatgaaagaagggatc

SEQ ID NO: 58380 - DNA, 214 bp, Oryza sativa
  unsure (1)..(214): unsure at all n locations
  Clone ID: PAT_MRT4530_60100C.1
ggatcatcaaccgcatgtcacggttggtacgacatcatttgtgctgtagcgattacacgacgtcctgggcttgttccgggatggcaatttcccacatggggccggggacccgcaggggacctgcccctacgggggcgggggcgggggcgggtgtggattttaacccgcggggagtcaggtccggggccccggtcatgagcggnggcggngacgg

SEQ ID NO: 58381 - DNA, 423 bp, Oryza sativa
  Clone ID: PAT_MRT4530_60101C.1
atgtacattaaaatccccgtccaggaccagccggggtacacaaacgacaatgttgacattcagatccaccgggaacaccactccacaggcatcctcgacggcacggacaaagcctactcctcggagaaaccttcatctgacccgaactcgaaatctgggcacaggggaagcggcgccgacatgcggggcccaccggtcagcggctcgggagagggaggaaagggcaccggcacgcgggcccactggtcagcggctcgggaggaaaggggcggcggcacccggctcggcttggctcaaggccggccgaccggccgcggcgacggcgacggcgcgcgcgcgaacgcgttgccggcgacggcaaccggcggcgaaggcgacggcgcaaaaggcgacgcgaaggcggctgcgctaagtggcggctag

SEQ ID NO: 58382 - DNA, 512 bp, Oryza sativa
  Clone ID: PAT_MRT4530_60102C.1
cagaactgcggatgactgcctggccggccacgtgaacacgcggcatggtttctctaggaaaaaaagaagaagaagaagaagcacacggtatggtttggaggtggaataatccagtgcaaagcttaaaccgcggctacaatcattgatgcctttctaccgatttctttaaggatcatttccggatcagcttgaatcatgcgtgtgattatgatactgtttatccgttttcgtgctgtctaaaacaagttgacgttaacaccgcgatcggtcagcgctgcagatggcgagctgtgaacgaacgaatttacctgccattcttgcaggccctgcacgctctcggggttgagcttcttgacggcgatgaccatgccggtgccgctgcgcgcggggctcatcgtcctctcgtcgacccaccccttgtacacccgaccgaacccgccctcgccgaggacgctgtccggcttgaagttcctcgtcgccgccctgagctccgcgaacgtgaagattcggag

SEQ ID NO: 58383 - DNA, 1087 bp, Oryza sativa
  Clone ID: PAT_MRT4530_60103C.1
taagcaaggggtttcccggccgggtggggggggaggggaaaaaccggcccgggggccattggcgtgtacggggggggcctttttgtggaaggggcacaaacgaggggcccgggtgataaggcccggccccaaaggccaccggaagggggtgcctttaacggcgttagaaggggaaggaccggccgccgataaaggggcccgcggggggactgggatttaaacccgcccggccggctagtctatgggggacggcaccggcccacaacgggttcggaccggcggcacggaaggcggcggcggccattcgaaggccacggcacccgaatagaagcggcggcgcggcactaagaggagaggaaggggaaaagaggggagggatgcctcaccgagggtggccggcgcggaggaagacgatggcgaacggcgacgacaagccacgggaggacgacgtcggctagcggacgagcttcggggtgccctaaggaaggagaagagagggattagagggagggagatgaaccacggcgaccggaaaccatggccgaaggcggcggtggaggtgatgctcacccgtgcgcgaggggatgagggctccggcgacgaacctcgacggaggagggggggagagggaaccggacgtggccgggagaggcgggaatcgccggccgacgtggggagtgggggaggagagagaggcgggattcgattttcgaatcccggccatctcgggcgcgggcgcgagcgggagaaaggggggagtgggcgcgggacacgcggcgcacgcgcgggcgtggttgacgtggcccggagaaggcggggacgtgggcgcggcggcggtttcggcgcggcggcgcgccgggagcggcgggaggtgggggacgggcccgacaggtgggccccacctgtcggcgaccccgagagaggaggcagcggggcggcctggctgggcctcggcctgcggccggcccagtaagggggagggaaggaaggaggggaatgggccggcggcccattcgaaaaaaaaaaaaggaaaaagggagggaaaagaaaaagaaaaagaaaaaggaaaaaggattttccctggaat

SEQ ID NO: 58384 - DNA, 245 bp, Oryza sativa
  Clone ID: PAT_MRT4530_60104C.1
attgatcaagtgggagtaaaaaggtggctggcacaccttggatgcttactgctggtggtgaagaatgagaaagagaagggcatacgaggccacattctgccaatggcacctgagctatgcaaaatatgccgctcgtgggcaatcagcagcagccttcctccacttccgccaccggcgccacaagaaaaaaagacgacgacagacgccgacgccgacgcgtgcggcaccagccgacgatcgacgag

SEQ ID NO: 58385 - DNA, 486 bp, Oryza sativa
  Clone ID: PAT_MRT4530_60105C.1
atgcggggcccaccggtcagcgactcgggagagggaggaaaggggcgccggcaagcgggcccactcggcagcaactcaaggggaaacggttcaccgtggaccgggaccacgcgggtggtccaccgccggtccacgggaccgacggcccagatcgccctcggggccgatcggacgggcggtggtgacccggctcggctcaagaccggccaagcggccacggcgacggcgacggcgcacgtgcgcgaacgcgttgccggcgacggcaaccggtggcggaggcgacgacgcaaaaggcgacgcgaaggcggctgcgctaagcggcggctaggaaggagagggaggggaatggatgggagaggaaacctcaccgagggtggccggcgcggaggaagacgacggcgaacggtgacggcaagccacgggaggacgacggcgaacggcggacgggtttcggggtgccctaaggaaggaagagagagagattag

SEQ ID NO: 58386 - DNA, 693 bp, Oryza sativa
  unsure (1)..(693): unsure at all n locations
  Clone ID: PAT_MRT4530_60106C.1
ccggccgggaggccaccgagcaccacccgtccatcccaatctcgcttccaccgaccaagcgagtcgccaccggctcgttcctcagcctccgcttccgtcttctctactcctcctcccatcctccatcctgagcgtgtcctctccatcaagctctacggcgtcgtcgttggtctccgtggcggcgtcgagcccgctggtgtcgccgaatgcgaagccccgcgtgcagccgaagctcccgccgaagacgaagctgaccaccatcacctttagcccccaccacaagcgtgactaccaggtcacctgcaccaacaccggctgccgcccctgcgtcgtctcctgcccttccaactgccccaacatgtgcctcgtcgcttgccgatactgaagctgattctcatcacctttagcccccaccacaagcgtgactaccaggtcacctgcaccaacaccgcctcgcgctagccgcccacggtgcctgttgtctgcaccgatgccgggaacaccgcaacgacgacggtgaagacgaggagaacacaggcgacggtggccatggcaactatggatctagcacggggtggccagcaaggcggaaagtggcgatgggtgaacggcagcaagcaagataaaggccagagacnaccccatattgagtcccccagtagcagcaagcctaagtaaatcgatcttggatgg

SEQ ID NO: 58387 - DNA, 504 bp, Oryza sativa
  Clone ID: PAT_MRT4530_60107C.1
atggagagggaggggtggagtgggcatccttatccactccactcacctcctctctctctcgacaacgtcggcaagcgagcggcgccctccctcaccgtgagcgacggcgccctccccacccctccgcttccgtcttctctactcctcctcccatcctccatcctgagcgtgtcctctccatcaagctctacggcgtcgtcgttggtctccgtggcggcgtcgagcccgctggtgtcgccgaatgcgaagccccgcgtgcagccgaagctcccgccgaagacgaagctgaccaccatcacctttagcccccaccacaagcgtgactaccaggtcacctgcaccaacaccggctgccgcccctgcgtcgtctcctgcccttccaactgccccaacatgtgcctcgtcgcttgcgcctactgcctcaccttctgcccgcctcgcgctagccgcccacggtgcctgttgtctgcaccgatgccgggaacaccgcaacgacgacggtga

SEQ ID NO: 58388 - DNA, 192 bp, Oryza sativa
  Clone ID: PAT_MRT4530_60108C.1
gagtagtaattgagtatattgccatggctgtgttctttgatgaaggacatagaagcttttgagcattgaaatgttgtgtatccaactcaaacatacaaaaaccatacatatgtttgggttaacttatgttaatcgtcaatctcctcccagggaaaaattgaagatcttggtcgcatcgatttaggcacttat

SEQ ID NO: 58389 - DNA, 393 bp, Oryza sativa
  Clone ID: PAT_MRT4530_60109C.1
atggcagggccatggcccctcctccggtcgttcctgaggaactgcgtcgccggaaccctcgtcgtcgtcaccgtcaacgaccggtacgcctccgtcatcaccgtgcgtggcacctccatgaaccccaccttggagtcccaacaaggtgaccgcgcgctggtgagccggctctgcctcgacgcccgctacggattgtcccgcggcgacgtcgtcgtcttccggtcgccgacggagcaccggagcttgttggtgaagaggttgatcgcgttgcccggcgactggatccaggtgccggcggctcaggagatccggcagatacccgtggggcactgctgggtggaaggggataatcctgacgtcagctgggactcgcgaagctatggccctgaatga

SEQ ID NO: 58390 - DNA, 348 bp, Oryza sativa
  Clone ID: PAT_MRT4530_6010C.1
atgccccacgccggagcttgtcgccggcgccgtctctatcaccacgtaggatcctccgccgtccatgtgaccattccccacgccgtagcttgccggcggccgcgtcctctatgccggagctcgtcgccggcgtccgcgtcctccacgccggagctcaacggcggtggccacgtctgcgccgccaacgtcaacctcggggaggggagggggcgcgcgccgctgccgctgtcaccagcggccaccgccgccgccgctgtcgccaaccgtcgcccccttcgcctgccgccgcgcaccgtgctgtcgctgtggaggggagggaaagggagggaggggcgcgctatgcaatga

SEQ ID NO: 58391 - DNA, 750 bp, Oryza sativa
  Clone ID: PAT_MRT4530_60110C.1
ttacgtattctccttttgccccgaataattaggatgttgtatactatatcgtccaaatactcattttccgagccgagccggccgcctccccgacccccgacgccacctctccccctctccctctccccactagcgccgctttccctcccatcccctccggcggcgccgctccctctccccctccccccagccagccgcctcccctgccaccggcgtcgtctctcccaccaccggcgtcgtctctccccctccaacaccactaatccctaattccgtcctctccctcccactaccctcagccgccaccaaccagtccatcgtcgcatcctccggcctcaccggcgccgccggccgccggccgccacctccctcccctgcactgtcggccgccatctccctaccctgcgccaccggccaccgccgccgaaggccgccacctccctcccctgcgccgccggccgtcgcctccctaccctgcgccaccggccaccgccgccgaaggccgccacctccctctcctacgccgccggccgccgccttccttcactgcgccgtcggccgccgcctccctccctattcctagaggccacgccgctcgacgccctctgtgccgccggcccgcttcctcctcccccgccgccgccggcgctcgcgcgagcgggcgcccccacgcccacgccgccgcgcgcgagtccgcattccgccgctggatcaaatcaagcatctcctgcaatgcagtttgaaaacgaa

SEQ ID NO: 58392 - DNA, 443 bp, Oryza sativa
  Clone ID: PAT_MRT4530_60111C.1
gctcctcctcccttcgccagatccgatcgctgcacggcagctgccaccaaatcggaaggcagcgtggggcttgtattgaggagacagtcagcggcaccggcagaaaggagagagagagagaggcagtggaggacatgcggcgacgcacggcggtgtcggggccaggacaggcgtcggaggatggagcggcgctgcagggcattggtggggcggggagaggcggcgcgaggagggtgaggcgacgcaccggcacgggggctagggtttcagggaggatgggccgaaggggccgttgctgcgagggatcggacggcgctggagccgctcgcgcggacgctcgagggggcgcggaatccgcccgcctcccagcgctcgcgagcgacgtggatagctccgcgtgcgaacacgccgccccgaatcgctctccgctcgccaattcaggg

SEQ ID NO: 58393 - DNA, 139 bp, Oryza sativa
  Clone ID: PAT_MRT4530_60112C.1
gcacgaggatgaaaccatgcaaaactcaattatttttggactcaaatttcataagtatcaatttgtgttgattttaataattatattgcatcttatttgcacatattcagtatgcgcgaggcctatttaggcctggtct

SEQ ID NO: 58394 - DNA, 269 bp, Oryza sativa
  unsure (1)..(269): unsure at all n locations
  Clone ID: PAT_MRT4530_60113C.1
gccgttacnaagcttctcaagtgacaattgaaatatctaagatgatcaagtccaggaagaagaaatttgagaaaatgcttttcgagaggctttcagtgagtgctaatatcaacttcactacggatctaacaggcagtgctgatgttgatattggagtatctacaagtgaccggttggctgattgggatcaacatcttaaccatgacattcagatgacggctgaaatatgttctgagtatgatggatatatgtataagccctcgaagtga

SEQ ID NO: 58395 - DNA, 794 bp, Oryza sativa
  unsure (1)..(794): unsure at all n locations
  Clone ID: PAT_MRT4530_60114C.1
atggggaattgccaggcggcggaggtggcggcggtggtgatccagcacccgggcggcaaggtggagcggctttactggccggccaccgcggcggacgtcatgcgcagcaacccaggccactacgtcgccctcgtgttgctccgtgtctccgcctcctcgtccggtggtggcggtggcggcaaggccgaacactccgccgtcggagcggccgtcggcgacgagtccggaggggcggcggcgaagatcaccaagatcaagctgctcaagcccaaggagacgctgctcctcggcaaggtctaccgcctcgtcacctcccaagaggtgaccaaggcgctgcaggcgaggcggcaggagaagatgcggcggtgcaaggaggtcaccgaccaccaccaccggcaaccgcagaccggcgactccgccgccgccggagaagaacagaggcgaccctccgatcaccaggagcggaagccggcggagaaagaccggcaccggagcagcggcggcggcggcggcggcagagggcggaattggcggccgtcgctgcagagcatctcggagtcggcgagctgacatcgtacggccaggattaaactacgattagtacaggagggttttggtttggaaattgnnggaggtagaaatcagaaatgtaaattaggtgaagagttctcggttaggtcaagcgtagctgctggcttgcacagtgaagaactcgcagcttcagaattttcagagtagttttgcaacgaacagcacaggggttgttaactaaaaaaaaaaaaaaaaaagcggcc

SEQ ID NO: 58396 - DNA, 4002 bp, Oryza sativa
  Clone ID: PAT_MRT4530_60115C.1
cttccgcccccgcctcgtaccctcatcgccacgagcaacgttgcgccccaggcccccgaaaagttctctctggttgcgtcgctcctccaccatcttactcccgtcccccgtgctaataaaacgggcccagacgttgcagagtatgacatgtaccccgtgaggcggcggcatcggcaggtattcataaggctgcatggtagttggctagcggataatgccctggggatgtgatataggaagaaatgcggatggggcattaccagcgacctgtcgacaccgccgcattcctcgacttcatcaaggacaagtaggccgctctctactttttgcttatcttcgggtgagaataattctagcaaagattgatagaacaattccgacagatactagaggaaggatcacggccagaaattgttcaatattatgcgatggtgaaatattagagaatctctatccgtaatgctatgagcgttttccatactatcctggggaaggttgagagagcacaacagaaggaagtccatttcaaagaagcaactcaatgctacaatagggcatcaaggatagatgaaactgaaccttcaacatggatcggaagaggtcaactctgtgtggtcaagcacgatttgcaaatggcatctgattcattcaagattgtattggatgaagatggaagcaattttccagctttacttggtcaggcctctgtttatttcctgatgggtgactcagagcagcaacacaagaaagctctggactattataggaactcactggatctctataagagagccctgcgggcctataccagctgtcctgctgctgtaaggcttggtatagcattttgccgatacaaacttggtcagtcagataaagctcgacaagcttttcaacgcgttctgcagttggaccctgaaaatattgatgctttagtagcactggcaatcatggacttgcaaacaaatgaagctggtggaattcgcagaggaatggagaaaatgagaagagcttttgaaatttgaagaagacgaatatagagatgaaccagaagcagaagatgattatgcaaacatcggcgaggagtaacgatggaacaactgacggagactgctctggtcaccttcttgctgctgcaggtcttgaagattctgatgctgaagaagatgacatgggacaccctcaatgtgccatagaacgcaagagacgagccttatatggcatctgacaatgaaatgagtgtgcagaggccagtgcaacctaccgcaggcgagaacgatctgagtgattgaattagacggtgaagcaaaagttcattagctagctttgagaaagtgttggaggtgcacccaggctcctgggatgcggaatcaactatagggcgtgctcatatgcacttgtggataattcgatgttgaaatggagctcacacgaaggtttgaaccagaggtgtaaaaaaaatttatctagggagcagagcagtcactgatattcaacaattaatctcgcgtcattctagacatgccatgggttggtggagctaacataaggcaatttgtaatttatgtctagtttacgcttaatcagccagacttttgtcctgtgagcttctaacgctagagcttgagatggctgaacaaagttttaaggaagcacttggagatggcttttgggtttcaattatagatggcagtgtaggtagctccgtggttaactggagtattcagtatagggaccagagtttttttcaacaacttgaagaagagggaacacctcttgaattaccttgggataaggtcactacattgtttaactatgcaagattgtttgaagagctccatgatactgtgaaagccagtctcttttaccgcctcattattttcaagtatccagactacattgatacttatcttaggttagcagctattgcaaaagaaaaaaacaatctccaactgagcattgagctgataggtgatgctctaaagatagatgataagtatccaaatgcactttctatgcttggaagtcttgaactccaaggtgatgaaacctggcttactgcaaaggagcatttccgtgaagctaaagatgcttctgagggaaaagacacatactctatgcttcaattggggaactggaattactttgctgctaatcgccctgagaaaaaggccccaaaatttgaggccactcatagggagaaagccaaggaactgtattcaaatgtactaaagcagcaccatggtaatatgtttgctgcaaatggtattgggatcttatatgctgagaaagcccaatgggatattgccaaggagttatttacacaggtacatgaagctgcttcaggaagtatatttgtccagatgcctgatgtttggataaatttggctcatatatattttgctcaaggtttttttcagcaagctgtgaaaatgtaccaaaactgcctgcggaagttcttctacaacacagatgcaactatacttctatatcttgcccggacacactatgaagctgaacaatggcaagactgcaggaaaacattgctgagagctattcatttggctccatcaaattatttattgcgattcaatgtaggtgtttcgatgcagaaattctcagcttcaactctacagaagacaaaacgaacagttgatgaagttcgtgcgacggtctctgagcttcagaatgctattagagtattcagtctattgtctgttgcatctacataccattcccatggttttgatgagagaaaaatagaaactcatattgagtactgcaaacatttgcttgatgctgctaaggttcatcgtgatgcagctgagcaggctgagcagcagaataagcaaaaaatggaagttgctcgacaaattgctttggctgatgaagctcgccgcaaggctgaagaacagaggaaggcccagttagaaagaaggaagcaagaggacgagctaaagcaagtaatgcaacaggagcaacactttgagcgtgtcaaggagcaatggaaaacctcaagtaacactcctggcaagagaaaagataggtctaagcatgaagatgaagaggggggaggtgaaaagaggaggaagaagggtggtaggagaaggaaggatcagaagacaaaggcacactatggggaagaggaagaagacgaatatagagatgaaccagaagcagaagatgattatgcaaacacggcgaggagtaacgatggtggcgattcagagaaagccccaggtcaccttcttgctgctgcaggtcttgaagattctgatgctgaagaagatgacatgggacaccctcaatctgccatagaacggaagagacgagcctggtcagaatctgaggatgatgagccagtgcagaggccagtgcaacctagcgcaggcgagaacgatctgagtgattgaattagacggtgaagattatggccgaatttgggatcacttcatatatttgtgacgaagaatggctcctgggatgcggaatcaactatagggcgtgctcatatgcacttgtggataattcgatgttgaaatggagctcagacagatggttgaaccagaagtgttaaaaaaatttatctgggagcagagcagtcactgatattcaacaattaatctcgcgtcattctagacatgccatgggttggtggagctaacataaggcaatttgtaatttatgtctagtttacgcttaatcagccagacttttgtcctgtgagcttctaacgctgtaccaattttagctcacttacatctcaggatagctgatctcctactttgttctttgctgctaggcaagcgtgccaagaaaagatttccaaaagtagctgatctcctactttgcacctaatttttcagacacttcggtttggcaggcaactgtacgtgctcattggcattcgctaatatcgccctgctctcgtccaaacaaagtaatggatatatagatctaaagtaacggattttttcacgatttgttaaaaaaaaaaaaaaaaaa

SEQ ID NO: 58397 - DNA, 3063 bp, Oryza sativa
  Clone ID: PAT_MRT4530_60116C.1
atggctagcgtatacatcccggtgcaggggacggaggaggaggtgcgggtggcgctggaccagctccccgccgacgcctccgacatcctcgacatcctcaaggccgagcaggccccgctccacctctggctcatcatcgcgagagaatacttcaagcaaggaaagatagaacagttccgacagattctagaggaaggatcagggccagaaattgatgaatattatgctgatgtgaaatatgagagaatagctatccttaatgctttgggcgctttccatactttcctggggaaggttgagagagcacaacagaaggaagtccatttcaaagaagcaactcaatgctacaatagggcatcaaggatagatgaaactgaaccttcaacatggatcggaagaggtcaactctgtgtggtcaagcacgatttgcaaatggcatctgattcattcaagattgtattggatgaagatggaagcaattttccagctttacttggtcaggcctctgtttatttcctgatgggtgactcagagcagcaacacaagaaagctctggactattataggaactcactggatctctataagttggaccctgaaaatattgatgctttagtagcactggcaatcatggacttgcaaacaaatgaagctggtggaattcgcagaggaatggagaaaatgagaagagcttttgaaatttatccttattgcacattggcactcaaccacctagcaaaccattatttctttactggccagcattttgtggttgaacaactgacggagactgctctctcttcaagtaatcatggactgctgaaatcacatgctttctataacttagccagatcgtaccacagtaagggtgatattgagactgctggaaggtattatatggcatctgtcaatgaaatcagtaagccacaggactttgtgttgccattctttggacttggtcagatacaattaaaatttgcagactacaaaagttcattagctagctttgagaaagtgttggaggtgcacccagaaaattgtgaaagtttaaaggctattgggcacatatatgcaaagtcaggtgagaatgacaaagctatagaaaccttcaagaaggttacccggattgatccaaaagatcatcaggcatttatggagctaggtgaattattggtacaatctgattgggctactgctatggaatacttaaaaacagtaaggctattcacttcgctagaagtttattctgttagcctgtatcagattctaccttggatcagttcacaggctcggaatctcctaaagaaggcaggagagaaaatacccattgaattgctcaatggaattggactacttcattttgagaagggagagcttgagatggctgaacaaagttttaaggaagcacttggagatggcttttgggtttcaattatagatggcagtgtaggtagctccgtggttaactggagtattcagtatagggaccagagtttttttcaacaacttgaagaagagggaacacctcttgaattaccttgggataaggtcactacattgtttaactatgcaagattgtttgaagagctccatgatactgtgaaagccagtctcttttaccgcctcattattttcaagtatccagactacattgatacttatcttaggttagcagctattgcaaaagaaaaaaacaatctccaactgagcattgagctgataggtgatgctctaaagatagatgataagtatccaaatgcactttctatgcttggaagtcttgaactccaaggtgatgaaacctggcttactgcaaaggagcatttccgtgaagctaaagatgcttctgagggaaaagacacatactctatgcttcaattggggaactggaattactttgctgctaatcgccctgagaaaaaggccccaaaatttgaggccactcatagggagaaagccaaggaactgtattcaaataattggtgtagtcaatttatgatgatgtccaaagacatcatctacaatatgtttctgggattcaagaaaatggtactaaagcagcaccatggtaatatgtttgctgcaaatggtattgggatcttatatgctgagaaagcccaatgggatattgccaaggagttatttacacagtaccaaaactgcctgcggaagttcttctacaacacagatgcaactatacttctatatcttgcccggacacactatgaagctgaacaatggcaagactgcaggaaaacattgctgagagctattcatttggctccatcaaattatttattgcgattcaatgttcgtgcgacggtctctgagcttcagaatgctattagagtattcagtctattgtctgttgcatctacataccattcccatggttttgatgagagaaaaatagaaactcatattgagtactgcaaacatttgcttgatgctgctaaggttcatcgtgatgcagctgagcaggctgagcagcagaataagcaaaaaatggaagttgctcgacaaattgctttggctgatgaagctcgccgcaaggctgaagaacagaggaaggcccagttagaaagaaggaagcaagaggacgagctaaagcaagtaatgcaacaggagcaacactttgagcgtgtcaaggagcaatggaaaacctcaagtaacactcctggcaagagaaaagataggtctaagcatgaagatgaagaggggggaggtgaaaagaggaggaagaagggtggtaggagaaggaaggatcagaagacaaaggcacactatggggaagaggaagaagacgaatatagagatgaaccagaagcagaagatgattatgcaaacacggcgaggagtaacgatggtggcgattcagagaaagccccaggtcaccttcttgctgctgcaggtcttgaagattctgatgctgaagaagatgacatgggacaccctcaatctgccatagaacggaagagacgagcctggtcagaatctgaggatgatgagccagtgcagaggccagtgcaacctagcgcaggcgagaacgatctgagtgattga

SEQ ID NO: 58398 - DNA, 470 bp, Oryza sativa
  Clone ID: PAT_MRT4530_60117C.1
cccactcgtccgattcttttccaatccctttacgctggtatggtgtaccctttcttttgttgtgaattgatgtattgtaattacacaaattaaacaaaaaataaaaaaacaatgctaaaatgcaaaattctcagaaaatgcagcactaatattggtttcagagcttgcgagtcgggcaggctgcttttatttcggtattatacaagcagctctcgcagctgtcggtgcaccccctcatctggtgcatattataactggttctgcggtagcaggtcaagctcttggctcttcagccgacatagtatgtttgttggactccctggcgttggaaggatgatcatggacaggccctccctacattcatacctgtcgctcttggacttggtggcgcagatgcatcccttgtctgtggagatgtcgactcaccccgcggcgttcacgctgctctgtgagctgccctgcaatctagc

SEQ ID NO: 58399 - DNA, 423 bp, Oryza sativa
  unsure (1)..(423): unsure at all n locations
  Clone ID: PAT_MRT4530_60118C.1
atgggnaaccttcaagttacactcttggccaagagaaaagataggtctaagcatgaagatgaagagggggaggtgaaaagaggagnaagaagggtggtagnagaaggaaggatcagaagncaagggcacactatggggaagaggaagaagcggaatatagagatgacccagaagcagaagatgattatgcaaacncggcgaggagtancgatggtggcgattcagagaaagccccaggtcaccttcttgctgctgcaggtcttgaagattctgagaaagccccaggtcaccttcttgctgctgcagggacaccctcaatctgccatagaacggaagagacgagcctggtcagaatctgaggatgatgagccagtgcagaggccagtgcaacctagcgcaggcgagaacgatctgagtgattga

SEQ ID NO: 58400 - DNA, 389 bp, Oryza sativa
  Clone ID: PAT_MRT4530_60119C.1
cacgagggagagagagagaactagtctcgagtttttttttttttttttttgtacttacttacaagctggagtagctgctgaatttcaactttgtgcatagaactaactaattacacatgctgattattcataagtctgtactattacactgcatagctactactcattgatccagaagaaaaaaaaaaaaaaatgttgctaattaatacacaggcttggtgctgaagctgccatgggtgcaagaggaggagtcggcggcggcagcggcggcgggctgactcttcttcctgtgcctgtgcttggcgaggagcagcgcgtacacgacgaaccccaggttcctcctcctggggtggaactgcctgcgcgaagcgccgccgtgatcgatcctc

SEQ ID NO: 58401 - DNA, 457 bp, Oryza sativa
  Clone ID: PAT_MRT4530_6011C.1
aaacacggatataaacagagccacaaaaggcatcggatttccctatctacagtcacgaccggaattaaaccaacaggcattccattcgtgcgtatattattccttgtcccaggaggcaagactgagccacaaactaagccttacccactagacatgtggaagtacggtagttctttgcaacagaggcccgaagaccggtccttatggtggccgaggtgctactatcaaaaccatgcacctcgagcccagcctaaaaccattttgagggttttgaatagagggggagatgatgtgacttgccttgctcgctttcccaaatgtcggcttcaacctccacgtagagcggatcttccgaagctgcagcgtctacacgaccaacgggaagaaaaaggcttttactctaataaactccatataaaaagcaggaacaaagcacaaaaatgggttcttgacttct

SEQ ID NO: 58402 - DNA, 1368 bp, Oryza sativa
  Clone ID: PAT_MRT4530_60120C.1
atggccatcttaagagaatttggaacgatagagggcatggaaaacctgctacctgaagatgtgctcagcaacatcatccaccgtcttgcaccacgctaccttgccatatcccgctgcgtctgcaagacctggtgtaccatcatcgaggcccacaacctgctgcatgtggacctcctcccacggccgttgtgtggaatcttcattaactttaatgagttaagcatgtcagagttcttctcccgcccctcaaaaggcccaacggtatctggcaactttgactatttgccttgcagctcctgcattatagaccactgcaatgggcttctcttgtttcacaagtatgtggttaacccagccacacgacagtcggcgccactgcccccatgcccatatatggtcgtagagcacattttccacagggagtaccttgtcttcgaccccacgttgtcaccgcattttgaggtattcatgatccctgagatccgacgatccaatgtgtggtataacatgttgaattcagatgacaagttagaccctgcaatagaggaattagaatggccaccgtcgccttgcatcctgcatgtgttctcatcaaggacaaaggtgtgggaggagaggtcatttgttcgagaaggggaggctgcagggaatgtttctgacatgcggttggatcacccatatgttccagacacttctgtttatgttccagacacttctgtttattgccggggagtactttatgtatattgccaaaacaagtatgttatgagaatatcattatccaatgggaaatatcaagtaatcaagccaccttcagattgtgaggggatggcatacacaaatctttatttgggaaaatcaatgaaaggggagcggggatttgagtatgaagacggtaacaatgaggcagtggtagaggacaggtttgaatgggactcagacaatgataatgttattgagaccaacagcaggggatctggtggttatattaattttcttgttgacactacaaggaggggcagatataactctggtggttatattgattttcttggatttcacccttacaaggaggttatcttcttgagtgattcgttgagaagaggattggcctaccacttaaatagctcaaagattcaagacttgggcagcctccgtccaacaaattatggaacagagaccaaaagggtgaaatgggagccccttcgccacgccatgcccttcgccacaataccaaaaaggtatggcgtcaagggctgggggcgaaaaggggggcttcgaagccaacctagtctctggacacctttcaccatccccaagcccttcgccaaaataccaatgaagtacggcgtcaagggctgggggtga

SEQ ID NO: 58403 - DNA, 458 bp, Oryza sativa
  Clone ID: PAT_MRT4530_60121C.1
ctcttttttttttttggttgatgaacatcacggggtgccaagcataacttgtctttttttttttcgtctcaagtatctagttgccgaaaacgttcgatatcgcaaaaaactatggaccgcatttgcctaagccctttgaaggctcgaacccatgctttttcacaaacaatgtaagaacctataggctacagcaacaatcggggggccacaaccatggttaactgggtacttcaggaaaccaaaagttcacccataaatggagggaggttaagtgccagaatttcccttgaaagggacttagataactgtgctggtatcgaaactggaatccatgtatattcattctatactcaaccgtgagcttacaggtacacatctttaccaggcaccacttcacaggatcgggttggtcagattggaatttttacccagtatacattgaacgagttctttatgag

SEQ ID NO: 58404 - DNA, 1425 bp, Oryza sativa
  Clone ID: PAT_MRT4530_60122C.1
atggccatcttaagagaatttggaacgatagagggcatggaaaacctgctacctgaagatgtgctcagcaacatcatccaccgtcttgcaccacgctaccttgccatatcccgctgcgtctgcaagacctggtgtaccatcatcgaggcccacaacctgctgcatgtggacctcctcccacggccgttgtgtggaatcttcattaactttaatgagttaagcatgtcagagttcttctcccgcccctcaaaaggcccaacggtatctggcaactttgactatttgccttgcagctcctgcattatagaccactgcaatgggcttctcttgtttcacaagtatgtggttaacccagccacacgacagtcggcgccactgcccccatgcccatatatggtcgtagagcacattttccacagggagtaccttgtcttcgaccccacgttgtcaccgcattttgaggtattcatgatccctgagatccgacgatccaatgtgtggtataacatgttgaattcagatgacaagttagaccctgcaatagaggaattagaatggccaccgtcgccttgcatcctgcatgtgttctcatcaaggacaaaggtgtgggaggagaggtcatttgttcgagaaggggaggctgcagggaatgtttctgacatgcggttggatcacccatatgttccagacacttctgtttatgttccagacacttctgtttattgccggggagtactttatgtatattgccaaaacaagtatgttatgagaatatcattatccaatgggaaatatcaagtaatcaagccaccttcagattgtgaggggatggcatacacaaatctttatttgggaaaatcaatgaaagggccatgtcaaataattgacgggcctggaccctggactttacaagatattaacaatcaggagcggggatttgagtatgaagacggtaacaatgaggcagtggtagaggacaggtttgaatgggactcagacaatgataatgttattgagaccaacagcaggggatctggtggttatattaattttcttgttgacactacaaggaggggcagatataactctggtggttatattgattttcttggatttcacccttacaaggaggttatcttcttgagtgattcgttgagaagaggattggcctaccacttaaatagctcaaagattcaagacttgggcagcctccgtccaacaaattatggaacagagaccaaaagggtgaaatgggagccccttcgccacgccatgcccttcgccacaataccaaaaaggtatggcgtcaagggctgggggcgaaaaggggggcttcgaagccaacctagtctctggacacctttcaccatccccaagcccttcgccaaaataccaatgaagtacggcgtcaagggctgggggtga

SEQ ID NO: 58405 - DNA, 957 bp, Oryza sativa
  Clone ID: PAT_MRT4530_60123C.1
atgacgcgagacccaccgctgatcaccggcgacgccctggcgctacacccgatcgacgtctgccaccgaagcctcctccatgggacgccgccaccacctccgccgagcaccggccgcaagaggcagcgggaggacgagttcgtcccgtcggtgacggagctggagcaggcgggcgtccacttcagccgcagcccaacgcggagcctccgcgacatcagcttccggcccggcgacgacgtgcggctgctcagcggcggcgtggtgtcaaatgggctgggcagcgacaaggcggtggcgaggatgttcaaccggctggcgaaaaacgcagtgctggaccggcggagcccgctgcgcggcgtgcaggggcaggtgaacgaccaccgggagaacgcgtggaacgagtggtgggccacggccggagctgagggcggagcagctacgggccgcgggaagctcctctcctccagccgagataaaaattaggcccctccgttcatggccgcgacttctcccccgccggccggccgctccgtccctctgctccggccacgatgcaccgccggtcctcttctccacgggcgccgaccagccgctccgcccacaagttgtgggccacaacacgccgccgctccggccaccgacccgccgctgcccgcctcgcttcgcctctcgcctccgccctctgctctgccgctgctccagccgccgcccaccccgctccgccgttatactaggatcatcaacatcgaccttgcatttgttggtaggggccagagcagcggcggcggcggatgggggctggagcggcggcagtggcccaccgggacccactgggagaccgccatgaagcacgtcgcagagcgcggcggtggcagccgcgacagcagcgcggcggcggcaggggagctcgagggagtagggcggtggagcagtagcgcgacagtagggcgacggtag

SEQ ID NO: 58406 - DNA, 1080 bp, Oryza sativa
  Clone ID: PAT_MRT4530_60124C.1
cgagcgggcccactcggcagcgactcaagggggggacggttcaccgtggaccgggaccacgcgggtggtccaccgccggtccacgggaccgacggcccagatcgcccccggggttgatcggacgggcggcggcgacccggctcggcttggctcaaggctggcccgccagccaaggcgatggcgacggtgtgcgcgtgcgaacgcgttgccggcgacggcaactggcggcggaggcgacggcgcaaaggcgacgcgaaggcggtggctctaagcgggggctaggaaggagagggaggggaatagatgggggaggaagcctcaccgaaggtgctcggcgcgtacgaagactacggctaactgcgacggcaagccacgggatgacgacggcatccgacggacgggcttcggtgtgccctagggaacggtgagagagagagattatagagagggagatgaacctctgcgaccggcattcatggcggtagaggttgaactcaccggagcgcgagggaatgcgaattccggcgacgaaactcgacggggaaggggcggccggggtggagcttagcctcgcgaacccgacggcagcgacggcgcggtgcggcggcgagcctagcggcggccggagtgacgggaaaggcggcggcgggtggatgcacggtgcgggagtgatggagagctcgggagagttcggcgaaatgggggaaaaagggagagagggggccggacgtggccgggagaggcgggaatcgccggccaacgtggagaagtgggggaggagagagaggcgggattcgaaaatcgaatcccggccatctcgggcgcgggcgcgggcgggagagagaggggagtgggcgcgagggatgcggcgcacgcgcgggcgtggccgacgtggcccggaggaggcggaggcatgggcgtggcgggggttgcgggcgcggcggcgcggcgcgaggtgggagacgggtccgacaggtgggccccacctgtcggtgacctcgggagagaggagggggcacgggctgagctggggcgtggcctccggccggcccagcaaggcgcgaggagagaggaggggaa

SEQ ID NO: 58407 - DNA, 325 bp, Oryza sativa
  Clone ID: PAT_MRT4530_60125C.1
cccccccaaaaaaaatggggccccaaaaaaaatttttttttgggggtctaaaaaccccccggtctttttggggggggaatttttaataggggcgcccttaacccaccgggggttcgccccaagggcatcttttcaacggggggccccccttgggtccaaatattaaaccccttgggaaaccattttttcccccaaaaattttaaaaaaaaccccccaaccccttttttgggggggaatttttgagaaacctaatttggggggcccccgttgaaaaaagggtttttgggggaaaacacaggtgggtccccccccggggaaattttt

SEQ ID NO: 58408 - DNA, 195 bp, Oryza sativa
  Clone ID: PAT_MRT4530_60126C.1
atgccgccgggcgccggccagatgtggctagatgtggccgggcgtcggcgtcccatccctgagtgcaggaccggcggccgctgcagccacctcgtcaagtccatcggcaagccgaggcccggcaggaacgtcggcgagataggggatgccaaatccagcctctccaacaccagatccggctcctccaagggctag

SEQ ID NO: 58409 - DNA, 609 bp, Oryza sativa
  Clone ID: PAT_MRT4530_60127C.1
atgcaggtggggcccacctgtcgggtccttcccccacctcccgccgatcccgctcgcgtcgccgccgccgcaaccgacgccgcgcccacgcctccgcctctcccgggccacgtcggccacgcccgcgcgtgcgccgcaatccccgcgcccgttcccctccctctcccgctcgcgcccgcgcccgagatggccgggattcgaaaaccgaatcccgcctctctctcctccccactcccccacgtcggccgtcaaatcccgccgatcccggccacgtccggtttccccatcccctttttaagcgtcgccggcaccccctctcgctttttccccattgcgccgacccctcccgagctcccgatcgcctccgcgccgtgcaaccacccgccgccgccgcctttgccgcttcggccgccgctagccgccgctaggctcgtcgccgtctcgcgccgtcgcgccgttagcttcgcggggtcgagatctacctcggccgccctttccccgtcgaggttcgccgccggagacccatccccgtcgtgtgccggcaagtggcgccatggccgccgccttcggccggcgctctcgcccccacgctctttcctctctcactaa

SEQ ID NO: 58410 - DNA, 1293 bp, Oryza sativa
  Clone ID: PAT_MRT4530_60128C.1
atgcgtcggctagaggaaagctacgctacaagcccagccgttgcccacgctggcttgtgggctgacgtcagcacggagggggtgcggcgccgacatgcgggcctcactggtcagcgactcaagggtggccggtctaccgtggaccgggaccacgcgggtgatccaccgccgatccacgggatcgacggcccggatcggcctggggccgatcggacggtgcggcggcggtcaggctaggctcggctcggcacaaagccggccgaccggtcacggcgacggcgcgcgcacgcgcacgcgcgttgccgacgacagcaaccgacggcggagacggcggcgcaaaggcggcgccgaagggcgcggcggctaggagggagagggaggggaaaagaggggagggggtgcctcaccgagggtggccggcgcggaggaagacgatggcgaacagcgacggcaagccacgggaggacgacgtcggcgggcggacgagcttcggggtgccctaaggaaggagaagagagggattagagagagggagatggaccacggcgaccggaaaccatggccaaaggcggcggtggaggtggtgctcacccgagtgcgagggaacgagggctccggcgacgaacctcgacggaggagaggtggacggggtggatctcggccacgcgaacccgacggcggcgacggcgcggcctggcggcgaccctaacggcggccggagtagcggaaaaggcggcagcaaggggttgcacggcgcgggagcgatgggaggctcgagagagtgcggcgaaatgggaaaaaagtgagaggggacgacggcgatgcttaaatagggggagagggaaccggacgtggccgggagaggcgggaatcgccggccgacgtggggagtgggggaggagagagaggcgggattcgaaaatcgaatcctggccatctcgggcgcgggcgcgagcgggagagagaggggagtgggcgcgggagacgcggcgcacgcgcgggcgtggtcgacgtggcccggggaaggcggggacgtgggcgcggcggcggttttggcgcggcggcgcgagcgcgagatcggcgggaggagggagacgggcccgacaggtgggccccacctgtcggcgaccccgagagaggaggcggcgggctgcctggctgggcctcggcctgcggccggcccagtaagggggagggaaggaaggagggaatgggccggcggcccattcgaaagaaaggaggaaaaagagaggaaaaagaaaaagaaaaaggaaaaaggattttccctggaat

SEQ ID NO: 58411 - DNA, 1365 bp, Oryza sativa
  Clone ID: PAT_MRT4530_60129C.1
atgtgcattaaaatccccgtccaggaccagccggggtacacaaacgacaatcgggaacaccactccacaggcatcctcgacggcacggacgaagcctactcctcagagaaaccttcatctgacccgaactcgaactctggggttgggaaaagcccaaccatccacctaaactatccaaattcaagagattacactagggtgaatccggaagcgacagaggccgtcgcagggcccgccccgctccatcacgcccacccttgcctggatgcgtcgactagaggaaagctacactacaagcccagccgttgcccacgctggcttgtgggctgacgtcagcgagggggcgcggctcggcgccgacaggcggggcccaccggtcagcgaccgggagagagaggaagggggtggcggcgcgcgggcccaccggtcagcggcacggggaaaggaggggcggcggcgccaccgcgggacctcgcggccggggcgcgcgggcgcggcgcgagacagcggcgaccatggcgccggcggcgcggcgctcacacggcggcggcgcacacgcggcagcggcgcaaagcaacgaccgacggcgatcgtccggcggcggagagcggcggctagcggctctaggaggagaggaaggggaaaaggagggaggggatgcctcaccgagggtggccggcgcggaggaaggcgatggcggacggcgacggcaagccacgggaggacggcgtcggctagcggacgagctccggcgtgccctaaggaaggagaagagagggattagagagagagagatggaccatggcgatcgggatccatggccgaaggcggcggtagaggtgacgctcacccgtgcacgtggggagggggttccggcgacgaacctcgacggaggaggggtggacgaggaaccggacgtggccgggagcggcgggattcgacggccgacgtgggggagtggggaggagagagaggcgggattcggttttcgaatcccggccatctcgggcgcgggcgcgagtgggagagagaggggaacgggcgcggggaatgcggcgcacgcgcgggcgtggtcgacgtggcccggggaaggcggagacgtgggcgcggcgtcggttgcggcggcggcggcacgagcgggatcggcgggaggagggagacgggtccgacaggtgggccccacctgtcggcgaccccgagaggaggcgggcgggcggccggctgtcgggctgggcctcggcctgcgccggcccaacagagaggagggggaggaaaaagagaaatgggccgacggcccattggacaaaaaggagggaaaaaaggggaaaaaggaaaaagaaaaagaaaaaggattttccctggaat

SEQ ID NO: 58412 - DNA, 3644 bp, Oryza sativa
  unsure (1)..(3644): unsure at all n locations
  Clone ID: PAT_MRT4530_6012C.1
gtccccgggctgcaggtaccggcgctctttttttttttttttagtactagaagtattaacatttcacacatcaaaacttacacaggaactacagtttgcagcacagagatttactgaaaggaaaacgaaattgcatccgataaagcaaggttcagataatgctacagaacattacatagacaaaagtaaccatatccctaacctgacttacaactgctgaacaactagggtatgtggctactaacatctgcaataacagcaggaaggaatactaccatgcacctaagtcacagaacatctacaacaactttcctcattcactacctcttcttttttcttcgttttcgcccctcttttttttttgtttttggatttttcttctgccgcagcacgctggaaggggaacaaacactccagggtgtctagcaaccgccgtctaaacacaagggcgtaagacgcaatatgtacaacaggtcactcagcacagcaggtcaatgttgggagcctgtgccagtaagcatggtcatcttgtaagaccatcaggggagcagctgtttacacccatcacgagcgtcttcttcatgccaattacttgctgcttcttcttgtcacccttggacctgatcaccctgtccttcccggtggccttccagtacccggcctccgtcgccctgttcgacctgctcccattgggatacttcctatccttcggcgcgaagaagaaccactccggatcatcggagcggatcagagacttatcagggagatcccacggctcgcacttgcagacatcgatctcggggatgacatcggcctcgctcctgatctgccccgtgatcttccccttgaggtagtgcctgacgagctcctcgtcggtggggtggaacctgaacccgagcggcagcttcttgagctccatcaccgtcatctccgccctctcatccacctcccccaacctctctctcactctcaagatccgattcgcggtcgccgggagggatatacttagcggcaaaggaagcgtggggtggtggagtgaggcgatttggggggggctagggtttggtcggaattggggattttaggggaggagaagaggagagccataaatcccaagggagataagcaggaccagagccacagagagaaccagccaaatgatgtacgatgggaatcccctcttattccctggtgctctcacatgtgaagcaagaacaccctcctcttcctcctgcttgttctccttgtcgcttccctctgctgtcttccgcagcctcagaacagatttagcatttgctgctgaagcatcatgctccttctggtcatcctcatggcaagtcccaccttcagccaaggtacttcctgcattctcttcaatctcaggtttctccatggtgcgttcactttcaccttcatttatgatgcaacttgatgaaccatcaacgctagaacacggtgctgcatcaaggtttgattgtagccgcaccctttgcactgcagcaccctgttgagtaaatgaactagctgagctagcagttggagcttggcgtcgtcttaggatagtgatacccgttgactcagcatcatctccatcagaaagcaagcttgcatttggagcttggtgctgtcttaggatggtaatacccgttgactcagcatcatctccatcagaaaacgaacttgcagttggagcatggcgtcgcctcaggatagtaatacccgttggctcagcatcatctccatcagaaggcatatccttttctgcagttgactcctcaggagcttcattcacatacttcgaagttacaacaatacctggttcctcatcttcacactcatctctagtcatgctcacatcaaaatcaggagataatgattctgatagctgtagcatgagcctcctatttgcagtgccctggtttggaaatgcggagttcggctgtaacggccaagacatgggaaatccagtcccctggaggaatggttcgttgccccatacattattcctcgcgtttgaatcgtccatgctgttgaatagatcttgcaaggattcagcaccagagtccatggagagcacatcctggtcggtgctatcataaggcagcaatggtgtgtcctcatacagtgcactcaactggggatttcggtcatctggccagaaatctaaattttccaacccactcagatcatccatgaattcaccctgcatcaccccatggttctcaaactcagttggtatgattccagtgtccgaatcatactgagcctttgatgttgttgatgaatgctcatctggatcagcaatggttcttcgaagttacaacaatacctggttcctcatcttcacactcatctctagtcatgctcgcatcaaaatcaggagataatgattctgatagttgtagcatgagcctcctacttgcagtgctaattcattattatcatggatattctgttgtgaaccaatcagctgagggaaagcaccagctgaagggctagccttagccccacacattattcctcgcgtttgaatcgtcgagacgtttacttcaatcgttgtcgcgttatcagttctgtctgcaagccaccttgtaattggcgcagcttgagcctcagttagagcaggcaaatcaattgggctttcatgcagagcagattctggagattccctgtttaatggtgtatttccgtcttcaattggttccatgttatcaggagttgaacgagaaggagtgggtgagtatccacttctatccacttcatcccggactgggtcgctcaattttctcctcttgctttcggaacagccgggtagagaacgtaacctccctgctcaccggactcaaactccggctcggtggtgcggtactcatgcatgatccacccagtccgctcacccttcggcgcacgcccccggtggaacacgagcgtcttcttcatgccaattacttgctgcttcttcttgtcacccttggacctgatcaccctgtccttcccggtggccttccagtacccggcctccgtcgccctgttcgacctgctcccattgggatacttcctatccttcggcgcgaagaagaaccactccggatcatcggagcggatcagagacttatcagggagatcccacggctcgcacttgcagacatcgatctcggggatgacatcggcctcgctcctgatctgccccgtgatcttccccttgaggtagtgcctgacgagctcctcgtcggtggggtggaacctgaacccgagcggcagcttcttgagctccatcaccgtcatgctgttgaatagatcttgcaaggattcagcaccagagtccatggagagcacatcctggtcggtgctatcataaggcagcaatggtgtgtcctcatacagtgcactcaactggggatttcggtcatctggccagaaatctaaattttccaacccactcagatcatccatgaattcaccctgcatcaccccatggttctcaaactcagttggtatgattccagtgtccgaatcatactgagcctttgatgttgttgatgaatgctcatctggatcagcaatggtttgattcaagaactcctccactggatctcgaggattcatattgccatcanaattaccaatggctcttagagggaaat

SEQ ID NO: 58413 - DNA, 483 bp, Oryza sativa
  Clone ID: PAT_MRT4530_60130C.1
atgcaaaaatctcgacctacaacacgaatctacggagagaaacgaagctacgcactaaatccacacagatcaaacacggacaagcatcaccgcccagctcgtcgggctgaaacagctcgtgctacgggatcagaggcgcttacccccttgcggtcggacgggcgaggcggcagctcgcgcttggtgacgacgtggcccttgttgatgcccacgaagagcccggacttcggctgcgacggcgccatcggggagccctttttcctgcacgacaagcagcgggagaagatctacgtgagcggcgccgagggaggagagaggctagggtttcagatcggaggcggaggtggtggcggcggcggctggcttaccttacctgggagaaatgaagcggcggcggctagggaggaaaccctagcggaggagtgctcttatataggcgcgcgccgcgtcgcggtatccagggtgatagacgggctgggctaa

SEQ ID NO: 58414 - DNA, 432 bp, Oryza sativa
  Clone ID: PAT_MRT4530_60131C.1
atggcgccggcggcgcggcgctcacacggcggcggcgcacatgcggcagcggcgcaaagcgacgaccgacggcggcggagagcggcggctagaggagaggaaggggaaaagaagggaggggatgcctcaccgagggtggccggcgcggaggaaggcgatggcggacggcgacggcaagccacgggaggacggcgtcggctagcggacgagcttcggcgtgccctaaggaaggagaagatagggattagagagagagagatggaccatggcgatcgggatccatggccgaaggcggcggtagaggtggcgctcacccgtgcgcgtggagatgagggttccggcgacgaacctcgacggaggaggggtggacgaggtggacctcggccgcgcgaagctaacggcggcgacggcgtgagacggcggcgagcctag

SEQ ID NO: 58415 - DNA, 717 bp, Oryza sativa
  unsure (1)..(717): unsure at all n locations
  Clone ID: PAT_MRT4530_60132C.1
gatcaaaaggtacaatctttattgttgtcgtcaataagcttttgtaaatcttatctacaatgtacgatatatggagtatacaaacatgtttctacacgactcttttgttgttgtttttacttttggaaagatttttaacgaggaggggacaacacacagttacaaaagtagataaaacctggtttaaactgcaacagtgctctgttctaaagcttctttaccggtgattccatctttcagagtcttgaaatactcattgtagtctttctccggtggaggattctcaggatctaccgtgaaaggctcgctaaacggaaccgtacttttaacctcgaaggtcttgttaagagcatacgggctttctaaagcagcgatgcatatacgcgctacttcgtctcttgataccttccccgtaatgttgtctccttgttcgaaaatgagatcagctccggcaggctcttctgttaaagcacatggccgtacaattgcaaatggaatcccgctgtcgcgtatcagatcctctccctttaacttgtaagtgagaatgaaatcaagctctttgtttaatctcacggccggaggttgtttgcttagatccaaaccgggtctctctggtcgagtaactcccgcagagccaacgtgaacaaacccttggagtgacggngtcttggatataagctcgaatgctagataaaggaactcgaaaggtccttcttt

SEQ ID NO: 58416 - DNA, 1904 bp, Oryza sativa
  unsure (1)..(1904): unsure at all n locations
  Clone ID: PAT_MRT4530_60133C.1
tttttttttttttttttttttcttatggattactttgtgtaaaattcactatagttttgaagatgcgtatttttttgtacaagtcttcttcaaaaacttctgtaaaaattcaccattttgaaggtgcgtacactgatagaagaccaaaaatgaattgggaaaaaaatacaaatgttacacatctatgtggccggccgaccaatccggcccaattaacacaacacaaagaacaaacgggcctccaaaacagaattgattgggcccaattaaattggtaatagttactccgaaatatttgaatcactttggtggcgggaggatccttcaattgccgtagatgaagttgtgactcaccgcgccgccgctgcacttatctactcgcctttgccggtgtgcttgaagcacttggcgtcgccggtggacccgagtaactcttcgtggcaggtgggtttgaactactcgccgtcgccggtgcagttgaattacttgccgtcaccggtgcagttgagttgctgggtgtcgccggtgcagttgagttactttccgttgccgtcgccggtgcagttgagttcctgggtatcgccgatgcggttgatttactcgccgtcgaggtagatgccgctgatttcccgtctggtggcgggaggatccatgagtcgccatagatgtagtgcgtgccgatgaagggcttggcctgatccgcggtgaggtcaagcgcccaacccaccctcttcttggcgtcggagccggggccggtgcacttgaactcgccgtagtagatcccgctgctctccggcttggcgatgttccagccatcccaccctatcggcaccacctccttggacatgtccgtgtaggagtacaccacccgcgacgaatccccccatgcccggccgaggtagatctgcccttgtcctttgatgctgcagttcttgaaggagaagccactttctatggcgccctcgatggtcttggtcctctgctgcgccgtcagcacggacacctccttggtgacggagacgatggtgcagccctcgtagagtgatctcccgaatccaaagatgaagtcgacgctgcccatgatgaggctatccttgatgtagtggagtcccttgtgatcgtatagggtgtcctgcccgccgtcgatggtgcagttgtagatggctgccttggtgccgaacaggcggagcgccaccgcctggccaccctcggcacccggcttggccagcggcgcgtcgttcttgaagacgacgccgtaggccatgaagtagtcggactcgacggcgacggtggtgctcccgacggtgccgacgggcttgccgtccttgcccctggtggcagccatgtcgttccaggcgatcaccgccgggttggcagggtcggacttgaaggtgatgtagggcttagtgatgttgaggaggagcttctcccggaactcggcgccgggcttgaggtcgaggatgacgcgcttggtgttcccctcggggaccttctcgagcgccgccgcgatggtggtgaaggtggtgtcgcccggcgtccccttggggtcaaccacccacgtcaccttggcctcctccgccgccgagaggctcgcgtcgatggtcttcccgccgatgtcgccggcggccttcatggcgtacagcgacttcttctcgacgtactcctcgtggttcatcagcacccacttgccaaaccctccgccggaggagcggtggctggggccggcggggaggaataggtcgaagaactgccatgacggcgccggcagcgtcgccgccaccaccgccagtagccccaccacggccacggcgaggttgggacgatccatcgtttattagttgctgcagtatgcagccggacgcttgtgctgcaactgcagccccccgcggtnctcnggacgtccc

SEQ ID NO: 58417 - DNA, 1683 bp, Oryza sativa
  Clone ID: PAT_MRT4530_60134C.1
atggcgccggcggcgcggcgctcacacggcggcggcgcgcatgcggcagcggcgcaaggcggcgaccgaaggcgaccgaccggcggcggggagcggcggctagaggaggagcggcgggcggcgataaatgcggccgccggcgcggctcggcatcaaagccgaccggccggctgggttaaacggcgacggcacgcgtgcgacgacggcggctaccggcggcacgggaaacggcggcggcagtcgaaggcgacggccgacgactcgaagcggcggctagcggctctaggaggagaggaaggggaaaagaagggaggggatgcctcaccgagggtggccggcgcggaggaaggcgatggcggacggcgacggcaagccacgggaggacggcgtcggctagcggacgagcttcggcgtgccctaaggaaggagaagagagggattagagagagagagatggaccatggcgatcgggatccatggccgaaggcggcgatagaggtggcgctcacccgtgcgcgtggagatgagggctccggcgacgaacctcgacggaggaggggtggacgaggtggacctcgaccgcgcgaagctaacggcggcgacggcgtcggtgttggtggaggaggcgacaaaggcacgagtggaggccgccgaggagtacgcatctgccgggagaggataaagagcacaggaactattgcacctgacgatctcgatcttggttgggtaatccttcacagagaggccaaaagggtcaagttcaacggaacaccaattatcacaagtaaaacggcgtgcggaaataaggctcttaataatctcaggagaaatgagaacattgttaagcacaaaggaagaattgggtctgtgccagacggagcatgccgtcgccgtgggagagagcacctcctgcataagagtagaggagatggagccgtagagccagctgaggacgacgcagtccatctgtgtccagtcggcgtgatcagggcgaggtacgtcggagaagacatgatcggtgagggcgtattttccaagcgcgacgaggaaaaggccttgccagcgggagtagttgttggcgtcgaggtcgagggtgacggggacgagcgccttcacgttgaggacggcgacggcttggctgtggaggttggcgacggcttcggcgtcgagcgccggcggtggtgcggcggcgtcgagcgccggcggttgcgcggtggcgtcctgcgtgggggcggccggcgtcgtggtgatgctgagacgggcgagaagcgccaggatctcggggggaagttgcgccgcgggagccggagtggaagtcggcggcggcgggatggcggtcgtcgaaggcgcagtcatcgaaggaaccggtggaggcaccgtggaggagatggcgtcatcggcggccggagtcgtcggaaggagaccgaggagaacaggggcaagggccgctcgggccgcggtcgcggcacgatcggcagcggtgccagcgacggcggtggtcagggtgtcgtcgtcctaaccagagggagccttgaaggaggagcggacggcgtcggcgatgattttaatggtgtcatcaaggacggcgtcaacagtgagggaggagggagaagccatggcggcggcagggtgcgccgaccggcggctggggtggagaggaggtggaagcgagaaggaacctaa

SEQ ID NO: 58418 - DNA, 1541 bp, Oryza sativa
  Clone ID: PAT_MRT4530_60135C.1
atggcgaggggagagggatcgcgctgccgaacagggggccgaacggggccgagaagggtttggccgaacccctggtttggtcgaaccagggagctcgtcgacgggctccagattttcaggggagcccggcactgctgcgaggggctgcacccacagtgcattcaccccttccactgtgtaattttccaccgggatgagttgattcgccgaatgtgcattaaattccccgtccaggaccggccggggtacacaaacgacaatgttgacattcagatccaccgggaacaccactccacaggcatcctcgacggcacggacaaagcctactcctcggagaaaacttcatctgacccgaactcgaacactgggggaatcatcaaagaagagctgaagtgggcccatccaaactccatcacgcccacccttgcattaggacatttgcaatataggatcaacatgatcaagtgacaggcatgacttgccttgctctgctgctggaggaacctcggcgactatctcgaagtacaccggagcgtcggaggaattggaatggccggccgaccggccgcggcgacggcgacggcgcgcgcgcgaacgcgttgccggcgacggcaaccggcggcgaaggcgacggcgcaaacggcgacgcgaaggcggctgcgctaagcggcggctaggaaggggagggaacgggcgacgataaaggcggccgccggctcggctcggcatcaaagccgacctgccggccaggcctagcggcgacggcacgcggccgacgacggcggcgtccggcggcacgggaggcggcggcggcggccgaaggcgacggcgcgcaactcgagggtggccggcgcggaggaagacgatggcgaacaacgacggcaagccacgggaggacgacgtcggcgggcggacgagcttcggggtgccctaaggaaggagaagagagggattagagagagggagatggaccacggcgatcggaaaccatggccgaaggcggcggtagaggtggtgctcacccgagtgcgagggaacgagggctccggtgacgaacctcgacggaggaggggtggacgggggaccgggcgtggccgggagaggcgggaatcgccggccgacgtgggggagtgggggaggagagagaggcgggattcgaaaatcgaatcccggccatctcgggcgcgggcgcgagcgggagagagaggggagtgggcgcgggaaacgcggcgcacgcgcgggcgtggtcgacgtggcccgaaggaggcggagacgtgggcgcggcggcggttgcgagcgcggcggcgcgagcgagaccggcgggaggtgggggaaggacccgacaggtgggccccacctgtcggcgaccccgggagaggagggcggcgggacggcctggctgggcctcggcctgcggccggcccagcaaggaggagggggggaggaaaggagggaatgggccgacggcccattcgaaagaaaaaaggaggaaaaagagaggaaaaagaaaaagaaaaaggaaaaaggattttccctggaat

SEQ ID NO: 58419 - DNA, 186 bp, Oryza sativa
  Clone ID: PAT_MRT4530_60136C.1
atgggccgcatcagatcacgccagagacatgagggacgcctgcgtcattctgcattaactattgaagacttccaggcactcgttctcaccagggaacaggtgggcattgcacaggcgcacctaccctgccacaccggtcattcgaacgtcgcacggcctgtcggccacgcctgcgcgccgcattaa

SEQ ID NO: 58420 - DNA, 102 bp, Oryza sativa
  Clone ID: PAT_MRT4530_60137C.1
tttctaaacttcttccggggcatcctaccaacagacactgatgcgaccacactggatgtcacaagctagctttccgtcgagttttctgaccgggtactcatg

SEQ ID NO: 58421 - DNA, 143 bp, Oryza sativa
  Clone ID: PAT_MRT4530_60138C.1
tctcaaaactggcgttcttccagtagaaaggagaataaaattaacgtgtgagattgtggtttcctttgactatgctgtgacgccgcgagacactcatgtaagtgtaaccattcaataataaaatgaagcattcctgttattgt

SEQ ID NO: 58422 - DNA, 2617 bp, Oryza sativa
  Clone ID: PAT_MRT4530_60139C.1
ggaaaagggttggtcataaaaaactttaaacaaacaagctggactaattacaacggtttcaaatgtttgttggggctcaggacctatacggttttaccattccttttccagtcatatgggagcaaattaaaagcatttgcctgacagctacaaaaatttagcagggcaactgctgaacccaaggaaaaatgtttccaggaaagtttgaaatatgatgaacttttacagcaaagtttcattcctttcacaattcacatcatcacagggtcatgtatgaactgtatattccagcaggggggcaacacaccaaagcccaagttccacatgcagttgcctttgcaaataaaagccccgtcccttaatttcaaaaaaaaaggagctgcaagggaaaaacaagcaggttgttggaaacggaatacaagtccatacaagctcactggaagctgaagccactgggaaatgagaaatgataccagttaaaagctcattgccatgacaattgtttgtatgaagatcgttcggcatcccaactgccctctggttccttcctctttattccaacacctggaggcatttgatacattctcgtatgctcgtccacaaaggcatgtggtggcgcaataaaattttgtctaactggtaaagttactctatcgtccttcacttctacatccacacttccagggccagaattaagatcaagaccctgtcttccccatttccgattattgtcatgtccaacagtgctgcttccttcagggaggtttattgcatattgtcgagtatgctgagcaggtaatgcacctgctgggccaacaagcgtcggagcaattgtagggaaataaggaattcctccaggtgcagaattcgcatatgatgtagacccaattgaaaaccccggtgcttgaaggtggacactaggagtaaaagggaatcctgcatactgataagcaggagggtgaaacatcatagtcggtgaagttgaaataactggagtccggctgggatcacttccatgttggacaccatctgccatcgatgtgatgatcctctgggttccacttccagctgctgtctcgactgggtgaggctgttctcctctagaaggtaaaaacgactttatagctacaggagcacaagcattggcagaagcaaaccatggtgatatgttactcatttcagcactgttcattctcatgctagcgacttgaggtaggaatggtatgctactggtatttttagatgacagactccttggtgcatgttccgtaccagcttcatcaagagttggtccattattaagatcaaaatcccttgagctatttgcatcggaactagagaaactccaggtaatggtaggaccattgcttcttctagtgttgccagattcagaaccagttgtctgaacagaactctgagagacgtcttcctcaagaaattgctcatctgcaacatttaagtcaatgtcaagtgctgggcggtgtttatctgcagcatcagaaactggaatgccaggtgcgctgagagtcatctcaaaaattttccttggttctgcaggacgaaatgcacttgtggctgctgaacctttccagccagtctcaggctgaaatcttagtaggttagcaggagaggtttctgcctcagactgatgcacgtcgtctccaggtattccttcattcaagtcaaaatcaagcttggctgtagcacttggcctgatcttggcagcaaaagaagaaccatcatctgatgagacaaggtcctcgttcccacttgcatcatcactcgacttctttgagctgcgccttgcactacgttcagtatcctgtgagacagtagttccaggtcttgcatgactacttgattcactggaattgtcttttaattctttagaactaatcccattttctggaccaaatggtacacctgctggtacagctagttttgtagcatcagctgaagtggaagaaggttgttccttcttttcatcctctctcagcactgcgttaccaaccagcaaaccatcagccttattcacctccacggtcgaagatgaaaatgaaggcagatcggtcatggcttctgaattatctggtagacactggcgattcttctgatctgttgactttaacaaaccatgagattgtttatctccaccacgtaattcacttgtagtagatggatatatattcaattttgcgtcaatcttgatatcaactggctgttttgtgaccgacttgtcaccatcaccacctttatctgtagtcctcacttcatgattttcagtcttagcaggagattcaacagccttaacatctattccaggtggagagggtagcccagaagatgtgaccttattgtcctttgcatcccctaggtgttgttcctcctttgcgaccaaacctgcaccaattttctcacccttatcagagatgattttctcagcatcatttgttggccctgcatgccgtgacaagcccatatcactttgtacttttagcttcccaatgttatctccttcacagccctcttcatttcctggtgaatttctaggtgaagcagatgaagaaatcaactcagatttagatatttctccagcaacactggcaagaagattcat

SEQ ID NO: 58423 - DNA, 378 bp, Oryza sativa
  Clone ID: PAT_MRT4530_6013C.1
atggccggaaatgagaacgcagtgggtacaacccgggacgactccatgtcgaaggatcctcccgccgaagtggaaatcgaaacttcgacgacatccgagcccgagaaggattctagtgcggccaagccttgtctttccgacaggaatcacgagccgacgaggattacttccgaggtgacaaggtcctggtgtcctatccacaaaaccagaaaacacaccttgcaagcctgttgggtttttctgaacgtccatgctgaaattcgtgcctgcaaagagcgtggaattcagcgtacctctccaactcgtgatgtcttttgtcctatttacaagacaaagaatcacaacctctcgagctgcaaggtcttttcagcgccatga

SEQ ID NO: 58424 - DNA, 583 bp, Oryza sativa
  unsure (1)..(583): unsure at all n locations
  Clone ID: PAT_MRT4530_60140C.1
ccacgcgtccggttcgttacatgttcttatggtctcaatatgacaaatgcttagccaatagccacttaggtagttggtgttgttctccatttgttccacaatctaaattacaaaaagtttcttgtctggtgtttatgctccttttcttttggcttcaaacttatgtacttgagtgctcaaattcgtgttgtgttgggttgcaatctaattctggagaatatgcgtctggggtggcattgtactgaacaggaagggtcctgttcccatctgagttaacatcctgtgttcgcatacatctcttccttctaatgcatggaattataagcatacatcctgttttcaattctttgaaccatatagtttggggatggtggatatcttgaatatgggatagtttggcataaaaaaaaacacagtaagggacctacatatgtttttccaagcgattgacaatattgtggctgcgagtggcagatgtanatccaactatcagaaagaacaatgcaaccacaaccttataatagggaaatactgaaacagacatcatgacatgtttcttatgccttgcatgaaattttttttg

SEQ ID NO: 58425 - DNA, 5321 bp, Oryza sativa
  unsure (1)..(5321): unsure at all n locations
  Clone ID: PAT_MRT4530_60141C.1
aataacgaaagatacagaaatagattatttcttggtctactaaatttcttatgactgcaaggcagagatggttacaccagaatgccccttgcaagcattcgggaactgcagacagtctactggatagtccataaagttacatgagcaaactgatgcaacggttacacgaaaaatacatgtcacatctaaaatcatatgtaaggctgcagatttgcccaacaatgtgaaaatggtttgtcataagaaactttaaacaaacaagctggactaattacaacggcttcagatgtttgttggggctcaggacctatacggctataccattccatctccagtcatatcggagcaaattagaagcatatgcctgacagctacgaaaatttagcagtgcaactgctgaagccaaggaaaaatgtttccaggaaagtatgaaatatgatgaacatttacagcaaagtatcattcctctcacaattcacatcatcacagggtcatgtatgaactgtatattccagcaggggtgcaacacaccagagcccaagttccacatgcaggtgcctctgcaaataaaagcaccgtacgttgagtgaggggagagggtgctggcaagtgagaaacaagtgggttgttgnnnactggnggcaagtccatacaagctcactggaagctgaagtcactgggaagggagaagtgataacagtgaaaagctctcattgccatgataattgcttgtatgaagaacgttctgcatcccaactgccttctggttccttcctctttattccaacacttggcatttggtacattcttgtatgctcttccccaaaggcatgtggtggcgtgattaaattttgtctaactggtaaagatactcgttcgtcctttatttctgcatctacacttccagggccagaattaagatcaaggccctgccttccccatttccgattactgtcgtgtccaacagtgctgcttccttcaggaaggtttattgcatattgcctagtatgttgagcaggtaatgcacctgctggccctaacagtgttggagcaatgctaggaaaatatggaactcctgcaggtgctgaattggcataagatgtcgagccaattgaaaaccccggtgcttgaaggtgcacaccaggagtaaaagggaatcctgcatattgatacgcaggaggatgaaaaaccatggttggtgaagtagaaataactggagcacggcagggatcacttccacgctggacaccatctgccaaggatgtaatgatcctctgggttccacttccagcagctgtctcaactgggtgaggctgttctcctctagatggtaaaaatggctgtgcagctacaggagcataagggtgtgcagaagcaaaccatggagagatattactcatctcggcactgttcattctaccgccagcaacttgaggtatgaatggtatactgctggtatttttagatgatagactccttgctgcatgttccgtgccagtttcatctagagttggtccattattgagatcaaaatcccttgagccatttgtatcagcactagagaaaattgcaggtaacggtcttgacgataacaatgggacttcgaccctgtggggagtgttcgacacaaaatggttctctgcaacttcatcagctctgttcaaatcaagttcaataccaacacttcgtacaggaccattgcttcttctagtgttgccagattccgaaccagttgtctgaacagaactctgagagatatcttcctcaagaaattgctcatctgctacatttaagtcaatgtcaagtgctgggcggtgtttatctgcagcatcagaaactggaatgccaggtgcgctgagagtcatctcaaaaattttccttggttctgcaggacgaaatgcacttgtggctgctgaacctttccagccagtctcaggctgaaatcttagtaggttctcaggaggaacaaagggacctttagctgtagcagctacttttatcggagcaggtagcccacttgacataggtgatataaatggagaaagacaaggtaaattaattgcagaagaacacacagcaggagaggtttctgcctcagactgatgcacgtcgtctccaggtattccttcattcaagtcaaaatcaagcttggctgtagcacttggcctgatcttggcagcaaaagaagaaccatcatctgatgagacaaggtcctcgttcccacttgcatcatcactcgacttctttgagctgcgccttgcactacgttcagtatcctgtgagacagtagttccaggtcttgcatgactacttgattcactggaattgtcttttaattctttagaactaatcccattttctggaccaaatggtacacctgctggtacagctagttttgtagcatcagctgaagtggaagaaggttgttccttcttttcatcctctctcagcactgcgttaccaaccagcaaaccatcagccttattcacctccacggtcgaagatgaaaatgaaggctccacatccaatttaacagcagcactgtcaccagatcggtcaatggcttctgaattatctggtagacactggcgattcttctgatctgttgactttaacaaaccatgagattgtttatctccaccacgtaattcacttgtagtagatggatatatattcaattttgcgtcaatcttgatatcaactggctgttttgtgaccgacttgtcaccatcaccacctttatctgtagtcctcacttcatgattttcagtcttagcaggagattcaacagccttaacatctattccaggtggagagggtagcccagaagatgtgaccttattgtcctttgcatcccctaggtgttgttcctcctttgcgaccaaacctgcaccaattttctcacccttatcagagatgattttctcagcatcatttgttggccctgcatgccgtgacaagcccatatcactttgtacttttagcttcccaatgttatctccttcacagccctcttcatttcctggtgaatttctaggtgaagcagatgaagaaatcaactcagatttagatatttctccagcaacactggcaagaagattcattgctgtatcatctccagcttgcaaggaatgactagcttcagagtacttgatttcaatcaaagcattcatagggttgaacgaatttctccccccattttcacttgagcaagccgccttttcattagcatctgagcaaacaactcgggaagcacatgcatctttgccagcttcttcagttgtcctactgcgatcatcggtcagcatagcataaggtgatttatcaccttcctcagaaactgaagctcctttaacatcattgctatgccaagattcagcatttgtatcattgcctaaatgaggatttgaattctcagttttcatttttactctgcgatcactctgttcatgcttatctgcaagcacaggagacgaagctctactcccagtaaatgatggatcctcaaaagaacccccacttgcacttctagcagggctacggacaggatttggaaaccggacaattaatctatgcccattaccctgatctgatggtgtgtcagttcctttctcgcatgctgtgacagattgtgatgctttttccggtaacagagagcggtcaagtgaggtagaccttgccacagtagcttccttttggcctcctgaactaagaatcccattgtttgttcttcgatggacacgtgaggaactaccagatgttctaccagcaatgccagaagctgcagttgaactacgggcatcctcctttgaagaaccaattgttttcgcatgttcactagagcatgactggctgttgttcagagactgacttgaactacagcttttctcctctttcaccgtatgcaactcagggctacaagtcccaccagatgatttgcagggttgctccttcaagttggttacagcatttcctggttgaatatgctgtagttttgaagaaccagatatcaagggactcgacttcacagtagtatcagacgctccaggtttgacggtcaaggccttcgatgaagaaagctgagacactgggcttttcagattaggctcacttgagccacttcgtctgtttccagcactagaaatttctgcaaacccaggtttccctggccaggatacagcttggccagatacaactggtttcgcatcatttgacttcatttcagcatcaacacgcttcttccaattttcaacaagacactttgccttcttctgtatctctggatttttatggcttcgcagatggttaacagatttccctatactgcaactttgtaaggcattaagattaataggtaatttcgccaatgcacgaagcagcgctaggagaagttcttccataggcttatcagtttctttaggactaccaccttcaccagacttccctttgtgagcctcttgaagccaatcatcaaatacaggaaggccccttagttgcacaaatctgccaaggcaatcagggttttctgtagctgttataacatctgcaagcattactcgaccagcaaaatctaacttccgttcagttcgatcaagttgcatgagatgaactagcttctccacagcttcagcatgaggaagtccacctttttctgtaatctttgcaatttcagacttcatattgtctcctttcaggtttccaggctcagtgtcatcagtcttaagggtgcgatcacggtctctcttaatttgatcaattccttgttcacctctttccctcttctttcctttagatgaaccgcaattttgggccccatctgaaccagcctttaattgctgggaagctgatgggccagttagccgcttcggtgagcgcccaccttgctgcacggcagtatgcatttcttgccttgttctgtgcagtagccgatttacctcttcctgtcgttcatttatataatcacgatcagtaagccaccataaacacttgttgtcaatatcataaacgcgccaacatacgaatgaagaagttccagctggcagctctgcaccttttcgcaaaaaggcaactttacaaggatggagaagtgagacagccgatgtctcgtcctggtgaaaagaatagaagatctcgtttggagcagcgtcgagttgtaagcccttgttgagcttaatgtcggcaggtctgtaaagccaacttacacgcaacttgggataaccttcttcctgtttctcaatccagcgtatcaatccaatgaaagggggtacatcgacagcccgaaaaagagcgcaatcacccactctgaactcacgtccgtccat

SEQ ID NO: 58426 - DNA, 1345 bp, Oryza sativa
  Clone ID: PAT_MRT4530_60142C.1
atgggtcacggtgtcagctgcgcccgcaccggcgacgagcacgacttcttccgggcggcgcagctcggcgacctcgacgccctggccgccctcctcgccgccgacccttccctcgctcgccgcgccaccctctacgaccgcctctccgtcctccacatcgccgccgccaatggccgcatcgaggtgctctccatgttcttggatcgcggggcgccgccggacgcggtgaatcggcacaagcagacgccgctgatgctcgcggccatgcacggcaagatcgactgcgtgctcaagctcctccaggccgacgcaaatatcttgatgttcgactcggtgcacgcgaggacctgcctccaccacgcggcgtactacggccacgtcgactgcctgcaggccatcctcgccgccgcgcagaccacgccggtggccgactcatgcttccctggaagcacgtcgcttcatttggctgctcgtagcgggaacttggattgcatcaggaagctgcttgcctggggagctgatcggctccaaagggattcggctgggagaattccctattctgttgcgctgaaacggaaccatggagcatgtgcagctttgctgaaccctacatcagcagagcccatggtgtggccatccccacttaagttcatcagtgagcttgaaccagaagctaaggctctcctggaagcagctctgatggaagccaacagggagagggagaagaaaatcctgaatggcacaaagtactccctgccatccccttcgcccggtgatgacagtgccgatgacgatgcatgctcagaggtgagcgacacggagctttgctgcatctgcttcgaccaggcttgcaccattgaggtgcaagactgtggacatcaaatgtgtgcaccgtgcacgctggcactgtgctgtcacaacaaacccaatccgacgaccctgacaccgccctcaccggcctgcccattctgccggggcagcatctcacggctggtggtggcccaaacaaggtctgcttgtgatcctgacaagccgtcatccctgcagctcacccggaagcggtcgcgtcgatctcacaacctcagtgagggcagcagcagcttcaaagggctaccttcggccatgggctccttctcaaagcttggccgtggctcgagccgcatggcggacagtgacagcagcaacctggacaagcctgagcacgatctatgaaagcagaacaacgcacggacaatcgccgcatcatcctgagactgaggaccaactctgattaacactgaagtctgccgtgtggattgggtttagattgaaaccaattcatggagataacccccctttttgtggc

SEQ ID NO: 58427 - DNA, 2216 bp, Oryza sativa
  Clone ID: PAT_MRT4530_60143C.1
ctcgcgcctccccgggcccggcgactcgtccctccacggcagcgccacccactgcgccttcgccggcggcggaggaggagggaggtgcggccatgggtcacggtgtcagctgcgcccgcaccggcgacgagcacgacttcttccgggcggcgcagctcggcgacctcgacgccctggccgccctcctcgccgccgatccttccctcgcccgccgcgccaccctctacgaccgcctctccgtcctccacatcgccgccgccaatggccgcatcgaggtgctctccatgttcttggatcgcggggcgccgccggacgcggtgaatcggcacaagcagacgccgctgatgctcgcggccatgcacggcaagatcgactgcgtgctcaagctcctccaggccgacgcaaatatcttgatgttcgactcggtgcacgcgaggacctgcctccaccacgcggcgtactacggccacgtcgactgcctgcaggccatcctcgccgccgcgcagaccacgccggtggccgactcatggggtttcgcccggttcgtcaacgtcagggacgaccacggcgccactccgctgcatctcgcggccaggcaggggcggccggggtgcgtgcaggtgttgctggagaacggcgccattgtgtcggctttgacaggatcatatggcttccctggaagcacgtcgcttcatttggctgctcgtagcgggaacttggattgcatcaggaagctgcttgcctggggagctgatcggctccaaagggattcggctgggagaattccctattctgttgcgctgaaacggaaccatggagcatgtgcagctttgctgaaccctacatcagcagagcccatggtgtggccatccccacttaagttcatcagtgagcttgaaccagaagctaaggctctcctggaagcagctctgatggaagccaacagggagagggagaagaaaatcctgaatggcacaaagtactccctgccatccccttcgcccggtgatgacagtgccgatgacgatgcatgctcagaggtgagcgacacggagctttgctgcatctgcttcgaccaggcttgcaccattgaggtgcaagactgtggacatcaaatgtgtgcaccgtgcacgctggcactgtgctgtcacaacaaacccaatccgacgaccctgacaccgccctcaccggcctgcccattctgccggggcagcatctcacggctggtggtggcccaaacaaggtctgcttgtgatcctgacaagccgtcatccctgcagctcacccggaagcggtcgcgtcgatctcacaacctcagtgagggcagcagcagcttcaaagggctaccttcggccatgggctccttctcaaagcttggccgtggctcgagccgcatggcggacagtgacagcagcaacctggacaagcctgagcacgatctatgaaagcagaacaacgcacggacaatcgccgcatcatcctcaaaacatccgttggtatcagaaacccagatgaaaatccaatggctaatttggagcaactttgatccatggaaagttaaatagatagggactaaataagtagaaccctccactccccattgtctgtgtgcccaccctatttttcggcttgccgggttaagcttagcatatgcataggagctctgaaagaccagagagagagtgagtgagtgagtgagagcaattcatcatcaatcacacagtgagtgttggtgtggttaagggatgcatgcagcagagatgtgaaacggggttcatgttcgtcacctctaaagttagcctgccatggcatgtgagctctgcgccggcctgacccctcctcctctgtgtgatgaatcatgcccccatttttggcccttgtctcgtgttataatggtgcgagttcatgtcctggtgatgctgcagccatcagcagggtggtccattggatcgccatgaattcagcagctgcggtctctgcctatgtgatgacattgtatgtaccgtactccagtgtgtaccggttctttgaactgtggtggcgtgtcactgtctctgtcagtgccactgtccatcgtcgtccggctgttacagccggattgttactgctagtaattggcttccttcgttcgttcgtgatggcatcagcatcagattgtttcttttcttcaggctgataaaatgaagactgttgttgcctgtaaaaaaaaaaaaaaa

SEQ ID NO: 58428 - DNA, 627 bp, Oryza sativa
  Clone ID: PAT_MRT4530_60144C.1
atgcccctagtatacgcaatttctaagaagaggaaaaagaccctgcgccaaggaaaggagaatgatgcctggctggttgccctatggactgcagtccacaacgtgcagttagaagaagaagagtcagaccaaatcgcctggaagttcactcctcatgggcactactcggcttcatcggcctacaaagcgcagtctgggcgcccggaaaatgcaaactccacgcttaacttatcatacagaatagggtttggacctctgaccggcttgcgaccaggggttggcaaaataatggcaggtgccctctctgtagaagagaagatgaaatggctttgcatcttgtcgctgagtgcagggttccaccagctaaaaccccgacgctggggggtggcgcaatcggttaaagattggtgggaaaggctggcctctgtgtctggcgtccccaagaagggactccgcaccctgattctactcatcgtatgggaagtctggaaggagcgaaataggaggatatttgatcataaggaagccgcaacctcgtatctcctttcaaagataaaagaagaggctggcatgtgggccttagcaggcgccaagcgtcttggagagatcatcccgcagtttgtatag

SEQ ID NO: 58429 - DNA, 362 bp, Oryza sativa
  Clone ID: PAT_MRT4530_60145C.1
atggtgtgcccatccccacttaagttcatcggtgagcttgaaccagaagctaaggctctcctggaagcagctctgatggaagccaacagggagagggagaagaaaatcctgaatggcacaaagtactccctgccatcccctttgcccggtgatgacagtgccgatgacgatgcatgctcagaggtgagcgacatggagctctgctgcatctgcttcgaccaggcttgcaccattgaggtcgccgccgtcaccgccgtcgccagcgccgtatctgccgccgccggcgccggcgctgccgccaccatcgactagggttagagattggggaggaatgggaagtcgggtgggggagatggacatga

SEQ ID NO: 58430 - DNA, 585 bp, Oryza sativa
  Clone ID: PAT_MRT4530_60146C.1
atggaggacgccgccgcttggcccagaggagaggagaaccggcgccggcggagggaggaggggagccggcgccgatggagggagcaggggagagccggcatgtgggtgcttgcatttgaatggcctgagggcaacgccgacgaggcgacgagagccctgccgagcgcaggacttcctgcagtccctcagcccattgagctgtacaacatatggatcagaaaaatagaatgttcaaaggggtggcctgacggacaggacaaaggaccgggagacggcttgggagggaagaaggaggcaacctgtgggccgtctgtagacaggattggaggcgatgggatttgggcgtcgccgtcaagaggagttgttgcctattgcgtcattgaggagaggagcgggcggcttggagcgacgagggaagggtcggtgttgagggaggccatcaattccgtggcttggatggggctgcggcggcttggagtgacgggggacagcggcggatggacggtgtggcgtagagaggagcgcgtgagggggcgtcagtttcggaagaggttaggtgcggaggccggaggaggagtgcgatga

SEQ ID NO: 58431 - DNA, 828 bp, Oryza sativa
  Clone ID: PAT_MRT4530_60147C.1
atggcgcactcatcatcgtcgtcgaggccgaagatcgccgtcaaggcggcgatggcgtgcggcggcaggggcccatcaaacatggccatatactggctgagaatgcgctccacggaggcatcttcttcgtcatggaggatgcccaacctcctgaacaggacgcgctggcacctctccatcgtcggtcttgcaggttgcttggcaaggcactcactccgccagcgggaacaccactccacaggcatcctcgacggcacggacgaagcctactccttggagaaaccaccatccgacacatactcggctgacgtcatcaagggggggcgccgacaggcgggtcccactggtcagtggctcaggagagaggggaaggggcgccggcacgcgggccccactcggcagtggctcaagggggggcggtccaccgtggaccgggaccacatgggtgatccaccgccggtccacgtaaccgacggcccagatcggccccgagccgatcgggcggtggcgatagaggtggccgccgggctcggctcggcatcaaagtcgcggcggcgcggcactaggagggagagggaggggagtaaaggggagaggacgcctcatcgagggtggccggcgcggaggaagacgacggcgaacggcgacggcaagccacgggaggacgacggcaaccggcggacgggcttcgggaactcaccggagcgcgaggggatgcgaattccggcgacgaatcccgacggaggaagggcggacggggtggagttcgtccttgcgaacccgacggcggcaacggcgcagtgcggcggcgagcctagcggcggctag

SEQ ID NO: 58432 - DNA, 298 bp, Oryza sativa
  Clone ID: PAT_MRT4530_60148C.1
ggctgacgtcatcaagggggggcgcggcgccgacatgcggggcccaccggtcagcggctcgggagagagggaaaaggtgcgccggcaagcgggccctactcggcagcggctcaagggagggtggtccaccgtggaccgggaccacgtgggtggtccactgccgaactcaccggagcgcgaggggatgcgaattccggcgatgaatcccgacggaggaagggcggacggggtggagttcgtccttgcgaacccgacggcggcgacggcgcggtgcggcggcgagcctagcggcggctag

SEQ ID NO: 58433 - DNA, 238 bp, Oryza sativa
  unsure (1)..(238): unsure at all n locations
  Clone ID: PAT_MRT4530_60149C.1
accaggcccctgaaaaaacatatttcttacagttcagtccctccgccgccgctggctcgcttctccggccaccgcgcaccgatcaacgcttggcgctgaccaacctccccacgggcggtggtggccatngcatggggttctctctgcaccggatgtagatgtgcacgcgcttgctgtggagcaccagctttttctggcacaggttacagggcgttgtcgacggcggcttgattggggg

SEQ ID NO: 58434 - DNA, 1074 bp, Oryza sativa
  Clone ID: PAT_MRT4530_6014C.1
atggtgcccccaatcgccgggaacggccgcgccaagtccggccgccttcctttgccgccggccaccattcccgtcgccgttccgccctctcccgtgctcggctcgcttccctccgctataaaatgcaacccactcgctccgttctatcgctttagccccctcccgcgccgcctgtgccgcctcgaccgtgcgccggccggccgcgccgtcgcctcctccagcgtcgccgccacctcctccaccccggcctgccctccgtttcgcgcggtgaccgccggaggcgcactcccgccgtcgcccttctcattcctccttgccggccacctccagccgcacctcccgcctcgcccgtgcaccctccggccgcgccgccacctctcccggcgtcgcagccgcctcctctttcccggcttcgcctccgtttcgcggggaaatcaccggagacgcgtcctcgccggcgtccagtggcgtcgccaccacttctccgcctccggccgcctctgccgcgtccccggccacggcgtcgcccgaatttcgccggaacgccgtcatctccgcgccggcctctccttcctcctcgtcggctcggtcgccccgctgcaccaccaccttcaccaacatcgcagcggcgtgttccacgccgtcccctcctccactcagccgctgctgcctgccatcatcgtttcatcgtcgtctccgatcgttctcgtcgtcgacgtcccgtcggtcgcccggctcgtcgtctcgcggcgccgcctccgtcatcgtcatcgtagcggcgtgttccacgtcatcctcgtccccgtgcagccgctgccggctgtcctcgtcgcctcctcgccggtcccggtcgtcgtcgtcgtcgtcgtcctctcgtcgttcccggtcgtcgtggcccccgtcctcgtcttcgtcctcggctccgcgtcgtcaagccccgtgccggccgcgtctcgccttcgtccaaggatcgccgccgaagccgtcccctcgccgttcgtctccgttgtgcccgtctgtctccgccgcgcccgttcgtcgttgtcgttcctacgcctcgtcgcgtggtggtaa

SEQ ID NO: 58435 - DNA, 1073 bp, Oryza sativa
  Clone ID: PAT_MRT4530_60151C.1
atgcgtcagctagaggaaagctacactacaagcccagccgttgcccatgctggcttgtgggctgacgtcatcaagggggggcgcggcgccgacatgcggggcccaccggtcagcggctcaagggagggtggtccaccgtggaccgggaccacgtgggtggtccactgccggtccacgggaccgacggcccagatcgcccccggggttgatcggacgggcggcggcgacccggctcggctcggctcaaggccggccgaccggccacggcgatggcgatggcgcgcgcgcgcgaacgcgttgccggcgacggcgcaaaggcgacgcgaaggcggcggcgctaagcggcggctaggaaggagagggaggggaatagaggggagaggaagcctcaccgagggtggccggcgcggaggaagacgacggcgaacggcgacggcaagccacgggaggacgacggcaaccggcggacgggcttcggggtgccctaaggaaggaggagagagagattagagagagggagatgaaccacggcggccggcatccacggccgaaggcggcggtagaggtagaactcaccggagcgcgaggggatgcgaattccggcgatgaatcccgacggaggaagggcggacggggtctcgaacgtggccggtaggggcgagattccgccggccaacgtgggggagtgggagaggagagagagaggcaggattcgaaaatcgaatcccggccatctcgggcgcgggcgcgggcgggagagagaggggagtgggcgcgggaggtgcggcgcatgcgcgggcgtgaccgacgtggcccggaggaggcggaggcgtgggcgcggcggcggttgcgggcgcggcggcgcgggcgcgaggtaggagatgggcccgacaggtggggcccacctgtcggcgtcccgggtaggaggagggaggcggccggcctagctgggccttggccttcggccggcccagcggaggggagaggaggaaggagaatgggccggcggcccactcgaaaagaaaagggggaaaaagaaaaagaaaaaggaagaaaaggattttccctggaat

SEQ ID NO: 58436 - DNA, 261 bp, Oryza sativa
  Clone ID: PAT_MRT4530_60152C.1
atgtctcaagaaggcgagtgtgccaagactgacgtttacagtacagcatgggcatcatcatcctcaagctctgaactggcaaatctcccgctggcaatagcatgggtggtgacctgctgcagtatagtgggtggtgtccattgtcaacaaggtgtgaacctgaaccaacgagaggtgttcgcgctcgccatcgccgccaagcggatgacggacgagagaagagaaaggctgcagcggcggacgagacacagtagacgttga

SEQ ID NO: 58437 - DNA, 1090 bp, Oryza sativa
  Clone ID: PAT_MRT4530_60153C.1
atgcgtcagctagaggaaagctacactacaagcccagccgttgcccacgctggcttgtggtaatcagcggctcgggagagagggaaaaggggcgtcggcaagcgggccccactcggcagcggctcaaaggggggtgatccaccgtggaccgggaccacgcgggtggtccaccgacggcccagatcgcccccggggttgatcggacgggcggcggcgacccggctcggctcggctcaaggccggccgaccagccacggcaatggcgacagcacgcgcgcgcgaacgcgttgccggcgacggcaaccggcggcggaggcgacggcgcaaaggcgacgcgaaggcggtggcgctaagcggcggctaggaaggagagggaggggaatagaggggagaggaagcctcaccgagggtggccggcgcggaggaagacgacgacgaacggcgacggcaagccacgggaggacgacggctaccggcggacgggcttcggggtgccctaaggaaggaggagagagagattagagagagggagatgaaccacggcggccggcatccatggccgaaggcggcggtagaggtagaactcaccagagcacgaggggatgcgaattccggcgacgaatcccggcggaggaagggcggagagggggccggacgtggccgggggaggcgggaatcgccagccaacgtgggggagtgggggaggagagagaggcgggattcaaaaatcgaatcccggccatctcgggcgcgggcgcgggcgggagagagaggggagtgggcgcgggaggtgcagcgcatgcgcgggtgtggctgacgtggcccggaggaggtggaggcgtgggcgcggcagcggttgcgggcgcggcggcgcgggcgcgaggtaggagacgggcccgacaggtggggcccacctgtcggcgacccgggtgagaggaggcgggcggccggcccgcgcggcctagctgggccttggccttcggccggcccagcgggaggagaggagaaaggagaatgggccggcggcccactcgaaaagaaaagggggaaaaagaaaaagaaaaaggaagaaaaggattttccctggaat

SEQ ID NO: 58438 - DNA, 396 bp, Oryza sativa
  unsure (1)..(396): unsure at all n locations
  Clone ID: PAT_MRT4530_60154C.1
gatngccgaagggtgcnctgtggccgcggtgctggggnccggaggccgtcggacccngaccgagcgcggcggttagctgcggtncgccatnaggcgcgcgccgctgctcgtgccgctgttcgaccggtgctaccttccctgccgcccctgtctngccgggaaccccgtgttcttcatcaccgacgaccgcgtgctctgctgnggcctcgacatcctccatttcttcacccgcgagtcctagttccagccgctggacgtgtcctccccgtcggcgacgccctcctccggcatttgcacgccgcacacgcgacgcagcctcgacgccgtctgcggnggccaggcgctgcgctggatcgagttctggagcgacgcggcctccgaccgacgccgccgcgt

SEQ ID NO: 58439 - DNA, 125 bp, Oryza sativa
  Clone ID: PAT_MRT4530_60155C.1
gcccgcgatcaccttcttcgtacttactcttgtcactacacgctctttcacgcctcgtggacttgtctcatgcggctctctcgtctgtccggttctctgcctaatgttgtgttctgacgactgac

SEQ ID NO: 58440 - DNA, 1296 bp, Oryza sativa
  Clone ID: PAT_MRT4530_60156C.1
atggcgacctccatcgccaccggggagcacaccgcgaccatcctctcatccccgcaccgccgccgctgccgggggctctgggtgttcccggccgcccgtgaccacctccactgccgccgcttggccgctagctccgaacacgactgccagctgagctcccttgaccacctaagtcggtttcctcccccaaaaccgacttctcgtgcctataaaacccaagccgagctcctcctcctctctatccctctcgtcttcgcctgccgcgccttgtcgccctgctcggctcgcaccgtcgccgttcgtcgccaagcaccaggaggccggtgcgtgcgtggacgtgtgacgaggagctccgggcacttcttcttccccttccccagccgctcccggagagcttgctcccgcgccgccgccgctcgtcacggcgccctgtcccaaagtggtagccctccgttcctcttcctcgctcgccctcctcctcctttaactcgcgtggtagctcggttagccttccggtggttcgtaggcgccgccccaagccccgccgccgctcgccatggccttgccgccgtcggcgcccgctcccggaggccgcctctcgtcgccagacctccacggcgcctccctaccccatccgatcccagaaacgacacccttaagccccggagatgctcccatccctttgaatcgaaccctcatcgtctcgtcgtcgtttccccctttgcttgccgccggttgctgccgccgcgattcgccgtcgccggctaccctccggcgaatctgagccgttggctcactctctcttgtcctccttgttgttccaatgtgctccccgtcgccctcgccgtcgcatggcaccacgtcggcgccacctcggctttgactgagccgagccggtcagccgcctcctccctccccaccctcgcgcgcgcggtccacggtgcgccaaccggctgcgcgtgggcccgccgcatccctggtccatccgcggctcgggagagagggaaaaggggcgccggcaagcgggccccactcggcaacggctcaaaggggggtagtccaccgtggtccgggaccacgcgggtggtccaccgccggtccacgggaccgacggcccagatcgcccccggggttgatcggacgggcggcggcgacccggctcggctcaaggccggccgaccggccacggcgatggcgacggcgcgctcgcgcgaacgcgttgccagcgacggcaaccggcagcggaggcgacggcgcaaaggtgacgcgaaggcggcggcgctaagcggcggctag

SEQ ID NO: 58441 - DNA, 561 bp, Oryza sativa
  Clone ID: PAT_MRT4530_60157C.1
atgcggggcccaccggtcagcggctcgggagagagggaaaaggggcgccggcacgcgggccccactcggcagcggctcaagggggggcggtccaccgtggaccgggaccacgcgggtggtccaccgccggtccacgggaccaacggcccagatcgctcccggggctgatcggacgggcggcggcgacctggctcggctcggctcaaggccggccgaccggccacggcgatggcgacgacgcgcgggcacacgttgccggcgacggcaaccagcggcagaggcggcggcgctaagcggcggctaggaaggagagggaggggagtagaggggagagggcgcctcaccgagggtggccggcgcggaggaagacgacggcgaacgacgacggcaagccacgggaggacgacggcaaccggcggacggaggtagaactcaccggagcgcgaggggatgcgaattccggcgacgaatcccgacggaggaagggcggacggggtggagttcgtccttgcgaacccgacggcggcgacggcgcggtgcggcggcgagcctagcggcggc

SEQ ID NO: 58442 - DNA, 1088 bp, Oryza sativa
  Clone ID: PAT_MRT4530_60158C.1
atgcgtcagctagagaaaagctacactacaagcccagccgttgcccacgctggcttgtgggctgacgtcatcaagggagggggggggggggcggcgccgacaggcgggtcccactggtcagcagctcaaaggggggccggtgcaccgtggaccgggaccacgcgggtggtccaccgccggtccacgggaccaacggcccagatcggccccgagccgattgggcggtggcgatagtggaggccgccgggctcggctcggcatcaaagccggccggccggtcagggctagcggcgatggcacgcggctgacggcgacggcgatcggcagcacgggaggcggcggcggcggccgaaggcgacgacgcatgacttgaagtggcggcgcggctctaggagggagagggaggggagtagaggggagaggacgcctcaccgagggtggccggcgcggaggaagacgatggcgaacggtgacggcaagccacgggaggacgacggcaaccggtggacgggcttcggggtgccctaaggaaggaggagagagagattagagagagggagatgaaccacggcagccggcatccatggccgaaggcggcggtagaggtagaactcaccggagcgtgaggggatgcgaattccggcaacgaatcccgacggggaaggggcggacgaggtcccggacgtggccggtaggggcgagattccgccggccaacgtggggagtgggagaggagagagaggcgggattcgaaaatcgaatcccggccatctcgggcgcgggggcggacgagagaaagagggaagtgggcgcggaaggtgcggcgcatgcgcgggcgtgccgacgtggcccggagaagccgtaggtgtgggcccgtcggcggttgcgggcgcgaggtagaagacgggcctgataggtggggcccacctgtcggcgtcccgggtggaaggagggaggcggccggcctagctgggccttggccttcggccggcccagcggaggggaggggaggaaggagaatgggctggcggcccactcgaaaagaaaaggggaaaaagaaaaaggaagaaaaggattttccctggaat

SEQ ID NO: 58443 - DNA, 163 bp, Oryza sativa
  Clone ID: PAT_MRT4530_60159C.1
acctgaaccggagccggcagggagcagatctcggcggccgagcagaagcgcgggctcggcttgcgaggacgaaggcgcgcgcgcgagcgagggagtagcagcgaggcagacggggaagagatggatccgacgcgtgaagtcgacgctctcactgctgcacgtc

SEQ ID NO: 58444 - DNA, 2052 bp, Oryza sativa
  Clone ID: PAT_MRT4530_6015C.1
atggcggcgccgccacggccccctcgccggcacgcgcgtgcacccgtgggtgcatgcacagccatcgaggggccccaaggcggtgccctttgccctcccccctttgctggcgttgacaatgaccggcgacgtggtttagatctagccaggtggttctatcgggtggatgaacaacaatatagagatgaaacgagagggtttagagaccgaccggttgaggtgttggaggatgaagaagtgccggccatcgtcgttgtcgtcgcgggcttgtcgtggatggtgacgacggtggtcgtgatggcgtcggtggtcgtggcgtggacgaccgtcggcggcgtcgatgaggcgtggcgcggcggtgaagctttgcgtcactggctacgccccctctcgatcggattaggggtgacgggagcccaccagctattgggctgggcgcccccgatcagggcgcgtgtcaaggccccttgtgccgttgggctcaaggggagggagatctatctaacaatctccatgatcatgctggcggcgctgacggctcagcagaacaaggagtgcgagcagctcgcccgccgcgtgttcatgattgccgagctgctgccgcacctgcaggatccggaggtgatgcggaggccggaggtccggcggccgctggccgggctcggcgacacgctccgggaggcgcacgagcttgtgatgtcctgtcagggcatgaccatggagttgcaagaaaatgtggtgctccatggagacgaaggtgagaaattcacctttgcggagctcgcgacggccaccaacaactttgcagctgacagagagatcggtaaaggcggcttcggcacagtgtacattggatatcttcttccggacgggcgagacgaggtggccatcaagcgcacgcacaaggacgagacgtacgggacaacagctaaggaattcatggcagagctgcgtgctggaacaggagaagcgccagcttcttccaccgttccggaagatgaagaaggtggaggagcgcctgatcgtctacgagtacaccaacaacggctcgcttcacgaccacctgcacggtacaacgccgccgccgtcgtcctcgtcgtcgccggtgaggacgtcattgaactggaagatgcgcatcgagacactgctgggcgtgtcgcgagccatcgaatacctgtagtgctacaacgagcgaccggtgatcatccaccgcgacatcaactcgtcaaacatgctgttcgacgccacttgggcgccacgctttggcgcttggctgacttcggcgcgtcggtccgctgcgatcactcgacgagaagtgttccggccgatgctttctatggcaagttcggatacatcgacctggagtacgccacgacagcgatcgcgaagccaacgatcgacgtgtacagcttcggcgtcgtgatgctggaggtgttgacggggatgagggcactcttttaccaagaggaggacgtgcacaaggtgttcgactgttcggaggaggatcggaacgcaatccccgccgtcttggctgaagtcacaccgccgttcatcgaggtaggggagaccgttggttccgctgctgctgctgttgttggtgttcgcctcgtccgtgtcgtcggttgtattctcgggctgtctgagctgcaacctaagttaagatatgtagccttccacgataaaggatatgacatatggaaatgtttgcagtttggacttgtcaaaaggttgcagtttggactatggaaatgtttcggctaccagcttgccgctatggttcttcgtcccacctacatgagcgtgagtactcgcacgacggcgacaaatgaagtgctcgacaggtcttgctgtgcagacaatcacgcgagatgctacagtgattctactctgatcctctcagagcgggtggcacactcgaaatcagcgacggcgacggtcggtggtggccgcggccgccgtgagctcgcggtcatcgacggcacactccgaaggaaggggagcccgtgcgcctgcaccacagccaccaccacctccaattccaccttcgcctag

SEQ ID NO: 58445 - DNA, 570 bp, Oryza sativa
  Clone ID: PAT_MRT4530_60160C.1
atggcgacactgccggtcgctgtcggcacagcgagaagagcgccgaatgttggatggaggacgtcggagcgtgggaaggtcgtggtggcggcgttctggctccgtccgcgatgctggggagggagaagaagaggtggcggcgaggccgaggaggcgaggatagggatgaggtggcggaggaggggcgtgggaggggaggcagtgagctcccgccgcccccgcggtttcgccgcccgtcactcctgccgctcccgccgcctcgccactccgtcgagctcccgccgccccgccattccgccgaccttccgccgccccgtcgctcccaccgagctcatgccgcctcgccactccgccaaagtcccgccgctccgccgagctcccaccgccccgtcgctcctgccgcccccgccgagctcccgctgccccgccgctccaccactccaccaagcacccgccgagctagctctctccatctcgcttgccgtgaggataaagaggaaggggaaattgccacgtaagcgccacgtcgatgccttatggaagtcaacccgccatgtaagtgccacgtag

SEQ ID NO: 58446 - DNA, 177 bp, Oryza sativa
  Clone ID: PAT_MRT4530_60161C.1
gggttcaataaaaggcattctttttattaaagcaaaccccacgggtcccttgcccgggtaattgtccaaaactcagggattggcccgttgattttgatccaacccgtgcccaaacttaacccacgggtaattttttttaaacaggttcaccaaccaacaaacgggggctaaattttt

SEQ ID NO: 58447 - DNA, 297 bp, Oryza sativa
  unsure (1)..(297): unsure at all n locations
  Clone ID: PAT_MRT4530_60162C.1
gggctgcaggaattggcacgaggctgctttcccctcctcctccccgcgagatccatccatggtggcctgctcccgcccccggatctggccctgtacgaggccngcattgccggatatttttggccctcctgccatttcctgaggtgtcctgtcgtttcccctttttcttttttcttttttggcccatttcttgtgaggtgctttctttgggttgggttcttgatccgtcgcatttcgcgcctggcactcggcgatccgttcttgcgatcccccgcacgttgcaagcgcggatttgtt

SEQ ID NO: 58448 - DNA, 2362 bp, Oryza sativa
  unsure (1)..(2362): unsure at all n locations
  Clone ID: PAT_MRT4530_60163C.1
tggatccccgggctgggcgaatcgccccgctgttttctcttccgctttttcctctctctctcgcctcgcctctgcttcctcctcccgttcgtctcccctacctacctagggtttctcgccgcctcgcatcccctcctcctcctcggctggttcgcctcctactctacgcttgctgctgcaggtacaagcgataagcagtagcttcttcatcaaaggttttgtgcaaaattatgcgatcttcatgggctgattcagttgcgaacgccgaggaatcggcgcccgcgactggtgctgctcccacccctgttgctaatcaccagaactcacgccccactcgcagcgcatacgtgcctcctcacctccgtggccaggcaccaaccacaactgcagctccagctccagctccaggaccagctgctgtccagccctcagcttctgtacagccttctggttacgcagctattgttggtggctctcgctgggctggccctgccagtggtgatggtactggcgctgtaggtggcccacgccagagcgttggtggtcgtggtgggggtgggggtgggggtgggggttggaactcccgccctgngtgggaccggagagaccgtgaacctaacccttttgccaatagcgaggcagaggaagccacagaggttgattttgatacggcaaacactggcatcaactttgatgcctatgaggacattcctgtggaaacaagtggccatgatgtgccaccgccagtcaatactttcgcagagattgatttgggtgatgcgctgaatgagaacatacggaggtgcaaatatgtgaaacctacgccagtgcagcggtatgccattccaatctccattgcagggcgggatctcatggcttgtgctcagacagggtctggaaagacagccgccttttgtttccctatcattagtgggattatgagctctaggccaccacagaggccaaggggatcgaggactgcataccctcttgcattgattttatcccccactcgcgaattatcagtccaaattcatgaagaagcaaggaaattcgcataccagactggtgttagggtggttgttgcgtatggtggagcaccaatacatcaacagttgagggaattggaaaggggcgttgaaatccttgtggcaactcctggtcggttgatggatctgctggagagggctagagtatcactgcaaatggtgaagtacttagctcttgatgaagctgatcgaatgcttgacatggggttcgagccgcaaattcgtaaaattgttgagcagatggacatgccccctcgcggtgtgaggcagacaatgttgtttagtgctacttttccaaaagaaatacagcgcatggcttcagatttccttgcggactacatcttccttgctgtaggaagagttggttcaagtactgacttgattgctcaaagggtagagtttgtccttgaagcggataaaagaagttacctcatggatctcctccatgcccaaaaagcgaatggtactcatgggaagcaagcgcttactctggtctttgtggagacaaagaggggagctgatgctttggagaactggctttacacaaacgggttccctgcaacaagtattcatggcgaccgaacacaacaggaaagagagtacgcgcttagatcattcaagagtggagcaacacccatccttgttgcgactgatgtagctgcccgtggacttgacatacctcatgttgcccatgtcatcaattttgacctcccaaatgacatagatgactatgttcatcgtatcggacgaacaggacgagcagggaagtctggcttggcaactgcatttttcaacgagggcaatctatccctggcgaggccgttatgtgagctaatgcaggaagcaaaccaggaggttcctcaatggcttgaacgatactcggcccgttcttcgttcggaggtggtggtggcagaaaccgccgatcaggcggtgcccgttttggtggccgtgacttccgccgcgacaataggggtggaggcggcggcggttatggtggtggcggtggtggctatggaggcggcggttatggagggggcggtggatatggcggtggctatggtggtggtcaaggctcaactagttcgtgggactgatactgattcccggctgtcgcgagcaacgatcatattctattgatttccctgaaaacatctgatgtgttgggatttgtaatcagcctggttggcatggtgctggaaaatgcgcccgtttaccttcaatttatggatggttgttactgcactggctttctcgtttactggcaatagtcttggttggctgattcccgccctatagtgagtcgtntacnant

SEQ ID NO: 58449 - DNA, 540 bp, Oryza sativa
  Clone ID: PAT_MRT4530_60164C.1
ttacaggacacccaaaaaaagtgtaattagctgtgggacaatgcaaagacgtgaatttgcccgaggacacttcaaaaatgtggtaatttgctgcagaacactaaacgcattaaaatataatatccagtcaatggatgagagagaaagcacataaaatggtaattttgcccttatcttcttcttcctctcgtccttgcccaacatagagtagagcctcctcagcttgtcgtgtggggcgcgcatgggcacatgcaccagcggccgattgcctggaacccctccacgcaggcctacgactgggtcggcttcacctgcgacgccaccaacgccaccatccttggtctccgcccacctagcgtcagcctcatcggatgctacgcctctagcggtgaggagtccgtggcggcgggcgtggcctgcgaccgcactcacaacaggggacgcacgcgagaggatagtcagaagaagaacgagagaagggagaagaagataagggcaaaactgtcattttacgtggtttctctcttatcaattgactag

SEQ ID NO: 58450 - DNA, 1077 bp, Oryza sativa
  Clone ID: PAT_MRT4530_60165C.1
atggcgcctgctgctcaggagctgctgctgcaagaagtgccgcagcctcgccgcaccggcgcggccctcatcgtgggcgccaccggctacatcggccgtttcgtcgccgaggcctgcctcgacagcggccgcgacaccttcatcctcgtccgccccgggaacgcctgccccgcgcgcgccgcctccgtcgacgcgctccgccagaaaggcgccgtcgtcatcgagggctgcgtcggggggaaggaggggaggaagtccgtggaggcggcgctccgcgcgcgcggcgtcgaggtggtgatctcggtgatgggcggcgccagcatcctcgaccagctcggcctcatcgaggccatccgagctgcaggcacggtcaaaaggtttctgccgtcggagttcgggcacgacgtggacagggcgcggccggtgggggcggggctgaggttctacgaggagaagcggctggtgcggcgggcggcggaggcgtcgggcgtgccgtacaccttcatctgctgcaactccatcgccggctggccctaccacgacagcacgcacccgtccgagctgccgccgccgctcgaccgcttccagatctacggcgacggcgacgtcagagctttcttcgtggctggaagcgacattggtaagttcaccatcagggctgcctacgacgcccggagcatcaacaagatcgtgcacttccgtcccgcctgcaatctcctcagcacgaacgagatggcgtcgctgtgggagagcaagatcggccggacactgccacgcgtgacgcttaccgaggaggacttgatcgccatggctgcagatgacatcatcccggagagcatagtcgcttcactgacgcatgacatttttataaacggttgccagacacatttctacatagacgggcctagagacattgaaatctcaagcctttaccctgatattcccttcagaacaatagacgaatgcttcgacgactacatacatgtcctcaacctagcagaggaagctaaagaagaggaggagaagaagaacgcgccaacagttgggagattggcaataccacctacttgtgcttag

SEQ ID NO: 58451 - DNA, 101 bp, Oryza sativa
  Clone ID: PAT_MRT4530_60166C.1
tagaggggaaaacatcggcgaaattaagaacagaaaagcagggcgaatgattgagtcggagaagaggagatctgcaggccgctgcgattccaccaagacca

SEQ ID NO: 58452 - DNA, 374 bp, Oryza sativa
  unsure (1)..(374): unsure at all n locations
  Clone ID: PAT_MRT4530_60167C.1
acaggtaagagattttatttgggttcatcgcccgcggggggggctcaaatctccccgtggctgccccgccggggcactccgaccccaacgacccaacggatcccaaaccccccacccatcgagctcgccacggggcctgcttctccaccaggggggagcatcccaagccgcagcgtcgctgcgcggaggcaggggtagcaccggtggatcggggggcgggggcaagcggcgccggcgccgcatccgtcctcatcgccaccttccccacaacacaaggtcccaggttcgatcgatcgatccatgtcatgtcatgcatgatgatgcataggccaccgcaggcgcggcgggcggcgtcnctctgccctgctaggctc

SEQ ID NO: 58453 - DNA, 873 bp, Oryza sativa
  Clone ID: PAT_MRT4530_60168C.1
atgggccaccgcctgggattcctctcccacatgccctctccgctcgccacgtgcaccgctcccatcgtgtacagatcagcagagagcgacgccgctcgccgcgcctgcggtggcctatgcatcatcatgcatggcatggcatggatcgatggatcgaacctgggaccttctgtttgtggggaaggtggcgatgaggacggatgcggcggcggcggtatcggcaccccccgatccaccggtgctacccccttcctccgtgcggcgacgctgcggcttgggatgctccccccccttggtggtggagcagccgccgcggcgagctcggtggtggggggttttgggatccgttgggtcgtggggtggggtggggtgcggtgcggcgaccgcgccgagcccacgctgagatctgagccaccaccgcggcgatggatggatgattctttgacgctctacaaactgagctataagggcaagcagaaattatggggaaatttaactatttgccattggatccatgccattgtaactggagtatttgctactcttcgacacttcggggccgcctccaccatgcggctggttgcctggatgctcatccatggccgtgcggcggcgttgggggccgggaaccgtggcgatgaggacggatgcggcgccggcgccgctgcccccgccccccgatccaccggtgctacccctgcctccgcgcagcgacgctgcggcttgggatgctcccccctggtggagaagcaggcaccgtggcgagctcgatgggtggggggtttgggatccgttgggtcgttggggtcggagtgccgcggcggggcagccacggggagatctgagccaccaccgcgggcgatgaatggatga

SEQ ID NO: 58454 - DNA, 650 bp, Oryza sativa
  unsure (1)..(650): unsure at all n locations
  Clone ID: PAT_MRT4530_60169C.1
atctgtattcttgtttcaacaaataaatatcatatgtacaaaacgtaagattgcaggatcaattagttcctgtacaatgagttgtatctacagaatgaatacaaggtagtgatgcttatccatgctgagcgctgcggctgcattccatggccagaaccaagcactttctagagtcccatttggagtagcagcactgtctaaccattaatgcagatgcggctggatatgcatcaccatcagctgttagcactgagattgaaatttttgtcccgtttcactgttggtcagtgactcagtgttacagattttgcatactatgtgcagcaaggacaaatacatacctcatgattgaaagagggtaacagttgcaatatatccatttttcatgacctcaaaagcaatattctgatatccatagacaaaagttgacccaaatggattattcatggagccttgcgtctggattgctgctcgaccacaatcaccaaggatctccttgacttgttcccactttgtgcgaggcgttatgcaactctttaggatactaccaggctgatctgtnccttcagcttcggcatcatagataacaaaagtacactttatataggaattgaaatctgaatgaccaaggaagtttgtgtgtaaaacaa

SEQ ID NO: 58455 - DNA, 348 bp, Oryza sativa
  Clone ID: PAT_MRT4530_6016C.1
atggggcgggaatcggcagagcgggcagagatggctgacccggagccagtccgagatacagctcccatggaagcaatgggagcagggcatcctcgccagcatctctccttcctcgaaatcctcgaagcacacggcgcactcgcgctccctcgcctcactcgataccgcctcctgcaacgcggcggccacggccgtgctcgacgcggggacaacgccggcaacccaccgccgtcgtcgctgtacatgttgtcagtggtgccagtgccacggctctgttgctccatgtatatatatgatgctgaagctgccggaagaaatccctgtccagtgttatcctcccctctctga

SEQ ID NO: 58456 - DNA, 490 bp, Oryza sativa
  Clone ID: PAT_MRT4530_60170C.1
tacacaagagcgcacttaatggaccaatccagagaattctgcccacacttgcatcaatgcaccgtcaaatactgtagcctacaaggcaaaagagtacagacgacaacttcacaggaggcgtgtgcgttccgtagagcagacaactcttgactcactaaccgaagagtgtaaggtgcagttgcaaaatctggttggcttgctggacaccgagcgatcagactcttctgaagaagctatcgtagtctgccgatacaagttctagcgctcttttggccctttttttggttcggtaggttcttattgctgagttgagctatgccaagcctatgtagaacagattaaatgcaacttgtatatagctgtaattttaggtgagcattaggtctaactaatttaagggttctttttttgttcgttggatgaccttcccccgtcggcgccatcaaccatgtcatcgccaggctgtcctccctctattcttcaaaaaaaa

SEQ ID NO: 58457 - DNA, 472 bp, Oryza sativa
  unsure (1)..(472): unsure at all n locations
  Clone ID: PAT_MRT4530_60171C.1
cggactcgtgggtgaggattcaaccccaaaggagacgcctccaaaagctgtggttctgtaggggaggttttgggtggcagaggcatcttgggaggttctgcttttggtgacttctcttntacccaaaatctnnaactacaaatcactgctaaatgacaagtactttttttgccgggggggggggtcacgcatcgttttgcgcatcgtttgacggattcacaaaacacatgttgcaatgctgaccacatttcatgaagttggcatgactcatttgatgaagctgcggtcttgttataaggatgagtttggcaccaggcacggtgtccaattgggtctgatgtcctgctttgtgaggggtgatgttacaggacttnaaaatcaaccaattggcaatgctgtcattgatggtgatgacatcatatacagagactatgttgacttcagngttgcttggtggtctttncaaggtctt

SEQ ID NO: 58458 - DNA, 1292 bp, Oryza sativa
  unsure (1)..(1292): unsure at all n locations
  Clone ID: PAT_MRT4530_60172C.1
tttttttttttttttctctccttcctttggaacttcaggaaggttaaaacaaaagcagcatgtgaacatataagcacactgggaataaatcatgttcagacttcagactaattttcgacatataagcagacacgggcccctcattgttcaatctttccatcaggtaccagaacaagatgatgttttctactacataatggtttgtttcgagctaatcaaaattcaaatcagggcaaaaacatgatacaccggaaataacatgctgagtttgaggaccaaaatcttgatgtgcaaacatgaattacttgttctaatcaattttacaggagaatctaggggggggggggcaaacacactgagattcggcgatgttagatagggaacccgtcccatgttcccttgagttgcccaagaaatctgatgttcagagagttaaaatctgcggccttgagtcactttgccttcttaataagagttgatgtgcggaattctgcgtcatccttgatgaaactccaccagagatatgtgagaggaatggtgcttgcatgccacagcgagtgtgcatcagcgtatcccttgtacggaaggaaagtcgtatacttcgagaagcatagcaagtgcaccaccaaagacaaccacccaaagcttgaatcgtgatggatgctgggttatgccagcccaaattgcccatgccagaagttgaaccacagccatcaccacgcaaactttcatgttccacccatagtcaagctcatagaagttaagatacaagatgtgtgttgtaacaaatgccaaaattggagcagcaaacatcaccctggtagcctcgtccttgacattgaaagtccttaacaatgaaaggattaaagaatagccaagtagagccacagctgaagagtaatccaacttctcagtcaagtctatatccctagtatggaatatagagctccaaaaccatgcgttcattgataatattgcatatatatgccataatccagtgtattcgtagtatgtcctcttagtttggggtctaacaggtaatttgtaattcaccagcaggaaaaatgaaagccagccagtgaagtgcatcaataggttgacagcagacagtgcagctgagagtggctcttggaagacagaaacacgtatgaagggccattttccatgatacttaacagggttcagaccacgtgattgcctttcaccttctctttgcatcatgcagtataacggcagtcattcatacagtttagttgcttccactgcatctngggcgaatcntcnaccaangg

SEQ ID NO: 58459 - DNA, 449 bp, Oryza sativa
  unsure (1)..(449): unsure at all n locations
  Clone ID: PAT_MRT4530_60173C.1
tccgcgtctcccgacgggtgcccctcctccgcctccttccatctctgctcaaattccacaccaaaacccccaccacgcatcagcaaattcgacccaaaacctaatccccagcaaacagagaatccaatcacagtccgtagagtaagagaganagagacctggctggcggngtgganctcctcgcgcgccgcacgctcccgctcctgcgaaaaccgtaaaatggaagaagaatcagcactacnanaggaagaagaagatccgacaaggcattggatgatcggcaagaaaagctcacgccgaagaaccggtgctcgganacnaacgaaaaaaactgcactgcaactgcgggaagcgccgccgcctccgcctccgccgccatcgccgccgcgccggtgagctcccgcttcctcttcctcttcactcgacgagccaaaaaaaaaaaaaaaaaa

SEQ ID NO: 58460 - DNA, 1251 bp, Oryza sativa
  Clone ID: PAT_MRT4530_60174C.1
atgccgcccgaggccgagaacaagccggcggaggagaaggccccagccggcggggacgagtgcgccgcgagggcggctgccggcagggaacccgccgcggagagaggcgtggcggccggccgtctatggtgtcgggagaggagggcggcggcggcgacaagaaggggaggaagtaggcgaagaatagcgtcgagacctacaagatctgcatatttgaggtcctgaggcaggtgcaccctcacatcggtatctcctgcaaggccatgtcgatcatgaactccttcatcaatgacatcttcgagaagctcgcgcaggaggccgcccgcctccaccgatacaacaagaagcccaacgtcaccccccgtgagaaccagacctccgttcgcctggtcctccgcggtgggctcgccaagcatgctgtctccgagggcaccaaggcagtcaccaagtttaccgagcaagaaggcctgtctctctaggtggaagattacattttgtggcaaacttccctttcccctacgtctgcatgagtgcttaggtcgcagtagctccatacgttgtccctaactggtgcagtttgcttgattttaatgggcactttgtacttgaagtaatctggctcagttccaacatagacctatgagcacttctcctgtcctgaatgcgtaattttgtgacttttgttgagcccagtattggtttgcgaacaacattgtttgttttttttttaagatccaaagaaagctttcaaacaggaaaaatagtgttggaaggaaaggttgaaaggatgaggccgggttggaaggtcatatgtgggtggaatgctgcatgccccatatgccactcaccgaggtactatccctctccccgccaactactctccgtagtcgagcgcagtcgagttccagacggcgaaggttggcggcccagaccttagcgacgacagcagctggcggccagacggcggcggaggtcgcgcggccccctgattccacgccgccggccgaatccggcgaggaaggaggcgtaggagtccacacgggggaagaaggcaaagcggctgccgccggagagggatccgaccccttcttccccatcatcgctgctccctcgttgccgtcgccaacacagcctcccttgctcctgcctcgtcatcgcggagctctcttggtgacggaggaaatcggacggcgacgacggtgcaggtgggaggcggcgacagcgcgggacggcgatggcgcggataggtaa

SEQ ID NO: 58461 - DNA, 2489 bp, Oryza sativa
  Clone ID: PAT_MRT4530_60175C.1
ctgccggcatcaacccgacgccgcccccgccgccgcctcgacgcatccgcttccccccacgcgagccgaagcttctagaaccttcgaggccgcggctcccacgggcggcaatgcagagcgcggcggccgtcgggctcctccggccatgcggcgccaccaccgccgccgccccgctccagctccgcaaccctagcccccggggcttcggcgtcggagtcgggcagccgctgctcccgccgagggggctccgcctctccgccgtggccccgcgcgcgggcatctccgcccggcgcatcgggctcgtgccggcctccccggagcaggaggatgagcggcggcggggcgcacgcgacgtggccgtggcggcgacagcggcggcggcgggtgaggcaggggcggaggagggtggagggctcgcgaagacgctgcagctcggcgcgctcttcgggctgtggtacctcttcaacatctacttcaacatctacaacaagcaggttttgaaggtttttccataccccataaacatcacaaatgtccagtttgctgtcggcactgtcattgctctgttcatgtggattaccggtatccttaaaagaccaaagatctccggtgcgcagcttgctgctatccttcctctcgctatggtccacaccatgggcaatcttttcacgaacatgagccttggaaaggttgcagtgtcatttacacatactatcaaggctatggagcctttcttttcagttctgctttcagcacttttcctcggagagatgcctactccttttgttgtattgtctcttgttccaattgttggtggtgtggcattggcatctcttactgaagcttcatttaactgggctggattttggagtgcaatggcctcaaatgtcaccttccagtcaaggaatgtgttgagcaagaagcttatggtgaagaaggaggaatctctggacaacattaccctcttctcaatcattacagtgatgtcattcttcctcttggccccagtaaccttgctaacagagggtgtcaaagtcactccgacagttctgcagtctgctggtctgaacttaaaacagatatacacaaggtcactgattgctgcgttctgtttccatgcataccaacaggtgtcgtacatgatcctggcaagagtgtcccctgttactcactcggtgggtaactgtgtcaagcgagtggtggtcattgtgacatccgttctgttcttccgcacccctgtttcgcctatcaactctctgggaaccggagtcgctcttgccggagttttcctgtactcacaattgaagcggcttaaacccaagcccaagactgcctgattgtgtcttggtatctatcgtgaagaaccgtagaagcattgccacacgccatcggaatgagtgccttagcttagaatgatccttggagaagctccatccagtgaactgatgctgctgtgtgtatcgtttgtagttgagttactagcgtgctaatcgtggcaaggtttttgtgtcttctttaccaccttatgcttgaacagtcaattattttgttgtatcaataaatttcgtgcaatataacgttatattatctctgtttctttatggaagtattactatccttgtattataaattaaaaagtaaatttcaaaaaactcactacttccgattgttggtggtgtagcattggcatctcttactgaggcttccttcaactgggctgggttttggagtgcaatggcttcaaatgtcaccttccagtcaaggaatgtgctgagcaagaaactcatggttaaaaaggaggaatctcttgacaacattaatcttttctcaatcataactgtgatgtcatttttccttttggcccctgttgccttcctaacagaaggcatcaaaatcactcctacagttttgcaatctgctggtctgaatgtaaaacaggtgcttacaaggtctttacttgctgcactttgtttccacgcgtaccaacaggtgtcctacatgatcctcgcgagggtgtctcctgtcactcactccgtgggcaactgtgttaagcgtgtcgtggtcatcgtaacatcggttttgttcttcaggactcctgtttctcctatcaactccctcggcactgccatcgcacttgccggagttttcctgtactcacaactgaagagactgaagcccaagcccaaggctgcgtaactgaagcatgcagttgccatcttattgtagcagtctttccaagatgaattgtcgtagcacacgtttggaaatttatagtgcatttagtgtagagggaagctgaacatgttcacgttgaagctaagtgtagtaggatcatgtatgtggtctaactcttacagttaaagcagggttttgaagtacatgagcagatttccgtgcgtgttgttgcaataaagtttcggcttcaattaatgcccatcaaaataattattattctagaacatcttaaatttcatgcaaacatcatctag

SEQ ID NO: 58462 - DNA, 664 bp, Oryza sativa
  Clone ID: PAT_MRT4530_60176C.1
gagagaataaagcgtagtttttttcccctgtcagatgaactttctgaatattagataatcgacattggacattggacggatatgagcaaaaaaaaaaaacaaagcaccaatttaagctaatgtcatcagataaactgtactcaaatcaactaattacacaacaaattaaccacctcctctatttcttcaaataaaaagcacctgaatcacatcacaggcttctaatccaaagggtaaaatctccaaagaatgcaacaaatcaacaatgcacactgatctcaatgctaccacagaagcaggagctgtgccagcgccgccacgaccacgccggcggccaccggcgccgccgccgccgccgccgccgacgacttgatctgtattgggaagttgcattgcgcggtggtggggtcggtctcggtgggcacggcgaggccctggaaattgcaagcctcctccttctggctctgcgcctggaagtaggcgttgaaggcgtaggacgcgttgccattggtgtccatgccgttgcacgacgagccgaagccgagcggcgtgcagtcggcgtacgtgcaggcgagttgaatgttgtcgccgagcttggacacgtccttgcattgggggttgaatgacgcaccacgtctgggggtaggtactcgatgcccttggc

SEQ ID NO: 58463 - DNA, 266 bp, Oryza sativa
  unsure (1)..(266): unsure at all n locations
  Clone ID: PAT_MRT4530_60177C.1
ggcncgaggcttggtgagggaaaattttngtcncatggaagattatattgaagctgtcnctggaagcaccaaaagggtttggttttctctgtgttgnaccatttttcatttgcncggcncttgaaatntatactgcnctaattgcagatgtgccgagaaagatatatacncagaagcaatgtttgtcncatcntttttcnctgtagcaaattttnatgagatcaatggctccagctcctgtgaaaaaaaaaaaaaaaaaaaaaaaa

SEQ ID NO: 58464 - DNA, 1380 bp, Oryza sativa
  Clone ID: PAT_MRT4530_60178C.1
atgggcggagatcccaccgccgacccctcctccgcatacttcatcgacgccgaccacccgtacgccgccgccgccgcctccgcgctcacctcccaccgctccaggtccaagtggtcccacctctcctccctcgccgtgcccgatcccctcccggcctccgccgtcgcggcggtccccctcctgctccgccgccgcccccacgtggccctcagcttccacctcttcgccacccgccgcctcctcccctctggctctccgcccccgctcctcctctccgtctccgccgcccatgtcgccgccgcttcccgcctccgccgcgccgccatctccctcctctcctccgccgcccgccactacccgcattctcaaatcttcgccgccctggccgccacctaccgccggttcgcctccgcgcccttcgtctttgaccttctcctcctcgcctacctccgctcccgccgcgacgccctcgccgcggcctccgtcgcccgccgcatcctcgctgccggcgcccaccccctcccctccacctccgccgccctcctccgctccctcccctccgccgccgcggccctcgacatgtaccgcgaaatctacacgcgcccgagttcaaggatcaacagccagctactgccgaccgttcataccttcaactccctcctcctcgctttctaccgtgaagggaagtgcgatgttttcaaggttgtgctccaggaaatggacagatattcctgcgtacacaatgtgtgcacctacaatatccggatggccgcgtattgtgatagcaaggaggtggagaaggcacgagggctgtgggatgagatggttgagggaggaatccaaccggatgttcccgcgtacaacacgatgatcagtgggtactgtggtgtgggggaggtaggtatggcagaggagatgtttaaggatatggagatgggtgggatcgacccaagcgttacgacatttgaatggttggttagagggcattgtagggtgggggatatcgatgcggcaatgcttgtgcgtgcagacatgagcaggagggggttccagatggcggcagaggttgtagaggaggtggtgaatgtactgtgtcagaagaagagagtgaaggaggcattaggtgttttgaaggaagagatgaggaaggaagagtttgtgccaagtcgggaatgttacgaggtattgataagggaactttgtgagcaaggggaggtggaggtggcaatgagactccaggcggagatggctggtatgggattcaaggttggcagtgaggtgtactgtgcctttgtctgtgcctatgagaaggctgaggattatgagatggcagagaagttgaggaaagaattgtcggtgataagcattcaggatggatga

SEQ ID NO: 58465 - DNA, 322 bp, Oryza sativa
  Clone ID: PAT_MRT4530_60179C.1
gggggggtcaaaattcattggtagggttgagcattactccaaagcaaatgtctccagcaaaaaggatgagacaaacataaacttttcggggatcgcgagtacatgcacaggtgtgtttcgtagcaatagccaacatccaattttcccagtggatacacactgacaagggccatacttctgcccccaaacaggctcaatttgatatgaagaggtgcagacagccacggagtgtctgcgagaatgagagaccgagatggcccgcactgtcggcgtaatcaggtcgccctcagtatgatatgcaccggactgtctgtatcaacca

SEQ ID NO: 58466 - DNA, 456 bp, Oryza sativa
  Clone ID: PAT_MRT4530_6017C.1
tgtctcacactctgccctcattgtgaagaagaccatccaccaggggagtgtcccacccgcaaggtcacatgttttctgtgcaaaggtacaaaccatgtgcccaaggattgccaactcagtgtgttgttgatcaagactgcagaaatccaacgaacaaccctacgattgtctcgtcagctagtcagctccaacagcaacatcgacgatatcatccacagcaccaatgctcctcctgctgcgcctgactctgcaacaaatcatagcaataataccttcagcaccaaccattctctgcaccgacagcctcagcaaagaattgttgtcgatggaagaagttgtgtctctccccgacctactccaggccgagcaaagggcaatcaatctcaggagggcgataccaagcagaagaccgttctctgcttcaaatagcaatcagaaggaagcttctcctgtgaa

SEQ ID NO: 58467 - DNA, 800 bp, Oryza sativa
  Clone ID: PAT_MRT4530_60180C.1
gttcaatacatgcatacgtttatatatagtgggagtgtagtagctactgatgagtcccgtttcatttgagctagtagctagctagcttatacacacacacacagagtatagggatcatagctagctagctaggcatgggtgatcatcatgatgaggaggagaagggaaaagacaataaagcagcagcatcatcatcttggcaagcccggcgccatttgatcgtgctggcagctctggggggaaccgtggccgcgaccgccgtggtgataaccgtgtccgtcatcctccggccggtgcacgtcgagttcgcggtggcgagagcgacgcagcagaagatcgccatcggcagcaacgacacgggcatctacctgaacctgaccgtcaccgccaggagcaccaccagccgcgccatggtgcagtaccggaaggtgttcgtggacctggtggcgaagacgatacagaaagacaagatgcagctgcagatgtaccgcgccccgctccagacgccgctgcccggcaacggcacgtcgtacgtgccggccgccgccgcgacgcagcgggcgagcatcaaggcgtcgctgctcctggtgggggacagcctcaacacaaagtcgaacctcctcgcctcccagctcatcagcacaacaccttccatcaacgttgtcgtcaccgcgcaggtgtccttcaaaatcggcgtcgtctacagcagggtgtacgacatcgccgtgcgctgccctcgcgtcgtcttcctccccgtcaaccagccgccgcctcatccaccgcccatctgcaccggctga

SEQ ID NO: 58468 - DNA, 425 bp, Oryza sativa
  Clone ID: PAT_MRT4530_60181C.1
cccacgcgtccgcggccaccgctcgggatggcctcgcccgcatggctgccaccgccgcaccgtcgccagatccgcgtaaatcggggtagcctccttgctgctgtaaaaaatacaaaaagaaaataaaaaagttacagaaaaacaaaatctcactcccgagggagaagaccatcggcaccaccgcactgacgagtccatgctgtcggagatgtcaccgccaacgctcctccgccggctatgaagaagaacagggcgtcaatccccccagatccgcctcgatagttgagggatgttaggatctcctcacatatgtctcgtcatcgatctgaaaaatcaggatcgtatgagaaattaaagaatgagaatggtgggtacaggcgtacagctgtatcaacacctaatataaatagacgtttaacttttgc

SEQ ID NO: 58469 - DNA, 4038 bp, Oryza sativa
  Clone ID: PAT_MRT4530_60182C.1
atggcctcggtcccaagtgacttggcctctcgccctgacctgggtagctgcatggtggcggcgacaagtgaaatggaacgtctgaagcagctcttcacggcaagatcggtggtggcctggtctgatgaaggccagaaggtggagatcggcacatttgctgatgacatccgttcggccttccgtatccatcgctccgacattcagatcacgaagttctatccagaagacttcttcctcacttttgttaaccatagcgatcgtgaggaagtgctgcaagagccaaggctggtaactcgaagtgggagagtgtatcacttcaagccatggaatgaaaggcgcaatgctgaagtaattgatgttcgcttccatgcccgagtctgcattgaaggtatcccaatgcatgcaagatcagaagaagtggcgacaaagatcattggctgcaagagttcagtccactacatagaagagtactcccgtcgccggaactacaaccgtacctttgatctttggatttggagctcagacttgagcagctccatcctgaaggcttcaagtttctctatcacaaggccagacagtgaagcaagagccactgatgttccttttcctgagttggagccgccccggatgccgggcattcttccgcagttgtttctcctcttccccaacctctctcacctgatctgttgcccgtgtcacaggatcagagggctttgctcttgcttgaaagacacctggatcctatctgctgcagactcacaggcgacaccagttgaggtgacccggcatgatgtggaggagttcctggcggaggtgaccacacccatccagcagccactccttcctgcgccaggaaccaagccacgccgcccatgctgcaacaaggtgattactccaatacaaaggcaacgtgaaagactggccgtgaaagccagacgcaatacaaagcttgatttaattgcgcaagaaatacttgcaaagaaatttggcgttcttgatgataataagcgtctagatgaccaaattaagaaactttacttgcagcactacaagaaactgctctccccagcagacatgaagacaatcacgacactggtggagaatggaggctgcaaaggcattcggctgcgtgccaagaaggcggcatcggtgttgaactgtttcatcctcaattggaatgtcagaggcttgaacagccaagttagaaaaaaaagtgttaagctgttggtagagcagatgaatgctacaatagtttgtctccaagaaacaaagatgaatcaaatctctgatgtggatgttttgcatactctgggttctcgtttcaaaaacgaatttgcttttctccctgctgatggaaccagaggaggaatcctcctagcctgcaacgataactatttcagcctctctaatgttctccggaagcagtacagtctcacagccacagtgactatgaaaaatgatggcatcgcatggacgataactgtggtctatggacctcagcaagatgcccagaaaattgagttcatcactgagctacaggaaataaagcaactggttatgtcaccttggctgctaataggagatttcaatctaatctataaaacctcagacaagaacaacagcaggctaaatagaagtatgatgcagaggttcaaaggaactttagacagattggaggtaaaggaactgcctctttcaggaaggaaattcacttggacacaagagtgtgataacccaacccaatcaaaaattgaccgtgctttttgctgtcctgattgggatgttcttttcgactcagcacaaatgtatgccctctcttcttcctgttcagaccacgcccccttattcataacaggctgtgtggaaagagagcaaaataactccttccgtttcgagtccttttggctaaagttcccaaactttcttcagataacagaggagtcctggaacagacctttacagaccaccaatccttttgcacgaattaatttaaagctaagaaggcttgcaagagatctcagaagatggaaatcaaccaaaataggagacacgagattgcagctggcaattgcgaatgaagtaatctttcaattagatgttgctcaagaggatagagttttgtcggatgaagaacagtgttttcgaaaatttttgaaaatctctcagatcttgatgagcctttcactgaagaagaacttaaatatgtcatttctgatctaccctcggaaaaagcccctggcccggatggtttcattggggcttttttcaagctgggatataattaaaatagatatgctgcaggcagtaactttctttggagatttgggatactcaaggctacaggacctaaactcagcacatatttgtctcattcccaaaaagactgatgcttcgaaagtggaagattttcgaccgataagcctaattcatagctttgcaaagataattgccaaactgctagccaacaggcttgcacctaagctaggagatttggtctcccaaagtcaaagtgcgtttattaggaaaagagcaattcacgacaatgtcctgttcgtccaaaacatgatcaaagcatgccatagagcaaaaaagccaactcttttccttaaagttgacatttcgaaagcctttgacacagttaattggccatatctgctagaggtcctacaaaacttcggttttggtcagaaatggtgtaattggatttctaacttgttgggtacctcctcctcggcaattctcctgaatggcaccccagggcaggcagaagagtctggacttctgtcaagtctccaaagacaaagacgtttcagatgttctctttacgcggatgatgttgcccttttcataaagccaaatcgagacgagatgctagttcttcgtggtattctctctgtttttgcagaagccagtggtctttacacaaacatggaaaaaacagagatatacccgattagctgcaatgagatcaatcttgatgactgtctatccatcttcccaggcagagtttcaaacttcccatgtaaataccttggtctccctttgcacacaagaaaattaagaaaagtagaacttcagcctttggtggataaagtgggatcaaggatacctggttggcaaggtcgattcttcacttcggctggcagagaagtgttggtcaaaaatactttgtcctcaaccccaatttaccacttaacgattctacaacaaaataaatggccatacaagcgaattgacagatttagacgagcttttctttggaaaggaaaagaccctgaaaatgttagtgggggcagctgccttctcaactggtcctctgtttgcaaacccaaatctcttggaggacttggaaccctcaatttggagaaattcgcgcgggctctacgactccattggctttggtatgaatggaaagatgaacataagccatggattaacatggaaattccatgtgacgagatggatagaattctgttcagggcaagcacgcagatctctcttggaaatggaatgaaatgtaagttttggtcagacaactggctacagggaagggctcctaaagacttggcaccaaatattttcagattagcaaaaagaaaagcaaattgtgtagctctagagatgcaaaacaaccactggatcacttctttaaggatgatcacctcgattgaagagatcaatgaattagtcttcttgggaacccagctgcaagagatcaacctacactgtaactctctagataacataacctggaaatggactcaacatggagagtacacagcaaaaagcgcttatgaaattcagttccaaggctctgttgtaaacaaaaactttatgccactttggaaagctgaagctgaaccaaaacactgtttcttcggttggctgatcctacatcaaagaaccctcacagcggaaaaccttttattaaggcattggccatgtgattggatatgcagtctctgcacagaagcttttgaagatgcaaatcatttagcaaaggaatgcagtttcactatcttggtctggaaccagtga

SEQ ID NO: 58470 - DNA, 3821 bp, Oryza sativa
  Clone ID: PAT_MRT4530_60183C.1
atgagcgacaccgacgacctcaagaccaccatcgcgcagctcgccgaaaccgtcaaggccctccaggcgaccgcggcggccaacaccaaggcaatcctcgcactctccgccgacaagtcgttgtcctcgggtcccaaggcaggcacgggggagaccaacaccgaccggccacctccgcgcttccagaaacttgattttcccaagtatgatggcaagtccgatccgctcgtattcattaatcgctgtgaatcatacttccatcagcagaaaatcatggcggaggagcaagtttggatggcgggggacgagggcatcccgccctggcgccgcttcgtcgacctcctcaacctccggtatgggcccccgctccgatccacgccgctcttcgagctcgccgactgccgacgcacggggacggtcacggagtatcaagaccgcttccaggcgctgctccctcgcaccggacccttggaggaagcacagcgggtccagctcttcacgggcggtctgctgcccccgctcagccacgccgtccgcgtgcacaaccctcagtcgctggccgccgcgatgagcttggcgcggcaactggagttgatcaagcagtccacgccggcgctgccaaccgcccggcctgctccgcgcgctcttcttctggcgcctccgccacgcctcgccctgccggcccctgaacgagccgccgcgccggccgcgccggtggctgggaacccggtgaaacgtctttcccaggcggaccaggcggaacggcgtcgccttggcctctgctacaacttcgatgagaggtatacgcgcggccacaaccgcgtctgccgccgcgtcttcttcatcgatggggtggaactcgccgacgccgacgacgcccaggctgccgcggaccaggacgccgaggcgcctgtcttctccctgcaggccctggccggggtacccgccgccgacaccatcacgcacaacttcatctcggaggcggcggcacggcgctccggcatgcccctgcacacacgcccccggctcacggccatggtcgccaacggcgagcgcgtcacctgcgcgggcgtcctcaaggccgcgccgctcaccatcgacggcgccctgttcccggccgacctcttcgtgatgccgctggtgggcttcgacgtcgtactgggcacctgttggctgggcaccctggggcccatcgtctgggacttggccagccaccggatgtcgttccagcgccaagggcggaccgtctgctggtccggtgtgcccacccccggcgccccggccctcgccgccaccaccgacggcgagcccctcctggatgggctcttggcgacatttggggacctcttcgccgagcccacgggtctgcctccccagcgtgcgcacgatcactgcatcatcctcaagccggacgcgcagccggtggctgtccgcccgtacagatacccggcggcccacaaggacgagctggagcggcaatgtgccgccatgatcgagcaaggcatcatccgccgcagcgactccccgttctcgtcgccggtcctcctcgtcaggaagcccgacgggacttggcgcttctgcgtcgactaccgcgccctgaacgcgctcaccgtcaaggatgcgtttccatccccgtgcgccccctcggtcgcctacctcggccacgtgatatcggcggcgggcgttgccatggatccgtccaaggtgcaggccatccgcgactggcctgctcgccgttcgcctcgggcagtgcgcggcttcctcggcttggcgggctactaccgcaagttcgtccacaactacggcacggtcgccgcgccgctcactgccctcctaaagaaagatggcttctcttgggttgaagcggcggcggtggcacttgcggccctcaagaccgcggtcactacagccccagtactcgcaataccggacttcgccaagctcttcatcgtcgagtgcgacgcgtcgtcccatggtttcggtgcagtgctcactcaggagggccatccggtcgccttcttcagccgccccgtcgcccctcatcaccgcgccctcgccgcatacgagtgtgagctcatcggcctccgcctagcgatgattccgcaacaccactgggtcgggaagctcttgggcttcgatttctcggtggagtacagatcaggtgccacgaacaccgtcgccgacgccctctcccgccgcgacatcgaggagggcgagctcctggccatctccgcgcctcgtttcgatttcatcgagcggctgcgccatgcccaggccacggatccgagcctggtcgccatccacgatgaggtccgtgcaggcacgcgcgcggcgccgtgggccgtggtcacggacatggtcacctacgacgggcggctttacattccgtcggcctcgccgctactacaggagatcgtggccgcggtccatgacgatggccacgagggcgtccaccgcacactccaccgcctccaccgcgacttccattttccccacatgcgtcgtttggtgcaggactttgtgaaggcgtgtgtgacctgccagcgctacaagtcggaacatctctacccggctggcctgctacagccccttccagttccgtccattgtgtgggccaacatcggccttgactttgtggaggcgcttccccgggtgcacgcgaagacgatcatcctctccgtcgtggaccgcttcagcaagtattgccacttcatccccttggcgcacccgtacaccgccgagtccgtggcgcaggccttcttcatcgacatcgtgcgcctccatggaatacaccagtcgatcgtgtccgatcgcgacccagtgttcacctcggggttctggcgcgagctcatgcgcctcatgggcaccaagctactcatgtcgtcggcattccacccccagacggacggccaaacggaggcggctaatcgtgtcatcgtcatgtacctacgctgcttcaccggcgatcgcccccgacagtggctgcgctggctaccgtgggcggagtacatctacaacaccgcataccaatcttcgctccacgagacgccgttccgagtggtctatggccgcgacccgccctccatccgctcttacgagcctggcgagacccgcgtcgccgctgtcgccctggagatagaagctcgcgaggccttcctcgccgacgtccgctaccgactcgagcaagcgcaagaagtgcaaaagaagcactacgaccggcttcaccggccggtgtcctatcaggtggatgactgggcgctccttcgtctccgccagagagcagcctcgtccctgccgtgcaccactacagggaaactgaagcctcgatacgtcgggccctaccgcgtcaccgaagtcatcaacgatgtggccgtgcggctgcaacttccgccgggtgcccgtcttcatgatgtcttccatgtaggagtgctcaacaagtttgtgggcacgccgcccacttccaccccggccctgcctcctactctccatggggcggtggttccagaacctgcacgcgtcacacgcggccgtctggctcgcggcgttcggcaggtgctcgtccagtggcgcgacgagcctgctgagtcggccacttgggaagacctcgacgacttccgcgcccggtacccagcgtttcagctcgaggacgagctggacttcgacggagggggagatgtcatgtacggccgcacgtacaggcgcaggcgtgacatgcgccgagcggccgagcgcgcgacggcgacgtccagtggctgagacgacgatgtccagaggctgaagaaaggaaagaagaaatctgctgctacttttggtgtccctag

SEQ ID NO: 58471 - DNA, 271 bp, Oryza sativa
  Clone ID: PAT_MRT4530_60184C.1
ggggaaccaaagggtggtaataacccacttgggattttgggcatgtcacattacatacaaaaagggattgccttaatttttcctttacaggggtaaaatttttccttttaataatctacatgctaaggattaaacccccaaactttggggggccctttaagaaacaattattagtttaggtggagcccaaacaaagcggaagggggaacaaaaagggcctttaaaaattttttcattggaattggaggggcaaaaaccatggggggtgggg

SEQ ID NO: 58472 - DNA, 368 bp, Oryza sativa
  Clone ID: PAT_MRT4530_60185C.1
tatcatcctcatcatttttttttcgttgagatccatcgttttttccacgaattcataatcaatctaaataaaaatctacgcctctctccaagccgggcccgcttccatctgatagcttttataggtcatagactaccctcacagaccaacacatgtcttttctgcacactttgtgctcactcgtgcgcacccgagaataatttcccggtcggtcacccatcccaaattggtccaggccaagcacgcttaaccctggagttctttgaaaatcggcttccggaaaagaagttgcaacttgttgatatgagtattttagtaattctattaagccctaggctgagatgttataaggggtccggtttcctcct

SEQ ID NO: 58473 - DNA, 342 bp, Oryza sativa
  unsure (1)..(342): unsure at all n locations
  Clone ID: PAT_MRT4530_60186C.1
ctttctatcttccaaatttgagttttgtttgggttgaccagaattttccgtcctagttgaaatgtagttccccacgtgaatactggtntaagttgncacgagatggcatcccttttctacctggttatttcactggttatcgagccacttttattgtgttccatgcttttgggcccttgaagctaccccaaatggctgagaccgttatcatcatccagtcacttataatgaacccgtacccattacccctcaccttgtttagagcgagatttgttttcagcccactctgctttactgaagctaccctggctaatccttggtttattccaaccgaaaaaaaaa

SEQ ID NO: 58474 - DNA, 1741 bp, Oryza sativa
  Clone ID: PAT_MRT4530_60187C.1
ctaatcttgtccgtagtgatagtcccagagaggactctgtggctgcaaagatggtaactgctgctgctgctggtcgatcgaccaaccatttttaaattaaataaaacaataatacataagaacatacacaacaatcgttctagttagacgcctttgtcgttgagcttttcctgcaaacagatacacttattgtatttgaccccctttaaataacggtgcagacacgagcacaattagctacagctgcacaacctctcgtacacaacgaatgcaatgttagccactgacagctaacgcctagcaacatcaggtaggagcatactgttgtacaggcctggagttgtttgcctgaagcaactccggcttacgagctatctagtgaaggccgccgagtcttggtctggttcaatcgttatactagggctaagaccatcttgcatctgctgctcagatccctgtggctgcaaagatggtaactgctgctgctgctggtcttgttgcatcacatatggttgtggttgagacatgctgtagtatggctccttgataggcggagaaaccaataatcttggatcgaatgcatccaccacaggctgtgaaaaatacccctggaatgctgaaccatgcaaaggtgtaagatcaacaccaaaaaagttatgctgctgccagaagagagccttgtttgccatttcaacatagaggtattcatcggaaaatggagccatatgaatccttccagttgttggaaacattttaccacctggcacaaggaatctgtctctagctataacataggactccagcatcctttcattcaccaagagggttcccataggctccgaaataagtatgtcagctttctctggaagttcaacttcctcaactttgcctttgatgaccgttattctttgtccaagagatgggtttccagaaataagacgctgagcatgttcagccatttcagatgcctcaactgcatatacatgtctggcaccagcctgtgcagcaaataatgaaagaatgccactaccagctccaacatcaaccacaactcgaccctcaaaatcggatcgattttccattacagcagcatagtatgttcctgtcctgacaaagtcttgcaacatattttgctgatgtaataactggccatagtagtggaaatacatctttgctgatgaggcctcaatttttgtatcaaatttgcttttagaaccaattattaatccattttccaaaggttcaccagcttttccactaatcactcggtgtttccattgttgaaaagctaaatagaaggctttgctctcagcttctgtcctaagaacaaccttaattgctcttgaatatgacttctgcctcaaagaattgagagttaacatgaagccatttaaccagcctgtgcagcaaataatgaaagaatgcgactcgccgctcacgcacagccactccgtcggccccagcttaaatatctgcgcgtcagagagatcgatctcgagcgtgtgcttcgcctgggtctccccggaccagacgaggctgaggcgcggggccccggtggacgcgtccccgccgaacacggccgtggcgccgccggtgacctccgtcgacgcgcccgcggcggcggggacggagacatgggagaaggagacgttcgggaacaggtccggcgacgccatcattgttgaaaagctaaatagaaggctttgctctcagcttctgtcctaagaacaacccctcgtgc

SEQ ID NO: 58475 - DNA, 392 bp, Oryza sativa
  unsure (1)..(392): unsure at all n locations
  Clone ID: PAT_MRT4530_60188C.1
gatcggccgagttngaaacgactggccgttcggcgccacgggcgtcaagcggctncacnncatcggcnngntctacgccntnacctgcatgccgggctcctaaatggnccacncgcangagtaagactantctctctctccancanncnatctnccgntncntgctcatatggttcgatgnngtcangattcngagctnatccatcnagantncnaaatctgaaannagtnngggttcgcnncttatgtgtcagctgctgctttaaactgagttaantctnncgangtcttaatctgtnccatcnanaangnagnagnannttncncgnagggggggcccggtcccnnnttcccctanaggtgagtcggtttnttttttntntggccgncgt

SEQ ID NO: 58476 - DNA, 640 bp, Oryza sativa
  unsure (1)..(640): unsure at all n locations
  Clone ID: PAT_MRT4530_60189C.1
aaaaccttagccaccccgcgtcgcccgcctcggcgcgcccaaaaccctagggcatcccggatccgaagctcccggccccaatggcgtcgccggacctgttcccgaacgtctccttctcccatgtctccgtccccgccgccgcgggcgcgtcgacggaggtcaccggcggcgccacggccgtgttcggcggggacgcgtctattggggccccgcgcctcagcctcgtctggtccggggagacccaggcgaagcacacgctcgagatcgatctctctgacgcgcagatatttaagctggggccgacggagtggctgtgcgtgagcggcgagtcggaggctaaggacggtgtggaggagaagtcatattcaagagcaattaaggttgttcttaggacagaagctgagagcaaagccttctatttagcttttcaacaatggaaacaccgagtgattagtggaaaagctggtgaacctttggaaaatggattaataattggttctaaaagcaaatttgatacaaaaattgaggcctcatcagcaaagatgtatttccactactatggncagntattacatcagcaaaatatgttgcaagactttgtcaggacaggaacatactatgctgctgtaatggaaaatcg

SEQ ID NO: 58477 - DNA, 478 bp, Oryza sativa
  unsure (1)..(478): unsure at all n locations
  Clone ID: PAT_MRT4530_6018C.1
cccacgcgtccgatcaatctgtagatgactgtacacgtatgtattctagcatccgcgtttgtcccgtgtttcgagaaaaaaaaatagaaacatcaagataatcaacaagagaagtgcaaattagggagggggagaggtgcttcaaagcaaaggcgagacctttattttggttcctctacgaatcacgcatcaaaaattcctttttccttttctttcccactgttttataggtagagctggaagaagaagcagcgacccccaactcctccctccattcgcgcaaaaacaccgaacccacctcctctcctcccccaaccaaaaatcccttcctttttttttcttttttgttttttcttttattgtctctcccctcgccggcggcgatgagccccaggagggagcaggcggaggagcagcancagcaggggtggagggaggaggcggtgtcnggcgcatcgctgaggcaggtggacctgga

SEQ ID NO: 58478 - DNA, 1167 bp, Oryza sativa
  Clone ID: PAT_MRT4530_60190C.1
gatcgaccaaccatttttaaattaaataaaacaataatacataagaacatacacaacaatcgttctagttagacgcctttgtcgttgagcttttcctgcaaacagatacacttattgtatttgaccccctttaaataacggtgcagacacgagcacaattagctacagctgcacaacctctcgtacacaacgaatgcaatgttagccactgacagctaacgcctagcaacatcaggtaggagcatactgttgtacaggcctggagttgtttgcctgaagcaactccggcttacgagctatctagtgaaggccgccgagtcttggtctggttcaatcgttatactagggctaagaccatcttgcatctgctgctcagatccctgctattcttgccaatgttcaatagctgaggccagacaactaatcttgtccgtagtgatagtcccagagaggactctgtggctgcaaagatggtaactgctgctgctgctggtcttgttgcatcacatatggttgtggttgagacagcctgtagtatggctccttgagttcaagtttggctgtggatgtctgcaggatgccaccttgttctgccccctcaccccacattttagctgacatcgtcaagtatatcgtgtagctttgtgcactgtgggctaccagatgaagtcgtcctgttatttcttgtcctgccatgacatataatggctgtgaaagtatgcatcgtagttgataccagtgagtcgtaggggagcctggagcagtggtaagccacctctggacagtgctcccattgaccaatacatcaaaccaacaagctagcccatgcaccctagtgccaacagaggccacaaaatttaggggaatgtcaatctcgtaaagctcctcttccttcatggtagtgaaatcaagcgtatgaaacgtaggcggagaaaccaataatcttggatcgaatgcatccaccacaggctgtgaaaaatacccctggaatgctgaaccatgcaaaggtgtaagatcaacaccaaaaaagttatgctgctgccagaagagagccttgtttgccatttcaacatagaggtattcatcggaaaatggagccatatgaatccttccagttgttggaaacattttaccacctggcacaaggaatctgtccggacgcgtggg

SEQ ID NO: 58479 - DNA, 260 bp, Oryza sativa
  Clone ID: PAT_MRT4530_60191C.1
aaccctatcgtacaagacacaactgggggcctgttcttagcatgcacgccaggctcaaccagctcccaaggattgtcacatccccgtggtcgcctacgatgacgctcgttccctaagcacaagcaggtacaaaaaactgggcgggaaaacagacaactagtattaaacgcttcggctacaggggcagccgagtaccaccaggtctgccaccatttactgactgtgcaaagacacgttggctaatggtcaatggcccaaag

SEQ ID NO: 58480 - DNA, 150 bp, Oryza sativa
  Clone ID: PAT_MRT4530_60192C.1
atgggtcatcctaggcttaaggccacgacactcaaggacgtggtaggcggcgtcacagaggtgctcccagcgaacaagctggccaccaaggaggacgccgacaaggtggcggccaccgctatgcagaaacgatgggaggcatgccggtga

SEQ ID NO: 58481 - DNA, 336 bp, Oryza sativa
  Clone ID: PAT_MRT4530_60193C.1
atgaaccccgactcaaacaagactattgtggaattcggccgaccgacgaaagatggtttctccaccagtgtgttcgtccaggtccccggctgggtgcgcgtcaagggcgagctggtgtacatgggtgggcgcagcgagtactgcctcgtcgagttgctggagcccgagggtagtagggacgaggagaagtgcgacgagtgcgtgctccggctcactactctgcgcgtggtgttcgacgacggcggcgagctcgttgccaccgctcgccggccggcaggctgctacaagttttcaaggtctggtgggctctgtactctgcaagcgttctggatgtaa

SEQ ID NO: 58482 - DNA, 320 bp, Oryza sativa
  Clone ID: PAT_MRT4530_60194C.1
cccacgcgtccgggcagaggcagcgactactaatgccgttcatggccgtgagttcagcgtgatcggtgcatgatctagcatgaatggtgtcgacgcgcgagaagagtgacttgccttctgcgcatgagcgaatatgatctgctcttatcaaagcatagaatatgtactacacatgctaaggataactcatgagcttaatctcactcatatgagttctcgtattcgagatgatcttacgccctgtgcagctgttatagacatactcgtacatacttatgatccattgagcagagctgatgaatgtttgcatcgcaaacttg

SEQ ID NO: 58483 - DNA, 942 bp, Oryza sativa
  Clone ID: PAT_MRT4530_60195C.1
ggggaggatggtcgtatttttgaagacgagagcgactacgacgacgatgacgaggtcggctcggctggtcagaccgagcgccaggccagtcagaccgccggcacacctccgaacgtggatcaacttcagaagttgctgctccgttccacattcaacgacgacatccgccggaacaaatcattggtcgtcccggaccctgtccgccgcttgtcgacctccctccatcgctcctcgtcgccggtagtcgccaccccctccggtgaggactccctcccctttcctttccttccccgtttccccgtgcgccgccaccacccgcgctcgccgccgccggggcgccgttcgctgccgctgcccacgccgtcggttgccgtcgccggcaacacgcgcgcgcgcgccggcacccttgccatggccggccggccggctttgagccgagccgagccgagccaggtcgccgcccccttgccgcatcgtctcctcgccggaatcgagctcgcgccgtcgctctctctctcctccgtcgccgacgaccttcagccggccttctccgctcgccaggaccgtttcccgcaccggcatcacctcctccggcttcgctgcaccgttgccgtccccgtccaccccctcgtcgagctcgccgaccgccggaacgccgccgaccccgtcgacccgagccgcgccgccgccttcctccgctccgccggcgaccataggggcgcgggcgcgtcgcctcccgccgaccgcgccggcatagctgccttcggccgcactgagtggctgccgcgtggggcccggccgtcagctgcccgcgccctcgggccaggattgagccccaagcaacaggatctagaccgggtgcgccacacacataggggtgagaccacccgcgtactagtccagtgccatggcatctcgactaacgggcaccgacccgtgtag

SEQ ID NO: 58484 - DNA, 157 bp, Oryza sativa
  Clone ID: PAT_MRT4530_60196C.1
cttacatacagtacattatttttagcctgtgtacagtgtataaggttatcaaacattttaaaattgtggaaggcattatacacctttcaaataatggtgcaccaaaggttgttgtcttctttaggtagttttatggtttcatggtagggatttagct

SEQ ID NO: 58485 - DNA, 870 bp, Oryza sativa
  Clone ID: PAT_MRT4530_60197C.1
atgtggggaacggtggagagagtcgacaaggcggctaggccgcgtgcggctcagcgcgacggcgcgagggagaggaggattgggaggaggaggtcggggtgtcgtcgcgggcggcagcggttgggctgtgcgcaggcgagggaggcaccgcggtgcggcggcggcttggcgcagccgcgcgcacggcggggcagggtggcgtatggcggtagcctggcgccatggcgacgtgaagtgcggagttgggggttggctgggatgaggacgacgatgatggcggcttcagtggcggaggccaatgacaatgaggggatggagttcgacaggggtggagaggaggaggccggcggttggaaagggaaggaggcgatggggagagtgagccggaggagaagctgcacaccttgcggcagccgggtagcggcacaccgtgcatggtcgccgagcgtcggtgattggctcgcggatcgtcctcgcacactacgctttcgattgccaacaacaaaggatcacacaactgaaaggatcagcgggttagcgaaacaaaaatggaaagtttttgcaaagggtcaaattgtgaaattttttgctggtgttgtggttgtctgcatgggaggcaagggtcaaattgtgaaaatttttgttggtgttgtggttgtctgcatgggaggcaaggggaggcaaagtagactttcagtgggttggcttgagaaagataacaggggtgggctgctacgtctctgggaagaaatatacttggactgtaaatgtggattggattatatggtgtattgtagcttggacaataactggatttgggtcggtatagatattccgagaatgcacaagggcgggataaatggattgtaa

SEQ ID NO: 58486 - DNA, 2911 bp, Oryza sativa
  Clone ID: PAT_MRT4530_60198C.1
atggcgcggccccgcttcgaggaggatgacgaggatgagttctttgactcgagggaggtcatgtcgccggcgtccgtctcttctccggcgagctccgggcgctacgacgggcccatgctcgaggtgtgggccaccgacccgtgcagcgtccatgagcgccgtcagaggttcatcaagtccttgggcctctcggattcgagcccctccgccggcggcggcggcgaccggcccgacgaggagccgtgctcgaggtccagtgccgcagaagagatcctcccgtgcagccccaccgtcgagctggtctcagccgtccccagttttgcgtgcagaggcgaggagccgggagcgtcaggcggcggcggcggcgcggaggtgttggattgtgtattcaagaacttggacgatggtacagtgtttgtcgtcgacgagatgggaaaagatgggagtttcaggagcctcagggacaggcgatccaaccggacagttactgcagcggaattcgaacggacctacggctcgtccccattcatctgtgagctgatgcggcgggtggatgattcggatgagtcctctgctgtggagaaggctctggtcaggggaaggagaaggaggaggagatttggatggctgcgcaggctcggcatccgtggctgcgtcgtcgatgtggaggaggacgatgagacgaattcaacatcctcgagttcttgtcggagttgctctgggaaggttgatagggtcaaggtgaggcattacaagaagaggtcaaaggaattgtccgcggtgtacaggggccaagacatcaaggcgcacgaaggcgcaattgtgaccatgaagtttagctctgatggacagtatctggccactggaggtgaggatggggttgtgcgtgtgtggcgggtggtggagggggagaggcccaatgaacttgactttgccgaagatgatccttcatgcgtgttcttcacagtcaatgaaaactccgaattggcccctgtcaactccagtgaagggagtaagagcaagcactacaagaactcaaaggtgtcgacagatccagcctgtgttgtgatccctcataggacctttgcattatcccaggagcctgtgcatgaattctatggacatgatgatgcgatcttggatctttcatggtcaaaaaatagggacttactttcttcatccatggataaaactgtacgattgtggcaggttgggtgcaatagttgcctgaaggttttctcccatactaactacgtaacatgtgtgcagtttcatcctaccagtgacaattattttatcagtggttgtatcgacggattggttcgcatttgggatgttcgtagatgccaagtcgtggactgggctgataccaaagagataatcactgcagtttgttaccgccctgatggaaaggccgcagtggttgggaccataacagggaattgtcgccactacgatgcatcagaaaatcacctggagctggaatctcaagtcgctctcaatggaagaaagaaatctccacttaaaagaataatcggtttccagtactgcccatctgatccaaagaaattgatggtaacatctggcgactcgcaagtccgtattcttgatgggcttcacgtaatttccaactacaaaggactgcgaagttcaagtcaagttgctgcatcattcacaccagatggagatcacattatatctgctagtgatgattccagtatctacatgtggaactatgcaaaccaaatagctcccgtcacaaaccatgtgaagactgtatggtcaaatgagcacttttcctgccatgatgtggccattgcgataccatggaatgcctctcagacaaggaattctatttcactggcttgcagtatcacttcttcacagcaagaagtcttggatgagttccacaatgaacatgatagctcatcatgttctcatactgaggattcccctgatggtgatagtctgtaccaattaccatctggaaatttcactcttagcagtgccttctttgcggaatctgctccaaggggatcagcgacatggccagaggagcagttgccatcaaattcgacaacacagtctaccttgaggaaatctcagtacaagttcctgaaggcttcttgccagaatgctgctacgcacgcctggggccagctgggtccatgtccatgctcagatcttggccttttatctcctgcttgcactgtcacgtcccttttcttccagatccctccccaagtccttcctattgaggtgatattcccaggaagtttactggtcttgtttgtttcaagaaccattgcccagcagtcacagaaataatcttagtactaccgtccatacgaatcttttcaaggttttttttagtactcttatctcttttcatcaaagatctctgcagtaaaacgatggcatcaaaagtacagccatggatgggacaagctcagcgatggctggttctgccgttacaagtactctccccccgttcctgtctggccatcttgtactagtagcaatgggcatagcagcggagtacaactacactcctccagtatcgttgttcaaaaaatgcaggtgccaggacgactgagatcctgacagggctgcccagtggatgatggtgcccatgccatgccatgctctgcagcagcaaggtgatgaaatggaatcatcagcctggatgctgccttgcctcattttatgcaacagtggatgttattttttcggtgccagtccagtctggtcaaggagtaaagatcatcaagccaagcccccctgaggacaatggctctctggtccatcacctcacctgctgtaatttcagaaatgcactgctcattccgtccaaaaaaacaacttagaagtggatatgacatcttccttttatttagatttattgccctac

SEQ ID NO: 58487 - DNA, 1332 bp, Oryza sativa
  Clone ID: PAT_MRT4530_60199C.1
atgaggtcgaaggccataagatcaggtgtccctctgacctcgggaaggctggatctgcgattcttagggcagcggaccatgcttaggagtagagccagaatgcaacgccattggtgctcaacaacggtggtggagatgacactggcgaggctcttggggataaaggagtcgacaccggtcattactaacgtgttaaaaaatactctcatcacagatgagtacctcatccgtgacggcgatgtgtggccgccggcgacgaagcggccccgcacgggcgggcgccgcggcgttggccacggaggtggaggcggggaagggcgccgcggcggtggccgcggaggtggagccgtggaggcggggtcgagcaccgtggagctggactcggagccccggcctgctctcgcgccgcatcctccctttctcagcgtcgggagcgtcgtcgtcgtcgtcgggcggcttgcgagcaaggcgggcagcgacctcgctctcgcgtgcggcgtcggcgtcgtcttcatcctccgcagcgagctcccaggcgacgaggctgctcatcacccggaggcgctcggcgtcgccgcgacgaggctgctcatcaccctatcagcgcacatggggcacaccatcgccgagaggctctgcaagacgcagggccagccgaggagcgccggcttgtcgccgcgggctggggatgagagccaacgccagcggaggaggcgtacgaggggcggagggccgcgctgctgcgggcggtggtcgtgggcgcgacatgtgaaaggattttttagctcgccattaaggaataaacgcgctgctctcactgtcgtcacccgcgtggccacgtcgatggcaccgacgtcgtcgtcgacgccggcgggcagcagggcgctggcggcggagggggtgttcgagtgcaagacgtgcaacaagtcgttcccgtcgctccaggggctgggcgggcaccggacaagccacacgcggctgcaggcgaagctgctgagcgaccccgccgccgcagcggccgagagggacagggcacgcatccacgagggcgagacgggcacgacgaccgtcgtgctcacggccgccgacgtcgacgactcgggcggcgccaccgtgccgcagccgccggaggccatgctggacctgaactacccgccgccagtggcagttcctccctcgccggccgctgcccgcgcccgccgctcggccgcgcccatctgctctctgccagccgcctgtgcttccgctgcggccctgcctgcctgcctcttgaaccgcgtggcgccgccgccgccgccgggattcacaaaaccaacggagcatacggactag

SEQ ID NO: 58488 - DNA, 2400 bp, Oryza sativa
  Clone ID: PAT_MRT4530_6019C.1
ttacatcgacgtttcgctgttcctcctagtcctcgtaggagtgcttctgtactcatgtactcggatgtcgtagctcgctggggagcatggcttcggagtcgtacacgaggaagaagggtgtttccttgttgtcagtgtggtgcgtacggtccatagtactgacgggagttcttcgacccattttttgtcatgtgacatgagcctgtcgtagacgcgggttttgatcccttgtagtactatgctgtttgccctctcgacttgtccgttgctttgagggtgagagaccgaggcgaagcatatcttgactcccagcccgatgtagtaatcctgaaaatcagcgctgatgaactgggagccgttgtcggttatgatggggtgcggtagtccgtatctgcaaaatatctccttgatgaatttgatggcgttgtcggccttgatttcccccgtgggtactgcttcgatccacttagtgaatttgtcgatcgcatttaataggaacctgtagccgccctgtcctcgtgggaatggcccaagtatatctagcccccagcacgagaacggccaagtaagaggtttagtctggagcgcttgagctggtagctttgtgtgtttacagtggaattgacaggcttcacatcgctggaccatgtggcatgcatctttaagggcggttggccaaaaaaaacacttgtcaaaaagctttcccgaccgatgttcgaccggcggcgtgtgacccacagatgccttcatcctgtttggcactttcttgtatagatcgttgccgaccatacagtagattttttctttacgggttattttctcagcctctgtatcgtcctcgggcaactcctcgctgttgatgaatttgattagtggggtgcgccagtcgtctgtggtctcgatgtcggcaacggcgcgttctgcttttgtggcctccgagctaatgtcgggggtggccgagctgacttcgccgctaacctcttttactgatggcttcgtcaggatgtccagaaaagtgccgggctcgagcggttctcgtctggacgcacgtcgtgctaggtcgtctggctcgatgttgtcctggcggtagatgtgtcggacctcgatcccatcgaaccttttctctagcttcctgacttctgcgagatacttggataactcagggttagagcatttataatctttgtgcacctggttcacgactagctcggagtcccctttgacgattagtcgcttgaccccaagtgcggctgcagctcttatcccggcgagtagtccctcgtattcggctgtgttattggtcgccctgaagttgaggtggattgcgtgcttgaattgatctccggagggagatgtcaagataaatcctgcccctactccttggctgttgagtgcaccatcgaacgccattgtccacgtttcgttgtcgacttggttgtctgatttgttatcaggcatagtccagtcggctacgaagtcggcgagtacctgggacttgatggaaatgtcttgtttcttcagcagagcaaagaaaggttgccctcgttctcccatcctagcgacgaacctactcagtgccgccatgcatccggttagcttttgtacttccttgagtcttgtgggtgacttcatgttctcgattgccttgatcttctcgggatttgcttctattcctctgccagaaacaaggaatccaagcagcttgcccgacggtactccgaacgtgcacttagccggctgttgagtccaccagttgtctattcgaggaagagggaagtgatcctttgggcacgccttattgaggtcggtgaagtcgacgcacattctccattttccgttggccttccgcaccatgactagattggctagccactctggatgaagtacttctctaatgaagccagctttgagaagtttgtcgagctcttctcgtatggcttgttttctgtctggtgcaaatctccgcagtctttgctttactggcttggcatcgggtcgcaccatgagtttgtgctcaatcacctccctggggacccccggtatgtcggacggtttctttggtggttcagtcgtggcgggtgggctaggtgtttgctcgaccatgtcgaggctccgtttgtcgcactgtactgccagctttgcgttcccttgaatagtgattgttcccttcggtcccggcatcttgagcacttgatacgcgtagtgagatgcggccatgaacttcgcaagtgcagttctcccgatgatggcgttgtaagcttcatttgacgggtacgagctaagtgtatctgaaaatcttctcttctgtccatcggcgaaagcgtacaattgtaaaattgcctggtacgcaggactagatatgaggagtttgtccagagattgtgcaacaaacatgtacat

SEQ ID NO: 58489 - DNA, 1298 bp, Oryza sativa
  Clone ID: PAT_MRT4530_601C.1
gcacggggctcatcatccatctgctactgctactgctagctccatccattttattctagctccatccatcctttaagagaagctgagatcaagaaacgtactcactcttgcctgcatcgatccttgagtttaattaactcaaggaagaagcaatcttcgcttcggtggatgaagagcaggaagaacagcacgacgagcacaaaagcagcaggcagctgccacaccagcagcagcggaggaggaggaggcggcggcaactgctatagcagcagcagtagcaagatggagcgcaaggatgtggagaagaatcggcgcctccacatgaagggtctctgcctcaagctctcctccctcatccccgccgccgctccccgccgccatcaccaccactactccacctcctcctcctcatcgccgccctcctccaccaaggaggctgtgacgcagctggatcacctggagcaggcggcggcgtacatcaagcagctcaaggggaggatcgacgagctgaagaagaggaagcagcaggcggcggcactcaccaccagcaccagcaatggcggcggcggcgggatgccggtggtggaggtgcggtgccaggatgggacgctggacgtggtggtggtgagcgaggcgatcagggaggagagggagagggcggtgcggctgcacgaggtgatcggcgtgctggaggaagaaggcgcggaggtggtgaacgccagcttctccgtcgtcggcgacaagatcttctacactctccactcccaggcgctctgctccaggatcggcctcgacgcctccagggtctcccacaggctgcgcaacctcctcctccaatattaattcacaccactctttcactctgctcagaatgagataatactctctactctactctactctgtactgtgatgataagaagtataaagagtagcagaccagagagcctctaggtagctaggttaattagtgagaaacaagagtttacactaagctaatggatggcatgagcgggagcaagctgttattactactaactcttggctaacgtttttgtatcccctagctagctgcctgccctacgtatatgtctccagtctatcatgtaggagtactccagtagtatactgcgtgtgagtgttctcttttgtgcctgaaattaatccagtccgatgtaagtacgtactagtatttggtttactgcatgctctctagcctcgcatcattatttttgagaggcaatgatgtgataatccttaaaaaaaaacctgcagcccgggggatccactagttctaga

SEQ ID NO: 58490 - DNA, 273 bp, Oryza sativa
  Clone ID: PAT_MRT4530_60200C.1
atggcgaacggcgacggcgggccacgggaggcgacggcgacggcggacgagcttcggcgtgccctaaggaaggagaagagagggattagagagagggagataggtcccggcgatcggaaaccatggccgaaggcggcggtggagatggagctcacccgtgcgcgtggggatgagggctccggcgacgaacctcgacggggaagaggcggccgaggtagatctcgaccccgcgaagctaacggcggcgacggcgcgagacggcgacgagcctaa

SEQ ID NO: 58491 - DNA, 312 bp, Oryza sativa
  Clone ID: PAT_MRT4530_60201C.1
gttaaaaaaaacgaaaaaaaaagagaaaaaaggggaaggtctcgccaccccggcgggagaggcgtacggcgcaccggccggccggcggatctgcgccggcgacgcgcgcccccgccggatccccgctgcccgaggtggacgaggcggcacttcggccatttatccgaccgggagcgcccacaaacgacccggcggatatttgctggtcaatttgccataaagtgcttccagttgaccccgagttggtggagaccccctgctctttaatctattctccatttgctaacaatgatcaattggaagaatctggcc

SEQ ID NO: 58492 - DNA, 207 bp, Oryza sativa
  Clone ID: PAT_MRT4530_60202C.1
atgaggcgcgtcatgggtggggccttgactgcggtgggcgatgagagaggtgtgcggcgggtagaaactcaacggcggcgggctgtggctagtggggagaagggtggtggtcgggctcagcttccagcacgattcaaggaagattgggcagaattgttcgccgacttcgagctttctgattgcgaggaagacagccaggaggagtaa

SEQ ID NO: 58493 - DNA, 498 bp, Oryza sativa
  Clone ID: PAT_MRT4530_60203C.1
atgagagaggtgtgcggcgggtacaaactcaacggcggcgggctgtggctagtggggagaagggtggtggtcggtaagagaggctcgcagtggccccttcctcttgccttcaccgttgcaaacttgcaatcgcgtgccgccatccagctgtctcgatctacacgtaaatccgaaggtgagaaggacaacgccatgtgggcaggtaggatgccatcaccgcccacttctagaggcgatgtcccgctggatccctggtcggcaagcccgccagccagttattcctctcaccacccaccactagcctccatcctcttcaccgcctgccgctccgccgtcctcctcgccacccgccgccgtcctcctcactacccaccgctggtcttctcctcaccactcgccacctcggctcagcttccagcacgattcaaggaagattgggcagaattgttcgccgacttcgagctttctgattgcgaggaagacagccaggaggagtaa

SEQ ID NO: 58494 - DNA, 196 bp, Oryza sativa
  Clone ID: PAT_MRT4530_60204C.1
ggacgacatctataaagattgctcaataaaggactatctggagacaacacatactagtagtcatatccagagtaaatcaattagttcagaccgaccactatctccaattgtaaagctattggaagaactaattcgaccgttatcactcttgtaaatacttgtattgagagaggatgtgtttacagttagaaattca

SEQ ID NO: 58495 - DNA, 345 bp, Oryza sativa
  unsure (1)..(345): unsure at all n locations
  Clone ID: PAT_MRT4530_60205C.1
tgatttcggtgctctaatgggaaatgattattgtttgtcgtgttactttgtgtgttgggggaattngancgngcgctgactgacaccttgtgtgactctnatgtgatanatgcaaggatggtgttttatgtcggacngantngttngttctctgggaaaccgggatgaaagctgttgggtggtaaatggtagacactgccatttggttaatgtggctgtgtcaagaaccagctgaattgggatgtgcgtttgtcttggcgcaaatgctgcaaatccacggggctgcccaatgttgcaggaatgctgatctgacttttcccgctttaaaaaaaaaaaaaaaaaaaa

SEQ ID NO: 58496 - DNA, 480 bp, Oryza sativa
  Clone ID: PAT_MRT4530_60206C.1
gcgcccaaatcccctccattgccttcctcgcttcgcatcgccgctcccgccgccgccgtcgggctgctcgccggcattgggtgttggttgtgaccgtatacaattattgtttttggagctgagcgatcagatgcatgagccttccttttaaatgatctgtgtccaccatggcgatgaaccaaatgcaggaacttcccgcttaatgggctggatgcgttgtatgcacgtttgcagtgacaagaagacattgaaacgttggttttttattgacaagagggttggttgagtgtctaactcttaaggaatcctatagtctacttgcttgctcttgtgttgttagtaactgttcttacaacaactctgcggagagttctgttgatggatttgaagacaagcaactctcctgttattgctgatcctctccctaaattagccttgccatctgctgtgatgacgtacactacacctacgagtttcccc

SEQ ID NO: 58497 - DNA, 951 bp, Oryza sativa
  Clone ID: PAT_MRT4530_60207C.1
aattaaagcatacagtacagtacagtagtattatatatatatatatagagcctgcattatccatgcatgcatgtacgttgttaaaacgtaccacacgacggtggaggaagatatatatggagagagtactcgctagctagtacacagtacgtggacacgcacgttcgtacgtatgatgaggacatgcgtacgcaacgcagtcgagttccagtaagtatacttgagttgagagctagctagcttaattattcaaaaactatattattgtaataatatagtagggccggccggccgcatccgcaggcgtgcttgctttcttcattatggatagatagatagagatagtaggctattactattagcggcggcggttggcgggctccctctgggagttgaagtggacgacggcggtggggaggccgagctgatggtacgccgcgaatgctcttgtgttgaagttgggcctgtccgccggcggcatcagcgcgccgtccacgaagcgcgccttctgctcgtacagcaccagcacgtacctgtgtatccccaccgtcggccgtggccccatgtactccaccatctcctcacctttagatgcatctgttccccccggtatgttaaccacgatccagtggagaaactccctcatggatgggtcgctagggctaggtgcgtccgggtccgtcatgatcagggtgtagaggtcgttgcggcggccggagatgcggacgaggggagggtagtcggcggcggatgggcggacgaggcagccgttgctgatgtccctgtcgccgtaggcggcggtcatggagatggatggaacgaacaaatccaccacctccccgatcacccgtcccaccaccagcggatccacgaaacgggccatcgatctctggagatctcgacttgagctcagctaagccgcggccggcaactgtctgcgggcactgctct

SEQ ID NO: 58498 - DNA, 582 bp, Oryza sativa
  Clone ID: PAT_MRT4530_60208C.1
aggactgagaagatttgaaatagttattatggaaaatataagagaggaagctgaaccaagaatgatagatatattctctatacagtttaatgattttcctccagcagcacccagcatccctgaagcaggcatggagcaatggagacagtaagattcccttatttcttttccagcactgaggttttgtcctgtggatgtaaaggaaaatagtgcaagagagtttcagggtttcaactagagaatatgcaaagcaatggacccaagccagatcaagatgagaaaacataatagatagagaaaaactaggagagaaagtagtcttgtggaaccagtgaaattaatgacgtgtatgacagcagtaaatgagttagcaacctggaagtacaggaggtttcagtcaaggagtggaatgtataattttgtgagttcagaagtagagacattttaggagataatgagatccagaatgtggctacaaaagtgaccattatggaacattaggaagttttgtgatggtgaagacatccaataacatggagaccaagttattggatgaattatccataagcatattataatcat

SEQ ID NO: 58499 - DNA, 624 bp, Oryza sativa
  Clone ID: PAT_MRT4530_60209C.1
gatattcatactatagattttttgctaacaaaaagccttggtttccatcaaggaagtgttctctggtggtgctcctcatcatcgtctgcgtgctcgccgcgacgtgtaccatgggggaccaccacaaagaccaaggtggtgtacagggctggtgagcgtatgtgagccaggaatggactacccgattactcgctgcacgctagcgggcggtggtgaagcgccagagcgtgcgccacggagcacccggaggagccgcggacgagcagctccggcaggactgctgccggcagctagccgcgggggacgacagctggtgcatgcagctcggcgctcagccacgtggtaggaggcatatacaggaagctcgatgccaccgacgttgggcacctgatgggcgacgtgctacccgcgatgtcggagaggggacgtgtgagcgcgcggagcagagcctaccggcgatctgcgacgaggacatgctcaatgggacaggaggaggctgctactgggtacggtatcctaggaccgcgagaactggtcactaggctagtaaagctagctgtgtggatgactctgtgggggagctaaacaactagtgctttcattttggacgaaggatatatgcat

SEQ ID NO: 58500 - DNA, 1293 bp, Oryza sativa
  Clone ID: PAT_MRT4530_6020C.1
atgatgcagaaatatctgtggatacagatttttgtgttgctctcgagcttctccttctcggttgagacggattacgcctccatttttagcttcggagattccttctccgacaccggcaacatcgtcctcatctacggtccggcgagaaccgacctcgtgatgaccaaaccgccgtacggaatgacattctttgaccatcccagcggccgcctctccgatggaagattgatcatcgatttcatcgccgaagcgctggggctccctctgcttccgccgtcgttcgcggcgaaccggagcttcgagcatggcgccaacttcgcgacggccggcggcacggcgctggaccgcgcgttcttcgtggccaacaacttcacggtgatgtccccgttcaacatctcgctcggcgaccagctcgggtggctcgacggcatgaaaccgtcgctctgcggctgcaagccaggtgggtgcgagggttacttctccgagtccctgttcttcgtcggcgagctcggatggaacgactactccgccgtgctgctcgccggcaggggcgtcgacgaggcgaggtctctcacaccccgagtcgtcggaaccatccgcgcggccacacagaaactcatcgacggcggcgcgaggacggtgttcgtgtcgggaatcacgccgatggggtgctcgtcagcgaacctcgtgctgttcgcgggctcaagcgaagcggactacgagccggacaccggctgcctgaggagcctgaacctgctgtccatggagcacaaccggcagctacgccacgccctggcgcagctcggcggcgcgaggatcatctacggcgacttctacacccccctcgtcgagctcgccgcgacgccgcgccgcttcgggatcgacggggaggagggcgcgctgagagcttgctgcggcagcggcggtgggcggtacaacttcgagttcaacatgagcgcgcagtgcggcatggcgggggtgaccgtgtgcggcgacccgtcggcgtacgtgaactgggacggcgtgcacctcaccgaggcggcgtaccaccacgtcgccgatgggtggctaagggggccgtcatctatatctatgggctataaactgggatgggctggaaatgaggcccatccaaacgaggcctcgtggtcctcatggatatgcacccgtgactcctgtggcctactgagaccatggctgactgaagattcttgtgctggattcactggcacggtggtaccgtggatttgtgcatgtgtcagactgtcaggttataaggtttatcaactgtag

SEQ ID NO: 58501 - DNA, 375 bp, Oryza sativa
  Clone ID: PAT_MRT4530_60210C.1
atgacgagccccaccaccaccaccaccacctcctcacctcttctcctcgctgagcttgctgtttcagtgttgctgctggcctgtgacctgtcggagactgatcaagtgaggatcttgacaaacaaagagctgtcggccgcagatgccccttcctacacttcgaagttaaagtggtcgcctggtgaccatgtcaccgcggacacggccaggccacccgacgccacgcggcgcctcggacacggcgggcgccaggtgagcggccggctgcacggggagaccggcggcgcgctcgccgtgccacacgggcacatgcacatcgccgtcgccggtgccgtggcgccgccgtggcacggcggcagccggcggcgcacgtag

SEQ ID NO: 58502 - DNA, 264 bp, Oryza sativa
  Clone ID: PAT_MRT4530_60211C.1
atggcgctgctggaggaaagggaagcatcaaggatgctcaagtatggagctactgatgatatatataaagggagtcgaatggaagtacaggagaagccgtgggttggagttgtagctgtaacaaacaggcccttatttgcgaatgcggggcgtcggaagaggccacatagagatgctaggtacccgtacctacagggcaccaccagcaggctgcatcgtgaagcacaggaggccacgcacggcggacgtaggcggccggaatag

SEQ ID NO: 58503 - DNA, 290 bp, Oryza sativa
  Clone ID: PAT_MRT4530_60212C.1
ctgagaactttcccttccacaaagaagggagggagcttagggggggaccaaaccggccttttgcccgcaaacgggcactaacacgctactacccttttttaccagggggaacatatacatatttggggccaaaaaagggccaaagacaaaaaaatggggggccaaagggggcatgccgttgctgaaagcagcgctagaaaatttcctcccaacagggaggaaaaatgggggaaccagtttggaaggggggggcccgctcaccaggaaaggccccccgaaccattgggggg

SEQ ID NO: 58504 - DNA, 1082 bp, Oryza sativa
  Clone ID: PAT_MRT4530_60213C.1
ttgtgtcgacttccaagtcttccgccttcgttggccccaccagtcagtgacccagtcaatctccggcgatgggggccggaatgagcagcggccggcggccgagcttctacggcggcggcggcggcggcggggtcggccggccgagagggatgctgcccctgctggcgctgcaggtgctgctcgagtacggccgcgcgggcgccagccggccccccgtgacggcggcgctgctcgccgccaacgcgctgctgtacctccgcccaggctccctcgacgcgctcctcccttcgctcaaccgcgtcgccttcaaccctcacctcatcattcactactgtgacctgacacgcttcttcctgtcggctttctaccacttgagcgaaactcacttcttcttcaacatgtcatctctcttatggaagggcatccagcttgaaacatccatgggtagtgttgagtttgcctctatggttgctgcattgcttggcatgtcacaaggcatcacactacttttgtccaaaggtttactcctgttcggcaatgatgaggcttattatgatcaatatgctgttggattctctggagtactatttggtatgaaggtcgtgctgaatgcctggtcagacgattatgtctttcttcatggggtggttattccagcaaaatatgctgcctgggctgaattactcctcattcaggcttttattcctgggacatctcttattggccatctcggtggaatacttgctggattggcctacctttggcttaagcgatcattctctgggccagacccgctttctcttctgatttcaggaattggaaaagctgtgagatggccagtagggtttgttcagaagcttttcaggtctggccgtcctcagggttacaccccaagtcgaggcagagttggccgtggttcagcaagagagaatggtcgaggatcccctcataatatatctttaggttgtctcatcagctatgccttcaaaaatagaagcagacgagttgttggaatcatggttggttccagacatttgagggcatcaattccagaagtccacattgacaggaacagggcttaa

SEQ ID NO: 58505 - DNA, 726 bp, Oryza sativa
  unsure (1)..(726): unsure at all n locations
  Clone ID: PAT_MRT4530_60214C.1
gagtgtcttgagcctgaatcaggagcagcataatatctttctcattgcttaataaaaaaccttcgcccttgcaggagaaaagaaggtattgctgcgtttgggacggccggtgatggagccgactaacatcagcggtgttgaatgcgatgattgcaatatgacccttgatgcctacgtgacaggcaccaccatgcatctatccttctacttgttcatacagctatgcatgctctgatcgataggagatctacagatgacatcgggcacaaacattggctgtagctgctacacctacaggtgctaactcatctgtatccggtggtgctgatgttcctgcaactgcgagtatgaatgctgattcattgatgcatcatgatgcatcccctgtgtgctgctactgcaatatcatagtttggatcttcgccttaagttggttgcattatgccccagattatttgtcagcagcaccttgcactttcgatatggactcctaaagtaaacactcgacaacctgcttatgtgatgcgtgctgcgtgcattgcatgactgttaagatggatacgtatgatactaggatggatcatctattatcacacagatcaaatcatgtactgctgctacgtctgatnattcttgatctgcatggtcaacagatccatctctgctatccttcatccatcagcataaactggcacagattcagcagcaacagcagcatcagatgtt

SEQ ID NO: 58506 - DNA, 1083 bp, Oryza sativa
  Clone ID: PAT_MRT4530_60215C.1
atggcgcgaatgcttgagaccgtgtcggagatggagaacaccgaggcggccgatggagatggagctacagctacctggagaagatccgtgagatccagtaactacagcagcgcgtcaagcaccgcgtccagtgcgcgtcctaggtacgtcccctgctacgatgatgctgatttcgtgacctactccttccagagggcagtaggacttggagcccccggacctgctcgagatattcgtgggcagcttggtgagtggttctcagaactggacgtcagctgtgtactccgcaatgatcaggaggaggaggaggcgaccgggagcctggtggggaggtgggcgcgagctctcactgtgatggcgcgcgcgctgatcgccacgctccaggaccaggaggacaacctcaccggccgactctgccaactcgggcggcttatggaggcgagtttctccaagatccaacttgcacagttcgcgcaggcgactttctccaagatgcttgcctttgccaacgccctcgctgataagccttggacgcggccaacggacaagttctcggggctcatgcaactccgcatctgcatcaacgacgtctcagatatcctcgtcccgctgtacaatgaggatgagctcgagaagaaatccaagttgttctctgaccatagcctgagatatctgttcttgcttaacaattcctacgtcgtacaatatcagtttcttgtacccagcgactacagccctccatcggaaataaagttccactatgagcagtaccaaaaagagtatatgcgtgcctcctgggaacctgttctgtcttgcctacacgataagatgccaccgtgcttccctaagctctcatcgcattcggagctgtcaagattcgagttggaatttgagaaaacatgcagtcatcagaagctgtggaaggtcccgcttccgaatcttaggcagagcctgcgagaaaccatcattaataagatcattactagatacaaaaagtacatggaggaccatccagagcaggagaaatgcggcagagatccactggacatggaaggcatggtgaatgatctatttgaaggatga

SEQ ID NO: 58507 - DNA, 586 bp, Oryza sativa
  Clone ID: PAT_MRT4530_60216C.1
gttccaaacattcaaccgtttcctttccttaaaactaattttcgcaggcgggagggaggtccgcctgcaccacaacgttcgcagtcggggcaacggcccgcctgcgaaaatgcaaaaaaacgaaaaaaaaaaatcgccgcacgcggctcgccgccgccccgcgcgcgtcgtcgccgccgccgccccacgctgtcgtcgccgccgtcgcccccgccggcctcccccctccctcctccggccagatctgcgaggaagggagggaggggagatgccgcggccgcgccgccgaagaagggtggcggcggcggcattggcccgacaggggcaggaggggtggcggcgccctcccctccaccagatccggcgggaggggaggggcggtggcggacggcgtggaggcgacggcccgactatgggaggggaggttgtggtggcccgatggcggcctgacagcgaatcctcggggcgacggaggcagcagtcacagatctggtagacggcgacgactccactcccagttttggtggagctgaaactgtttggctgagctccagctccaggaggggtggagctggagctggagctg

SEQ ID NO: 58508 - DNA, 3519 bp, Oryza sativa
  Clone ID: PAT_MRT4530_60217C.1
ccatttcgcggttccgccatggccaccgccgcggcgctcgcgctccacacgcagttccggccgccgcgctcgcctcgccgtctccggcagcatctagccttaccctcaggagtcctcatccgatcccccgtccgcgcctcggctgcgtcggcgtcggcgtcggcgccggcgcagcgggaggccgccgccgcgggagtcccgtggggctgcgagatcgagtccctggagagcgccgtgtcgctggagaggtggctcaccgattcggggctccccgagcagaggttggggatacagcgggtggacgtcggtgagcgcggcctcgtcgcgctgaagaacatccgctagggggagaagctgctcttcgtgcctccctccctcgtcattacagctgactcagaatggggctgccctgaggtggggaatgtgttgaagagaaattctgtgccggattggccgcttattgctacctaccttagaagcgaagctagattagagatttcgtcgaggaggaacagctaaatagcggcgttaccaaggcagccttactctctgttgtacaagactaggcctgagcatgatgcatacctggtggcttcgccgatcagggaacgcgcaattcagaggatcactgatgtggtcggaacatacaatgatctccgtgacagaatattttctaagcattcagatttgttccctgaggaggtttacaacttagagacgtttagatggtccttcggcatcctcttctcacgcctggttcgattgccatcaatggatggaagggttgcactagttccttgggcagatatgcttaaccatagtcctgaggtggaaacattcttggattatgataaatcctcagggggaatagttttcactaccgatcgttcatatcaaccaggtgagcaggtgtttatatcctatggcaagaaatccagtggcgagctattgctttcatatggttttgttccaaaagagggaacaaacccaaatgattcagttgaattgctggtgtctcttaataagtctgataagtgctacaaagagaagctacaagcactaaaaagaaatggattgtcagagtttgaaagtttccctttacgcgtcacaggatggccagttgagttgatggcttatgcctttcttgtggtcagccctcccgagatgagccaacgttttgaagagatggctgtcgctgcatcaaataaaagtccatccaagcctggacttaattatcctgaactggaggaacaagctcttcagtttatcttggactgttgtgagtctaacatagcaaaatacacaaagttcctagagggtagcagtgggtctctgcaactttcaaccaattcaaagcaagccaaccggacgttactgctaaaacaactagcaagagatctttgcattagtgaacggagaatcctgtatcgtacacaatatgttgtctttgttgctgatgaagctcagactgttgaagaaaaggaaattgacaaatcagattacaatctcagccgacaagcaactgatgctagaagactagaagtggtaggagggagcatggcggggagcggcggcggcgtcgtctccggcggccgccagcgcgggcccccgctgttcgcgacggagaaaccggggcggatggcgatggcggcgtaccgggtgtccgcggccacggtcttcgcgggagttcttctgatatggctgtacagagccactcacctgcctcccggtggcggcgacggcgtgcggcggtgggcgtggctcgggatgctcgcggcggagctctggttcggcttctactgggtcctgacgctgtccgtgcggtggtgccccgtctaccgccgcaccttcaaagaccgcctcgctcaaagaattttgattgcaaacagctacagtgaagacgagcttcccagtgtggacatttttgtctgtacagcggatccaacagcagagccaccgatgcttgtcatctccactgttttgtctgtcatggcttatgactacctgcctgagaagctgaacatctacttatctgatgatgctggttcggttttaacattctacgttctatgcgaggcatccgagtttgcaaagcattggattccattttgcaagaagtacaaggtggaacccagatcaccagctgcttactttgctaaagtagcttcccctcctgatgggtgtggacctaaagagtggtttaccatgaaggaactgtacaaagacatgacagatcgtgtgaactcagtagtaaattcaggtaggatccccgaggttccacgatgccattccagaggcttctcacagtggaatgagaatttcacttctagtgatcacccttctatagttcagataagggtatcatcagtgataagcaacagtccaatcatcatgaatgttgattgtgatatgtactcaaacaattcagagtccatcagagacgcattgtgttttttcctagatgaagagcaaggccaagatattggttttgtacagtatcctcagaattttgaaaatgtggtgcacaatgacatctatggccacccaatcaatgttgtcaacgagttggatcatccttgcttggatggttggggtggaatgtgttactatggcactggatgcttccatcggagagaggccctatgtggacgaatctatagtcaagaatataaggaagattggactagggtagcagggagaacagaagatgctaatgagttggaagaaatgggcaggtcacttgtgacttgcacatatgagcataacaccatctggggaattgagaagggggttaggtatgggtgcccactggaggatgtaactacaggattacaaatccaatgccgtggatggagatcagtgtactacaaccccaaaagaaagggattcttaggcatgacacccacctcactaggccagatcctggtcctgtacaagagatggacagaagggttcctccaaatatccctctcacggtacagccccttcttattaggtcatgggaagatcaagctgggtcttcaaatgggctactctgtctgcggcttctgggccgtgaacagcttccccaccttgtactatgtcacaattccttctctttgcttcctcaatggcatctccctctttcctgagaaaactagcccctggttcataccctttgcgtacgttatggtggccgcatactcctgcagcttagcagagtcactgcaatgtggtgacagtgcagtggagtggtggaatgcacagaggatgtggctcattagaaggatcacctcatacctcctggcaaccatcgacacattccgcagaatattgggcatctctgagtctggattcaacctgacagtgaaggtcactgacttgcaggccttggagaggtacaagaaggggatgatggaattcggatccttctcggcgatgtttgtaatccttacgacagttgcgctgctcaacctggcatgcatggtaggagtaaaatgcaccgctagtacctcaacttgtgaaatgggtgcaatttag

SEQ ID NO: 58509 - DNA, 1200 bp, Oryza sativa
  Clone ID: PAT_MRT4530_60218C.1
atggccgcggcggtggaggcggaggggcgcgggggcgagcctgtgacgccggggacgccggcgccggaccttagccaggcgacggacgaccggcggctgctgcggtcgcggtacctcgccgtgaagagccgcatcagcgatgacaaggatgacatggcgagggcggattcggtgaagttccgtgcagtcttcacgcaggtggaggatctccacaggcttgttcagaggcctagggagcagatcgccgatgcggaagccttgcttggcatcgccaccagtctggtggcatcagtaaggacgcattcagctctggggatcacgccctctgatttcgtttccggaatgctgaagaagtttggagagaagaggagggatgatgatgaggctgcctcgttgcgctggctcgatgtaggcctctacacttctcggattttcatggccgtgcctggatgctccacaatggttggtccaatgaatacagaagtgttgccacggagggttcgtgtgtgtagaaagaggacggctaagcctcgtggaagtgaatgccctgaacagctcccagattcatcaaatgcagcaaagacggatactgacaggaacatgtctgtcatatttgatgtcctgagaaagaagaaaaatgctaggctggaaaaccttgttttaaacaggaagtcttttgcccaaacggtggagaatatctttgccttgtcattcctagtgaaagatggcagggtggaaatcagtgtcaatgatgaggaccatcatcttgtctatccaagaaatgcccctgctgctagtgccataacctcaggaaaagtagtatacaatcattttgtattcagattcgatttcaaggattggaagctcatgaaagacatggtcgtcgacggcgaggagctgatgcagcacaggcctccggctccacaagtcggcacgcacggctccagcaccaccaccaccaccaccaccaccggaggagcgaatgaaggccctgagaccgagacgcctgcagcccctgcacacagcacggcgatcaggaagctctgcaggaaccgaggcctggtcatgcacgacatgaaggaggaggcggccaccatggaggagaagaggtcggccatggacgcgcaggtgtctcagctggcgtcgaagcgcaggcgcctcttccaggacgacgacgatgacgacggcgacttggagtag

SEQ ID NO: 58510 - DNA, 628 bp, Oryza sativa
  Clone ID: PAT_MRT4530_60219C.1
aagctcttcagtttatcttggactgttgtgagtctaacatagcaaaatacacaaagttcctagagggtagcagtgggtctctgcaactttcaaccaattcaaagcaagccaaccggacgttactgctaaaacaactagcaagagatctttgcattagtgaacggagaatcctgtatcgtacacaatatatattgcgtaggagactgagggacatgagaggtggtgaacttaaagctctgtcattgttcaatgggctcagaaagctcttcaaataaaaggatggatttgtttttcaatgttagctgaagatttcgaggacaatgtttaatctctagtatcttgcttcttcctttcaggttgtctttgttgctgatgaagctcagactgttgaagaaaaggaaattgacaaatcagattacaatctcagccgacaagcaactgatgctagaagactagaagtggtcacagctcaatagaagacactagttgtaacttgcgattgaacagtccatatcttggtttaaatctactatagcaccatgcaacaatgtaccagtggagtcatctcgtgtatattttgtttcaggggtttcccctcgatatctatagcataatatcccttctattt

SEQ ID NO: 58511 - DNA, 3281 bp, Oryza sativa
  Clone ID: PAT_MRT4530_6021C.1
tttctcgtttagtgtcgccccgatcttgacagtcttgtcggggttggcactagagagtggaacgatcttgatggcgccatccggcttcggcgtcttatttgtattgctcactttcttgggtggctcagtcgtggcgggtgggctggtcatttgctcgaccatgtcgaggctccgcttgtcgcactgcaccgccagctttgcgttcccctgaatagtgattgttcccttcggtcccggcatcttgagcacttgatacgcgtagtgagatgcggccatgaacttcgcaagtgcagttctcccgatgatggcgttgtaagctgtatcgaattcagcgatatcaaaggtgatctgctctgttcggaagttgttggcttggccgaaagtcacaggtaacgtaatcttgcccaaaggtctggacgatgattggggagtaattccatggaagggttgatcggttggtgttaactcattttgcggaattcccattgcgtccagagtgctggcgaaaagaagattgatcgagctgccaccgtcgatgagaactcgcgctaccttgatgttccgaatagtgggttcgaccacgatcggatatcgtcctgggataacggcggtcttggggtggtcttcttccgagaactctattttctcctcagaccacttcatcttgggtgcagcccctcgtttgcctttttcaaacgccatgtgcttctcgagcgactttttgaaaacaaggcaatcttccagagaatgtctgtccgtcttgtgtatggggcaccaagatttctttgtgtcgctgccttgtgggtctgggcacttgggggggttcgcgtattctgctgcgaggacttccgcttgagctttccttttcccgtttttgtgatttttcttcttgcttgactcatatgcgtctgtggctgatttcttttctcccccggtcttcggcttgtcgttcttgcgtcttagcgcatcgtccacatgggcgcatcgctcaacgatctcgaatagcctccgagtggttgtgatgggtcttgtcaccaattcctgggtagtgtaacgatctctgacaccggatttgaaggcacggattacagaagcgttagcgatatcagggattgtgtttctgcattcgttgaagcgtcgaacatattccctcaatgattcacctgagttctaggtcgtctcacctgagttctaggtcgtcttcgatcgcgtggcgcttgtacgttcctgaagagattgaaaagggaggaagatgcatcagccatgaacgtgcagaacccttcaacgcggttggtaaatagttcgctagcgcgttgtcgtctgctccggcagcatagagtactgtggagtagacttgaaggaattcttctgggtcggtgctcccatcatacttttcaattgctccgggtcgaaatctctcaggccatcgaacatcacgtagggaacgaccgaaagccctgcacccagcgttgggggcggtgggttgtcggcggtcgtgtgtccttcatggatgtctgtctgacagtcaggaggacgcagatgatgatgatgacgatgggtcgcttggttccggcgtacgattacgaggatgacggcctggatctcgggaatcctgtcgttgtctctcgctgttgtctcggcgccgatctccattatcgtcgtcgttacggcggcggccatgaccagtattgtctggcctccgtcgttcgcgatcaatgcgatcgtggtggttgtcgtgatcccggtcctcgtttgagcggtctcctcgatttccattatcatgacgccgtgaagagacatgacgccgagagcgatttacattgtctcgtgtgcgtcgtgcttctcggcggccgttgatttgatctcagagatcgccagcgccgtgaggtggaggagtggctcgttgaggtgattccctccgttccggatcttcaccattggcgtcgctagttggcggctgatcttggtgcgctgcggtagtggcttcttcaaacgcgttgctgaggttggtcactgattcccgtagtcgttctgtccaacgctcgaggtcatcattcagaacaggatcgtaaggagtttccctcagtatagcttgaacagccttgatgtgttgggctggagtagtatgattcgccgcttctatgttggcttgcgctgacgtgccaacgtcatcgatagccaatacctctcgcggcacgctcgttgtcgatgacccatagtctttgagaagatgtaagaccgatggttcgtgaggatcgatatcgattatcccaacgaatcgatctgaggctggagtcgctccttgttccttgccgttatccctgacagggacgtatgacttaggagacggagttttcatggcgccgaggaagactttgcaactcaacaggtcgtgattctttgtcttgtgaataggacaatagacatcccgagttggagaagtacgctgaattccacgttctttgcaggcatggatttcagcacggacgttgaggaaaacccagcaatcttgcagggtgtgtttcttggttttgtggataggacaccaagaccttgtggcttcggaagtcatctttgccggctcgtggttcatgtcggaaggacaaggtttggccgtatcagaatccttcccgagcttggatgtcatcgatgatccgttctccgtttcgacgggtggatttttcgacatggagtcgccttgatttgtagccactgcattctcgtttccgatcattggaggaccggttgacatcggcgttgtggtgtaaaccgggaagacgatttcgccgacttgagaccataccagcattgttgaagcagggagcgcttggctgaggctagtgttgacgttgttgtcgacgaagttggatgacatagtagtagaaccatgagtaccaagtccccctacctggcgcgccactgtcgacgggtgatacccgtagaccggatatagagggtattggggtacgttggtacaaggatcggcgagatcgtagtcgagttggttcgactagatccctggcggtttggctcctgcaggctctggcttcgtaggctgtgggggttgtgttggctctgagattcgatgccttaggtcctccccaggggtcccttttatatcacaggtcaggcggtttccaagtcgaacttggagacatcagaccctacacgatacattgacgacctagtcttgttcgagtaggactcttttcgtccgtaaactccgtgaaggatttccttaatatatgcagagggtatccgtatgcgcgtgggtatgccat

SEQ ID NO: 58512 - DNA, 600 bp, Oryza sativa
  unsure (1)..(600): unsure at all n locations
  Clone ID: PAT_MRT4530_60220C.1
tggttcataccctttgcgtacgttatggtggccgcatactcnntgcagcttagcagagtcactgcaatgtggtgacagtgcagtggagtggtggaatgcacagaggatgtggctcattagaaggatcacctcatacctcctgcaaccatcgacacattccgcagaatattgggcatctctgagtctggattcaacctgacagtgaaggtcactgacttgcaggccttggagaggtacaagaaggggatgatggaattcggatccttctcggcgatgtttgtaatccttacgacagttgcgctgctcaacctggcatgcatggtgttaggaattagtagagttttgttacaagaaggcccagggggtttggaaactttgtttctccaggctgttctgtgtgtactgatagtagccatcaattctccggtttatgaggcgctcttcctccgcagggacaagggcagcttgccagcttctgtcgctcgagtttccatttgctttgtgttgccactctgtatactctcaatatgtaaatgatattacgtacagtatgtacaatgctatatatcaggaagaaattaaacttaaaagagcttcaat

SEQ ID NO: 58513 - DNA, 855 bp, Oryza sativa
  Clone ID: PAT_MRT4530_60221C.1
cctagcggcgacaacaatcatcctaggggatgggaagatggctagtttttgggaccgcactcgctggacaacaaagcgccaaaagagatcgcaccagccatcttcacggcctgaaagcgcaaatcaagaacggtacacgacgcccttgcccacaacaattggattagggacatagatctaatgcacactacagaagcagaccacctgagccaatatgtctgtctttggaacttgatccaacaggttggcccgctatccgaccagcgggactccatcgtccagaagctgacaacaaatgtcatctattctactagttcggcatacgggatgcaatttcttggcgtggctactacaatctacaaccagaccatatggaaatgttgggccccacctaaatgcaaattctactcgtggctaatcattcagaatagggtttggacggttgatagagtgcagaaaagaagttcggctaattagcgtgtttgcccactctgccatactgtgccggagtcagcacttcacctactcgcaggctgcaggctctccaaaagaatttgggctgaagcacaaaggtggactggtatagacctccgcctacaagaatggggggaatgcgcaacagtggaagactggttgtgaaaaattttgtgcacaacaaactatcctacgaaggcccttaaatcgatgattatcctgatggcgtgggaactctggtgcgagtgcaacgccagaattttcagacaagtggcatccatgcctgccatcatcattgccaagattaaagaggaggagcgagcttggatcgcagtgggagcggctaagctaaccgagatcaattccagcgggagtgtagat

SEQ ID NO: 58514 - DNA, 300 bp, Oryza sativa
  Clone ID: PAT_MRT4530_60222C.1
atggggaatagaatggttaaaaacctctcaccatcggggatgacgggggcggggacggtgaaccattccccgtccccggcccccacgatccacagcagcctccagccctccacccgagtcacgcatgccgcgccgccgccattcgccagtccgccggcagcccgggagccaccgttcgccgcaccgccgttcgccgggagactgaagccgccgttgccggccgccttcgtcgacgagccgccgggccggcgcggcgcctgcagccgtcttcaccgggagccgccgttgacgcgccgctag

SEQ ID NO: 58515 - DNA, 529 bp, Oryza sativa
  Clone ID: PAT_MRT4530_60223C.1
ccgaggttccacgatgccattccagaggcttctcacagtggaatgagaatttcacttctagtgatcacccttctatagttcagattttaatcgatagtaacaaacaaaaggcagttgatattgatggaaatgcattgccaacacttgtatatatggcacgtgagaagaaaccccagaaacagcatcacttcaaagctggatctttgaatgctttgataagggtatcatcagtgataagcaacagtccaatcatcatgaatgttgattgtgatatgtactcaaacaattcagagtccatcagagacgcattgtgttttttcctagatgaagagcacggccatgatcttggttttgtgccgtctcctcagcctcccgcccctgtttcgctttccgtcctttttggtgcccccgttccctgctttcccccccccttttttctcctttgcccccgctcccgtttttccccctcccttttcctgttctagtttttcttcttcccccccccttctcccgttttttttttttttcc

SEQ ID NO: 58516 - DNA, 1043 bp, Oryza sativa
  unsure (1)..(1043): unsure at all n locations
  Clone ID: PAT_MRT4530_60224C.1
ccgggctgcaggaattcggcacgaggcgatccccacccatcgcgcgcgcgcgcgagcgagcagggtcgccgtcgttcgtcctgctgcttccgccgcatccatcctggtaaccgggagcatcacacgtgctcgctcaattcggattagaagaaacagctttgtggtactttggggttggactgttttgtgaatctgctgtgagggcttgtttttcttggtagcttttcgggatacgacggaatggagtgcaataaggatgaggctcttagggcaagggagattgcagagaggaagtttgaatcgaaggacctgcagggggccaagaagttcgccctgaaggcgcaggctctctttcctgggcttgagggcattgttcagatgatcaccaccgttggatctctatcttgcttcagaggtgctaatttctggggagaaggatcggtactctatcctttccgtggagacttctgctgatgatgagactctaaagaagcagtacaggaagttggtccttcagctccatcctgacaagaacaagtcggtgggtgctgagggtgctttcaagatggtccaagaggcgtggactgtgctgtcggataaaacaaagagagctctgtatgaccaaaaaaggaaactaatggttctgaaacggaatacatctcaaacaaataaagcaagtgcagctcctggtgcatccaatggcttttataattttgcagccaatgctgctgcttccaaggtgacaagaggaaacaagcaaaaggcaggaccagcaacatcttcagtgcgccaggggccaccccctccccctccccctccccgtcaggctcctgctccacctccagcaaagccacctacattttggacctcatgcaacaaatgcaagatgaattatgaatacctgaaagtgtatctaaatcacaatcttctctgccctacctgccgtgagccattcctaggcacaaggggtaccaatggccacccaccgggagtgttcatgctgtacatgatccgacatcagtggtggaaatnaaaacacaatg

SEQ ID NO: 58517 - DNA, 2445 bp, Oryza sativa
  Clone ID: PAT_MRT4530_60225C.1
atgtctatggcacgcctagtttgtgtcaccaagtccctattaaatccttcaggcgaaaatgaaacggtcgacccagacatagacggtcgacccaggcggcaaaacatctccttgccgaggagaggatacgggttcgattcccgccgctccatcaccaccgcagtgaccgccgtggtcgcagacagggcggtgtccaagattctcaagaacttcaaccagcaaacggccaccgccgagaagctccagcggctggagatgctgctgatcaaaatccacagcacgatcgaggtgtcagagaagcgcgccatcaagagcgccgcgttgatccagtggcaggacaagctcaaagaagccgcctcccgtggtgaggaggttctccatagcttccagcagcgggaagcagacgtcgacgaagccactggtcagaacgccagcgaccaccagcagcagcaggaggaaggcagcagtagcagttctgtgcctgctactgctttgtccttcaaaaggaaggccctatcaggcatggcacagcgcgtcatcaccatagccatcgcgctcttctccagtgacgaggaagtgaagaagctgaacggcgccgtggaggcgctggagaaagagtcggcgaacatcggggagttcatagcgttgctccagctagaggcctcgccgaatccaaagcggcgccgtagccaaatgtcctcaaacaacatggaagggttgtcatttaggttgcaggaaggtgatgccaacacacgattccttcatcagcattccgcctggcggcgtcgaaagaattttgtgcaacaaatcgagcacaactcgcagatcgccacagccccagatgaaaaggccgcccttgcccataatttcttctctgaagtcggctctgtcagtcatcgtgagttttcggtggatcttgactactttgagccaagggggcagcagctctctgacttggaggaaccgttcactgtggatgaggtgtggaaggcaatcgctgacagccctcgtgacaacgccccggggccggatggtttttctggtcagttctattactgctgttgggacatcattaaggaggacattatggcggctttgaatcaacttcatcgaatggatgggtccagccttggtaaggttaacaaggctttcatcaccttactgcctaagaggtcggatgccaggaagctcaaggactttcggcccataagtctggtacatagctttgtgaagcttttcacaaaagttctctctcgccgccttgcgccgaagttggatgcattggtcgctaaaaaccagagtgcgtttgtgaagaaacgttgcatccaggacaatttcatgctagtgcggcaatcagctaaacgcttgcatgatcgaaggactccatcggcgctgctgaagcttgatactgcccaagctttcgattccatttcatggcaattcattttggaagttttggagcacaaaggcttcggccttcggtggcgctcatggattgccatgttgtttcgaacaactagctcgagggtcttaatcaatggtgagccaggctgcccaattttgcatcggcgaggcgtccgtcagggagatccaatttccccgatgatttttatcttagccatgaatgtgctgagttccatcttctccaaggctgaggttgaaggtttgctgcagccgctagggattcctttttgtgtatccctctatgctgatgatgtggtcgcatttatacggccagctgtggatgagattcgcacagccatgcaaattcttgccatttttggagaagtgtctggtcttcgaacaaattttgctaaatgttcggcgctccaatccagtgcaatgagacggatcttcaaactcttcatgatgagttgccataaggaagacctgcagccgctggttgacaaaatcgcgcgccgtttgccttcttggatgtctcacttgatgacgcctattggccgggctaccatggtgaacgttgtactgagctcaattcccgtttacctgctcatggccatcaatgcaccgaagtgggttatcaaagggattgacaagatctgccgcggctttctttgggctggcaaagcttctgcaaacggcggcgtctgtcgggtcgtctgggctcaagtttgctcgcccaaggagtatggtggtttggggatccccgatctagagaggttggaaatcgctctgaggttgagatggctctggcagcagagaacttcaccggaaaagccgcggcaagggcttaatattccggtctcgcagaagaagcgcaatctagtatcgatttccacgtatgcttggtgggagatgggaattcggtgttgttctgggaggattgctggctgcagggttcctccattcggtcgctggcgttggctgtctatgcagccgtccctgctcgtctccggaatcatcgcacggtggccgaggcaataa

SEQ ID NO: 58518 - DNA, 875 bp, Oryza sativa
  unsure (1)..(875): unsure at all n locations
  Clone ID: PAT_MRT4530_60226C.1
gcaaactaacgctcgcaataactatagggcttcccatagtcctaccattccttccatctggttgccttgcgcctccttctacttcttccaagtcgtccatgggcacaaatttctcantctcctcngcgcgcggcaacgccccccactcctcccacgcaacgccccccccacccgcctccgcgcaactcctctcaccgcgcgcggcaacgcaaaccccacaccccaatcangctccccctcccacttccaaatggttcgctctcccgacgcaccctcacccgccccctctgcagcggcacaccaccacccccaccccncgcaacgcaactccctccgcaacaccgccccncccggcgcaantcttcccccaacccccttcgggaaacgcctttaaaccccttcaaaccccaaaaaacccaaatttctcggcaaacgcggccaccaccgcacacactcgcacgtctccccgtttcgtcgccccgagctcngccaccccctcgacgcgccgccctctaacgctcccnctcccccaaaccaaacccccacaccgcggcggccncttctaaaaggtttcttttcctaaaccaccccacaaatttggcttnaatttcgcccctaacaaattggccctcccacccaaacgncntctgggtccctacatttcgtccccaaaggnncgcggcgcanctcgtctcgccgaccgcgccacctgcccctcggttncgctccccaccacccaccgctccccccaaggctccacgttttaaagagggttcctccccccctcttttgggaacgaccaaacgcaaagcgctcgggcccaaaccacgccctggggtttgaagngcctccaaatccatccaaatcccaaaaaa

SEQ ID NO: 58519 - DNA, 1354 bp, Oryza sativa
  Clone ID: PAT_MRT4530_60227C.1
agcctttccatcagtctggccgcggcaaaccaaaccccgccgtactcgaccaaccaaatccgcaacttctgcagtccgcatagcgactacctgcaccaaatctagagtgcaattaaggccctggtgctgatcatagacttttttctttttaaattaatttccaccaaagatcgccctgcgcagcacactacaaaaaacctttttatatatatatgcatgcttctgcataaactaaaacaaaggcaaactgcattacagagaggtgaacaaaaacaatagtgagttccacatactctgaataatgatagtactctacctgcacttcagtttcaccctgtacataccacataaatggaacacgtcagagtttcaactctgatgaagacagaacaatgaacatcttcaatattcttccctttcacatgtttcaaaacctcctgccagactccatcgagtctagaaccaggcttgtgtctctcagcgcaacagcaccagcgccttcatggaaagcgtcggtctctgtccatcccatgttgtgtgagttttcattaccgttgcttcgtgactcggctagcagttggaagtgagcatgaggccatatagcatcagcatcaaatggatatgggaaaaattgcaggtaacaaaacgaagcaactgtgagacctataatgccgcctgcaaatacatcttgccagtgatgccagtaatcgtcaacccgagagactgccacaagtgatgcaacaagtagaggcagaaagactaggcatagttttgcaatatgcccttcacgtttaaaagctttaagtttgcctgctaagtaccacgcaagaaaacccagaccagcaaaagcccctgaagaatgcccacttgggaagctcttgtagccttccttgatgacactcctttctccatggcatatgacatcaccagtgacattattgaaattatccattgtttctgtacaatttgcttaatatatgagagtaccgaatatagaatccccagtatgccatggtgtaaatcatagacatttttctttttgaagtaaattccaccaaagacaacccagggcagcacaattgcaataagtggaacggcccaaaatggaattgtgttgccctttagtggatatctcaagtctgtcatcatgtcacgtccaacaaagcggtgaaaaggctcaattatgtttagcagcccatcaacaacagctgggaagagaagtctcggcgccggagtcgcccgcagcgtcgcattccccggcttgccgcgcggccgcgaaagcgaatggatggatggagacgatgctgagtagcagcaggagtgcaggagagaggaggcaacgcggaagcagcat

SEQ ID NO: 58520 - DNA, 2343 bp, Oryza sativa
  Clone ID: PAT_MRT4530_60228C.1
atggcggggatccaacccgttttggatgaaagaatggacccatttactggtagaatgattataccagcctctacttgccaatcacgatgtactgctcacaatgatctgtccttattcagcgggccattgattgacagaacgtcttcctcttccattagtgagtttaacagcgaggctgaaaagttcaacgatttggaagtgccgccaccatggttgttgtcctaccatcgcagctgtgatatcgggagcaactttgaggcgtttgcaactgtaatgtcacggctgcgccagcacttgttggatgcaaatgtagagattaattacacggagtacttagatttgatgaaactggaagttgaacagcaccttaataagctcaaggaggatataaggttcctgaaaagtcatagcttggtccatgatggtgatgcaaatggttcatgccctatggtgtgtcaccatgggaagcttgttgagatatatgagggcttcaatggcttcaagctacttctggttgtggtgttccggcaaatcaaggagatgctgagcttgttcagtgcttcaattcgtgatctccagtgggaacacgagatgcaattagaggtcaccagcattatgatcggagactgcattaaaagccttcaggatgagctagagaggaagctgtatgaacaaagttccatagtgaacactctgaaaaagaattggaaggaaactgttgttcagtgtggtgctatccatgaagaactgattgacattgctgatatgcttttaccttcagaagaagaatcaaatattttgaacagcaagcatgaacattttggtaactggagtagcggatggaaacacaaattctttggaaaaaagtcaggggaagaacgcacgccatcttccaatgaggaaaacatcagctccgcaactcagaaatctgtatgtcccagagaagttatttcagaaaaatctgacttccggcatctgaagggtatgaatagagaagaaatgataaagtacttcagatttgagattagtaaactaaaaaggctacatgaattgtcattgcaagagaaaaccgaagagttgttcaaattcaaacgggaaaagggatcattggctcttaagtatgatcctgaattcgagcctttaagaaagaaagttcctgagatcatttcaagagttgatcaaatcattttgaataccataaatgcacctacagctttcagcactaatcaggtacttgaggaaaggggcagattgactggtagaattgattcactatactatgcaaaccagaatcttcgaggtttgcttgcagaaaagatgaaggatattaaggatttatcacgccaggtttctgatgccagcaggaaaatgtcatttcaattgtcactggaggagaaactttcaaggcagctccacaaaattaaaggggactatgaggatctacacattcaaagcactattagagatgaagtgtatcaaactgttacaaaaagaatgtttgatgattataggaacagcctgcaggaccctgcactaacttatcaagaaaaagtgacttcacttgaagctgcactctcagaaaaggagacggcgttacgtttagctaatgaagaaaaccagaggttaaaggagaagttgtcaaaacaagaaaaggagcatggcatccaaaataaccaggactatcctgagttaatcaaacaagacaatgaggaaatgatactccgtgatatcgagatggagcctcatgtatcacctaggagatcatatgccatttctgagcagaatgcagagtatgaggagctcatcaaactgaagcaaactttagagattgcctcaactgccttgaaggaagttgaatcaaacgaattggattataatggtattctaggtaaaaatgagcaagaaaagcaactagaattcattttggtatccattatggatttgtcaaaagaatttgtgcagattgaaaataaaatgtcaggggatatgaagggaagtgaaaaagggcctgaaattctgggttatcaatgcaagcatatggtacagcaggcacttgtgctaacaaagaagggcctttggtataagcaaatgctagacacaagacggtctcaactccgaaaagctgaagctgaggagtcaatcaaagtttcaaaaatggttgacgttttaggaaataaggttagcacactcttaagtcttgttcaaaagatatacgtgactctcgagcattactctccagtatttcagcaatatcctgggttgctagatgctttcttgaagacatgcaagcttgttgcaggtttaagaagtaaacaaaaagaggacttacaggatacatcttaa

SEQ ID NO: 58521 - DNA, 1422 bp, Oryza sativa
  Clone ID: PAT_MRT4530_60229C.1
atggtgagcttggtcaaggggattgccagttctcaaggtggaatggagaagagccagcgaagtttatatgcacccatgtatgcagatatcaacgagtgcgatccatccaacaaggacaagtacccctgctatggggtttgcaagaacattgtaggagattacgaatgcagctgtcatactggttaccagccaagtggtggtggtccaaagaaacaggagtgcaatccaaagtttccagttgcagcacagcttgcccttggtgtcagtttgggattttccttcctggttgttgttgttcttttcacactaatgatgcttcaaaggagaaaaatgaacgaatatttcaaaaagaatggtggttcaatactacagaatgtggacaatattgtgattttctccaaagatgagatgaagaaaatcctaaaaaacaattcagaagttattggtcaaggaggctttggtaaggtctacaaaggtagacttaaagacaataccctggtagcagtgacgacttcaattgaggtaactgaagctcaaaaggaggatttcacaaacgaagttatcatacaatcgcgaatgatgcacaataacattatcaagctattgggctgttgtttggagatggatgttccaatgttggtatatgagtttgccgctaatggtagcctaaaagacattctccatagtgatgccagtcacctagtccctctcacactagatctacgcctagacattgcaattgaatctgcagaaggtctaagatacatgcactcgtccataagtcataccatacggcatggtgatgttaagcccgccaacatacttctaactgacaagtttgttgcaaagatctccgactttgggacatccaagcttcttactgtagacaaagaattcaccatggttgtggcaggaagcatggggtacatagacccagtgttctatatgactggtcacttaacacaaaaaagtgatgtgtttagttttggagttgtattgctggagctcatcagcagaaggcaaacaatatatggcaagaaccgcagcctcattattgagttccaagaggcatatgatcaagcaaatagtgggaggttattgttcgacaaggatattgccatcgaggaagatgtcttaatcctagaagaaattggtaggttagcgatggaatgtttaaacgaaaagattgacgagcgtcctgatatgaaggaggtagtggcacgacttatgatgctgcgaagatctaggaagcttaaacaagaaaactacaacataagtcgtcaacagttctttgaggagaatagtatagatgaactccctaagagctttgatgacaacagctcaagtagcagtgcagagcttttatccaatctagccacaaagaactctctaacctatagatcgacgactggaagagattag

SEQ ID NO: 58522 - DNA, 414 bp, Oryza sativa
  Clone ID: PAT_MRT4530_6022C.1
atggcgacggcggtggaagcggcggcggtgttcgggttgaagctcaccgaggcactagaaagtgttgggcaaccttggttgtcagtggcggctcgtggaatggctcggcggcggcgctccttctcgggtgaacggcgatggctcgatctatcaaacaacctggcatgcatggggtcacttgatggggagatgttgaggaaggtgaggtcgatctccctcttcggagctccattcttcatggttcttgaggggaaatggagaggagtacgaggcgaatacaatggcgcgacggcttggcccgacttggtccagatcgattgcgacggcaacgatgccaccacggcgacgcttggagcgcgctctggagctctcgtgggcacgtcggcgttcccgtcgctgcagtggatgaaatga

SEQ ID NO: 58523 - DNA, 210 bp, Oryza sativa
  Clone ID: PAT_MRT4530_60230C.1
acgaaaccggacggacattttatcttacttcataccttacgtatcttgaacgagccgaccccacacgagagaagaatgaatcggtgcatcgagcgaccgaactaggcatgcaaagagtatgcacgaagatttctcatgcttacaccgctgatatgacgacccactctttcgctttcgttggagtcgacttcggcttaatcttatgatgca

SEQ ID NO: 58524 - DNA, 560 bp, Oryza sativa
  Clone ID: PAT_MRT4530_60231C.1
agtagttatatgccttccttttttttacattcagaagtcactaatgtagtaattacccatttttgctttcacagcttttctttccttccttttttttttcttttttgacaattctggatattagtgctaccagtatgagaatcgagaaatcctgctttcttactgtattgtcaaccaaaggatttcctaggttagaattataaacctgtaactattcttaggtctaccagagcccctaggtccagagctaaatgggtttctatttgttgctaagttacatgtcatcatcatttgcagtttagctgataaagatcgaacacttgaatgccatattggtcataaagtggtaattggttgagcaaccacattgcttttccagtatatgaaaatagtacaactagtcaacactcctgaggagaacagggtttaaagttttgtgttgaggcaatagatccatggctagaacacagttaccgatgacttcctttgcttcatggtaatcagtttttcatggctctgcacatcctatctttatggctcaactaaagtgaagcttttgt

SEQ ID NO: 58525 - DNA, 573 bp, Oryza sativa
  unsure (1)..(573): unsure at all n locations
  Clone ID: PAT_MRT4530_60232C.1
caccatgcttcaccccggttattcgtttccaaccgcatccatgtgcaaggtgcatccagaaggactggccatgttcggcattgacgaggaggctctcgacatctatgtgggtccanctncacaggtggggaagtacaggagatcnctgcgaaggtggtggtggcgtcgggtgtcggcagggncgacttaactaactggacatggcccagggtgggtgactgggccagttcacacatgggtggatggtngcaccggcgcacggagctgcgtgcgactgggttgctgcccggaccttgctgacagtgctcacaagtgccaagcagaccaccgatgggcagacgccctgcagcaaagaagatgcactgcgaggccgtgcgcggcaagaagttgcctgctgaccccaagaccatgccgcagccatggccatgcgccgctgagctgaatgatgatgatgaatggctgcaatgatgatgcaccctggattggatgcgatgcccatgccaaggctgatgagtgggcaacctgaccctgatgatgatgatgatgaactttgttgtnttgatgaaaaaaaaa

SEQ ID NO: 58526 - DNA, 531 bp, Oryza sativa
  Clone ID: PAT_MRT4530_60233C.1
atgtggcatcagcgagaagctgactatccagccgggcagatcggcatagaaggagccaagaaggtgacaaaaccaggccacgtgatgatgcggcgactgatggaaagtttgcttgagctggactggggcggggcgccacggtcaatttggacgcctcgactgtggcacgaacgaaggatgcgccactccggcgggcgtgcgtctatggtgacctacagtgtgatagtatttggccctaacaacggtgattcgccaccgcccttctccttctccgtgcgtgctgcctttgggccgacgaacacgagcatcttcgtggagaagacggagaagaaggcgcatggaacctggtgctcatttgcgatgggcgggagccagtcgcgagcgaagtcgacgatgacccaattgggcttcttgctgaaaggatttggccctctacctccaccaccctcccaatctctagcagtgtctcattgtttggaattctggttgaaggacgaatatcggttgaaggatgaatatcgtattagttga

SEQ ID NO: 58527 - DNA, 1649 bp, Oryza sativa
  Clone ID: PAT_MRT4530_60234C.1
ccggccggcccgagcttttcccggacaggtctcccggcgccacggcatccaagctgctcgtcgcgctatctatacatgacacgccccgtctccctccttgcttgacaccaattcaacgacctctcgcgactgatcgatcgatcgatcgatcattcgatcgccatgaggctctcggtctccgtcgccgcggtgctcgtcgttcttgcggcgctccggccgccgcgggtggcggtggcgcagaagtacgcggccatcttcaacttcggggactcgctggtggacgccggcaacctcgtcgtggatggcatcccggactacctcgccacggcgcggctgccgtacgggatgacgtacttcgggtaccccaccgggcgttgctccgacggccgcctcgtcgtcgacttcatcgcgcaggaggtggggttgccgctgctgccgccgtcgaaggcgaagaacgcgacgttccaccgcggcgccaacttcgccatcaccggcgcgacgtcgctggacacgccgtacttccaggggcgcgggctggggcacacggtgtggaactccggctctctgcacacccagatcaagtggttccaggacatgaaggcctccatctgcaagtcccctcaagagtgcagggacctgttccggcgatctctgttcatcgtgggggagttcggcggcaacgactacaactcgccgctgttcgcgttccggccactggaggagaagctgatcgaggaaggggcggtggagctggtggtgcccggggtgctgccgatcgggtgcttcccggtgtacctctccatcttccggaagcagccggagatgtacggtcgccggagcggctgcatcagggacctcaacacgctgtcctgggtgcacaacgctgcgctgcagcggaagatcgccgagctccggctcaagcaccccggcgtccgcatcatgtacgccgactactacaccccggcgatccagttcgtcctccacgccgagaaatacgggtttttgaggcagacgccgcgggcgtgctgcggggctccgggggtcggggagtacaacttcaacctgacgtccaagtgcggggacccggggtcgtacgcgtgcgacgacccgtcgaaccactggagctgggacggcatccacctcaccgaggcgtcctacggccacatcgccaagggctggctctacggcccgttcgccgaccctcccatcctcgagacccgccaccactgatcgatcgaaaacacgatcggtttgtgatccactcgttcgtttgcatatatgacaagcagacacacaccacatacacacacaccttcatatgcactggagatgtgaaggatagcgaaaggggccggacaggcagaagaacagagaatgtgatggttaatttgttcagattaattagatggttggttggggatgtgttgtagtttcattcatgtaagaagcgttttggtttgtgtatttcgtttgttggtccttggtagagaaagagagagtagatgtaattcctatttcttgagaaattaaaattgctctcatatatagcatcctttcgaccttgtatacataccgaccgtgtatttctaacctgtcgttttactacttttcaaaaaaaaaaatttgtctaaaaaaaaaaaaaaaaaaaa

SEQ ID NO: 58528 - DNA, 168 bp, Oryza sativa
  Clone ID: PAT_MRT4530_60235C.1
atggcaaaaaaaagaaagagctacacgcgggggaagggggcaataccgaggtccaggaaaggtgttggattcgagcacctgaatgtagagttgttcttatttcagaaggtaattggtgtcatggagaagaaccaaattaaagttgtcaggctggagtttctgttgtga

SEQ ID NO: 58529 - DNA, 146 bp, Oryza sativa
  Clone ID: PAT_MRT4530_60236C.1
ggaatcgggtatactatccagtttaaaagataataaaaattgatcgcaacacatccagatactacgatggccattgctgtactcggcgcataagcaggacatattattccatacactgatatgatcataacagacactgttacaag

SEQ ID NO: 58530 - DNA, 2370 bp, Oryza sativa
  Clone ID: PAT_MRT4530_60237C.1
atggaggtcaggggtctgggccagctcctggccgcgctcgccgcggcgctgttcgtccgcgccgtcgccggcccgggcccggcgctcctccctccggccgacgacgaggactccgacgccgacccggaggccggcggggaaggaggcggcgtgcctccggtgacgataaggtgggcccgcatcacctgcgccctcaagaacaagcgcggcgacgtggcgaggtttttgctgtcaaatgcgtctggggaggcgaaatcggggaggctgcttgcgctcatggggccatcagggtccggtaaaacgactctgctcaatgtgcttgctggtcagctcacagcatcaccttctttgcacctttctgggtttctgtacatcaatggccgacctatctcagaaggtggctataagattgcttacgtgaggcaagaggaccttttcttctcacagcttactgttcgtgaaacgctctcgcttgctgctgaacttcagcttcgccgcacgttgactcctgagaggaaggaaagctatgttaatgaccttttgtttcgtcttgggctggttaactgtgctgactcaattgtgggtgatgcaaaagtacgtggaataagtgggggtgaaaagaagcgtctctcccttgcgtgtgaactgattgctagcccttctatcatctttgcagacgaaccaactactggtcttgatgcgttccaggcagagaaggtcatggaaactcttagacagcttgcagaagatggacacacggtgatatgttctatacatcagccaagagtggtcatatttgtccttgttagtggcactatccaaaattccagtgtacggtatcattgtccagatcatgtgaaccctgctgagttcttggctgatctcatttctgttgattatagttctgctgaaagtgtgcagtcatcacggaaaaggattgaaaacctcattgaagaattttctaataaagttgcaattactgaaagcaacagttcgctgacaaatccagaaggctctgaattttctcccaaacttattcagaagtccaccaccaagcatagacgtgggtggtggagacaattccgtttgctgtttaagagagcatggatgcaggctttccgtgatggaccaacaaacaaagtgagagcaagaatgtccgttgcttcagcaatcatatttggatctgtgttctggcgaatggggaaaactcagacttccatacaagacaggatgggacttcttcaggtaactgctataaacacagcaatggctgcactgacaaagacagtaggagttttcccgaaagagcgggctatagttgacagagaacgggccaaaggttcctatgcactaggaccatacctttcttctaagttgttggctgaaattcctattggggctgcattcccattgatatttggatccattctttatccaatgtctaaacttcatcctacattttctagaaatagtagaatatcgatagttcgatactattttgtttatgctccatcaaacaacattccatgctacactttcagatttgccaagttctgtggcatcgtgactgttgaatcatttgctgcatcagccatgggccttactgttggagctatggctcctacaacagaagccgccatggcccttggaccatcccttatgacagttttcattgtatttggaggatactatgttaaccctgataatacccccgtcatttttcgctggatcccaaaagtatccctaattagatgggccttccaagggctttgcattaatgagttcaaaggtttgcaatttgagcaacagcattcctatgacattcaaactggtgaacaggccctggagaggttttcattaggaggaatccgcattgcagacacgcttgtggcacagggtagaattctgatgttctggtactggttaacctaccttcttctgaagaaaaacaggccaaagtatcagcagcttctaccaccatctgaggaagatcaaaataagcagcaagttaaggaagtgaaatgaagtgctgccagcaacattttgccagcaaagagagaagctgcaccttcttcacagcatctcggcatgagaatgagaggatcactaaatcatgcggcaataaaacaattagccgcccaagcccatcactttgaagcagtacatcaactcaactgaatgattaatttcctcttttcttttttgtcaagcaagtactcgtagtaatagtattcaactcaataatgggagatggccggtgttggttggaaaagacctgtcgttttattcgatgtggacacttctaaactatttattgttccatgattccttccctgaataaatcaccggccaaaatgtgccatgtggact

SEQ ID NO: 58531 - DNA, 440 bp, Oryza sativa
  Clone ID: PAT_MRT4530_60238C.1
atccagtgaacaaccaagatttatcaggtgattgagttgggagtctatcccttcaatcgaatcgatttatacaaccatctttgatcctatactacaaattgattcctgccaattcttttagaaaaaaaaaaatactacaatctctgtagatcagaacacaacctcgtttacatcttacaacagctgaatcatatgagaacggtagaacaaacagttgttaaatacatgctacttcaagcctaattgtaggcttgtagccaatgaacttctcacaattccaggttgaattcatgtgtttattgtcaaatagcaggctggttcagcctaattttaataaattaatggaatctgcaatcccaaactccctttgtaatttgtatgggggggccatctacttgcactgcagctgcttttgcaatggctttgagctccatgtcagc

SEQ ID NO: 58532 - DNA, 245 bp, Oryza sativa
  unsure (1)..(245): unsure at all n locations
  Clone ID: PAT_MRT4530_60239C.1
gtcgtaagctaggttcctctattttagacgcccttttttttttttttttttttagagttattatagcataaatttcctaattaacaagatttctccatctagccaagttcagagctgantgagtttcagttacacaagcgttttattccctactcttgtgttagtatttcaaacaatagagacagttagcacattttttatagacatatatatataagtactagttacataggagtcctttagaa

SEQ ID NO: 58533 - DNA, 348 bp, Oryza sativa
  Clone ID: PAT_MRT4530_6023C.1
atgccaaccagttggggtcatatcagcttcaacggagaggactcgcctgctctcagggaaatcatgataccactggttaaagatggaacatgtacaagtgcgatgagcggacggaaaggtgagactgtacgtgtagacacgactactgaattttgtgcgggatcagagaacgggatcatacgtgatgcatgccaaggcgattcaggtggccccttggtcgtgcaacggaatgagaaatacaggcagatcgggatcgtgagctacggcatcaaatgtggtgtaacctttggtgtttacaccagagtcccacactatgttgactggattgagggaatcattaatgagtag

SEQ ID NO: 58534 - DNA, 323 bp, Oryza sativa
  Clone ID: PAT_MRT4530_60240C.1
gtgagggggaacccccgggccccaaaataggcccccattttttggggaaaaaatttacattattagggggcgccaatttttggggcccaccaataaaggaaatttttcttgaaacaaaaaggttcttgggaaaaaaagggcaaaaaaaaactggttacaaaaaaaaatatacagggggggaaaaaaaaaaccctttttattgggcacttttagggggctttgggggacctatttatctggaaaggggggggttttggtcaaaagagcccccgggggatgggtggaatttaatagggcacttaagggcgggggttgggggcttc

SEQ ID NO: 58535 - DNA, 2550 bp, Oryza sativa
  Clone ID: PAT_MRT4530_60241C.1
atggagacggcgatggccgcgacgtgcagcgccctctccagcctgggcgacatcatgctggtggtcagggaggaggaagaagaaacacgcgagggcggcgccgtcgagctcctcgcggcggagctgacggccgtgcacgccgcgctccgggacgactacctcgccgacgtgcccccagcgcggttcgacgagcaggccaaggcctggtccggccacgccagggagctcgcgtgcgacgcggcgctcttggctcgtcgcgcggacggctcccctgacgcggcgtcggcggcgacggtcaaggcgcttctcgagagggccgccgacctgtccaggaggaggcctcgcccaaccgcggccgtcgaccctcgccggccggccgctgccgtcgacgctggcccgccggcgacggagatcgtcggcttggacgccgccaaggacgacctgatcaagaagctctgcgacgacgtcgacggcgacgagcaatcggagcagcggctgaagaccgtgtccatcgtcggagccgcaggtctgggcaagacgacgctcgccaagatggtgtacgacacgctccggccgcggttcgactgcggagccttcgtgtcggtgtccgccatcaatcccgacatggccatggttttcatgaggatgctccgccagcttgacgacgacgacaagcacgagagcgtcggcggcgaggaaccgagcgtcagcggcgaggcgcagctcgtcgatcaactgagcaagttcctacgagacaggaggtatgtacagtatctcattgttattgatgatttatgggataagccatcttgggaaatgatcaagcatgctctggttgagaattattgtggaagtagaataatcacaacaacccgaaatttcagtgttgctgatcaagctggaatgccatatgaactaaagccactttctgcagaaaactcgaagatattgttccttcaaagaatatttggccatgacaacaaaatctgtctcgacgatgagtttgctgaagtagctgataaaattttaaagaaatgtgacggtgttcctattgctattcttgcactagccagtttattggctggtaaaataggagacaagaaggaatggtataaggtccacaactctatcggttcaacactagagaatggtgctgacgtgaagaatatgagaatgacaatttccgttggatattaccgtttacctgcaaatctaagggcttgcttattgtatctaagcatattcccggaagattatgaggtcagctccttgtcaagcgaagaaaactttgtgactatattgaacgatgagcagcagacatgttcatcaaacaagggttgccggttatccatccgaggaagcaaggcatcagtagacactacaaatcaggctaccatgatgagcatgcttcaagcgcggtcgctttctgtcttcagccctgctattggtagcatcaatctttcagagttcaaagttcttcgtgtattggatctagaaggttgtgatatttcacaaagccaccacgtcctcaacgatcatcttggtagtttgatccacctacggtaccttggactgagaaatacacggatcactgaacttacagaagatgtaggaaagctgcagtttctgcagacgctggacctcgcggacacaagggtgaaagaactgccggcaacagtctttcgccttggaaagctcatgtgccttcgtgttgaattccagacaaggattccgagtgggatagggaatctggtgtcactggaggagctctcggacatttcgactcgcgattcaccggatcttgtgaacgagctgaggaacctgacaaagctgagggtcctcaagatcacgctgaggcagccgacgcagagcaccgaggaagccctggtggagtccctgcgaaacctgcgtaaattgcaggatcttcacatctacgccgctagcgggaatgggcacaagaggctgctcgatcttctccaggatggcagctggacgccgcctccgcgcctccgatcattcagcgcgttggcgacgtacatctcctgtagcccactgcggctgctgccagcgtggatcgccgcctccgtcgtgccgcgcctcgccgtgctgctcatccaggtgagggagctcaggcaggtggacatcgacgcccttgggaagctgcctgttcttcggacacttcgcgtggagccatacgagatgaaggagatgattgtgattggtcgagacgcgttcccgtgtctgaaggaatgccggttccggaactcggaccacgggccggtgatccagcggggagccatgccgaggcttcggatcatcgagttctgcttcggggtaaggcagaccaaggatctcggcaatggcttcgactttggattggcaaaccttggttgcctcgaggaagccaccgtttacatcaactgtaaggaggccaccgaacctgaggcagaggaagcagagggggcagtgaaacatgcagctgacacacatcctaaccatgccaactttgatatgaacatatggggaagagctcatgcgtttcgacgatga

SEQ ID NO: 58536 - DNA, 912 bp, Oryza sativa
  Clone ID: PAT_MRT4530_60242C.1
gtttcttccccatctctcgggcagcgtgaggcgagatgggtggcgcgcggcggccgacgggagaggagcggcgtagcggccggcggaggccgcgtccccgtggccccctccgccgctccccccgttgtcctcgcttcttccccccgggccgacgccgctgccgccctcaccaccgtcgcgtccgccatcgccgattccttccgtgacctgttcctcctgtcccgccactgggcatggcggagcgggacgtgttcgcgtacacggccatgatctcggggctgtcggaccacagccgatgcgtgaaggccatcgaactgttcgagcggatgcaggaggaacggggagggcagggctcatcggccaggcaagggagatcttcgggagcatggcggcgaagtacggcatggagcccggcgtggagaactatggcagcctggtggatgtgctggcggggatggtggaggaggcggaggatgccgatgaggcccgactagtgcgtgctgggggcgctgctgaatgcgtgaatggcgcgcggcgacactgaggccgggaaggaggtggcggcgatgatggcggagctggggctggacgaccacagcggggtgcaggtgcagctgtcgaacctgtatgtggggcgggggaagttgggggaggtggcgggtgttccacctccatgatccatcggccagcgacatggcgacctcagcgtggtgacggcgtccaagtactccaaggttcctcaacccgtaggagttaggacacgccccatcgcgccaccgccgacctccctctcgtcgtcttcagcaacgtgcactggggccgcttccaggaggccgtcctcgagctcaggcatgacgtcgccgaggcatggccgcatgggcggcgctgtggagggacgacgccacgaggttc

SEQ ID NO: 58537 - DNA, 552 bp, Oryza sativa
  Clone ID: PAT_MRT4530_60243C.1
atgctgatgatgatgaagccttacacggctgcccttctcgccgtcgccgtcgccgtcctcggcgtcgtcgccgtcgacgcgaccgtggtgacgacgtgcagggcggcggccgacgcggacgcccgggtggactacggcttctgcgtggcggagctgggcaagcaccacgacagcccaggcgccgacgcctggggactcgccaaggtggcggcgctcacgggcgtcgtggacgccgacaacgccgcgtacgacgccagggacctgctggcgaaaggaggaggaggcgcggcggcggcgctcgcgcggtgcggggagctgtaccgcgcggccgggttcgcgttcgccgaggcgcacgacgacatcaacgcgcgggactacgccgccgggaagggcaaggccgcggacgcggcgtccctcgcgcgccagtgcgacgccgcgttcgctggcaaggacgacgccgccgccgccgtgccgccggtgatcgcgcagcacggctcgtacgccgcgcggatagcgatcgtttgcacggcgatcaccaacctcatcgagtga

SEQ ID NO: 58538 - DNA, 225 bp, Oryza sativa
  Clone ID: PAT_MRT4530_60244C.1
atggagaagaagatgagaggaagcgacggcgcgggagcaccagaccaggagggcctcccttcacgccgccccaccgccaccgccactgccaccgcaaccggcagcaacggggagctcgcccatgccatgggagtcgatctcgacctctccgacaagcccgccgggctcgacgtccggtctcaccgctacacgttcctggcaaaggacgacgcccgctgggtctag

SEQ ID NO: 58539 - DNA, 351 bp, Oryza sativa
  unsure (1)..(351): unsure at all n locations
  Clone ID: PAT_MRT4530_60245C.1
cgcccacgcttgtccgcccacgctgtcacgcttctgctgtatgatctcactgtatgataactcgctatctcatttgtcactcgctactgtgcggctaatcgggcaggaggccgaatggagcgggcggaagatgacaacaaagaggaagcgtgaagagccatacctcttgtcatctctggggggtgctgtgcaactacctttgtatggagggccgagcaaagagggagagagagaggaaaacgataaaaagacgtgattactaatgatggtgcctatacaaaaccagacccanggccagcgggcggcggaggcngcggtttancacggatccccagggaggggcngcggcta

SEQ ID NO: 58540 - DNA, 1550 bp, Oryza sativa
  Clone ID: PAT_MRT4530_60246C.1
cttgctcttcgatttaagcaaaaaatgacattgaagcttggcccagtaatttgaagaacttgaatgaacagattctatctactgctataattttgtcactaattattacaggccattctctgactggactgcaatgttggaagaaacttttccaagagcaagaatgcgacaggattattaggtggtcttaacccatgctgaagcccaaagaaattgaggtgccgccagttaacctcttaaagctaaagcttctctccgcgtatgcaacaaaaattagggggaaggaaaacaatcaagaggacggaatcacatcggacgatcagatatgatcacagactgccttcgtgaagtctgaagtcgacgcctttccgccgagatcagcagtcctgaatttcccctcggagatggtctggaggatggcgttgtggatccggtctgcttggttattgaattgcaagtggcgcaacatcataacagcactcagcataagagcggtcgggtttgcaaggttcttgccagcaatatcaggagcagaaccgtgaacagcttctgccagacaaatgccaccttcaccaatgttgcagctgggtgtcaagcccaagcctccaatcagaccagcacaaagatcactaataatatcaccataaagatttggcatcaccagtacatcaaaaagaccaggattcttcacaagcgtcatacaacaattgtcaatgatgacctcctcgtatacaatttcagggtacttctcagccacttcacgacagcacttgaggaaaagaccatcggtcttcctcatgatattggccttgtgtatcgcagagaccctctcccggccattggtcttggcatagtggaaagcatactctgccactcttaaacttgcttggcgagtgataatttttaagctttccacaacacccctcacaacctgatgctcaaggccactatattctccctcagtattttcacgaatagtcacaaggttcacatcatcatatcgagtcttgtatcctgggaggctgttgcaaggtctaacatttgcataaagaccaagctctttccttagtgtaagattcaatgaacggtggccttttccaataggcgtagccataggacctttcaagccaactttgtttctccgcaccgactccaagctttcccaagtcagaaaactctctgttctgggatcaacttctgtaccaacatagtgttcttcccattctattggtacccctgcaacattgaatacctgcttgaccgactcggcgatctccggcccgatgccgtcgcctgggaagagcgtggcgcggacggtctccccggacgccgtcgagaacggcgccgcggcggctctgcccgccatccgcggcaggacgctcccctggagcagcctccgtagcgccatgcccccccttcctccctcttcctgctgctacccggacggcgaaggcgactcgcggcggcggcggcggtcggcggcgaggaggaggagagagagagagatggatggaaaaggggaggaggaggagaggcggacgcggatcccc

SEQ ID NO: 58541 - DNA, 298 bp, Oryza sativa
  unsure (1)..(298): unsure at all n locations
  Clone ID: PAT_MRT4530_60247C.1
ggtacttgcncggccgctgcatatgccncctaaaaggaagcgatcccggtcactgtctggacagttagtttgatctgaaatcgttggggtcnctagagtctagagttggttgatccatatggcacnggnaacagtntggatgccgtnacaacaactgatagtttagttcaacagngagtttgctcacatgtttcccccnttttgacattgtaaactaaactattagctatgtacatctctttntntgnaaaaaaaaaaaaaaaaaaaaaaaaaaaaaaaaaaaaaaaaaaaaaaaaaa

SEQ ID NO: 58542 - DNA, 174 bp, Oryza sativa
  Clone ID: PAT_MRT4530_60248C.1
atggcaggagagaacgggcagcacggggaggtggcacgagatgagacggagcggggtggccgccagggccacgacaatgcaccggtggcggagcaggcgcggcggctttccccatgcggggttgaggatggtagcagtggaggggaggctgtagcaggagggacggcggcgtga

SEQ ID NO: 58543 - DNA, 1689 bp, Oryza sativa
  Clone ID: PAT_MRT4530_60249C.1
cggcacgagggcgacagataacccccaccgataccgatggacgcggccctcgcctcccgccgccaccgcctcctccttgccgccgctgccgccgctgccggcggctacggcctctaccgcctctaccgccaccatcgccgccgcgttgctgccgtcctctccctcgccgacgccgtctcccaggtcggttccgacctcgccgatttcctccgctctgattccgatcacgtcccccgaaccctcctccagctctccaagctcgccgcctccgaccccatctcctccgctgcctcctccctttcccactccctcgcctccggcctcctccgcgccctctccgactccacctccacctcgaccacgaccacacccgcacaaatcggcctcaccgatcggatcttggaccgcctgctctcccccgccggcaccggcttcgcctccgccgtcgtcggcagcttcgccaggaacctcgtcttgtcctaccacgccgccgccgcccctcggccccccagcgcccacccgctcccggattggctctgcagcgacaggggcaaggacgccgcggccgaccttgtccgggtcttcgttagcaccgccgtcgcggcctacctcgaccggaccgcctccgtgccgcgtacctctcaccagctgctcgcggcattcaccgaccccaagcacgaggccaagctcaaggacctgctcgtctccgtctgcaatggcgccgtggagaccttggtgaggacaaggaggcaggttgcggttgctccacctccaactccaattgtggtggtcagtgaggcgcagagtcctcatggatgcgtcatggacacggtgtccagcactcttgccgtgcccagcaaccgcaggtttgtgctggatatcactggcagagtcaccgccgagaccgtccgctccttgctcgatttcctggcgcagcgggtctccgatggagccaggaagagcattgccaccgcccgcaacgaggggttcctcgccatcaagcacatcacctccaagtccatggccatcttcaccatatgcttcgccttgtgcatgcacatttccatgggaacaaggttcctcttgccgccatagctcactgctattggaattccaggtgacagcttgtcccccatcttcattagttgcacactaaattattactactatatctgtagattgcaaattgatcctataccactagtagttattattacaagcttggcgcctcattgtcatattaccatgtctttggggtgttggctgaaagcatcaaggttccatcaacaactagactggaattttcagatggtggttgttctgtttgtggcttgattgattgacacgaggtatatgatggctaaattaaatcatactggccgaattggcaattttagtgtatgataattttgatacgggtagtgattgatgctgttttatgcttgccaattttagtgtaaagtggcctagtttttgtcaatagcttcttgttgctgatgctcttcagctgtctttccatgcatgtaatccatagagcttgtctgcttttttttttgtttggtattcactctttcttctgacttgtaacaaagggaacgggaagttgtgagataaaaataaaatgccttgttttgtgaatgtagtggcatttctatacatctttgtgtgtattaatcttgcagtttgtat

SEQ ID NO: 58544 - DNA, 395 bp, Oryza sativa
  unsure (1)..(395): unsure at all n locations
  Clone ID: PAT_MRT4530_6024C.1
cccacgcgtccgcttcactgttggtctttgaattgtgggaacaatgagaatttttggttatggagattatagctgagggtggtctagacatggctgtgctatgccttttgttctcttagatatcactctcgaaatgaatctgtctgtttgacgcggagtctactaattaaaactaacttattaacaccaatacaaaaaaacatcaatgccaaaaaaaactcaacacattcaaacaaaaaataactaaaaagcatcatcatcgccaagcggctcataaagaagaagatctcctcatggcaattgaacagaaacatgtatctgtgcaacatcccatctttggggctctgaagtcatatatatacanaaactatgataanaaaagatcaatataccat

SEQ ID NO: 58545 - DNA, 1590 bp, Oryza sativa
  Clone ID: PAT_MRT4530_60250C.1
atggcgcgcccgccagccgccaccgctccgcctcctcctccgccgccgccgccaccgccaccgccaccgatcgaccgcctcgtctggctcgcctgcgccgccccgctgtcccgcatccccgtcgtcggcacccaggtctcctacttcccagagggccacgccgagcagtgtcccgcccctctcccggatccgctcccctccgcccaccgattcttcctctgcaccatcaccgccgtcgacctctccgccgacaccaccaccggcgagccctacgccaccatctccctcctccctcttcgccacgacgcccccgcccccgcccccgcccccgcccccgccgccgccgaattagcagaagcagaatcacaggagttccgctactacgccaagcagctgacgcagagcgacgccaacaacggcggcggcttctccgtgccaaggttgtgcgccgatcacatcttcccggcgctcaacctggatgatgacccgcccgtccagagcctcaccatgggggacctgcagggcgactcgtgggaattccgccacatctaccgcggcacgccgcgccggcacctgctgacgaccgggtggagcaagttcgtgaacgccaagcagctggtggccggggacacggtggtgttcatgtggtgcggggccccggcccccgagaggaagctgttggtcggggtgcgacgcgcggccaggtactcgggcgagtcggcgtgcaacgcgcgggggcgggtgcagccccaggaggtgatggaggcggtccgactggcggcggagcaggcggcgttcagggtgacctactacccgcggcatggggcgggggagttcgtggtgccgcgggtggaggtggataagggattgactactccgtggaggtgcgggatgcaggtgcgcgcccaggtgatggaggccgaggacacccgccgcctcgcttggctcaatggcaccctcactaacctccgccaccaacaaatctggcgcactctcgaggttgaatgggatgcctccgccgcgtcatcttccatgaaaaacagatttgttaatccttggcaggtccagcctgttgatttccctcctcttcccatggggctaaagatttctaacaacaatattagtgcacctgtgtgcaatggggattcactgctggtgccaccgatactaatgcacccgcaacctcaacctcccgctgacattcagggagccaggcataacaatggccatgcctatgcagatataccctcttcatcaacaccatcaatggtgaggactcagcagctgttcccaagggatcttcagattttagttccccacaccgacattgtcactcctcaaaatggatcaccgcccgacaaccccgtaaacacgcctctttctgcatctgacggaatgaagaccatacagctgtttggcgtcacaataacatcacctgtgcaaggagacaccaatggcgctttcgcttcagcacaagtgaatcaggttccagagggtgtagatgatgaaactgctaccgaagaagcttctgacacaagcctacctgactctcttaccaatggccacaatcaagatggtgctaggctttga

SEQ ID NO: 58546 - DNA, 144 bp, Oryza sativa
  Clone ID: PAT_MRT4530_60251C.1
atgacgttcatgttgtaccccaaggtccccttgagccccataccggagcaagtgatcccaagccaagactggccacaagggtcgccgttctgcgccacccagtttgtcagctgcgagggcgagttcagacttgtgctgcgttga

SEQ ID NO: 58547 - DNA, 206 bp, Oryza sativa
  Clone ID: PAT_MRT4530_60252C.1
ggttggggtttaatcctttttttttttttttttattcattttttatggacactgaagtcttcccgatatatcgtgaccgcgccctattggttagccattttacccaaaacattgggtgataacagatggaaggcaacgaccacccaactgtttcccgctgtaacatttacaaagctaaaataacacacgcgaacaacccgaaagca

SEQ ID NO: 58548 - DNA, 2238 bp, Oryza sativa
  Clone ID: PAT_MRT4530_60253C.1
atggcgcctcctccgaacacgtactcggagtcgtggtggggtggcaaggaggagcggggcacgccggtggtggtgaagatggacaacccctactcgctggtggagatcgacgggccgggcatggcggcgccgtcggagaaggcgcgggggaagaacgcgaagcagctcacgtgggtgctcctcctccgcgcgcaccgcgccgtgggctgcgtggcgtggctcgccgcggggttctgggcggtcctgggcgccgtgaaccgccgcgtccgccgcagccgcgacgccgacgcggagcccgacgccgaggcctccgggcgcggccgcgccatgctccgcttcctccgcggcttcctcctcctctccctcgccatgctcgccttcgagacggtggcccacctcaagggctggcacttcccccgctcggcggcggggctcccagagaagtacctccggcggctgcccgagcacctgcagcacctcccggagcacctccgccgccacctgccggagcacctccggatgccggagaaggaggagatcgaggggtggctccaccgcgcctacgtggcgtggctcgccttccgcatcgactacatcgcctgggccatccagaagctctccggcttctgcatcgccctcttcatggtccaatccgtcgaccgcctcgtcctctgcctcggctgcttctggatcaagctccgcggcatcaagcccgtcgccgacacctccatctccaacgacgacatcgaggccaccgccggtgacggcggcggctacttccccatggtgctcatccagatgccaatgtgcaacgagaaagaggtgtatgagacgtcgatatcgcatgtgtgccagatcgactggccgcgggagaggatgctggtgcaagtgctggacgactcggacgacgagacgtgccagatgctgatcaaggcggaggtgaccaagtggagccagcgcggcgtcaacatcatctaccgccaccgcctcaaccgcaccggttacaaggccggcaacctcaagtccgccatgagctgcgactacgtccgcgactacgagttcgtcgccatcttcgacgctgacttccagcctaaccccgacttcctcaagctcaccgtcccacacttcaagggaaacccggagctagggctggtgcaggcgcggtggagcttcgtgaacaaggacgagaacctgctgacccggctgcagaacataaacctgtgcttccacttcgaggtggagcagcaggtgaatggcgtctacctcagcttcttcgggttcaacggcaccgccggcgtgtggcgcatcaaggccctcgaggactccggcggctggatggagcggaccaccgtcgaggacatggacatcgccgtccgcgcccacctcaacggctggaagttcatcttcctcaacgacgtcaaggtcctctgtgagctgccggagtcgtaccaggcttaccggaagcagcagcaccggtggcactccggccccatgcagctcttccgtctctgcctcccggccgtcttcaagtccaagatctcgacgtggaagaaggcgaacctggttatgctgttcttcctgctgcggaagctgatcctgccattctactcgttcacgctcttctgcgtgatcctgccgctgaccatgttcgtgccggaggcggagctgccgatctgggtgatctgctacgtgccggtgatcatgtcggtgctcaacatcctgccggcgcccaagtcgttccccttcgtcatcccttacctcctcttcgagaacaccatgtccgtcaccaagttcaacgccatggtctccggcctcttccagctggggagctcctacgagtgggtcgtcaccaagaaggccggcaggacctcgtcggagtccgacatcctcgccctcgccgaggccgccgacgccgacgcccggccgccaccggccaagctccaccgcggcgtctccgagggcggcctcaaggagtgggccaagctgcacaaggagcaggaggacgccacggcggcggcgtcggcggcggcggcgccggggacgccggtgaagaagagcaaggcggcgaaggctccgaaccggatcttcaagaaggagctcgcgctggcgttcctcctcctcaccgccgccacgcgcagcttgctctcggcgcaggggctgcacttctacttcctcctcttccagggcgtcaccttcctcgccgtcggcctcgacctcatcggcgagcaggtcagctag

SEQ ID NO: 58549 - DNA, 332 bp, Oryza sativa
  unsure (1)..(332): unsure at all n locations
  Clone ID: PAT_MRT4530_60254C.1
ccactccgttggccaccacgagaagcaataaatcctgtgaaatatcaccagcgattctccccattcacacgcgaaaccacagccaagatcgatggaagcagctttgtaaggggaaaaggtgggggggggnggggaaaaggtgnttctgatctgctgttngtacttntacgtntgttgttgtttanggttgatttttttgtagttttggtttgnngtttattacaccaaaagctgtagacatggctcgccctccaaccaatcgagatattgtaatcttttggaacagaatgagaacacgtagagtgaaactagtgatgacgttgtatttattg

SEQ ID NO: 58550 - DNA, 647 bp, Oryza sativa
  unsure (1)..(647): unsure at all n locations
  Clone ID: PAT_MRT4530_60255C.1
gnnnnntnnnnnnnnnttcngggtngcaggcttcggcacgagaacagttgnttaccaaangagattgncactcnanccatcgcatctggtatncctggggtggggatctctntncgtgctnctngcaagtggtgttnatntctgatcggggggcggncatgcnaaaaccanctagttgtnttntctataccatactnaanntncntctaggatatgtcaggnccggaaatnncctgcatttnccnacttctnacgtcatatgcctnatccacatgggtntgctggagataaaaattaacagacangtgtctaacacccatcncngtgcnnttanatcnggnannnttagcnncaatncancnanatatngcngtctttgctgtgaccctcccaaatatnntgtatctgctcntggacacctnaaaaancngntatntgcctaatcccttataaatcaaaaaatcgaagggggncccggtncactattctcccnatnnngantcatattccanttcactgggacntcgtattncaacgtcntnaggggaaaaaccctntnntnagccaanttgaccccccnttcaacccatccccctttcnccttctggggngtcaacgaacaagcccgcaccaatnccccatccnaa

SEQ ID NO: 58551 - DNA, 324 bp, Oryza sativa
  Clone ID: PAT_MRT4530_60256C.1
atgtcggccatcagaggcagaggtgccgatggcggggtcagcccggcaagcaaacggaagctgggagggaggggggggggggtaacggcctcatattggttgaagcttggtcagattgatttgcataaatataccatcgaaatcgtcattagaaagcgtgataccgaggttcgcaacgggaaagtgcgatatcgccactgtatcgcattaccaatgcgcgagagcatgatggtctcgcgcgtcgaatgggcgaggagatttgagctggcggtgtcgcttgttggctatgcgatatcgacgcggtatcgtgttttcatagagtga

SEQ ID NO: 58552 - DNA, 378 bp, Oryza sativa
  Clone ID: PAT_MRT4530_60257C.1
atggccagtgatcagtccatcgtcatgtccgagcaacagcgagctgtgttttgcttgacattgatggccgtcacgtacggccactgccggcagccagccgacgccgaactgctgcataggctgcaacgtgctgatcagccgccgcccatccgcggcgctagggtggtcgaaaacaccgagcctaatgtcctgttcgcgtatactccacacaatggtttattggtttgtcaccggagttcaacgacgacgacggcgttgctgattattttgcagccgatgatgacgaagcttgatcgggaaacctgtcgtgccagctgcattaatgaatcggccaacgcgaaccccttgcggccgcccgggccgtcgaccaattctcat

SEQ ID NO: 58553 - DNA, 371 bp, Oryza sativa
  Clone ID: PAT_MRT4530_60258C.1
tttcgtttatactccggctcttattcagtgtcgaatcctgtcttatgctggtgcccaccagcaccaccgtagcactggcggtcatcgggccgatcaacaaggaggacccgctcaactggtgcgcggtggtggcctatatggtcagaagccacctcgacgaggtgaatcgcatggtggtgcagttgcgtgagccgctggacaagatccagggcgccaccctccgtgttgtccatgtggtcggcgtaatctaggtcaaggactgcgccagcgtctgcgttgagctcaacgaggaggcccgctcccgtgtcaaggtcaacagcggttggatcctcaactgcatcgtccacggtggagacatatacggcgttact

SEQ ID NO: 58554 - DNA, 1191 bp, Oryza sativa
  Clone ID: PAT_MRT4530_60259C.1
atggccaccttctccggcaccgaccgcctccgcgacctccacgccttcgacgacaccaaggccggcgtcaagggcctcgtcgacgccggcgtcaccaccgtcccctacttcttccgccaccaccccgacccactccccgtcgccgcgccgtcggaggccgccgcggccatccctctcatcgacctcgccaaggccgacgtcgaccgtggccacgtcgtctcccaggtgaggtccgccgccgagtcggccgggcttttccaggtggtgaaccacggcgtcgccggggagctcatggacgcgatgctcgcggcggcgcggcggttcaacgagcagcccgcggaggcgaaggcgccctactacaccagggacctcggcagcaaggtccggttcttctgcaacttcgacctgttccagtcgccggcggcgcagtggcgcgacacgctgtacgtggagatggtgcccgacgcgccctcgccggaggagatcccgccgccgctcaggggcgtcgcggaggagttcgccgcggcggtgtggcggctcggcgagcgggtgaccgagctgctctcggaggcgctgggccttccccccgggtacctcgccgagcacgccgggtgcatggacggcatgagcatggtggcgcagtactacccgccgtgcccggagccggagaagacgatgggcacgacgcggcactccgacccgagcttcctcaccgtgctgctgcaggacgagtccggcgggctccaggcggtgctcccgcggcccccggaggagcggtgggtggacgtgcccccggtggccggcgcgctggtggtgaacgtcggcgacctcctccagctggtgtcgaacggccggctccggagcatggagcaccgggtgctgcccaccgccgccagcgcggcgcgggcccgcgtggcggtggcgtgcttcttccggctcgagtactcggcgtcgttgacgaggccgaggtcgtacggcccgatcgtggattccggcgaaggcggcgcgcggcgggcggcggcggtgtacaggagcacgacgccgagggatttcctggcgtacttcaacggcaaggggctcgacgggcggtcggcgctggagcatttcaggattccggaggcggctgcggcttcttccgccgtcgacgtcgtctcctcctccaccaccgccgccgcatccattccacggtag

SEQ ID NO: 58555 - DNA, 419 bp, Oryza sativa
  unsure (1)..(419): unsure at all n locations
  Clone ID: PAT_MRT4530_6025C.1
gacccacgcgnccgcactcctcaccaagncaaagnnnctncctcgcgaccggcggcgagcggcggcggcggcgagggcngggagaggcaagggcggcaaggggctcgggaagggcggcgcgaagaggcacaggaaggngctgcgcgacaacanccaggggancacgaagccggcgatccggaggctggcgaggaggggcggcgngaagcgcancnccgggctgancnacgaggagacccgcggcgngcncaagancnnccncgagaacgncanccgcgacgccgncaccnacacggagcacgcccgccgcaagaccgncaccgccanggacgncgncnacgcgcncaagcgccagggccgcacccncnacgganncggcggcnaggcgaggcgangcgaggccacgcgannnggaaggg

SEQ ID NO: 58556 - DNA, 2226 bp, Oryza sativa
  Clone ID: PAT_MRT4530_60260C.1
atgtccatctctcactgtgaggataatgattctgacaggatcagcaacctacctgacaagctgctgcaccatgtcatgtcctatctaacagcgcaagaggcagtgcggacatgcgtgctgtcacggaggtggcagaacgtctggtcatctatgatgtttctgcatgctaacgcagccaagtccagcagcatcacaagtttcaagaaatttctcgataatgtgctcctgtaccgcaatcctgttccactgaagggactttgggtttctgccgcctgcgacaactctgatgattcccttgattattccgacatccatcgatgggttcgtcatgttcttaggagcaatgcacgcgaagttggcatattcgttcgttgtggttccaagcttctttctatagatggttatccctttgctttcaactcggtgcacttgtctaagttggtgcttttcaagtttacagtaaatgactgttttgccaagaagttttcttctggttgcccggttttgaaggatcttgtgttgataagctgtggcatcgatgtcaccatgttttcctcaaccacattgaagagtttcgtcattcacaatgcagaagacattgaacatctgcccaaacaaattgagtatcttgtcatagaaatgccaaacttagttaccctgcatatagaggagattccaagaagaaatattcaccttgtggacttgtcgtcagtgaaagaggccacaatttacttttttgaacactcttttcgaaattccgctgttgactgcaatattctcagtgctctttcaaatgccacaagcttgaagctgatatgtgattctgtctatgatgaagtgtcaaagcttggagctgaggagtatgagaagtttccaactgctgcagcagcaatagatcctccatgcaaagaagcagcaagaacgtttcattgtgaaaaacttacagagattgaaatcgtctaccctcagggcgataaaagggtgcacatcattgtgaggatattgattgcgaacattagccctctccctgaaattaaaatcaagccctttccgaaatccggattatcatgtgcatgtctgcaggaaccaattatcagaacagcgagctcatcatcatcagacgaaccaattatgttcttagtttctgaacagccaagtgttctgaagcttctcattcctgtttacaatccggctgtttttctgtttcctagacaacaccttgcacggaagctgctcgattcaatgtccctgatagagcaagttcttccagcgacagggatgaccacctctatcaatgaggagaatgcgcctgacaggattagcagactaccagacgggctgctacgctttgtcatgctctatttaaccgcgcaagaggcagtgcagacatgcgtgctatcgcggaggtggcagaatgtctggtcatctacaaagtggctcaaagctgatgcagcaaagttcagcagcatgaaaagtttcaagaagtttgttgacaatttgctcccgtaccgcagacctgtgccactggatgcactttttattcttgccacctgcaaccactctgatgattcccttgattattctgacatccatccatggattcgtcatgcccttaggagcaatgcctgggctcttggcattatggagcattgtggcaccaatcttctttcaattgatgatgagattccaaacagaaatattcagctcgtggacgtgtcatcagtgaaaagggccacattttacttttttgaactctctttccaaaattctgctgttgactgcaatattatccctgctctttccaatgtcacaagcttggaattggtttctccaactgcctatgaagatgtggtgccaaatgtgttaatccgtagttttccaaggtgtaagacattcagcaacctgaaatatttgaagctaggtgagtggtttttgagagatggttgctatcctctacttttcttgcttcggcgctcacctaacatagaaaaacttcacctgcaacttaacaagtatggatctgatgactatgaggattacccagatgctgctgcagcaattgatcctacttgcagagaaatagaagaaatgttcaattgtgtaaaactcaggaagatcacaatattctacccacagggtgatgaaagagtgcacatcattgtgaggatcttgattgcgaatattagccctctccctgcaattaaaatcaagcccaccccggtttag

SEQ ID NO: 58557 - DNA, 379 bp, Oryza sativa
  Clone ID: PAT_MRT4530_60261C.1
gttggacgtgtacatccatgattatcttttgaagaggaacctgcagagcactgccaaggcattccaagcagaaggcagcgtgtcttccgatcctgttgggggtttcctcttggagtggtggtctgtcttctgggacatcttcattgcaaggacgaacgagaagcactctgatgttgctgcttcgtacattgagacacagtcaattaaagctcgagagcagcagccatcacagctgcagcagcaagaggctcattcccagcagtcatcacagcagatccaaatgcaacaactcctactacagaggcatgcacagcagcagcagcagcagcagagtcagcaacaacacagcaacaacgccgccagcagaagcaacaacagc

SEQ ID NO: 58558 - DNA, 2668 bp, Oryza sativa
  Clone ID: PAT_MRT4530_60262C.1
atggcgcagcagcagcagcagcagagtgcgtgggaagcggagaagatgttggacgtgtacatccatgattatcttttgaagaggaacctgcagagcactgccaaggcattccaagcagaaggcagcgtgtcttccgatcctgttgatgtcagcttttgttttgcaaaaaaagcaattgatgccccagggggtttcctcttggagtggtggtctgtcttctgggacatcttcattgcaaggacgaacgagaagcactctgatgttgctgcttcgtacattgagacacagtcaattaaagctcgagagcagcagccatcacagctgcagcagcaagaggctcattcccagcagtcatcacagcagatccaaatgcaacaactcctactacagaggcatgcacagcagcagcagcagcagcagagtcagcaacaaccacagcaacaacgccgccagcagaagcaacaacagcgtagtgaaagcagtcatttgccgacaagtgcacataatggtttggtttctgctgatcctccaacacgacaaagcacttcagctgcaagttctttgtctgcaaagatgtacgaggagagggtgaagaattctgttcaaagggacaccttagatgaagcacctgcaaagcaaaggtttacagaaaatattggacaactgctggaatcaaactcatcatctatgctgaagtccgttgcaataacagctcaggcttcagggcaaattttccatggatcaactggtggcgtgtcaggtactttgcaacaggttcaggcccggaaccaacaactccaggcatcaacacaggaaataaaggtagacacaaatgctgctgtacacatgagagctgcaggggcagatggatcattaattggagtaccaggcgctaacccagcagggaacaatttgacgttgaaagggtggcctcttactggcttagaccagcttagatctgggtttctccaacagaaatcttttatgcagtctccccaaccattgcaccatctacaatttctcactccacaacaacagcagcttctgcttcaagcacaacaaaatatgacatcttcacctggagagatggacagcagaaggcttcggatgcttttgagtagccgaaacattgttcctgggagggatggtcaatcaaatgcctacacggaagttattcctagtgttggcccttcattgcaaaatatgtgctcacctgtgcagcgcatggagacagatatgctgatgaagaagatagcagctatacagcagcaccagcaaagcagcaatcagcaacagctccttcagcattctttacttagccagcaaccaccaatctctaatcaccttccaggccagcaggaaaaaatgggagctggaagtgttactattgatggaagcctgtctaattcattccgtggaagtgaacaggtttccaagaatcaaaatgggcgaaaacgcaaacagccaatctcatcgtctggtccagccaatagttctggcactggaaacaccgcggtcccctcctcagaaccctcaactccttcatcgcaaagcccaggagacacaatttcaatgccctcgctgcaccacaatgctagcttatcaaaggctttagttgtttacggtaccagtacagcagggacaatgggatcaccatcaaatcaacttgctgacatggatcgttttgtggaggatggctgcttggaagatcatgtggattcgttcctgtcgcatgatgatgcagatcgaagagatggcagtcgtatggaatctactaaaggattcatcttccgagaggtctcttctgtacaagcaagcacgaacaaggttgtatgctgccacttctcatcagatggaaagctacttgctactgggggtcatgataagaaggtggtattgtggcatgctgaaactttaaaacagaagtcagtattggaggaacattctcttttgataactgatgtacgattcagtccaagcattccacgccttgctacctcctcatttgataaaactgtcagggtctgggatgctgacaatcaaggctattcaattcgaacgttcactgggcactcagcatctgttatgtcactggatttccacccaaacaaggatgacctcatttgttcttgtgatggggataatgaaattcgattctggagtatcaacaatggaaacatcgtccggatatttaagggaggatcaagccagctgagatttcaaccacgtcatgggggatatcttgcagtagcttcggagaatgctgtctctatacttgatgtggagactcaagcttgccttaggagatttgagggccacacaaagcatgtcgattcagtatgctgggatcccagtggcgaatatgttgtatctgtcagtgaagacacggtgaagtctcttgagctgtgggacatgtcggagaacagaacgatgacgctcgcagctcatgacagcctcatcacagccctggcgtcgtcaagctccggtttggtcgcttccacgagccacgacaagttcgtcaagctgtggaaatgatgtgctttcaagctaggaacgatgacgctcgcagctcatgacagcctcatcacagccctggcgtcgtcaagctccggttcggtcgcttccacgagccacgacaagttcgtcaagctgtggaaatgatgtgctt

SEQ ID NO: 58559 - DNA, 2343 bp, Oryza sativa
  Clone ID: PAT_MRT4530_60263C.1
atttcggagggggatgtgtagcggcggcggcggctagggtggtggtttgctgttcttcgagctagcatctgtagtaattctcgcaagttatttgaaggacaaatatggctactattcaagatataggtgtctctgcagctatcaacatactgagtgccatcactttcctgctagcgtttgctttcctgcgactacagcccatcaacgatagggtttacttcccaaagtggtatctcaaaggtgcaagagagagtccaagtcatgggggtgcatttgtgcggaagtttgtcaatttggacatgcgatcatacttgaaggtcttaagttggatgcctgctgctctcaaaatgccagaggatgagttaattagccatgcaggccttgattcagctgtctatctgcggatctacttaatagggcttaaaatatttgctccaatcacagttctagcatttattattcttgtgcctgttaattggaccaatattacccttcaaagctcgaaggtgcagcacagtgatattgacaaactttcaatatccaacatacctgtagggtcaaagaggttcgcagctcacctgaccatggcttatgttttcacattttggacatgctatgtgctgttacgggagtatgaaatagtggcaacaatgcgtctgcgctttcttgcatcagagaagcgccgcccagatcagttcacggtccttgtgcggaatataccgcctgatcctgatgaatcaattggtgagcttgtggaacatttcttccttgtaaaccatcctgaccattatcttacgcaccaggttgtctataatgcaaataagcttgataagatggtcaaagagaagaagaaaatgcagaattggcttgattactatcagctgaaatatgaaagaaatacatctcaaaggcctactacaaagactggttttcttggatgttttggttcaaaggtggatgctattgaatactacacatctgaaattgagaggatagaaaaggaagaaactgatgaacgtggaaagattatgaaggatccaaaatcagttgtgccagcagcctttgtttccttccgatcgcggtggggagcagcagtgtgtgctcagacacagcaaaccagtaatccaactgtctggttgaccgagtgggccccagaacctcgtgatgtctattgggataacctctctattccttttgtttacctgacaattaggaggctgataattgcggttgcattcttcttcctgaacttcttttatgtgctcccgattgcatttgttcagtcccttgcaaatattgaagggattgagaaggcagctccatttctgaagcctttgattgaaataataccaaggacaattggtgaagcaattccaatgaaagcaaccttttttataacatatgtaatggttgatggttgggctggggtagctggtgaaattttaagattgaaaccattgataatcttccacttgaaaaactttttcttggtcaagactgagaaagacagagaagaagcaatggaccctggaagcattggttttgactcaaatgagcctcaaatacagctctatttcttgctcggacttgtctatgctgtggtgacaccatttttgcttcctttcatattaatattctttgggttagcatatgtggtataccgtcaccagataataaatgtgtacaaccaagaatatgaaagtgcagcagcattttggccaagtgttcatggacgcataattgtagcattaatcgtatcacagctgcttctccttggattactaagcacaaaaggtgctggccagtcaacaccggtgctccttgttctccctgttgtaaccttttatttctataaatactgcaagaatcgctatgagcctgcttttgtggaatatccattacaggatgcaatgcggaaggataccctagaacgcgcaagagagccagggttcgacctcaaaggatacctgatgaatgcctacatccacccggtgttcaaaggcgacgaggacgacgagaagttctccatctccgacgaaccagaggcggagcaggttctcgtggcgacaaagcgccagtccagacggaacaccccagttccgagtaaatacaatggctctgaatcaccttcccttgctgaaattgtaaatgatcaacggctataaatataatagaggtgatggctagtaggtttgtagtttcgacatgtacattaagtaaaagagcaccaataatggttttgaggatcggttttgtttacagcaaggagcaatggcaaaatatatatatatataccaatgggctcccgatgttgctttgctgtaaaaaaaaaaaaaaaaaaaa

SEQ ID NO: 58560 - DNA, 762 bp, Oryza sativa
  Clone ID: PAT_MRT4530_60264C.1
atggctgacccgaacaacaacaggcgtcgacccaatctcctcaccgggggctgcagcgcaggcaaacaatacttggctagtaaaacggccccgtccattttcagtgtcgaggtggccgtgcgtcatgagaagcagaacaacttgaaagctatgaggaaatacgtggcgttgacagacaaggcaacagatgtgatggatacgggggtgccaacagatgaacttactattaagagacgacaacagactggatttgtcgttcacagtagcgacacacagttgtttatcctgactacagcccatgcagttgattgtgtgttcaaaaaaggggtgcaccaagtcactgctgaagagctcaacttggtcttcctgtttggtgtggcctgtactcatcacgaggcgcagattcaggcagattaccctgatgggaatgtatctgagctgttgagatcatattgcgatgcgcatgtggtagcccttgacattgagaaggatcttcttcttcttgcagtaacaaaggacgagctgtgcttgcaagacgtagatgttggtggggtgtttgtcccatgttccagtgatcatcctatcattcacctggccgatttgcctcctgagcagagtgatctatcccttttgcaagtgatggtggatgctaaatgtgggtatgcaatttgtttggaggatgtcagagagtttcttaccaatgcattggaaaacctgcagcttcttgaggacaatgaggatggagatggtgggcatgcatga

SEQ ID NO: 58561 - DNA, 590 bp, Oryza sativa
  unsure (1)..(590): unsure at all n locations
  Clone ID: PAT_MRT4530_60265C.1
ccgggctgcaggaatcggcacgaggaagcaacagcatcttctagatcagtttttcatcagcatgctgaaagagctgtgacatcttctagatcttctatgacatcatgtagatcttctacatatcaaaatggtgatagagttgcgacatcttccagatctgcatngggtccgaatgctgatagagttcatgcgtcttctaaatcagcacaacaagcttctcgtcgatctcttagagaaccacatggtgcagtttcccttcctcgtgcagctgtcaacaaaggatcacatgtctctcatgttgctctcagcaatagtactactcagaagtttgttactagtcaccctaaacactcggtgatgcccaattcatctcaaagtgcaagtaccttacatactactcaggtctcgttgaaaagatcagcaggtgttagctctgtaaacaacagaccgcagaataaaaggaaacagcttagcacaccgtcaacatggcgatgaaaataagctgaacagaggatacgcacgcacatctgcaccctcaagtgcaagaagtagctccgttggcattcttccgcacaaaactgcgaaggcac

SEQ ID NO: 58562 - DNA, 450 bp, Oryza sativa
  Clone ID: PAT_MRT4530_60266C.1
catgcccacaaccgcgtcgctgtccccctccggcgcgcccactgtccgtgccgggctcaagaagcccctgtgcgcctcgttccagcccgtccgagggcgagccgacgcgcggcgaggatgccgtgagggcgtcggcgtcgatgaaggagagggcgacgccgggctgacgccgcgccatgcgcggcgatggtcctccccgacgtcgcggagccgccaggcagcctgaccctcgctcaagaacttcctcctcagcatcgtgtccgcgggtcgtgctctccccatctcggccccttctcccctctccaacttcgaccccttcaacgacctgatctccctccctcatcacaacacccctcgatccttcttatcgaatcatctctctccattttttgaattcttaactattacaatatgaatatgatttttaatgtatcctccataaaaaaaaaa

SEQ ID NO: 58563 - DNA, 1776 bp, Oryza sativa
  Clone ID: PAT_MRT4530_60267C.1
ttatctctggtcttcagtggctttgggcagatcgacaagcttctgttcttcgattgcaatctgtgcattgcattgctctaactcggctaggagttctatctttcgagcatttagccgatctatgttagcctgtgtagagcttggaccagcttctaattcatcaagatttgccttttcttcattgatagaaaccctgctagcttggatggttgcttcaagatcttttctttcgcgacgatcagcaatcctttgctttgccttttcaagcttgagccgatgctgttcaaggtatgctgctggggtgagaacatcagctagctcatctgggatttggtcatggatttcatggaatctatctctgattgatccacagctgaccactagggtttctagagagccctcaagccgctttgagatgtccagcaaggttgttttcacattatcggctagaggcaccaaggctttacttgtagtttcttcttcttcatccataaactgcctgatgtcaaaagaaaacatatcggctgtgccagggataccaggggttggtgctacctcttcttccatatgatggctacctgcagccgatggagtatgttcgctcgattcatgaactgaaggagttggagaatgaggaggcggtgtagctggtgctatcggtttcttggaggctagcttctttttccttggtttgtaagtggaatgtgttggaggtggtggagttctttgaggagtaggaatatcggctggtggtgtttgttctcttgtctcactcatggtagcagccgcatcatccacggcttcttctatttctttatcttccaagaattgctccacgactgggtcaatagatggcaagtcatcggtagttttttgtttcttggacttctttggtgcagccgatggagcagcaaccgattttgctctctttttcttgccagcttcataggcaatcggtacacgagtctgaccatgcagcaacgttgaggtcttgggggcatggtagccaatgaacgaaggagctaatccaccaccattgggaagaattcctagagcgaaatggatctctaggccactttcactatgatgaggaggagaggattctgttgtttgagggacagcttcagggaataaatctgtcaagtacattgaagtcgattgatgcaacaggtgtttcttccattctacccaccatcggtcaaatgctgcactcctctgtatagctagcttgatgttttcaatactccctagactgggtcctgctatgttcaacagccgatccatcataggagcagatgtgatctctcccatgttttggatcttatcggcaaagaacaaactaatcggcagttggcccatccctaattgtcttgcagcacttgttggatgatagaattcataagagatctgaatatgtctgccttgatgaataccaactggcagtatgcaaggggtgatggctgctgagaatacttctctggatttatcaaacttatcagagttgatctcaacaaactgaaaatcggctgggagctcaaagttggcagattcctcatatgcaaaccaaactctggtattccttgggaagccatcataaaagtttgtgaaccaatctctgaagagctcagccgataacttggatccggcattggttgatgctgcctctccaatagacatgcatcggcgtttagtgatttcttctccatcttcattggtgatcggctcaagtcttggaaattctgcttctgatagtgctagccgatcaacgaccttcat

SEQ ID NO: 58564 - DNA, 2079 bp, Oryza sativa
  Clone ID: PAT_MRT4530_60268C.1
atgtcggaggcggaccggatacgggtgcgcgcggcggcgctggcgctggacggcggcggcggcggcgcggtgcgggacaagccggacgcgaaggcggacgtgttcgccgatcttggctcgccggtgtccccgctgcgggcgcgggcgagcgtggcgacgtcgtcgtcgtcgtcgtccgggtcggctaagtcgccggcgccgtcgaatgccggggcgctggcgctggcgggcgggaggagccactccggcgagctgacggcggagagcacgcccccgcggctgcccgggcaccggcggtgcggatctggcccgttgatattctccggtgggagcagcggcgggagcggcggcggcggcggggaccgcgggagcacggcgagctcgccgatgactaatgcgctccccgcaggtaacatctgcccgtccgggcgcgtccccgtcgcggcggccgcgccgcccccgccgcgctcccgcccggacgtgctcggatccggcaccggcaactacggccacgggagcatcatgcgcggcggcggcggcatggcccccgcgaggagcagcattgactcctcgtcgtttcttggacacgctccgagatctccggcgaccttcccggcggcgtcgtcggcgagcagcgggagcctccaggatgtgacccgcctgggcaacgagtggtacaagaagggcaagcacgccgaggcgctgcggcactacgaccgcgccgtggccctctgccccgagagcgccgcgtgccgcgggaaccgcgccgccgcgctcgccggcctcggccgcctcgccgacgcgctccgcgactgcgaggaggcagtccgcctcgatccggccaacggccgcgcccacagccgcctcgccggcctctgcctccggttggggatgattagcaaggcgaggaggcacttaacgcaggctgggcatctccatcaatctgatccttcggagtgggagaagctgcaggaggtggagatgcatcagggaagaagcatagatgccaggaaagtcggggattggaagagcgcgctgagggaagctgatgctgccattgctgctggagctgactcctctcggctgcttcttgcgataaggtcagaagcacttctccgtctccacaagttggaggaggctgactcgactcttgcaagtttgctgaaattggacagcgtgttgctgtatcggatgggagccaacccgtcaggcatgctagctgagtcatatgtctctattgtccgagcccaagtcgacatggcattgggaaggtttgatgctgctgtggaggcagctgataatgctagatttattgatcctggaaatgcggaagttggaatgattctaaataatgtcaaattagttgcaaaggctcgagcccaaggaaatgagctctataaagctgccaagttttctgatgcatctatagcatatagtgaagggctcaaatatgagccctcaaatccagtgctctattgcaatcgagcagcatgctgggggaagctagagcggtgggaaaaggctgttgatgactgtaacgaagcattaagaatacaacctaattacacaaaggcgcttttaaggcgagcttcatcctatgccaagctcgagcgttgggctgattgtgtgcgggactatgaggtgcttcataaagagcttcctgctgatacagaggttgcagaagcactgttccatgctcaagttgcattgaagacaactcgtggtgaggatgtatcgaatatgaaatttggaggagaggttgagatggtaaccagtgtagaacaactccgtgctgccataggatcaccaggggtgtctgttgtttacttcatgtcaatcatgaatcagcagtgcacactaattacaccttcggtgaactccctttgcagcgaatgcccctcgctgaatttcctaaaggtaaatgttgaagatagccctatggtcgcgaaggcggagaacgtgcggatagtcccaacattcaagatatacaaagatggggtgaaggtgaaggaaatgatctgcccaagcttgcatgttctgcgctactcagtaaggcactatgccgtatctagttcttga

SEQ ID NO: 58565 - DNA, 344 bp, Oryza sativa
  Clone ID: PAT_MRT4530_60269C.1
actgcaaactccgcctgcgatgacaccgggggcacttttaggtaacaccgggcttgccgcccccaccgcatctacagccaccgaacgaacccaggagagatagcgacagactgctacaagaggcgccaccgagcccgattactcccgatggcacacagatcggcaagcaaagaggacgagccaaactcgatctgcatgaaaatgtgggagcatcagccagctgcgaatgctcaggttatgcggaggagtgtacgcagggatacatcctccccgggccgtacgaggacctggggcttcagctgagagaactcgctgccgacgaacgagggcacgtgacacgacca

SEQ ID NO: 58566 - DNA, 1006 bp, Oryza sativa
  Clone ID: PAT_MRT4530_6026C.1
tgggccaggcgaggacgcgccggcgcccgtcgcccatcgcgccgtagccgacctcatcacctctccggcgccccgaggcctgcgccgacgccccgtttcgccgtcgcacccgcaccgccaaggcgcctcgcgagcccgcgacgccacccgtttttttttgagaggcagaagcgcactgaccaacagataatccaccgacaattcagcacccaacaatacatgagcagagagccgaaaagacaacccttagcgaaaagaaaagcgaaacaacgacaagcaaccaaaaaagaagacgagaaccaaagaaaaacaaaaccaacaaaaccagtttaaaacaaaacacacccacacaagaaaacgaaaacaagcaacacacaagcaacagcaaagaagaggacaacaaaacaaaacaaaaacgaaagcccagagaaagagggaaagaaagcacgcgccaaaaccgacgcaaaaataaaagcaaaccaaataaaaaagcgataaaaagaaaaagagcgacaccgcacacaaggaacaaagaagaagagcagaaagaaagacctcaaaagaaaagaagagaacaaatagaaacccgaaccaaaaaagaaagcgcaagcacagaacaaagcaacgagaaaaaaacccatgcgccagtaaataaaaccgtgcccaaacacacaagcacagcccagaaacaacaatgcaaagtacaccgacgcgaaagcacgaaaacaacacaaaaaaaagaaacaggaaaaagcagaacaactaaagtgcacaacgcacgagaacgaacagcgcaccacagaacagccaaacaaggcgaagggaaaaaaaacacgaagagaacaagaacgagaatgtaaacgacaaaaaagagggagaagagagaccgaacaaataaaaaagaaaaaaacaacgtacacacaccaacacaccggaaagacaaaaaaaccagacagaaaagaacacaaaaaggagcaaacagcaacgaaagtaaaaagaagaagat

SEQ ID NO: 58567 - DNA, 196 bp, Oryza sativa
  Clone ID: PAT_MRT4530_60270C.1
gaaaacacaggttacaaagggaacaatggaacatgacggatccagcaagatcgtggtcgagttggttcgactagatcccggcgatttggctccttgcgggctccgacttcgaagtatccgtatgcgcgtgggtataccataccgatatgtgacgtatatcgaagggaatcagccgaggcacacaataacaaattga

SEQ ID NO: 58568 - DNA, 355 bp, Oryza sativa
  unsure (1)..(355): unsure at all n locations
  Clone ID: PAT_MRT4530_60271C.1
cccacgcgnccgttttttggggtgttggangcggagggggaggaggaaggggagtgcgtgttctgccttttcaggaagggcgtcggttgcagggaggactttgtcgggcgggagaagtgcgtggtggacgcgtacaaggccgccgaccacgtcatcaagcgttgctaccaggtcaccgccgcgctcgacaagtgcatggaggccgccgccgagtactaccaccccatcctcagcgccgagcgcgccatggtcggcgacctcgaggccgccaaggcacaccaggccgacgaggtctgatgggacgccggcgcctttttctggcttcatcaacagccgccggccacggaggaagaag

SEQ ID NO: 58569 - DNA, 454 bp, Oryza sativa
  Clone ID: PAT_MRT4530_60272C.1
ttttttttttttttttttttttttttttttttttttttttttttttttttttttttttttttttttttttttgggaaccaaaattttgggaaccttgggctctaaaaaaaaacagagagcttttttttttttaaaacagaatccacagggccaaaacccgccacttttggggggcaaataaaaataaactacacgcataacaacagcccgggggggaacataccgggtccccaaatcctaaaattggggaccatgcacactacaacacagggaagcaaggaatcattttagaaccattcctttatttaaagctttcactttttgcaagggatggggcaataagggtttaggggactcccaaaacaatgcaaaacagcagggaacaggccaaggtcagggtcaaacagcaaatcgctggacgggtggataccttccttacaaattttatatgggg

SEQ ID NO: 58570 - DNA, 339 bp, Oryza sativa
  Clone ID: PAT_MRT4530_60273C.1
atggagaaagagggcggagtgaaggcggcggcggaggcggaggcggaggcggagggggagatcgtggcggcgccggcggagaaggtggcgtgcttcaagaagacggcgggggaggaggcggacgcgacgttcatggagcgcgtcaaggactactataaccagctcaaggagagctccgccgagaagcactggatctgcatcaaggacaagttccgcgccgccggcgagtacgtctcacagaagagcagctcggtgttcggcaagaagaaggtcgagcccgtggtcaaggatgctgcagttccaggggaggcgagttcggtgacagtcgagtctcagtga

SEQ ID NO: 58571 - DNA, 132 bp, Oryza sativa
  Clone ID: PAT_MRT4530_60274C.1
atgggccggcaagaggtatctagcgccatctctgttctcgccgagtacagattcgaggaggaagattaccctgtcatcgactacgacaccggcttcggccaacaggatgtagggctattacctatcagataa

SEQ ID NO: 58572 - DNA, 387 bp, Oryza sativa
  Clone ID: PAT_MRT4530_60275C.1
ttcaaaatcatcatctcaaaatgaacagcaggtactttctttgtgccaaatgtcctgtgatgctgtaattattgatttaataaacctaagtgcttagggaagaaaaagcaggcggacgtgacttagatacatgatttgagatttgtcttcttagattcatgagttgggcagtgattcagaaaaggggtttcagaatttgccactgatttgcaaaagaccttaagatggttcttggcaagacatagttagatgatgcagacatttaaaggggccgcatttactgcaggaacagcagagcaaagcccgagaaactgctcattcaggccttgcaaaaggatatgccttcctcggccactgcttctgtgccctcagcccacccaccccatc

SEQ ID NO: 58573 - DNA, 1810 bp, Oryza sativa
  unsure (1)..(1810): unsure at all n locations
  Clone ID: PAT_MRT4530_60276C.1
ttgggatttcagcaatggaggagaggttagccgacgtggagggcagtttcgcctgcaattcgagaggggaggatgacttcaggagctgctgtggggatgaggatgagtgggaggacaccgaggagtcattcacggccggcgtcgccaagggagagcttgatgagagctcggtgaggctgttcttcaagggcgtgtcgagccccgaggcggaggggaagaagctgtccgggattggggtggtgatggagaggtcacctggggtgcctatgcttcaggtgcagaagaaactggacttctatgtggatgagctagtggccgatcacttggcgctgatggatggcctgttggtggcgttgcagaatgggatacggaagatctttgctttcaccaattcggagaagctgtactttcagagaatcgcagaagctgaaattctagaagaccagctcttggtagctttaggacacagaattcttgaactggtggaaaagctggaagactttgatataatattgcttcctagctttgagcttgagaggccactgcagttggccaaagaagccataggcatcatgtatctatctccatacgaggttggcacctgttcaatttgctgtgaggaaaaacgaggcgctcagatgatcaaagtgggttgtgctcatacattttgctatagctgcttgacttcatatactcaagagaagctgcaaaccaacaaggttcctataagatgcccacagttaaggtgtaaatatcatatttctgctagtgagtgtaagtcattccttccagttagctgctacgattctctggagagagcttttgcagaagctggcacctcagacatggaaagattttattgtccctttccaaactgttcagttctactagatcttagtcagcacttctctagggcaagtacatcaagtcagtcagacctcaattgtgttgagtgcccagaatgccatagagatatctgtatcaactgtggagtgccatggcatgtcatgatgggctgtgatgagtaccagagcttgcctgttgatgaaagagatgcaggagacctgtctttgcatcggctagcacaaaacaataggtggaggcgttgtcagagatgccgacgaatgattgaactcacacaaggctgcttccatatgaattgctggtgcgggcacgagttctgctactcctgtggcgccgagtacaccaatggtatacagacatgccaatgtgttttctgggacgaagagagcatcgaggctgcctcggcagcgcattccacccaagcatccgagatatgggcatgggacacgttcgactgcatgccaaccgccatcgaagggtactcggagcaggagagagctcagctggctctcattcagaggttcctctcagggggtttcaacctgggtgagcctccaagccagtcgccgccccgctgcgccgattcatatatcattgacaccatgaaggaccttcaccagctgccatggctcgagcggttcgtttcggtgatcagtgacagctacaatgaagattacatccagtgaaaacaacatagatagcattaagaaaaaaaagaatggcacatactgatgaatttcatttggaataatatgtttccatgcccctcttgaaaatcaatacaggaaaagtgagatggttctataccttcatgagcttttcctcttgtactcccttttttcctggtttggtgcataagcaaaaggagttgccatcactgattttatttattttttgttaattccctaagcgtgtaaaaaaaaaaaaaaaaaaaaanngannnnaa

SEQ ID NO: 58574 - DNA, 457 bp, Oryza sativa
  Clone ID: PAT_MRT4530_60277C.1
atgaagccggcgacttatgaagttgattccatcgcacttctcgacggaaaactcgacgcaacccctacctggcgcgccaactgtcgtatagatcctaaggacattgtgaccagactccaaggtttggacatggaggtgtccccacggatatgtttcgaagcttccaatgaggttgtgcagcacacatactccccgaggtttgagccctacttagatccatcccagtggccgagttatgacagggtgttgtttcccggtctagaggagtactttgaggagaggcaccaggctcctaggatagcaagtggagagcgcctcaagactctacgagtcagagatcacacagcacacatcccgttcagcaactgcggggagctgacgctgacactcgaggaggtcaccatgatcttggctcttcctatacggggccaagcaatcaccagtgacattaattccg

SEQ ID NO: 58575 - DNA, 1215 bp, Oryza sativa
  Clone ID: PAT_MRT4530_60278C.1
atgcggtggaagggttgtaagttcgcagcgttggtggtggtggtggtggtggtcagcagcggtgccaagaggggtaggggaggtggtgctggccttccactgttcagtgtctcacctctgaactctgaagctccactaatcgagacctggggccttgcctcgccgaatgagtttgagccggtgccgcggctatgccgattgattctcacggtgtatgaggatgaccttgagcacccgcagtgggcgcctcctgggggatatggcattgagccacggtgggtggtgcaccggaagacatatgagcacactggtggacatgccccgacatacttgttgtatgttgatcaccaccattcggatgtcgtgctcgctgtccgtgggatgaacatggcgaaggagagcgactacgccgtgctgttggacaattcgctcggccagaggaggttcgacggcggctatgtgcacaatgggttgctcaaggctgctgagtggttgtttgatgctgagtgtgatgtgctaagggaccttctggagaggaatcctggttacacgctcactttcgcaggccattctcttggttctggtgtcgtggcgatgcttgcgctggtagctgtgcacaatagagaccggctgggtggtgttgagaggaagagggtacggtgctttgccatggcacctgccaggtgcatgtcactcaatttggcagtccgttatgcagatgtcattaactcagttattctccaggatgattttctgcctcgcacagacactcctttggaggatgtattcaagtcacttgtctgggtacctgatgccgcctttatcacattgttgaaaggaaaccattcaggaggtggcgttgaagctgaggagcttcgacgtcttggactcgatccggggatgcctagcccgttgatgctggagaacgagagaaccatgaagccacctgagacgcaaagaatggacgatgaaatcgccatcgagagggatcatgatgaggagcagaaggcggcattgaggcgtgccgttgctctaggggtcgcagatgttaatgtgccatcagcatatggtacattcagtgaaaatctgactcctgaggctgatgaggcctctccggtattgcccgacagtggactgcgaaggacggtctgggatgagtggattgcaaggatatttgagaaggatgaatctggcaaaatgattccacgaacatga

SEQ ID NO: 58576 - DNA, 165 bp, Oryza sativa
  unsure (1)..(165): unsure at all n locations
  Clone ID: PAT_MRT4530_60279C.1
cacattncacatataggcgcacgcaaactgcccatcgcgaggaagcaggattgcttattgtctactgttgcgtgaccgctggggtcttggggctctagccattcagacgacaggtgccgcaaccaatgactagatgtaggactcgcccacattcttgctggacga

SEQ ID NO: 58577 - DNA, 3528 bp, Oryza sativa
  Clone ID: PAT_MRT4530_6027C.1
atggctgaccacggcgccgcctccgccgccgcggacgcggacccatcgctccgtcagggcggggacgctgctgatgctgatgaggaggaggacggggagtaggcacggcatacttcggcagcggggatagggataagggggtttgtcgacgatcggtgaagggcgagaaaagatttggtggagcaggacgcggtcggggcgaagtgcagggtgccttggctggtggaggagaacgacaataaggaggtggtggcgtgctgtgggaagggggaaggggaggtgctcgcagcggttccgggaatgggaagggggaatgtatactgaccctgacttaaggggcttatcgctgtagagggagtggaccaagagctgaaggtgaggaaagggtcaaaaagaggacccgtggccatttggttagatatgactcatcggaatgtatggttgtgtggagctgtaagaaatttgaattcacaggtattccatgttgccatgtactgaaagttcttgaggtaggaaatattaaagaacttccaccagactacagttttgaaaagatggagaaaggatgctcagagtgaatctccgagggagaactatggtgtggaagctgtagatgaagatcccaggttcgcagtcccaaataacgggcaagaggcgcgcaagatgaggggttctaagaggggtaggactaaaaaggatgttacagagaaggatgagaagcctgttgtcgaattggaggccgaaaaggaggacgaggtggtggcgcaagatggtgatgatgttgaggagcagaaaggggaaggggaggaggaaatggaagaggaggtacaagtggaagtgcaggaaaagagagggaggggaaggccgaggaaagcagatgccgagggcaatgccctgcaggcacgtgtgctgagggaactcggtttgagggcatcacagtacactaatgaggagaggaagaagatagttagtaagtacctctcaaagcgacagagcagacctgtttcggcaaggcctgccaagatcgcctcacatcaagctttggctgaaagacgaaaacgtggtgatggaggtagatttctgtcaagcgaaggactgacgcaaccttcggaaaggcgctctaaacgtctcgaaacaccatttgggcagttgcaggaaccagcacctggtcctctccagcaaactcatctacagcaaccaccctttcatagcggtccacaaatcccccaggccccacctccggacatccagtcattgcagtttcttagcagcaatcctcaactgggtcaccaagccacggatcaaagccagtacaccattccagtctgggatttcctgtgatgtacgctgtgatatactagcatgtaccatagtactagcaatctagctgtaaattatgtaatggcaataatgtagaaactaaagttatgccagcttgagcagcttggctatgttagtggaacaattgagcgcggctaagtctcggattcagccttgtgcgcaggtcaaaagagtgccatcaagaatgtcagcagctggatactcgaatggacttgtgtagtcaagttgtagtgttgtacaggatatgtcaaatgcaagagaaaggaggaagcaaaacaaggctgaactgaagtttatattcctctgaaaagaacaatctataaaaaagatatgcaattaggtgatacccaggcaatttatgaatatttgcagaggaagaaaggtgaacatccttctttcttttatgccatccaagtggatgaagatgaccagttgacaaatgtattctgggcagatgttaagtcgattctggattaccactactttggtgatgtactgtgtgttgacacaagatatagcacaagtgatcatagtaggcctctattgttgtttattggtgttaaccatcataagcagccagtcatatttggtgcagcattggtttatgatgaatcagttgaatccttcaaatggttgtttgaaactttcaaatctgcaatgagtggcaagcaaccaaaaacagttatgatcgatcaatctacagcaatcagtgaagcagttgcttctgtttggccaaggaccacccagcgcttttcactgattcatttatataaaaatgccactaagatattaagggatgccttccaagcctcggaaacttttgcagacgattttagcatgtggttgtatggctatgaggaggagggggatttcttgtcaagctgggaaatcctctcagataagtacaatctaaaggacaatgagtggctaggtaaattgtatgcagatagagaaagatgggctttaccttatggacgtgattcattctgtgcagatattgcagccgcactccgaagtgataataacactgatgctatactggcagatcttctaaagaaagaaacggatttcccatccttctttaacaattatgacaaacttttggagaacaaacgcctagctgaacaacaagctgactaccttggggttcaaatggcacagagagtagcacctctgcggatgctttggcaagctgctaatgcatatactcctacactttttgagatgttcaggttggaatttgaactgaccttgacttgcatggcttattgctgtggtgagattggaccaatatctgagtatgaggtaactgtcaaaaacaggccccgtgaccattttgttagatttgactcatcagaatgtatggttgtttgtagctgtaagaaatttgaattcacaggtattccatgttgccatgtactgaaagttcttgaggtaagaaatattaaagaacttccaccacactacattttgaaaagatggagaaaggatgctcagagtgaatctccgagggagaactatggttttgaagctgtagatgaagatcccaggttcttgttgtctaaacgatacagcatgttgtatcgaacgttctacaaaattgcagcaaaagctgccgaaaatattgaagcttatacatacatggagagccaatgtgatcagtttatagagcaagttgaacttctattgcaagcaaagttacatgataaatcttcattgagcactatactgaaagttcaacagccaaatttgtttccgaatgaagccagcaacagtgaaactcgcagacagcaaagtcctcttcaatcaaataagaagaaaaagggtagacaaggtctaccggagcctgaggaggctgaagttccgcttagggttgatcctcctacaatatcaaatgacattccaaatcatctgagaactccaaccagtcaatttcttgcaacaagccatataatgcaggcaccgtatattgcacagcaattcggacttagctctcttcagggatttcctggcatatcaccatttgggcagttgcaggaaccagcacctgctcctctccagcaacctcatctacagcaaccaccctttcatagcggtccacaaatcccccaggtgattgttataacttacacccatgttcccttcccaagggatttcactttcacagattccattagcaattactag

SEQ ID NO: 58578 - DNA, 561 bp, Oryza sativa
  Clone ID: PAT_MRT4530_60280C.1
cgggtgatctatgcatgtatcaatcggctaggtaaatgctaaaacttaatgaggtaaactacttgtgacagcttgcgatcggcctcctcgccaaagtcccatgttggcttgtccgcaccgttaggccgactcgctctcctaaagccaacttccagaccctcaatttccacaacaggtggtacggcctccacctcagccttgtaagcgttagagtaccatttctccacgtatttgtccccagtgaagagctcagggaagacttgtcgcatccttaatagtgctgttcctgagatctgatccacgctatgcgcatgtcgcagggcgaggaagtcaggtccaatatccttcctcaacctctcctttacttcctcaggatattgcccaaccttgaagagaagcaagtcgtagtgaagaagtgaagcctttccgtgccatgatcctccacgggtggctcggtgatagagaccaagcaaagctgtgatggcgccaatgcatcctgtaccgtagtccgaaatggggaaaggagggacgacgggttctgacaagcccatgaagcgtcct

SEQ ID NO: 58579 - DNA, 487 bp, Oryza sativa
  Clone ID: PAT_MRT4530_60281C.1
cctggagccagccgggccgggccggaagccccaaccggccggccggccggaccaaaggccttcacaaggaaggaaccctctccggacccccgccttcggaaggcccttacctgtgcacaagggaccaaaccccgggaggacccgaaccgatgttcccgccacccttccggaccaacttggattctgacccataatatggttgcctaatcctccttccggtaattaattataagttacctgggtttgaaaagattatttgttccgtaaggaagaaccagagggaacttttcgttgaatggttgttatttaccaggatagttcacaagggggataatggggaaaaaaaaggtttttaacacctggttggtcgggaggaattggtagggaacttttcctgctggataattttcccatgtgttagtattggaatatgatgatataagttgggaaataaatcaccaaatttccaccaaaaaaaaaaaaaaaa

SEQ ID NO: 58580 - DNA, 1820 bp, Oryza sativa
  Clone ID: PAT_MRT4530_60282C.1
actggcattattttgtatacaatcattagtcacacacatatcaaacacaaatccgtctctccatctgggttcacatgtatagatgataaatatacgtccacggttcacgttgtgcttcacttagcgtagccgatgctgacgccggcgacggtgaccgaatcgcagccacacctcggcacgatcgacacgacgatcgtcttgtcgccgtcggcgccgatgtcgtccagcaagtcgcatatgccgaacctcgcctccgtcttcctcggcgacagctgcccctcgcggtggatcccgtgcggcgccagcgcgacgctgccggcgcacgtcgccgcgcacgtcgccgcgccgtccccgctctcgggcgcgttcacgaacacgtcgaacttgacgtacgtggagtggtcggggatctcgacctcctcctcctcctccttctcctcgcggctcctcgacgccctgggcctcgtcacggccacccgcacggtcttgtccagggtcgccgggaacgcgccggccgcgggcgccggcgtgctggctgctcccgtggacggcttggcgttcagccacgggagacccacgtcctggtacgtgaagcgcagcgccgacgggtcgagggtgtcgcggacgcggacgcggacgaggcgggcctcctcgtcgtagaagaagaagctggcgtcgagccagtcggggtcggtgaagtcggtgtcgccggggaagaggaggccgcggcggatgtgccacatgcggtcgacgttgccgtggtgcgcgaagaacaccgggtcgcgcgccgccgagtagaagatgcccatgtcctcgccgttcggctgcctcgggtcgccggtccatctgtggacggggttgtgcggcacgctctcgacggtgcccgcccccggctccggctggtcgccggcgcggtacggctgccccatgaacagctccgccttcctagtggcctggcggtacatgatgttgaggttctgatcgatcagctggtctttcgggatgttcgtgtcggttccactgtagtcgaggtcgagcgggaacggtggcaggtgagcctggttgcgccgcgggtcgtacagcggcgaccacctgttggcgtacatcgcggggaacgacatgccgtccggcgcgtcccagttccagaacggcagcgcgaacgtctcgtcgccgatcagcttgcccagtatcctctcatggaagtacaggtacatcctgtgccatgggaagaagagccagcagctgtgtatctggatctccaagccggggaagccgacctggtcgtacgcgccgtcgcagtaggcgcagtggacgcgccactgctgctcgaagctgcgggggtcgtcggcggggagcttcttcatgagcgacacggccctctcgtacttggccaggtacgccctgtccgccaggtgagccgccggccgcacgcggagcggcgaggacgccggcggcggcgcgaagtcgacggcgacggtgccggcgctgtacgtcgggcagcagttgatcgccggcgccgtggcggggacgtccacgggctggtggcagtcgccgaggtccggggcctggatgggcgccgcgagcgcgccgccgccgccctgcgtggccaccatggcggccgcgccgctgatgccgaggagcacgtcgcggcggtcgaccctgcaggacacgttccgcggcttccaccccttcgtcttgcggtgcaagagcaggttgttgtagcgaagggtactctggaggttggtgatgcacggcggcggcggcggcggcgccatgcgaggcgtagcggttgttcctggtgctacgttgatgctctccat

SEQ ID NO: 58581 - DNA, 699 bp, Oryza sativa
  Clone ID: PAT_MRT4530_60283C.1
acatttaatcataaccatacacttattttcatttctcaatcgcacctagcataggcgcgtaatccattttctaacaaggtcgtaattctatacgtccttggtcctaaaatatataatactagattcgacataatccagtgatgtgaccatgggtaccactgctacaaacattgctaacatcatatggatcagcaagaagacaaagatcaagtcctctaagtgctagaattcgattcggtcacctactaaattactaacttcaaagggccgccaaatatacatacgaactttattttcggcccgtgagtacttgatcgaaagatctcggagtcctctttccaacggatctagcttcattgccaaattccattccaatcatccgcaattgaggaaacaatgtgttgtgtcacctgtagtgggcctatgggcttggaacttcgtctgggaccccggcccatgtggagcccatgtggggtgcgccccaatctggtggagcacaaccctaataccctcatggtcgttcttccacctccttaaatagctaggaataaggttgatttgcatcggcaagatcaacaacccacggagaggtgtatcgatcgctaaggtgcaacgcaacgtcttgtacgctcaactcactgaaagattgggccaacaacaactttagtttcgagtggaactcagggtttatcatccagt

SEQ ID NO: 58582 - DNA, 371 bp, Oryza sativa
  Clone ID: PAT_MRT4530_60284C.1
ctctttcttcttcacaatccatgtgacactcaaggagggttttaggtatcacagtcacgaggttatgggctgggaggccactgatctggcttatggtgacatgaactagagggtcatccggagctgaggtcctacataggtctccgatgtcgagaccatcttcctcgggcgagaacatgccggtacatggggaaaggcacttggggcataggtgctatgactgaaacaacatggggtagcacgatcttgctcaaggatgtcccctcaggctccaaggcttctgtcatactaaatacggtctggctacattgcccaaatcagcatcacactgcttggacaggtagagctatgagagtgctctcggttctatg

SEQ ID NO: 58583 - DNA, 437 bp, Oryza sativa
  Clone ID: PAT_MRT4530_60285C.1
gtcgactctggaggatccccattgcaactccgccaccacgccaaccagatgcacctccaggcccatttggtgagttctttgctaaagaaaccgacaatgaaatggtatttattggtggcggtgcagcactttcagatccactccctgaggataattgggatggttacacgggctttattcataatgtgcttaatgagaactacttgaaaaatcacgaagcaccggaagattgtgaatactatatgtgtggtccaccagtgatgaatgccgcagtgatagaacaaattactttacaaggtaaaacaatgggcaccacttatacagtcaaatatattgatgatgttaatacgccgtttgagatttcaccagactttgctacggtggtggcagaagctatccgcttgaataaaattacagagggcgcatttaatgtgact

SEQ ID NO: 58584 - DNA, 603 bp, Oryza sativa
  unsure (1)..(603): unsure at all n locations
  Clone ID: PAT_MRT4530_60286C.1
gaaacctgaagattttcagcttgcctgaaggctgaagatatttgcggaatgcaataactctttgtttaattaattaatcatctgtaggattgcaagttgctggctcgtggaataaatgtacatgtattacataagaaattaacaaaagaaaggggaaaaaaatgaatgccagatgctacagagttgctgaattattgtaactctgtnaaaaaaaaaaaaaaaaaaaaaaaaaaaaaaaaaaaaaaaaaaaaaaaaaaaaaaaaaaaaaaaaaaaaaaaaaaaaaaaaaaaaaaaaaaaaaaaaaaaaaaaaaaaaaaagggggcggcccttttaaaggaccaaagtttacttccccgtgcttgcaacgtaatagtttttttttggggccccctaaattaaattcacggcccgcgttttaacaacgtggggactggaaaaaccctggggttcccaaattaaatcgccttgaaaaaaatccccttttcccaagttgggttaatagaaaaaaggccccccccgttcgcccttccaaaaatttgcccaccctaaatggaaaagggaaccccccctgtagcggcgattaaagcgcgggggttgtgggg

SEQ ID NO: 58585 - DNA, 230 bp, Oryza sativa
  Clone ID: PAT_MRT4530_60287C.1
gggaatatgttttgtcggtcaaccgccaagtctagatcaacaaggaaatccaggtgctaatcgtaagggaaagttttctgcgcactcctacataatgtcctacatctacttcaagtatattttgtggaaaaaaaataaaattaacaagtattcacttttgttcgattaacagagtatatatattttcatgtatatatcatttacagcaaaaacctatgtttgctagttag

SEQ ID NO: 58586 - DNA, 256 bp, Oryza sativa
  Clone ID: PAT_MRT4530_60288C.1
atgccctgcaatgctgctgccgcttcctgcactgctgctgccgcgcctgtagcagttgcgcccgggtgccctgaagccacgacccttgactgctccgcatccccttgccgctgcgcgcctctggccgagccaccagtggccggcgcccttctgcggctccgccccttcccacgcacagagacgtcaatcgtggagttggggaatttccaaagacctaggttttgggtgcgcgggaagggcagatggaggaaaggag

SEQ ID NO: 58587 - DNA, 360 bp, Oryza sativa
  unsure (1)..(360): unsure at all n locations
  Clone ID: PAT_MRT4530_60289C.1
cccccgagcccgccccgacgcgaggcccccgcggcgcgancgcgcgacgccgccangangaancccgacggcggcgacggcgaccgccncgaggcggcgggggcgggcccgncgccggcgcagcaggggcggccgacgagggaggggcggnncgcgcaggcgcccggcgagcgcgcggccggggaggacgcgcaggaagcngacancaccccngcaagcgagcgcgacaaaccgggggagcaggccgccaccggagacagaggaggacgngcngccncacgcgaaaggacagaggcncgggacaacgcccgccggagagaaagggagagacangacgccccgacgacgagacacccagag

SEQ ID NO: 58588 - DNA, 773 bp, Oryza sativa
  Clone ID: PAT_MRT4530_6028C.1
aagcttatacatacatggagagccaatgtgatcagtttatagagcaagttgaacttctattgcaagcaaagttacatgataaatcttcattgagcactatactgaaagttcaacagccaaatttgtttccgaatgaagccagcaacagtgaaactcgcagagtaagtagtaagaaaattaaaaatgtagatacgcgtcggcagcagcaaagtcctcttcaatcaaataagaagaaaaagggtagacaaggtctaccggagcctgaggaggctgaagttccgcttagggttgatcctcctacaatatcaaatgacattccaaatcatctgagaactccaaccagtcaatttcttgcaacaagccatataatgcaggcaccgtatattgcacagcaattcggacttagctctcttcagggatttcctggcatatcaccatttgggcagttgcaggaaccagcacctgctcctctccagcaacctcatctacagcaaccaccctttcatagcggtccacaaatcccccaggccccacctccggacatccagtcattgcagtttcttagcagcaatcctcaactgggtcaccaagccacggatcaaagccagtacaccattccagtctgggatttcctgtgatgtacgctgtgatatactagcatgtaccatagtactagcaatctagctgtaaattatgtaatggcaataatgtagaaactaaattatgccagcttgagcagcttttctatgttagtggaacaattgagcgcggct

SEQ ID NO: 58589 - DNA, 1689 bp, Oryza sativa
  Clone ID: PAT_MRT4530_60290C.1
atgggtcacacagccagtcggatatgtacccttctctcgatcctcttcgtttcttgtatgcttgcatctgctgccaatgatggactgatccgcatcgcgctgaagaagagaccgatcatggagagcatctacggtgaactagttcccaagagtggtacagtggaccacgaggttgcacttgggtattctggcgtcaggatgaattcggcagatgagggattctacgatccggtcacggaagccattaaccatgttcgtgtgcatcagcaaagaatgctcagggacatagaggctgcagccatggaagggaggctcaagcatttctggagttacagagggttcagagaaaggggtagcctgaaaaatggcactcagaatcatcctctagcgctgaagaactttctgaacgctcagtattttggggagatcggagttggctgcccaccgcagaattttacggtggtctttgacaccgggagctccaacctctgggtcccttccgccaagtgcgttttttcgcttgcctgttacttccatcggaagtatgaatcaagaagttccagtacttacatggagaatggaacacctgcttccattcactatggaacaggatctattcatggttattacagtcaagatcaagttaccattggtgatctagttgtcaataatcaggaattcattgaagctactcatgagcctggtcttacgtttctagcagcaaaatttgatggcatccttggacttggatttaaggaaatttcagttgaaggtgcagacccagtctggtacaatatgattcaacaaagccttgtgactgacaaggtattttccttttggttaaatcgaaatgcaaacgatatcaatgggggtgagattgtgtttggaggtgctgacgagagccattacaaaggtgatcatacatacacccgagttactcggaaagcttattggcagtttgaaatgggagattttcttattggaggcaggagcactggaatttgtgttgacggttgtgctgtcatagcagactcaggaacttcgttgattgctggtcctatagctgctattgcgcagatccatgcacatattggagccaccggtgtggcaaacgaagagtgcaaacaagttgttgctagacatgggcatgaaatgctagagttgctgcaagataagacaccaccagcacaagtgtgttccaaaattgggctctgcaaatccgatggagcgcatggaattagcgatggcattgagagtgtgctgggtgagacgcacaaatctgcagacgaagtttctgacgctacgtgtaatgcatgtgagatggcagttacatggatgcagagcgaatttgttcagaaccatacaaaggagggcaagttggagtatgctaatcagctctgtggcaacatgcctagcccagtaggatcatatgtggactgcagacacatcggtcacttgccgaacgtcgcattcagcataggtggaagagcatttgagctgacaccggagcagcagtacattctcaaatttggagagggattcctggctcattgtatgagtggattcacggctttagacattcctcctccaataggtcctctctggatattaggcgatgtgtttatgggggcttatcacaccatctttgactatggcaaaatgagggttggatttgcagattcagcgtga

SEQ ID NO: 58590 - DNA, 201 bp, Oryza sativa
  Clone ID: PAT_MRT4530_60291C.1
atgggtataaatatgtacacccagggatcaaacttactggcacgcctgcatctcatcaagatttggacctgcacaggagctaagcagatctcccacgccggtgtgttcgattttttcgtcaacacaaattggcacgcccgcatggtggagtacatcagtatcggcttgtcggtgacatggggccgcgggtatcatgactag

SEQ ID NO: 58591 - DNA, 295 bp, Oryza sativa
  unsure (1)..(295): unsure at all n locations
  Clone ID: PAT_MRT4530_60292C.1
gaaacaaagaaagaaagaaagagaattgaaggtggagagaattgagagtnagataaaacctcggcgcagaacgggatgcagcatatcctttcttgaccagctccagttcagtttctttaattcatagcatagcactaaaactnatcgttgagccttgcattttnatatggctaccatgtgacactggaagattggcatgcctccgcaaggtttacctctctactttntcaattcgttgctaatgtcattttntttaaaaaaaaaaaaaacncgtcccaaggtgagggaggataaa

SEQ ID NO: 58592 - DNA, 1710 bp, Oryza sativa
  Clone ID: PAT_MRT4530_60293C.1
ttttgcaaaatatgtaaacatatcacatcttcatagcaccatcaatatgatttgcctgaatccaagtaacatatagcaatatgtagaagtatattattacacaagaaccttctaacaaatcacccagcaacaccatccagccaccggccaccgcgttaatatactcgcggtgaatccatccatgcgaaagcctctcggggtgggataaatacagtagtccacgagagaccactaggcagacgcattgaccaaaagcctccgcgaggtatacagaaggacactaaagtgcagatatctcctttatgacctgctctttgtctgcctcgaactgttcatcctctttgtcaatcttgaatccggcaaaaaatcggagaagcttgcttcggtttgtgactagtatgtttacaacctcagttggcttgtttttatttgccgcaaataacttgaacacatgaaatgcttcaatttgaatatttttgcttgaatctctcaagagattcatgagaatcataagattatcttttgaactaacataacgcatcatgactgtagagttggatctatcaagcagcatgtctcccaagaacttgatagcctgcctttttgttatgtagttggttgatgatagcaacctagtgttgaattctgaaaagaaccagtcataattctttgacagaaattctgccacggtagctttatgccttgtcagaagttccttaaaggtcgcagaagcatctgatgcaatgtcaaaatttggaagttgtatatagtcaaagaacttcttcatgtggtcagactctaaaacgtaccttgcaatactttggtggcgaatacattccctcagcatagagccgtaatgcaaagcaatgtccatattctcatacccagaaattaaggtgtccaaaagatctttatttgcttctagatactcagatgcaactatttttgaggagacttgctgcctttgcaagtttgcaacaacttgagttgcatctttcctggtctctaagttcaatttcggaagacaaataattagaagccgtaaagtgttctctctgaagaattcttgggtcaattgcacgcaagcctcagtcacaggttcagattcaccattgccataaagaattgacttcaactccctgatatttttgcttaattctgccatcttctcctcgcgcttggcgtcgccgccgcgtgatccggagtgtaggtcgaggaagatgaggagctcccgcgtctgccgcacgacgtctgccggcgtccgcggcttggacttgaagaggcccttcatcttggcgccgtcgtccgctgccgctagcgccgcggcggcggcggaggcggaggaggctagcggcggcgcccgcggcggcgagggcaggggcgaggcggcgggcctcctccgcccccccgacccgaaggagaagcagccccggaacagcgccactggtcccgccgcggcaaaaccctcccccactgggagaacgagtacccacccctcctcctcctcccccaccgcgacggcccgcggcgacgcggcgagggttcgtggggttcggggtctcgcgagatcgtgacgcgatgcgcgcgcgcgcgcggcggcggcgcggcggtggcggtgggcggtggccgagatccccctctcctactcccctatccacccacccaccggcgcggaaggaggcaagcctagggctaggggccggtgcgtcc

SEQ ID NO: 58593 - DNA, 401 bp, Oryza sativa
  Clone ID: PAT_MRT4530_60294C.1
gctctcaagtttatatattcatatgtagtttagcaaatccatttcattatatagcttaaagtagctgaccaaacttattggcacaccactaactacaaattaacttctatacataagcacgggacaatatcttaaagatggaaaacaaggaagatctactggattcatagaacaaccatgtgatggtataaatcaaatgaacacaagtatatatgatatatgcactctagctcaatttttttaactatggttgaccggaagtgtgttaatctcttggactcctcccacccttcctttggaccttccattatggtacaacaacatgaagtggatcatgatgcaggcaagcacaacaacagccagagcgatgacatacccagacgtctcccagtctctgcagc

SEQ ID NO: 58594 - DNA, 374 bp, Oryza sativa
  Clone ID: PAT_MRT4530_60295C.1
gtaccggacctcccttcccgagtcaacccacccgtctcttacttttcttgctaaagcaatcgccaatggtacggattctatttatatccgggtgatgtacattaaattaattcaaaaatatgttggtgaaggggcaccaatggtccaggaattatctcacatagccctctcaaataaagcatgcattgccttctttataatgttgatactattggaatgtgcctcactctccatgatcagggttatggggtgatatctatgttcaacataccatgttcgaaattgtgaaccaactccatgagtctgatacgacgggaaacatcaaagttctaatagccacaaacacgcctgataccttagatccttcacttcta

SEQ ID NO: 58595 - DNA, 1440 bp, Oryza sativa
  Clone ID: PAT_MRT4530_60296C.1
atggcgggcaggtcgtcgtcgtcgttccggttgcttgacctggtccggccgttcatgccgctgctgccggaggtgcgggagcccgacggccggcgcgtcccgttccggcggaagctggcgtgcacggcggcggcgctcttcgccttcctcgcctgcagccagctgccgctctacgggctccacagggcggcggcggccggcggcggcgccgacccgttctactgggtccgcgccatcctcgcctccaaccgcggcaccgtcatggagctcggcatcacccccgtcgtcaccgccggcaccctcgtccagctcctcgtcggctccaacctcgtccgcgccgactcctccaatcccgacgaccgcgccctcctgagcgcggcgcagaagttgctctcgatcgtgatcaccgccggcgaggcgacggcgtacgtgctgtccggggcgtacgggagcgtcggcgtgctcggcgccggcaacgccgtgctcgtcgtgctgcagctcgtgctcggcggcatggtggccatcttcctcgacgagctcctccagaaggggtacgggttcggctccggcatctccctgttcaccgccgccaacacctgcgagggcgtcgtcaccagggcgctcagcccggcgacgatggaccgcggccgcggcgccgagttcgtgggcgcggtcaccgccgcggcgcacctgctggcgaccagggccagaaagctgtccgcggtgcgcgaggccttcttccgcggcggcggcggcggcagcctccccgacctgcgcggcctggccgccacctgcgccgtcttcctcgccgccgtctacctccagggcgtgcgcgtggcgctgccggtgcggccgcggaacgcgccgcgcagccaccgcggcggcgcctacagcgtccgcctcctctacacctccggcatgcccgtcgtgctgctctcctcggcggtctcgtcgctctacgtcgtctcccaggcgctgtaccgccggttcggcgggagcctcctcgtcgacctgctcggcaagtggacgccggacgccgccgtccccgtcggcggcatcgcctactacgtgaccgcgccggcgagcgcggcgagcgcggcggcgaacccgctccacgcggcgatgtacgtggcgttcgtgctcgcggcgtgcgcggcgctgtccagggcgtgggtggtggtgtccgggtcgtcgtcccgggacgtggcgaggcggctccgggagcagcagatggtgatgccggggatgcgggaggcgagcatgcagagggagctggagcggtacatcccggcggcggcggcgctcggcggcgtgtgcgtcggcgcgctgacggtggccgccgacctgatgggcgccgtcggctccggcgccgggatgctgctcgcggtgaccaccgtgtaccagtgctacgaggccttcgagaaggagaaaacctattag

SEQ ID NO: 58596 - DNA, 147 bp, Oryza sativa
  Clone ID: PAT_MRT4530_60297C.1
acacacaatagccgatgggctctacattggctggtatcttgaaccacctaaagagaactgagacaggtttgaacagacactagggctcacacgggtgcatataggtactctcatgctatatgcttcgacgagccatgtgccgagcac

SEQ ID NO: 58597 - DNA, 221 bp, Oryza sativa
  unsure (1)..(221): unsure at all n locations
  Clone ID: PAT_MRT4530_60298C.1
nnntnnntnnnnattttttttttttttttttttttttttttttttgggagggaaaaggtttaattaacataggaggacagcggcaaataacaatataaagatggcctggaattaaagccgttggtccaatttaccatacgcggcctttgatttcagggataccgaaaaacttctcccggtgaccggttttaattattaaaaagcacaggttcagatttttg

SEQ ID NO: 58598 - DNA, 456 bp, Oryza sativa
  Clone ID: PAT_MRT4530_60299C.1
ttgatgcgttcgttggcggcggtggtggcgcctcttgtggcaggaacctaggagtcgaaggcggaggcgtcgttcgaagaggccatgtccgaggagccgaatgtcgttgcggcgttcgacgagccgtgcaatgtggagtccacagctgatgcggagccggttgttgaaacaagccgtgtgattcgaagtctgaagagaagaccttagtggtcactcgtgatgaggcggcaccaagacggtggaagcgatcgaggaaaccttcgttcccgctgctgctgcgcctgctgcctgttccatagaggaagacgttgcgctggaatctggaggtgctgtcggcatcagcgcctgagcccgtgttgatctgtggcttgccctttgtaggttacgtctagcgcaccgactctgtgtttctcaagttactgctcgcgctcgatttcaaagtgtttgatgccttgg

SEQ ID NO: 58599 - DNA, 329 bp, Oryza sativa
  Clone ID: PAT_MRT4530_6029C.1
aacgaattaaccttcccatagcttgatgtatgcatacatagcatcgctagtgcatgcgtgcctgatcatggctttctggcggaggatcatgccgtgtcgtgtgtcggctgtctctagggtctgcgctaatccactctcagcatatccgccaattgttgccgcgctggccacgtatatgtacttgatcgatgaccgagaaactcctaggtcaatctgtgtgttcatatatacatcagtccaataaatcgatcgctaattatgttaaaacaaaacaaaacttgccccaactgccaatagagttagcagtttaattgattaacctggccacg

SEQ ID NO: 58600 - DNA, 466 bp, Oryza sativa
  Clone ID: PAT_MRT4530_602C.1
cggacgcgtgggcggacgcgtgggcgctcgctcatcggcaatggaggccacggcgctcacgctctcctcccgccccgccgccgccagccgctcgccggcgaagggaaccttcgcctccctccacccccgccgccgcttctccgcgcacgctgtccacctccgcgcggcccagagcgcctccctgcgcgccccctccccgggggcgaggaggagacggaggagggggagcgggctggtggtgcgggcggagatgttcgggcagctcaccaccggcctggagtccgcctggaacaagctgcgtggcgtcgatgtactaacaaaggagaatatcgttgagccaatgcgggatataagaagagcacttctggaagctgatgttagtttgcctgtagtgagaagatttgtttcgtctataagtgaaaaggctctggggtctgaacttataagaggagtccgccggaacagc

SEQ ID NO: 58601 - DNA, 594 bp, Oryza sativa
  Clone ID: PAT_MRT4530_60300C.1
atgtcagcgtgccacgtcaacttcccctttcacctcttttctttctctgtttctctgcttcctccctccctctctctctctgctctcgcagggcatggggatgccggcgctagggcgcccaaggcggcgcgcgcggccggggtcggcggcggcgatggcgttagcagcggcggggaacgggttgtcatcgtcgtcattgtcgttgaggaggctgaggaggtcatcggccgtagagatgagaagggagcgggagcagcaaccgcagtgcgaggaggtggcgggcgggacggcggcggagccgcatccaccactggcgacacatccaccgcccccgacaacccctcctcccaaatcgcctatggcctcacggcgagatcgattgcgagtaacgagccgtgggcggcgcagttcatgggcgccatgggggagcttgcctgcggcatcgacaccatcaaggtggagtcggtgtggcatcgcgtccccaccaatctggcgtcctcgcagatcccgccgtccccgctagttctggctgatggtggtgctcttcttaccgtttgcctgcaagtcaagaggctcgaagcgaggatccgctag

SEQ ID NO: 58602 - DNA, 1212 bp, Oryza sativa
  Clone ID: PAT_MRT4530_60301C.1
atgcggacggcccgcacgccggcgtcggcggcgcgcggcggccgggcgctgtacgagctgtacagggcggcgagccgcgcggcggcgccggcggcgcttctatggcggcggctacgaggactggagcacccgtcgcgttggcccgagcggctgggcaggccgtcggtggcgcggcctcgtccgggctcgccgctcgtgtggttccacgccgtatccctcggcgaggggatggccgcgctcccggtcgtacgccactgcgcccgcctccaccctggtctccccatcctcctcaccactactaccctctcatccttcgaagtgatgaaagacttgctcccggatggtgtcatatatcagtttgcaccccttgactgtcctgatgcaatagaaagtttcattggatactggaaaccaaatttgatacttcttatggaaagtgaactctggccaaacctcattttgtctgcagcagagaaagggattgcagtggttcttttaaatgcgcgcatgtcattgaagtctttcaaccgttggtccttgcctctagggttgcagttagtctctttgatgctctccaaactatcacttgttatcccattgagtactattcaagctgttcgttttcaattacttcatgcaccaccacagatcatccattttgctggcgatttaaaatacgctgttggtgacattgctgctggggagaaagaggtagctgcaatagaagatcttcagcagcagttcagcaataggcccatctggatggcagcttctatccacaaagggaagatgaaattaatgaatgaaataccatggaaaataggtgaattaagaatgctctacagggttactccaatagctgttattgggggttcttttttgcccggcttagctggacataatatttctgaggctgctgcagttggttgcgctgttatgactggtcctagtgttgggcacttctatcatatgctggtcgaaatgtggcaaataaatcctttagctgtcaagcaggtcaaaggagaatatgaacttttggaagcactaaaacaactgcttggtgattctagagctctggaagcatgtcaaagagccgcaaaagatgcgttttcctttatgtcagatggagttgtcaatcgtgtatggaatttagtccacccgttcactattggttcccaaccagacacatgcgacagcttctcgagtagttag

SEQ ID NO: 58603 - DNA, 183 bp, Oryza sativa
  Clone ID: PAT_MRT4530_60302C.1
gacgcgtacgcgcggtgggacgcggtggtggggtgccgggtgctcgcggagatgtaccggccgtggtctcctaacacggcggcgttgcagcacgtacgtggttggttggttggttggcttcttctcggtttgttcgaggtcgcgagagggagaggaatcgatggagagagagagaggcggcgg

SEQ ID NO: 58604 - DNA, 1375 bp, Oryza sativa
  Clone ID: PAT_MRT4530_60303C.1
tcacgcgccgctaacaaaagcccaaagcgacccaggccgtgagtcgttggacgggccaggctcgatgcggacggcccgcacgccggcgtcggcggcgcgcggcggccgggcgctgtacgagctgtacagggcggcgagccgcgcggcggcgccggcggcgcttctatggcggcggctacgaggactggagcacccgtcgcgttggcccgagcggctgggcaggccgtcggtggcgcggcctcgtccgggctcgccgctcgtgtggttccacgccgtatccctcggcgaggggatggccgcgctcccggtcgtacgccactgcgcccgcctccaccctggtctccccatcctcctcaccactactaccctctcatccttgtaagcttcccccatcttgctcccggatggtgtcatatatcagtttgcaccccttgactgtcctgatgcaatagaaagtttcattggatactggaaaccaaatttgatacttcttatggaaagtgaactctggccaaacctcattttgtctgcagcagagaaagggattgcagtggttcttttaaatgcgcgcatgtcattgaagtctttcaaccgttggtccttgcctctagggttgcagttagtctctttgatgctctccaaactatcacttgttatcccattgagtactattcaagctgttcgttttcaattacttcatgcaccaccacagatcatccattttgctggcgatttaaaatacgctgttggtgacattgctgctggggagaaagaggtagctgcaatagaagatcttcagcagcagttcagcaataggcccatctggatggcagcttctatccacaaaggggaagatgaaatcattctccgtgttcatgatgagttaaccagggcgtatcctactctacttttaattctcgtcccaaggcatcctgaggacagcaagaatgtttctcaattaatgaatgaaataccatggaaaataggtgaattaagaatgctctacagggttactccaatagctgttattgggggttcttttttgcccggcttagctggacataatatttctgaggctgctgcagttggttgcgctgttatgactggtcctagtgttgggcacttctatcatatgctggtcgaaatgtggcaaataaatcctttagctgtcaagcaggtcaaaggagaatatgaacttttggaagcactaaaacaactgcttggtgattctagagctctggaagcatgtcaaagagccgcaaaagatgcgttttcctttatgtcagatggagttgtcaatcgtgtatggaatttagtccacccgttcactattggttcccaaacagacacatgcgacagcttctcgagtagttag

SEQ ID NO: 58605 - DNA, 246 bp, Oryza sativa
  Clone ID: PAT_MRT4530_60304C.1
atggggcagctgaaccaggtttttacgattccgatgaaatccggtcggatttcacgaaatttcgacgtttcgacaaggctcgaacaatttcgccaaaatcgaccagttttcgagaacttgtcggcaaactcagtaaatttgatttataaaatttgttcggaatttaccggttttctaccggatttcacgaaattccaaattccgcctgaccgaaacggaagattttacaagaaaaaccaaatcaat

SEQ ID NO: 58606 - DNA, 1650 bp, Oryza sativa
  Clone ID: PAT_MRT4530_60305C.1
atggactcttcctacctccacctcgtcctccccgccgccgccgccgccgtcgtcgtcgccgtcgtcctactcctctcgctgtggcggcgctgccaaaccacgtcgaaccaccggccgcaggcgaacccaatcctcggcaacctcgtcgccttcctcgccaatggccaccgcttcctcgactggtccacgggcctcctcgccgcggcaccggcatccaccatgcaggtgcacggcccgctcggcctcggctactgcggcgtcgctacggcgagccccgacgccgtcgaacacatgctgcgcgccagcttccacaactacgtcgacaagggcgaccgcgtccgcgacgccttcgccgacctcctcggcgacggcctcttcctcgccaacggccgcctatggaggctgcagcggaagctcgccgccagctccttctccccgcgcttgctccgcctcttcgccggccgcgtcgttctggaccagctgcgccgccgtctcctgctgttctttgacgccgccgctgacgcccggcgcgtcttcgaccttcaggatgtgctcaagcgcttcgccttcgacaacatctgcagcgtcgcgttcggcgtggaccgggacgacagctcgccgtcgtcgtcgtcgccgtcgcggctggaagccggcggcgatggccgggacgacgcgttcttcgcggcgttcgatgacgccattgatatctccttcggccgcatattgcacccgacgaccttggcgtggaaggcgatgaagctcctcgacgtcggcagcgagcggcggctccgtcaggcgatcggcgtcgtcgacgagtacgtgacggcgatcatggagtcgaagcaacggtgcagtgacagtgaagaggagtcggacttgctgtcacgcttcacggcggcgatgatggaggaagacggcggcaacgagctcggcgcgatgttcgactcgccggaggcgaaacgccggttcctgcgcgacaccgtcaagaccttcgtcctcgccgggaaggacaccacgtcctcggccctaacatggctgttctggtttctcgccgccaacccggagtgcgagcggcgcgtctacgaggaggtcaccgccctgcgtggcgacaccgccggcgacgagagagacgacgggtacgaggagctgaagcggatgcactacctccacgcggcgatcaccgagacgatgcggctgtacccgccggtgcccctggcgtcgcgggtggcggcggcggacgacgtgctccccgacggcacggtggtgcgcgccgggtggttcgccgactactcgtcgtacgcgatggggaggatgccgcagctgtgggagcgagactgcggcgagttccgcccggagcggtggctcgacggcggcggcggcggcggcgggcggttcgtggcggtggacgcggcgcggtacccggtgttccacgccgggccgcgctcgtgcctcgggaaggagatggcgtacgtgcagatgaaggccgtggcggccgccgtggtccggagattctccgtcgaggtggtgcctgccgcggcggcgaatgcgccgccgtcgccgccgccgcacgagacggcggtgacgctgaggatgaagggcgggctccgtgtactgctcacgaggcgcaggggcgtgttgtcccatgcatag

SEQ ID NO: 58607 - DNA, 357 bp, Oryza sativa
  Clone ID: PAT_MRT4530_60306C.1
atgccggatactttattcaataaaggcggcggcggggtcctcccctccggacccctcctccttcacctcatcgtccgccgccctcccctccccccttccacctacgcgacgggcggtgtcccccttcccctctgcccccccatgggtggcgtccccacgggcggcgcatggagaggcggcggatcgcagccggcatgcggcagcagcgggtggagaggccgcggcagcggtggccgcgacctcccctctgccagatccggctgcccggcatgcggcagcgggacggggggcagcggcgtgcggcggcggcgacggcgtgtcaacgtgttcctgtttgtggttgtgttgatgccttga

SEQ ID NO: 58608 - DNA, 438 bp, Oryza sativa
  unsure (1)..(438): unsure at all n locations
  Clone ID: PAT_MRT4530_60307C.1
cccacgcgtnncgccacgcgttcgtccacgcgttcgaccacgcgtnctatcatacttcacaatgcatagtattggctgctctcagatgaatccaagttattaaagttttgatgaaggagttgcgctgtctgcatttattctgctatatatgcaatgaagggtaattggtgctgacatggatttctttgactacagtggcgtcattgtaaaaagaactaaataaaccgcaggttcgttacctgattgagcaacagtattttgacgtacgttgatatgtaagctttctactaaatgtcccaactgtagaattatacaatatttagcagttaaactgatggatttctattagctggtgcagacgtgtatggtcctttgtgctgagagtggaactcttataccaacttagaaaggtttttggattttctctatgtggatata

SEQ ID NO: 58609 - DNA, 597 bp, Oryza sativa
  Clone ID: PAT_MRT4530_60308C.1
atggaatgcgctgctagtcttagcatcaagcttgataagaaacatggtatctggtttgtagacaattttattgatgagcataaccacccattgacgagccacgacgggactccatttcttcggtctcataggaaaattaaggacttccaaaaatctgaaatacattcactagaatctattggtattcgaaaaaatgtcataatgaaggtcatgaagtgcaagtatggaggatacgataaggtgggatttgtcaaaaaggacttgtacaattattcatcaaggtataagaggtctagaattttggaaggtgatgcaagtgcaactttagaacttatgaagaaaaggcgggacaaggatcctggttttttctatgagtaccaagttgatgatgaaggtcgtctgaaaaatctgttttggtgtgatgctcagtctcgcatggactatcaatcgttcggtgatgttgttgtgtttgatagcacacaaaggatgaacaaatataacatgccatttattccctttgttgggctcaaccaccatcgtcaaaccactatttttgcctgtggtgttcttgagagcaatgtgccagcagaaaccaag

SEQ ID NO: 58610 - DNA, 2301 bp, Oryza sativa
  Clone ID: PAT_MRT4530_60309C.1
aaccaacctcccagtgaaactttcagaccctcccgttttagcaagtgagagaagccctgcgactctcgctcgctcgctcgcccaagatgaagtttatgaaacttggcacccggcctgacaccttcttctccaacgaatccgtgaggtctgtctgcacagaggtcgccactgacctgcaaatcttggtgggtgactgcttgtatcagcttcacaagtttcctctgctgtcgaaatgcctgcttctgcaagcgctgtgcgccgagtccggatgcggcggcaatggcggcgacgtgatcgagctcccggggttcccgggcggcgtcgaggcgttcgacgcgtgcgccaagttctgctacggcatcaccgtcacggtgagcgcgcggaacctcgtcccgctccgctgcgccgcggcgcacctcggcatgtcggaggccgccgaccgcggcaacctcgccgccaagctcgacgcgttcctcgcctcctgcctcctccggcgatggaaggacgcgctcgccgtgctcaactcgacgcgccactgcgcgccgctctgcgaggacatcggcctcacctcccggtgcgtggacgccgtcgcggcgctcatcgcgagccccgccgccctcccggcgcactcctcgtcggcgtcgccgtggtgggcgcacgacgtcgccgagctcggggttgacctgttctggcgcatcatggtggccgtcaaggccaccggcgccgtccacgagaagaccgtcggcgacgcgctcaaggcgtacgcgcgccggtggctgcccaacgtcgccaaggacgggatcgtcgtcggcgccgaccagccgttcgacggggtcggcaatggcggcgacggcggcaatgccagcgtcaagcagatcgccacgaggcaccgcctcctcctcggcttcctcctcaagctcctcaaggcggcgaacatcctcagcgcgtccgccacgtccagggcggagctggtgcggagggtggcgtggcagctcgaggaggccaccgtcggcgatctcctgatcccgtcgctgtcgtgcgtgtccgagacgctgtacgacgtggacgccgtggcggccatcctcgacgagttcgccctgcgccacgccgccgcgccgccgccgccggtggcgctggcagtgagccccgacgacgacgacgacagcccggcgcgttccggcgggcaccggcgctcgcggtcggccgagagcgtcgggttcgacggcgccgcgcggcggtcgtcgtcggccgcgcccgtgtcgcccgacgcgctcgtcagggtgggcaggctggtcgacggcttcttgatcgaggttgccagggaccccaacatgccgctcgacaagttgctcgccatggccgaggccgtcccggacaccgcccgccccgagcacgacggcctctacaaagtcgtcgacacttacctcaaggtgcactcggagatgagcaagagcgcgaggaagcggctgtgcagggtgatcaactgcaggaagctgtcggacaaggcgtgcgcgcacgcggcgcagaacgagctcctcccgctgcgggtggtggtgcaggtgctcttcttcgagcacgcgcgggcggcggcgatggcgggcggcgcgcacgccgcggccgagctgccgggcagcatcagggcgctgctgcagtccaagtcgtccgggtcggatcaggaggacgacgcggcggaccgcgtggacgagcagcggctgcgcgcgctcgccgcaggcgcgtcccccggggacgactggagcgtggagggcctgcggcgcgcggcgtccaagatcgccacgctgcggatgaagctggaggaggacgacgaccacgacggcggcggcggcgacgacgaggagttcgcgcgcaggcagcaggccgggctggcgcgcagcgcatcgctgcggttcagggcgttctgcgccatcccggcggcgaggccgaagcggatgctcagcaagctgtggccgctggccagaggcgtcaccaccgagcggcattagcgtcgcaaccagtagccattactactaggttttttgtacttcttcttcttgggtgtcttgcttgcattgcttgcccaaggcctgagaatgcaggtttctttgcttgtctcttcttcttgtttctccttttcaattacagtgtcaaggccaagtgtaccttccaggcttccatgtagttgtaatcttttctctctctccgttttttttttgggtgaggcatgtagttgtaagcttaattattaaaaataaataggaactgcacagtttatataaaaaaaaacctgcagcccgggggatccac

SEQ ID NO: 58611 - DNA, 1164 bp, Oryza sativa
  Clone ID: PAT_MRT4530_6030C.1
ctagtcgatatgttcaatcaaatgttgtatgctactcatcttaagcacagcatatattgggtacctcttgactggtctcaccggaagccagtggcgaggttgctgtagatctagccagagctgtgtatcctgcctccgccggatcgtggggatggcatcttcagatgagcatatctccacctcatcaacttccaagcatccaaggttggcgtgtgaagcttctgtctctagctgcagcttctggtcgtcgttggcattcatgattgatcgcactatgaatccctgagcatcataaagacccttcaaaatgctggattcttcatgtacttggtcagagctatggtatattttaccctttgaattctgggcaccactcacggcctcccacgaatcccggcagagcagcctcctcatgccggcgtgtgcttcaccgtcgtcgccgttccatgcgccggcgaccctctcggcctcggcgagcacgccgtcgcgatctcccgccacgccgtccacgaccttccattgcttgaggtagctgccctggtcgtgcctcggggccatcacccgcgccccgagcgtgtaccagcggtccgtcttctgccggagcagcgcgccgacgtgcggcggcacgacgacgcccctctcgaccatcccgaggtggtaccgccccccgctcaccaccacgacgtcgtcgtgcgccagcgccagcaccaggcccagcgagcgcgcgccgcccgtcgccgcgcacaccgtcagcatcggcatcgccaggagctcccggatcacggcgaccatcccgtcggcggcggcttgcttctcccttgggctcgcccgctcgtagtcgacgccgtcgcagaaggagcccgcggaggaggcggtgatgagggcgcgggcagcggcgccggcgggcggcttctgatccatggcgcgctcgcggatggcggcgagcgtgcgggtgagctcgtcgactgtctctccggtgaggtagtggtggtcgtcgtcgccggcgagcgtgaggcggtagacgccatcagtcatgttgggctgcggacagatcccgagctcacaaccggccaacagcttttcaaacggccacccgggccaacaactttcaaacggccacccgggcctagctgatcccttcagcacacatccgcccatgaccat

SEQ ID NO: 58612 - DNA, 428 bp, Oryza sativa
  Clone ID: PAT_MRT4530_60310C.1
tcgcccacgcgtccgcgcggctgcgtcccgacgtcgccggcggcggcgtctttgacatgccgttcccggctcccgcgtcaccggctggagtttattcctgaatgtatttacaaggcattctcctccctggtatgcggtcgctgactgggaaaagggaatctgaatctttttggcaaccttccccgggcagatcttgatttgcatggcggagtttgtaaaacccctcccgctgcgtcggtttctgctaccacccctccgacttgaggttgctaaagccgatgttgggggagaatttgtaccaaatcttgcccgcatttcacgcttggccacccaaggtcgcttatttgaaccccgtcttctcccccctttttagtgtactatttctggggggaggggtgctgaaaaatgccttgatgaataaattcacc

SEQ ID NO: 58613 - DNA, 327 bp, Oryza sativa
  Clone ID: PAT_MRT4530_60311C.1
tgtaatttttggtatccgagtaaagattagtttttcagtagtggactatgtatcgttaccactcgacgcgctgcgcagcggaataaggcgctaagaagtcgaatgaattctcacgaagtagcgcgcgtcgatgtagaggaagtagtcgatcgcaccagctcgaccttctcctcttcgtgcgttctcctcgccgtattcccacggtgatgcaatacctccgccggtcacacccctcacgaatatataggatacatcactcgggcctccaagggccgtaggactcatattcggatccctatccaaattaagctcatattagatctccat

SEQ ID NO: 58614 - DNA, 418 bp, Oryza sativa
  Clone ID: PAT_MRT4530_60312C.1
gggacccaaaaccccctttatttggcttcccaaaaataaaatcttagttacattacccggaagccccccctttaaataaattaaaaaattcggggaaaattggggggggaaatcaaggggggaagggcccaaactcgcccccccgggggttttggggttttaaacccttttcccttggaaggcaaaaccctttagggaaaacaaaaacggggaagggggggaaaacggagttcaccccggaaggggggctaaaaaaggcataacggttgggggggatggcaaaaaatgggcacccttaagggggggcttttttaaaaaaaaaaagtttgggggaaaaaaaaaagggggtttgggaaaaaaaaaaccggaaaaaaaagtttttcaaaagttacgggcaattgggactcgagacccccct

SEQ ID NO: 58615 - DNA, 453 bp, Oryza sativa
  Clone ID: PAT_MRT4530_60313C.1
atgaagacaggggctggggaagacctcgcctccggttcagtgcgcggtgacggcggcagcggcggcggaagggaacgacctcatgggcagcggtggactgcggcggcggcggcgcatcgggaagaccttgtctccggcggcggcggttggggacgacgtcggctccgggcgacggatggggacctgcggccggccgcggtggatggggaagctccagcggtgggaagacctcgcctctcgttcagtgcgcgccggcggcggaaggggacgacaacgccaggagtgagtcgcgcgttgagaggttgtggcaagccacactttcttatttcatgggtctacatgtcatatactcattttctagccaaacattgccacacttgtggccaacaaattgttggccacactttgtttgccatgccacacctatggcaaactgagttatggcaatgttag

SEQ ID NO: 58616 - DNA, 357 bp, Oryza sativa
  Clone ID: PAT_MRT4530_60314C.1
atgaagacaggggctggggaagacctcgcctccggttcagtgcgcggtgacggcggctgcggcggcggaaaggaacgacctcatgggcagcggtggactgcggcggcggcggcgcatcgggaagaccttgtctccggcggcggcggttggggacaacgtcggctccgggcgacggatggggacgacgtcgtctccgcctgcggccggccgcggtggatggggaagctccagcggtggggaagacctcgcctctcgttcagtgcgcgccggcggcggaaggggacgacgacgcgattaataaaaatagaacatgagataattgaattggagagaggatgggagagtcataggaggagg

SEQ ID NO: 58617 - DNA, 210 bp, Oryza sativa
  Clone ID: PAT_MRT4530_60315C.1
tttattagtggttcaaggacgcgggcgccaccgggagggtcttttttgaggcgcacggcatgttcccatggagcttgacaaataacgacgcctccgaacaacaagaccttgaacaaccggtgcacggaagacagaaacctcgccatggacacgcttctgagagagcccccgggccgagggtatatcccgcgggcttggttcgcttgggga

SEQ ID NO: 58618 - DNA, 532 bp, Oryza sativa
  Clone ID: PAT_MRT4530_60316C.1
gcttattctcacttctttataggctgcaggggtccgccctcacgccttacgaatttctttgaacacgaggacacgtttcacgacctgaccgactgatgagtggagcggacgttactggctcaccagggggctgtcggggacaaatcatgttccgtttggtattgtgcgccatcgccagtctggcggatgttgtctctcctggaggtcttacaaggccaagtgggtggtctccaatagtccttcttgacggtcgcgcctgctgcattccctggccgatcttgttgcatgttctttacagctggcgttcccaggaccataacgtcttccaccggtattatatctcctgctcgttctctcaaaccatagattggttctaattgcgttgtgtttttcagcgacctcgctcctgttccggagtcctcgtcagtcgttcagtcgttcccagcaggtaggatcgaaaaagtgtggcttgcattgcatttggagcgattccctcatttctgcaaacccttcgggtttggttcattggagg

SEQ ID NO: 58619 - DNA, 741 bp, Oryza sativa
  Clone ID: PAT_MRT4530_60317C.1
atggctacgacccgccgccggaccgcctctgcgattccctcctcatccgctccagccgacgagctccccggccgaggaggggacgcgctgggggcggagcgcctggagggttccgtaccggccggggagttggtaaaggcgaaggcgacgaagaagccggtcgcgttcgcgcgcgtctggtcggaggcggacgagctccgcatcctggagtgcctcgccgcgcacgtcgagaagcacggcgcgcccccgggtcgctcccagctgcccgaggtcctcgccggccgcggcctcgacaaggaggagttcaccgtctcggagatttacgagaaggtgcgccgcctacggacccagtacgacaaaatgctctccggtcctcggcccgtaccaggcgacaacaggttcgagctctcttgtgccatttggggcaaccccgtcgcgccaccaccaacctctccggctccggagaagagctcgattccggcgtcgggaaccaggggccgcagggacctagaggagctgcgtcctctgtatccttatctcgtcgatgaggtggagaggatcagcaccaatgagttgggtggacatgttctcaagatgggattggagttcatcgatgacggtacagccgtccgtatgaacggcatggcgaagaagcagagggttctggagctcaagacgatgttgaagctagatagtatgaggaaggaggtgacgaggacgttgctcaacaacatggattga

SEQ ID NO: 58620 - DNA, 666 bp, Oryza sativa
  Clone ID: PAT_MRT4530_60318C.1
acctgaatttatctacaccacaaattaatccatgaattaacaaatatggggaagagaaataatcctgaaaaattcctgaaaatctctgaaaatcaagtctttcaccactctcacccacggacccacctagcttacatcgacttgggctcacttggcagagtgcacaaacttgtaaaatgcttgttttggtgcatgaacttgtccaatgcgtgcggaggaaggcgaaaaggacactagatgctcttcctatatacaacccaagtcagcgagacaaatctgacgagttcactagatgtgttgataacttatgtcaaagactacttgtgggctcatcagaacaaaagcttcatcctactagctcataatcatcagtaccattgggttctcttagtcatagtgttgaagtggagtaaggtctactaccttaactcccgaataagtgataaatatgactttttcatgcttaaaggttcattttatgatgcgtgggcaccaaacgtggaaaaggggggggggaaccgggagggggagaacctctatcaccacaaagacttcccatgccatcaacaaattggtgaaacttgtggtttccacatgtgccataacataaagaccttgctgaataaggtgacattgctagatattgaggttcgtatttacttgcat

SEQ ID NO: 58621 - DNA, 363 bp, Oryza sativa
  unsure (1)..(363): unsure at all n locations
  Clone ID: PAT_MRT4530_60319C.1
ggcagggctatatttcaactcagttcaaatccttacatgatcatgcacttatctatgcagcgccaccaatgaatttagatacatctagccctttatttctccagctgttgaaacggcatgtccaaatcacgtatgttatatactacttactgcagaagtctatgcacatctatccttcaatgatcttcacaggagtcccatatgaattctgtttaactgatagtagttcaacgtccagctcaatagttgcatttggaggaatttcctgaacgcccttcttcccataagccagctcaggaggaaccccacgcgttcgcccacgcgttcgcccacgcgttcgcccacgcgttcgnccacgcgtac

SEQ ID NO: 58622 - DNA, 312 bp, Oryza sativa
  Clone ID: PAT_MRT4530_6031C.1
gcggccgggagtgcattttttctccgatccgaagcggttcgccgccaagctagtcccacgcctgcgcctctaggacctgccactcgaggctcggcctgctcaccaacctcgacccgaccccggtggtggatgtgttcgtccgcgtcaacgcgagcgatgtggaggcgccctcgtcccttgcccccaagatcggtcctctggctccctcctcccacaacatcggtgaggacatcgccgcgggcacgggcaacgactgtaaggccctccgggtcaccggcgtattcagcgagccgaagcgtcaggcgaatgtgt

SEQ ID NO: 58623 - DNA, 511 bp, Oryza sativa
  Clone ID: PAT_MRT4530_60320C.1
acccagcagagtgcacagtcttgcagccagcacaatcacagcacggatgcgtcgaggaggcttatcagaggaaggaagcaatgccccagaatgccacccctggaagcaaaaggcttgcttcagtccgtcgttcagtcgagaagttaccttacgggcaggccgaaggggcttcgtccgtccggaccaacggggttacttacggccagaaggggttccattcggaaggtaaggctttaaccttaccggcggagccatgccataccagccaaccggggatgaccccccgcggtgaaggcttggaacccaaggggaaaagcccagttaccgcgggcgcaacctcgcacatcgaatggttcacgggttggaagcccccacaagtgcagcattctttcccgcccggcccaagttacttagctactgggcttgcactcaatagctatagatcacaccgtctttgcatgcaacgagatagtgatcaaacaaatccgcataatgaaatgtttgaaaaaaa

SEQ ID NO: 58624 - DNA, 331 bp, Oryza sativa
  Clone ID: PAT_MRT4530_60321C.1
gggggtgacaggaaggaatcgggagatcacctgcgcgcgacatgacaggatcgcagggacagctgcaggttttgatgatgatggcgatgacgatgaggatacgatcaggaccgaacttttcaggggggtggggacgggaattaaactgggcgatcggatcatgaccgtatcagcctgggtttgtgtcgacggtgttgttaagtggcggtggggagatacggttggatttggtcatttggaggctgggagaggagaggggaggattgtgcatgttgaggctggcaggatcgtcgcagggatattttggttccattcacttggctatcattga

SEQ ID NO: 58625 - DNA, 181 bp, Oryza sativa
  Clone ID: PAT_MRT4530_60322C.1
ataacaacattaactattattgctatacgggaacacgatacacacatcaatcatgctaactaagctctaattcacaataacatatgccatgtttcaaaaccataataacattacatgccattcacacaatcgacagagatcactatatccatcctatatggtcatgaaaataactatcatg

SEQ ID NO: 58626 - DNA, 370 bp, Oryza sativa
  Clone ID: PAT_MRT4530_60323C.1
ggcaaacaaacatgcatatatggagcggtacagagaacgacacattatagacctatatacacgcaaggactgctgaaattatcatcaacgatgagacgtggtgtggacgggacctaaccggcaatgtacgagctctggtggggggcgggcttcttgtcacccgacttggtctgctggtgcttgttcttgatccaatgggacctatgcgccgtgctctccgtcactttcctcagaccgctcgccgccgacgccttcgtattgtacatacccttcttccatgctcctcctcctgcggcggcggttgtcttccccgacgacgacgacggcgggggtgggtcgctgccgtagtcccactggttcgcccacgacg

SEQ ID NO: 58627 - DNA, 1736 bp, Oryza sativa
  Clone ID: PAT_MRT4530_60324C.1
tgtaagagatgtgggtgcatccttttccatttcaggtcagatcaaggggaagataggctgtgttatctgtgtgaatggtaccgtatacaggttcttaagaaggaatcacaaataccgttccaaagcagcatatttcgacaacactgaatagcttgatgatccaccaggaccatgcaagggtgatagagtgttccaaatgacgaaaaatctcaaagtttttttttgagaaggcaaaaaagaaggaaaccaagcggaagcgaaatgcggaaggaccaagcgttctattcaatagatatatagatacatcattttatcggtgtcatgcacctagagaaaaatgtgttctatagaaccattgggactttagtagccataccaagcaagacaaatgatggactgaagtcacataatgaccttgtgaatacgcagataacagaagagcttcacctgcggatgaaggccaggatgtcacaagagtgcacctttcgctgacttattacaccttgacaaattatgagaaaatggcattgtacaaatccctacacgaggtgagagtccctaccgtctcacataaagtaattgaccttgaagagttaggtcatctccgtgttttcgctatagagaccttgtgcaagcttgagatgtgtttccctctgtcatttttcaatatgatgcaaccccgcagccctcatatcgtgcctcagatacttgtgcttgggcccttgtaccttcatcagatgtggacattcgaacagtatatgtccaatctaaaaaggctatgtacggaaccgtgcccacccagagggttcgatgatagagggatacactaccaagaaagtcattgagtgttgcattggttacttgcaagatgggaaagcaattggtttactagtacctcgacataaaggtaggttatctggaagagggacaaaaaggaaaaaagaatcctcgacaatgactacaaagcagtgaaagatgctcatttcattgtcctgtaacagcttgtgatagtggagctgtacatagagcagcacctaaaggaattacaagcaagaaatgtcaggcgctctgaagcatggatcatgaaatggcacaaatctgactttaccgaatggttaaaggacctcggccgaccatatggtgatagcacgaaggaaaaaactatgaaaagtttggctgacgggcattcaagagtgtacacctcatggtgagcgtatatctgaatgggtacacattttataccaaagcaagagacaaaaggagtgcatctcaaaataatggcgttcaagtataggaaatcgacacaacaggtcaaaagagcacatactatgaattcatagaagaaatttgggaacgggactacgaacccaatatgcagattccaccgtttcggtgtcaatgagtgaaacacccagctggcgtgtttgtggacaaatttagacggacaattgctgaccttgacaacgtaagccacaagaataacccattggtacttgccgatcgagccacccaagttttttacgtgactaaccccatctcagttgaagaaacacatagttatttccggaaaacaaaggattttgggagttggtgatgttgaagatgttgaggcatacaatcaatacgagaacatgacactattcatggattttggaaactacattaagcttgtagaagaaacaattagtgaatcgccgaagccgtacatgaggaataaaggagtaaggaagaatgtg

SEQ ID NO: 58628 - DNA, 259 bp, Oryza sativa
  Clone ID: PAT_MRT4530_60325C.1
accaacgtgatccccacatgtttatataggggttggtcttgccctctacaggccctcctccacgtccaactcggagtagaaaccaaaggaaacccgaaacatgctttcccgagcaagaaaacctcgagacccgatgaaacacagttagactcggacctgccggtcagaccggccacacaccgccggtctgactggccctcaaccggtggtttgaccgcccaacacacggcggtcagaccggcccactcgaaggaaaccg

SEQ ID NO: 58629 - DNA, 606 bp, Oryza sativa
  Clone ID: PAT_MRT4530_60326C.1
atgactactaccgccggccacgtcgctgcccctccccgcgacccctcctctcatagatccggcggaggggatgggtgtcggcagcggcgcaaggcgtatgggtcggcggcggcgcgaacggaaggcgtcggccggcggccctaccgcaagacgacgacggcccaccgcgcgacgacgacgactagcaccggccgcgtcgccggccctcccctcccagatccggtcggaggggggagggaggcggcggcggccaccccatgcaacggaggagttcgccggcgacgacgactcagagacgacaacgtgctggaggaggcgtggcacgcggaggcggcggcgctggcgatggccgagatggagaagacaagtgccgcccggccatggaggcggctgaggcggcgcagcatggcatggcgcatggcggtgcggggaaggcagcggagggcggtgcggccgacggatgttgcggtcgagcaggatgttggccggcttgaggtcgcggcgcacgagcgactccggcttggtctgatggaggaacagcagcgccgtgtgattttgcagccgtccaccgaggcgcggcggtaccagcagccgccgccggcgtag

SEQ ID NO: 58630 - DNA, 477 bp, Oryza sativa
  Clone ID: PAT_MRT4530_60327C.1
atggcagcgaatgtgcctgtgatgagcgcctgtgatagggagagggaagtcagttttgcttcctttgggttaaaagagcaacggcagcgaatgtgcttatggaatgtgcctatgatggagtgcttcctttgggttcaagagcaacggcagcgaatgtgcttatggaatgtgcctataatagagagggaagtcggtgtttgcttactttgggttcaagagcaatggcagcgaatgtggacaaatgcccggaagtcggtgtttgcttccaaaaacctttggttcaagagcaacggtagcagcaatggtgtaaggaaggatgaggcggcggcggcgaagagggagcagcagagaagcaacgacagcggagaggtagcagtagagtggtacgccaagcgtgacatcgaccgggcctccgagttcatcgacagggtgcaccgcgggatgctcaccgacgccagcggtgagcaagacggatag

SEQ ID NO: 58631 - DNA, 1360 bp, Oryza sativa
  Clone ID: PAT_MRT4530_60328C.1
atggaggctgtcctacgacacccatccctttcccgcctcaaaccccccaaccccaatgctcagagaactccagccctctccatcaccgtccctttccggcttcgtctccccaaccggcggctcaccgccgcggcggtgttccaggaccagaccaacccaagaaacccagcgagcaagggaggcgacgacgatgaggcgtacggcgaggtggaccgtattgtgtccagccgcaccatcaagaatccggtgttcgcggaggacggctcggccaccacggtcaccgccacggagtacctcgtcgagtggaaggacgggcacgagccttcgtggatcccggcggaggccatagcggcggacgtggtggcggagtacgagacgccgtggtggacggccgccaagaaggcggacgcggcggagatcactgcgctactcgcggacgagacgctgcggcgtgaccccgacgcggaggatgcgcaggggcgcacggcgatgcacttcgccgcggggcttggatccgaggagtgcgtgcgcgcgctcgccgaggccggggccgacgtggggcgacccgagcgcgccggcggcgggctcacgccgctgcacatcgcggtcgggtacgggcgcccggcggccgtgcgcgcgctgctggagctgggcgccgagccggaggcccccgacgggcagggccggacgccgctggagctggtccaggacgtgctcgcgaagacgcccaagggcaacccggcgacgttcgagcggcggctggcgctggaggcggcggcgaaggagctggagaaggccgtgtacgagtggggcgaagtggagaaggtggtggacggccgcggcgagggcaagtggcgggagtacttggtggagtggcgcgacggcggcgacagggagtgggtgagggcggcgtgggtggcggaggacctggtgaaggacttcgacgccgggctggagtacgccgtcgcggaggccgtcgtcaacaagagggaggcggcggaaggggaggggaaatgggagtaccttgtcaagtgggtggacatcgaggaggcgacgtgggagcccgcggagaacgtcgacgccgaactcctccaggagttcgagcagcggcaatctggggtggctgctggcggtgatgctccgccgccgccgccggtcgccgggtgacagcgtgtcgccgtcgacggagggtgttcgattcttcctggttttgctgtgtataacagaacgggataaaatgtttgtgctgctgcaaaatgtatcattagcgctttgataatttttgagttgaccagaactttagcctcagattgcaatttgagaaatgtgaagagtttcagaaaaaaaaaaaaaaaaaaaa

SEQ ID NO: 58632 - DNA, 289 bp, Oryza sativa
  Clone ID: PAT_MRT4530_60329C.1
ggggggcccaaacaaaacccgggaaaacttttttaaagggcaaaacaaaacaaacaggtttttaaaccctttaaaaaaaaaaaaaccccaagggaaccttcaaggggggcttaaaaaaaacaaaccctttggcggcccttgcaacccggggccaaaaaacaacccccccctttccgaagggccccggggggggaaaacccttcatccccccctggggggccacaaagaccccaacattggtttaaaaggacaagaaaaccccctcctttggggcccccggtttgccccc

SEQ ID NO: 58633 - DNA, 463 bp, Oryza sativa
  Clone ID: PAT_MRT4530_6032C.1
tgccgctcctctccttttctagctccttctcgcgctacccagcgaacagccgccgcttccagtcatcctctttgtgtgagcggccaccatcggcgcatcgtcttcccgccgtcgccgcaccatcgtttcgccgtcgatttgctgtcaccatacccatgtagctgccatcgctgcatccatcaatagggaggtcccggcctcctcgccggcaggtcgtgctgagcggaggcgaggggaaaccggcggccgcccctcctcctgcacccggcaccgtgacggcgatggtggcgcagatcgactcaagaaactggcaggggccgtatgagcgcgggaggctgttgaggagggcagcgacccgatttggagagggagcagcccggtcggtgccattggcgtcgtcggatttggtgctgtcgtgccccttgcggcgtgccggcgcgtcatccgtcttcggcggattcat

SEQ ID NO: 58634 - DNA, 921 bp, Oryza sativa
  Clone ID: PAT_MRT4530_60330C.1
aatgcggcttggcagaaagaggccatgaattcaatcacgctatcagtacaacaacaacatcttaaacgtcccatttgattcgcagtgttcatcacacggaatgtatgggcagatgctagaggaggaataaagcaaaggaacacaattccaaagcaaaagtataaccgaagtcgaatcccaacgcgaggcaaacctcgtgatctccgccgtcggccggatcacgcagcccggacatccgcggcggcggcggcggcgggcttgcgccgccgtgctggcttggctggagagatcttggcggcttggggcctcgagctcttcctgacatggcagagaacccagaagtcgtcctcctcgccgtcgtcggcgcggcggtagcaccgcgggtcggtgatctcgtactcggccatcatccacccggtgctccgctgctgccccatctcgccgcgcacgtagaagcagtagttgatcctgcaccaccgcaccaccacgccgaggtcggtcacggactgcccgttcttggtggagctgtgcatccacgcgccaccgccgccaccgccgccgccgcagcccgccacggtccgccgcaccgagggcttcctccgcgcgcgcgccgagaagaagaacccctcctcccgcctcccgtgccgcgccaggagctcccacggcgccgcgccgcaggggtcggcctccaccacggcgcccgccacgcgcggcgcgaacccgcgcagctgcggacggaggaagtggagcatcagctcgtcctccgtcggctcgaacccgacgccgccgccgccgtactcgtcttctcggatcagattcatctccttccccattccgagtagtagctagtctagtctccgctcgaagtcaacagcgagaagacaagatgtggagatgaacagagacgggtaggggtgtgtg

SEQ ID NO: 58635 - DNA, 241 bp, Oryza sativa
  Clone ID: PAT_MRT4530_60331C.1
tttctctccaccaccaccaccttgatcgcatgctgcgtttttggctgcggtgcgcgtgtaggatgcggaggatggacgagcagatgggacgcgtggggttcgactaactggtgctcttgcatcatcagcaggagcagcggatgctgagggagcagcctttggaagaggaggaggaagaggaggtgcggcgcccgatgtccggcgcggtggactgtgggctagccgcgtttcctgtggcggc

SEQ ID NO: 58636 - DNA, 134 bp, Oryza sativa
  Clone ID: PAT_MRT4530_60332C.1
gttcaagattccatgggataccagactacgaaatgctgatgagcaggtgacacttgtgcacgttgaacagctcgatatatgggttctgcaggcctgcgagcctgctagttattgctgatggctccaaagtatga

SEQ ID NO: 58637 - DNA, 470 bp, Oryza sativa
  unsure (1)..(470): unsure at all n locations
  Clone ID: PAT_MRT4530_60333C.1
nttaaaattncntaaagaatatgataaaacttacttgattaattaaataacaatgaatatggatggggttgaatagatcgatgaaaaataggtgatgtgggagagagcaatagcataacatgagtttgatggctctgcttccgaagcaaaacccgcgaggtcgagcctggacggagctgtcatcggagcaaatgttgctggtagtagcaaatctcaaaattactactttgaaggcccaagaggaaaaaggttccataacaacggctgttgcacataggtcaggctatcctaatggaccgcgtcacccacgtagaaagcgcgattgtcgacatgcaccaaagggaatccgcctatgatttccgcacactggacctcgacgttgagaatgatcttagtaagtccttaaactggcgcgagggccgcagggatagtcatggtatttggattacactgccccaatactacagact

SEQ ID NO: 58638 - DNA, 754 bp, Oryza sativa
  Clone ID: PAT_MRT4530_60334C.1
agtagctgacgtcaccaccccaggcgttccacacgcgcaccgcattggctttctamccgacgccgacgccgacgcggtcgccgttggagctcctcccgttcatccgcgtctacgtgagcggccgcgtggagcgccctgctcggcaccgacacggtcgcggcgtccctcgacgagcccacgggcgtggcttccaaggacgtcaccgttgacccggcgaccaacctctccgtgcgcctctacctcccgccggcggtcgccgccggcgagaggctgccgatcctcgtgtacttccacggcggcggcttcagtggtcgagtcggccacgtccccgacgtaccaccggtacctcaacgcgctcggctcccgcgcccgcgtcgtcgcggtgtccgttttagtaccgcctcgcgcccgagcacccgctccccgccgcgaccggatccgccgcgagtggcggttcatgtgcgggagccccgacgtccgcgtcgacgacccgcggctgagcccgacggtgcagcagggcgcgccgtcgctggcggcgctgccgtgcaggagggtgatggtggccgtggccggggacgacttcctggcggggaaagggagggcgtaccacgcggcgctcgtggcgagccggtggcacggggaggccgagctggtggacacgccgggggaagaccacttgttccacctcacgcgtcccggcacggcggcggcggcgaagatgatggacctcgtcgtggatttcgtcactcgttga

SEQ ID NO: 58639 - DNA, 489 bp, Oryza sativa
  Clone ID: PAT_MRT4530_60335C.1
gtttttggtgaagataatcgagatgatgaagtttttgaggaagaaattttatcgtttgatggagaagaatatacagtatgagaaggacgaggttgtgaaacagagtgatcctggtcatcgatacgaaaagaaggaagcgaccaaaaaaaaacaaaaggatctgaagaggaagtggagttagaaaacgacggagaataaaaagaagaatcagactctttttgcgattcactctcttgtgactccagtgaaagcaagtcgctcttgaaggggagtttgtaataggtgagcgaaaccagcaccccgtcgtttgttgctgcaattagctctaaagttttgcgaaacgtgtcgtcctgaatggctggttttctgatctgttttagctcttcttgagtcgctgtttccagcagatacaaccaggttctctggtgttgcggtcccttggaatcttgctctgatacgatgatgcgcctcccattttcccttcgggca

SEQ ID NO: 58640 - DNA, 621 bp, Oryza sativa
  Clone ID: PAT_MRT4530_60336C.1
atggatagtaccgacgggaggggccccgagcagtcggacggggcggccgtgccgctgcggcggtttctgatgagcaccgggcttgacgcagatatgagaagggggagggagggcgacgcggcgtccgtggcggtcgtcgaggagggcgtcgggggaggaggcggcgggaggaaggtgtgcaacggcggcggcgacggccgccgcgacgccaatgcgtactaccggcggatgatccaagccgacccggcgaacccgctgctgctcggcaactacgcgaggttcctcaaggaggtggagggagacgcggcgagggcgcaggagtactgggagcgcgccatcgtcgccaaccccggcgacggcgacgccctcgcgctctacgcgggcctcgtctgggagaccacccgaccgcgccgacgcctacttcacctgaggaaggggccccgccaccgctcgcccgccgccgccaagccaactgctagacgttgccgcatacaagcacgccgccgccggcggccgcgccgtcacgtatgcgctggtgatagagatgcagctggtcatgggcttcttcgccaccgcgttctgcactgtcggcgtggtcatggactcgccggcatgccgtag

SEQ ID NO: 58641 - DNA, 280 bp, Oryza sativa
  unsure (1)..(280): unsure at all n locations
  Clone ID: PAT_MRT4530_60337C.1
ccactctcttctccaatagcaagtgggagcaagggcgccanagtagctcacgggcggacagggcgncanagtagctcacctgctgccgcatctcagcgccggcgacgcggcaccaggcgagcgcgtaggggcgacggcagcacctcgtgggtggagggccgccggcgacgggcgnagcggctgacgcatcccggagcctgncgncggcaccgngcgagcgtggagcgtcaacgcagcagcttgcggatggaggggcgacgacaacanctcgcgagtgaag

SEQ ID NO: 58642 - DNA, 555 bp, Oryza sativa
  Clone ID: PAT_MRT4530_60338C.1
atggccgtggccggcggaggaccggcagtgggcggtggaatccagcgggtggcgaggcggcggcggcaccgccgaagctgtggggatgtaggagggtggtgggccggcgtcggcggcgggggcaaagcaagcatgagattaggaggcggcggccggtggtggcggatccagcgacggggagctgccggagacggggaagacggcggagcgggggaatctcgctgtcaccttcttgagaagaaagagagggggggtgggggagggggcctcgccggcgtcgttgactccttccggccagccggcgaggcgggcggcggcgtgatagatatacttacaactgcatcgccgtctacaactgtgggcgtcaaggatgccgccgccggcttccctgtcgtcgacttctcccgcgcctccgccctccccgccgcctgccaagagcctagagagaagagtgagagagagagtgataagaggaagggagagaagaggggaaagaaagaggaggctgacatgtggggcccatgtaggtcttacgctgactcagcagtcacgtag

SEQ ID NO: 58643 - DNA, 122 bp, Oryza sativa
  Clone ID: PAT_MRT4530_60339C.1
gtctcttttgaaagggatcaagcaaaacatctacaggaaatctttggatttgagccatcgtagtaagcacaggaatgaaggacggggacgcattcaggtaggctacaagtgtatttgacatg

SEQ ID NO: 58644 - DNA, 129 bp, Oryza sativa
  Clone ID: PAT_MRT4530_6033C.1
cagtaaacattcatcgattcataatgcataatgatgtagtagcccatacagttgaactgaggtaccgttgcacagtttcattagccaaacttaactaacaaacgaaaaaagggaagcactcattcaatc

SEQ ID NO: 58645 - DNA, 304 bp, Oryza sativa
  Clone ID: PAT_MRT4530_60340C.1
cacaccaaacaaggcaagcgccaccgctgccttcctgccggccatggagctactaacgcccacaagagccgtctccccggcgcaggaacagtgccaccctgtggtcggtacacgccgcctcctcatcggagccggcccgacaaactccatcggcacctacacgacgcctacatcaagccgtgctcctactgcccggacttcatcgcccaaacaaccaccgccaaggaatattctcctcaatcttaaatttggctttggtttgaaccgattgccttcacaatctcgtggaaatactctttgctga

SEQ ID NO: 58646 - DNA, 276 bp, Oryza sativa
  Clone ID: PAT_MRT4530_60341C.1
atggcttcttctcgggttgtcgtcgcggtggcgctgctcgtggcggcggtgctcgccgcgttcggtgcgctggcgccggcgtgcgagggcgcgagggtgatgcgcgagggcgccgccgtcgtcggcaagatgtcgagctaccagccgccggtgaggcataagcctcccgtcccgccgtcggggccgtcgcacaggcacaacaagagggcgacagtcccgaggaagaggaagcacttcccgccgtcgggcccgtcgtaccacgatccgcacagctga

SEQ ID NO: 58647 - DNA, 3267 bp, Oryza sativa
  Clone ID: PAT_MRT4530_60342C.1
cggacgcgtgggcgctcacccgagtcctagggttccagcgagcggcgaggaggtagctcgttcgcgcgcgcgtcaaatcccatggcgggcgccgccccgctgcgcgactccctccgccgcctctgcaccgacgtcggctggtcctacgccgtcttctggagggccacccgcgccgccgactcccagcggttgaaattggtgtggggggatgggcactatgagcgggcggccggagcgccgtcgatctccggcttcgaggccatggacctgctgctcaaggagaaggccgcggcgttgcggagcggcaccgggcgcggtggtggcggcggcgaggggcacgcggctgatggcgccgcgggacacagccatgacagggtggacgcgctcgtgcacaaggccatggcgcaacaggtccacgtcgtgggagaaggggtgattggtcaggctgcactgacagggttgcatcggtggatcgttcacgatattgttgatgagtgtgaggaagaagatgaggtattgctagagatgaagggccagttttgtgcaggaatacagacaattgcagtgatacctgtccttccacgaggcgttattcagcttggctccacaaaaatggttatggaggaagcagcatttatagatcatgtcagatctttgtttcagcagctgggtagttcaactgcagttgttccgtgtggttcctttgtacaagattcgattatgagaactccatttcacaaatcacttggtgtgcctacctcttcgcactcggaagaccttgctggtggtggaaatacttataatgatgacatgattaaccaccagttcaggcatcagaagtcaccagcctcgacaattcagtcatttaaccctgtacaacagttctatgctgggcctactttctgtcgtccagtaactattgcatcacgttgtgatctcttccaacctgaccatggatcaacctttactttgaacagtcagtcagaggacaatagatcgacagctttactcaaaaatagtgtttcacattctaaaacatcaaatgatgccttttcacacgcttttaaccccctcaatgaacccaacgtctccatttcaggcagaagagagtgtgtaagcatagaacaacatggttcttgccgtaatggagaaatggaaataacaataggccgcactgcttcttcaagttgtacaggcaaaacaaatattatcaataaagtggatgatttgctgagtcaggattgtttggtaggttgtcaggcaagcaatgccacatctgtgaacagaaagtttcagacaatgtccattgttgataatacaaagcttcaagatggttcttatgcaattccacatgctgcacttgttgactctacccaatattcagactgctttcaatcgcttcttggcacaatccaaggtagttcttccagcaattcaaatgcaattcatgtggatacttctcataatgctgtccatggaaagagtaacttttgccctttaggagataggaatgctgctaattcaagtgacttggctgaacttctggcatcgccaataccattagagttgactgggggaaacgatttgtttgatgtactgcaacttcagcagaagccaaatggttcaaataatagtgaagtaaacaatcgtcaatcaatgccttatggttcagagcaagctgttaagtctctgattggatgtgtggatgatgatttcactggattgatcacagaagctgatccagaccagctcctggatgcaatagtttcaaagataatcacagggcacaagcagaacgtggataccagtgcttcttgtagtactacagtggcaggctttgacagaccacttcattctgattgccacctatataccacaggaccatcatcagggccaatattttgtaattttgccagtgttgctcctgtagcaattaaaactgaagggcctgctgcaggttccaggcaatcatcttctagtatagataaatctgcaggatgctctcagacacaggaaagttacaaatcacagataaggctttgggttgagaataaccatagtgtaggatcagatagtctttcaactggacaagcatctgacagtctttcaactggacagtgtaaaaggagtgatgaaataggtaaatcaaaccgaaagagatctagaccaggggagagtgcaagaccgaggcctaaagatcggcaaatgattcaagaccgtataaaggagcttcgtgaaatagtacctaacagtgcaaagtgtagcattgatacattactggagaagaccattaagcatatgcttttcttgcaaaatgttgcaaagcatgctgataagttgaagggatctggggagccaaagattgttagtcatgaagaaggtttgctcttgaaagataactttgaaggtggtgcaacctgggcctttgaagttggtacgcgatctatgacatgtccaatcatagtagaggatctcaatccaccccgtcaaatgcttgtggagatgctttgtaaagagagaggaatcttcttggaaatagctgatcaaattagaggtttagggttgactatcttgaaaggtgtgatggaagttcgtaaagataagatttgggctcgctttgctgttgaggcaaacaaggatgtaactcggatggaaatatttctttctcttgtccatcttctggaacctagcactgggagctctattttgtcagcaggtgttgagaacactagcctgccgcgcgatagtttctttccatcgtctattccagcctctggtttctccaactgcttgtgacacgatgtaccatacctcagcaagtggagcgctgtgagtgggtaaagtttcacctgccgtgaccttttctccctgccttgttctagctgccacagatagttacgctgactccagtatcttgttgcctgtctccacggctgacgttgtggcaaattactggtcagtaagggagagatgtgtgttttgtcctaaccttaaactacatcgcagccagcctttgtgagggaagaagctttagcgtaggaaattgttgttttaggcaggctccacaagtgtaagaaatgcagtacataaatgattagagatttagagttaggatagcatcaggtttttctgctatgtaatatctgcattcatgtgcccatttggctctctggatctgctaacctggttgtgtatttgcagttcggtctttttcctctgttcagcaagtaccacttgaatgagtgcctcaccattttttactgaaaa

SEQ ID NO: 58648 - DNA, 183 bp, Oryza sativa
  Clone ID: PAT_MRT4530_60343C.1
atgcgggccccacctgacagtgactcgggagggcggtccacggcggaccgagtccacggaccggggaaaaccggcgcaccacgtggcgcacacgtggcaccgacgtgcggcgcggcgcgcatgcggcggcagcgcgagacgacgaccggcgacgaccggccggcggcggagagcagcggctaa

SEQ ID NO: 58649 - DNA, 459 bp, Oryza sativa
  Clone ID: PAT_MRT4530_60344C.1
ggaatcaacgggacggcgcggcggccaacctcaaccccttgcccaaccgaggctcggctcagctcgtggccagccgcggcggagcaagcggcgaagcggctgcgaatgcgcagagaggaggatggcagtggcagtggcaaggtgttgacgcctaggttcgtccgaactaggagttcgccggaaccctggtggagcccaatcagcctggccctccacgtgttcgcgccagatgcactctcaatgatggttaaggggcaagaaggcaggatagtagatgggccgttgatggtgacagctcagtacgggtattcctccatgttagtatacattcctaagacaaattcctggggagggtactcctccgtatttagccccggttggacggtcatgacaggttgtcgtaaggaactcggcaacccggggtggtctctcgaaacaacaggaggacactgttatggg

SEQ ID NO: 58650 - DNA, 396 bp, Oryza sativa
  Clone ID: PAT_MRT4530_60345C.1
atgatgaagagaatcagcgacaaagggtcaccttgccgcacaccacggtgcagccacacagccagcggtgggcggcgactggcgagtggcgcggggcgatggggcaggggatggtcggatgtgggcggtgactggcgaatggcacgggaggcgtacgacgcaggtgctggtgagcggcactggcgcctggtggctaggcttagagacacaaggcccagatcatcggtggtggcgacggacgagggccggagcggcggcagccgacgcctcctccaatcccatcccggccagcgttcacccagtaccgcagggacggatcttgcccggcaagcgcttaggcggcacggtggcagtggcagcagcggtggcgggagggtccgccctctgcggcgttag

SEQ ID NO: 58651 - DNA, 282 bp, Oryza sativa
  Clone ID: PAT_MRT4530_60346C.1
ccctgcgtgagcggcagcaagtgttcactgcgttgttcttctcgatctatcttccttggtttctcagagctgaagcttactagcgaccatgtacgggggagtcaagatgtaccaccacatccctggcgcaagccaaggatagacattgaccccactggaaaaagcacacacaacatggaatggcgcaacgttttattctgaacagattgtctaaggctgattagagaataccatgttcagattcttctgacgggccagatctctatatgacgcactggacca

SEQ ID NO: 58652 - DNA, 510 bp, Oryza sativa
  Clone ID: PAT_MRT4530_60347C.1
atgaggtccctcttctcgtccaagctctcccgcgcgccggcctccccgccgccgccgccgccgcacgccgccgcgggcggcggcggagacgcccacacgccctcgtcgcacggccaccgccaccgccgcttccccaaggagaacgtcgacccgtccccctccccgggcccgtacgaccaccactccgcctaccgctccccgtcgggcaagcagcagcagcagcagcccctcgccgccaagaaccgcagcctcccgccgcggcccccgctcaagcgcaagctcctcgacgtctccgccgcctcccccgcgcccgagggcgcgcccagcggcggcggcggcggcgattctggcgtccaggttgtggtgagggtgcgtccgccgagccgcgcggaggaggaggatgagggggccgggaaggaggtgtgcgtacggaagaccggccctggctccgtcgagatacatgggcaggggttcaccttcgattcggtcgctgatgaggcctccacgcag

SEQ ID NO: 58653 - DNA, 366 bp, Oryza sativa
  Clone ID: PAT_MRT4530_60348C.1
atgggcagagaggcgcggcgactcgggaagggctcgccggcgacgagcggccgcggggatggctcggccgaaggccgtggaagctataggaggcggttcgggacggcggcgggcagtgtgctacggcgaacagtggctcgattaatggataggggagggcctagggactacgaggaggcttactccttgcttgattcggggcggaggtggtgcgtgacggcgcggcgacgggttcacgaggcggcggacggcggcaatggcggcggcggcgctccggcgagggggggggtgatggcggtggctctgttcggccggctcgggggtgcggtgatggcgcggccgttcccgtcgaaacagagaggttag

SEQ ID NO: 58654 - DNA, 1708 bp, Oryza sativa
  Clone ID: PAT_MRT4530_60349C.1
cataaacatgcaatgatgggactagcttgtgaaaagagggtttagatctaatagcaaaatatctcagtacaaatcttaaagcagaatcgacggctaaaaaatttgacatcacggcggcggcggcgagcgttgcggtggcgacggcgaagaagccaccgtgccccgctccaccagcggcgccgccattccctatttccccatttctccccagtccccatcctcctctgcgtgttcgtcttctccgcccgcgcgttcatcctctgccgtggccgccccaccgccgtcgtcgccaaccttcccgcagccgccgtcggcgcccgtcgcgccgtcgccagcgccgcccatcacatcgtcgcgaaccttcccgccgccgccgtcgccacctcctcctcgtccccctcctccgccagccgccgccgccgtcttcttctcctccgccgacgacgtagccgccgacttctcctccacctcctccgactccgccgacgcagccttctaatcctcttccggcgccgccttcttcttctcctcctccgacaacgccgccgccgccttctactccacctcctcctccgccgacgtcgccttctactcctcgtccgaccgccgccttcttcttctcctccgccgacgacgccgccgacttctaatcctcctcctccgccgacgccgccttcttcttcttctcctccgacgatgccgccgccttctactcctcctccgccgacgccgccgccgccgcctcctcctcctccggctgccttcttctcctcctcttccgcggacgcctcctgctcctcctccggccgccttcttctcctcttcctcctcctcctctcctccgctccctcctctccggccgccagggccacaatcgccacctccgggagtgaagccatcgccgccgccgccgccgccgccaccccccccctcgccggagcgccgccgccgccattgccgccgtccgccgcctcgtgaacccgtcgccgcgccgtcacgcaccacctccgccccgaatcaagcaaggagtaagcctcctcgtagtccctaggccctcccctatccattaatcgagccactgttcgccgtagcacactgcccgccgccgtcccgaaccgcctgcactgccggccatggcgctcgccgcctccagccacccccggctgcgccaccgcctccgcctggctcaccgccgccgcagccgccgccgatgccgccatcgccgtcgccggcgagcgagcgatctccgccgccgcgctcgccggcgccctgcgcgcgcccgtcggcatcgagtactcccacgccgccgcgttcggccccgccgccacctcctcccacaccaaaacttcgaggcccccgtcgcggcaccctcctccgccgccggatctccaccggagtacggcgccggccaccccctcctcccccggatcttcaccgccggtgagtcccccgctccttcccataatctctcggtgagtctccgcctcttcccgtcctcctccttgctcccccgcgccccgcctcctcctcacccgccgccgacaccgtcatcgccgccgcagccgcagccgtagccaccgtccggagcgaggagggagagcgccacacggcgccgagcgccgccaccgtccccgcctacgccgccgccgtctcgaggctgctccgccgctgcctcgactcgccaccggcgtccccggccgcgccaccg

SEQ ID NO: 58655 - DNA, 597 bp, Oryza sativa
  Clone ID: PAT_MRT4530_6034C.1
caggtaaaactttcttctttttttttgcctattattacatatacacaaatcgtaacagacaaggaaaactaccactactaaaatgatatagtgaaaaaataaaggaagagcttttttgaacggacctaaaaaatgcttcatcgggggagggagctgaatttacgggtccaaagtaaatgtttaaatttctgttgagattaaacagataaacactatggtagtacgactatttttttctataataagtgaacaaaagaggtgaaaagcaaacggatttcgtcagaaaaatcgttgcaggcacatctcccatacacaaatcaaatcaaggtggaattttaagtcaaaaaagggaacttgtcgtctgatttcctaacaaaaaatcgttgcgagaatcatcacacaagcaagaacacagatcacaagcaaatcgcccgaggaaggaacttgaagagaaaaataaaagcgaatcgcacgaggaagggactggaagaaagaagatttcagggcacaagaaagagctcaagagttctgaatccaaacggaaacaaaagtaaaagggccaaaaacaaatggggaaaaaagtgggggggactcacc

SEQ ID NO: 58656 - DNA, 255 bp, Oryza sativa
  Clone ID: PAT_MRT4530_60350C.1
gctccggacggatgacaggcgccggcacaccgggggggattggtcccgggagaccccggtcccaaccccccgggcccgagcaagaagccagagcaccccccgaggaccaaaccgatgagcaagaccaggcgaggagggcgaacctgggcggcagcgaggagaagacccccgaggccagcaacaagaccgaaaccccccgacgccaggaggccgcccggagaaagaccggccccctccaacaggacagaggcaccc

SEQ ID NO: 58657 - DNA, 888 bp, Oryza sativa
  Clone ID: PAT_MRT4530_60351C.1
gagcgaggtcctaagtcgccccgcgtcgaggagacgagggggagggagacccagcgagggaggagaggaggattccgagcgctgcagccagccatggcgaagcaaggggtgaagaagacgagggacgcgaacaagaagcggatggacctcatcctgcgcctaatcctcgcggccaacgttatttacatagtagtgagaatggctgtaatgcattcgtctttcacctggaagcattggattggtcttgctgtgacatctgctgcatattttctgccgtacaagcaacttgccaatatgtcagagccagaatactctgagaatggagagttaattaatgctggttatgacttgaacgctggtggaatgtccgaatatttacaagatgtgatatatatcactctctttgtgcagctgatgtctattttttctgataaattttggtggacatatttggtgattccagcttatggtggatacaagatttccggtctgttgagaggagcatttttcggtggtagttcagagggcgaagaagaggatgagaagacccgaaagaaaagggagaagatggagaagaaggcatctagggggaagattatcaaaaccaggactcgttgatggcacatgtagtgtatcggggctcgttgatggctcatgtgtattattgtttgaagggtaggtttgctttacatggctgtccaactgaaatgtaagctgtcgggcagaattgtttcatgaattattcgatcatttgccccagcagcttagtagtagcacaaatttgaactaatcctcttaacttatcgataccagcattatcaatgagcagctctcttttgggttagcatttcccccccaaaaaaaaaaaaaaaaaaaaaaaaaaaaaaa

SEQ ID NO: 58658 - DNA, 242 bp, Oryza sativa
  unsure (1)..(242): unsure at all n locations
  Clone ID: PAT_MRT4530_60352C.1
attttattttttatttgacgacaaaccacgaactcacataataatggggccactacaaaagggaaggcagacaacacaactgaacacagcacaagctacaagtcnnnggcgacaaaatagaaaagacaaagatcacaaaagccagggacacacactgatgaatagcaacgcgcacccacagcataaaggatatggacgacaattaaacatggcctaggcacaacgaaagatcgaataacaac

SEQ ID NO: 58659 - DNA, 537 bp, Oryza sativa
  Clone ID: PAT_MRT4530_60353C.1
agaaaccaaggaaaaaaaagggggacccccaggggacaggggaaccggaagaacaaaagaccaaaaacgaagccggccgggaggggggcaccacggaaagaccagcagcgcacaccagacccaaaaaaggagacgacaaaaacaaggacgggggaggcaacccggacccgggaggggaaaaaaaaagcaggaagggggacaccccaagggcggggcaggggggggcccggacccccccccccgcgccccgggccaaccggggggacaaagaagccaagccagagaaaccggggcaggaacaaccgcaaaggcgcggggagcgcggagggaaaaaaacacggaaagcacgcaaagcacagcaacgaaggcaaacaagcgagagcgaaaaaacaaaaaaaacaaaacaaaaccggggcagaaggaaaaacggacacagaggaaacagccgggaggagagaaagaaggcagcacggacgcgcccgccaagccaacagggccgggaaggggcgaccgcggaagggcaggcaagcgggataa

SEQ ID NO: 58660 - DNA, 482 bp, Oryza sativa
  Clone ID: PAT_MRT4530_60354C.1
tttttgttatccaccaaatatgggtagagttgatttattggagtcttcaatttgaaaccatgaaagatatccatattcttatggggcaatagttgttaatgcccattattcaaagattaaaatacattgaaaaaaatccaaggtggttagcatccccactgatatgttcgttttgaaagaagccaactattaacctgaagcacctaaaaatatgcctcatgagctcaggagccttgtttgctactttggttcctcctatttactgaagcccaaacattgatgtcactgcattcacatctggccatgtcctaagatacttgctacattctcatccaccaagcaatcaacctataggagaaggacctcatatgtcacctaatatcaaataattaggaggggtgaggctttgaacccaggtcgtctagcccaccaccttgtggagctagccagaagacccctgtgcatttcttctttccatgcat

SEQ ID NO: 58661 - DNA, 241 bp, Oryza sativa
  Clone ID: PAT_MRT4530_60355C.1
atggagttttccggcgacctggacgcccgcttggggctccacctagcactgcggctgcatttgccaccacatgtggcccgcgagttggtggccagtgctaggcacggcgggcgtggtggagagttgggccgcgtccggcggctggcggccggaaatccactgcgggcggcgggcgccgtcgcccccacgcaccactgggagcagcttcagctccacgcgcaccacgggcaccacgggcatg

SEQ ID NO: 58662 - DNA, 164 bp, Oryza sativa
  Clone ID: PAT_MRT4530_60356C.1
agggtaacccgagggttggcccccgggttttaggtccttttagggccacgctcgacaaaaccccgccttccgccaagactggttacccctggggcgttccccatggagaaaacgctcgtgttttccccggggtgggactcccgggccagtttttcccggaataa

SEQ ID NO: 58663 - DNA, 850 bp, Oryza sativa
  Clone ID: PAT_MRT4530_60357C.1
ccggccgggatcgcacgcacgcacgcgctagagaaactaaagagagagaggtcgatcagaaatcaatggaggcgcacgtggagagggcgctccgggagggcctgacggaggaggagagggcggcgctggagccggcggtgatggcgcaccacacgttcccgccctccaccaccaccgccaccacggcggcggcaacgtgcacatcgctggtgacgcagcgcgtggcggcgccggtgcgcgcggtgtggcccatcgtgcgcagcttcggcaacccgcagcggtacaagcacttcgtccgcacctgcgccctcgccgccggcgacggcgccagcgtcggcagcgtccgcgaggtcaccgtcgtgtccggcctcccggcttccaccagcaccgagcgcctcgagatgctcgacgacgaccgccacatcatcagcttccgcgtcgtcggcggccagcaccgcctccgcaactaccgctccgtcacctccgtcaccgagttccagccgcccgccggcggtcccggccccgccccgccgtactgcgtcgtcgtcgagtcctacgtcgtcgacgtccccgacgggaacccgggggaggacaccaggatgtctaccgaccaaggcgtcgaagcccaccgctccgtaatgctgacgtctgtggccggggattcctactgatgtatagggggtctcgcttatgtgaggcctccgcatacttggaggcaggcagagggcgggccgagtgcgtgcgtgtttgagtgcgttacagtttatcgtttcttagccttatcattactcggagtccgcgctcgtggctgtacaagctgcggtggggtacttgtaacatactgttacaa

SEQ ID NO: 58664 - DNA, 445 bp, Oryza sativa
  unsure (1)..(445): unsure at all n locations
  Clone ID: PAT_MRT4530_60358C.1
cttcaatttncccttgcccaccgctgtgccgccgccgccgccaccgccgcctccgggatccccatccatcccgcgagcaagcagggcgccgtcgctcgtcctgctgcttccgccgcatccaccctggtgagcacatcctccgccaccaccccctgctccgggccccatccatcgcgcaagcgagctggagcggagcgggcgagcagggtcgccgtcgctcgtcctgctgcttccgccgcatccggcggagtcttcccatcagcatatgatggcaggacccgctactttagatcctcagcgggctgaagcggcaaacaagcatgtgagagcactcaatagccagtttgctagctgggtacaatcacagttgcaaaatcatccagccgaactttgggaggatggcatgagggactacatatcccatgcttctgaaataatggaaaaa

SEQ ID NO: 58665 - DNA, 1119 bp, Oryza sativa
  unsure (1)..(1119): unsure at all n locations
  Clone ID: PAT_MRT4530_60359C.1
attcggcacgagggggcgtggcgcgggtcaacctgtgccacgggggccgcggctggcaccgcgccgtgatgcgcgaggtgcggaggctcaacgaggaggaaggcttctgcgtctccctcatggtcgacaccgaggggtcccagctcctcgtcgccgaccacggcggcgccgcctccgtcaaggccgaggatggctctgaatggctatttacaagtaanaagaaccgatgaatctctatccattcacaatgcatgttaactttgataagttttctgaagacattctagttggtgatgagcttgtaattgatgganggaataggcaacatttgaagttattgagaaggtcggaaatgatttgcgctgtaagtgcacagacccaggattgggctgacattgaatttgggatagctgaaggagttgattgcatcgctctttcatttgtaaaagatgctaatgacatcaagtatctcaagacttacctctccagaaaatcattagaacacatcaaaatcggcgcgagggttgagagtcttgaatcactcaagaaccttaaagacatcatagaggcatctgatggagttatggtagcacgtggtgatcttggagttcagattcctttagaacaaatcccagccatccaagaggcaattgttgatctttgtcgacggttgaacaagccagtgatagttgcctctcagcttcttgaatcaatggttgagtatccaacaccaactcgtgcagaggtagcagacgtttctgaagcagtacggcaatatgctgatgccgtaatgttatcggcagagtcagctataggtgcatatccccagaaagctctagcagtcctccgtgctgctagtgagaggatggaatcatggagccgtgaggaaaacatgcagaaacttcttccacaacatcagcttgcaatagctttgcctgataggatctcagagcaaatttgcaccagtgctgcagaaatggcaaacaaccttgcggtggatgccatctttgtttacacaaagtatggtcacatggcgtcgcttctttcgcgcaaccggcccaaccctcccatttttgctttcactgataatgccaactcaagaaagagcatgaacctcta

SEQ ID NO: 58666 - DNA, 3014 bp, Oryza sativa
  Clone ID: PAT_MRT4530_6035C.1
gaagaaagaatcatttttccttttttttttttttggttctgatttcatcgtcatcgtcaactacatatacaaggtggctgaaaccttctcgcatatttttatcatacggggcatatacaagcatggaagaaggctgaaaatgttgaaagaaaaagaagaaaaaaaaacaaaaaaaaacctgtttatcctgtaacttctgcagctaacccctaaaccacacgaactgaatcatcatcatcttttccatttgttattggaatttcctccttggtttttatactgtgcagaataatccctgtctccgtcacagtgagccttcgaacgagacccgcagctgcacttgccttggccgctgcgatggcgcattggcgagaccctgcagcatcttgatcacgtcgaccgtgtcgtcgaggtagtacttggccatgctcggcttcttgccgaccgtgcaggcgaacacctcgctgctcgccgggagcttgacgctgctgttcgacgggcaaacgatgctctcgaacatgtcctcgtccgaccggtcgtccccaatgcacagcacgaaatcgggcgccttccctcggctcaccatggatgacaagaggttgtccacaaccacacctttgctgatgccctgtggatttacttcgacgatatgctggcccctcttaacaacgactggttcatttgcaagaacgttttcgaggtggtcaagcagttcctttgcctggcatgaaccaaaatctggatctgcctcatcgtggtgccaaactaacgcgctttccttgtcttcgatggttgaaccatctgttgcctccttgtaaagcctcatcactggttctgcagtcttcttccaatcaaagtccacggccaacccgcaggtctcccaagctgagtccctgctccaccttgtgaagtaaccatgctctgcagcaatccccagcttctcacaaggtgcaaaccatctgccaagttcatccttccctctaccgctcacgatgaacactctgttcttggggtcctcgcacagacgattcaatacagagatgacctcattgctcggtgccttatcaattgaaccctctggcatcactgtgccatcatagtccaagagaattaagcgattatcagacttccggtatgacggcacaatgtgatcgacagacagccgcctgaaattcgggccaagtgccaccaccttgaaactcatcccaaacccaataccccaatgccgccgcgagaaatgatccttgcaagctcgctgcaggtcctggtcgaaagatttcgcccagtaggcaacatcatgggtgctcacatacttgtagtgcttctcatgtcgcagccgctgctctggctcaggcatcctcagggctgcattcatggcctctgccatagactccacactccatgggttgacccggattgcgccgctgagcgacggggagcacccgacgaactccgacagcacaatgacgctgcgcttggccgcatcatccaggccagtgctctcctgccggcacaccgtgtagatgtagggtatccggttgaggccgtcccgcacggcgctcaccacgcagcactcggccgccgcgtagtacgccgccttctcgtgcaccgacacaccgcggtcgatcagcacgataggggtgtaccccggcgtgccgaaccgcgcattgacgcgggcgctgatcgccctggcttctccctgaacctcctggatgtcgcgcccctcgctgcgcgccgggttcgcgatctgcacgagcaccgcgcggccgcgcagctccgggtgctccaccagcagctgctccatcgccaggaacttgagcccgattcccttgaacaggtcgacgtcgtcgacgccgaccatcaggcgccgccccttgtacgactcggtgagccgccgcaccaggtcccccgtctccggcgccgacaccaccgacctcagctggcccatgtcgatcccgacgggcagaatcttgaccgtgacggtgcgaccatagtactcgatgccgatgtagccgcgcttggactggtaatccaggccgagcagccgcgagcaggcggagaggaagtggcgcgcgtagtcgaaggtgtggaagccgacgaggtcggcgttgaggagggcgcggaggaggtcctccctgacgggaatggtgcggaagatctccgaggaggggaacggcgagtggaggaagaaaccgaccttggcgcgcgggaatcgcttgcggaggaaggtggggagggcaaggaggtggtaatcgtggatccagacgaggtcgtcgtcggggctgagcacctcggtgaggcggtcggcgaaggcccggttcgccgagaggaaagaatggtagagcgcgcggtcgaacggcaacccgcccagcgacgacggcgtgagcggcagaaggtaatggaggagaggccacaggtagtgcttgcagaatccatggtagaatcggcggtggagatcggcgggcaagtacaccggcaggcaagagaagttcgccagcaagtagttgcagagctcgtcggaggccgcctcggttgcgggcggcgggagcgtgccgatgtggaggacgggcgcgccggggggcagccccgagcggagctggtacgcgacggcgtccgagtcaaccgtgaaggagaacccgaacggcgacgccgcgtcggccgcggcgcggagcgggaggcggtgcgacacgaccaccctccgcgcgggggccggcgtggacggcgacgtgggcgaggccggcgacgccgccgacatgacgcgcgggaggcgcagcgacgcgggcgacggcgccgcgtcgtccgccgcggcaacgaggtcgaggaggttgtggcaggagagcgaaggcatcgccaaaacaaaaaaaatcaccggttcgtgcacccgacgaacaactcgccgcctccacgtcgcatcaagagaagaagaaaacccaacccggcggcgacactactccgatgaagcggaaggatggaaacggccgcaagcgtgatgggcgtggaggtggacctcgtgc

SEQ ID NO: 58667 - DNA, 3675 bp, Oryza sativa
  Clone ID: PAT_MRT4530_60360C.1
atgaggccctcgccgcctcccgccgccccggcggcggaaccggtgcccccgtggctgagatcgctgcccgtcgcgcccgagttccgccccaccgccgccgagttcgccgatcccgtctcctacatcctcaagatcgagcccgccgcggcgccgtacggcatctgcaaggtcgtgccgccgttgcccccgccgccgaagaaggccaccttctccaacctctcccgctccttcgccgcgctccacccggacgaccgctcgccgtccttccccacccgccaccagcaggtcggcctctgcccgcgccgcacgcgcccggggctcaagcccgtgtggcggtcctcccaccgctacacgctcccgcagttcgagtccaaggccggcgccacccgcaagtcgctcctcgccggcctcaacttccctgcctccaggcaactcaccccgctcgaccacgaggtgctcttctggcgcgcatcggccgaccgccccatcgtggtcgagtatggcagcgacatgtcgggctcgggattctccccttgcgccgcgcagccgcagccgccgccgcagcagcaaccgacggcgcgggcggcggcgcaccttggggagacggcgtggaacatgcgcggcgtggctaggagccccggatcgctgctgcggttcatgccggaggatgtccccggggtcaccacgccgatgctctacgtcgggatgatgttcagttggttcgcgtggcacgtcgaggaccacgacctgcacagcctcaactacatgcacctcggggccgccaagacgtggtacggcgtgccgcgcgacgccgcgctcgcgttcgaggacgtggtgcgcgaacatggctacggcggggagattggtgcagaatgcaggggaatttgtggtcacttttccaggatcttatcactgcggtttcagtcatgggaaccatccaatggtgaaatggagacacggagctctcgaataaaggagaagaagaaatgcgaaggggaacaactggtcaagaagatgttcatccaaaatgttattgaagataatgaactgcttagtcatcttctaaatgacggatcatcttgtattattcttccagcaaatgcccatgatggtcctggtctttctactttgcgctcaacagatcaatcaaatatgaattccagaatatcacataacctatgcagtagggaagaagctccagaagcctcaggatgcttatcgccgaacaggaatggtgataccagaaattgtatttcatcagatacgcataacatggaaggtgataagggagatataatgagcgctactggattgttagatcagggtctattatcatgtgtcacttgtggaattttaagtttttcatgtgtggctgtactcaaaccaagagattctacagcacgatacttgatgtctgctgattctaattcaattaataaccagctttctatttctggagggagtattctggcagatgcgccaacaaatgaaaggaatggtgtcatttctcgtccatattctgaacactgttgcaacgaaataatggccgatgatgcagaaatcgataagaattctgctcttgatctcttggcatttgctcatgggggtcaaccagatcctgaagaagatccactggagaaaatactgaagattgcacatggcattaacaaatcacaacctaatagttcaaataatgttggttgtgttggaacaaagctgtcctcaagtagcacagagcgccaagaaagaccatcttcccagaacgctcattgtaatggtagctcagttatttcaaatggaccgaaaggtgttcgcacgagaaataagtatcaacttaagatggtactttctgaaggttttcaggcaaaggatatctattctgcgaaggaaaagaaggttcaatcagaaccatcaagctcaaaaggggatgttaaggagacaattgatgttagtggcacagagaacgatgtcggatgtaaaagcactacaatctctgtcagtgaacacaggggttctacaaagaatatgtattcagtgaaggaaaagaaggttcaatcgaaaccatcaagcttaaaggggactgttaaagagacagttgatgtcagtggcacagagaacgatgctagatgtaaaagcattacaatctctgtcagtgaacacaggggttctacacctatgaccaatagtttagctgcatcaatcgtgaaacctgacaaggattcatcaagaatgcatgtattttgtcttgagcatgctattgaggttgagaagcaactgcatgctataggtggttctaatattatgcttatatgtcgtccagaatatcccaaaatagaagcggaagcaagattgttgggtgaagaaatgggactggtatatgactggaagggcattcatttcaaggaggccaacatggaggacaggcagaagatacaggaagttctgcgggatgaggaagcaatacctacaagcagtgattgggctgtaaaattgggtattaacctttattatagtgcaaatctggccaaatctcctttatataacaaacaaatgccatacaacagagtcatttatagggcatttggctgtgattctcctaatgactcgccagtaatgttcaatacttgcgaaaggaaacaaagccaccagaagaaaatagtggttgctggccggtggtgtgggaaagtatggatgtcaaaacaggtccatccatacttggctcacagagttgaaagccaggaagcggaagaagcagatagaatctgttcttatcattttgatgagaagcacaaagctgagccagttgggaattctagtagagtggaagcctccaaaagaaagagtagcagtttgacagacgtaacagaatcaagcaatagaaggggggaaatacctggtgaggaaacaaacaccaagaggcccaaacattctcaagagaacaatctcagagctttggaaaccgctgctgaagttgtggtgccctcaccagctggaacaggtctccgcgttagctccaggattgccaacagggcaaacaagctaaaatcaaagatggaaaaggaggatgtcccttctagccgtccaaagtctaacataaaggagaaaagcagtcatgctagcggtcagaaatcaaatgttcaagaggcgaatgctaattctgctagccatttgagagcaatgccaccaaaacagaaggctgaagcagaagcaaagaagcaaataagaactccaaaacctccaaagcaagcagtggagtactcgtgcgatattgagggttgttctatgagttttcgtacaaagcgggacttgtctctgcacaagagtgatatctgcccagtgaaaggctgcgggaagaagttcttctcgcacaagtatctgctgcagcatcgcaaggttcacacagatgaccgtccgctaacatgcccatggaagggctgcaacatggcattcaagtggccatgggcaaggactgaacatctcagggttcatacaggcgacaggccctatgtttgccatgagccaggttgcgcacagacattcaggtttgtctcagatttcagccgtcacaagcgcaagacaggtcattctgtcaagaagaagaagaaagcaaagagttgagctcgtattacagcaagctagttatggtagaaccggacgcagtaggaggtagtttgt

SEQ ID NO: 58668 - DNA, 1505 bp, Oryza sativa
  Clone ID: PAT_MRT4530_60361C.1
gcttatcgaagatcctgggaacatttttttgtcttgatgatggatttgcagtaataacaacaatgtcagttataacagagaacatggaaatcttcactcccaatcctcacacaaaccacacaaaatgttactactaccgattgtttcctttgacatttacattggaaacattttaactaatttttcatggtgtgacggcggttgagcatctcggtgatcccttgaacccacttgtgctgctcgtatttgctcctgcactcgaactcgatcatcctctccaccgtcttgatcccgaagtatcccctcctgtggctcccctcctccacctccctccccgcccacgccgggatctccgagcagatgtcaagcacaacaaatttcttggtcttgatgaaggtgccggccatatgcgcgctcctcatcttgatgatcactgttatcgtgccttgtcttgtgcgcttgagaagctcgccgcctctggagacgaaggcgaatggcgacgtgtccctctcgggctccctgccgctgatgtcgccggcgccggcgccgccgccggggagggcggcggcctggatctccttgtggagcctcgcccgcagcatcgccgccccgcgcagggccgtggcggcgccggcggtgagcgccatgatgtcgccgctggtctgcgcgttcacggcggactggatggcgccgaggatctggtcgtggctggcgccgatcgcctgcgccatctccacgcagtgcgacgccaccagcgcggcggcggacgcgatggccgccgccgtcttcgcgcctgccgctccggcggcgtgtgcgggtgccggtgctggtgcggcggcgccgccgttcttggggtggtccggaggaggggagaacaccgcgccggcgaccagcgcggccaccgcggcggcgacgccggccacggacgtcgccgcgtaggcctgcgcgttgcgcgacctcgcctcggcgcgcttccgctccttctgctccttgatccacgtgcccatcgtcgtcttgccgcccccgcctctccctcccgccgccgccgccgccgtagccgtcgcccggagaagcttcacgtccaggttggcacggggagagatgggcgggctcatcgcgccgccctgcgccgccgccgccattgacgacgcgtccgctctcatagatgctgcctcgttctcctcgcttgcctgttcatggcggcggccgtccatggtcaccggtgacctccgctccttcctgtcgccggcgacggcggcggcggcgtcgtggacgtcgtcggagacgcccttgccgctgaggaccctgagggccttggagatctcggcggccgacaggctccacgacctcgccaagaactccatcgtctccgtcggcgtctccggcggccggacagtcgtcggcggcggccacttctcggcggcgccgccttcttcctcaatgccctccagcctctgcagctgctggccattgctctgctgctgatgatgatggcattgctccat

SEQ ID NO: 58669 - DNA, 272 bp, Oryza sativa
  Clone ID: PAT_MRT4530_60362C.1
cgacgacggacgaatatttcatgatcaagtcgaccatacttaggccctcatacatttgtaaatactgagctattttgagagcattacgaggaacacttgccaaaacgatcattgaggatgcatgctcttaaaagggatagattatgatgcagtgcacatggacacatgagaatgagctcacacacatggttgaccattcaaagtagaagatcaccggtgccctgcatcaaggttctggcgtatatgtaaacgaccgaataagctttattgga

SEQ ID NO: 58670 - DNA, 438 bp, Oryza sativa
  unsure (1)..(438): unsure at all n locations
  Clone ID: PAT_MRT4530_60363C.1
ttccctcccatctctctcttcgccgccctcccctcagcgcccccgagcggaggcggcgacggcgcccctcctcccgcgagcggcaggcaggcaggcaggcggagccctcccccaccaccgacggcaggtggcaggcgacggctctagcgggaggggcccccatcaccggcgacggatctagcgggaggagaggcgccccgcgagcggcggcggcggagccctcccccaccaccagcggcggatctagcagaaggggaggcggcggcggcgctctcccctccgccagcgccctccgccggcggcggcggcggcggatctagcgggaggtgaggcggcggcggcctgttcggcgtcccagtggcggnggcactctccccttcaccagatccagcaggaggggagccgncggcggccagccatccctgcggcggcgacggg

SEQ ID NO: 58671 - DNA, 709 bp, Oryza sativa
  Clone ID: PAT_MRT4530_60364C.1
ggcgattgggttcctcgaggccggccgggcatatccgcctctctcgatagaattgagatcccctttccatatcctcctcccaatgtagtgtttgcgctgctgccagctctctgatgtccatgccgagattgcctccttccttctacgctcccttgtctgtgcgatgagactaccatttcctcctacattccctcatctgtgcgatgaggttatccccttcctcctacaatccctcatttgcgaccatcgctatagttatcaagaggatgtattgacttactctagatcgcttacatcaagactcaaggagtgcgaggaaaggtgcatacccctttccgtattcgtaaatctcggtcgctattgatacgcaagcatgacgttatgggctctagtaaggtatgttttttttacatggaaaaaacttgttaatatttgtgttactaataatttctgaccggtgttctatgcttgtacatattgatttattgttatgcacagaatccgaaatgtttatactttgtggtttaaatttttcacaaaccatagccatgaaattcacaagagactgtcccatcgtatcttttcttgtttgcactaattcacaagagaaacacttgcgaattaacatggttcccaaaattcacaggagaaacactcgcaaacgtggttctcgtagcatcttcacatgaatctctatccttgaagcatc

SEQ ID NO: 58672 - DNA, 565 bp, Oryza sativa
  Clone ID: PAT_MRT4530_60365C.1
tttttttttttttttttttttttttttttttttttttttgtttgtttttttttttttttttttttttttttattttttattttttttttttttttttgtagttgttttgaatgttacagcaggagggggttataataataaggaggggggaaggcagaaatatagaaagggggcaaacggttattaaaatcagctgctataaactaagaaaaaaccaagggtggaaaaaggtagaactggaggggcagcaatatgagtataaggacattaacattgataagagaatagcgcagaaggtacaactgcaacagttgggggatctctactttgataaaaatgtggatcaaggtgaaggtgtgttaggtattaacgtgcgatgtagatatgagatctatcctaggtactataaagaacccagtaccattaagaaggttgggggagttttgtaatgagaagtaacattttattgattcggaagagaagaataaacatatatataatcataggtgaaatgttaaaaatttgggtgatagaaaatgggaaaaaaagttctccttaataatgt

SEQ ID NO: 58673 - DNA, 305 bp, Oryza sativa
  Clone ID: PAT_MRT4530_60366C.1
cgcacttgccaatctcccattcatcgtgtcatgtctcctcctctaacaacacagcgagcggcgccaggggcgagctacctaccgtgcatatttgcagatgctggatacggacagctcaagacaagtgcgacaaaacagagcgtctactgatagctcaaatggcttaaaagcttcaagcctatcgcaaccatcctgatgtacataaaaccattcatcactgggctccgacagttaaatggtgtattagtattgccaatggtgtacactatgctaatccacctgaagagaatgctatccacagcaag

SEQ ID NO: 58674 - DNA, 1270 bp, Oryza sativa
  Clone ID: PAT_MRT4530_60367C.1
ggggtggcgattggccggcgggcgcgcggcgaggatagggtgcgcgacgggcgcgcgggcggccacgtctccccgaatcccttctatggccgcgacgcgctgacacggtgcgcgatcatctccgcttgggttttggaggtccgcagcgaactggccgagaagagcaggtggttggcttgcgcacttgccgtggggcgtcctgaggaggtcgcatcgctcaccgtgggagagtggccggcggaaggagccgtggtcgccatggagacttagagcagggagagggttccctgcacctgagccggactacccatccacccccagttgggcagagaggtcccccggagtcgcgtcgcgtaggcgtagcgtttcgctggctcccccctgccgcgtctctcgctgggccgtgcccgacccgcgagacccggcgaccgtctcctcgcctgtcctctcctgtgaccgtgaggccctggggactggggttgctggaaacttgaatgcgtgcatattggatatgcagcaagaactagaagacattccttgggaagaactagacattccttgttcttcaggcgggagcagcaagctgggggcgcgcggcgaggcggctgctacacccgccgccgccgcggccggccgcggcgacctcgccccgatggtcgggatgtaccagcagcagctcgtcgaagatcccttccccctgagcggcggctactgcagtgaccagccacggcacgcgcccgcctccgcctccacctccacctccacatcctcgtcagctgccgttgcagcctcgccgctggcgcaggcgcatggagccggcgagccacggcggctgttcgaggcgttcatgggggagatcctgctcccgctccgcggcgagggaggtgccaacggcggcggcgtcggccgcggtcccggcggggttggggatctgggggagttgctgcggtggacgcgggaggtcgccgcgaatcccgtggcggcgcggcctgttccggcggaggtcaaggcgaggaagcggcaggtgctggccttacggcgcgctcgctacctcaggatggaggacgttgcgaacgcggacgagctacccagcttcttcaaggcagaggtacctgactggactgaaccaccttcagatgaacttgctcgttacaaaaatgacccaaacatctcaaagatgctaggaaccagaatttggccacctgaagacagcatcacacagatgcagccagagatcagctaacagaggaagaggaggatgaagatcaat

SEQ ID NO: 58675 - DNA, 4083 bp, Oryza sativa
  Clone ID: PAT_MRT4530_60368C.1
atgtctgatgatggcgggcgatacacaccgcccggacgccgtggtggcggtggcggcggcggaagcggcagcgggcgcggaggcgcaagtggcagcggcacggggggtggcgcagacggcgcgaaccttcctctcgtgccacaggggagagatgctgggcacactgctcgcctcccggtgctgtcgaggaccaattatccggattgggcattgttgatgcgtgtaaacctacaggcgcaggggttgtggacggcgattgaacccggatacgcggagtaccgcgacgatcgggcggctctctcggcaatccttcaggcggtgccgcgcgagatgttgcgcgggctggcgaagcatgacacggcgaaggcggcgtgggacgccatcaagaccatgcgggtcggcgttgaccgtgtgcgtgaggcgaaggagcagggcttccgtcgccaattggaggcgatgcgcttcaaggatggagagacaccggaggagttcgcgatgcgactcactgccgtcgtcgcggacattcgcgacatgggtggagtcatggaagacgaacacatcaacaagaaactgctgcgcgttgtgcccaagaagtacaagccggtggcgatttccctcgagcagcttctcgacgtgaaaacgatggcccttgaggagctcgttgggcggctgtcgacggtcgactcatacagtgatgatgaggaggaaggtggcggcggcaagctctacctcacggaggaacagtggcaggcacgcgcaaggaaacaggagcaggaaggctccggcggcagtagcaagagcaggggcagctctggcacccagaacaaccgtcggggcaaggccggtgggtcaccgaaggggaaggagacgatcaacagtgggaacaccagccgtgactactccaaggtaaaatgtttcaattgtgatgagtttgggcattttgcaaggcagtgccgcaagccgcggcgccaacgtcgaggggaagtaaacctgacgcagggggaggaggagccgaccttgctcatggctcacgccatgggggtgtctctcgccggtgaggagacactcgggcgaacacctggtgtgcacgaggtgcatctcactgagaaaaagtttggtgatggctcagttgtggacatcaggggacgcggcaccgtgttgttccagtgcaagaatggagatcatcgctcgctagaggcagtgtatttcatccccaagctgtgcaagaatatcatctccatcggccggcttgacgcgcgtggctacgatgctcacatataccatggtgtctgcacgctgcgtgatcctgatggtctactgcttgccaaggtaaagcgctccccaagcttcctgtacattctgaagttgaacatggcgaggcccatctgtttggcggcgaatggcaccgagacggcgtggcgttggcacgcccgtttcggccacctcaatttccaggccctccggagattggcgcaagcggagatggtccgtggactccccgtgattgaccacgtcgatcaactgtgtgatgggtgcctcgccggcaagcagcgacgagtgccgttcccagacaaagccaggttcagggcgcaggatgcgctcgagctggttcatggcgacctgtgcgggccgattgcgccggcaacgccaggcggcaggaaatatttcctgctccttgttgatgacatgagccgtttcatgtggatacggctcctctccggcaagcacgaggcagcggctgcgatcaagcagttcaaggccggcgtcgagatggaaagcggccgaaaactgcgggcgctgcgcaccgaccggggaggagaatttacctctgtcgagttcactgagttctgtgccgatcggggtgtgagtcgccagctcacggctccatactcgccgcaacaaaatggggtcgtcgagaggcgaaacctgactgtcgtcgctgctgctcgctctatgctcaaggcggcggagatgccggcacaattctggggagaggcagtcgtggcggctgtgtatctattgaatcggtcgcccacaaagagcctggatgtgaagccaaatttgaggaaacttgatgatcgtggcacacgaatggtgttcattggttatgagcagggctcaaaagcctatcggatgtatgatccggtgtcacggcgagtttatgtgtcacgcgacgtcgtctttgatgaggcggcaatgtggccatggcgtgatccggaggtcactcaaactggaggcgaggaggatttcactgtggagtttttttccactccgctgggtggaaatcgtgttcctgacgtggttgtggaacatggaggcgcacgggaaactgaaaccgcaccaagtccgctggccacacccgacgcggcgcccgtgtggtctccagtgacatcaagctcacctgccggtgttgagttctgtacaccaccatctgatgccagtattgaaagcgatggagctcctccccgttttcggacggtgaacaatgtgctggccaccacaactccggtgctcgatttcgactacgacgacgagtgtctcatagcggagcaggagcctttcagtttcaaggaagctgagaaggagcagtgctggatgaaggcgatggaagaggagatgagctccattgaaggtaacaatacttggttcctctgtgacttaccatctgaccatagggcaattggtctcaaatgggtttacaagatcaagagaagtgccgaaggtgagatattgaagtacaaagcaagattggtggcaaaggggtatgttcagcaacaaggcatagattatgaagaagtatttgctccagtagcaaggatggaaactgtgaggttgctggttgctttggcagcacatgagggttggcaaatacatcacatggatgtgaagtcagcttttctcaatggtgaattggaggaagatgtgtatgtagtccaaccacctggttttgttgttgagcacaaggagaacaaagtactgaagttaaaaaaggccctatatggtttaaagcaggcgccaagagcttggtatgcaaagctggattctacacttgcaaatttggattttgtaagaagtgcaacagagaatgcagtgtacactagaggggaaggtaatgccagactcgtggtgggggtatatgttgatgatcttatcattacaggagctttggggacagaaatagcaaaattcaaggagcagatgagaagtatgtttagtatgagtgatcttggattactgtcctattacctgggaatggaggttaaacagactgaagaaggcattacaatgtcccaagctgggtatgcaggaagaattttagagaaggctgggatgcaaggttgcaatccttgtcaggttcctatggatgctagactgaagctgaaaaaaggagtagaagattgcattgatgcaacacagtttagaagcattataggaagcctgaggtatttggttaatacaaggcctgatctatcctactctgttggatattttagtagatacatggagaatccaggtgctgaacattgggctgccatgaaacatattttgcgctatgtggcaggaagtctgaatattggtctcaagttcagaaagggagaagagaaatttcctcggctagttggctatagtgatagtgatatggctggggatgtggatgatagaaagagtacaacaggggtgttgtttaagctgggagaaaacttaatcacatggcagtctcagaagcaaaaaatagttgcattatcatcttgtgaagctgagtatattgctgctacaactgctgcctgtcaggggatttggttagcacgtttgctgggagaactgcaaatgaagaagccctgttgtgtcatgttaaaagttgacaacaaatctgcaatcaatctctgcaagaatcctgtacttcatgatagaagcaaacacattgatacaagatatcatttcatccgtgagagggttgaaagaaaggaggtcgaagtggagtacacaagttcagcagaacaacttgcagacatactgacaaagcctcttggcaaggtccgatttttggagctgaggggaaagctgggtttgtctccagtgtga

SEQ ID NO: 58676 - DNA, 120 bp, Oryza sativa
  Clone ID: PAT_MRT4530_60369C.1
atgggtgcggcgcggctagggttagggacggtcgcggcgccgaccctggcgcgacgggagcaggacgctcgcgcgggcaagtgcgtatcgccgggttttctggaggtgacgctacgctag

SEQ ID NO: 58677 - DNA, 939 bp, Oryza sativa
  Clone ID: PAT_MRT4530_6036C.1
ctgcggcacgtcggcccgggggagctctctcgctcgcccgctcgcacgtgtagcggacaaactcatcgctcggttgagttcttcttcttctcctcctcctcctcctcgtgcgcgctctgcaagcctgcaaccccatgagctagctagctcggcgaagcggccggcggcgagagagggggagagtgccggtgggggcggaggagatcggtccgtacgtgctgccggccggcgagccgacgtcgggcatggacaccatacggtgctgcatcgcgtgcatcctgccgtgcggggcgctggacgtggtgcgcatcgtgcactccaacggccgcgtggaggagatcagcgggccggtgctcgccggcgagatcatgaaggcgtaccccaagcacgtcctccggaagccgccgtccacgtgccccgccgacggcgggggaggcgggatcgtcgtccagaagcccgtcatcctgccgcccaatgccgagctgcagaagggcaagatctacttcctcatgccggtgatggccccaccggagaaggagaaggagaaggagaaggcgaaggcggcccaagcgcaggcgcccgcggcggcgaggaggcggcggaggaggaaagaaaccgctgatgaggccgccggcggccgagctgccagcaacgcagcggccgcgccgcccacccgcgtcggctcggagggcgagaaggagcggctgctggccaacgagaggtacctgtcggagatcatgaaggagaaggcgtcgacggcgagagaccggcggcgcgggcgcgtcgccgtgtggcgacctcacctggagagcatcaccgaggatgacttgtaatcaaacgaggtgttcgtttttttttcttcttcttctctattttttcccattgggttcttgtttttttacttagtttcttttgccaattccttctgtttggcctccg

SEQ ID NO: 58678 - DNA, 3912 bp, Oryza sativa
  Clone ID: PAT_MRT4530_60370C.1
atgtctgatgatggcgggcgatacacaccgcccggacgccgtggtggcggtggcggcggcggaagcggcagcgggcgcggaggcgcaagtggcagcggcgcgggggatggcgcagacggcgcgaaccttcctctcgtgccacaggggagagatgctgggcacactgctcgcctcccggtgctgtcgaggaccaattatccggattgggcattgttgatgcgtgtaaacctacaggcgcaggggttgtggacggcgattgaacccggatacgcggagtaccgcgacgatcgggcggctctctcggcaatccttcaggcggtgccgcgcgagatgttgcgcgggctggcgaagcatgacacggcgaaggcggcgtgggacgccatcaagacaatgcgggtcggcgtcgaccgtgcgatgcgcttcaaggatggagagacaccggaggagttcgcgatgcgactcactgccgtcgtcgcggacattcgcgacatgggtggagtcatggaagacgaacacatcaacaagaaactgctgcgcgttgtgcccaagaagtacaagccggtggcgatttccctcgagcagcttctcgacgtgaaaacgatggcccttgaggagctcgttgggcggctgtcgatggtcaactcatacagtgatgatgaggaggaaggtggcggcgacaagctctacctcacggaggaacagtggcaggcacgcgcaaggaaacaggagcaggaaggctccggcggcagcagcaagagcaggggcagctctggcacccagaacaaccgtcggggcaaggccggtgggtcaccgaaggggaaggagacgatcaacagtgggaacaccagccgtgactactccaaggtaaaatgtttcaattgtgatgagtttgggcattttgcaaggcagtgccgcaagccgcggcgccaacgtcgaggggaagtaaacctgacgcagggggaggaggagccgaccttgctcatggctcacgtcatgggggtgtctctcgccggtgaggagacactcgggcgaacacctggtgtgcatgaggtgcatctcactgagaaaaaggtaaagcgctccccaagcttcctgtacattctgaagttgaacatggcgaggcccatctgtttggcggcgaatggcaccgagacggcgtggcgttggcacgcccgtttcggccacctcaatttccaggccctccggagattggcgcaagcggagatggtccgtggactccccgtgattgaccacgtcgatcaactgtgtgatgggtgcctcgccggcaagcagcgacgagtgccgttcccagacaaagccaggttcagggcgcaggatgcgctcgagttggttcatggcgacctgtgcgggccgattgcgccggcaacgccaggcggcaggaaatatttcctgctccttgttgatgacatgagccgtttcatgtggatacggctcctctccggcaagcacgaggcagcggctgcgatcaagcagttcaaggccggcgtcgagatggaaagcggccgaaaactgcgggcgctgcgcaccgaccggggaggagaatttacctctgtcgagttcactgagttctgtgccgatcggggtgtgagtcgccagctcacggctccatactcgccgcaacaaaatggggtcgtcaagaggcgaaacctgactatcgtcgctgctgctcgctctatgctcaaggcggcggggatgccggcacatttctggggagaggcagtcgtggcggctgtgtatctattgaatcggtcgcccacaaagagcctggatggtgtgacgccatatgaagcgtggcacgggcgacgtccctcggtcgaacacctgaaggtgtttggctgtgtcggctacgtcaagacagtgaagccaaatttgaggaaacttgatgatcgtggcacacgaatggtgttcattggttatgagcagggctcaaaagcctatcggatgtatgatccggtgtcacggcgagtttatgtgtcacgcgacgtcgtctttgatgaggcggcaatgtggccatggcgtgatccggaggtcactcaaactggaggcgaggaggatttcactgtggagtttttttccactccgctaggtggaaatcgtgttcctgacgtggttgtggaacatggaggcgcacgggaaactgaaaccgcaccaagtccgctggccacgcccgacgcggcgcccgtgtggtctccagtgacatcaagctcacctgccggtgttgagttctgtacaccaccatctgatgccagtattgaaagcgatggagctcctccccgttttcggacggtgaacaatgtgctggccaccacaactccggtgctcgatttcgactacgacgacgagtgtctcatagcggagcaggagcctttcagtttcaaggaagctgagaaggagcagtgctggatgaaggcgatggaagaggagatgagctccattgaaggtaacaatacttggttcctctgtgacttaccatctgaccatagggcaattggtctcaaatgggtttacaagatcaagagaagtgccgaaggtgagatattgaagtacaaagcaagattggtggcaaaggggtatgttcagcaacaaggcatagattatgaagaagtatttgctccagtagcaaggatggaaactgtgaggttgctggttgctttggcagcacatgagggttggcaaatacatcacatggatgtgaagtcagctttcctcaatggtgaattggaggaagaggtgtatgtagtccaaccacctggttttgttgttgagcacaaggagaacaaagtactgaagttaaaaaaggccctatatggtttaaagcaggcgccaagagcttggtatgcaaagctggattctacacttgcaaatctggattttgtaagaagtgcaacagagaatgcagtgtacactagaggggaaggtaatgccagactcatggtgggggtatatgttgatgatcttatcattacaggagctttggggacagaaatagcaaaattcaaggagcagatgagaagtatgtttagtatgagtgatcttggattactgtcctattacctgggaatggaggttaaacagactgaagaaggcattacaatgtcccaagctgggtatgcaggaagaattttagagaaggctgggatgcaaggttgcaatccttgtcaggttcctatggatgctagactgaagctgaaaaaaggagtagaagattgcattgatgcaacacagtttagaagcattataggaagcctgaggtatttggttaatacaaggcctgatctatcctactctgttggatatgttagtagatacatggagaatccaggtgctgaacattgggctgccatgaaacatattttgcgctatgtggcaggaagtctgaatattggtctcaagttcagaaagggagaagagaaatttcctcggctagttggctatagtgatagtgatatggctggggatgtggatgatagaaagagtacaacaggggtgttgtttaagctgggagaaaacttaatcacatggcagtctcagaagcaaaaaatagttgcattatcatcttgtgaagctgagtatattgctgctacaactgctgcctgtcaggggatttggttagcacgtttgctgggagaactgcaaatgaagaagccctgttgtgccatgttaaaagttgacaacaaatctgcaatcaatctctgcaagaatcctgtacttcatgatagaagcaaacacattgatacaagatatcatttcatccgtgagagggttgaaagaaaggaggtcgaagtggagtacacaagttcagcagaacaacttgcagacatactgacaaagcctcttggcaaggtccgatttctggagctgaggggaaagctgggtttgtctccagtgtga

SEQ ID NO: 58679 - DNA, 4488 bp, Oryza sativa
  Clone ID: PAT_MRT4530_60371C.1
atgtctgatgatggcgggcgatacacaccgcccggacgccgtggtggcggtggtggcggcggaagcggcagcgggcgcggaggcgcaagtggcagcggcgcggggggtggcgcagacggcgcaaaccttcctctcgtgccacagaggagagatgctgggcacactgctcgcctcccggtgctgtcgaggaccaattatccggattgggcattgttgatgcgtgtaaacctacaggcgcaggggttgtggacggcgattgaacccggatacgcggagtaccgcgacgatcgggcggctctctcggcaatccttcaggcggtgccgcgcgagatgttgcgcgggctggcgaagcatgacacggcgaaggcggcgtgggacgccatcaagaccatgcgggtcggcgtcgaccgtgtgcgtgaggcgaaggagcagggcttccgtcgccaattcgaggcgatgcgcttcaaggatggagagacaccggaggagttcgcgatgcgactcactgctgtcgtcgcggacattcgcgacatgggtggagtcatggaagacgaacacatcaacaagaaactgctgcgcgttgtgcccaagaagtacaagccggtggcgatttccctcgagcagcttctcgacgtgaaaacgatggcccttgaggagctcgttgggcggctgtcgatggcacgcgcaaggaaacaggagcaggaaggctccggcggcagcagcaagagcaggggcagctctggcacccagaacaaccgtcggggcaaggccggtgggtcaccgaaggggaaggagacgatcaacagtgggaacaccagccgtgactactccaaggtaaaatgtttcaattgtgatgagtttgggcattttgcaaggcagtgccgcaagccgcggcgccaacgtcgaggggaagtaaacctgacgcagggggaggaggagctgaccttgctcatggctcacgtcatgggggtgtctctcgccggtgaggagacactcgggcgaacacctggtgtgcacgaggtgcatctcactgagaaaaaggtgattctgaatcatgaggttgcagaagaggaggacaacaccacggaatggttcctggataccggggccaccaatcatatgaccggctctcggtcggcattcgctgacctcgacaccggtgttgttggtactgtgaagtttggtgatggctcagttgtggacatcaggggacgcggcaccgtgttgttccagtgcaagaatggagatcatcgctcgctagaggcagtgtatttcatccccaagctgtgcaagaatatcatctccatcggccggcttgacgcgcgtggctacgatgctcacatataccatggtgtctgcacgctgcgtgatcctgatggtctactgcttgccaaggtaaagcgctccccaagcttcctgtacattctgaagttgaacatggcgaggcccatctgtttggcggcgaatggcaccgagacggcgtggcgttggcacgcccgtttcggccacctcaatttccaggccctccggagattggcgcaagcggagatggtccgtggactccccgtgattgaccacgtcgatcaactgtgtgatgggtgcctcgccggcaagcagcgacgagtgccgttcccagacaaagccaggttcagggcgcaggatgcgctcgagctggttcatggcgacctgtgcgggccgattgcgccggcaacgccaggcggcaggaaatatttcctgctccttgttgatgacatgagccgtttcatgtggatacggctcctctccggcaagcacgaggcagcggctgcgatcaagcagttcaaggccggcgtcgagatggaaagcggccgaaaactgcgggcgctgcgcaccgaccggggaggagaatttacctctgtcgagttcactgagttctgtgccgatcggggtgtgagtcgccagctcacggctccatactcgccgcaacaaaatggggtcgtcgagaggcgaaacctgactgtcgtcgctgctgctcgctctatgctcaaggcggcggggatgccggcacaattctggggagaggcagtcatggcggctgtgtatctatggaatcggtcgcccacaaagagcctggatggtgtgacgccatatgaagcgtggcacgggcgacgtccctcggtcgaacacctgaaggtgtttggctgtgtcggctacgtcaagacagtgaagccaaatttgaggaaacttgatgatcgtggcacacgaatggtgttcattggttatgagcagggctcaaaagcctatcggatgtatgatccggtgtcacggcgagtttatgtgtcacgcgacgtcgtctttgatgaggcggcaatgtggccatggcgtgatccggaggtcactcaaactggaggcgaggaggatttcactgtggagtttttttccactccgctgggtggaaatcgtgttcctgacgtggttgtggaacatggaggcgcacgggaaactgaaaccgcaccaagtccgctggccacgcccgacgcggcgcccgtgtggtctccagtgacatcaagctcacctgccggtgttgagttctgtacaccaccatctgatgccagtattgaaagcgatggagctcctccccgttttcggacggtgaacaatgtgctggccaccacaactccggtgctcgatttcgactacaacgacgagtgtctcatagcggagcaggagcctttcagtttcaaggaagctgagaaggagcagtgctggatgaaggcgatggaagaggagatgagctccattgaaggtaacaatacttggttcctctgtgacttaccatctgaccatagggcaattggtctcaaatgggtttacaagatcaagagaagtgccgaaggtgagatattgaagtacaaagcaagattggtggcaaaggggtatgttcagcaacaaggcatagattatgaagaagtatttgctccagtagcaaggatggaaactgtgaggttgctggttgctttggcagcacatgagggttggcaaatacatcacatggatgtgaagtcagcttttctcaatggtgaattggaggaagatgtgtatgtagtccaaccacctggttttgttgttgagcacaaggagaacaaagtactgaagttaaaaaaggccctatatggtttaaagcaggcgccaagagcttggtatgcaaagctggattctacacttgcaaatctggattttgtaagaagtgcaacagagaatgcagtgtacactagaggggaaggtaatgccagactcgtggtgggggtatatgttgatgatcttatcattacaggagctttggggacagaaatagcaaaattcaaggagcagatgagaagtatgtttagtatgagtaatcttggattactgtcctattacctgggaatggaggttaaacagactgaagaaggcattacaatgtcccaagctgggtatgcaggaagaattttagagaaggctgggatgcaaggttgcaatccttgtcaggttcctatggatgctagactgaagctgaaaaaaggagtagaagattgcattgatgcaacacagtttagaagcattataggaagcctgaggtatttggttaatacaaggcctgatctatcctactctgttggatatgttagtagatacatggagaatccaggtgctgaacattgggctgccatgaaacatattttgcgctatgtggcaggaagtctgaatattggtctcaagttcagaaagggagaagagaaatttcctcggctagttggctatagtgatagtgatatggctggggatgtggatgatagaaagagtacaacaggggtgttgtttaagctgggagaaaacttaatcacatggcagtctcagaagcaaaaaatagttgcattatcatcttgtgaagctgagtatattgctgctacaactgctgcctgtcaggggatttggttagcacgtttgctgggagaactgcaaatgaagaagccctgttgtaccatgttaaaagttgacaacaaatctgcaatcaatctctgcaagaatcctgtacttcatgatagaagcaaacacattgatacaagatatcatttcatccgtgagagggttgaaagaaaggaggtcgaagtggagtacacaagttcagcagaacaacttgcagacatattgataaagcctcttggcaagcgatatcatggtgccacggaaggcgacaacgtagtgaggagccaacgggtggcggccgggcttgctggcaggcagagccggcagcacatgctcgtataccgcgccgatgatgaactggtcgttgttgttggagtcgtccttgatcactcggaggaggcggaagccaaagctctcccaccaagccggcgcgagagcgttggtatgcaccctgcgcctgttactgtcgttctccatggtatagacgcctttcacaagacaggcagcgacgcaccggcggtgttcctcattgtccctgcgtga

SEQ ID NO: 58680 - DNA, 126 bp, Oryza sativa
  Clone ID: PAT_MRT4530_60373C.1
atgtcgttcttgcacttgtcgccgctgcagtgcgagggccatggcgccgcaaagcacaagctattgctgtcagtctcgtggccgcgccacgccacgatgccataccctccacctcccatgtcgtga

SEQ ID NO: 58681 - DNA, 294 bp, Oryza sativa
  Clone ID: PAT_MRT4530_60374C.1
accacgcgtgcgaccacatgaggaagatgaagaacagcgccatcggtcgctacatcggtcactttgacattcagattgacatgatctaccttgagacctagcgtgttgtcatgcgcattacacatcaagcgttagaccgaccgttggaccttcactgagaccaacactggcattattggtcttgctgagggccgtgtgatgaactttgggtgcgctactgttcacacgagctgcgtcatgtcctgctcattcactaatcaggtcattgctcagcttgagctgaggactgagaag

SEQ ID NO: 58682 - DNA, 116 bp, Oryza sativa
  Clone ID: PAT_MRT4530_60375C.1
atgtgggcgaacaaggagcagtcgtgcgaagcgcttcccaaaaaccttattgccactatatcccgacgtagggcgttgaaggcgaaggttccgaaggcctactctcctgtttgccg

SEQ ID NO: 58683 - DNA, 470 bp, Oryza sativa
  Clone ID: PAT_MRT4530_60376C.1
tttttttttttttttttttgtctcgtttttttttcttttttttctgatcttttagatcaacttatgagttgtagcaaatacacgataccataatatgggttctacatctatataggaacaacaagaacgaaaagggctgccccgttcgcaaaaaaacatttatgtacaacgagaggggtcagctacagcgatcaacgaatacttctaataaggttacacaagagctcctggatgaggctgtcgcgaacaatctgtcagtcagcaacttctttcctttaaagaacacaagcatcccacttttgcccgtagatgctcatacatttattgtgcttccatttgctagcaatcctcaagttagatactaattaataccaagctgtatgtgaaatgtcctagaacctgtaatgtaatttcccttttcccttgcactgatgaggaggcatgatgcttagaaacggggcacttttgac

SEQ ID NO: 58684 - DNA, 1458 bp, Oryza sativa
  Clone ID: PAT_MRT4530_60377C.1
atggaggatcagctctccttcttccctggtggcctccgtgtcatgcccgtggatggtgacacgaagaacacgagaactgcaaccaaaacgctttctaccttgcactactcattggtggcaacgcacaccaccgcaagcgctggcctgtgcaccctctccagcgacaacatgacagacgtccaaactgtcctctgcgatgtcaaaaaggtggtctcctccggcttcgactttcgccgtgtcgtcgagaccgaacaccacatccccgtcatctacctattgtcgacgacggaaccagagcagatggttgccggtgaggacacggagttcctgaaccacctcttgctgaaggcgacctatatcgtcaggaagccactcgaccaggccacaatggcccaattgtggagagtggttgcatggcgtaggtgctgcctagaagaaaggattcctcgtgactccatggacgacatagctgcccatgccggtgttgttggcaaagacggcaatgacaacgatgtcatcatcattgaggagccgcaagtgcacttcaaggtggtgaggtcccgtggcagccggaagaggcagctgaccatcaatgttgacagtggcagcagcgacggtgcagatgccaacccaagacagaagctagagcacaagaaagacgcgaaagggccgctggggcagcatgttgctagccacttgcagccgcaggaatactgcacgaagcaacagaaggaccttgatgagcgccgtctcctctcattggactccttgttcctcaaagccatcctttcgacgctcaatgtctcgctgtgcaaccctctgatcctcaccgtcccggcggccttcacgcctcaggacgggatgacaatgaataaagacaaggctcctatgatcgagcttccatttgggctacccgtggatgacttcctcgttggacaaaccgcatatggcagtgccggaccatccataggagcccctgacgacaacgacgatgacgccgccatgtacgcctacacaagcgcactgaacaacaatgcagctgttggttctctcatggtgccaccaattgagtcaacattcaccatcatcgatccaatcgttgggaccaagggtgagggatctgtccctgttgtcgttgtgtcagaggatcagaataatgcggtggcagcaattgaagcaacagcacctaacaacgcagaactattcatgatgcctgaacaggttgctgttgatgctccggttgatgttgaagaaggcatcatgttctctctggaatcgctcttggggttggacgaggacatgatacctatggaagacgctggcggtgaggcaactgacgactcactgaacataaaggaaggtggcatggagatcggctgggacctggacctggactacatccttatgaacaacaccaatgaatttgccttcctggatgacatggcctggatcgagtag

SEQ ID NO: 58685 - DNA, 238 bp, Oryza sativa
  Clone ID: PAT_MRT4530_60378C.1
cggacgcgtgggcggacgcgtgggcttcataccgagatccagagaatcagatttttggctgtgagcattacaaaaggaaatgcaaacttgttgctgcatgctgcaataaactgttcacatgcaggttttgtcatgataaagttagtgaccatacaatggaaaggaaagcaacggtggaaatgatgtgcatgcaatgcctgaaagttcaaccagttggtccaaattgccagaccccttc

SEQ ID NO: 58686 - DNA, 264 bp, Oryza sativa
  Clone ID: PAT_MRT4530_60379C.1
atggcgcatcagtccagccaggacagccagaattggaatggcagcaatggagatggctcccaccagcttggcaacgccagggccgatcctagcgaagaccacattatggcgatgcagccaaagtatccggaaacaatctgcggaacttgggggttccacatcatccctgtcagcatggaagcccgtcctactccaaagcactaccttacctggggtgtcaagttcggctcagttgattatttccttcacgttttctcaaaatga

SEQ ID NO: 58687 - DNA, 171 bp, Oryza sativa
  Clone ID: PAT_MRT4530_6037C.1
atggcggtggagagggacgggacacggacgggcttgacggctgtagccataggagagagggacaggcctggcgcacggcccttctaccgccacgacgaagaaggcacactgaagtggccccaaccaccaaatccacatacacgtgggtatggaaaaattatgatggtatga

SEQ ID NO: 58688 - DNA, 442 bp, Oryza sativa
  Clone ID: PAT_MRT4530_60380C.1
aaaaagtaactagcatgcatggtatgccgaataatttgctaggcaatcaacactataacaccgaacatcgcaatcttattaaagaaaaaaaaaacacacacacacatactcgatcgatgaacttaacaacctgcatgcgcgtagtacatatactagcaaatgcataaatataattaattaatttccagctgaaaccacctactaattgtaattaacagtaacggctgctctcgatgatttgccaattgtcgtcgtaccgagccgccggggcggcggcgacggcgacggcggggcagccacctcgtggttcttgtgtggcacgtagtgacgagcaggcaccgctcttgccgccaccgccacgggatgcttctccccgtagccgccgccgttcgggacgcccgccgcgaactgatcatgagctggtggctgccgcggcggcggc

SEQ ID NO: 58689 - DNA, 1206 bp, Oryza sativa
  Clone ID: PAT_MRT4530_60381C.1
atggcggcttcccgcgcgcgtgggcagcgacgaggcgggcggcaacggctgcggcggctccccgtgcgcgcgaggagggcgacaacggctgtggcggctccccgtgcgcgcgaggagggcgtgcgcgtgaggcgggcggcgacgatccactgcgatttaggcaaagagaaagatgctctctctccccgctgcttcaactccggcgccgtcaccgccgctgctgctgccgctgccgcgccgttgctgctcgacgccgctgctgctcgccgctcgtgctgctgctcgctgccgctccgcgtgctgctgccgccgcaccgccgctgccgctcaccgatgccgtcgctccaccgccgctgccgctgctgccgttgttactcgccgccgctccgcacgctgccgccgccgctccgccgctgccgccgccgctccgctgctgccgcccgctccgccactgccgctcgctccatcgctgctgctcgccgctcgctgctaccgccgctgccgctgctgccgttgctgccgccgctgccgctcgccgctcgctccgacgctgccgctgctgccgctcgctccgccgccgcctgttctctgagctgtggaagaaaggagaggggagaaaaagaagcaaaaaagggggagctcggggagaaggagggaggcgtggagcggcgacgtcccccatggcggcgctggaggaggcagggcctcgcgccgacgaccgccgcgtccgccagatccgccaccttggccgggtcgtcgccgagcccgtccacctccttcctggccgcggcccttcgccgccgcctcgaatcgctcgccgctccagggccttgcgccgacgaccgccgcgtctgccagatccgccgccaacaccgccttgcccgggtcatcgccaaggcaacctgtcgtccacccccccgccacggaggatgccgaggtgctgtcggccacggccgcctcatccggcgccgcatccacagacggagccgaggccgcggacgaggaggacgagcggcgagtgcggcggagtgggaagagaagcggagctggcgccggacggggaggacaagcggcgggtacggcggtgcgatgagaggagccggaggggatggaatggataggatcgaatgggcggagtgggaggggaagggtaggtggaggaaattatttcttccactcgcccatgctaaccgcacccaggcatag

SEQ ID NO: 58690 - DNA, 221 bp, Oryza sativa
  Clone ID: PAT_MRT4530_60382C.1
ctgacttcatctgggttgtagcggcaccgtcttatacgacgacgcaactgaactccaacctgaaccctacgctgcctccattatctgctcgtactatcgggctcctctgattcctacaggagagtacttaacgagcacagatgcagtaattaccaacatctcgtattaccaatcaaagtctctagatgagctctaactctcgcccctgtacttggttggat

SEQ ID NO: 58691 - DNA, 2442 bp, Oryza sativa
  unsure (1)..(2442): unsure at all n locations
  Clone ID: PAT_MRT4530_60383C.1
gataccgacttcattatctagcttccctatctaccccgcccagcgcaaccgcaaacccactccaaaccctagctcgcctcgcctctccgcctccgctcccaagaccctctccctctcgcacgcgtctcatggccgcgagaggtcttcccatctgcgccttctagccccacgcacagcacagcacagatcgcccatggaggctcccccgccgccgccgcccgactcatgggagaccgccgacctcgacgagcccatgagccgcccccacctccccgccgcgcgccggggctacgcctctgccgtcctcgcggacgccgatgccgacggccggcagcacccgtcgtccggtcgacccgattcggttgaccaactcgatcagttcctccgggaggcgttcgagaagccgtgggagcggctctctgtgctaaggatggagcaagacattttgaagttcattcatgaccctacgcagacagagtttgacttccatggtcttcctacttcttacctgcgtcttgctgcacatcgtctggcacagcattatttcctccagtcaattgctctacaagataacggccttcctgatggatctggttctcgtatcatccttcgcaaaacatcagctgagtgccggttgcctgctgtgcgcctatcagatattcaagttaatctgcctcaagatgagagcaactctatagccaaagttgctatcaagcaaagacctcagaagcactaccataacaattccagttcaggtgctcactcttctagagccaaccttcagaaaagtgttgaagaaagaaaggaggaatacaataaggcacgtgcacggatatttaataacaacagtagcagcggcaatgctgctgatggaagaccaggtgatgaagtaactttgccaaatactctccataggtccagttccttggagctaagctcaggtaacaggctaggtgaagggcctgaaattacccttgaaaggagtttgactactgcctcgtctagcagcagggtaaatagaaacaagactgagaaggatcctgcatttaatagaaacaggcaaaacaacagggtggcgatatttcgagaccgtgagtcagatcgcaaggatcctgattatgacagaagctatgacagtgaagacaaggactgcccttttgtatcaagccaactcatcatgaatggctttacaggttcatacactattcaacctttgtatgcccctgctgttaactacaacactgagttccctcagcttgggtctcatgggtctccagttcctgttgaacagcagcctcagtcaatagcacagcatattcctgggccctggtcaccggctcaatcgcctaatgcgattgggtacagacctccggatggttccatgccaccaccttacagtcctggtcatgctggtgctcccattaggtcatctgtttttatgcatactccccaacaatttgctatgccttcacggccaggagtcacatatgtacatccacaggaacccatgcgtccatttgcacagactcaccaacaacaacctgaagctagtttgcgcttagcccggccccgatgaggggcctgggcatgcctgcaccctgccagcgtgctctgaatgtgtaaatcggatgtcatacccgattcatttcttgctggtagatggtagcaggcataaaagaaccgagaactacatatctgagctaaacaatccacttgatcttgttagcttgtggttcttggtgttgttgcgccctgcacattcaggtgcaggagaggcaccttcttcgtcctggaagtaaattgcagactgttgcatacgggacctcaagtccaatgcatagaagctgagaaatgaaggggagagcagtcatggctggcatgatcggtgctgttctgctgctgttccttgcagttcagttttgagattcaggaggggcacattgcccccttgaagtcaagcactcagcgcgggtgatgagaagagaatcggcacaacatctaatatgtggatatttattcaggacgtgctgcttggtccttgtcgcttgctgaagcttcgccttcgccttccacctgaagtggcgtcagattgactggaccgaagatgcagcgctgtagtccccacagtgaacctaagcccctcgctgaggcttaatcagtgtctgttatagatcattgtagttgtagttgagtaaccccaactttgtaactccactctagtaagttaaaacaatgtactaagctcgattgccaattgtactagtagcactatatgtattgtcgtatggactgggatgtcgcagttactgcttgtacagtggagctgcgtaactttaacccattactacagctttatgccgccgattttattaaaaccctttgtgaactgtattaaaaaaaaaaaaaaaaagaaaaaaaanaaaaaaaaaangaaaaacaaaa

SEQ ID NO: 58692 - DNA, 1167 bp, Oryza sativa
  Clone ID: PAT_MRT4530_60384C.1
atggcggtcggtgttggtgcaacgacacccatcgacaaggagcgtcattcccccaccgttcgacggaatgatcacgatggtggctgccacgacactaaccagccttgccacgttggtgtcgtccggcgatggcggtcatggaggaagctgcctcttccttcctcctcccacttcgaccaaagctcaacgcgctttcttgaccgccacttcctccctcttcttctttgtgcccgaattgggaatgaagatggcagtcgagcatcgtcaagccaaaggtggagaagatgggggtggcctccaccactaccatccctcgccagcaacgtcaccaagaacgcgagcaaaccaaccccacccgccgcggcgcggcggggagggcgtacactctccttgtcggcgccgccgcaacattgcgaggccacgcgacggctcctcgtcgccaaccttcgtcttcctccactccacgccgatcacaagcacgtcgccgacgatgatttcaccagcagcagctacctcggcacggcggggaaggggtacgcgctcctcgtcggccccgccgcatacccgcgacgccacgtccgctcctacacggcggcggcgaggggcggcccgctcgccctccttgtcaccgccctcgacgaaggtctcggctccatccacctcgtcgccaccaacaccaccaccgcttctggagctctcaccgaccagctcgtcgacggtatggaagagctgttccagttcgtcgttgccaggattttctccttcaccgaccttctccccaccagcgtccgccagctcgcgcgctctgccaccgccaatggttccatcaccgccttcaccgaccttctccccaccagcgtccgccagctcgcgcgctctgccgccgccaatggttccatcaccgcccacggttcggctttctacacagacctcgtccactacggcaagtgcagcagcgccgcctccttcagcagcagtctcaagggatggatccctgccatctttccgtgctccacctctcccgcctgctgggcaattcagacagaggacaagggagagagacagcagcagcagcagcaggaggaggaggaggaggaggaggggcagcaacagcggtggcagcagcagctgcagcagcagtagcagcagcaggaggagcaacaacat

SEQ ID NO: 58693 - DNA, 1255 bp, Oryza sativa
  Clone ID: PAT_MRT4530_60385C.1
gcagagctagagctaccagcacgtgggcaatgtctatcttcgattgctaatggagaagagcttatatttcggctcgaggtcatgtaagagtctcgcccatctctccattggagtcctggttatggcatgaccttaagttgaagtgccttgaccttgcttcagttgagcataccattgcgcaccagcattcgcgtcttgtttggctcaaggagggtaacggcagcaccaagtttttccatcttcacactaaggccaggcggcagaggaactgcatcacgcgccagcgcgcttgcctctactcacttttgcagtgtcatggggacgttcatcgagcgagacctttgtcttgacccccactctcttggtctctattcggtagactttgctggcctagacaacatcttctctgaggatgaggtgtgggcggtaatcaagcagctacttttagataaggcgcctgactataatggtttcacaagccatttctacaaatcttgctggccaatgatcaagtggaaatactggttgcccttaacaccctctttctggcgaacaaccatggtctcgcctccctcaacgatgccctcatctctctcttgcctaagaaaaatgaggttgttcaagttaacgatttccacccaataaacctcatcttcagttttggcaagctgttttctaaggtcctagcgtcctgcctcactccccacctcaacgagctggtggcggttaatcgaagtgcttatgtcaaaggccgttcactccataacaacttttgctatgtccagcttgcggccaaggcactccatgctaggcgcacgccccatctgctcctcaaagtggacattgcgaaggcctttgacaagttagttggctgttcctgctcaaggtgcttacctatcttgtgttcagcagtcgatggcgtgattggatctccctgattctccgttgctcctcttcccaggtgctggtcaacggggtaccgagccaccatttcctacactgtaggggggctctagcagggcgatcccctgtctcccatgctcttcctccttgtcaagtatgtgctaaatgggcccttcaatctgtgtgcactcttgtgattagccggaaatattatatgtttttttagttcactagctagcactgatcatagcatttacataaatccatacacatccaatgtagcaacaaacccaaagtaggtcccctcatatgtctgatgcatggccatctgtagaaacaagcaaaagaaata

SEQ ID NO: 58694 - DNA, 213 bp, Oryza sativa
  Clone ID: PAT_MRT4530_60386C.1
atggacatctctaggacaaatgaaggctacacgagctgcggcccgttagtcgagatatcatggcacaggcctggtgtcctgctgctaggggctcaatcctgcctgcctgtcctggaggttccggccgtaggaggggctggtgaagccagctgtgaagcaggagtgaagatctgggagaacccgtcgcagaacctaagccaccctctagagtag

SEQ ID NO: 58695 - DNA, 293 bp, Oryza sativa
  Clone ID: PAT_MRT4530_60387C.1
gcgcccacgcgtccgctcacgcgtccgcacacgcgttcggtgtacgcggctgcggttcctggaggccgactacgggtggaggccgtcatggcacgtgataccattcgcgtactacccgtgcatgggagcggccatcatatgatcaccgacggtgcccaagaccagcacctggatcatgacacagtgcatatcggaccaccacctgccggcgatgaaggaggagagcaaggccttttacaggtaatacgcttatgaaactggaactcagtgatcgttactacttctatgggctc

SEQ ID NO: 58696 - DNA, 334 bp, Oryza sativa
  Clone ID: PAT_MRT4530_60388C.1
ccggtcagggtacgctgtacaatccatcccattgaggcttcgtgttttctgcatgtatgcagaggaacaacctgcttgactagtttgacatgttccagtcttttggatgaaaaaaaaataaaaaataaaaaaaaaaataaaaacaaaaaaaaaatctccctcctctcctcctccgtcgcgccgcagacgccaaccccgatcccgatggccgactccgcctccgaagacaacgccggatccgacaatacgctgtcccaaaacttccgcacatccttcaacaatccgtcgaaagatcacaggaccgtgcgactcccccgaaaaccgaattgatctc

SEQ ID NO: 58697 - DNA, 749 bp, Oryza sativa
  Clone ID: PAT_MRT4530_60389C.1
gcggcaatgaggagctgtgccactcgtcgccagctaccgcatcagtgcctatatcgcatctgattgccaccaccatcaaccaccaagatcccgccgccgttcccctggtcctcccactgccacgagccgtcgccgcccaacaaggactcgaaggtcgaaggtgggcgagggactcgaaggtccactactacatgaaatatttttccgtgcgggtggaatcgattttcgcgtgcggagcttccacctgtctggaaggcggcgtctgcgaaaatcccgattttttcatgcgggtgacgcacccgcacgcgaaaatcgtgtgcggacgatggatccggcctccccacggtggcaggccgcggatccagcctccccacggtggcaggccgtggatccagccttcccgcggcggtcggcgatggatccggcctccccgcagcagtcggcaatggatccggcctcccagcggtggtaggccatggacccggcctccccacggcggccagcgatggatccgacctccacgtggcggccggagacggatccgctccgccaacaccaccgtagccgatgccgccaccccggccgccgatgccgccgcctccgccaccctaaccgagtgcaccggcgtcgccgaggaggagagggggacagggagatgggaggaggacagggagagggagagggaggatggcaggatggggaggaaatggcagcgcgcgcccatgatgggaggatggggaggaggataa

SEQ ID NO: 58698 - DNA, 1058 bp, Oryza sativa
  Clone ID: PAT_MRT4530_6038C.1
atggatttattgcgtcagccgaggggaggggcgcgcggaccgggtccacgggagtggggcccacgcggcagccccacggtccacggtggaccgggcgcacccgggctcacaccggccggcgccgtgggtcccacgcgtcagcgcacctaagggcgcgggcggctgacagcggggccccacgcggcagccgctcggtgcgcccgaaggcgaccacgccggcgcacggggggcacgacggagcgacggccgagagaggggagggaaggggggaaacgaagcggcggtccacggctcaccccgggtcgacggcgacgacggaaacggcgaccggagcggaggaaggtggcggcgtggctcgggtggacggggtcgacggtgctccggcggtcggcaaccgaaacggagaggtggacgaggtcggcgagaatacggcgaagccgaaggaggcggcgccgaagcgggaagtggtccggggcgacgacggcggcggaccggagctcgacggcgacggcggagagagagcaacggcgcgagctcgattccggcggggagagagggctgtgagtggcggaaacggtggagggaggcacggggagggtttatataggattgggggtgagagggggcggccggaggagggggaaacgggcgcgggagacccggccgccattaatggcgccggcgaggttaggggaggagtttccaaacgaatccaagggagagagagagggaaaaatggggggaaagggggaggggatcccggggaatatttcccccctattgattgcacgcggggaggacgggggcggcgggattcgcggcggcggcggcgctagggcgcgggcgaggcggcgggagcggcgggaggaaggggatgacgggtgggccccacccgtcagcgagggtggcaggcgggcccgcccgtcagcagcacgcgcgcggggaggaggccgaatgggccgcggggggggggggggaaaggaaaaaggggaaaaaaaatgggccgacccggccaaaagggggaggggggaaaggactttttagagcttttcttttta

SEQ ID NO: 58699 - DNA, 384 bp, Oryza sativa
  Clone ID: PAT_MRT4530_60390C.1
ctgcaggaatcggcacgaggagaagttcgtcatctggcaacgatgagcagaggtgcatgcaatccctttcacgcagcttgacaatgcccaatcttctgagctgtgtcaggttagctagctcctcgatggtcccatttccttggtgtgctgcaacataagtcagcttctgcagctcctttaaattccctattcctcggggaagtgtgactccgagcgtatagtaatatggcggatgccgaccggagtaatatcggtaagcaagtaggtgtcgaaggctttcaagcttggtgattcctgaaggcagctgagagacatatgtacctttcaggtccaatgtctgcaagttcatcatcttcttcaaagactttgggagcttgtcgatcc

SEQ ID NO: 58700 - DNA, 363 bp, Oryza sativa
  Clone ID: PAT_MRT4530_60391C.1
atggatctgcctgagttcctcgccaagatcctgcaggcgatcgcggacgcctgcctcgacgacaacaagcttcccggggcgcttatctcgtgcggcgtcctccaagccgcggctgcactctccctcgtcttcttcatcgctccgagcggagtcttcggcaaccatggtaaggcactccactggctgtactacggaagccttgtcaccgtggtgctcgtcgggtttgtagaggcttctgtcgggttttgggtggcagacgatcgcagttctgacatgtgcttacgctgcctctattctacttccgatagcgctgcacatatttgcactcgcgttcagaaggcaaatgcagcaaacaagttgtaa

SEQ ID NO: 58701 - DNA, 1916 bp, Oryza sativa
  Clone ID: PAT_MRT4530_60392C.1
tgtcgtgcgcaccactcgcccggtcgccccatccccactctggcactccagcgcccaaaaaccttcgcctccgcctccgccatgggagaccaccgcgccacggccaaggtccgcgtgaacggcgcgccggcagaagcgacgctcttctgcaccgacccgccgggtgcagctaatggcggcggcggagatggaggggagctccggtggcggtgcgctggtggcgccgcggcggagcgcgtgctgtcgctggacgcggacgtgctcggggtcgaggccaggggtaaggaggtggtcgtgaaggccttcgtgctgccggcggacgcggcggccaggtcggtgtcctgcgccgcgggtgcggggaagggaggaggaggacggaggaggcgcaggagggattacgtgttcgagatggccgccggcgaggacgccgccgcggcctggtgcgacaggatgaggggctccctggactctctcggccggcctaagagattgttcatcctggtcaaccccttcggcggcaaaaaatgcggaaagaagatttacgaggcagagatcaagcccctgttcgaggccgccggtgtcaacgtcacaatgcaagagacccggtatcaggggcacgcccggcaggtggcgtcttctcttgaccttgcgcgctacgatggcattgtctgtgtcagcggcgatggtgtcctcgtggaggttgacttctttactgatatactcgtatatccttttcggggaatgcgtaaaaggcttgcgtatgattgcgttaagagaaaaggatatacttctatatctatcggggaaagtccagatttgcaagaaaggctcgcaaaaagtaataagaagaaagatttgcaagtagtaaatggaattctacaacgaatggattgggaggaagcgatgaagataccgattggggtggttccagcaggtacaggaaatggcatggctaaatcgctgttgcattctgccagtttggtggctgatatagatattgagtctgagaagtacaggtggatgggaagtgcacgctttgatttctattttcctgcttcccaagcaagaggaagtttgggtgtctggaaatctttgttggaaaatgatgccttcagtcttaaagatactcttgcactatttcaggctttggttcgcataatgaacttgagaaaatactacggaagtattcagtatgttcctgcccccggctatgaggcatatggagatgtcgtcaagcaggttgagaattgcactgtagaatgccaagaacagattgggaagtctttgtgttcttatcaaggtccttccgttgagtttcaaggttcagaatggagatcccttgatggtccatttgtgtctatttggatcaacaacgtgcaatgggctgctgagagtatcatggcagctcctggggccaagttctcagatggctacatggatgcagtcatagtcagggactgtccaaaggctgatcttttagccctactgatgaagatgggcgatgggagtcatgtaaaatcaccatacgttacgtatctaaaggtgagatgtcttcggttatcaccaggccagcttgtggagaatccaaaacgaggtggcataatagacgtggacggggaggctatcgctagaggagaaggaacgtacggcaaaaaccagaaacaggacgtgatgggttatggcccttccattcagatgacagtgcaccgagcgttggccacaatgtattgtcccaaatgacccctttatctcctctctctcccgagattggagtatttattcgtgccaattgtttcgctctttgttagaaaaacctggtaatcttgagcagtattcattagaaatatcttttgaaaaaaagaaaacgctgatacaccattacaccttcgcatgaaacaacataactggattatttt

SEQ ID NO: 58702 - DNA, 1453 bp, Oryza sativa
  Clone ID: PAT_MRT4530_60393C.1
ggcggcggcgcaggcgcaggcgcagccatgaacccgatccgatcggccctcgcgagggcgctcctctccccgaagccccgcccgccgcgcgcccgccactacgcaacctcctccaccggcggcgcgacgcagccggagagcgtggcggcggagatggtccgctacgccctcggcggagccaggcccgatgaggcgatgcggatactggagcagggggcctcgaacctgcagggaggcggcgaggggtgcggtgaggccgtcgggatgctcatgctcgcgatgtctacgctgctctatcggagtggaagacgccaagaagcaatggaaaaactcaaggcaaccaaccaagttgctcctgcagctttcagagttgcagcatgggaagcaacaatggggctgtgcatggaagcgggccaggttatcaacacctcagtgtccccagatgatttggtcgatctatcaatcaaggatgataatatcaaatggtcagatcagggccatctgaaatgtcgggttaatgctatcaaagggcttattgcacttctaaatggagagacggaatcagaaaatgctgtactttcatattgtgaatatctgcactgtgttggggattttcctttggctactcaaatgtatgaaagggttctggaggcattaaccatggaagacatgtctggaaattttttagccacatgtaacatggttcctgaggaggtttctcttggggccacctgttcatatggccagcttttatcacattcagggaagttcagtgaggcagaggattatctcacaagggcgctaaagaaggctgaagatcaatttggggcaaatcacccaaaggttggcattgtattgacttgtgtagctagaatgtacaaactgaaagcaaaagcagaaggttctagctcaataatggttcaggaggggttatacaggaaggccctagaagtattaagagcccctgccattaactctgagggtgtgagcaagcagatggattggagggacatcatctcccttgctagaggagagtatgcagaattgttgcttattcagtcaaatagaagagccgaaggtgaacggatgaaagaatgggcagaacatgcttggaggaatagtagattaacattagctgaagccttggaattttcaggaccttcaaaaccaacagttgttgatacccggatcggcagggtcatgtagcctccacaatctaacgaatggtactatgcaataatctgcggttgtaagcctgtaaatgcaccaatatatatatgaatttctccttcagaattttgcgcctaactgtttttagaagaatttaacatgcacggaccctaattgcataaatgagatttattgctctagagcatgtacaacagtgcttaacggactttctccgttgccatgcaaaataaatttgaataaatttggtaaaaaaaaaaaaaaa

SEQ ID NO: 58703 - DNA, 248 bp, Oryza sativa
  Clone ID: PAT_MRT4530_60394C.1
ttttggggttttttttttgtttttgttattgcaaaagaatgtttcaattcaccgcaacatttgatccgtacatagtaaaacattgggaatacactaaacgaaacatttttgatggaacattttacagaggcgatttattgcaacggcctgggtgggggagacacgtggcaggtgcggcgcaggacctgactgtgagggtaacatgcgatgggggcacagcttactattaaacccaaaccagcaaagtt

SEQ ID NO: 58704 - DNA, 1383 bp, Oryza sativa
  Clone ID: PAT_MRT4530_60395C.1
atggcgaagggccgccgcttgtggaaaaccaagcatctcacactgcgcccgccctgccacggcggcggcgatggcgatggcgatggcggtcacccagactggattctcgtcgacgtccaggcctacatcgccgaccgccggaacgccaccaccgccaccgccatgctcagcaacggcggccaccaaatccaggtcaccatctgcgtcgcgccgccgccgctcgtctcctacatctgcgcctggtcccccaccacccaccccgccgagctcttcgacacggagcccaccgtcgaggccgtcgacgccgacctcctcctcctccgcatccacgtctcgctcaaccatgtccacgacctcgtctaccaggcatccatgttgccatcgctgacgctcatgcccagccaagatccttacctgcacgagcccaactgcatcgcgctcatcccccgctcctcccatggcttctacatctccacgctcgacacggatctccgcagtgggattgggcgatacaacctctgcctcttcgactccaccaactccaaatggagccatgaatcgctctctctggatcagctgcgcaatccgcctgacaaaaacgaggtgctccatatcacggagaaggtgatcaccttcatcaacgatccacatctggttgccttcgttgatctctggcggggcatcatcatctgtgacatacttgacaccaaaactcaaactgcaagctatgtgccgatgctcaaggagatcatcaacctccgcagaacccgagcatcgtcgatcaccagggacattgctgtcgtcaatggccgcctcaccgtcgtcaggctcaccactgtctttgatccagatatcaatggttgggactgggatctgtccacatggagcagggcagtggattgtttggagcaggaggattggcgcgaggactctctggtcgaggcctctgacatcttaatcgaccacaacatctgcaacgttgagctcttgcctaagatacaggggcaacctaccatggctaaactccacgttgctcttcccactctcagcttgactgatgctcaggttgtttatgtcatgggcaaggttaacgaatccgatgaaaaggctgtgctgctgtctattgacatggccaacagaaggcttgatgcagtatcagtgtatgacgctgcaagaatcctccactactttgatgtctgctacacgcagtctaccatcttccgatattccgccccttcttcaggtttaaatggaaacctgaaacgaccagggaagttccctatgccatatcctcgcaagcaacaggctgtaaatgagccatttcttccggatgctgggagaggtttagaaactgaagatagggatactatggactgggagtag

SEQ ID NO: 58705 - DNA, 501 bp, Oryza sativa
  Clone ID: PAT_MRT4530_60396C.1
atgggaggtggaggagggaatagatactcgacgaggatccagcctggacccaagccgccactgtcgccgatcgccaagccgcctagtggaccagctgtggtgcagcccaacaaggtgtctaacacggccttccaggtcgagtccgactacgccgttgcatcactatacacgggcaatacaagtccgaggcagagtctaattgcatcgaccaatttcaggttcggagaattaaacaccgcccgatatccgacgtcggagaaagaaataaactccgaacccccttggccttgggtgagctcaaactcctccagtacagcgttagcgtcgcttctctacaaccactacaccccaagtggatgcagctgcctgaaagggggttcggagaattcaactccaaacccccacctcccgattccagtatttgagggattcggagaattaaaccccgaccactacgtaccgctccagcatggtgggaaaattcgactacgaaccgcctga

SEQ ID NO: 58706 - DNA, 601 bp, Oryza sativa
  unsure (1)..(601): unsure at all n locations
  Clone ID: PAT_MRT4530_60397C.1
tttttnttagtggccccaaagctcacaaaatcaagtcttccataatttgcattacttggcttattacatgctttcaaaacaaagccccaagcccttttttttttttgcttacaaacccaaaatttatacaacacttttccaatatcaactatgcggctaaacagcacacatcatgaaaaaaaaaatgaaaaatgcagcctcgccagcaaagaactactccagcacaacgttttccaggcaataccacgataatgatcctgatcagccgtgatggctgccccagcatcggtacacttcaacgaggattctatgcggattgccccggcatcggtacgctgtcatgtacctcgaatgatcaggcagtgtatgctatatactgctgctgacaccaatcgcaagcattgtatagttaccacttaccactggttgttctgtgggatgaaatgaagaaacagtgattgttgttgtctgttctcaatgggcaggatgtcgctctcgcttcccattaggcgctctattcggggacggcgttttgccacagctagctaatctcatcactctttccctctcaagctcccccacgcgtccgcggacgcgtggg

SEQ ID NO: 58707 - DNA, 108 bp, Oryza sativa
  Clone ID: PAT_MRT4530_60398C.1
atggagacgaaggattcctggcaatctgtaatagatagagccaagagctacctaatcgaggcttccaccatagtggaggttgaagtttccatggcagcacaagtgtga

SEQ ID NO: 58708 - DNA, 518 bp, Oryza sativa
  Clone ID: PAT_MRT4530_60399C.1
tgttgtgcaggcggctctccccctggcagtgacatcatttgtgtacgctgaagagtacaaggtgcacgcaaacatcatgagcacaggggttattcttgggatatttatatcacttcctgtggcaattgtttaatatattctgttggggctgtgagcctgtgattgagacatctaaatttagtcgaaggctaattaaagttgcatgtgtgctgatgtgcatatatgtaggaagacagaattcaaacagtaaaaatactgaaggatgacaacaaggtgaattgatttccctccggagcctgaagattggggttctggcgagaaatacagtgaaatgtgactgtaatgtttggtaataataagatgtcacaaaaacccggcatatatactgaaacttttgcaatgtgcagcaagtattcaatgaacagggcttattacagccccccagttgattcttcgaaattaaaaacgtaaaaaaaaaaataaaaaaaaaaaaagggcaaaaaaaaaaaaaagataaa

SEQ ID NO: 58709 - DNA, 5352 bp, Oryza sativa
  Clone ID: PAT_MRT4530_6039C.1
ctacaataggaatttgtagccgctctgtcctcgtgggaatggcccaagtatatctagcccccagcacgagaacggccaagtcagagggattgtttgaagcgcttgtgcaggtagctttgtgtgtttgctgtgaaattgacaggcttcacatcgctggaccatgtcgcatgcatctttgagggctgttggccagaaaaatccttgtcgaaaggctttgccgaccaatgtccgtccgacggcgtgtgacccgcatatgccttcatgtatgtcgaggaggagttgtctgccgtcgtcgatagagacgcacttgagaagtatcccgtttggcacctttttgtataaatcgttgccgatcatacagtagatttttgctttacgggttattttctcggcctctgtgtcattttcgggtaactcctcgctgttgatgaatttgattagcggggtgcgccagtcatctgttgtttcaatgtcagccacggcgcgttctacctcgatgacatctgagctgatgtcgggggtgcttgggacgacttcgccgctgacttcttttacggagggtttcgtcaggacgtcgagaaaggtgtcgggctcgagcggttctcgtctggatgcgcgtcgggctaggtcgtctggctcgacgttatccttgcggtagacgtgtcggacctcgatcccgtcgaacctcttctcgagcttcctgacttctgcaaggtacttggataactcggggttagagcatttgtagtctttgtgcacctggttcgcgactagctcagagtcccctttgacgattagtcgcttgaccccaagtgcggctgcggctcgtatcccggcgagtagcccttcgtattctgcagtgttgttggttgccctgaagttgaggtggattgcgtgtttgaattgatctccggatggagatgttaagataagtccagcccctgctccttggctattgagtgcgccatcgaacgccattgtccatgtctcattgtcgccttggttatctgacttgttatctggcatggtccaatcggccacgaaatcggcgagtacctgagatttaatggctgtttgcggcatgaagtggacatcaaattggcttagctcgactacccatttcgcaatgcggccgacaacgtctttgtttctcacgacttcgccaagagggaaggaggaaacaattgtgactctgtgggcttgaaagtagtggcgtagcttccttgatgtcatgatgattgcgtagagcagtttttgaatctgtggatatcttgtctttgcgtcatggagagcttcgctgacgtaatagactggtcgctgtactttctctcgctcaacgacaataacaatgctaacggagtgtggcgtagcggcaatataaagaaataattcttcattaggttggggagcaacgagtacaggtgggtttgataggtagcgcttgagtgtaataaatgcctctttggtttcctgcgtccatacaaatttgtcttgtttcttcaacaaggcgaagaaaggttgtccttgttctcctatcctggcaacgaatctgcttaacgctgccatgtatccggttagcttctgtacttccttgagtctcgtgggcgacttcatgttctcgattgctttgatcttctcaggatttgcctctattcctctgccagaaacgaggaatccgagtagcttgcccgacggtactccgaacgtacacttctctggattgagcatgagacgatatcgtcggaggttgtcgaacgtttcccggaggtcatcaatcaatgagtcgcttgtcttggttttgacaacgatgccgtcgacgtaggccgtgcgttggaaagtgttgccagctgttatcaatccgaagggcattttgacgtggcaaaatactccgaacggagtgatgaacgctgttttctcctcgtcctccttcaccatgctgatttggtggtagccagagtaagcgtcgaggaagcttaatagttcgcatccggctgttgaatacaccagttggtctattcgagggagagggaagtgatccttggggcacgccttgttgaggtctgtgaagtcgacgcacattctccatttaccattggctttccgcactataactggattggcaagccactctggatggagtacttccctgatgaagccagctttgagaagtttgtcgagctcttctcgtatggcttgttttcgatctggtgcaaatctccgcagtctttgtttgactggcttggcatcgggtcgcaccattagtttgtgctcaatcacctccctggggacccccggcatgtcggacggttgccaagcgaacacgtcggcattgtcgcggaggaaggcgatgagcgcgagttctttcttgggtggctcagacgtggcgggtggagtgggcgtttgctcgaccatgtcgaggcttcgcttgtcgcactgcaccgccagttttgcgttcccttgaatagtgattgtccccttcggccccggcatcttgagtacttgatatgcgtagtgggatgcggccacgaacttcgcaagtgcagtcctcccgatgatggcgttgtaagctgtatcgaattcagcgacatcaaaggtgatttgctctgttcggaagttgttggcttggccaaaggttacaggcaacgtaatcttgcccaaaggtctggatgatgattggggagtaatcccatggaaaggttgatcagttggcgtcaactcactttgtggaattcccattgcctccagagtgctggcaaaaagaaggttgatcgagctgcccccgtcaatgaggacccgtgctaccttgatgttccgaatagtaggttcgaccacaatcggataccgtcctgggataaccgcggtcttgggatggtctgcttccgagaactccatcttctgctcggaccacttcatcttgggtgcagcccccgccaagatgtgcgaaacatggaggtcggagtctgggtacgcagagtccgattcgtgaggaggcgactcctcgttcttctcgacaacgcgtactcgcttgcctttctcaaacgccatgtgcttctcgagcgactttttgaaaacaaggcaatcctccagagaatgtctgtctgttttgtgtatggggcaccatgatttctttgtgtcgctgccttgtgggtccgggcgcctgggagggttcgcgtactctgctgcgagaacttccgcttgagctttccttttcccgtttttgcgatttttcttcttgctcgactcagatgtgtctgcggctgactttttctctcccccagtcttcggcttgtcgttcttgcgtcttagtgcgtcgtcgacgtgggcgcatctttcaacgatctggaataaccttcgagtagttgtgatatgccttgttgccaactcctgggtagtgtagcgatctctgacgccagacttgaaggcgcgaattacagaagcgtcggtgatttcggggatggtattcctgcattcgttaaagcgccgaacgtattccctcaaagattcacctgagttctgtgttaacgcgtgaagatcgtcctcgatcgcgtggcgcttgtatgttccttggaagttggcgacaaactgctgccacaggtctgcccacgaagaaattgagtagggggggagatgcatcagccacgaacgtgcagatcccttcaacgcggttggtaaatagtttgccaccgcgttgtcatctgctccagcggcataaagcactgtcgagtagacttgaaggaattcttctgggtcgatgctcccatcatacttttcaatagctccgggtcgaaatctctcaggccatcggacatcacgtagggaacgaccgaaagccctgcacccagcgctcggagcggtgggttgtcggtggtcgcgtgaccttcgtggatgtcggtctgacaatgaagaggacgcagaggatgatgatgatgacgatgggtcacttggttccggcgtgcgattacgagggtgacgacctggatctcgggaatcttgtcttcgtctctcgttgttgtctcgacgccgatctcctccatcttcgtcgttacggcgacggccgtgactagtgttgtctggccctcgccgatcatgatcatcgtggtctcggttatcgtgtgggcgacttcctcgatcatggcgtcgtgaggagacatggtgccgagagcgatttgcttcatcccgtgtgcgtcgtgcttctcggcgcccgttgatttgatctcgaaggtcacccgtgccacgaggtgggggggtagctcgttgaggtgattctctatgttctggaatttcgccgttagcatcgctgatgggtaatcggttttgttgcgccgcggtggcggcttcttcgaacgcgttgctgaggttagccaccgatgcccgtagtcgttccgtccaacgctcgaggtcgttgttcaggacaggatcgtaaggtgtttccctcaatatggcttgaacagccctgatatgttgggctggggtggtcgattgatccgccgtctccgcgtttgcttgtgctaacgtgccaacgtcatcgatagccaacacctcccgcgccgcgtctgatgtcgatgacccataatcttcgaggagatgtaaaacagatggttcgtggggattaagatcgattaccccaatgaaccgatctggggccaaagtcgctccttgttccttgccgttatcccggactgggacgtatgacttaggagacggagtttttatggcgccaagtagaactttgcaactcgagaggtcgtgattctttgtcttatggatgggacaatagacgttccgagttggggaagtacgctggattccacgttctttgcaggcgcggatctcagcacgagcgttgacgaatacccagcaatcttgaagagtatgtttcttggttttatgaataggacaccaagacctgatagtttcggaagtcatctttgctggcctgcggtttgtgtcggagggacaaggcctggtcgcatcagaatccttcacgaacttagatgtagtcagcaatccgttctccgtttcaacgggtggatctttcgacgtagaggcgtcttggtttgtaaccaccgcgttctcgtacccagtcattggaggactggttgagatcggcattgtggtgtaaaccggacagacgatttcgccgacttgagtccataccagcattgtcgaggtgggaagaacttgaccggaactggtgttgacgttgttgtcgacgaagcttgatggcataatagtagaaccttgaataccaaggccccctaactggcgcgccactgtcgacgggggatacccgtagaccggatatagagggtattggggtacgctggtataaggatctacgtaatacgacat

SEQ ID NO: 58710 - DNA, 443 bp, Oryza sativa
  Clone ID: PAT_MRT4530_603C.1
agagcccaaagaacaattttctttgaaagattggacatttgaagccgcagaaaagtaatatttcaacagtgtcatgcagagtttcagtatctatgggttcatatacaacatggattccctggaaggacaaaataaatgtttttttttggaacaaaaattttaccatacagaaaaccgggttgggctggcttattatcacaaaactgctgtaaagaatgcccttggagttttaactcctcgctgttgcactggaaatttcggaaccacaccttttttttttagttagcggcttcgttcggttcaaaacttacgataggcaggtttcttctggactgaggagatgttaatctcctctccaggggtgacttcctcttgctgacgaggaacctgttcacgcccttcctcatcggctttatatacgggaagtcctcgtcagggatgtt

SEQ ID NO: 58711 - DNA, 381 bp, Oryza sativa
  Clone ID: PAT_MRT4530_60400C.1
tattttgagagactgctctccttctgcgaagacgggcaatcgataccgcgggggtgaggctccgcacgaggcatttctagaacatgaccatggcgacacttaccgtgccgtggatcgtgacgacacgtgtacgacgactgacgagcagctgcacagggcctaacaagggtgcgctacgaacggaggactaaggataggcatcgagggccacggcgatgcggtgcagggggaggacattcgaccggccgacaccgacacctatgggccggagctgctacttaacatcaccgacgagatctgcagggacttcgataggcccctgaacgtgtggacactgggcgcggcagatcgcgacccgaagcctcggcatgctgtccatga

SEQ ID NO: 58712 - DNA, 1091 bp, Oryza sativa
  Clone ID: PAT_MRT4530_60401C.1
atggatgctttggtgacacgacgcaggtatcatatcctccgagatagagtatccggaccggttgattctgctgccgccgactggtatcctcgcctatacggttggttggtcacaccacctttcatgggcatccacatccccaccgacggcctgcctccgtcgccactgactggtgtctctgcctacacggctggsctattatgccgcctttgttgggcgtctacgacttcaccgccggcttgccttcgctgccgccgactggtgtcctcacctacacggatccagatccagatatgcataataggattcatgtctttcaacgcttatctcctacgcttcaggaatggattagtcagaacatcaccaccggcttgccttcgccggcgccgactggtgtctcttcgcatatacgccgcctcattcaccggcgacaggtgttttcgcctatacgatgggttggtcacaccgcctttgatgggcatctacgtcttcaccgaacggccgcctcgtctgccaccgactggtgtctctgcctgcacggctggcctattatgccgccgttgatgggcgtctatgtcttcactgaccggctgccttcgccgccgcagactggtgccctcgcctacacgcgtctacgtcttcaccaccggcttgccttcgccgccgccgactggtgtctccgcctgcatggctggcctattatgccaccgttgttggacgtctacatcttcaccgacctaccgcctcgtataacgccaactggtgctatcgtcttcacagttggccacatcgccgccaccactaataggcatcatcatcttcaacgcaagctgcctacgtctgctgccgactgttggcctactacgcatttactgaaggatgaccttgccgttatcatcggctgctacactgctattgactggatcattgacatcgtcatcttcataaacatcctgtcaagcctcttcggctatgcctactctgctgccgttggtgggcaacttcgtcatcataactggctgtctccgttgccaccaattgtcattatcgccgattgcgtttgctgtcggcaattgttttcttcttttgca

SEQ ID NO: 58713 - DNA, 837 bp, Oryza sativa
  Clone ID: PAT_MRT4530_60402C.1
atgagaattggtcgacggcccgggcggccgcaaggggttcgcgttgtccgattcattaatgcagctggcacgacaggtttcccgatcaagcttcgggttgccgctagctgcatgcgtcgtccccttcggaccgccaccgaaatgggccaacccgtgcgctaggccgagcagccgcgcttttattttggtcatatcttcatcctcagccgccacactcccatccattctcctctcctttcctctcctctcctctccggcggtgggtatcggcgatgacagcgtgcggcggcgtcctccttcgccgcttaccacgccgcctctatctccgccgccaccacgctcgggagcggtggatctgctagatcccgggcctagggcggctagatcgagcggcggcaatccccgggcggctcgaggacggcgtgcggctgcatcgacgggcccaaccgctagccgattccaaaccacgttggccacagcatcctcgcgccgcccgctgaccacccccccttcctcgtgctcctccgcgcatagcagcagccgggtcagagagagtgccgacacggcgtggacgcgtccgcaaatgccagtgctggtcctcacgctgatagctagtaggcccattaggcttgtttagtgtaaatgagacccaaatttccccatctgagtcatctgaccatctcctccaacctccgccaatccccatccccaatccccatcggcggacgggggctgctgtggtgcgcgccgcgcggtgagggcagggtgaggtgaggaggggcgcggccaccaggcttccagagctgcggtttggcatctgctccggcaaggcggcaa

SEQ ID NO: 58714 - DNA, 124 bp, Oryza sativa
  Clone ID: PAT_MRT4530_60403C.1
tttgttttgagggacaaccggggccatggctcgggccagcgggtacattggacccccgtcaaggtagctaaattgatacaggctgccgatccagggctaactaaaaggacatgcaatgcacacg

SEQ ID NO: 58715 - DNA, 348 bp, Oryza sativa
  Clone ID: PAT_MRT4530_60404C.1
atggccgccgccgtgaactcctcgtcgtcgtcgtcgtcttcttcttctccggccaagaacgccggcgcgcccgcggcggtggccaagtactgcctgtgcgcgccgacgacgcacccgggctcgttccggtgcaggctgcaccggtcaccggcggcgacggcgaaggcgaaggcggcgatcgtgccgccgccggcgacggaggaggaggaggaggaggagggcgaagaaatggcggcggcgcgcgcgttcctggcgcgggcgtcgcggaagtcgaggcaggatggtggtaggaataggatcaagtgctttcatcctaggacttctagattaggaatcatcgaggagtga

SEQ ID NO: 58716 - DNA, 2208 bp, Oryza sativa
  Clone ID: PAT_MRT4530_60405C.1
atgggcgccttgctgtccaagctgggcaacctgctcaaggaggagtataagcttcacaggaacctcagggaggagatcaccttcttgaaatccgagctggagagcatggaggctgcactcctcaaggtttctgaggcgccgatcgaccaaccgcctgaccgccaagtcaagatctgggctagggacgtcagggatctgtcgtatgacatcgaggacagcgtcgacgagttcatggtgtgtatcgacagccgtacgccgaacaactcgtgtagcttcgggggctttgtttacagaagcatggatttgctgaacagagccaagtttcgccacaagatcggcacggacatcaaagggatcaagagccgcatcaaggaggtgaatgatcggcatgatagggtaaacgagtttgttggcatcgatgagaagagcgatgagcttgtaagaatgctaatggggacaggcgagtcatcgataagaaaaagaaaaagggatgtgagtgaagagtcgaagcagaaattgaagatagtttcgattgtcggagttggaggattaggaaagacgactctggctaatgttgtgtatgagaggcttaaaacacaattctattgctttgcctttgttcccgtctctcttactcctaacatggagaagatattcaagaatatgctccatcagtttgataagaaaaagtatcggaacatcaatgaggtaacatgggatgaagcacaactcatcgcagaactgagagaattccttagaaacaaaaggtacttaattgtcattgatgatatatgggatatatctgcctgggaaaagatcaagtgttcttttgttgatagtgaaaatggaagtggaataatcacaacaactcgcaatgttgatgttgcaaaagaagttggtggtgtttatcaactaaaacctctttgtcatgttgactcaaggaaattgtttaatctgagaatatttggtgctgaagacaaatgtcctcctcagttggctgaattgtcagagagaattttgaagaaatgtagcggagtacccttggctatcattaccatagcgagtatgttggccagtaaaatagagaatgaaaacgcacatgaagatgatttcaagcagttatctatttcgaacttgtcgcatgtcaggtcactaatttttttcaaaggcttcaattcatttcctgcctactcaagcttcccactattacgtgtattgaacttaagtggctgccagaaagtggataacaatcactgcaaggatatttgcttgtactggttgcacctaaggtatttgaacctgtccaggacatctgttacagagatcccgagagagatcgagaatctacaatctttacaggtactgtgcataaatggcatcgaaatagaagatttgccatccacctttgttcgactaggacaaattttgtacctcaatgtctacttgaaaacccgaataccagatggatttgggagtctaaagtatctgcaagaacttaaaggaagaatcctcatcggatctctaaccaatgtgcacgatcttggcaagctgaccgagctcaggcgattgcatattgagttccaaggatgggaaacgagctggaaggaacctttgcaccgatgtttatctaatctggtcagccttgaggacctcacaatagctggttgctttggcagcctagattctgcatgtgatgattcatctcctagacctcaacagctttgttccattggcatgtggaatagcaccatccatgcagtgccaaactggatggtctccctatccaccctctccaatctaactatcaaattagacacactgaaagagagggacctgcaaatacttgggagcataccatctcttagtcgtctctatctaggagtggagaaacccacagtggacagggatgagaggctgataatcagctaccgattcaagtgcctatcacttttcgagtactggagtgacaccatggagatcgagtttgcacaaggagccatgcagaatcttcgaacacttaaattattcatcgatgtgcacaagacacatgatcatgtggattttggcctggagaacctctctgcccttgagcatgcctatttatatcttaacaactgccctgaggaaatgcacgaggttgtcgaggctggaattagaagacagatccatatgaatcccaacagccccacacttgacttgagcatgtag

SEQ ID NO: 58717 - DNA, 5676 bp, Oryza sativa
  Clone ID: PAT_MRT4530_60406C.1
atggagagcggcggggtcgacggcgagaggcccctgctgcgcgaggcgggggatttgggtggcgaggacggcggcgcaggcggagtccccgaggagggggatgcgaagggcgatgtgatggcggcggcggcgatcttgagagcgcccttattgccctcgtgccaatatgccaaaacatcaagaagttattgcgagagttaatccgtatcaaccagtatttatgtaagcgagcaaaggcagcaagataaatccattagagttaatgcaagcataaattagaactagagttaatgcaagcataaattagtgctatctaacgaggatgagaagcgtgaggatggatcggccttggagaatggggaggatttgttggcctcccgttctctcgctgtcgagggtgacgaagaagggtatggttcttgtgctgatattggtatagaagaagacgctgagggtgatgcgagtcgggagcgcttggaggaggaagccatgacggaatcaatcagggagtatgtgacagaagctgttttggctgaccatatccaggagcaaccggacaaatcgaagagtgaatctgaacatgtgaaggttgctcagcacaagtcgcagattgcgaagagcagggaagagggacccaaacaatctggaggcgaaccgtccgttgttgtcgaggaattgaatggatcaagctcgtctgatgatgagagtaaagctacctccgctcctcctgcacgatccattagtggtgctgcaggtcgttctaatggcccctctttgccatctcgtcctgctgggcttggagcatcgacttccttgtcgcagccctcagctcgacctgttcagcagacccgcgctaatggtccagtcgctgtggacagagaaactcggcaggatgttgaatctcctgaggatggagacgaaaatgatgaaatccgtgagaaactccagatgatccgggttaagtttctgcgtcttgctaacaggtttgggcaaacacctaataatatggtggtttctcaggttctttaccgacttgggctggcagaacagcttagaagaaatacaggccagggtgtttttagttttgaccgggcacaagatatggcagaacgtcttgaagctgctggaaacgagccccttgatttttcttgcaccatcttggttcttggtaaaactggggttggcaagagtgctaccatcaattctatttttgatgatgtccggttggaaacaaatgcttttgataccagcactagaaaggttcaagaagtagttggtgcagttgagggaatcaaagtaaaagttatcgatactcctggcctgtcatgctcatcttcagaccagcaccacaaccagaagattctcaattctgtcaagcgacttatcagcagaaaccctcctgatattgttctttattttgatagactggatatgcagaccagggactatggtgatgtgcctcttctgcaaaccattacaagagtctttggagcatcaatctggttcaatgccatagttgtgctaactcatgctgcatctgcaccacctgatggtctgaatggaattcccctgagctatgagatgtttgtaacccaaaggtctcatgtagtccagcaagctataaggcaagccgctggtgatgtccgtcttatgaatccagtgtccctggttgaaaaccactcagcgtgcaggaccaatagggcaggccagagggtgttgccaaatgggcatgtctggaaaccacagttgctattgctttgttttgcctcaaaggttttagcagaggccaacgcgcttctcaagctgcaggacaatcctgctgaggagcagtttggtgatgatgatgatattgaagacgatttggctgatgattcggattcagatgatggttcagactatgatgacttgcctccttttaaacgcctcacaaaagctcagcttgcaaagctaaaccatgctcagaggaaggcatatcttgaggagctggattacagagagaagttattctacaaaaaacagctaaaggaggaaaggatgcgccgtaaaataatgaagaaaatggcagcagaggccagtgcaagaacagatgacttcagtaacagcaatcttgaagatgatggcagtgctccaacaaatgttgcagtgcctatgcccgacatggtattgccctcatcgtttgattctgaccatcctagccatcgctatcgtttcctggacacaccaagtgaatggcttgtcaggccagtgctggagacccagggatgggatcatgatgttggttatgaaggtctaaatgttgaaaggttgtttgctgtgaaaggtaaagttcctttatcagtgtctggtcaactttcaaaagacaagaaggattgctccctccaaatggaggtcgcaagttcacttaagcacggtgaggggaaaaccacttcactggggcttgatttgcagtctgttggcaaggacatggcatacactcttcgtggcgagtcgaggtttaaaaacttcaggcgcaataacacggctgctgggatatccgccacactccttggagattctgtatccgctggtgtgaaggttgaagacaagcttgttgtgaacaagcagctcagggttctggttagtggaggcgctatgagcgggaggggagatgtggcttacggagggcggcttgaagcaacattgaaagacaaagattacccaattggccgcatgctttctaccatagcgctctctgttgttgattggcatggggatcttgctgttggctgcaacatccagtctcagattcctgctggaagagctagcaatttgattggtcatgcgaatctaagcaacaagggaactggtcaagttggcattcgcctcaacagctcggagcatcttgagatcgcccttattgccctcgtgccaatataccaaaacatcaagaattgggaacacacacgtcggccgtctcgtctcgcgccattttttttgatgggctcgaggggcggcgacgccgacgcgtgggagacggcgagcgcgcggagcggcgtctcctcctcctcctccggccgcgcgacggccgcggcggcggcgccggcgccggagaacaaggtgttcgtggctctcccggcgcagcacaagagcggcaggtccacgctcgcgtgggcgctccggcacgtcgccgaactggctccggcggcgatcggcggcggcggcgaggtggtggtggtggcggcgcacgtccactcgccggcgcagatgattccgatgagcagtactcctgaatcccccaatgcggcgccccctgcctcgccggggacggcggcgaggggtgtcgcgacgggagctcactccggcgacggcgagcatcttcgcgcgcacaattatcccgaggatgtcagtacttacagaaaatatgaaagggagcaggtggagaagaatttggatgaatacctcgagcaatgcacaaaaatgaaggtcaaatgtgagaaaattgttattgagaatgaagacattgctaatgggattacagagcttattttgctgcatggggagtcccttagcaggctaaacatggagggcacctctgttgattcctgggatagcttccgcagaggaagctttccaagttcataccgagcttcttctactgtgactgaagaagtgttgagcgattctagttcatctggaatacctagagatggcatctcaacacttgcaggttgtgactttccaaactcagcactgcaccatgaacagggtgacgcaggttcaaatgctaacctatttgataaacttgaagaagccttcgcagaggctgagaagtataggaagcaagcatatgatgagtcactgagaagacaaaagacagaagaagaattgatttcatatcaccaaaaggccaggaaatctgaggatttgttcttaaatgaggccaagcaaaggaaagaggttgaggaaaccctagcaaaggcaaatgtggagatacaattattgaaggaagaaatggatgcactgaaacacaaccgagatgacctcagcagtaagctttccgacgtgagtgaacagaaagtgacactagagcaacaggccgtggaatatggaagcattatcattgatctcaaggatacagttgcagcaagccaagccctcattgattcaatgcaaatggagtttgaacaattgaagcatgaaagagacaatgcactcaaacatgcagaagagctgcacagagagaaacaaaacatggtatcgagctcagacttggaatggagcactgaattctctttgttggagctgcagcaggcaacacaaaatttcagtgatgcaatgaaaattggagaaggtgggtttgggtgtgtctacaggggtcagcttcgtaacaccactgttgcaattaagatgcttcgctctcagaacttgcaagggcagtcacagtttcagcaagaggttgctgttcttagtagagtaaggcatccaaaccttgtaactcttgtaggttattgctcagaagcttcaggtcttgtgtatgaattcttaccaaatggaagccttgaagaccatctagcctgtgaaagcaacacgtctccgcttacatggcagatccgtacacggatcatcggtgagatatgttcggcgctcatcttccttcactctgacaagcctcacgcagtcatccatggtgatctcaagccagcaaacattcttcttgatgcaaatttggtcagtaagcttggtgactttggaatctctcgcctcctaaataggtctagcacagtgtccacgagcttctaccaaacaacaaatccaaggggaacttttgcttacatggaccctgaatttcttacaactggggaactaacagcacggtctgacatatactcatttggcattatcatactgcgactggtgactgggaagccagctttaggcattgcaagggaggtggaggttgcacttgataagggtgagttggagttgcttgttgaccgatctgctggagactggccgtttgtgcaggctgagaagctgatgcttcttggcctgcagtgtgcagagcttagcagaaggaagcgccctgatcgtatgaatcatgtgtggagcgtggtcgaaccccttgtaaagtctgcttcgctgccagtagaaccagaatccattggacattgggtgaataagaaccgcacgccattctacttcatatgcccaatttctcaggaggtcatgagggatcctcacattgcagcagatgggttcagttacgaagaggaggccatcaaaggatggctcggcagcgggcacaacacctccccgatgacaaaatcaactctggaacatcttcagctgatcccgaatctcgctcttcgttctgccattgaggaatttatgcagcagaagcagcagcagattccatcatagtaattagttcagtgaacttgattattcttagcttcataagttgtaaagttgatagctcattctttgttcagaagtctgctcgtgtagtgtagctgttttgttttgtgagcagcaacttacaataaatcgtgcatgctcatatgagcaggtgatgatcagctagcaaatgtttgatgtcagattgtgcttgaacataattgtttcagcccacttagaatcatgggacttatcagtttactgttgttggaaacttggtaaaaaaaaaaaaaaaaaaaa

SEQ ID NO: 58718 - DNA, 357 bp, Oryza sativa
  unsure (1)..(357): unsure at all n locations
  Clone ID: PAT_MRT4530_60407C.1
aaaggaaacaggcccttttatttcacaaaggggggttttcttacgaagcaacccatttttcccccgccggggagccactaggcgggggttatggggaaaatttgaaacgaatttttccgcaaaaaaaacaggttagggggccttttcctaggtaaacaaaactacggggtggctggctggctggcaatgcaggggggggggggatccaaatgaaaccggggggctggatatacccaacccttttgctaaagtaaagggcttccttggggccccggctgccaggctggtatggaaaaaacctcaccttgccttcnncgatgtcgggccacaggggagggaaaatttgccaagcaacct

SEQ ID NO: 58719 - DNA, 3084 bp, Oryza sativa
  Clone ID: PAT_MRT4530_60408C.1
atgaggaagggaatatgcaccgggcatattacttatacggggcggacacgaggcccaataacggagggcaaggaagcatcatcggcaatctgccgaggaagcgccaagcgtgaaaacggaacgacatggacgatggaaatggatgggggagatgaggcgaccagctcaggcacaagggaaaaccttggtatccctgaacgcgctgcaagatatggcgcatcattcccgtgtgtggaggagcatggagagaccaaagtcgggcaggccggggtccaggctcctagtagagaagaatgttcaccgggattcaagtggcagtggatcacccactacaggcactcatggggaagccggagggtgtgcgactgcgagctagggtttggggcggcggggagggggagggggggaggattggcggaggcggcggcggcgttggaggggttccttgcggatccatggctgctgaggccggcggcggcgggggagggggtgggggtggaggaggagggaggggtggcgacggtgcaggtggaggtgccgccggtggaggcggcggaggagggggaggaggaggccggcagggcggccgtgctgcggcaggcggccgccgcggaggactacgcgcggaggctggagggcgccgccgccgcgggtacgggtctcaggtttatgccaaatggattttcagtgcttcttacgctttgcttttttatttggggtgtagatacacacgactatgatgttgtcaagttggaggaaggagatgaagaggactggggccaagaagatgtgggcaatgctgctgtcaaggttatgtgtcgtatatgcttttcgggagaaaatgagggtagtacaaaagctgccaaaatgcttccatgcaaactctgcaacaaaaagtatcatagaagttgtttgaaaaactggggggaacatagagatcttttccattggagctcatgggtctgcccctcttgccgcagttgtgaggtatgtcgacgacctggtgatcccaacaagttaatgttctgtaaaaggtgtgatggtgcttatcactgctactgtcagcaaccgtcgcacaagaatgttacccatggaccatacttatgtccaaaacatacaaggtgtcacagttgtggatctggtgtacctgggagtggccatagcacaaggtggtttctgggttacacatgctgtgatgcttgtggacgattatttgtgaaaggaaactactgtccagtttgcttgaaggtttatagagattctgaagtgataccaatggtttgttgtgatgtttgtgaaaagtgggtacatattgagtgtgatggcatcagcgaggaaaaataccagcaatttcaatcggaccaaaaccttcagtacacatgtggagcatgccgtggcgaatgctcccagattagggacacagaagatgctgttagggagctttggaagaggcgggatgtagttgatcatgaccttatggctagtttaagggctgctgctgcactgccttctttggaagatgtctcaccatctcatcctaactcagatgatgaaaaacttggtgcatatgtaatgaaaaatgatggtagaaacacactcaaattctctttcaaaagcaacagtactaagcctgcattagattcatctgaacaagagaagaatgctatcaagagctcagggtcaaataagaagcattccaagaagaaagggaatcaaaataataaaacagttagcgagcaggatgagatatttttggagaaaaggaatgaaactaaatcattgggtagtttgggagatcaaattgcagatgttactcgtgataagagttcatttaaaaatgatgccgatgcgtttgtgctgtcttcagctcaaagtgcagagaaggctttgaaattacaatctgccaaagctgcagcacataatgctgatatgatacccaaagtcaagattaaaggaactaaggttccgagtttgcatttcaaggatgtaggcgaggaaaatgctgccaagagtgacacagggaaaggtaccaagttggttattcatatcggttcacgacacaaaagtaggagtggctctcccaagtctgaaatgtccaattctcagaaagagcaagagctggtttcaatgcatggagggaaagttgatgtgacaagccagttcaaaagctctagaagtgaaataaaagaaaaaagtgtaatgaagctagttagagagactggagtacaacaaaatagccttctaggagatctaggtgcttcaaaaaagcatgcaaccggaaaaaggagcaatgctatagtttctgcaatggaaaatgcaagtgaaagtggtaccagaagcagatcgtttggacaaaaacaatctgttaatcatctgactgagaaccaggggaatgcttcattttctgtgaacaactctcctgacagcttgaagccatcattgctcaagcttaaatttaaacgtccaatttttgagcagccaagcactcagtcttctcaaccagaggagccgggcacctgggcttcaccgcaagaggagttaaatgttgctaaaggccagagatcaaagaggaagagaccttcattagacaagatggatggttcggaaagtaaggctccagctgccaagagacatgagcagagcacaggagaagaagcaatggatgcgaactggatcctgcgcaagttgggcaaggatgcgattgggaagaggattgaggtccagctagcttctgatggcaaatggcatcagggggtagtctcgaatgtaatcaatggcactttgtgccttcagttagataatggtaggtctgagaacatagagctgggaaagcgggcaatccgcttgatagcacaaaggtcacataccggaaagcgattaacccattttgcgcctcaggctccagcatttggatcgtcgcagtctctgattcatgggagattgggaggtctgaagcgcattggcttcattttgacttctggtagtgtaggaacaaacaactgggaaggctttttaggggccaccctggatgtagaagaaatgcctgatgatggccatgtacatgtagctgtagctgctgaatga

SEQ ID NO: 58720 - DNA, 2214 bp, Oryza sativa
  Clone ID: PAT_MRT4530_60409C.1
atgggacaacttaggactattgctgtccttgatggttctaattacactgagtggaagaactccatggatccgaacttagccctgttggattttgacttatgcctaagagaggatcctcctgaggaaattcaacctcctgaggaactcaatatggctgaggaagattatgagcaactcagattgtctttgatgtacattaagaatcatatccctcatgagattattggtggaattgttgattctgacaacgcaaagacatacttagccaatattgaagagaatttcaaatcctcttctaagacttatgctagtacaatcattagcaagatgattactagcacttataatggcaaaggaagcgtcagaaagcatatccttgagatgactaatatggcacatcaacttaagtccatggatatggatgtcactgaaggtttcttagtgcacttcataatgagctctcttggccctgattttggtccttttaagatcaattataatactcagaaagaaaagtggaccatacaggagctaattgcacactcagtggaagaggaagagcgtcagagagctgagaaacaaaagcttaaagaccaactcaacctcgctaatgccaataacaaaggcaaaagaaagatgtatcaaggagaagggtcaaacagcaagaagaataaatcaagctcctcacagaatccaagtgggagtaaacaagaagcttcaggccctcaagctggtcctcctaagactccatattgtcctttctgtttcgcagatggacattggcagaggaattgctcacgcttcaaggcgtggttagctaagaaaggtaacactaattctgaagaaatatctaatgtggatgaatccctttatactgaattttcccttaatacctggtgggttgactcaggtgccactgtgcacgtctctaactcattacagggattcagtggcatcaagaaggtagcaaaaggggagcaaagcctaagagtagctgatggggcggagattgaagtgagggctgttggagacctcacacttagactacccagcggctgcaatttaattttaagtaatgttttatttgctccctctattaagagaaatcttatttcagttagagtcttagtagagacaggttatgactgtcattttacaaagagaacatgttacattaagtttgataataaagttgttggtcttgccttcatgcgagacaaactctatttgctctctttggatgactctgtgctgaatgctataaatgcctgtaataataaagctgagacgtcatcgaaattatggcactatcgtttgggccacatttctagggggagaattgaacgtctcattaaagaagaaatactcctccccttagatttttctgacactggtcattgcgtagattgcattaagggaaaattcactaacacaattaagaaaggggccactcagagcacaagtccactagaaataattcacactgatatatgtggaccgttcccagtgacatctgtggatggttttgactcgttcattacattcatagatgattattcccattatggctacatttaccccattaatgatcgttctgaatctcttgagaaatttaagatatttaaggccgaagtggaaaatcagcataatgctaaaattaaagttgtgagattagatcgtggtggtgaatactacgggaagcatgctccatttgggcaaatccttggtccatttgccttatatctccagcaacatgggatagttgcccaatattccatgcctggagaacctcagcagaacagagtagtagaacgacgcaaccgcacactgatggatatgcaaaagccagaatatccagaaagatctaaaggataccgattttattatccagaccgtgtcactaaatttgtggagactagacatgctgtcttcttagaaaataatgaagcaggaagctcacaagctaaggaaattgatcttgaggaaattcgggctaatgtcccaattccggaaatacgagagattaatattccatttattcaaactgagccacataatgtagtgccaacaacaatgggtaattctggaccctctggctctacacctaatttgaagaaagtgttgatggtaataatgatgaaactaatgagcctcaacagaattccgcaacacaaaatgaagaacctccacaagaagatgctcaaccgcatgtga

SEQ ID NO: 58721 - DNA, 4536 bp, Oryza sativa
  Clone ID: PAT_MRT4530_6040C.1
atggtggaggcgtacgatgcggcccgtatcgacttccatcatatggtgcgccgtgggatggtcgtgaacaacatgaagatcctggagctgcgtcaggagaatctgcagctgaagaaggacctagacgcgctggaggcgcagctatgtcagctcaagatggtgacaaccaggagaactgctgctatcggtgatggcaaccaacccgaaggtagcaaccccaacatccaaggcggcccacctccacctcctcccccgccaccaccaccaccaccagacaccaaccccatcctcactcaaatcctcgcccagcaggccaacatgatggctgctttcctccaccacatccaaaatccaccacagcataatgctccacctccaccaccacccccgcagcattctaagctcgccgagttccttcgcatccgcccgcctaccttctccagctccaataaccccgtggatgccttggattggttgcatgccgtggggaagaagttagacaccgtgcagtgcaacgatgaggaggaagtcatctttgccacccaccagctgcaggggcccgcatctctatggtgggaccacttccaggctacgcagcccgaggggcagcctattacctgggcccgcttcaccgccgctttccggaggacccatgtgcctgccggagtcatggcccttaagaaaagggaattccgggagttgaagcaaggcaaccgctctgtgatggagtatttgcatgagtttaacaacctggcccggtacgccccggaggatgttcgggaagatgaggaaaagcaggagaagttcttggcaggaatggaccctgagctatctgtgcgtctggtctccggggattatccggattttcagcgtctggtggacaagagcatccgcttggaagccaagcacaaggaactggagtcgcacaagcgtcgcttggcgaattttcgcaatcaacagggggctaaccaaagggtccgctacaccaatccctatctagggggatcctcctcgcagcagcagcagcagcaacctcgctccgcgccccgaccccaattcgtggtgcgcgtcccacagccgcagcaacagcagggccgcagagacgctcaaggacagcagcgtctgtgcttcaactgcttcgagcccgggcactttgcggacaaatgcccgaagccgcggcgccagcaaggccaagcgcctccccgccccaacaacggtggtaaggacgtcgctcagggtcgtgtgaaccacgtgactgtcgaggatgtgctgacgactccggacgtcatcgttggtacgttcctcatacattccattcctgctaccattttgttcgactctggagcttcccactcgtttatatctgtgcctttcgtgggaagaaatcaactgggggtagaacggcttaggaaccctctgctcatcaccacccctggaggggatatgacagcaaagtattacagcccggccgttcctatagaaatccagggaatcccttttccctcggatttgattcttctggacaccaagaacttggatgtgatccttgggatgaattggttggctcaattccaaggtgtagtggattgcgtaaggcgcacggtcactctgtaccgagggccggaacaaccagttgtgttctttgcacccccaacctctgttggcagttcagaacttcatcagataggactgtcagaaatccctatcgccagtgaattcggtgacgtgtttccggaagaactacccggtatgccgcccaagcgggagatcgagttccggatagatcttgctccaggaacaactcctctgtacaagcggccctaccgtatggcagcgaatgaacttgccgaagtcaagaagcaattggaagagctgaaggaaaaggggtatattcggccgagcacttccccctggggtgctcccgtgatttttgtggaaaagaaggacaagacaaagaggatgtgtgttgactacagagctctcaatgaagtcactatcaaaaacaagtaccctcttcctcggatcgatgatctgttcgaccagctcaagggtgccaccgtcttttctaaaatcgatcttcgctccggatatcatcaattgcgtattcgtgaagaagatatcccgaagaccgcattcaccacgcgatatgggctgtatgaattcacggtgatgtcgttcggtctgactaatgctcctgccttcttcatgaacttaatgaacaaagtgttcatggaatacttggataagtttgttgtggtcttcatcgacgacatcttggtgtactcgcaatcagaggaagaccatcagcagcatctccgtttggtgttgggaaagttacgggaacatcaactgtatgccaagcttagcaagtgtgagttctggttgtccgaagtcaagttcttagggcacgtgagatctgctaaaggagttgctgtggaccccgaaacggtgaccgccgtcaccgattggaagcaacccaagacggtcactcaagtccgcagctttttgggtttggccgggtactatcggagtgtgagaaagcattccaaactcaaagaaaagctggtttcctcgccagtgttaatcttaccggatactcgcaaggacttcctggtgtactatgacgcttcgcgccaaggattggggtgcgtattaatgcaggaaggtcatgtggtagcctatgcctcacgccagctacggcctcatgaaggcaactaccctacccatgatttggaattggccgctgtggttcatgctctaaagatctggcggcactatctcattgggaatcgttgtgaaatatatactgatcataagagtttgaaatacatcttcactcagtcagatctgaatcttcggcaaaggagatggttagaactcatcaaggattatgatgtgggaattcactatcaccctggcaaggccaacgtagtcgccgacgctctaagtcgaaaaagccattgcaacactcttggcgtccgtggcattccaccggaacttaatcaacagttggaagccctgaacctaagcatagttggtcgtggattcttggctatgctggaagccaagcctaccttgctcgatcaaatccgcgaggctcagaagaatgatccggatatgcatgggctcctcaagaatatgaaacaaggtaaagccgctggtttcacagaggatgaacacggaaccctatggaatggaaatcgggtatgcgttccagacgtcagggaacttaaacagttgatacttcaggaagctcacgaaagtccctattccatccatcctggcagcacgaagatgtacttggacttgaaagagaagtattggtgggttagtatgaaacgggaaattgcagagttcgtggccctttgtgatgtgtgccagcgtgtcaaagccgagcaccaacgaccggccggactcctccaacctctacaagtgctagaatggaaatgggatgaaattgggatggattttatcaccggacttccaaaaacccaaggcggatatgattctatatgggtagtcgtggatcgactaaccaaggtagcacgattcattcccgtaaagaccacctatggagggaacaaactagctgaactctacttcgctaggatcgtaagtctccatggcgttcctaagaaaattgtatctgatcggggaagccagttcacctctcatttttggaagaaactccaagaagagttgggaacccgattaaatttcagcaccgcgtaccacccgcagacagatgggcagaccgagcgtctgaaccagatcctcgaagatatgcttcgcgcatgtgtcctagattttgggaagacatgggataagagtctcccttatgccgagttctcctacaataacagctaccaagccagcatacagatggcaccgtacgaagcgttgtatggccgcaaatgccggacaccactattgtgggaccaagttggggaaagccaagtgttcgggaccgatatcttgagagaagctgaagcgaaggtcaggaccattcgggaaaacctaaaggtggcacagtctcggcagaagagttatgcagacaaccgacgccgtgacctggaattcgcagtggatgactttgtgtatctccgggtaacgccgttgcggggtgtacacaggtttcaagcgaaagggaagctcgcccctcggttcgtgggtcctttccgcatcattgctcgacgcggagaagttgcttaccagttggagctgcccgcttccttgggcaacgtgcatgatgtgttccatgtgtcgcaactcaagaaatgtcttcgagtgccgtccgagcaggccgactcagagcagattgaagttcgcgaagacttgacctacgtggagagaccagtgaaaatcctggacaccatggagcgcaggaccaggaatcgggtaatccgtttttgcaaggtccaatggagcaaccatgccgaggaagaagctacttgggagcgtgaagacgagctgaaggcagcccatccagatctcttcgccagttcttccgaatctcggggtcgagattccgtttaa

SEQ ID NO: 58722 - DNA, 569 bp, Oryza sativa
  unsure (1)..(569): unsure at all n locations
  Clone ID: PAT_MRT4530_60410C.1
gcacgaacaaaagaaatactcatccacaatgtgagacacttctagagtattctcactgactgaggataatcgtagagaaacttggctcgcactggagagtacccctgcatggactcctcaaaatctgaagcaacccggtgagggtctacatcccacagtgggtgtcctggatcaaggtagcctagtacaaaaattccacccatacccctcatcagtccactagcctagcaacctcttcctctcctctttctcacattttctcgtctcctccacccaccgtctcctcctcttccgatctccccctctctctctcggtcgaacgaggcacggtggcgaacggcgagcgccgcgcgaggtggccgacggcgacgggcgcgcggggtggccgacggcgacgggcgcctggggtggctgacggcgatgggcacgcgaagtggccgacgacgtcaattgccaaatccccttcccgatnagcagggcggtgctgtgggagagaggcgagggtaagagggggatttgggggagcggcgaagagacgggagtctgcacccangcgtccgggaaggtgg

SEQ ID NO: 58723 - DNA, 662 bp, Oryza sativa
  Clone ID: PAT_MRT4530_60411C.1
ctcgtcttgagctgagcagaagcccgcgacgtgccctgcactgcacgcggaagcagagctccgagccgtggcggcggcgggcgcggggcggcgtccgatccatatccgcgccgccggcgtgggcggccggcttacgaggtggtgggcgactggttggcatcatggactcctcccgcttccggagtgcggcggccacggaggcggcggaggaggaggcggcggggtgggtgacggtcgaggagtgggcgggctcctccgccgccgcgctctcccgcaccgccgtcctcaccgcctccccctcctcctccctcgcctcccgcaggttcgaaacccggtggggccggttcgacgcccgattgtctggcgccttcgggcccaggggctttcctgggagcgtcactccggattacgtcccgttccagatgtgggataccttgcagggtctctcgacttacatccgtgcaatgctgtctactcaagctcttttaggcgctattggagtaggtgagaaatctggcacggttataggtgccacttttcagtgggttctcagggatttgacaggaatgctcgggggtatactggtcactttctatcatggatctaaccttgatagcagtgcctaaatggggcgcctagtttgagactttttaatgaccctt

SEQ ID NO: 58724 - DNA, 566 bp, Oryza sativa
  Clone ID: PAT_MRT4530_60412C.1
ctactgccgaccagaccaaaggaacagtgtgtagaatcctccaaccaccgtggacgcagccatcaaccaaacggcggctgccacaggccacggcatcaacgctgaaactcgccatgagaagacaaccgtgaggagagacgaggagaaccagacgccggccttggagcgagatttcgccggtgagttcgccggcgccctctcgtattgctgcaagcaccagaacagcagcaggaggctgaggtacgacgtggcgacgaaggctatgccggcgatatctccgtgcgacctgtagatggctagtagcgagttgagcgtcaagaagccaaaccatacgtaggccagccatgaagccattgccagccgcaacagatgatcgatggtctgttaaggcagctagctccgcaggtcgcgtctcccggccatattatatatgtcgcctaattaatgcttattgttcaagcctcgagcagtcatatattaccgactcaaatcttttgactggttttatatgactatcattagattcatgttgtgaaaaaagcgaatcaaacttaattaatttgttt

SEQ ID NO: 58725 - DNA, 444 bp, Oryza sativa
  Clone ID: PAT_MRT4530_60413C.1
gtttcttctttcattaaacctatgtatgttttactagttcaatattgtaaagtccatcaccggtccctaaacttgtaccgctgtgtcatcccggttcctaaactcgcaaatcgaccgtttaggtcctcaaacttgttcgactgtgttatcccggtccttaaacttgcttatcacacgtttaggtcctccaacttgttcagttatgtcaccccagtccctaaacttggatttgaatatcatctgggtcaaataggatgggaccggggtgacacaactgaacaagttggaggacctaaacgagtgatctgcaagtttagggaccgggataacacagtcaaacaaaatggattcatttgcacacagtctataagactcaagggggcaggagggagcggcggcgagcgcgtgctgccggctacgccgcggttggctacccgcctcgcc

SEQ ID NO: 58726 - DNA, 240 bp, Oryza sativa
  Clone ID: PAT_MRT4530_60414C.1
atgcagagcccctgcgttgtgattgtccggtgcgcgagcaagcgttatccgccgtgcgcgctcgccgaatggagagaaagcaagatcggttggggaacggcgggcgtgcggcggcgcggcggcgtggcgggcgcccgccgcccgttcgagagtgcagcattgccacgatgggcggaaaagggtgtgggggcaggcgccggcgccggcggcggtgggttcagcggcagtgcctgcgggtga

SEQ ID NO: 58727 - DNA, 463 bp, Oryza sativa
  unsure (1)..(463): unsure at all n locations
  Clone ID: PAT_MRT4530_60415C.1
gagcccactattctgcggccccccttnnnnnnnnnnnnnaaacggagaaggatatggggggattcgacaaaaggattcccaagcccaccacaagcactgtgggctcacaaaatactaaaattctaaaacccacgtaagaagtgccctcatctcatggcaccaccataagaggcactacaaaaacactcgggatgatgatcactgaattcatcaaaaagaactccaaaagggcgaccaaaatcgggcatagtagttcttagaacaagcagagactactcccctagcaacaatttacactcatgttagacaactgacttgacaaaccagatccaccaccatccaaatcccttttctttggcttcagtaaaggaggcacccagttaccaataatatcaggaccagcatgttcatgaacatcaccaatggcatcacctttgtctcccacataacctgcatggctagg

SEQ ID NO: 58728 - DNA, 531 bp, Oryza sativa
  Clone ID: PAT_MRT4530_60416C.1
atggtgtggatgtggattcgtgctcagcttggccgtcttagcgccttgattataacttgggaagaaattgatatggatgggatgatgaccagaagaagcagtggacaaatcaaagttcacatatatttgtatggccctttaggcaggatgccacatatacatcacattcagcattcacgtgatggtgttggtgtcggtagtggtgctgagcttgaatatgttggtagtggcgccaagctcgagtatgtccgtggcagccatgaagtggtcatcagtgagagcacgaatggcatcggtggtggcgtcgagcttgagagtatgccgacggtggtcatgaagaattcatcgtggcttgactcggggagtgtgccgacggctgccacaaagaagccatcagtgtataggcgctgcggagtgatagagacaccgatggggatgccgagctcgtggttactagacggtgaggtgaggatttatgaggataacgccggtggcggcgataagtcagtggactccgtcgcatatgcataa

SEQ ID NO: 58729 - DNA, 393 bp, Oryza sativa
  Clone ID: PAT_MRT4530_60417C.1
atgggttacagcgactcgattcgtggacaggaaaaatgcgaaataatccgattcgacacgtctgcaaactgtcaatccaagccgaacactcctgactctcgtcctcctcggccggcgccggcgacgacggcgagcgtggggaagcgtcggcgacctggttgggcctactacataggaccctctctcgacgccgatgagcttgagctggaggaggaaagaagaagtggggcgcttcaattcaatacgaacactccggcggtgccggcgccggcatcggcggcgacgacggacgacaacgacgactggggaatcgtcaaggagctcgacgacggcgtgcatggcgaagcgtcgacgacttgttgcgccgtgaggcccagattctgtggaagcctc

SEQ ID NO: 58730 - DNA, 844 bp, Oryza sativa
  unsure (1)..(844): unsure at all n locations
  Clone ID: PAT_MRT4530_60418C.1
gcataatgttcttcagtaatatatgtactcattcatgacgttgtttccccgcacataaggcctatgactggtaataaaacaccgattcagctctagcagttacaatagaaaccatgttgtattcttgctactaacgcactagaaagtagcacatattttgtgtgcatttataggttatttcaacaccaaaatttacaccaacacacagactcaactagtacacaatgaaatccgcatgacgcttatttgcatagttgctcaagggaatgctgaaacaaatgcagagaaacaagttcgatatgtgcaagaactaacgagatttatttattggcagttggctcgggagatttggcgagttacccccgagttagcttcccctttcaaaaccagcaactgtacattctcagagagcccaagtcttcaagcacttcagatccttgctgaacctgtaaacttgacaaggcgagacactgatcgtcccaacctgatctccatagtgcagcttgatacgtgaattctggctgctgctggaccaaagcagagcttcatggaggctaccttcctcccacctgatgttgatggtcacaccgcctcgggccttgagacctttcacacaaccttgaggccacttatcacggngtaaggcagggagcaagtacaagtcgctcccggtgctctgtaccagcatttctgacagtgcagcagggaatccaaaatttgcatcaatttggaaagggtgggtgtgctgtgaacagattgcagtataggcctccttccttttcacctcatgtnttggatctaccaaagtgatcagctgaaagaacattttatatgcatgctcact

SEQ ID NO: 58731 - DNA, 978 bp, Oryza sativa
  Clone ID: PAT_MRT4530_60419C.1
atggaaaaatgcccttttgtgttttcttgtaaatctttgagtgtcatctcagatccagctgttactttgtcaaaagactttgctgacattcgccctcgaattgaagaacttgtctctaaatttagtgttcgagacttggtcgaggagttcatttatcttggtattcgacctctttctgccaactggactttatctcttggtgaaattcctgagggttctagttctttgcttcctcctttcgagatatctgcgaatacaaaaattgtgaaggacgtggatgggccaagcaagaaatatattggcccttataccaagaaagagcatggcacatatcttgcggttcagcaaggtagaaaacaaaacaggattctaagtgccctcggccaagatatgatggttcgagttcatcctgatttgaagaagaaaaagaagaaaaactcgaatatcaatccaaaagatgctgcatcttcatcttctgataatgaggagaatagcttggatggggagtctgattcaagtgatgaatcgtctgatgacagcggctcctctgagtcgagcgaacatactcacactgctccttttgtgcaagaaaactcgagtcctgctttgaagcgtaaaaagatgccttcaagttctcctgttgactcgaacttgaaaaaagttcgaattgctctggatagtgatgatgaggatgaaaacattctgtcttatgagctacctgctatcagtgagataagttcagttgagattgggaatgtttcgaacgttaattctctttcagctgcagctgattacctctctgctcccttgaacgttcttacttctgctgccaaagaggttgaggaacctatttgcattgatgctattgatgtggacatgaaccctgtcaatcctgttcaaacagagaacgttcctgaagttgttaatctgaatttccaatccagaaaaaacatagttgaagatcaagccacagaatga

SEQ ID NO: 58732 - DNA, 282 bp, Oryza sativa
  Clone ID: PAT_MRT4530_6041C.1
atggagatggatgaagtcgggggtcgatggacattctctaggacaaatgaaggctacacgagctgcggcccggtagtcgagatgtcatggcacagggttggtgccctgctgctaggggctcagtcctgcctgcctgtcccggaggttccggccgtaggtggaatggttggcctgggttggcttgggacgagctgggacccagggtcgggttgccagttcggtctgaatcatcgtaggccttgggttaaggcagtaagagaagctttggagaagaagtcttag

SEQ ID NO: 58733 - DNA, 392 bp, Oryza sativa
  Clone ID: PAT_MRT4530_60420C.1
gcgacgcggccggcagggcctccagtgggggggactccaacgcagacccagtatgtccatcctctctattccccacggtacaatccagatggtggcgcaagttcatctgagctgagtagtttggggatagcgtaaggagagaaactccaaattaggcatggggagggcgcggtttggaggaagtctaaaaaggtgtgcgtgatagaggatttgctagagcgtgttttttcatctccatacgtgaaaaatgagatggatggcgggatggaagagctgctgggatgctctaatgaacccagaacccatgatgctgcccaagattgtcaggtggtggctccactagtagatactactaagttggtatgcgcataggtgaatgcgcaatgtgcttc

SEQ ID NO: 58734 - DNA, 179 bp, Oryza sativa
  Clone ID: PAT_MRT4530_60421C.1
agacagaagctcagtaatcttttgattttttacccgagggcatgagtggaaggaaaatcggctgacataacatagccgtccagactgcaaatcaaactcaaccatatgatggtaaacgtgactgacgattaacgacctgcgcctatgacagtgataaggaggataaacgctgtgcacca

SEQ ID NO: 58735 - DNA, 258 bp, Oryza sativa
  Clone ID: PAT_MRT4530_60422C.1
atgcccctcgggccctcgcgctgcctcgccccgaggccctcgcccaaccgccatttggcgggaccagtctgtgaccggcctattgccggtcacgtccgattggacgggtggccgtgcccccacgtcgcctctgtatccggcggagtggaggtagggctgttccccgtgtcaggtggggggtggcgctgtgtcctgctcaaggacggactgctgcttagcctccaggcgaaggcacgggtcatgacccggtcaaggtaa

SEQ ID NO: 58736 - DNA, 528 bp, Oryza sativa
  Clone ID: PAT_MRT4530_60423C.1
atgaagtcggggtcgcgcgcttggtggcttgcaagaaccagctccaccgcggcccgtgccaaagaagctgacgaggactttatgttggctatgctggcgcatgggaacgccgactcggcgcgccgcgcgctccagccgagcgacggcgtcggagagctgcccgggcccgagttcgttggtgaggcgaagggccgcgatctccccagcctgatcttgcaccaggcgccccaggtcggcaagggtactctgagccttagcgagctcgctcgccaaccccgcgccgccgggcggcccgccggctgccaggtgcttctcccgggcctccagttcggaagccctcgccgctatcgccgcgcgctcagcgcaagcgctctccagatgccgggcctcgcgcccagcagcagcctcctcgcgcttcgcaagctgctcgcccagccggcgcaaggctacctcgcggcggtttacctcggcttcgcgctcggcgagtgcggcgtcccgttcccggcacgcctcctcccgcagccgtag

SEQ ID NO: 58737 - DNA, 975 bp, Oryza sativa
  Clone ID: PAT_MRT4530_60424C.1
ctaactcatgcggcaacgctgctgcggagatgcacacgcagcagcagccagcagctgctccgacgcagcgtcaccaccagccggccggagggacgacgatgacgatgacagctgccgcatcggcgctgtcgtcgctcggtcgagctcctccgcatcggcaccgctgcccggccgcacccccgagggcgcgacccgcgctgtgccctcaccggggccggcaccaccgcacggccacgctcgcgccgagcctccactcagccgcgccccgccgcatcggcgccggcgtcgctcaggcgagctcctccgcataggcaccgttgtccgggcgcatcgctgctgcctctccgtcgccttctttccggtgagcacgcgctcccggtcgcagcatagcgtcggcgcatccactctgccgccgccgccgcccatcgccctcgcccactgcgccaccgccgtggcgccctcggagaagaagaggcggaggagagcacaaggcgattctttgactattcttgttgttcttgctgttcttgtaaactccacctcgtcgatagcgtccttgagctgcagcgaccagttcatcatgctggggtcgttgatccgctgcttcttcactaaactcactacgctgttcatctcctccaggaaatttgccccgctgttaagcttctccccggcgtccgcgcgcgcggcgccgacgagcgcggagccctcgaggacgtccctgatggccttggcgtagcacgcgcgcagccgccgcagcgcccgcctgtacatcgccgccaccacccaccgcagccgcagcctccggagcgcccccataaaccgccgcggcctcctgctgccgtcgccgagccgcaccaccgccatcttcctcctcctcaccctgcagcttccgtgcagaatcgtcagagtccgccgcgtcgtcgcgcggaacgcagcgtctcgccgcggcgccacagcgacgtggccgtccat

SEQ ID NO: 58738 - DNA, 2493 bp, Oryza sativa
  Clone ID: PAT_MRT4530_60425C.1
atggctcaagacaccggcgacacagtgctcccttctccccgcatctcggcagacagacaccttagcctcccccgcaaaatcatgccggacggcgccgtcgtgagggcgggggagtcacggccgcggccgcgatatccggagcggtccgtgcacctcttgtccttcgccatggcgggattgattccgcctttctcccgatttttccacgaggttctggatttctacgaaatccatgccttgcatctcgcgcccaacgccgtgatgacaatgagcatctttgcgcacctgtgcgagatgttcatcgaggtgcgaccgacgatgcggttgttccaggccttcttcgtcccgcagctgctacagggtgcggtggtggggggatgttacttccagccccgaccaggcacggcggggcagtacatcgagagccacctccgcaagaaatgggaggactggaagaaagactggttctacaccgcgctgccggatcacccacgacttcgagttcccgccggtcctcccgagagatccgccgcatggctgacggcttcggagctgggcgaggaatatgacgcggtgtgggatcgtctcaggggcctgcgaagcttgggcctcacaggagcaatggtcttcggcgactactttcgccgccgtatcgcccctctccaggaacgatcccgtggcgcgtgggagtataccggccccaacgaccccatgcgcaagcacgcgggcgagcgctgggactggggcgaggaggacgccaagatggtgattcggcgggtgctgggcctggactccgccgagcaaacactgatcccggatgggatcctccccctctgctgcgaccgcgaccgggagagcatcttggccgtgatgtcggtcgtcggcgccggcaggggccggcctggccgagggggcgccagcggtagcgccgccagcgccggtggtggcggcgcgtccgtgggcgggagccggccaagcggtccgggcggtggtggcgactcacgggcgcccggctcgggcccggagacgacccagcaacgatattccttctcaggggacctcggggtcggacccctcgcggaggacgaaatccgcacaaccggagcggtgctcgccgccgccgactccactgtccgggaggggctcaacacccaagttcaagccctggcggaagagcggacggccctggatgccgaatgggctcagcttgtggcggaccgcgcgcgagtcgacgaggggcaccgtgccgtggaggacatgtacgaggcccatgccgaggacctggcggagagggtcaggaatgcgcgtggcaccctcgacgcagccgctgcccacgagcggcgagcagcggaggccgacacctcgttgcaggcccggactgcggcactcgaggctgaacgcaaggccttggacgatcgtgcccgctccgtgcaggagtttgaagccacgatccgtcggcggattgaggtccttgatcggagccagcgcgaacaaaacgcgcgcggccaggaacaggcgcagcgggcccaggagctggaggagcaagcacgcctgctggatcagcgggagtccaccttggccgcccatgagagaacggcggcggaaacggaggcctcccttcaccttcgtgaagaggccgcggctgagcacgaccggatcactctcgccgcggaagcttccgcgggccgccgcgcggaagagctacggctgcgggaggaggcgtgccgggaacgggacgccgcactcgccgagcgcgaagccgaggtaaaccgccgcgaggtagccttgcgccggctgggcgagcagcttgcgaagcgcgaggaggctgctgctgggcgcgaggcccggcatctggagagcgcttgcgctgagcgcgcggcgatagcggcgagggcttccgaactggaggcccgggagaagcacctggcagccggcgggccgcccggcggcgcggggttggcgagcgagctcgctaaggctcagagtacccttgccgacctggggcgcctggtgcaagatcaggctggggagatcgcggcccttcgcctcaccaacgaactcgggcccgggcagctctccgacgccgtcgctcggctggagcgcgcggcgcgccgagtcggcgttcccatgcgccagcatagccaacttccgcccacacaaccagcgctcgcgttccggttggacgggctagcggcgggcctggagagactggaagaggaggtcggcgagaccataaagtcctcgtcagcttctttggcacgggccgcggtggagctggttcttgcaagccaccaagcgcgcgaccccgacttcatgccgtggtgcgcacttgaagattttcccccaggaactgaagcgagggcccgggagcaagttcgggaggcagccgacgcgattttctcgggcttcgagggatcggccccccgcttcacctccgggctcgcctcggacgaagaaagcgggagcgggggtgacgatagcgacgaagactag

SEQ ID NO: 58739 - DNA, 294 bp, Oryza sativa
  Clone ID: PAT_MRT4530_60426C.1
atggggaagaaaagcccgcggttcgcccccgggacgacggagtgctgctggaccccccgcgagacggggcctgctctcggccccccttctgcgaggccagccccgagggtgccccaaacgcaagggggagcggctgttcttttcgtcccccgctcccagtcctcgggtggattcggcctcggcctcgggctcaggaccgcccccagcctcgacctcaacctcgggcccggcccggaccgctccggttgtgcggatttcgtcctccgcgaggggtccgaccccgaggtcccctga

SEQ ID NO: 58740 - DNA, 396 bp, Oryza sativa
  Clone ID: PAT_MRT4530_60427C.1
atggctcaagacgccggcgacacagtgctcccttcttcccgcatcacggcagacagacaccttagcctcccccgcaaaatcatgccggacggtgccatcgtgagggcgggggagtcacggccgtggccgcaatatccggagcggtccgtgcacctcttgtccttcgccatggcgggattgatttcgcctttctcccgattttttcatgaggttctggacttctacgaaatccatgccatgcatcttgcgcccaacgccgtgatgacactgagcatctttgcatacctgtgcgagatgttcatcggggtgcgaccgatgatgcggttgttccaggccttcttcgtcccgcagctgttacagggtgcggtggtggggggatgctacttccagccctga

SEQ ID NO: 58741 - DNA, 426 bp, Oryza sativa
  unsure (1)..(426): unsure at all n locations
  Clone ID: PAT_MRT4530_60428C.1
atggggaggggacatgctgctggattggaggaagaagtcttgatgccggcgtgggaggctgcggtagaagaactgcggttaaactttgaggagtttcagaaagaggtagaaggagacaacaagctaattcatgaggaaatccagagtcaagcgattttggctcaagctcacaaggaggaggttaccaagcatctgaaggcaatccaagatctgctggttgattccaatagcaaacaagggcaaggagtggttgagaagggagccacgccttctgcaccttntacgtctcaggtaactcataaatctgagggtttggctgctccaggggccatgggccaaacacccccaaattctaagggagtcttagggggaatgcaaaaccttgaatttggggagagttctactgctagaaattttgggcagtaa

SEQ ID NO: 58742 - DNA, 2295 bp, Oryza sativa
  Clone ID: PAT_MRT4530_60429C.1
atggctcaagacaaaagcgacacagtgctgccttcttcccgcatctcggcagacagacaccttagcctcccccgcaaaatcatgccggacggcgccgtcgtgagggcgggggagtcatggccgcggccgcgatatccggagcggtccgtgcacctcttgtccttcgccatggcgggattgattccgcctttctcccgatttttccacgaggttctggatttctacgaaatccatgccttgcatctcgcgcccaacgccgtgatgacactgagcatctttgcgcacctgtgcgagatgttcatcggggtgcgatcgacaatgcggttgttccaggccttcttcgtcccgcagctgctacagggtgcggtggtggggggatgttacttccagccccgaccaggcacggcggggcagtacatcgagagccacctccgcaagaaatgggaggactggaagaaagactggttctacaccgcgctgccggatcacccacgacttcgagttcccgccggtcctcccgagagatccgccgcatggctggcggcttcggagctgggcgaggaatatgacgcggtgtgggatcgtctcaggggcctgcgaagctggggcctcacaggggcaatggtcttcggcgactactttcgccgccgtatcgcccctctccaggaacgatcccgtggcgcgtgggagtacaccggccccaacgaccccatgcgcacgcatgcgggcgagcgctgggactggggcgaggaggacgccaagatggtgattcggcgggtgctgggcctggactccgccgagcaaacactgatcccggatgggatcctccccctctgctgcgaccgcgaccgggagagcatcttggccgtaatgtcggtcgtcggcgccggcaggggccggcctggccgagggggcgctagcggtggtggcgactcacgggcgcccggctcgggccgcaaacccggagacgacccggcaagtgacccgaaggggaagcggaaggcggccgaatcttggccgccctctcccccgcgtggaggaggcgccgagcgcgcgacagaccttccaccggcgggtcacaagcgacctgccgggcccgaggccggtcggaagaagaaacggctccggaagatagggcaaacggagccgtgccgagggagctacatcgagcccccgaagtggaccttcaaccgtcctccccgcagcgatattccttctcaggggacctcggggtcggacccctcgcggaggacgaaatccgcacaaccggagcagtccgggcctggccaatccaaggccgcggggtcttcgcaacctcgcggtggggtccacaggacacgtaccgggcctgatcccgagcgacccttagccgggactcgacctaccgtgggtggcggtggcgtcgacgcccctcccgggggcagctccgagactggggtccgtgcggagcgccgcccaggatcggttggtgcggacggtcgcgagcccgaggttgaggtcgaggctgggggcggtcctgagctcgaggccgaggccgaatccacccgaggactggaagcgggggacgaaaagaacagccgctcccccttgcgtttggggcgccctcggggctggcctcgcagaaggggggccgagagcagccccccgtctcgcggggggtccagcagcactccgtcgtcccgggggcgaaccgcgggcttttcttccccatccctggtgagcatggagccacttctgcaggtgctcgccgccaccgactccactgtccgggaggggctcaatacccaagttcaagccctggcggaagaacggacggccctggatgccgaatgggctcagcttgtggcggaccgcgcgcgagtcgatgaggggtgccgtgccgtggaggacatggtgagggtggggcgcaaaaagcaccaagcccacctagccaaaatccaggcgcgcgaggaggtgctggactctgtcatgcgggagacggaggaggagcggcatgcggcgctgatcgcctcgagcgccctggacgaagcgctgggcgatatccgccttcagtacgaggcccatgtcgaggacctggcggagagggtcaggaatgcacgtggcaccctcgacgcagccgctgcccacgagcggcgagcagcggaggccgacgcctcgttgccggcccggactgcggcactcgaggctgaacgcaaggccttggacgaagaaagcgggagcgggggtgacgatagcgatgaagactgggacaacatcgtcagcggcgccggcctcggagggccgggcaccccgtga

SEQ ID NO: 58743 - DNA, 1476 bp, Oryza sativa
  Clone ID: PAT_MRT4530_6042C.1
cccccaacataaaaaagttagtcaagcagcaaagccaaattcaagcaattataacgcttgataatgaaccaatactccaatagtatctgaagcagctcagatgacaaaccagtatgcaggacagattttattatatgagcactgctatgcagactagctcacttgtatcattcagaaacaacaaaatagaacacagttctatgcagatcttattttccgatcaaacaaggaggatcagacagacgagatggagcagatatacacctcactctgctccaaggagggcaaggagtatatcctcgtagtctctggttgtatctttagcaacagctcgctccaatgggacactgtttctcttctggtaggcctcctttatcagcttcaggtctacctcggcacgagttgttatgatccttgtaagagagttctcgtctgtgcccattcctcctagagccaatcgaatgactttctcaaagtatctgtcagggcaagtgaagcatcttatgatcgcccttagtgtaccaaggaactcgtccttaggatcagctttaagatccttagtgattggatggccgaactgatcattgtaactattgaatgttgctagtaactgtgctttgctccttgtggtgagaatcctgatgatttcatcgtcactgtaagccttgtcatggatcttctcatggagtattttggcttcagaatgtgccaacgatgtgttcacctctggcccatcatagcgatatacagtcacaagtggcaccaaaagcttacggtagtcgccggtgatgtgccgccgcgacgtcctcctcgagcgacctcttgaagcgctcgtggtacgcctgcttcgcagcgaagagctgcgatggagtgcgcgtgcacgcgatctcgacgagcgcgcggccccccgggtgccacttcctcgcctcctcgttcgccagcaccgcgtcccgctccgccgggtccagcgtccactggatcaccgccctctcgaatttgccgtggatctcgtcgttgagggcgcggagcagctcctcgccgtacgcctcggcgtaggcgcggcggatcgcccggcgctgcgccgcgtcgcggtgggcgaggatggagatgatgagcttctcgttcgtgccccaccctttgaacgccttgcgcagctgctcgcagtcctcggcgacgggcggcacggcggcgggcacggtgagcgtcgccattgatcgtcgctccggtgatcgatccaatcacggtctctcactttatgcctcatgagacgccacatgttgggcaactggacgcggtgatggcatcaataggaaggtcgagacgtgacgtatccgagccgcgcgcggaggcgagcgcgacgtcgctgtcgcgcggcccgtttctggcgccctccgcggcgtcacgtcgcggcgcgggtcggccaccgctgctcttccggcgcgaagagtcttgttggttgggtgactcgatccccat

SEQ ID NO: 58744 - DNA, 340 bp, Oryza sativa
  Clone ID: PAT_MRT4530_60430C.1
ttattcgctggtcgtgtcactcctaccgttaagcttcccgcggcggcgagagcaagctaagctaggtcggacatggtgatggacaaggtgatggacagcggcagcgtccacttccagtccatcctcaagaacaacgccgaccccaaggacgtccatgggggaggccatgagggcgttctccttctccctcgccgaggccaagtacgatgcccgcgacagcgtccgccacgttgtcctgcacaccatccggtccgactgcctccgcgtccgctcccaccaggagaacgtcggccttgtcaagctacccaagttgacccactttgtcgaccccgccgacggc

SEQ ID NO: 58745 - DNA, 1758 bp, Oryza sativa
  Clone ID: PAT_MRT4530_60431C.1
gcatttgggagcccgcgcagacaagaacaagacgcgcagcaaagcgcagcagcagcagcagtattaatcgaggcgcaggacaaggagcagtggcaattgttgttgggagaagagcgagttgttgggagggagaaaggccaagaagaggaggaggaggaggaggaggaggaggggatcaatggagatggagagcccgcggagcccggaggcggagatcgggcacagggtggaggacctgtgggaggtggcggagccgcagctgtcgccgtccgagaagctcaactcctgcttcgaggacatcgccgtcgcctccttcccccgcccccttggctcgcaagtaatcgagataccttcaaatgctagtctggctgatactgttgaaatattatccaaaaacaaaattttgagtgcacccataagaaatgttgatgctccagaagatgctagttggattgacaaatacattggcattgtggaatttgctggtattgctatgtggttgctctatcagtctgaggctgcagctaatggcacggctggttctgccgtagggtcaccagtagccaatctagtatctaggctaggctctttcacattcagaaggacatcatctggcagggtagaaaccaccactgacccagaatcagatgaaaccgcatcggtcggtgggagctttttcgaaacactcacttcctctgaattctacaagaacacaaaggttggcgatatctcaggaagcttccgatgggcgccattcctggcactgcagacatctgacacattcctcaccatgttgctgctgctgtccaagtacaggatgaagagcctcccagtagtagacattgggggagataagattgagaacatcattacgcaatcttccgttgtgcacatgcttgcagagtgtgttggacttccttggtttgagagctggggaactaagaaactctccgagctggggcttcctctcatgaagccatgcaaactcgttaaggtaaatgaagaccaacctgtgttaaaagccttccaactgatgagggaaaaaggcgttggtggcctcccggttatggacacaagtggcacaaaagcaattggcaatatcagcatcagagatgtccaatatcttctaactgcccccaacatatacaaagattacaggacaatcacggccaaggatttccttaccgcggtccggcaacaccttcaggagcaacacgaggcctcgccgttgctcggctccgtcatcacatgcagaagggatgatgaagtcaaggacatcatactgaagctggactcggagaagatccacaggatctacgtgatcgatgacaaggggaacaccgagggggtcatcacgctgagggacataatctccaagctggtgcacgagccacgccattactttggggatttcttcgatggtgttgttcccctgcctccaaacagcactgtatgacacggcccttgagatttcatcacgctggtgtgctcttgtaaattgtacattatgtccctttacgacaatggttccaaatggatgggaatagtgtacagtttgccttgtgtagttctttggcagtggaacaactaatggactaatggatagcacgggtgtacattcaataacttgaaataaaatctgagctcccttctgtatgttttatgagagaaaaacaaaaacaaacgcgaactcccgggttttgctctaaccaattttctgtctccaagacatggatattttgcagaaattgtgcttaa

SEQ ID NO: 58746 - DNA, 237 bp, Oryza sativa
  unsure (1)..(237): unsure at all n locations
  Clone ID: PAT_MRT4530_60432C.1
ccacgcgtncnnacctagatctgctnctcntactccttcancnnaccgagggtttcgactncggcttccancgntgncgcagaggggacgaaccgaggggcaagaatggcggcgcgggacctnagatccggcctcccccttctncgancccagctgtccnaggantgctcaagtngatttgngtcntanntngcaaanncnacnnggaaggctatnaaggttacagaagctctatat

SEQ ID NO: 58747 - DNA, 401 bp, Oryza sativa
  Clone ID: PAT_MRT4530_60433C.1
ggttgtgttattatttgtgttgtttttattttttcttttttcaattctttgtgcttggaaactcacaattccacggtttaacaagaaaccaatattccgagtacattaatagtttaaacaaaaaatacaggaatccattcataaaatgagacgatttggtaacgcaaaccgaacaaaaggcaaaccccagaaaagatcaacttcgccagattgatgaaagaagaccccttcttttacaaagcaacgtgagccttggccttgagctcgggaacattcttgaccccctcttatacttttgactcctccgtccaaaaaaacagatcaaggccacttttaccttgctacagtccgaacattgtcaaattcctgcgggcccggcaccggggggaagccaccccccg

SEQ ID NO: 58748 - DNA, 308 bp, Oryza sativa
  Clone ID: PAT_MRT4530_60434C.1
ggccgctctttttttttttttttcttttttacattttcgatgtattttcttatgttttactattttttttttttatttttttttttagtttttttttgtttcgggtttgcttgcaacatacaaccccgcccaagggtctaatcaaaaagacgcggatcctctaaaacagaatatcgaaacgcaaaactagattggtctggaagtgttccggcccgacgcgcttgaagggttcttatcaaaggtaggatgctctggcgaccaaaggtcctctcctaggacgcccaagggtgtagggagggcatcttaaa

SEQ ID NO: 58749 - DNA, 262 bp, Oryza sativa
  Clone ID: PAT_MRT4530_60435C.1
gttagacatactctatctcatagcatctgttcgtttactggcaatataccacgaaagatggcttctgacatcgttggacaccatcatatgtgaccaaagaggtagctgaggtaacacccggagtgtttcagggatgggtatagcagatctgaggatggggagaaggatgggaccaaactcaaggccagcatttagaagtaaactggtaacaacagaaacaagtacattcccaggaacaactggtggtactaagatcaggaag

SEQ ID NO: 58750 - DNA, 419 bp, Oryza sativa
  Clone ID: PAT_MRT4530_60436C.1
cccgtgccattccgacctgacagttgggccgtgcctagggcgatgccatccccaaacaggagtagggtattacctctcattgagagggcctgaacctgtctaaatcctttgtctccgcatccatccacttttaggtctcgtgcgctacccccttttattattgccgaattcatgtttcgacagttggcgcgccaggtaggggttgcgtcgagtttcctatcaacgagtgcgatggaatcaacttcatgagtcgccgacttcgttttcgctttgggagttttcgcttcctcgtcgccgacaacttcaacaagttctctctggctcagattcaaatcagtcgggaaggctcaagatggcttcgttctcatccggtcatcgccatgttcgtcgacaccatcctgtggtcagatcaatcttaa

SEQ ID NO: 58751 - DNA, 747 bp, Oryza sativa
  Clone ID: PAT_MRT4530_60437C.1
cgcagctgagctgagctagcaagcgagcgagccgagctcgagctccatttgcttcttctcgtggcggcagcgcctcctccccgtcgccgtcgtctccacgtcgtccgctccgatccgcctcgatcggcgttcgatcgcgtccaccacctcgatctccagaaacctttatataagcagccgcgtccgcattcttgttcgatctatctctccacaccatgccttcgttgctcgactcgccgccgcagatcacgccggcggctgctgccggcgactggagctcgctgtacgcggcggcgcaggcggagacggccgtgaaggcgccgcggcatggggcggtggcggtgaagaaggccgcggcgtatggtggtggcggcgggaggaggatcaagaacctggagatgtgcaccgaggcgctcgggtgcgagaccggcggcgtcgacggcgcggcggccaccgccgccgatgccgtcgttgtcgctgctgctgcggcggcggcggcggctgaggatgccatgcccgtggtggtggagaccgacggcgcggagaggaagaggcgcgcccgggaggaggaagcggggtcgatggtggagctggcggccgccgcggcgagggcgcgccgcgcgggcccccgcggcggcgcgccgctgcccccgccgctgacgacgctggcgcgcggcgagagccgcttgcacatggtgcaggaacgccgcaacgggcggttggcggggaaccccgtgccgacgggcg

SEQ ID NO: 58752 - DNA, 651 bp, Oryza sativa
  Clone ID: PAT_MRT4530_60438C.1
atgtccgtggcggaggcaatcgggcgcttgagggcgttcgaggaatccttgaagggtcggcgccgcgaaccggaggttgagtatttgttgctcacacgtgcacaatgggagaatctctatatcaaggagaagaaaggagaagacggcagcgactccaacagtagcgagcgcaaggttgataggaagaagctgcagattgcatgtctgtttgtagacttaaggccggtagaggtgcatgaggaggttggtgcactgcggcgacggagctgccagccacctcgcagatccggcgatgctggccttctccctcgcagacccgatggcaacggccttcttccatgcaaaccagcacagccagccttctccctcgcagatctggtggcggcggcctcaggagcggtggatccaccgccactggcctctcttgtagatctggctatgacaatgatgggtggccctggccctaggaggggcggattcacatgcgttagcgtcaagtgtggcagtggcgttgacgacgatggcggcaagcttagcagtggtggatctagtggccacagccccgggaaaggcggattcgccgttgttggccttgggtgcggccagtggcggagccacgttgagtttgggtggtgcacaggaaccccctaa

SEQ ID NO: 58753 - DNA, 558 bp, Oryza sativa
  unsure (1)..(558): unsure at all n locations
  Clone ID: PAT_MRT4530_60439C.1
ccaaccaaggtanngtgttcnntcggtatttgcgtgccgtcgtcgnnttctctttccgtgctncnngcggcggcgnnnatggcgacnncatggnncggnnaccaccacnncaagnntctaccannnccccggtnngagcannatgtcggtccatggtaattatagctatcnnncgacataccctcactccgcgcgggtggtcggaaccattgnngtgaggcgcccnnnatgcgttggcncccgtggcgtcggccccagcgccgcggnacgaagcctaagtctggcaagtactnngctgccggcagtctcgcccgcccgtcgacgacggcttggtgcagngtgccggggcgctcgatcacatgctgtcaggcatctacagggagctcggcgcncccgtggccgggcaccccatggccgaggtgttccccggctgccggtgaggggacttggtgcgcgcggcggcgagcctcccggcgttcttgctcgtggtcttccccnatgggcctggtggtgtctgcttctggcttgggtctccttggtccccttgcgccggtccct

SEQ ID NO: 58754 - DNA, 228 bp, Oryza sativa
  Clone ID: PAT_MRT4530_6043C.1
atgtccaaccaggggaccccccggccgcataaccgcgacgacgacgatgaccggaccggtgacccggccgacgcgcgcggcagacgcgcaccaaccatgcgtcgccccgatcccattcctccggcgacgccagcagcggccaaccagccgtcgtgtcgtcctgcccccggccggccaaaacgacagatagctctcgccggcggggccggctcacgggcgccgggaagc

SEQ ID NO: 58755 - DNA, 1023 bp, Oryza sativa
  Clone ID: PAT_MRT4530_60440C.1
atgcagcctgacccgcagccgcatgggcgggggagggagaaggcggcgggggcgggcccgcggctcccgccgccggtgaccgcgccgtcggtggggcggccggcgtcggtgctcccccacaagacggcgaacgtgcgggaccactaccgcatcgggaagaagctggggcaggggcagttcgggaccacgtacctgtgcgtggggaagcccgacggcggcgagtacgcgtgcaagtccatccccaagcggaagctgctgtgccgggaggactacgaggacgtgtggcgcgagatccagatcatgcaccacctctccgagcacccaaacgtcgtccgcatccggggcgcctacgaggacgcgctgttcgtccacatcgtcatggagctctgcgccggcggcgagctcttcgaccgcatcgtcgccaagggccactacaccgagcgcgccgccgcgctgctcatcaggaccatcgtcggggtcgtcgaagggtgccactcgctcggcgtcatgcaccgcgacctcaagccggagaacttcctcttcgccagcaccgccgaggacgccccgctcaaggccaccgatttcgggctctccgtgttctacaagcccggtgacaaattttctgatgttgttgggagcccttattatgtcgcacctgaggtgcttcaaaaaatctatggcccagaagctgacgtctggagtgctggggtaatcctgtacattttgctgtgtggtgtgcccccattttgggcagaaactgaatctggaatcttcaggcaaattcttagaggcaaacttgatttggaatctgatccgtggcctagtatatctgatagtgctaaagatctagtccgtaatatgcttatccgtgatcctacaaagagatttactgctcacgaggttctctgtcatccatggattgttgatgatgctgtggcacctgataagcctattgattctgctgttttgtcaaggctgaaacacttttctgcaatgaacaagctcaagaagatggctttgagg

SEQ ID NO: 58756 - DNA, 570 bp, Oryza sativa
  Clone ID: PAT_MRT4530_60441C.1
cggcacgaggccatccatccaccaagcccacgagtcccccggcgcgagccaaacccaacaaccatggcgaccccgttctgcgccgccgcgtgccgcctctccatctccccgcccaacgcggcgccgtcggcgcccggccgcgcccgcgccctcgcccggcgtggcctggtggtggcggtgcgcgcggaggcgggggtcggcgggataaacccgtccatccggaaggaggaggagaaggtggtcgacactgtcctcgccggcgagctctccaagccgctcaccccgtactgccggtgctggagatcaggcacatttcccctttgtgatggaagccatgtgaagcacaacaaagcaacgggtgataatgtggggcccttacttgttaagaagtagaatgagtttcttccttgttaaaaaataagaagatgaaatgaatttcttcatcctggcctcatgttgagtcaaacaatatttgcatgtcatagtttgtatgatcatttttgtcacatgtaaagatcatgctgtgtcaaagtaacttttattgatccctcaaaaaaaaaaaaaaaaaaa

SEQ ID NO: 58757 - DNA, 1165 bp, Oryza sativa
  Clone ID: PAT_MRT4530_60442C.1
atggcggagaccaaccacctcctcctcctcctcctctctcctccgcgcctccgcctcctctcctggactcccacgactcctcttgcgtgtgctgcgttgagtcgagcagccaagctgtctcgtgatctcgtctcggagaagggagaacgaggcatccggtcgttcaaaaaaaatattgctgaacaacatatgcatgccagcttagggctggaccagctagcagccattggtagcctgtatcagttcataaggggaggaggtgaaggcaaggaggcagctagccaagaagaagagcagacaccaaaactcagatctgttattgcacatcttgtttccaggaagaggagaagggataggatcaatgagaagctgaaggcgctgcaagagctacttccaaattgcaccaagaccgacaaagtttcgatgctggatgaagcgatcgactacctgaaatcactccaactacaactccagatgctggtcatggggaagggaatggcaccggttgttcctcctgagctgcaacaatacatgcactatatcacagctgatccttctcaaattcctcccatacgcccctccgagccgcggccatttcagataacccacgccacccaacagagacagtctaacgtcgagtcggatttcttgagccagatgcagaatttgcacccttcagagccacctcaaaatttcctcagaccaccaaaattgcagttgtacacgccggagcagcagagaagaggtctagctagtagcagtggccacaacagcggttggatcacggagaggaattcatcgtacaacttcttggagtgatgaccacctgacgagttactaagagatccagaagcagatgcagtctagactctactactctagactgcataaccttcattcagttcatggtgttcctggagatgaaacaagttgctcaatggagtgatgaatctactgcatgcagttaactagttaattttgtacgtcaaataaatagtggtgatcctgatcttgcttcctcgtcatgttctgtgcatacaagacctaaagcgttttttgtgatctctgtactgtatattagcagacagtctacttcctgctgctgatgcttatgtgctctgacaagcaaatcacatggctaatttaatcaaaaaaaaaaaaaaaa

SEQ ID NO: 58758 - DNA, 356 bp, Oryza sativa
  Clone ID: PAT_MRT4530_60443C.1
attacgcaccaaactattacaacatactcaccatattctgaccacactaaatagttcggggacactattcaggggtgcgggggccgacattacatcaaaatctaccccgacattaacgccactcttgacatccgataacgctccaagtgcaccacttctcccaaacaactatacctggttcttcacataaactaaaacacgcctgttctgatgaacaaccaacactaccaaaacgcgctctctcacgatgtggtgagacattctgaccagatagatgcaacaccacacccacaatgcggcactttaggctcaaaacacatcttatcataatcatgaatctcataagagattcaacc

SEQ ID NO: 58759 - DNA, 285 bp, Oryza sativa
  Clone ID: PAT_MRT4530_60444C.1
atataacttttttttttcctgttcggaagacaggaatgtatcttgggtaaactttggaacgctctagaatggacaagggcatcgatcccattattgggcctataatttaatcgccttcgctaataagagggggcatccttttatgtctaagggaagggtttcaaaatctaccaaccattctttatttaagaacgtccaaagtgaatagagatgctgaaccaaaaagcggttcagcatgagcaatctttaaattgcaacacagctcaatcaccggttaagataagg

SEQ ID NO: 58760 - DNA, 378 bp, Oryza sativa
  Clone ID: PAT_MRT4530_60445C.1
aagtcaccacgcgtcacgcagtacgatccacattatgttcatgtgtatagatcagctagtattatttctatgtcctgaaaataaaatgtatcacaactcgcattggcctgcccccttctggcaaccagctacgtttcaattgataaacaaccaaatcatgcaacaacagtgttgccaacagctcaagctggtggccccaccatcttactaacatgccattagttgcgttcaagcgattgtgcattatctacagctgcataaagtcagtgttgtgtactttgttcaaactcaaacttaaggctaaacctttgtggtcctaaacttgccatccatatgtggaatctatcctaactactacattgctcttacgagcattcc

SEQ ID NO: 58761 - DNA, 717 bp, Oryza sativa
  Clone ID: PAT_MRT4530_60446C.1
cagtcatgatgccccaagtaagaatgctgacatgaaaaaaggtcgcaatccacgccagatacatgatgacaatcagctcctcaagcttctggttctgtatcttcacctgcactctcgtcattgataattccttctctaaaagaggctactggtgacaagtttaacggaccagttgttcatacattccttgattccttgatgcatctcgaaaaagagctacctggatcttgtgaggtgctgattggcagaatgctccatcggctagggagctcgaaggagtcctcgctgcaaagtcttcaagagacggcgacatcagttttcgcaaagaaatctgaacctccctctgaacctccaagtaacaagaaaatggctaatacaccttccttggctgcccctaccgtaagccctttggcgaggttccttcttacaaggtggcaaaaccaagtttcccaagatcttaactccgtctgaagacaatacaaacaaaaaaaaaacccgtcatgattcaatgtataattaattttgagtgtacataacgctatggttagaaatctctttgttgctagctgttctcagcagcttgtgctgctaccggttgtttcatttgtttgtgttcgcggtgaataacacattttctacccattttataatgtaactttgcacccactgtacctgtatatcacctgaggaacattaataacacatcaatttttttcc

SEQ ID NO: 58762 - DNA, 764 bp, Oryza sativa
  Clone ID: PAT_MRT4530_60447C.1
acgagccgctcgaggaggcagctcccccccaaaaaccctagctcaggcttcggcaccgcctctccccccctcgccttcctccccccaccaggcgcctccaagatgaagctcgtcaggttcttgatgaagctgaacaacgagacggtaacgatcgagctcaagaacggcaccaccgtccatggcaccatcactggtgttgatatcagcatgaacacgcacctgaaaactgtgaaactcacattgaaagggaaaaatcctgttacctttgatcacctcagtgtgaggggaaacaacattcgctattacattcttcctgacagcttaaacctggagacattgctggttgaggatacaccgagggtcaaggctaagaagccaactgcagggaagcctttggggcgtgggcgcggccgtggtcgtgggcgcggtcgtggcaggggacgctgagcttcactccagttccctatcttggaaacttttgcatccgtgcaaatgtaatctctgctctcgtgttagcttgtacggagtagtgttctgattatggcaaagacgttgatgtaagcactcggcacctctttatcgatgtggattttttcccggttggtatttgaccagatgttcttgttcaagaatatgctacgttacattgtaattactgtgccatgatgctctagcttctcagtgagtggtcgaatccttccccaactttttactaaaaaaaaaaaaaaaaaaaaaaaaaaaaaaaaaaaaaaaaaaaaaaaaaa

SEQ ID NO: 58763 - DNA, 1759 bp, Oryza sativa
  Clone ID: PAT_MRT4530_60448C.1
aatgagcctcgagcacaacaagatgatgatcactctcgtgcggttgctgccgctcgtcctcgtcgtggcattggcgtggcctgcggctgaggcgccggccgccgcgagccccccaccggacccggtgcagtgctcgtccggcagcggcacggccgactgcaccgtgtcgagcgcgtacggcgtcttcccggaccggtcgacgtgccgcgcggccgccgccgtgtatccttctacggaggaggagctggtccgggccgtggccaacgcgacagcgtccgggaccaagatgaaggtggccaccaggtactcccacagcatcccgcagctggcctgccccggcgacggcgacggcgagggcctcgtcatcagcactaggcggctcaaccgcgtggtggccgtcgacgccggcaggatggaggtgacggtggagagcggcatatcgctgcgggagctcatcgccgaggcgggcaaggccgggatggcgctgccgtacgcgccctactggtgggggctcaccgtgggcggcatgctcggcacgggcgcgcacggcagctcgctgtgggggaaaggcagcgccgtgcacgagtacgtggtcgggatgcgcatcgtcacgccggcgcccgccgccgacgggtacgccaaggtgcgggtgctcaccgcggccgacccggagcttgacgccgccaaggtctccctaggcgtcctaggagtcatttctcaggtgactctggcgctgcaacctctgttcaagcgttctgtgacgttcatggagcgcgacgacgacgacctggcggaccaggtgaccaagttcggctaccagcacgagttcgccgacatcgcctggtacccgggcatcgggcgagcggtgtaccgcgtggacgaccggctgccgatgaacgcctccggcgagggcgtcctcgacttcatcggcttccgtgccacgccgagacttctgatccgtactaaccgcctcgcggaggagctgttcgagcgcgcgggcaacggcaacggcaagtgcgtgacgtcaagggtcacccacgcggcgctctcgtcggccgggtacgggctgatgcggcggagcggcgggctgttcaccgggtacccggtggtgggcccgcagcacctgatgcaggcgtccggcggctgcatcaccgggccggaggacgcgctcctgacggcgtgcccgtgggacccccgggtgaggggctccagcttcttccaccagaccaccttcagcctgccggtgagccgtgccggggcgttcgtcgaggaggtccggcggctccgtgacatgaaccccaaagcgctctgcggtgtggagctctacgacggaatcctgatccgctacgtcaaggcgtcgaccgcgcacctcgggaaaccggcggcaggaggcggccaggcgcggctgttcgaggatgtcctggaggagatcgagcagatgggggtgttcaagtacggcggcctgccgcactggggcaagaaccgcaacctcgccttcgtcggcgccgcccgtaagtacccgcgcatcggcgagttcctccgcatcaaggacgcctatgaccccgacggcctcttctccagcgactggagcgacatgatgcttggcattggcggccgtgcgccgaccagggacgcgccgggttgcgcgctggaggggatgtgtgtgtgctcgcaggacgcgcactgcgcgccggagcaaggttatgtgtgtcgccccggcaaggtgtacaaggatgccagggtctgcaccaaggtgtag

SEQ ID NO: 58764 - DNA, 1794 bp, Oryza sativa
  Clone ID: PAT_MRT4530_60449C.1
atgatgatcactctcgtgcggttgctgccgctcgtcctcgtcgtggcattggcgtggcctgcggctgaggcgccggccgccgcgagccccccaccggacccggtgcagtgctcgtccggcagcggcacggccgactgcaccgtgtcgagcgcgtacggcgtcttcccggaccggtcgacgtgccgcgcggccgccgccgtgtatccttctacggaggaggagctggtccgggccgtggccaacgcgacagcgtccgggaccaagatgaaggtggccaccaggtactcccacagcatcccgcagctggcctgccccggcgacggcgacggcgagggcctcgtcatcagcactaggcggctcaaccgcgtggtggccgtcgacgccggcaggatggaggtgacggtggagagcggcatatcgctgcgggagctcatcgccgaggcgggcaaggccgggatggcgctgccgtacgcgccctactggtgggggctcaccgtgggcggcatgctcggcacgggcgcgcacggcagctcgctgtgggggaaaggcagcgccgtgcacgagtacgtggtcgggatgcgcatcgtcacgccggcgcccgccgccgacgggtacgccaaggtgcgggtgctcaccgcggccgacccggagcttgacgccgccaaggtctccctaggcgtcctaggagtcatttctcaggtgactctggcgctgcaacctctgttcaagcgttctgtgacgttcatggagcgcgacgacgacgacctggcggaccaggtgaccaagttcggctaccagcacgagttcgccgacatcgcctggtacccgggcatcgggcgagcggtgtaccgcgtggacgaccggctgccgatgaacgcctccggcgagggcgtcctcgacttcatcggcttccgtgccacgccgagacttctgatccgtactaaccgcctcgcggaggagctgttcgagcgcgcgggcaacggcaacggcaagtgcgtgacgtcaagggtcacccacgcggcgctctcgtcggccgggtacgggctgatgcggcggagcggcgggctgttcaccgggtacccggtggtgggcccgcagcacctgatgcaggcgtccggcggctgcatcaccgggccggaggacgcgctcctgacggcgtgcccgtgggacccccgggtgaggggctccagcttcttccaccagaccaccttcagcctgccggtgagccgtgccggggcgttcgtcgaggaggtccggcggctccgtgacatgaaccccaaagcgctctgcggtgtggagctctacgacggaatcctgatccgctacgtcaaggcgtcgaccgcgcacctcgggaaaccggcggcaggaggcggccagtcggacgacatggtggacttcgacatgacgtactaccgcagccgcgaccccaacagggcgcggctgttcgaggatgtcctggaggagatcgagcagatgggggtgttcaagtacggcggcctgccgcactggggcaagaaccgcaacctcgccttcgtcggcgccgcccgtaagtacccgcgcatcggcgagttcctccgcatcaaggacgcctatgaccccgacggcctcttctccagcgactggagcgacatgatgcttggcattggcggccgtgcgccgaccagggacgcgccgggttgcgcgctggaggggatgtgtgtgtgctcgcaggacgcgcactgcgcgccggagcaaggttatgtgtgtcgccccggcaaggtgtacaaggatgccagggtctgcaccaaggtgtag

SEQ ID NO: 58765 - DNA, 1016 bp, Oryza sativa
  Clone ID: PAT_MRT4530_6044C.1
atgagtagagtgtccactagttggggttttgtttaatctagggtgaacaaggccgaggggaggggcgcgcggaccaggtccacgggagtggggccgacgcggcagcctctcggtccacggtggaccgggtgcacgcggcttacgccggccggcgccgtgggtcccacgcgtcagccgcacccgagggcgcgggcggctgacggccgggccccacatggcagccgcggggcgcgcccgaaggcggcctcgccagcacagccgacgggaggcggcacgcccgcgccccgatggtcgccgccggcgaccaccggcgcggcggagcggcgcccgagagaggggagggaagggggaagcgaaacggcggtccacggctcaccccgggtcgacggcgacgacgggaaaggctaccggagcagaggaaggcggcggcacagcacgggtcgacggggacggcggcgttccggcggtcggcgggcgaaacggaggggtggacgaggtcgacgaggtcgcggcgagaggcggaaacggaggaggggggcacggggagtgcttatatagtgttgggagggggagagagcggccggatgagggggaatcggccgcggaagatccggccgccattgatgcgccggcgaagtttgcgggagggtttccaaacgaatccgagggagagagagagggaaaagtggggggaaagagggagggaatcacggggagtgatttccccctctttattgcgcgcgggggcggcgggatgcggcggaatccgcggcggcggcggcgctagggcacgggcgaggcggcgggtgcggcgcgaggtaggggatgacgggtgggccccacccgtcagcgagggtggcgggcgggcccgcccgtcagcggcgcgcgtgcgggggaaggccggatgggccgcgggggggagaggagagagagggagggagctgggccgagccggcccaagaagggaaaaagggggggaaagactttttaggatttttctttttataaaacctttt

SEQ ID NO: 58766 - DNA, 485 bp, Oryza sativa
  unsure (1)..(485): unsure at all n locations
  Clone ID: PAT_MRT4530_60450C.1
agctcgtgccgaattcggcncnaggcgaagccaagcgacnaggcgaaaaatgacgccggcggcgaaagcgaagcggcgccggaggcgaaagcgaaaggcgacaacattngcgccnaacccnccnaanaaaccgttcccncggcggcggtgaaagangctnncnatgacnaccaangagcnnaggacgaaaaaaacaagcccnangacgccggngaaaccgcgccacccgccgccgccacaangaanganaagtncctgcacttctccccnacaccngcggggcncaancancaccangancactacccctncccnttctacngngcgccccaaccggtngatnaactnccacatngcgcancccaaaanaaacgtntcctnctnnnccccccngncgganccngcgttctccnttcancancaccccgccncccgggttttcccgccccccccgcagcaacagcaataccccgcgtctcgtctcc

SEQ ID NO: 58767 - DNA, 373 bp, Oryza sativa
  Clone ID: PAT_MRT4530_60451C.1
aacctaacaggattgacccatccgccgccaccgcccccgagaagccaaaacaaagtggccccccccgagttcatcttattgaaacagcagaatttccctactcacacgacacacacaggacccagcggaccaacggatagggggcccacgcaacccactaggacccagggaaacgaggagggggcttggggcctcgggggggtccggctctgccgggagaagaagccccggacggcccctccgggactcaagcttcgggtaaaacaggttcaccttcctaaggtccctgatcaccgggtgcagcttcagctggaccaggttctcctcccaaaggacccaaagggacaggcaggttccggacaaccccctcccc

SEQ ID NO: 58768 - DNA, 223 bp, Oryza sativa
  Clone ID: PAT_MRT4530_60452C.1
cccttcgagggtggcccccaagtacgttgcttggaaagctccataggtaccttcagttctttgttgcgtgagagctatgccatgtatgtatggcggcttggtgtttccctactacacaggtacggtagccaccgtacccgaaccttgcctttactgtgctcctccatggggctgaagggagggtccaaagtggctgagcggtgtgcctgtgctgctgcgacaa

SEQ ID NO: 58769 - DNA, 671 bp, Oryza sativa
  Clone ID: PAT_MRT4530_60453C.1
gcctccgccggtatcacgagaagcgcatccgagcacgcatactttcgatcggcgactacgtcctccggcgagttcaaagccaagcagggcgaaacaaactctcgcccaaatgggaaggaccgtacacgatcacacaagtcttgcggctaggcgcattcaagattgcagacggtgatggtcgcgaagatttcaatcaaagtgtcccttcccgatgatcccttacccagatgacacctagcgttgaaacctatcctcatgtccctttacgcagtcttgataaggcctccgaggaacctaagggaacttcggctggggacgcctagagccgataaggccttgtcggatccgttgcagtggtccatgatgtcaggaccttcttcgagaggaaagaagtcgaacacaccactaatcggtgttggcggcgggcgggagaagaagtccggaaacctaaggccccagaagtcgatgaagatgccagcgagcgacagcgggaggaggtccgcacgtagcagcccgcgggagtcgatggtggaacgccagtccgtacaaacacaccgcaacgcggccaggctgcggggtggcaggcgccggaggatttcggcgagcacgtcctccggtagcaccacctcgacgcctctcgctgcgagcggcgcctcttccatgatctccat

SEQ ID NO: 58770 - DNA, 1137 bp, Oryza sativa
  Clone ID: PAT_MRT4530_60454C.1
cacgcgtccgcacaggagagatggccggacacgacgagctgaagctgctcggccactggtcgagcgcctacgtcaccagagtgaagctcgcgctccacctcaagggcgtgagctacgagtacgtcgaggaggatctccgcaacaagagcgacctcttgctcgcctccaacccggtgcacaagacggtgcccgtgctcatccacaacgggaaccccatccgcgagtcgcagatcatcgtgcagtacatcgacgaggtcttctccggcgccggcgactccatcctccccgccgacccatatgaacgcgccgttgctcgcttctgggccgcatacatcgacgacaagctactggcgccatggaagaaggtattcagggccaagacggaggaggagagggccgcgtggatgaagcagatgttcgtcgcggtggacgttctggagggaggcctgaaggagtgctccaaggggaagggatgcttcttcggcggcgacagcgtcgggtacgtcgacgtcgtgctggggggtgccgtctccttcgtgcacgccaacgacatgatcaccggtggaaagctcttcgacgctgcgaggacgccgctgctggcggcgtggttggagcgcttcggcgagctcgacgccgccaaggcggtgctgcaggacgtcgacagggcggtggagcacaccaaggtgcggtacgcacggaatgccgccaccgccgcaaacgactgaattagttaagttaaacaggcgtggctacgtacgtgtctccggctggctagcttgctcggacaaatgtacgtctggattagattagattgctcaatattttcactagctgttgtcgttacactactatagaaacacacatgcatattgacactatataagtgccggaacagccaaaaccgacacatatagtgtttctcccatctctacgggctgaaaattaaaaaaaataggaacctttaaacaaaggtgctggttttagagaaaaaccggcacctatactacatgtatctttttttaaaggtacctacaatatattattggtgtcggcttttaattaaccgacacctataatatactgtaggtatcagtataccatagattattagttctttcaaaaaaaaaaaaaaaaaaa

SEQ ID NO: 58771 - DNA, 408 bp, Oryza sativa
  Clone ID: PAT_MRT4530_60455C.1
tttgttatgtgaactcggcctccaatcctgacgggggagtcatatgaagggataggcaggtacatatgatgaggcttattgcccctaatcattgtatgcttccctagttttatagtgcttttcgcccccaagccatcttttgtttatcacaagatcatggagcgccagcctcttattctcataatcaggaacaggttcaagtatgatctgacataccaagaggttatttctatctctcattgcagtgccacgtcttggatgatgtgctaggtcacctactgacaagacctacccagcctgttacaatgaatggaatttccatccacaagacttgagcgaactacatgcttatgtacgactaccaaaggacaatcctctacattatatctttataggctaaaatactaa

SEQ ID NO: 58772 - DNA, 3071 bp, Oryza sativa
  Clone ID: PAT_MRT4530_60456C.1
cggcacgaggcctcgtgccgaattcggcacgaggcgcgacgcgagcacgagcagcgcggcggcccaactcccgaggtggtgtaaagccttctcctctccgctaccttcttccaagatcgcgttcctgctctctgaattacgcggtacagtaccggggtaggggcgcgcgagtacttgcctacagataccgcggcggctacggtttctagtagcggaattgtactaagatttgcgggggtagtatagtttagctgctgaattgccgggtagtatgtagattcgttggctgcagctatgctatatcttaggggggcgccgccgcggcggagttagggtttagaccggccggtgatggggaagggcggcggctgcgtccccagcaagaagcggcagccgccggccagcaccgtcgccggcgcgccgtcgtcgtcgtcggcgccgcgcgacgcccccgaggcggaggcgtcgggggaggcggccggggggcggcggaggctgcggctgtacatcgtgttctactcgatgtacgggcacgtggaggcgctggcgcggcgggcggcggcgggcgtcgcggcggtggacggggtggaggcggtgctgcggcgcgtccccgagacgctcccgccgggcgtgctggagaagatgcaggcgccggccaaggaccccgccgtcccggtcatcgcggcggcggcggacctggaggaggccgacggggtgctgttcgggttcccgacgaggtacggcgccatggccgcgcagatgaaggcgttcttcgactccaccggctccctctgggagaagcagaagctcgccgggaagcccgccgggttctcccgtacagcaccggcacgcagggacgcggccaggagaccaccgcttggacggcaatcacccagatagtgcaccatggaatgctctttgtcccgattggctacaccttcgggtcaggcatgttcaagatggatgagatcagaggaggcagcccctatggcgctggcgtcttcgctggtgatggcagcagacagcccagcgagacggagctcgccctagccgagcaccagggcaagtacatggcctccatagtgaagaagcttgcccaggcttgagcctagaagaagttgaatcctcccacgacgccactgtgcagtccaaactccacacgatcgtccagtcgccattgatttccccctattggtttttcttcttctatatgtaatgtgcacagcctgatgatcctcagatcgtcgtcgtatttgttcgtcacagatttatctgtaaattgttgacataaaacattgtttggtgtccagttgaacactaagtgtgccatacggtgttgatcgaaataacatacatcacttgccatagagcttgcaagtacaataccagaagctggagatgaggcatttcagattcaccgcttgaagcgatctgcatatgctgctgtgctgagagcgttctatgctcaaccagaccttctctcaggggccaaggaaggtagtcttgcaaaactgagaagtgaattcacaatatttgacaccgagcacagagaatatctaatgaaggctatctcaggaagtcagtctttgagtgttggtttgaacaaagcaagcatttgtaatattgaagttacaaaggattctctagatcttgtacccatgataacagatgctcaagatactgcatttcagattcactgcttggagcgatcagcatatgcttctgtgttaagagctttctttgctcagtcagaactcctctcacggtcacaggccaagcttctcactgaactgaggaaaaaacttagaatatcagatgcggagcttagagaagttctcatgaatgtcacttcaaacgagtatatcaagtctttgcggaattgtagtttggcaaataactctggtcttaaggatcctacttttgatgcacgtgccatggttcctgataagctcgtcaaagatggacaaagcttcacctcattcacaaactgcatcagtttgtctcaggaatcacaaatatcaccgcgttcaatgctatctgtgaggagtgttgacatattacgtagctctcacaggaccaaaaagggtccctgtctttatccccatgcaatagttcctgctaagaagtactctggaaatgagtacacattatcatacttaaaatcctctccagctgaacaattgccagttgcagtttcctctgtgcaggtgaaacgtagcacagatgatccgcttgatactaagacattaccttgtgaagtgaagactggctgcactctatctcccatccaattaaagcacatccaagcaaatgctggtcatgttcctttgtgtattcatcaagacatgaaagcatcaatgaaaaggaaaactgaagtgccagaagtgacaggatctaagagcttgactgtcatcgtgtcaactgctggaaacatagaacatgattttgacatcatgaagcttgacctaactgccaacctcctgagcaaggttgaacaactgtttagagaaaagccaaacccagatgatttagagacagcaaaggcgatactcaaggtgagaaccctcttgacttggataactcagtatgaacaagaaaaggtccttttagatgcagtccttaagctttctgaagtatcatatgttgaggagtgtttcagcaccaactgccagccagatgagttcaaccagcactatgagtatgagagcgacgacgagatgccgcagaagacagcgagcacaaacgacgccgagacgccaccaaaaccggtgagcccaagcgacaaggaggcgcctccgcagccagtgccaggacgtggtggtggcgccaccagcaaggttttttgctggagacctctcacctctgatcaggctgcattctcaggcagctttaagatgttgcctgctagtagcatagtactatccctgcactgcagttctggaaagtggtcgctggctgtgcccatctccagcatggttaaactgtacattcatcacggttttgtgatggctgagtggcttactcatgcaagatctagttatgcagagacagggattggtcttaactcttaa

SEQ ID NO: 58773 - DNA, 380 bp, Oryza sativa
  Clone ID: PAT_MRT4530_60457C.1
tgtttggtttttaatttttttgggttttttccataaaccatgggttttattactcctacttgtggtacaaacaaacccaagacgacagaacgggccgccaaaaagaagaaagcataccatgaggaaacaaaacggataaaacggtgccccaggtaattagaggagggatagactatgagcacaagggcctccaaccagagggatcaacatatgtactacgactatcccagctagattgggtgaaatcagctgggaaatcttggctaccaaaagccacccggtgaaacagcccgaaacctgccgtgaatgccacagggaacatatgggtgtgaccaggctgaataccaatgcttagaacgacgccagctaagctataaaga

SEQ ID NO: 58774 - DNA, 479 bp, Oryza sativa
  Clone ID: PAT_MRT4530_60458C.1
gcacgagtctcacatcacatttcaccacactccactccatagacacagatcgagcaacgcgtgcgtcggagaagaatgcagtcggagatctgagaagaagaaggttagccatggccatggcgctgctcttcctcctcctcctgctgccgccgcccgccgcgcccttctccctggacttcttcccggaatccccatctcccccgcgcctcgccctctccggcgcagcctccctccgccccaccgccgtctccatggcgtccccgcgcgcccgcctccagctcactcaccccgtcgccctcggccccgcattctccacctacttctccttctccttgtcaggcccaggctccctctccttcttcctcacgcccctccccccccccgcccgcctccccctccgccccgcccccgtcctcgccgccgtcgcccccgcccccaccgaccgcgcccgcctcgcatgggccttccgcgccaacaac

SEQ ID NO: 58775 - DNA, 443 bp, Oryza sativa
  Clone ID: PAT_MRT4530_60459C.1
atgggcgaccgccgtcgcttactgcctctgcgagcacgccgcgctgcgcggccgtcaacaaccacaatcggcgccgccgccatcgggaatcgattcgatttccctcaccttttcttcacccaaaacctagttcttccaaaaatccccaaatcttcaaggcgctgaaaaatcgattcgaacgcctcttcctgacgccgctccagttccacagggtgtccaacagcacggcgatgcagtccttctccacggccttcgtcatcggcatcatcggcgcgttcgaggaccagggcagcggcagactagcggtggcagagaaggccttgaaagaagaatgttcagactccaaaaccattaacatcgtttcgaactttagacgatatattagagaatccaatttaacagcacaattttttggagcaatgcagcatagagttgggctgaaa

SEQ ID NO: 58776 - DNA, 903 bp, Oryza sativa
  Clone ID: PAT_MRT4530_6045C.1
tactataggggatgctggtccgcctggagccgccggggcggaactggcgggacctgcacgagccgaagaatcccaaaccctctcctccttccatggcgatttgacccccaaaccctagcaatgccctagactaggactagtaggtagcggaaggaagctggaatcggaaggaaggaaggaaggtgggagggatgggttcgaaatcgaacacggagagggcgaggaaggcgctggaggccatgaagcagctgggtttctccaagaaggaggccacccctgtcctcaagaacctcctcaggctcttcggcaacaactgggagcccatcgaggacgagtgctaccgcgccctcgccgacgccatcctcgaccgccaccaggagaccgcagctgaccgcggctgcagcgcgacaaggccaacgccggacgatgatcatcacccccttaccctctgtggtgcttcgcgcgacgtggatactgagaccgacgaacctcgcaccaagaagcctagggccaccaactcagatcctcaatcgcctccatcccttacggacgaccaagatgttcctgcagctatctcacccccatcccatggtgcttctcctcaattccgtccacagaccagggcctctgcacgactgcgccaagcttctccttcttctgttacagcagcacacaagaggccaagacagatgatggatgaagatttccaagactctgcattcctcagggaacccaagcctgagcccgatatcgatatggacgccatacaaggcactgctgctacatcagactgcccaaatgcccaccttggcctcattgactatccgctcaatgccagctcctcaagggttgcacttcctctggcattgcttccacctgatcaaaatgttccacagatttcag

SEQ ID NO: 58777 - DNA, 228 bp, Oryza sativa
  unsure (1)..(228): unsure at all n locations
  Clone ID: PAT_MRT4530_60460C.1
atgaaaactggggcaccttcatttaaaatgaaggaggaaggaatactttctacaaatccaatacaatgcatttgtttatcctgtacaaacaacatgntaatttacagatgaattatacacttggaataaaggcttccaatatgaacctataccagcttaaatacgttgttctacacaaactatctgcacaagatatgacaacagtacacaaatgtatcctggaacaaa

SEQ ID NO: 58778 - DNA, 2037 bp, Oryza sativa
  Clone ID: PAT_MRT4530_60461C.1
atgatgctcgccggctatggcatcctcgccgttgtcctcgtcctcctgccgccgtcggccacgccggctgggatcgctgactgcgacctcggcgtcggcaacacgtacgtgggcaacagcacgttcgaggcgaacctgaaccacctcgccgcggagctccccggcaacgtctccacggcgcataccggcggcttcgcggtcgccaccgtcggcgcggatcccgaccaggtgttcgcgctggcgctctgccgcggcgacgtgaacgccacagcctgccgcgcgtgcgtcgcggcggcgttcgtcgacgggaagaatgcttgccccggcatcaatggcgtcaccgtgtacgaggacgcctgcgtagttcgcttctccggccagaggttcatggatttcctcagtccggatcagtggcaggtcaccgagatgatttgggttcccgagcaagcctcggagagcgtcaatgcgccggcggttggctggttcaacgccgccatcgcgaagatcctcgccgccctggtcgaccacgccgtggccacggcgacgggcaacaactcgaccaccaagaagtatttcgccacgggtgaggaggacttcgaccccaacatctacgggttcgcgcagtgcgtgccggacctgacgcaggagcagtgcaaggaatgcctcaacaccttcctttttcaagcaaaacaagtgtactttggcaagagccttagctgggttggtatgaattcggtgtggtgcagactgatgtatagtgtgcggccgttctacggaggccgggcgatgctgcagctgtcggcgccaccaccaccagcagccgaggctccggttctatctctagagcctggagcagggaagaaaaagagtgcagctggaatcgctgccgtcgtcgcttcttcagttgtggtattgttgatcctttcattttttgcagttgttctcttcaggagaaggtccaaggttactgagactgaccaccagttgaggaagataacaagagcacaatgcttgatttttgacctgccagctctgcaagaggcaacggataacttctcggacaataataagctcggagaaggtggttatggtattgtatacaagggagtactctcagatggacaagaagtagcagtgaagaaacttttgggaacaagtgagcatggattggatcagctacaaaatgaggtgttgttattggcagagcttcaacacaagaaccttgttaagctacaagggttttgcttgcatcagggggaaacactgcttgtttatgaatacgtcaagaacgggagcctggataactttctattcgataccagtaggggaaacacaccaaactgggagcaactgtacaacatcatttttggaattgccaagggaatattgtatcttcacgaggactcaagcttgaggatcattcaccgagacctgaaatcaaacaacatcctacttggggaggacatggaaccaaaaattgcagattttggattggcaaggctactagaagaaggtcatactaatactcggacaactagaattgttggaacattcggttatatggcacctgagtacgcaatacacggaaatgtgtcaaccaagatcgatgttttaagttttggtgtgttggtccttgaaattgtaacagggagaaggaacctcaattctgacgatcatgatcgcgggaatctccttagtgatgtctggaattgctggacaaaagggacggttacacaactaattgaccaatcacttgaagagcaattccgaagacaagcactgcgatgcattcatatcgggctgctgtgtgtccagtcagatcctgatgacaggcctcacatgtcatctgtcattttcatgttgagtagggaaaacatgaatcttcagccaccggcacaacctgcattcttctttgatggagactcaaactcatgttctcaaccctttgagcaacccgtgtataatcggcctaatgcaatctatgaagaggatatctccgtgaataggatgacagttactgacatataccccagataa

SEQ ID NO: 58779 - DNA, 398 bp, Oryza sativa
  Clone ID: PAT_MRT4530_60462C.1
gcttttatccgggactgaaggagcgcaccggggagctgctgttcacacagagtaattatgccctagctaatccacgcccttgggtgatcgcctgctgaccaatgtactcgcgcacgcgcacgccttcctgcctgttggttgaatccaaaagctagccccaccaaagtttgcaccctacgatccccgccatgttagaactactgcctgagctcgcggcgaacatgatgcatccgcgccgcaccgtgccagatgcaagcggagcgcccacgcgtattggatgctcacatgtacgactatctaggcgatgcccgcattgtgatcctgtataggttcctggcgctgtaagactgactgagcatgcagggagtgcgaactgcaccaaacactctcacagaagg

SEQ ID NO: 58780 - DNA, 584 bp, Oryza sativa
  Clone ID: PAT_MRT4530_60463C.1
tttttttttttttttttttttttttttcttaagaaaatcttcaacttcatatacaattaattcgtttgtacactcgaatagtgataacaagttaaatcaatgagaaaaaaaaaagcatagtcaacattgtcgacgtagtagtagaactagaaaccatcagttgaccgttgaacaaacaaattccacctcgcctgcagcggatccgccaccatcggatcggccaccagcacatgcacatcctctccggccgtcgtcgtcgccgctgccgccgccgccgtcagctcgcgccggcacatggggcaggtccctagcttcacccgagcccaagactcgaggcaccgcgagtggaagcggtgcgcgcacggcgtctccacccacgcctccgtcgtcgtcttctccccaccgccgccgccgccgtccaagcaaatcgggcagttgctgccgtcgtccggcgcctccaccgtcttcatcccgatcaacgcctcgccgccaccgccgctgccgccgccgatgtagtcgtcgacgtccatctcctccgtaccatcgtccttcaactggttcaccgactcgctcgacgtcgccat

SEQ ID NO: 58781 - DNA, 512 bp, Oryza sativa
  unsure (1)..(512): unsure at all n locations
  Clone ID: PAT_MRT4530_60465C.1
tcgatctctttcggttcttcangaaacttggttgtcnaatgggaggctcattggagtacttggccggcctgttcagttgtggcgatcatcaccatggccacaagaacagcaagaggaggcagctgcagactgtggagctgaaggtcaggatggactgtgatgggtgcgagctcaaggtcaagaacgccctctccaccttgaaaggcgtcgagtcggtgaagattaacaggaagcagcagaaggtgacggtgagcgggtacgtggaggccagcaaggtgctgaggaaggcgcagtcgacggggaagaagtccgagctgtggccgtacgtgccgtacagcgcggcgagccagccgtacgtcgccgccgccgcctatgacaggcgggccccacccggccacgtcaggaacgtggaggcctcttccgccgcctacgtgtccggcggcggcaggacggaggagcggctcaccaacctgttcaacgacgaggaccccaacgcatgctccctcatgtga

SEQ ID NO: 58782 - DNA, 661 bp, Oryza sativa
  Clone ID: PAT_MRT4530_60466C.1
ccggaacgcgagagcctcgtactcggagcgcagcttctgtgcactcggcttgcctacgcgcatggtcttgatgcagttccacgctgccttcgtcgtctccttggtcgctagcgtcgagatcatctcgacggggacggcgctgcaaatggcgtccaacgccattcgatcttcatggagctccactgcgacccctcccggatcaatggtgccccacaagcagtcaagcatcgagcttgcagcttgatcttcatcagtaaagaccactcgttgtagtttgtcttcgtgagcacggggtagttcgccgcgcctcccgcctccttgaccacgcggtgaatcaccaacccgcggtcgttcccgccgctgcccgaggcgtggctgccggaacctcctagagtgcgcttcgtcagggacgacgagcgacggcgaggcatgagtgcaacttcaagagcacgatcatgcgtccaagccctaaaccttgctctgataccaattgtcaggaaatcccaacgaatcagcgagcgggcgagaacgaacaccggacgaatacaacgcacgcgacactgtagataatctgaaaatggcagagacacacgagagcgggcgccggacgcgtggacccaattacgccgcgcgcggcaccagcgaggcgcagcagccccca

SEQ ID NO: 58783 - DNA, 315 bp, Oryza sativa
  Clone ID: PAT_MRT4530_60467C.1
atggcgtgggcggcctcggcgggaatcgcggcggaaggctggggacgcagccttcccagaggctttttgcagagggatggcagcggcggtcggggtcgtcgtgtcgcgtcgtcgccttgggcagagagggcggcgtcgattggccgcggcagagcggagattggcttggtcggcatcgggcagagccttggcacagcgggaatcgcggacagagggtggcttggtcgtcttggaggcgctgacttcgggttggcactccaaatgttcgacgaaatgacctcaagggggagaggtgaagaggagagggaaaactga

SEQ ID NO: 58784 - DNA, 261 bp, Oryza sativa
  Clone ID: PAT_MRT4530_60468C.1
atgactctgcgatcgcctagcgccgctgctgctgccgctgccgctgccgtctaccgcctcttatttcaggtacttgcccttcccctgcgtcgtgccagtgctacacggaggcacaccacgagcatgagcttgagcaagctgatcaccggaggccataggctttgctactaccaccaattaaccaaccaaccctttggagaccgtggtgatgggcttggcggtgaggatgggggaggtatcgtcgccgacgatgtgctgtag

SEQ ID NO: 58785 - DNA, 134 bp, Oryza sativa
  Clone ID: PAT_MRT4530_60469C.1
gctagctgtgcatgtatgtggtgtggttactagaataattactgatttccttttggttggaagcatatgtgtggtgatataaatgatgaactccgatgttactctctataaatcttgatgattcgctagctgat

SEQ ID NO: 58786 - DNA, 570 bp, Oryza sativa
  Clone ID: PAT_MRT4530_6046C.1
atgaggataactacccgtctcatgggcaaaacggaaggttttcaggacaattctacaaagaagtgtcgcactctcgcagcggcggcagacggggttggtcttgccctctacaggccctcctccacgttcaactcgggcgccctagcgccgtgccgcttcgtaccgccgtcgtcgccgtcgctccagccgcgtcgcgccgccgttgcagccgccgtcgtcggtcgccgtcgccaccatcgggttcgcaaggtcgtcgccgtccccgtctaccgtttcgccaccgccgaagaccgccggagcaccgttgccgccgtcgacccgaaggttgccgccgcttcttcctcgtcgccggcgtcgtccgttgttcttccgccgccgttttggtcaccggtgagttcgccgcgtcgtcctctacgtgctggtgccctccgtttgtgccgaagtgccgccgttcgccggcgagcgtgcgccgcccgagccgtccgctccgccgagccgccgccgctgtcggtgacgtcattgccgacgtcatcgggatcgtccgccgtgagccggtcgtggaccgtttga

SEQ ID NO: 58787 - DNA, 324 bp, Oryza sativa
  Clone ID: PAT_MRT4530_60470C.1
gaaagacaactttttttctatttatgggacccaaagtttcacatgtcacatatgatgatatctgagcttatttttaactctcgaaccactatactgttaaaactcattacaagacaccggctagggtggtaatggtactgggtgcaccatagtacctagggtagataccatatctagatggcacgtataaagccaacatagcttgagcttgagccagattccgatcaaagttgagatcaccaaactgctgtagttgtatctgctgcgctatggcctgaacaatgttaaatgtccccaacgcgttcgaggacacgtgggcgtacc

SEQ ID NO: 58788 - DNA, 471 bp, Oryza sativa
  Clone ID: PAT_MRT4530_60471C.1
atgacgcgcagtgaccttagttttcgtcacgactcgcgcaaaactaaaccatcagtccgaccgagcccccccaaaacttccacgcgctctccgatcccctccatgcaatgtctccggccgtcctcaggtagtcaggtcaggtgggccgtgtgccaggttccccgcgccagcgcgcgagcgactccacggaccacggtctacgggtacgtgccgccgcgcgcctcaggcgtcgaaatcgagtggcacacgtacgcacgagacaagccgcgcgccgacgcgcgtggagtcctccgagtcgaacgatacctgctcctgcggtccgtgcagcgatatgcatgcgtaccacatagccacgcacacggcggcacggcgcatgcacgtagactacaaatcaaactcacggcccgtgtccactgcacgggtgcgggcgcagcgtgcactctcgcgacatgcctcacgtcgcggtggtaa

SEQ ID NO: 58789 - DNA, 485 bp, Oryza sativa
  unsure (1)..(485): unsure at all n locations
  Clone ID: PAT_MRT4530_60472C.1
aacaacaaacatcactagattaaatattaaaacacaaattgccagccatccctgcaattagactaagtcttggtacagctgcattagtggaggcatgatgctatcactaggacatgacatgggagataaccagctgggcacaagttctgactacaatgttgagnaacangaacaatgnngaaaagataagcattcggtcctacatcgactatagccataagnnacatatttacatgcatgtattggtgaatacatagatgatattacagaagggctgagacaacaaacattgacatcgctgggctaatctgttagcataccatgttcttccctggagctcaatatgctagtaggacgggtatggaattggttgcctgtcagtacgacggctaacgtcattcagaacagaaccaaatacgcgtctactatattcgtatgtaccattgcttcatcctctactcgatatcccacttggtgcctcgtgc

SEQ ID NO: 58790 - DNA, 1986 bp, Oryza sativa
  Clone ID: PAT_MRT4530_60473C.1
atggcaaagatgatgctttaccttcttctcctgccattgctcctcctcacatgcatctttgcatcttatgttcattcgatggaatcaagcacctccaagtgctccaatattcccatcccttatccctttggtattcttggtgggaaccctgccccagcccaagggtttgagatcacatgtgcctcatctggcccgatggtacgcattaacaatatcatgtttgggattcttaacatctcgttgctggatggttttgtaagcatcttggccagtgccacttctcagcagtgcaaaaggaattctagcttcagccttgaggggaccaatttcacgttctcagatacaagaaacaaatttacagctctgggttgtgatatggtagccatgctattgaacggtagcagcgggtatagcggtggctgtgcttctttttgctccaccaaaagcaatataattgatggtatgtgctctggcgtggcttgctgccaagcaccagtaccgaaggggttaaagaagcttgagttggagttcactaacataactgggcagctcagcaggcccaaggaggtcaataatactccaacatgtggcgaggctttcatcgtggagcagaactcctatgttttctctagtgttgatctgagcaacactaacaggaacaatcctcaataccgccctgttgttcttgagtggtccattgatggtggctactgtgaggaggcgaaccgcttcatgtcatatgcctgcaaggagaactcctactgctataactcatcaaatggaattggataccgctgcaattgctcccttgggtttcaggggaacccttacttgcaagggcccgatggatgccaagttactggactagctctgctactgcttctccttgttctcatattctggacccattggcttgttaagaagagaaaacttgcgaagataagacagagatactttatgcagaatggtggaatgttgctgaagcagaagatgttttctcaaggtgcaccactgcggatatttacttctagtgaacttgagaaagcaaccaacagcttcagtgatgacaatatcattggtcgaggtggatttgggatcgtgtacaaaggtatattatccaatcaaatggttgtggcaatcaagaaggcgcagcgagttgatcagaaccaaatggaacaattcataaacgagttggtcattctttcacaagtgaaccacaagaatgtggtccagctattaggctgttgtcttgagacagaacttcccttgttagtttatgaattcatcaccaatggggcccttttttctcatcttcaaaatacatctgtcctgatttcatgggaggaccgcctaaggattgcagttgaaactgcatcagcacttgcatacttacacttagctacaaaggaaccaattattcacagggatgtcaagtcatcaaacatactccttgacgagaacttcactgcaaaggtgtctgattttggtgcctcgaggccaataccacacaaccagacccatgtgacaactttagtgcaggggacattggggtacatggaccctgaatatttccaaacaagccagctaactgagaagagtgatgtatacagttttggggtggttcttatcgagctattgacaagacagaaacctatatctgatggtaggacagatgatgtgagaaatctagcatgtcattttagtatgttattctatcagaaccagttgttggaaattgtagattctcaagtagctgaggaagctggcacgaaacatgttaaaaccgttgcacaattggctttacgatgcttaaggtcgagaggtgaagagaggccaaggatgatagaggtggcaattgaacttgaagctctgagaaggctgatgaaacaacacttggtcctgcagaccgaagaagaccctctgctctgcgaatcaggtcagcatgcagatgtaaacatcgaagcatcctccgagtttgagccttga

SEQ ID NO: 58791 - DNA, 354 bp, Oryza sativa
  Clone ID: PAT_MRT4530_60474C.1
atggtttcaatcatcttcaccgcctatggcactgtctcctttagcacttacaaaattgttgatgatgtacccaaacaacagcatcacttggccacatcaattgcaaggaaggaggcaggcattgagaagaggaaggatgaagaagagccaatgggaggtccatcgtcaggcgaccaaaaagcaatgacatgtgtcccctctctccttgacttgataccagtttacacctccaccaacagcaacggcggcgatcaagacggcaacttcctcgacgcccgacgcgccaccctgcatgaccagctgccgtcattgcctccgtgctcattgagtaacgagaccaaaactccaattggt

SEQ ID NO: 58792 - DNA, 1117 bp, Oryza sativa
  Clone ID: PAT_MRT4530_60475C.1
atggtttcctccatggtccttgcacagttgcttctcctctgcttgttatcgctttcctcgagcagttcttcccagatcagcccactcaagtgccccaatagctccgttgatatcccatttcctttcaaaattgccaccaactcaagcttaacgtcaactccaggctttgcgatatcatgtcgtcaaacaggcccaatgattttgctcggtggtaactacagcgtcctcagcatctccctgctcgagggatacgtacgtgtgactggccagaccgtatactcctcccagtgccataacaatagccagggaatcatcgacctcactgccacaaactacatgttctcccacacgcaaaacaagttcaccgccgttggctgtgatgccatggcaatgataagaaacagcagcgatgttgtcggtaacaccaacagcacggtgatgagcagatacagcggggggtgcgtgtcgttctgcgcatcaaatggaagcatcatcagcggcgaatgctccggtgtgggctgctgccagtcgtcagtgcccaaggggctcaacaagctggacttggagttcaccagcatacgggaccagctgatgccacccacgagtgccgtcggtagcggcagcacacggtgcagcaaggcgttcatcgcggagcaggactcgtatgtgttctctaggcatgacctatacaaggacttggggaatctgccgatggtgctcgactggtatatacagggtggcaactgcaaggaggcaagccgcagtcgtcaaacctacatgtgcaaggagaacagttattgctatgaggtggaagatggagctggatatcgctgcaattgctctggaggttacactggcaacccgtacattggatgtgttggtggaagccttggtttgatggctgttctcattgttcttggcttttggacttactggatagtgaagaagaggaggcttgcaaagcagaaacaacgatacttcttgcaaaatggtggtttgttattgcagcagcagatattcacccaccaagcacctgcaaggatattcaccaccagtgagctcgaagatgcaacaaacaacttcagcgatgaccgtattgttggtcgaggtggatatg

SEQ ID NO: 58793 - DNA, 3467 bp, Oryza sativa
  Clone ID: PAT_MRT4530_60476C.1
atgaccctctgactactatatatcaggcctgcaattgctcccttgggtttcaggggaacccttacttgcaagggcccggcaagtttctgaagccctgtatcactgccttgccatgtgaatgatgtaatcattcaatttgaaggcttgagttgattaatgctgcatccagtagagatccctgaattttctgtgtctgtgcagttactggactagctctgctactgcttctccttgttctcatattctggacccattggcttgttaagaagagaaaacttgcgaagataagacagagatactttatgcagaatggtggaatgttgctgaagcagaagatgttttctcaaggtgcaccactgcggatatttacttctagtgaacttgagaaagcaaccaacagcttcagtgatgacaatatcattggtcgaggtggatttgggatcgtgtacaaaggtatattatccaatcaaatggttgtggcaatcaagaaggcgcagcgagttgatcagaaccaaatggaacaattcataaacgagttggtcattctttcacaagtgaaccacaagaatgtggtccagctattaggctgttgtcttgagacagaacttcccttgttagtttatgaattcatcaccaatggggcccttttttctcatcttcaaaatacatctgtcctgatttcatgggaggaccgcctaaggattgcagttgaaactgcatcagcacttgcatacttacacttagctacaaaggaaccaattattcacagggatgtcaagtcatcaaacatactccttgacgagaacttcactgcaaaggtgtctgattttggtgcctcgaggccaataccacacaaccagacccatgtgacaactttagtgcaggggacattggggtacatggaccctgaatatttccaaacaagccagctaactgagaagagtgatgtatacagttttggggtggttcttatcgagctattgacaagacagaaacctatatctgatggtaggacagatgatgtgagaaatctagcatgtcattttagtatgttattctatcagaaccagttgttggaaattgtagattctcaagtagctgaggaagctggcacgaaacatgttaaaaccgttgcacaattggctttacgatgcttaaggtcgagaggtgaagagaggccaaggatgatagaggtggcaattgaacttgaagctctgagaaggctgatgaaacaacacttggtcctgcagaccgaagaagaccctctgctctgcgaatcaggtcagcatgcagatgtaaacatcgaagcatcctccgagttatcgctttcctcgagcagttcttcccagatcagcccactcaagtgccccaatagctccgttgatatcccatttcctttcaaaattgccaccaactcaagcttaacgtcaactccaggctttgcgatatcatgtcgtcaaacaggcccaatgattttgctcggtggtaactacagcgtcctcagcatctccctgctcgagggatacgtacgtgtgactggccagaccgtatactcctcccagtgccataacaatagccagggaatcatcgacctcactgccacaaactacatgttctcccacacgcaaaacaagttcaccgccgttggctgtgatgccatggcaatgataagaaacagcagcgatgttgtcggggggtgcgtgtcgttctgcgcatcaaatggaagcatcatcagcggcgaatgctccggtgtgggctgctgccagtcgtcagtgcccaaggggctcaacaagctggacttggagttcaccagcatacgggaccagctgatgccacccacgagtgccgtcggtagcggcagcacacggtgcagcaaggcgttcatcgcggagcaggactcgtatgtgttctctaggcatgacctatacaaggacttggggaatctgccgatggtgctcgactggtatatacagggtggcaactgcaaggaggcaagccgcagtcgtcaaacctacatgtgcaaggagaacagttattgctatgaggtggaagatggagctggatatcgctgcaattgctctggaggttacactggcaacccgtacattggatgtgttgatatcgacgaatgcaacgacgggaataactatccatgcacccacaagtgcatcaacatagctggtggttacaattgtacatgcccaatgggcatgacaggagatggcaagaagcaaggcattgggtgtaaaagagatacaacaatgttgtctactgtaggcaagtctcttgcaatctttaatattattctctctttttcgaaattttatcaaccaatttcaggtggaagccttggtttgatggctgttctcattgttcttggcttttggacttactggatagtgaagaagaggaggcttgcaaagcagaaacaacgatacttcttgcaaaatggtggtttgttattgcagcagcagatattcacccaccaagcacctgcaaggatattcaccaccagtgagctcgaagatgcaacaaacaacttcagcgatgaccgtattgttggtcgaggtggatatggtacagtgtataaagggatactatctgatcaaaccattgtggctatcaagaagtcaaagcttgtggatcagagccaaatggagcaatttatcaacgagttgatagttctttcacagattgatcacaaaaatgtggtcaagatattgggctgttgtcttgagactgaagtgcccttactggtttatgaatttatatcgaatggagctctgttccaccaacttcataatacaaatttggtaccaatttcatgggagcatcgtcttaggatagcaactgaaactgcatcagctcttgcaaatcttcacttagcaagaaaggtgccaatcatccatcgtgatgtcaagtctgccaatatactgattgatgagaactacaccgcgaaggtatcagactttggcgcttcaaggctagtcccttccaatcagacacatgtaacaaccttagtccaaggaacattaggatacttggaccctgagtacttttacacaagccaactaactgacaagagcgatgtatatagcttcggtgtggttcttgttgagctattaactagacaaaaaccgatatcttatcataggcaagaggaagggataaatctagcttcacatttcacggcgcttgcccagcagaaccgactacaggagattgtggactgcgtcgtggtgaaggaagctggaatgaggcatgttaatgtggtgtcgcatttgattctgaagtgtttgaagcttaaaggggaagagaggccaaggatggtagaagtagcaattgaacttgaagcgctcagaagacaatccatcgaacggctggaaatatagcgggacgcctcctgtccgacttttttctttctccttgtccccggcgccgccgccgtcgcaccaaaacgcaccaga

SEQ ID NO: 58794 - DNA, 921 bp, Oryza sativa
  Clone ID: PAT_MRT4530_60477C.1
gcaggaattcggcacgaggctagtctcgagttttttttttttttttttttttggggttttttttttttttggattataaaggtgcgccatttattcaggatttaccgacctggtacagtacaagcagctaccacgaaaagtacaaaatagtattatcagacaatccaaagcatctgaacatagtgaacttctccaaaatctctaccctcctgcccccagggagaaactgcgaaaaccgaaatgatatcgccattcagatatcaatattcatttaactggtacacgactgtaggtctaagcaccaaggacgtgaagcatgatagcattctgggcgtgcattctgttctcagcctgggggaatacgattgagttgggagcttcaatggcgccgtctgttacctctatccctctctctgcaggcaaacaatgcataaggaaggcatttggcccagccatctccatcatagcttcatccaccgtgaatccttggaacactttttttctatattcagcttcctccttttggcccatgctggcccagacatctgtatacacaacatcctgctcccgttaactgctttccatagggtcaccagttaggtccatcgcacggccagcacccctggctgtctccaagggccttgcagatgacagccgtccctgccggatgctggctgaggcacctacttggctcgtgcacactggtcgctgggccagcactgggcctgtcggtgggggagccgggtacagtattgtcctctcccggcggcgtctcgctgcttgatgccctgttcgtgttggctgggcctgtccgccggccttcgtgcctggtgcgccggctgtggggggggccgggggtgctggcggcgccattggaagctcccatctccctcgggttcccccttggcgggggcacggtat

SEQ ID NO: 58795 - DNA, 469 bp, Oryza sativa
  unsure (1)..(469): unsure at all n locations
  Clone ID: PAT_MRT4530_60478C.1
ttgtttttttttttttttttttttttttttttttttttttttttttttttttttggggaaaaaagaaacaatttttttaatcataacacctaacaggaaataataataaaaagatttaagaatttattatccacagtccaaggccatggcctttccccttataaaaaacgggatgtattggtatctggatccatatggggccaacattttctttgcctttttttaaaaccccaattggggaacaaaaataaccctttttgacttattcccaatctgaatacacttaaattttttttttcccccctaaatgcccctntctctctctctctctctctttttcccagaaaatttgcccccaaaagaatttcaaacattttgtggggaagaagaagaagaaagaaagaaagaaagaaaaaacaaattttaaaaaaaattcctctcacatgatgaactgaactcatttagaagg

SEQ ID NO: 58796 - DNA, 770 bp, Oryza sativa
  Clone ID: PAT_MRT4530_60479C.1
tccaagcaggctacggttgctgcctctactctcaacatggccaaggctacaggagaaacgaaacaagaaaaaaaattcttatattgcgaacttgtacaatcacccaagtcttatattaccagcttctacaagcaactttttagtcaacctgaggactctcattttacagcggatgaataaagaacagaggattgtcctaggttacgaagttgaaaaatgagttccttatgacacctttacagaaaaatatgtccgggtagctgtgtttgggatagaacataataaggcccctagaccggatggtttttcagtgtagttctataaaaacttttggaatatcattaaagaggttttaatgaatatattaaacgagttttatgcggaagtcctcccactgtccagccttaattttacggtaataacacccctttcgaaagttcaagatgcatacataatacaccaatatatagaccaatatttttgttgaatgtcggtcttgaaattttcaccaaggttgcaactaatacagttaattctctgactggtcatgtcgtgagctccacataaactgccgtcatgcgaggatgcaacatccaaggtggtattgttaatctacgcgagacagtacatgaattgcatcacaaaaaattgaattttgtgatattaaaggtggaacaaaacgcaactggcaaggcgatcaaaacttcacttgagcaagcaacacctcatctgatccatccatcaacgaagatggaacatgctaccgcaac

SEQ ID NO: 58797 - DNA, 2775 bp, Oryza sativa
  Clone ID: PAT_MRT4530_6047C.1
cgagccactggccgctgtgctatgccgtgcccgtgtctagctcaccggtttagtcgcagccgttattgagtcgttcgctcgttcgttcaaacgaggtgttccccttgcttcgttcgttcgtccgtgttgagtcgtcctttagtttagagccgttcagagctgccggttccgttcgccggtttcggttgatcatttgggtgatctttatgtgtactatttatttggtttttattagtctttttcctcgttttgcgtgttagcttgtcgtttccgtcgtttcgaaggatcgcgtgtgcgtcggaagtgttcaagaagacataataaaagatgcttaatctggtaataatttgtttagctcctggtttggaatggtacattcctggtttggagatagaactgtgcagccgggatggttgttcagaatggttgggcctatacaacaggatgccgcgttacaagcctgagtacctgtttggtgttgagggttttgtccaggagttgcgtacgatgtcctttgtcattggattcgggactgcccctttttatgcccagattcctcatgatcgtcatgaagaaaagtgccgagtcaaagtcactttgaacagtaatagtgaagatatcccctcagtgatgtttgaagctggaggaagaaattacatccatgcatgtcaggaggtggcaaggatcgccataggagagctccgtgatcgctacagtgatcaattggccgacactgagtatcgttaccatcctcgtcaaccacagggaagtgaccgtggcagttatcttgagactgaaggaattgagaatgatgctaccacaaggcatttggttgagatgctgtgggctatggatgaaagtcgtgcggagactgtactagcagctcaagatcgtgaagaccggaatcgtggtaagatttgcaagttagaagacaaggtggatcgtttggagaaggaattagccgcattgaagggagaagcaccgccgcagaaggccaggattcgtcttaccgcaaggaagagagctttatttgtccctcgctatcaactggcgccaaagatggtgaacactcgcagcaatgggaatggtcccaacaaccccaataacaacaacaatggagagaatcccactctggcccaagttcttgctcaacagacacagcttatgaacatgatgatgcagcaatttcagaatcagcaaaaccaaggaaataatcatgcacctccccagaacaagttagcagaatttcttcgtgtgaggccgcctgttttctctagtaccactaatcctgttgaagctagtgattggctgcatgccatagagaagaagttggatttgcttcagtgtactgatcaggagaaggtctcatttgcatcacatcagttgcatggccctgcctctgaatggtgggatcacttccgcctgaataggattactgctgaacctatcacttggcttgaattcaccgctgctttccggaagacgcatataccatcaggagtagtgtctctcgagaagaaggagttcagcgccaggagaagttttttgggaggacttaatgatgagctttcttacccactcatggttggagattatcctgatttccagaaattagtggataaggctatacgtcaggaggacaagtacaattgcatggagcagaggaaacgtcggattgctcacttcaaggcacaacaggggagtaatcagaagccgcgtcttactttaggaccccagcccatgtcacagggaggttcttcgtctgttgttcgtccgcagcgtcagttcttcaacaacaatgctggcaacaacatccgtaatcaagctccacgtcctgttgcagctccagtacagcaacaacctgccaagagggagcaaggcagcaagcccgtggtgtgtttcaactgtggagacccaggacattatgctgacaagtgtccgaagccccgtcgcgtgaaggttgtccctgcccagagtaactctgctgtaccagcatcaaaggcccgtgtcaatcatgtcgctgctgcagaagctcaagatgctccagatgtgattttgggtacgttccttgttaactcagttcctgcaacagtgcttttcgattctggtgctacacattcattcttatctatgagttttgcgggaaatcatgggatggaagtggaagatcttagacgtcctttgatggttagtaccccaagtaatcaagcactctctttgcaacgtagcccctctgtcagaatagaaattaaaggagtaccatttctggccaatcttatcttgttagaatccaaagaccttgatgtcatcctagggatggactggttagccagacataaagatgatttacctggtatgccgcctaaaagggatatagagttcagaatagatttggtacctggaacaactccgatccataagagaccttatcgaatggcagccaatgagttggcagaagttaagaggcaagtagatgatttgctacagaaaggatacatcagaccgagttcatcaccatggggagctccggttatttttgtggaaaagaaagaccatactcagagaatgtgtgtggactatcgtgcactaaacgatgtgactattaagaataagtatccactacccaggattgatgatttgtttgatcaactgaaaggtgccactgttttctccaagatagatcttcgatcagggtatcatcagttgagaatcaaagaggaggatatacctaagacagcttttaccactaggtatgggttgttcgaaggtttatag

SEQ ID NO: 58798 - DNA, 255 bp, Oryza sativa
  Clone ID: PAT_MRT4530_60480C.1
atgggcatgtatatgggctgcattcgatcgttcaggtggttaattgagattgttggtccgatggggacaaatacagtattgaagaacatcaccattccactcaccgatattgggaacaaatcaaataacagtctatgcgctgtatatgcagttgagtcgagttattcactatgtcaggtggcacagctgaataatttcaacaagcaaacggtttctgcattcaacatggttagcgctactgcactacaaacctaa

SEQ ID NO: 58799 - DNA, 175 bp, Oryza sativa
  Clone ID: PAT_MRT4530_60481C.1
ccccgcccgtgtgttggtatttcttaacgacattactagaaatataattcccagcaatggcccagaaatactcctggtatattatggttacagagttcatccacaagcgcatggatataccattgtagcatttcacccgagaatattccaagggtatcgtatttattttatcccg

SEQ ID NO: 58800 - DNA, 243 bp, Oryza sativa
  unsure (1)..(243): unsure at all n locations
  Clone ID: PAT_MRT4530_60482C.1
ggggggtgtttttaatgagggaaanggatataacaaaatccttttcagttacaaaggaaccagctttacaacaaatattataaaggggcttaaccaaaaaataccttcatctcaaaaagagctatatctagaaggccttcccctaaactttttttaaattaaaccggtccttaaaaacatccttcaaaaagatttttattttttttataccaaaaccccttttttttttcaaaaaagtcaaaa

SEQ ID NO: 58801 - DNA, 1470 bp, Oryza sativa
  unsure (1)..(1470): unsure at all n locations
  Clone ID: PAT_MRT4530_60483C.1
atgcggctgcacggggaggtttccttcgatgaggacgaggaggaagtggtgatggttccggcggcggcgctgtcgtcgtcgccgctcaacggcggggccgttccggtgacgaggctcgtggtggggtacgccctcaccaagaagaaggtgaagagcttccttcagcccaatctgctgttgctggcgagcccagaggatttttgcgagaacaggaagaagggaattaatcttgtagcaattgatgacactcgcccgcttgcagaacaaggcccatttgatgttatcttgcacaagattactagcaaggaatggcaacaggttctggaggattatcatgaggaacatccagaggttactgtccttgacccaccaaatgccatcaatcatctgaataatcggcaatctatgcttgcagaagtatctgatttgaacttatccagtttctatggagaagtttgcactccacgccaactggtcattatgagagatccatcctctataccaaccgcagttgccatggctggactaaccttgcccttggttgcgaagccattggttgttgatggaacatctaaatcccacgaactatctcttgcatatgatgaggcatccttatcaatgcttgatcctcctctggtcctccaggaatttgtgaaccatggtgggatcctctttaaggtgtacatcattggtgaaactatacaagttgtacggaggttttctcttcctgatgttaacacttatgacttattaaacaatgttggcgtctatcgatttccaagagtttcatgtgctgcagctagtgcagaccatgcagacctcgatcctcatatctcagaacttcctccaagaccactcctagagaaactgggaaaagagcttcgtggaagactgggtttaagattgttcaacatagatatgatcagagaacttggaaccaaagatcggtactatataattgacatcaactacttcccagggttcgggaaaatgccaggttatgagcacatattcaccgatttcttgctgaatcttgcgcaaagcaagtacaagaagtgcttaagcggcggctgaagtgcaaagagtcctgctgaacattaacaaaatggaatgtaacggtctagcagtcagtgtacatatctcggagaaataagtttaatcccaaggctttgaggaagagagatttagggtgtcttcccagaaaatggtggcacttaccggattagagaagagatgaaaaaatggatcgattttctaatgccgagtgcttgtataaatcactaacactgaatgttcccagcgtgccttcgtcaaggcttctgtctcaataatttcattatctttttcatgagcaaaaaaaaaaaaaaaacgaggttctctctggaaactgccaacgcgggccgatcaacgctgcccgtctgtctccataattacngggcttggtttctcccggaaaaaaaaaaaaaaaaa

SEQ ID NO: 58802 - DNA, 958 bp, Oryza sativa
  Clone ID: PAT_MRT4530_60484C.1
ctattgctcctggtcggaatttctcaggccaccgtacttctcgtactgtgggtgtgaatgctctgcatcctcctcccggtacgatacgcggtcggtgtccatgctgtcttctaggtggtctagctgatgatgaggacgatgaagatgatgatgacgaagggccgctcggatatggagcgttgcacctggatcggcgtccttgttgatgatatcgacgggaggctggagaattcgactcctgccatcgtcgatcatcgttatctcgtcgttgacctcgaccattgtcgtcccgatctcgccgttctcgacggtcatcatcatgatgacttcgacaatcctatcggtcttggttcttgttagggtggcctccttgattcgcaacgttgtttcatcgcggcggaggatggcgttggtgagcattgttgtcaactcgttgttcccgttcggtgtcggctccgtcatgtacatcatctccttgatgcggcaagtctggggctggtggtttggcaagatacccttggaatactctcgggtgaaatgctacaatggtatatccgtgcgcttgcggatgaactctgtaaccataatataccagaagtatttctgcgccattgctgggaattatatttctagtaatgtcgttaagaaataccaacaagcatttgccgtcaggctacgactgttttcattttctctccttgggaaagcaaagcagtggttttatgccaaccaatgcccttcacggaagaattttgagtttccagcagacaagggacgagtccattcctgaggcgtgggaacgacttcaggagtatgtggccgcctgtcctcatcatgggatggacgactggatgatcttgcaaaatttctataatggactcactcccatgtcccgtgaccacctagacgcggtagctggaggagccttctcacctcgatcgccaaacagccaaatcaa

SEQ ID NO: 58803 - DNA, 447 bp, Oryza sativa
  Clone ID: PAT_MRT4530_60485C.1
atggcgaccgacgccgcgacgaccccgctgcaggccatcccattcggaaggccggcagcggaggcctggtacgaggcccgctcgatgtcggagtgcctagcgggcgagatgggccaagtcctcgctctcgtctatccatctctccgcatcgacaagacgactagtcgccggaagcccggatcagagccagcctcaccgggacgggacctcccccgccaccgcccaccgccgaggatccaggcggcgatgcggcagcggtgcgagcgggatcctgccgaggcttcggaaggacaagccggagcatccgagcatctggttcaacagcctgccctcagtggaagtcgtgcgcatggggaaggcgaacctcagggatgtgaggagctgaagcgcgatgtcttgctcatctgtttgtctcaccaattcccagttgcaagcgaaaagcgttag

SEQ ID NO: 58804 - DNA, 256 bp, Oryza sativa
  unsure (1)..(256): unsure at all n locations
  Clone ID: PAT_MRT4530_60486C.1
tctccccccggcttccaccggagaggaacccctctntcacgccgcccccatccccagattcctccgcgagcganacgcgaaggagcnacacgtaccccgacggcgcaataaagcagaggcggtcggcgacctgggccgcggcgagcaggggcgggtcggcggccggcgacgcggcagccgatngtggtngggtntgcacnggcgagcaangtaaaagcggggaggaggggaggaaagnggaggtcgcnggttgaat

SEQ ID NO: 58805 - DNA, 2847 bp, Oryza sativa
  Clone ID: PAT_MRT4530_60487C.1
atggccgcaacaagtgcagcaaatgagcgtagcatagccatcccgggcccgggtgatgatcagcctgcagcacagccagccgcgctggccggcggcggcgacgaggacgagggggcgtggaagacggcccagaagtggctgaaccgcttcgtccgcgtcgtcgctttcgtggagaggacgggcaacgccgtcggcacgctggccttcacctgggcgaccgtcgtcgtgctcggtgggtactccacggacctgcgcgaggatttctggtacgccatggcgatagtcttcctggaggcttacagttcttggtcattcatgggtgagtctgacctctactatgaatttgtcctagtaccaaatttggttgtctacaacgctgctaaccgtgtcattgggggactcagggtgttcagccgccaaaacaaatcagacgataaattcttgttcaagaccacgggaggaatcagagtgctcaagctgtcttcaaccctggagctgctgtattttctgaacgcggtgatcgtgatgctgtgcctctccgtcatcctcacggtcgtcctaacccacgtattcccgaaaaaacggttccccatcatctggctcctcaaacgagcgaacagaccagggtcagggcgccgcgtcgtcgcgatagtactgcggctgacccccctggccgcgatactggccttgggctgttcactggtgctgctgtacggcgctccgccggtgacggtgctggcatccgtgttgctgctcttcatgacgttcgttctgtgccagcagctgatagccgtgcgggagaagatcaagagaccggcgcccctgcagcgcccgacggctgcaggtgaggcttcgccgccgccgccgtcgtttgcccagcgcgcgtggctggtgctcgccaacactatgttggtcgtctgcccacccttgatggttgccttcctgacggcgacgttcggcttcctggggctgtacgtggtgctcacggcggtggcgctcggcaacttccagatcccggcggccgtcgcccgcgtcgccatctcgtcggcgcgcctcgccggcagggtggaccgcgtgagcacgggcaacgtcaacctcgtgccgtcgctcaagatcttctacgggcttgtgctcgcccagggcgcgctctacatcgtggcgtgcctgacggatcccttctccgtcctcctccggagatggctggcgcggcgctgcaagctcgggacaaggtccgtcgacctgtactacgagcacgcctacgacgcgtggatggaggacggcttgctcgccatggaggacgcgaacatcgtcagcttcgccgtcgactccctttcggctccggcggaacccagccgcagccgcgagagggtccttgctggggtcaccgtccttcactgcttcctccggcaacgaagaggctccaaggcccggcttgcttcatcgaagatcatcacctccacaaacgcaattgccaccttgatcggcatgctgggatggggcgccgaagaagaccggcaaatcaggctgttcgcggcgaaggtcatcggcgaggtcgccggtgagctccggatcgccaggttccctggcaccgtgcagctgatatcttcactccttgatgctccatcttgctcgaagaaagaacaagacagtggaggctcaacacagacaaaagcagctgcaggcaacgttaatactgactcgacctgctgctgttgcttccccaagcccagttgcccgcgacgaatcaagaatctatggtcagctccagacgaggagcctctcgacgacgacgaagacgcgctcccgataatggggatgctgatcctcgagaagcttgcttccgatcccgaaaactgcgcagaaatctggagggcaactaacctcgtctcgaaggtgatagggttcatagcctgctccagcaacgaggcacagcggaatcgacgacccatcaccgcctcgtcactgaagctagtcgcaaagctcgccggcgccaagggggagatcggcgtcacgctccggcggaagatatcggaccatcctttcctagtgagcagcctcgccgggatcttggaggacgacggcgccggcacggaggaatggtcgccggcgatggatatcctcgccaagctctgtgtcaacgccgatacgaggcaggaggtcggggaaatcgcggcgatcattaccagattggtgcaagaattcttcccctcgcagcgagaccaacaagcgagcagtacacaagatgatcgccagctgcggttggcggcaggtgaagcattggcgacgctggcaacggagagccccggcaactgctcggccatcctcaaggaattcaagggaaaatattgcgatcttgtaaacgatctcaaaaacatgatttcggctagggacgaggatggctgccgatgtgcggcaagcctgctgcagaatctgtgcgcgcactccggagacgagctgcgccatcttggtttcagcgaccatcttgcatccgccttgaaagtgattttggagaaaatactgaataccaagggaaagcagctagaggtcctgattgggctcacagcgcagattcacaacgccatgcctgcctgctttaaagatgcactggaatccttagccaataatacagcggaggcactcgttcagaagatggtggatacactcaactccagcaagaagccgagccctgaatgccccaggatgagaagagcaatagtcgagctagcgatttccatagtagaaacgcgcactcttccgtatggctatgcagccgacttcaggaagaaggggatggtggaggcgctttccaaggagtgtgcatgttcgctaagtgctttaagcccataa

SEQ ID NO: 58806 - DNA, 371 bp, Oryza sativa
  Clone ID: PAT_MRT4530_60488C.1
ttctttaccgcctcccctcctctcctctcctctctcgcgtctacttaaagaaagggggggttacaataacaaaaatcctctgcgatggcgaagaacaaggagagggcggtgaacgtgtctatgaatccgcgccactcgctccacgtcaaccgcgccaatgacaataacggcccgaaccgctgcaccccaggctggtcgcggcagcctttctgctgccacagtgcggcggctcaagatgtacaagatgaggcccctcagggacctaggccggaagatccttaatcacgaccttcaatccaaggagctacccaacacccgcatcgagtccaatctcccctggttcggaaatacaccagtccttcatcacaaag

SEQ ID NO: 58807 - DNA, 1902 bp, Oryza sativa
  Clone ID: PAT_MRT4530_60489C.1
atgtcgacctctcccagcccgtccgccgcatcatcagccgagtacgcagagcatctctccaacctgatcgcagttccgagcctatctgacgagaaccattactttctcggcccagtcggcaaccttgatcctactgagttcatcattggcgaaaccaatagaattcctttcagattagccaacctagatctaggtcactggaagaataccttcaaatcatggccatctctcgagaaaacttcacccgagaagagctggattacatggtacaagcgcatgtcgtctaacaagaaagttcactgggacgaaattggaatcggccaagcgcttacccttaccatagccaattcagctaaagatgaacctttaatggccgccgccacctatttctggtccaataccatcaacgcttttctgttcaaccaagggccgatgactccaactttgattgacatcaccatgattaccggattagacgtaacttcattgcctaaccctacttggctgaatctgatggtcatgaaagttgtcaatcggccatctgtgatagaagctgaattcctaagattagagccgatcatagaagacgatggagaggaacgcacccatcgcaaatgcacatcctatcgagggtatgcttccacactagccgacacaggggcaaagctatcagctgaactgcttaaggattggttctgcagtttttatgaaggctttcagaaagatgctccaatttggttcccttatgaggactcagcacttctagagctcccatcggactttagatttgaagacatcaaccacgagagatacgaaaagtccagagaagtcttctcggctgcaataagcccatgcatccttcctgtcggcattcatcaagggaggaatattcaagtctcttatgaattttatcatccgatgagttctgctagacagcttgggatgggtcagctaccaatcggcttgttctttgccgataaaattcaatgtcgaggggaaatttcatcaaccttaatgatggatcggttactcaatctcgaaggacctcctttgggcagtattgaaaatatagagctggcaaggttcaggaatctgttccccgatgttgttcctcagacaacagaatcctctccccctcgcaagagcaatagtggcatagatatcgaatacgctccaggtctcattcccaatggaggtgggtcatctccccctgtcatcaattgtcatgcccccaaaacttcaagtatgctccaagggctcattagagaactagctgatgccggtaaaaagagaaaaaccagagcatcggctatagacccattggctccggctccaaataagaaagccaagtcaaataagaccaagccaaccgatgatctgtctgccgtagatccatccattgaacaagctctggatgaagaggatattggagaagatgttgatcaagctgaagctgggataagcgaaaaagaaaactactatgagaaagaaatcggtagcaacaactctcaaactggctccaccattcaagctttgatcccggaagaacatgccgacgtcctcactccagctgcttatcttgaacaatatcaattcaaactggagaaggccaagctgagattagccgaacgtcgggagcgcagggatattgaagccacaatccaggccaatcggcaactcgtgcatgaagagaagtccaagcttgatcagctatctgagggcccgatcaagtctaatattgatcagcttgaagctcgtaagattgagctcttggcacaactccaagaatgcaatgctgatatgaccaagtccctaaaagtcatctctggaaccgatgctcaagatacccaagctattgaagaagtagaacacattaggcaaagagctatatcggcgatctag

SEQ ID NO: 58808 - DNA, 4050 bp, Oryza sativa
  Clone ID: PAT_MRT4530_6048C.1
atggtgaacactcgtagcaatgggaatggtcccaacaaccccaataatatcatcaatggagagattcccactttggtccaagttcttgctcaacagtcacagcttatgaacatgatgatgcggcaatttcagaatcagcaaaaccaagggaataatcatgcacctccccagaacaagttagcagactttcttcgtgtgaggccgcgtgttttctctagtgccactaatcctgttgaagctagtgattggctacatcccatagagaagaagttgtatttatttcagtgtactgatcaggaaaaggtctcatttgcatcacatcagttgcatggccatgcctctgaatggtgggatcacttccgccttaacaggactactgctgaacctatcacttggcttgaattcaccgctgctttccaaaagtcgcatataccatcgggagtagcgtctctcaaaaagaagaaattcaggtcgcttacccagggatctcgctctgttactgagtatctgcacgagttcaatcgtcttgctcgttatgctccggaagatgtgcgcaatgatgaagagcgccaggagaagtttttgggaggacttaatgatgagctttcttacccacttatggttggagattaccctgatttccagaaattagtggataaggctattcgtcaggaggacaagtacaatcgcatggagcagaagaaacgtcggattgctcaattcaagacacaacagggaaataatcaaaagccgcgtcttaccttaggaccccagtccatgccacagggaggttcttcgtctgttgttcgtccgcaacgtcagttcttcaacaacaatgctggcaacaacatccgtaatcaagctccacgtcctgttgcagctccagcacagcaacaaccctgccaagagggagcaagccagcaagcccgtgaagctcaagatgctccagatgtggttttgggtacgttccttgttaatcagttactgcaacagtacttttcgattctggtgctaacacattcattcttatctatgagttttgcgggaaatcatgggatggaagtagaagatcttagacgtcctttgatggttagtaccccaagtaatcaagcactctctttgcaacgtagcccctcggtcagaatagaaattaagggagtaccatttctggccaatcttatcttgttagaatccaaagaccttgatgtcatcctagggatggactggttagccagacataaaggtgtgatagactgtgccaacaaaaaagtaactctcaccagctatgatggtcgagttgtaaccgttcatgcattgtcatctgagtctttaaggtcaagactgaaccagataactttggaagagattcctatagtccgggagtatcctgatgtgttcccagatgatttaccgggtatgccgcctaaaagggatatagagttcagaatagatttggtacctggaacaactccgatccataagagaccttatcgaatggcagccaatgagttggcagaagttaagaaggcaagtaggaatgatttttgggggcccttttttaaacccagaaggatacatagaccgagtcataccatgggagctccggttatttttgtggaaaagaaagaccatactcagagaatgtgtgtggactatcgtgcactaaacgatgtgactatcaagaataagtatccactacccaggattgatgatttgtttgatcagcttaaaggtgccactgttttctccaagatagatcttcgatcagggtattatcagttgagaatcaaagaggaagatatacctaagacagcttttaccactaggtatgggttgttcgaatgtactgttatgtcttttggacttaccaatgcccctgctttcttcatgaacttgatgaataaggtgtttatggaatacctagacaagttcgtggtggtctttattgatgatattcttatctactctcgaaccaaagaagagcatgaggaacatcttcgtcttgcattggagaagctacgagaacatcaactgtatgctaagtttagcaagtgtgaattttggttgtccgaagtgaaattccttggtcacgtcatctcagccggaggagttgccgtcgatcctagtaacgtggaatccgtaaccaattggaagcaaccaaagacagtttcagagattcgcagtttcctaggcctcgcaggatattaccggaggtttatagagaatttttccaagattgctaagcccatgacacgactgcttcagaaagatgtgaagtacaagtggtcggaagaatgtgagcagagttttcaagagttgaaaagtcgcttaatatcagctcctattttgattttgcctgatccaaagaagggtttccaagtgtattgcgatgcatccaaacttgggttaggttgtgttctgatgcaagatgggaaggtggttgcctatgcatctcgtcagttacgtccgcatgagaagaactaccctactcatgatattgagttagctgcagtcgttcatgcattaaagatttggcgtcattatcttttcggtactcatacagaagtgtacaccgatcacaagagtttaaagtatatctttactcagccggatctgaacatgagacaacggagatggttggaattaattaaggattatgacatgggaattcattatcatccgggaaaggctaatgttgtagcagacgctcttagcagaaaaggctattgcaatgtgacagatggacgacagttgccattggaattatgcaaggaatttgaaagattaaatttgggaattgtcaatagaggtttcgttgcagccttagaagcgaagcccactctaattgatcaagctagagaagcccaaattaatgatcctgatattcaagagatcaagaagaatatgagaagaggaaaagctattggtttcttggaagatgagcacggaactgtatggttgggtgaaagaatctgtgtccccgacaacaaagacttaaaggatgcaattctgaaagaagctcatgatactttatactccattcaccctggtagtaccaagatgtaccaggatctcaaggaaagattttggtgggcaagtatgaagcgtgaaatcgcagaatacgtagcaattcctgaatggaaatgggaagaaataggtatggattttatcactggtttgcccagaacgtcatcgggccatgactctatttgggtgatagtcgacagacttaccaaagtggctcatttcattccgacagacggacaaaccgaaagggtgaatcaaattttggaagacatgttgagagcttgtgctctagatttcggtggaagttgggataagaatctaccctatgcagaattttcgtacaacaacagttatcaagctagtctacagatggctccttacgaagcactgtatggtcggaagtgccgcactccgcttttgtgggatcaaacgggagaacgtcaggttttcgggacggatatcctaagggaagcagaagaaaaggtaaagatcattcaagaaagattgcgagtggctcaatctcgtcataagagttatgccgacaatcgccgcagagatttgagttttgaagaaggagattatgtgtatcttcgtgtcacgcctcttcgaggagttcatcgttttcagaccaaaggaaaattggcaccgcgttttgtgggaccttataagattgtcagcagaagaggagaggttgcttatcagttggagttacctcaatccttggcaggagtccataatgtgttccatgtgtcgcaattgaaaaagtgtttaagggtacctaccgaagaagctaatattgaccagatagaagtccaagaggatttgacttatgttgagaaaccaatccgtatactggaaacaaatgagagaagaaccaggaatcgagttatccgtttctgcaaagttcaatggagtaatcactcggaagaagaatcaacttgggaacgagaagatgaattaaagtcagctcatccgcttctgttcgccagttcttccgaatctcgaggacgagattctgtttaa

SEQ ID NO: 58809 - DNA, 304 bp, Oryza sativa
  Clone ID: PAT_MRT4530_60490C.1
atggagatagggatttttatacaggttcgggcccctgaattgtcagttgacaacagggtagccttcctcctcgagttcgtgcccggcgagatcaaagatagcgctttcgtctctcctgacagtatctggagacaccgtaggggactagccgtgcttatccctgaaatcgatatccggcatcttgtcttggcgtatgttggcttgtatgttgatcttgtgtcttgatatattgttttaggttgtttccgtataggacatgttaagctagcaggcaggcaacagaccaagcttcaacaacgctaga

SEQ ID NO: 58810 - DNA, 343 bp, Oryza sativa
  Clone ID: PAT_MRT4530_60491C.1
gcccgaggcccccccccctttttttttttttttttttttttttttttttttttttttttttttgtgtttttttttttttttttttaattagtaattagcataccacatatatattttgtcatcactcaaacacacaagcagagtaaatgaaatcaaagtatggagaaaagcttctccaaaccacacttcacctctagaaattaagacctaggcacatatttgagtttagcatgatcaaactatatatatatgtcgccaagccaacatctatcactctcacttattgagcaggcatggtgaaaagctgagagcagtattaatggtggccaccatggtgaccgcc

SEQ ID NO: 58811 - DNA, 1011 bp, Oryza sativa
  Clone ID: PAT_MRT4530_60492C.1
tcacttggtatgtatgttaacttcagccagagtcatgtcgtacccaatcagatttgttctacttatatcatcatactctcgagaacaattggaaacttctcccacagcaactgtcctatgtctgtaagggggccaggaaaccattaacaccttctccattgattgcagagtcatcttacttggagccaaggcaggatgtgaatgcttgcaagcccttccttttggcccagctacacatacgacagtttgaagcattagatctttttcacaatctatctcagtaattcttgcctctgaatagcgcctctgtttgttcactgccttatcttggcgaaagctatcctcacagtgatcacaaataacaacaatctgatacaatttatctagctcttgtgctgatttcggttttcctttggtgaacagatggtctagacagtgagccgaactcagtatcttcacttctttgggcttcttcctccttccccacgccgcgttctttggccttccccttctccctgtgtcgcttgctctttctgactcagcgctcgccccctccttcccccatcttgcggcgagcagtcgccccgactcctccaccaaacccaaatcgccaccgccagggacactgacgcctgcctcccccaccgaactgcacctccgggacactgacgcccgcctcgccgatcccctcacatcctctgccgctcccctcgcccccttccgcgtcgtctgcaccgcccacgatctccgcctcgacgaccggttccacaacgccattcctcacgatcccctcccgtcctcctcgattggcgtcgcccccgatctctcctcgaccgcctccacgcaaccaccaccaccaatctccgccgagcactgttctccaccggatccctctccaccgagccgccgtcgggtcgtcggcaatccctcgacctcctccgggctgccaccgagtcgggatccgggaacgcggccggatcagcgtcaaccgcctggccgctcctccactcc

SEQ ID NO: 58812 - DNA, 1782 bp, Oryza sativa
  Clone ID: PAT_MRT4530_60493C.1
tttaattaagcgagggagtgagagctagctaactcaggctcagccaactgatcgcgagctgtgacgaggtgatcaccatggcgtcctcgtcgtcgcttcttgttcgtgggagagcgttcgcgctggttgtggctgtagctctggtggctgctcctcgccggattaatggcggcgccgccgggccggcggcgaggacgaacgaccccaactggcacgtcttcagcgtcagctcgctgctgccgagctcggcctgcactgcatcgaaagcggcgtccaactcgtcggctctcggcgtcgtgcaccggcacgggccgtgctcgccggtgcaggctcgtcctcgcggcggcggcggcgctgtcacccacgccgagatcctggaacgcgaccaggccagggtcgactccatccaccgcaaggtcgccggcgccgggggcgcgccgtcggtggtcgacccggcacgcgcctcggagcagggcgtgtcgctgccggcgcagaggggcatctccctcggcaccggcaactacgtcgtgtccgtcgggctcgggacgccggcgaagcagtacgccgtgatcttcgacaccggcagcgacctgtcgtgggtgcagtgcaagccctgcgccgactgctacgagcagcaggacccgctgttcgacccgtcgctgtcgtcgacgtacgccgccgtggcgtgcggcgcgccggagtgccaggagctcgacgcgtcgggctgctcgtcggacagcaggtgccggtacgaggtccagtacggcgaccagtcgcagaccgacggcaacctcgtgcgcgacacgctgacgctctcggcgtcggacacgctcccgggcttcgtcttcgggtgcggcgaccagaacgccgggctgttcggccaggtcgacgggctgttcggcctcggcagggagaaggtgtcgctgccgtcgcagggcgcgccgagctacggccccggattcacctactgcctaccgtcgtcgtcgagcggcaggggctacctgtccctcggcggcgccccgccggcgaacgcgcagttcacggcgctggccgacggcgcgacgccgtcgttctactacatcgacctcgtcggcatcaaggtcggcggccgcgcgatcaggatcccggcgacggcgttcgcggcggccggcggcacggtgatcgactccggcacggtgatcacccgcctcccgccgcgcgcgtacgcgccgctccgcgcggcgttcgcgcgctccatggcgcagtacaagaaggcgcccgcgctgtccatcctcgacacgtgctacgacttcaccggccaccggacggcgcagatacccacggtggagctggcgttcgccggcggcgccaccgtcagcctcgacttcaccggcgtgctctacgtctccaaggtgtcgcaggcgtgcctggcgttcgcgcccaacgccgacgactcgtccatcgccatcctcgggaacacgcagcagaagacgttcgccgtcgcgtacgacgttgccaaccagaggatcggcttcggcgccaagggatgcagctgattacaatccgagatgatgaatcaatcgatcattttgttttgttacagtgacatatatatggggaaaaaatagtgaaaaaaaactgcaataaataagcatcatcgatagtgacatggaagaagttgaaaaccgttaaaaatatttttgatgcaaaccagttcgggctagtaacagtaaaaaaaaaaaaaaaaaaaaaagggcgggcgctactaggagaacgagacgaggagtgcatcgacgtcatagc

SEQ ID NO: 58813 - DNA, 1608 bp, Oryza sativa
  Clone ID: PAT_MRT4530_60494C.1
atggtgcctccggcgctgggcgcggccggcgcggcggagggcttcccggggcggtggaaggcgatcgccgcgaagctggaggggctcccggcgtgcctgtccgacctatccagccacccttgcttcgccaagaacgcgctgtgccgcgagctgctgcagtcggtggccgccacgctcgcggaggcggcggagctcgcggcgcggtgccgggagccgccggctgccgggaagctgcagatgcagagcgccatcgacgcgctcgccggtaagctggacctcaacctccgggactgcgcgctgcttgtcaagaccggcgtgctgtccgatgccttcacgccgccgcctccgaccgacgaggcgacgtcgacggcgacggcggcgcaggcggacgtgcgtgagctgcttgcgaggctgcagatcgggcacaccgaggcgaagagcctggcggtggatggtcttctcgaggcgctcaacaaggacgagaagagcgtcctctcggtgcttggtcgcgccaatgtcgccgctctggtgcagctgctcacggcgccggcgaccaaggtgcgggagaaggccgccacggtgatatgccagcttgcggagtccggcggctgcgaggggctactcgtgtcggagggcgcgctgccgccgctcatccggttggccgagtccggcagcctcctcggccgtgagaaggccgtcatcacgctgcagcgcctatccatgtcatctgacaccgcccgcgccattgccgggcacggtggcgcacgcccgctcattgagatgtgccagaccggggactccatctcgcagtccgcggcggccggcgcgctcaagaacctctcggcggtgccagaagtgcggcaagcattggccgacgaaggaatcgtccgcgtcatggtcggcctactggattgcggcaccgtgctcggctccaaggagcacgccgccgactgcttgcagaacctcacgtcgagcagcgacagcttccggcgcgccgtcgtgtcggacggcgggctccgcagcctgctcgtgtacctcgacggcccgctgccgcaggagtccgcggtgagcgcgctccggaacctggtgagcgcggtgtcccccgacagcctcgtgtcgctcggcgtgctcccgcggctggcgcatgtgctcagggtcgggtcaaccggcgcgcagcaggcggcggccgcggcgatctgcaggatctccaccaccacggacatgaagcgcgtcgtcggcgagcacggctgcgtgccgctgctggtgcggatgctggacgccaagtcgaacggcgcgcgcgaggtcgcggcgcaggccatggcgagcctcgtgggctaccctcccaacgccagggaggtgaggagggacggcaagagcgtgccatgcctggtgcagctgctcgacccgagccccgcgaacacggccaagaagtacgccatcgcgtgcctcctgtcgctcgccgcggccaagaggtgcaagaagctgatgatctcgcacggcgccattggctacctcaagaagctctccgacatggacgtcgccggcgccaagaagcttctggagaggctggagcgcggcaagctgcgcagcctcttcagtagggactaa

SEQ ID NO: 58814 - DNA, 558 bp, Oryza sativa
  Clone ID: PAT_MRT4530_60495C.1
aggcgagacgatggaggcggccaccccgacccgtcctccccatgacgttcacgtcatccatatccgttacctgttattcgcttgacacccatggccacgaagacggagcctcgctggagctccggcgagggagatctgagggcgacatgcgtgatcatagcgaggctacctccaagtaccgctcaactattccgagaagatccgcaagagcacccactatccatgcgtccgtgtccactgggatattcctcctcaggaagatctcctatgtgatcctcgccatacatctggaccatgcaaatattgtcacgtacctgttcaattgtgattgtacttgttacacgattgtctcgtctacgtcggaacgatggtactgtggtcattgattgaattggtgtagacttttacaaagagtttgcttctgttctagaagatggtgttttactcttacagaatgagagattctacacagacgaacagaagattggtcctgaagttacctactatgttgcagttgtcactgacctctatctaaatttttgctttttataatgcaca

SEQ ID NO: 58815 - DNA, 627 bp, Oryza sativa
  Clone ID: PAT_MRT4530_60496C.1
atgggactcaccacaggtatcgatgacttcgccttccctccagggcaggcgtaccatttcggcagcctcgacttcagcaccgacagctgcggcaagatttctcttttcgactcggattcaaaccaatcaagaggagatcgcatctcggtctcgttcggtctcctgaactcggctgagatctactccaatgcactgtcgtccgagtcggctccaaaccactcggatgagagttcggcgatttcttcttcagagctagatgatctagctggggttttcacttcaagggcaccttctccccgtaggtccagatccaacttggtttcgaccttggttcgatctggctccagggaagtcggcgtaattcttcaacgacttggatcagtttctacggaagaactagaaggctacctcagctctcccaacgtcgactcccgccatccaactgagatcaccgactacaacgattccaactacgatgatgacttcaacaacttcaacaacctcgatgaagacattggcgacaactatgaggataactacactccactctttttcggcgttttcatggccgacaacgagaccgaggagcagcgcctagatcgtgaggccaatgaggagagcgcatga

SEQ ID NO: 58816 - DNA, 566 bp, Oryza sativa
  Clone ID: PAT_MRT4530_60497C.1
gatatgatgattcttgggcggcgctccagtgggcggtgtccgcccatgcggacgactggatcaccgagcacggcgacacggcgcgcgtcttcgtcgccggcgacagcgccggcggcaacatcgtgcacgacgtgctcctgagggcatcctcgaacaaaggaccgaggatagagggcgcgatcatgctccacccgttcttcggcgggagcacggccatcgacggcgagtccgacgaggcggtctacatagcctcgaaggtgtggccgttcgcgtgcccgggcgcagtgaacggcgtggacgacccgaggatgaacccgacggcgcctggcgcgccggcgctgtataagctcgggtgcgagcggctgctcgtgtgcacggcgcaggaggactggctggtggcgaggggccgcgcgtactacggcgccgtggccgcgagcgcgtggctcgggagcgcggcgtggcacgagacggagggagaggggcacgtcttcttccttcgcgatccggggtgcgacaaggccaagcagctcatggaccgcgtcgtggcgttcatagccagcgcatga

SEQ ID NO: 58817 - DNA, 4745 bp, Oryza sativa
  Clone ID: PAT_MRT4530_60498C.1
agtgctcgtggctcccccgggctgctgcttttttttacacacagctgaaaaacccatgctgatcacacaaagcacaagggtcaagtaagttacacggatcaatgtctcagcaactgatgaactgaatagagcacacgacgcacaagagatgcatctcagcaagcatcaccaatgtaacagacaggtcaatcaatctaacgactcagcaaacaggcagacagtcacaccgctcgctacggagttgatcctacattgttccagtagttaaattcaggggacattcagtcgtcgtcctcgccaaagtcagagccggcgaagtcggaatcatcgctgatatcctgcacttcgtcctcagtgtcatcatcgctcagctcctgcacctcctggtaactcttcttgttcccccgtgtttgccgtttcggcctcgctgcgactggctcggcagagctacctgatggggaggatgactcggtttcttcagtgctcgtagaagctgttgaggccctctgcaagacagagccgctcttcttgtggaagggagaggccctcatcttgcgcaccttcttctcaggagatggagcgctggtgctgctgtcctctgtaggcttgaacatttcttccatcactttctgcctcatggacttcccctgagctggcgccctcttcctggttgcagccttcggcttctcagcggcgggcttctttcctctacctttcttgaccggcacttcttccatggcgaaatcatcctcgtcgtcctcatcgatgggcactgtttcgtcttcctcgtcatcagatatcacagctagggatgatatggccttctttgctgctcctcttttgcttggttccttcctccctttcttcccttttgcctgttcttctgtagtctcagtttccatagcagtatcttcggaatggtcatcaagattgtaagcagccaatcggtcttttagagcaagaacttcgtcgtcctcgtcatcactcaactgggtgcttgccttcttagctggctgcttcttctgtgcggcaggtttcgggattgctgctatataatcttcatcctcgctatcagccaaacttgcctttccagctggtttcttacgtggtgccgcaggttttggaaccgccggagcagcggcattcccgtcagagctttctgccgcctgagtattagtcgctgtctttctaggtcgtctcttgggcgctgctttattaggtgcagcgccacctccagcattcctcgtagctcttctctcctcagcatccatgctgtccttctcatcaagcgcatccagttccttctcgaatgcatcaaggtctctcatccaaagtgattttggccttgttctcttcagttcagctacttcattctccattctgcccttctctgcaatgagctgttgtaccctctccagagtcaatgtaccaattgccattgagaggagatattcataatcacttgaaccaacatttgcagcttcagggctctcctcattctcttcatcctcttcaatagctccaacagcggatggcccagccctctgttttttccttgggaaaggatcaaatcccttctgcttaagctccacaaacagctctgccctcttcctgttattcactatgatatctccttcgacaacagcaagaataaatctaactttgttagaaagcttctttaactccagttcaatattttccaataatactcgctttcttttctcgtagaactcgagcctcagtccaaagaactctttaagtatgtcctctggagtatcgtacttccgaatttttccattagagtcaaataagtgcatatttgttgtaccaatcgtagttgtcaacttgaacttcttctccagcccttcttgcagagctatagccatgttttctttactcagggtaatcagaaattccacattcttgtcatcactataagtatcgaatgcctcgataaaaggttctatgtccttctccttcttttccttctccttgaccttacccttgcccttgcccttatccttgtctttgtccttgctcttgtcggttccaccaatagatattaaaaactctttgtaatcctgagaccagcgacggattggtagctcagtaattctcagcgtagtgtcatcaacaacctcaataataccagtgacagtatagctgacaccacccgcttttgtgcctgtcttctgaatagagcccttgaaccccctataccatgggtccattggttcaacaggctcatcatttagcaaccgtcttagattagcaacaatatctcttggattatagtttgggataaaggtgctccatccagtgccaatgccttcacttccatttaccaaaaccatgggcaggattggcacataccaggtgggttcaattgactgtccatcttcatccaagtagttaagaagaatatcgtcatccttagggaaaattgaacgagtgataggcgacaacagggtgaagatgtacctagcactagcagcatctttgcctccctgatctctggtgccaaattgaccattgggctgcaagaggtttatgttattgctgccaacaaaatcttgagccattccagtaatggtactagctaaactctgctcaccatggtggtacgcagagtgttctgatacataaccggaaaactgtgccaccttaatttccttaactaagttcctcttgaacgagcaaaacaaaatcttcctctggcctggtttaaggccatcgaccattgaaggtattgagcgcagcagatccgccatcgagaattgtatcagttccttgttgatgaagtcactgtacttgatgtacttaccttcggtatcaagatgggttccagactgaaagttagtaagccactctttcctatcagtaattcttttcttgctgaatgccaattcaatatcgttgtcatcttggtcattcttccagacaaaatccttcttgtgcttggcaatatcctggaagtactgccgaccctcagaggaagtgcttgttccaagtcccttgtagtactttatagaccaaccacttgcatttcctccaaggctctctttccattgttcgtactcaggcattgagtaaaatggcaggacaatctttttgtcccttttgttggtggcctgatctgtcattatcatgagatggccatatctcaagccttttgtgctatcatactgcttcccgtgttgcaacccaaggatttgctttatattctggatctctgcattctccatgatctgcttatgacttgcttctctcacatttaataattttcccctgagaggaaacacaccatagtaatctcttcctaccacagaaataccagccatagctagagccttagccgaatctccttcagtcaggattaatgtgcagttattagaatccttcccaccagcaccgtttgcatcctcaagcttggggatgccggtaagtcttgatcgcttgcttccatcagtcttctgtagctccttgcttagtttgaactcagcccaagaaaggagattgaggacaatagctgagctaccaaccttcttaaggaaatcatcagaaagttcacactttgatccaaagcttgcctgacgagtagtcaaggtctctttggtttgtgaatcaaaagctgggttgtcaatgagtgcattaacaaagacccataaatggctcttgacattatgtgctttcatgtgagcattcttgttcctcttattaacaatgttcatcacatgggtggcaatttggttagtgacatagtccacatgagtgccgccttttatggttgcaattctatttacaaagctaacctgctgaaactgcccttcgctaagactcacacacacctcccaccgatcatttactttctgtgaaatacttgggagttcattgacatcgtctctgtccttggaagcagacttgatatacagtttcacataatcagagaagctatgtacaggcaccttttgatgatccaactcaaccttcacagttttgccaagagtgcctgccatatcaaccactctcttcctcatgagggctacaacatcattttcaagatgggtcatgttgaatttggcaaggtcaggcttgaacgtgactctggtccagttctctccttgtttgcacttggtaatctggggttcagacttctttcccatgttttcagagaaaacctgcttgtacttcttctgccgacgtccatcggcggtctcaatcacgaactccgtcgagaagatgttggtgagcttggcgccataaccattccttccgccggtggtcttcttcacgttgtcgtcgtaattgctactggtgaggaggtggccgaatatcatctccggcacgtaaacgccctcctcctggtggatctcgacggggatgccgtcgccgttgttgtagacggagatgcggccctcgtcggcgtcgatctcgacgcggagggagtccatggaggggtcgcgctgcttgttgtcggcggcgttgacgagtatctcgtcgaagatcttgtagaggccggggacgtaggtgacgctgcggctcaccatggcgccgtcctcgtacacccagagctgcgcggtgtgcttctccaccgagccgatgtaggtgtccggccgcaggaggatgtgctccagctgcgtcttcttctggtacatctcctcgatggtcttgccgccgcccccacccgcggcggcgttgtggccggagctcgactggagcgggagcctcgcggcggcggccgccat

SEQ ID NO: 58818 - DNA, 732 bp, Oryza sativa
  Clone ID: PAT_MRT4530_60499C.1
ccggccgggacggccgatcgctcattcccctccggcatcacgacaaccgcaatcatgagctccaccaactccgttcagtgcttcggtaagaagaagacggctactgctgtcgcccactgcaaggccggtaagggtctcatcaaggtcaacggacgtcctctccagctcgtccagcctgagattctccgcttcaaggtctacgagcctctcctcgttgttggccttgacaagttcgccaatgtagatgtgcgcgttagagtatctggaggtggccaggtgtcacaggtctacgctatccgacaagctatcgccaagtccctgatcgcctactaccagaagttcgtcgatgagcactccaagaacctcctcaagcaggctctcgtccagttcgaccgaaccctcctcgttgccgacaaccgccgttgcgagcccaagaagttcggtggtcccggtgcccgtgcccgcttccagaagtcttaccgttaaacggttcaagatgttggtcggaatggggctcaaaagcgtcgagtcggggcgatgttgcagtggaggatacaacaggcagtgcgaaaaggggaccggagtcacaatttccctgggttgggaatgggttacctattgacatttgcatggccttgcttttggcggattggacaggatctggcaggcaaatgaaatctttcaagttaactatgtggctcacgctgcagtggtttgtgatgtcaatgaact

SEQ ID NO: 58819 - DNA, 108 bp, Oryza sativa
  unsure (1)..(108): unsure at all n locations
  Clone ID: PAT_MRT4530_6049C.1
cttggccttattgaatgattaaatcgcatataacgcaacgtaccgcaggacgagctgcatatttgtatagccatatctagtnactggatgttgatcagcatggcctat

SEQ ID NO: 58820 - DNA, 492 bp, Oryza sativa
  Clone ID: PAT_MRT4530_604C.1
cggcgttaccgcatttttatttacatttaaggaaatagttcagtaaagtttatcaaactacaaagcagaatgggcgttgaagtaattccaatttcacctggagatggcagcacatacccgaaaaagaaccagaccgtcgttgtccactacaccggaacattggacgacggttccgttttcgattcatcccgaaatcgcggaaaaccattcaaattctgcatcggcaaaggagaagtaattcgaggctgggatgaaggagttgccaggatgtccgttggagaacgcgctaaattggtctgttcttcagactacgcctacggtagtagaggtcatccgggtgtcatttcaccgaatgccacctttgactttcgatgttgagctccttaaattggaatggattaataaactgcgcctttttttcaaacaaacagaaaaatattttttttccaaacaaataattaacgaacattcttgcacccaattttgaataaa

SEQ ID NO: 58821 - DNA, 453 bp, Oryza sativa
  Clone ID: PAT_MRT4530_60500C.1
ttttgtggtgctttatagtggtggcggccacaagaggaatagatcatacaaccaacaacaggcaaaggataaaggtgcacttagctattttaatctgggaagatggccaacattggataaagttctacccccaacctgcccacttacatttggggccaacacgctacaacaataaccacaagcccatccgggcacaggtgctctagtttatgcaaatcatgttaaaatttaggccttgcggggaatggtgctggacagacagaatgggccccaacgcaaaacatgacctgttgcaggacatgaaacatggatataccacggatgaaggcaaatggagtgcagtccaagtgtataagtgagttcaggagcattcatagagcaaggggaagcttgctagtgagtaatggcatcacgcacagaatctgttagtttattccccccccctatattggg

SEQ ID NO: 58822 - DNA, 159 bp, Oryza sativa
  Clone ID: PAT_MRT4530_60501C.1
atgcatgaagacagggagggtccggaggaggataggtaccccatgcgccggcgaatcgcggtggtcaaggtggggagccactccaccgtcgccctcgactccaccatcgccgttgaagccttctccgccgtctggatcgactccgccaccgccgactga

SEQ ID NO: 58823 - DNA, 451 bp, Oryza sativa
  Clone ID: PAT_MRT4530_60502C.1
cccacacgaccactaacacgtccaggcataggacgagctggatcaggtgactcaaaaagaattacctcagagacgtgtggacagtcaccgcagtgagacctacctagaatgtaactgccatgcgaatgagagcgtaggcggactcttgatttcgtatgaaggacaggttattacaccttgctcgccgagatgctacctcataggcacagcgagtaccagcacctgaagcgtaacggtgcttctataaccgctcatcaaccttgtatgaaactcccagatacactgggtggagccgatagcgtgaggatgccgacaagcattgacaacacggcgcgccttggtatacgtcactctttgaggtcaggtactacaccacgagccttccgatccatgcgcccagtggcgtctacctcatggcagagggctccggaggcgaaatctgtaattacac

SEQ ID NO: 58824 - DNA, 1322 bp, Oryza sativa
  Clone ID: PAT_MRT4530_60503C.1
atggcgtccgccgccgacgagggcaacgcggcggcgcccagggccgccgtctcgcacgtcatcttcgacatggacggcctcctgctcggtctctccctctcctccgacgattcggtttcatatgcgcattcgatggtttctttctttgctttcttggttgctccaatttggatggagttggacacggaggggttctacacggaggtgcaggagaagatcctggcgaggtacggcaaggtgttcgactggtcgctcaaggccaagatgatgggcaagaaggccaccgagtcggcgcgcatcttcgtcgacgagtgcggcctcgacggcctcctcaccccggagcagttcctcgaggagcgcgagagcatgctccaggagctcttcccctcctgcgccgtcttgcctggagtgctacgtttgatccatcatctccatgcaaatggagtaccaatggctgttgcaacaggatcccacaaacgtcattttgccctgaagacgcagaaccacaaggaaatgtttacactgatgcaccatgttgtgatgggggatgatccagatgtgaagactggcaagccatctcctgatatatttcttgccgctatgaggaggtttgagggcaatatagaaccaagtaactgcttggtatttgaagacgcaccttctggtgttgccgcagcaaaaaatgctggaatgaatttggttaccgttccagatacgatggtggacattttatatcacaatggaggtgacctatttcaagacgcacctttgctggtgttagccgcagcaaaaaaatgctggaatgtatccggtgatggtcccagattcgaggttggatgtttcatatcacaaaggagctgaccaagttctcagttccctgctggatttcaaacctggtgaatggggcttgccaccttttacagattagacaaaaaagtttgaagattgggaagttcccatgaacaaataaggatgtcgaatggaaactttagaagaatggattttttggtaaagaaaaaggagaaaaactctggccttcataggcaggcaggcagccctatttcttgatcagcccattcgtaaaatttagagaaatttatcgccctacttatatgaaattttataactatatactatttagcaagaaagattgttaggcttagtgacaagcaaaactatgagcattcttgctgcctactattttgtggcagcgaactacgacataattcctttcaataaaaagaatctccatagcttgatgtgttcttgaaaaaaaaaaaaaaaaaaaaaaaccggccccgggccggttctctccctcgtgc

SEQ ID NO: 58825 - DNA, 549 bp, Oryza sativa
  Clone ID: PAT_MRT4530_60504C.1
tgagcagttcacctgtccccactttccccttccccctcccgcgcgcgatggcgtccgccgccgacgagggcaacgcggcggcgcccagggccgccgtctcgcacgtcatcttcgacatggacggcctcctgctcggtctctccctctccctctccctctcctccgacgattcggtttcatatgcgcattcgatggtttctttctttgctttcttggttgctccaatttggatggagttgggtgatgatggatggattggatgaatggcgtggttgttgctggtgggtgcagacacggaggggttctacacggaggtgcaggagaagatcctggcgaggtacggcaaggtgttcgactggtcgctcaaggccaagatgatgggcaagaaggccaccgagtcggcgcgcattttcgtcgaccagtgcggacttgacggccatcttaccccggagcagttcctcgaggagcgcgagagcatgcttcaggagctcttccctttcgcgccgtcttgcttgagtgttacgtttgatcatcatttcatgcaaatga

SEQ ID NO: 58826 - DNA, 384 bp, Oryza sativa
  Clone ID: PAT_MRT4530_60505C.1
atggtcctttttggacgccagagaggctggcgccgtcctccaacatgacggcgccagccatcatggcgccgcgacagtgccaccatggcactagggctgtcgtagcgatgcggacttggcagaagaggggcgccagccaccttgacgccgcccctcatacgacggcgccagcatggatggcgcgcctctcctctgtgggccgcgcctttaaaccctgtggccccaccacctttctcctctccactcccatttttgcctgagtcgtagcctgagccgctgcttgttgttcttctccctctccccccctcacctctccacctcaaatccagtcaatttaaactcatttttcgcgggatttttcgccatgttagaggacggcgccag

SEQ ID NO: 58827 - DNA, 260 bp, Oryza sativa
  Clone ID: PAT_MRT4530_60506C.1
aatggaagttgaccaaatatactttttcccatatatcttatataaataacatatattcaaaaccatgctttgcatatagctccacaggaattattttggaggtacaacatgtatggccttaatttttgccacttagcccatttacacaaaaaattaacccaccagaaaaattaaattatattagaaaaattaaattaaatggtttcgcctcgaaacattggaagttgaatcttcttttttaagaccaataatttatttta

SEQ ID NO: 58828 - DNA, 2230 bp, Oryza sativa
  Clone ID: PAT_MRT4530_60507C.1
ataggaccaccataacacaaggggcgatcataaattagccatcactcatgaagcacaagccatgattacttgttgcttccaactcactgagtctgtgctgtttgctaccgaatagtttgtctacaaaagacgaacttggaatttaaatagaatacaggctgatagtcacatatccagagcatgatctggcagtagaaatccccagaaatacagtacgggctactcttcgcctaaagattttacttctaacaacagctcaaattgatgaacgctaggccaagggaactctgcattctatcttatcctgcgtattaccacatcgttactgtagttgccttgccagggtgctgcgccatgacaaaactccattggcttctcttaaactcctagcccttctgtactcgatttctgcatctgaggaagatgactgtccaggctgaactttcttcctgacttctatgggttttagagatatttcatccatcgcctttctgaaaggatgacaatctttcacgaccccttcatcctcagatagatcccctccttttgttcctttgaatatgaccaagtgcaccacattatgtggagagtcgttggaaagctggtctgcagatttctttgggcttgtggtcacttttacattgaagagtggtttatctacctcggtagcaggagcattgtttccaaatggagatatactgaatccctcatcaagcgcatctggtatctccacataagcttgagttgtaacgatttcatctgcgctaaatccaaaagatgctctgtatgcttcaacctcctcagcgtcttgtttgtcccttgagacgctaatccttcctccattattatatggaaatgactgctgagcctgatccaggtagaactgggcagatgcagctggccgaaagaagttattatctaacatgtagtttctagaagcagctgaatcaagcccaaaaatattggacggtgaattcctggaatatggtgtgtcacaggcagacctagacgtcttccactgtgccgtagggacctcttgctcaggtattggtgaagccctggaatatggtgtgtcacaggcggacctagatgtcttccaatgtgcagtaggcacctcttgctcagggataggtgatgaaagaccagtccttggagttgctgaagcaggcgatatgaggctgctagaagggctttctgggtaaagcggataagatgcctggagtcctgaacctccggaatatgctgtagataagtacggcatgttgtgatccttgccagcagttttaagatccatagctgaaaaaagaaaccgagcatatggaacatctggagaggagggagtagttgcatgagttagttcaggtggaggggtcagtggtgctgtggaaggctcagttgtgtaagttgagaagactggaggtgagacaagctgaggctcgttagcatacggcccaacagcgaacatattagatgttggcccaccaggagagtttgcagatattgacaagaagcgattaggtgactgggcagttgaaggaattgcagaatttgagaaggacgccggagaagatggtggagcaagaagagataaattcagagccacattttggttggaattgctaccagattggtgtgcatttccacgactagttgacgcattgccatcaggtatacgtgctgcaggaactattcgttttccacccttctgtgatccaaaacatgacaaggcagaaaaacagccagcccatctactctgcctatcctgttgtggtggttgggagtggaatctggccacctccgccggcgccgagccaaccgccggcgcggcagcattgatggcaactgcgccattggccggcctggtgctgctgctgctgccgcgcgccaccaccgcccctgttgctcccctgctgtagccttttctgatttgaagccgcggttgctccggtcacattctccggaacccgagcaaggtttctcctacggatcccaggatccggcctaagctcctcgggtgcactggctggacgaagagctcgccgcaggctgaggcggccggcgagaagaggagcggcagcgagagagggaagatcagggaggaggagcaggagaatagtgggagcgtgcgggcaagacgtaagcaagcaagaaagtcaccgcgaaagatagacgcaagaccaggaacgatcaacgtaatcggcgtggattgaggcttccccccggccgtcat

SEQ ID NO: 58829 - DNA, 2137 bp, Oryza sativa
  unsure (1)..(2137): unsure at all n locations
  Clone ID: PAT_MRT4530_60508C.1
ttggtttttgaatttttttgtttttaacacaangggcgatcataaattagccatcactcaggaagcacaagccatgagcacttgttgcctcacttgtactagagtgtctactacagtagtatatagtatacaaaagaggaacttggaatttaaatagtagaaatacaggaggagcatcatctatctggcagtagaaatccccagaacaaatcaccagcatggcctactcttcgcctaaagactctcacttgtactaacaacgatgcacacacgctaggcctggccaggggtactctggattctagtccttactacttattatcctgcctagtgtatcatcgttactgtagttgccttgccagggtgctgcgccatgacacaactccattggcttctctcaaactcctagctcttctgtactcgatctctgcatccgagcatgactgtccacccccaactttcttcctcacttctatgggttttagagatatttcatccctcccctttctgaatggatggcaatctttcaccatcccttcatcctcacacacatcccctccttttgttcctttgaatatgtccaggtgcactacattttgtggagacccatttgaaagcttttgctctgtagatttctttgggcctgtgatcacttttacattgaagagtgatttatccacctcagtagcaggagcattgttcccaaatggagatatactgaacccctcatcaagcgcatctggtatctccacgtaggtttgagttgtaacgatttcatctgcgctgaacccaaaagatgccctgtatgcttcaacctcctcaacatcttgtttgtcctttgagacactaatcctcccaccattattatatggaaatgactgctgagcctgatccaggtagaactgggcagatgcagctggccgaaagaagttattatctaacatgtagtttctagaggcggctgaatcaagcccaaaaatattggacggtgaattcctggaatatggtgtgtcacaggcagacctagaagtcttccaatgtgcggtgcagacctcttgctcagggatgggcgaagccctggaatatggtgtgtcgcaggcagacctagatgtcttccaatgtgcagtaggcacctcttgctcaggtataggtgatgaaagaccagtccttggagttgctgaagcaggtgatatgaggctgcttgaagggctttctgggtaaagcggataagatgcctggagccctgaacctccagaatatgctgtagataagtacggcatgttgtgatctttgccagcagttttcagatccatagatgacaaaagaaaccgcgcatatggaacatctggagaggagggagtagttgcatgagctagttcaggtggaggggtcagtggtgcagtggaaggctcggtcgtgtaagttgagaagacaggtggtgagacaagctgaggctcgttagcatatggcccaacagcaaacatattagatgttggcccacccggagagtttgcagatattgacaggaagcaattaggtgattgggcagtcgaaggaattgcagaattagagaaggacaccggagaagacggtggagcaagaagagataaattcagagccgcactttggttggaattggcaccagattggtgtgcatttccacgactagttgacgcattcccatcaggtacacgtgctgcaggaactatacgcttcccacccttctgtgatccgaaacatgacaagccagacaaacagccagcccatccactccgcctatcctgctgtggtgggtgggagtggaatctggcctccgtcgcagcagcagcagcaacattcgctggcctgctgctccctggtgtagccgccatttgtgataagagaaggcgcggcgcggcgcggtcacattctccggaaacacaccgacgaccaagcttgggtttgtcctacggatccgagctgagctcctgccggaagcagcagcaggacgaggatgacggcgtgctctgctctgctcgagagagagagagagatggagatggagatcgccgcagcgcagcgcaggcgcaaggagcggagacgcaacccacaatgcacactcgagtgttttttttcttttcttgtcttgtattccatc

SEQ ID NO: 58830 - DNA, 1120 bp, Oryza sativa
  Clone ID: PAT_MRT4530_60509C.1
ccacgcgtccgattttatgcatgttgtgatatttaagtatctttctgccaaaataaacatatagtggtctcttcctcttgcagtttctttgataaccttgcaagacattctgcggagtaaaacctgtttatagatttattaattctattatctcaaatcattattcagaaagaccaacaaaatcttttatgctgttgaatatttgaacttggatttgatttgctctctgtccaacattccaaggcctttcgggacttgaagtagataaagtccacagctgcaagaccttagtgctgtcttcctaaactttagacaaatctgttctgactcctgataacttaaatcgatacactattttttacctgttatataactacccaattttaaccaatggctgtttggttggttctcactttccagcagttcatcattgaatatgcacacaaaaggatttacagttccatatcttgttgccggcaattttttcatgggcttcctgaagaaccatctaatagtttaaacaatttcctgaaaaagttcttcatagtttcagtatctaataatgatcaccataagattcaaaaccagtgttgatagcttctggatcataggcttagttatgtcacagttggtgcaaattttattatgaggtgttatacagaaaaagaatgcataacaatttgttgctaactggacacacttggttcttgcaagaggcaaaacatcctctcttacactctttgtttgctacttccatcaatttattcactttcttttggtggaaaataaattctgaatgtttcttgtaggattattcaatatataattattttcgttacgtattttgttgttacctaaacttatttggcctttcggaatggcctcttttggttgcaactgctattttaactatgaactgtcatttgattatcatcctagcagaattaaatagtagtttagaatggcctcatcatacttgaagactgtcaatatgatactaggtcagtcttgtagtggtgcactttggatggtctttggcaattcttctttagtttcagcaatcaagaacaagaagccagtatactgttaggccacaggattactgttatactaatagtac

SEQ ID NO: 58831 - DNA, 198 bp, Oryza sativa
  Clone ID: PAT_MRT4530_6050C.1
atggtcaaatcaggggcaaaagagtcatttgaagtcccctttagtgctggtaaagctgacatggcccttcccttagataaaattggtaggggctgtgagggaagcaggacaaccgccgtctcctcgcgtgacaagaaggggcggatgaaggtggtgtgcttctgcaacaaacttccagactgggctggctgcagatga

SEQ ID NO: 58832 - DNA, 318 bp, Oryza sativa
  Clone ID: PAT_MRT4530_60510C.1
atggcggcggcggcagcgagagccctcctctcgtcggcacgggtcgccggcgccggcatcgccgccgtgagctgctgctgccgccgctccttctcggcagcggcggccgcggcggtgaggcagcaagagcctgcgacggcggcggcggccggcacgacggcgaagctgcaggcggcggagggagccgccgccgggagtaaggaggggttcttctggatgagggagcccaggacggggaactggatgccggagaaccacttcaacgacgtcgacgccgccgacctccggtcccagcttctcttcgccaagaaaaactag

SEQ ID NO: 58833 - DNA, 850 bp, Oryza sativa
  unsure (1)..(850): unsure at all n locations
  Clone ID: PAT_MRT4530_60511C.1
aagggatgatgctgtctcgttttctcaattaccagaactcctgaatcattactttgtcaagagctacatttctaaccattgtaattaagaagtacaagatcgctgattgcacatcaacgcattatgttattatcagacacatgagatgtgctatcacaagtttatgccgcctaaccttcaatccttcagttctttccttcaagctggaaggcaggcctgccatcaccatccgccacaacaggctgctacacaatgagggcccctttgaatcaaaggatttatataggaatttcattggattcaaatcctataggaaaatttcctatttggccctttgattcaaaggattgaaacttttcaaatcctatgaaattcctatagaatgacacattgtaagtggattttggaggaaacttagcaagaggtccaacctcttggaaaaattcctttgagtctatatttctcatccgattcctgtgtttttcctgcatgtcttgttggtcgtgagtcttgtcaatccatacagatctttataccaatcagtccatacacataatgtttaggtgttataacggcatcaatggatcttcttaatctttagcgagtgatgcttgccattttctgtaggattcctcttaatatatacagtgtttatagtcgtcttgacatgttcacagccatcacactccactattccaggctttctgtaagcatatcatacttgcattccatgtgagcttgcaagcaatcaagaacagccaggacattgtttacttggtggctctttgatctgttctctgccgtgaaggaataaaccttatcaccgactnctanccagccggacgcgggg

SEQ ID NO: 58834 - DNA, 1987 bp, Oryza sativa
  Clone ID: PAT_MRT4530_60512C.1
cgtcgtgcgcagtggggccatgtggtttctacaaactggctgatttggtagccatgaacgtgtgaaatcggccaccagtagcaaaagctgaattcccatgttagagccgatcacaaatgaaaacggagaakascgcacccaccgtaggtgtatgtcctatggggaatatgcatccacaccagtcgattctgtagcaaaattgtcagccgaactgctcaaagactagttctgtagcttttatgaaggcttccaaaaaggtgctcgagtctggttttcatatgaggattcaatgagctttaaactcccatcagatttcagatttgaagacattaattctgataaatatgataaatccagagaagtcttctcagctgctattagtccatgcattcttcctgttggcatccatcagggaagaaatattcaagtttcttatgagttttatcatccaatgagctcagctagacaatttggaatgggccaactcccgatcggcttgtattttgttgacaaaatccagtgccgaggagaaatctcaccaactctgatgatggatcggttgcttaaccttcaaggacccccattgggcagtattgaaaacatagaactggcaaagtttaagagccgaaattttgataggtggtggggtgaatggaagctgcatctgtttcataaatcggcttccatgtatttgacagaccttttcccggacgttatcccttaggtatgttttcttcatccatgtggtaacaacagaattggcaaggacatagagtatgctccaggtcttattccaaatggaggtggattggctcccctagctatgggttttcatgcccccaagacctcaagtctactccatgggcaaatgagggaaccggccgatgcgggtaagaagagaagaaccagatcatcggctatggacacattagcccctgttccaaagaagaaggctaaactaaagaagaccaagccagccgatgacctgcctgccttcgatccatccattgagcaagctctgcacgaagaagacatcgaagatgatgttgatcaggccgcagttgaagtgagtggtatagaaagaacaccatcagcttcgcccaagcagacacctcctactccttctgcccccactcatttctcaagaaagaagaaaactgctgtaaagaagaaattgacagcaacaattgtgaaaccaactccaccacagcctcctccttcttctcctcctgtacaacaatcgtcaagtgaccaaactccatcggctgtaggaagtcaccatgttgaagaagaagaacaaccagttgcccctgctatcctagctttagccgatctgttttccttcgatattaaagattatcttgacgaagaaacagaagatgataccaccagcaaatctctggttcccttgtccgatgatgtgaagaaaacgcttgaagacatttctcatcggctggaagcatcatcactagacaacttggtggtaaactgtgggcctattaggactcggcaacatgagatccaagctctaattccagatgagttagccgacatccttactccagcaatctatcttgaacaacatcaattcaggctggagaaagccaagctgagactagctgaacgtcgagaacgcaaagagattgaggctactatccaagctaatcggcaacttgttcatgaggagaaggctaaacttgatcagctgtctgagggtccaatcaaatccaacattgatcggctcgaagcccgcaagattgagctcttggcccaacttcaagaatgcaatgccgaactggttcttgaacacaagaagttagccgatctcccaaagtctgtggaagaacaaaaggcaagactaaaatcggctatcaagaatgttgctgatctaaccaaatccttaaaagtcatccctagaaccgatgctcaagatgcccaagtcattgaagaagtagaacaaattaggcaaagggctatttcagctatc

SEQ ID NO: 58835 - DNA, 404 bp, Oryza sativa
  Clone ID: PAT_MRT4530_60513C.1
cctcatgaggaagatgaggcttccggcaatgaattcctgcctgcacctcctccaactgtcctccctaagatctatctcctagtgttatctggttaaaaggagatgtagcatacatagaatccaaatattgcaatgaggaagacaagaatcggtcgcggtggaaacggtgctcccttggaacttttaagtgaatatggatgcattttcttattgcaatttggtactatatcggccgaattctgcttcttccggttgtccgcagcaaacaagcatcaccatttgtggatgagtgacactgcattcttggttcgtcagcgagaacacactttgttatcttctctcactatctctagtagtgacgttaatgcagtaggttattaggactatttggattttaaatggtt

SEQ ID NO: 58836 - DNA, 108 bp, Oryza sativa
  Clone ID: PAT_MRT4530_60514C.1
gtgattataaagaccctcacagctagcctatccctgattcttcaaccttttggtgcatattgtgatggagaattcaatttgagatgcggatacccatactttgccgct

SEQ ID NO: 58837 - DNA, 314 bp, Oryza sativa
  Clone ID: PAT_MRT4530_60515C.1
ggggagcctccgtagaggacgatggggcgcgagcaccgacgagaggaggagcagcagcaccacgcccctgcatgcgccggccccagcagccaccgccaccatgggctccccaagtgcccgccgccgcccggcacttcggagagcacgcgcgcctcgccgccgccgccgccgccgcgccgagcgatgcgggaggaggaggagatgcggtcgcgttttgcggtgggcgcaggcgcagcgaaagccgaggcgccgagtgagaggagccaagcgtacgacgcggaaagcacggaaggtggtataggaccaatcccaag

SEQ ID NO: 58838 - DNA, 2517 bp, Oryza sativa
  Clone ID: PAT_MRT4530_60516C.1
tgctagatctctcctccacatccggactctcgctatcaaatttacgtaagcacagtgagaaaaataattagcagggccaccagcatactgttggcgtacagctgcaaatacctgtcgagctaatcttggttaaaatgttggtttagattctgttgcttaattgctggtgaggaggagcactcactatatagctcaatccatcttcctctgcaaaacgtacgcacgacactctggttgcgatcgattatcactccctgatcgcgagttcttggtctgcgagcgtctgcaattaagggaagagttcctctttgttttgacgaggatcgaggattgtttggacgaaccagcagcagcgtacgtgccaatttcattgatagtcgctgtatctgatttacaggaaaaatacatacaacagtgtgtggtaaagtatactactattactggagtactaattaatggaagagacccctctgccatccgggaagaacttcaggagccagcttgctgctgcagcgaggagcatcaattggacgtatgccatattttggtccatttcaaccagccgcccaggagttctgacttggaaggacggcttctacaacggcgagataaagacgaggaagatcacgaactccatgaacctcacggccgacgagctggtcctgcagagaagcgagcagctgagggagctctacgactctctcctctccggcgagtgcggccaccgagcgaggaggcccgtcgctgcgctgttgccggaagatctcgcggacacggaatggtactacgtcgtctgcatgacctacgccttcggcccccgccaagggttgccaggcaaaagcttcgcaagcaatgaatttgtttggctgacaaacgctcagtctgcagatagaaaactattccatcgcgcgcttatagcaaagagtgcatctattaagacaatcgtctgcgtgccatttatcatgcatggtgtccttgagctcgggaccactgatccgatttcggaggacccggctctcgtcgaccgtatcgcggcgtcgttctgggatacgccgccccgcgcggcgttctcgtcggaggcgggagacgccgacatcgtcgtcttcgaagacctcgaccatggcaacgccgccgtcgaagcgacgacgacgacggtcccgggggagccacacgcggtagccggcggcgaggtcgccgagtgcgagcccaacgccgacaacgacctcgagcagatcaccatggacgacatcggcgagctctacagcctctgcgaggagctggacgtcgtgcgccctctcgacgacgacagtagcagctgggcggtcgcggatccctggtcgtcctttcagctagttccgacgtcttctccggcgccggatcaggcgccggcggcggaagctactgacgtcgacgacgtcgtcgtcgccgctttagacggtagctccattgatggatcttgcaggccgtcgccgtcgagttttgtggcgtggaagaggacggcggactcggacgaggtgcaggccgtgccgctcatcagcggagagccgccacagaagttgctgaagaaagctgtcgccggagccggtgcctggatgaacaatggtgacagcagcgcggcggcgatgacgactcaaggaagcagcatcaagaaccatgtcatgtcagagagaaggcgccgggagaagctcaacgagatgttcctgattctcaaatcagttgtcccgtccattcacagggtggacaaagcatccattctcgcagaaacgatagcctacctcaaagagctggagaaaagagtggaagagctggaatccagcagccaaccatcgccatgtccattggaaacaagaagcaggcgaaagtgccgtgagatcactgggaagaaggtttctgcaggagcgaagagaaaggcgccggcgccggaggtggccagcgacgacgacaccgacggggagcggcgccattgtgtgagcaacgtgaacgtcaccatcatggacaacaaggaggttctcctcgagctgcaatgccagtggaaggaattgctgatgacgagagtgttcgacgcgatcaagggagtctccctggatgtcctctcggtgcaggcatcaacatcggatggtctccttggactgaagatacaagccaagtttgcctcatctgctgccgtcgaacctgggatgattacagaagctctccggaaagctatagcaagctagctagctagaaggttgagatcagtatcgtcttggtcatttgctctcatcttgtttaggaggtaccgggaaataaatcttgtcgctctgatcagtgcctccttactagtctcgtgatctgttgtaagtaatagttagacatgcatatatatcatacaacaacgtttgatcttgcatggtagcatatatatgtacaccacatttcttatatctttactcctttaaaattcagtgaggatggtaagtgatgaatctgccaccccatcaccaactccctaaaattctgaaaaaaaaaaaaaaaaaa

SEQ ID NO: 58839 - DNA, 456 bp, Oryza sativa
  Clone ID: PAT_MRT4530_60517C.1
gaaacatgcacttattatttgcaacagggaggagtagccaactattatcagaagcacttgcctcaagcatagatattggaagccataatatctaatactctacaactggccaagaagtgctgttggcttcctgggcaaccactacatgacatgaatgacgacacactaaacaccctacattgaaatgaaaaaaaaaaagacatagccagctccaaacttatgagaactcgactgaaaactcttatggttagataatgacggcaaacaattgaagactatatgctaacagacgcttgttaataagatgccaaatgacccgatgactcccgactcgctgtcctgttttgcttcactggtgaaagcgtccaaattctttgggatatgatgaaaaggccccagaaattgccccaaaaatggacccacttgccacattttaacggaatcgtttttagaaaa

SEQ ID NO: 58840 - DNA, 1650 bp, Oryza sativa
  Clone ID: PAT_MRT4530_60518C.1
atggccgacgagctggtcctgcagagaagcgagcagctgagggagctctacgactctctcctctccggcgagtgcggccaccgagcgaggaggcccgtcgctgcactgttgccggaagatctcggggacacggaatggtactacgtcgtctgcatgacctacgccttcggcccccgccaagggtgcgtatggttgccaggcaaaagcttcgcaagcaatgaatttgtttggctgacaaacgctcagtctgcagatagaaaactattccatcgcgcgcttatagcaaagacaatcgtctgcgtgccatttatcatgcatggtgtccttgagctcgggaccactgatccgatttcggaggacccggctctcgtcgaccgtatcgcggcgtcgttctgggatacgccgccccgcgcggcgttctcgtcggaggcgggagacgccgacatcgtcgtcttcgaagacctcgaccatggcaacgccgccgtcgaagcgacgacgacgacggtcccgggggagccacacgcggtagccggcggcgaggtcgccgagtgcgagcccaactccgacaacgacctcgagcagatcaccatggacgacatcggcgagctctacagcctctgcgaggagctggacgtcgtgcgccctctcgacgacgacagtagcagctgggcggtcgcggatccctggtcgtcctttcagctagttccgacgtcttctccggcgccggatcaggcgccggcggcggaagctactgacgtcgacgacgtcgtcgtcgccgctttagacagtagctccattgatggatcttgcaggccgtcgccgtcgagttttgtggcgtggaagaggacggcggactcggacgaggtgcaggccgtgccgctcatcagcggagagccgccacagaagttgctgaagaaagctgtcgccggagccggtgcctggatgaacaatggtgacagcagcgcggcggcgatgacgactcaaggaagcagcatcaagaaccatgtcatgtcagagagaaggcgccgggagaagctcaacgagatgttcctgattctcaaatcagttgtcccgtccattcacaggggtaatactaattactacttcatccgtttcacaatattcattaccatcaatatgaatatgggaaatgctagaatgacttacattatgaaacggagggagtgtaatttttttagaaccaaatttgtcaaggtggacaaagcatccattctcgcagaaacgatagcctacctcaaagagctggagaaaagagtggaagagctggaatccagcagccaaccatcgccatgtccattggaaacaagaagcaggcgaaagtgccgtgagatcactgggaagaaggtttctgcaggagcgaagagaaaggcgccggcgccggaggtggccagcgacgacgacaccgacggggagcggcgccattgtgtgagcaacgtgaacgtcaccatcatggacaacaaggaggttctcctcgagctgcaatgccagtggaaggaattgctgatgacgagagtgttcgacgcgatcaagggagtctccctggatgtcctctcggtgcaggcatcaacatcggatggtctccttggactgaagatacaagccaaggtcgtcatctcagcggctaagtag

SEQ ID NO: 58841 - DNA, 287 bp, Oryza sativa
  Clone ID: PAT_MRT4530_60519C.1
tgacatagatatgagccatccacaaatgccaaagggaggggaggtagtaaagattgcgggcctgacatgcccatttgagccaccgaagcctaagaccaagcataaggttgacattgatactgtcgagaaagcccagacactgggtgagcaagagcagaaacacttcgatgaaatgggtcagaagtgcatagatgctggtgcaaccctgggtatttgtaagtggggttttgatgagtgaagccaatcatttgttgatgcatagaaatctgccagctgccagatgggaa

SEQ ID NO: 58842 - DNA, 874 bp, Oryza sativa
  Clone ID: PAT_MRT4530_6051C.1
cccaacgatggctggaagacgtggccaacttggtcatgacggcacagcagcgcctgggtgctggtggacggtccgccaccaccaccaagacctccggcgctgctaccaccggctccgtgtcatcaaggcggagggcgcggcgagcggcggcggctgcacgtcattcggctgccactccctcgtctacaccgtcgactcgggaggatcagcatggggagccggatgcccgcctcaacatcgggcgccggcgtaatagccggcgtactccccgtgcaacggagggagcctcctcgtccagagtgtcacctcgacatggacgtgaagatcagccctccgtgccccgggaccggtggtgttggctgtagagccttgtggcgagtcttcggaatgtccgttggcccccaaggttccggccccccatcaccgagaagtacgattggagcgtcaaccccccgaagtttctccaggtctatacgcccgggattaaggccgctgggggtgacgacagggtcatggcgaacttctttcccatggccctaaaaggacaggcgcgggttgggctaatgaacctgccacccgggtcggtccactcctgggaagatttgtgcccacagttcaccatgaacttccaaggcacatatccgcgcccaggcaaagaagcggcttgcatgcagtcaagcaaggcgaatatgagtcgcttcgctcggacaatcagcgggtttgccaagtccgcaacactatcccatgcatccctgcacacgcggtgatctacgcgttcagggggggcgtgcggccccaccgcatgctcgaaaagatgacttccaaagagccccagactaccgcggagctttttcagctcgcggaccgagtggct

SEQ ID NO: 58843 - DNA, 536 bp, Oryza sativa
  Clone ID: PAT_MRT4530_60520C.1
aatgaaaccaagctttccgaggatgagcatccatgctcctaaggtgtgggtctaactcctatattgttccctgatgaacttcattatatagatgtagcgtactagacgacccagtattcttgactggtgtatcaaggcttgcaatggaggatgctctgcttgcaataaaatgtactggtgcacctggagctgcatgcttgccatctggatcctgatatcgagatcctctcaggttgaaccggtgatactaacgagaggttcatgatggcacagcgcggcttgctcagccattatggactcatatggtactcccgttacagacaagagatatacgcgtaacgctgcccatacgtgtggggatacatggtgtaatccgatatgatgtctgacatcctcttccgggctaagctgatgtcaatttgatggtgatacttcatggtgcatgacattcacagaactgaaaagtgttgcttgatcgctaagattcgactggctacaggacccacgtgtccgtccatagatcaatgccactatac

SEQ ID NO: 58844 - DNA, 158 bp, Oryza sativa
  Clone ID: PAT_MRT4530_60521C.1
ggttcgggggatcattccttttattctgaaattactggcagagcttaaccaacggcgctgggtacgaacacacaacacaagcgcgaccgcaaattaagcaagctagccgggctagcgaacgatggaacggaccattgaccggcacagacacaccacac

SEQ ID NO: 58845 - DNA, 1337 bp, Oryza sativa
  Clone ID: PAT_MRT4530_60522C.1
gctgcaggaattcggcacgcccgacgagcccacctctcctctcgccctcctcctcctcctcccgtctcctcctcctccgcctcctcctctcccgccgccggagccccgcctcgcgctcccctcctcctcccctccgccgccgcctccctctcctcgctgcctccatgtcctcctcctcctccaccgccgccaccagaaaccccggctccgtcgtcgccgacgccgacggcctcgcccgcaaggtcgccgccatccgcgccgccggccccgctaagctccaggtcatcgcggacttcgacggcacgctcacgcggtactggtacgacggctcccgcggccagagcagccatgggttgctgaggcaggggaacgaggagtacgacgccaagagggaggagctgttcgagcactaccaccccatcgagatctgccccgacatcccgctccccgagaaggccaagctcatggaagaatggtgggagaagacacatgctctccttatcgaaggtggacttacatatgaagctataaggcaatctgtggctgatgctaaaatcacttttagagatggagtggtgaagctctttgagttcttggaggagagagattctccagtattagtagtttctgcttaacttgcagacataattgaggaggtcttccggcagaaactccacagatcattcaagaacattaaggttgtgtccaacaggatggtcttcaatgaagaaggtcgtcttgtttcatttaaaggaaagactattcatgggagagacaaaaatgagcatgccttggacatggcagctccagtgcatgacaatttgggtgatccaaatggatatactgatgactattcgttggtgaagaagaggaccaatgtgcttctccttggagatcacattggcgaccttggaatgtctgatggtctaaactatgaaaacaggattgctgttggatttctgaacaacaacatcgagaaatctctaaaagattactccgaggcatttgatattgtctacttgaatgacgcgccaatggtgggagttgttgagcttgtatctgaactatgtccttaaccaaatgatgttttgctgagcttagaagccgcatccgcctcccgctcttgctgaaatctgggaatcctattccccacttcactaaccggccgggtttgttcaataagaagcaattttgtacaggcttgacatcaagcaagccaagcagccttttgaaccaatatctccttaagccaatccaaacttgtatgaagtccagaacacatttatgaaatggaatttcaaatttggttttggtcctcaaaaaaaaaaaaaaaaaaa

SEQ ID NO: 58846 - DNA, 244 bp, Oryza sativa
  unsure (1)..(244): unsure at all n locations
  Clone ID: PAT_MRT4530_60523C.1
taatctttggtcaaccttncagttgctgtgaaatttggtctgtancgtganctcatanccttggggttgtccnntancagttgttgttcccctgcctctgggncaaaccttttggncncttatatgtnantctatttgtttggaaccnatttcggnatctnagggtggctatagttnatttcataancttntgttcttgntctttctnnnaaaaaaaaaaaaaaaaaaaaaaaaaaaaaaaaaa

SEQ ID NO: 58847 - DNA, 621 bp, Oryza sativa
  Clone ID: PAT_MRT4530_60524C.1
atggacaagacggtgatcgtcgtctccgccgtcgtcgggtccctggggttgctgagcgccattctgggattcgccgccgagagcacaaagatcactatttcggacgtgcgggtttccggcgacgagtgcctgtacccgcagaacccctcgctaaggctggggctctgcgccgccgtattgctgcttctggcgcaggtcaccgtgtccgccatcggcggctgcggctgctgctgcggcaacggcaagccccgcggcatcccgtcctccaagaccaaccgggtcgtcggcatcgtcttcgccgttgcctcatggatagcggcggtgatcgccgtagtgctgttcgtggagggggcggcgtggaacgccaacgtggcgagggacaccgcgccggtgtgctacttcctcaaggacggcgtcttcgcggccgcggccgtgctggccctcgccgccacggcgctcggtgtcgcctcctacgtcatgctccgcaggcagctgcccgacgacgacgacgacgcaccggcgggcgcggtcgcgtcctggaggcagccgctgctgcactccgggatcgcgatgggccacccgcagttcccgccgcatcctcaatggcattcgcaggtttag

SEQ ID NO: 58848 - DNA, 473 bp, Oryza sativa
  unsure (1)..(473): unsure at all n locations
  Clone ID: PAT_MRT4530_60525C.1
ctagctataccagattctgcgtccctggcctctctctctgcctccgaggactgcaaacaacaacctagctagagcagcaactactactaacacagaaagaaagaaaaaaaaaagaaaaggaaaaggaaaggtatgaggagtactgtactgagtactaaccactttggtgatcgatcgatggtgcgtggcgatgagagatggagaagaaacgggattgattgatggattgaagatctaacaccttcaaaaggggggccagtaggggcatcttctacctgcatcgacaggtacgcaacaacacatgccctggatcgatccactcgtcccagctttttattactaccatctttccttccttttttttttcctttagtacaagataataatagacacacttcctactattagcttattttaaaccacatatataatagattagctatcagnttggctaaaaaaaaaaaaaaaaaaaa

SEQ ID NO: 58849 - DNA, 768 bp, Oryza sativa
  Clone ID: PAT_MRT4530_60526C.1
cactctgagtggttgtctgaaaatattattaagacattgccgatctttatcgcgatcaatttaatctcaatcatcgtttggcgattacagatatcacaattatcaatgccgttaatcttaggcgttatagcgggggggttggttgacttagacaataatttaaccggtcgaattaaaaacttaatgttaagtttaattgcctttactatttcctcattaggtgcgcaattttgttagtatttggttggttatttttacctgcggcaatgttaagtacctttattttagtgatgatgggtgcggttggacaacgttatagcaccattgccttcggtactttacttgtagcaatttataccagtttaacgtatatgcaggagcacccttggtatagcaatattatccttattttagttggcaccttgatttatagtttagtcagctaattggtctatctatgctttccaaaccgcattgcccaagaaaatttagccaaagcctatgatgcattaagtctttatttacaagctaaatctgaattttttgatccagataatgatgatttagccgctaagcaatttgccttagccaaagccaatcagcaagttacccaagcattcgaacaaactcgtgtttcgcttttttatcagttaaaaaggaatagccgtaaaacgcgcaccaaccagttattacaggattattttattgctcaagatattttagagcgggcaagctcaagctattatcaatatcacgaactttttcaac

SEQ ID NO: 58850 - DNA, 224 bp, Oryza sativa
  Clone ID: PAT_MRT4530_60527C.1
acagcgcacgcatccaccaccccccaacacgggagcggagagctcgccgccggcgatcgccgcaggattctgagggcttcttccggcggccacgggagatggttctgctcgaacgcacgccgttggtggtgcccgaggcagcagcagcagccgccgccgcctcaagccgcttcggaggccggtcgcctaggggtttgaaggaaggggcccccggccccccttga

SEQ ID NO: 58851 - DNA, 248 bp, Oryza sativa
  Clone ID: PAT_MRT4530_60528C.1
gtgccgccgcgccgccgcctctgtgccgccgcgccgcgccgtgtgccgcgccgggcgtcaccacgccttgcgccgccgtcgagcccgagggaattgcggatccgagctaggatcaagacccgcaggactacgagcaaggcaagtcatcactattccttgaacatgttgatcccaattgcgaaattattttatttacaaataaaattgcatgcaatgatgaacatcctacttgtgattatgccatgcct

SEQ ID NO: 58852 - DNA, 249 bp, Oryza sativa
  Clone ID: PAT_MRT4530_60529C.1
gtgccgccgcgccgctgccctctgtgctgccgtaccgcgccgtgtgccgcgctgggcgacaccatgccttgcgccgccgtcgagcccgagggagttgcggatccgagcgagggtcaagacccgcaagacttcgagcaaggcaagtcatcactattctttgaacatgttgatcccaattgcgaaattattttgtttacaaataaaattgcatgaaatgatgaacatcctacttgtgattatgccatgtct

SEQ ID NO: 58853 - DNA, 177 bp, Oryza sativa
  Clone ID: PAT_MRT4530_6052C.1
atggaccgttcctggaacctctaccacgctcgcaccatgcgtgggggccgtgtgctggtggcttcctcaggtggtctcatcctctactactcgtcggccatgggcaattttgccgttgccatcctgctcatcagcttgaaggttgcaatggatcttaagcttttgcgtggtgcatga

SEQ ID NO: 58854 - DNA, 234 bp, Oryza sativa
  Clone ID: PAT_MRT4530_60530C.1
atggctttcggtcaattcacaatgaaggaggtcctcaccattactgctgcaggaagtcttgtctcaatggtcgtctttgctaatatgcattgctccgatccaagcgccgtcttcctcccgcgacgcccggccggcgccgtcttcgtcccgcggcacccggtcggcgccgcggggcccggacggcgccgtggcgcccggacggtgccgtcttcgtcccgcgggtcccggccgtag

SEQ ID NO: 58855 - DNA, 248 bp, Oryza sativa
  Clone ID: PAT_MRT4530_60531C.1
gtgccgccgcaccaccgccctcggtgccgccgcaccgcgtggagtgccgcgccgtgcgtcgcccgccttgcgccgccgccgcacccgagggagttgcggatccgagcgaggatcaagacccgcaggactacgagcaatgcaagtcatcactattctttgaacatgttgatcccaattgcgaaattattttgtttacaaataaaattgcatgcaatgatgaacatcctacttgtgattatgccatgcct

SEQ ID NO: 58856 - DNA, 498 bp, Oryza sativa
  Clone ID: PAT_MRT4530_60532C.1
tcttccaattcacccgtgtttcaaactgagaaactgccaagtcaatgcagcacgcaagtggctggccaaacaagctccaggatgatcgcagcaaccagtgctgcactgccaaggcccattacccagtggttcaggcgattggtggcaagcaagctacaagctgaccaaccagtgtgtggctgggcgtgctaacttcgatcaaggctgcaagctgcaagcccacagctgatgttgggccctaaactgtgggccgtgcaatatggcggtgatgcctacccacaggctgacaacactggctgccctggtaggcattgcctgaccgtgcggtgggtaatgctgggtgattgtggaatgtgtgacgcgtgatgagtgagtgaccacggagagataaaataaaagtgcatggcatcatcggtggtgtgaccacagttgaaacatcggggtgataccaatctgaataaaaatgtcatgcaaatttaaaaaaaaaaaaaaaaaaaa

SEQ ID NO: 58857 - DNA, 680 bp, Oryza sativa
  Clone ID: PAT_MRT4530_60533C.1
cgagtaggtatcaggtgtaatacctatcaggtatcagatgattctacacacgtttcaggtgatacctgcaagtatcatgtgatacttatcaggtatcatgcaattttctaccacgtatcgcgtgatactcgcaaggtatcatgtgaaacctgttaggtatcagatgatttcaaccacgtatcgcgtgatactcacgaggtatcatgcgatacctgtcatgtatcagacgatttctaccacgtatcacgtgatactcgcgaggtatcagacaatttctaccatgtatcacgtgatactcgcgaggtatcagacgatttctaccatatgaggacggcgatggcggcagcagaggacgggcgcggcgacggcggcggtagcgggggacgggcgtgtcggcggtgggggatgggcgcggcggcggcgacagcggctgcgacgggggacggacgccgcggcggtggcggcgggggacagcgacggcgacgaagacgaggccggcaaggtagacgccggagctgcgcaggagcacggcgccgtcgctcgggacgcgccccggctcggccggcgaccgcgcgcgcgcccgggccctcgaccgccgcaccttctgcgcgaggcgcagcgtgaggaggagcgcggcgagggtgagggccttcacggtggagtccatgttccagtggagg

SEQ ID NO: 58858 - DNA, 389 bp, Oryza sativa
  Clone ID: PAT_MRT4530_60534C.1
gtgggaggcaaagacccaagccacggggcttctgaaattttaataccaaacgggtggggcaacttggccggacaaaatacatcgatggttgctaatgtcgccaaaaaaaatgaacgaagcagttgcgacaaaacaaaaagatgttcgaggatcacagggaaaaaaaccaaacctgttaaactcgacgcagaaattaaatagggggaaaaaccggaaataaaacgactgaaaacctctaagtataaggggagaggggcaagaaaaagaactgaaggtcgtacctaaacatagggagaaagaaagctccacaagaaaggcaaagtgttgactaccacccgaagaagggggccaaaaaacgtctaaacttgaaccaaaaatggggaggaatt

SEQ ID NO: 58859 - DNA, 1947 bp, Oryza sativa
  Clone ID: PAT_MRT4530_60535C.1
atggcggtgtcctcgccggacaggagaaggaattggctccgcggacaccgaaaggttgtttcttgccccctctttaattcttcatccaatgtgttatgtgccaccaaaaaagatggcaatttgggcggttttgctcccaatttggctttggcttcagcaactgatttgttggtgctgtgcattgtgcagcagatcatcggagactacctcgccgaggctcgggctgctctcgccgccgccgccgccgcgccgctggatggggaaggtggcgagcactcagcggctacggcggcgcttggactagtggaagcggtgctagagatgtcgccgcgcatggaggccgctctcgagctccgggcgcgctctctcctcgcgctccgccgctaccgcgccgtcgccgacatgctccgcgactacatccccagctgcaccaagccctgctccgccgatgatacctcctcttcctcctcctcctcctcctcttgctcctccgcctcccgcaccgacctgctctcgcctgcccgtgaccgctccgacgctgcctccgccgcctcccgcttcctctgctgcttcgacatttccgacctcaagcaccgcgtcctcgccggcttctccaagaacaccagcgccgacacccagtggaggtacttggtcttgggccaagcttgcttccacctcggattaatggaggacgccgccgcgctgctccagaccggccgccgcctcgcctcggccgcgttccgacgggagagcgtctgctggtcggaggacagcttctcgccgtccaacctcacggccaacgctatctccgcgccggcgagtcgaagagcctccaagtccggcgcggcgggaagcgaggcggagtccgtgtcgcagctcctcgcgcacgtcaagctcctgctccgccggcgcgccgccgcggtggcggcgctggacgcggacctccccgccgaggccgtgcgccatttctccaaggtgctcgacgcgcggcgtggcgtgctcccgcacccgttcgcgaccgcctgcctcgtcggccgcgccgaggcgctccgttccagcgggcgggcagccgacgccatcgccgactgcaaccgcgcgctcgcgcttgacccggcgttcatcccggcgctgcgctcgcgcgccgaccttctcgagtcggtaggggcgctcagcgactgcctccgcgacctggagcacctcaagctcctctacgacgcggcgctccgcgacggcaagctgccggggccgacatggcggccccagggcggcgttcgcttcagtgagatcgccggcgcgcaccgcgcgctgaccccacgcatccagcagctccgcgggcgcgtggccggcggcgaggcgtgcagcgtggactactacgccctcctcggtgtgcgccgcggttgcacgcggtcggagctggagcgcgcgcacctcctcctgacgctgaagctcaggcccgaccggtgcgcgtcgttcgccgagaggctggagctcgtggacgagcaccgcgacctggaggccgtgcgcgaccaggcgcgcatgtcggcgctgtcgctgtaccgcatgctgcagaagggctactcgttcatcatgtccgtcgtgcaggacgaggaggccgcagagagacagagggccaaggacgccgccgccgccaccgccgcggcagcagcagcagccgccgcggcagcgttggcgcgcgagcaagaagagaccgccgccgtgccggagaaggccaggatcagtagtgttagtgtgcctagcacgaatgttcaggttcaggtaactcaggcagcagcaatgccaacagctgccatggcggcggcggcggcgatgggaagtccggtgttccagggcgtgttctgccgcgacatggcggtggtggggaccctgctgtcccgtggcgggttcgaccggccgataccggtgaagtgcgaggcgatgagctgctga

SEQ ID NO: 58860 - DNA, 213 bp, Oryza sativa
  Clone ID: PAT_MRT4530_60536C.1
cccgccgtcggcgcgacggtgaaggcaggcatgttccaggaggcgatctcatcgctggagaaatcggcgagcgcggtgaaggaatgccaggacgggttcggcaagagcaatgtgacgtcgccgctctccgcggagaacgacgatgccttccagcttgccgagctcatcgttttgctcatccgtgacgaacagatcaacaatgtttcgccttaa

SEQ ID NO: 58861 - DNA, 717 bp, Oryza sativa
  Clone ID: PAT_MRT4530_60537C.1
atgggagaggcaaagaagaagacaaggaggaaagaggccaggaaggaggaggaggaggcgagtcgtcgatgcagtctttggcccccttgcttgctgcgtaaaataagaggagagaaagcggcggggcgcgaggtgacaccgtggggtcggcagcacaggacagggacgacgacgacgacaagggttgtgtgcgggagaagccgcggtcaccgtcgcctcgcctcctttctcgcggtgcctgcctctgaccgcacgtctacacgcgcggcgcggcccgccaatgcgttttttcccctctcctttgctgataagcacaagcataaagataatggtgataagcaggattgcatgagcgagcgagtggcgaatatgggcgagtcgtgttgtggcgcggaaacagccacacgggtggttatcgtcgtaattaatgggtatactaatcaccggtgctcatctccaattattaagccgctggcgctcgctgatgcgaatgctctcctcctcgtcggtggttactggcccgttgctctatcacaagttcacaactcacaaattaaacacaccatcgtccacaaggcagagcaaggctaccaggccaccgtgtccacgcgcggctgggtcccctttgtcacggacgcccgcggtacccacggcccacggccacgggggatcggctgcctggccatggtggacttgggcgtcctcgaattcggctga

SEQ ID NO: 58862 - DNA, 230 bp, Oryza sativa
  Clone ID: PAT_MRT4530_60538C.1
gcttgcgaaaagcacggttggtgaaattccctgattgtgatgtagtggcgcttggtttggtttgtttggagggctgggaaattgacatcatggtttttgagttgtctattattacgttattaccaggatatggcgtctgattttttaaaaaacttcatgcaacttgatacagatttcatgacatatacaatgaaacagtataatgttgtggctcaaaaaaaaaaaaaaaa

SEQ ID NO: 58863 - DNA, 225 bp, Oryza sativa
  Clone ID: PAT_MRT4530_60539C.1
atggcgtcggggacggcggagcaacaagcgatgacggcaataactggcacccgtgaagatcacgaaggcagagcagcaagtgacgacaacggagaccaccatcacctctccaaccacaagctcgtgcaaggagcaggtggtgcagatggcactggcaatgatgccggccagggagcacgcacgcctggattcggcctccccggagctcgcatgaggaggagttga

SEQ ID NO: 58864 - DNA, 649 bp, Oryza sativa
  unsure (1)..(649): unsure at all n locations
  Clone ID: PAT_MRT4530_6053C.1
gttaggcgcgtgccagctgtaggttgcggtcgatctaaagatccccngagtccggnatgacggcggcggcgaaccggactcgtcggcgacggcggagagagaggaaagcggcgcgagcgcgattccgacggtgagggcgagcggcgaacggcggaaacggaggagagaggcacggggaacaattaaatagcgtcgggagagagggaaagcggccggaggagatggaaaccggcgcggagatctcggccgccattgattgcgccggcgaactttgcgggcacaaaatcggacgaatccgagggagagagagaggggaaagtgggggaatcgggagagggaatcgcggggagtaattccccccactttaatgcgcgcggggacggcgggatgcggcggattcggcggcggcggcggcgctagggcacgggcgggcggcgggcgcggcgcgaggaaggcgatgacaggtgggccccacccgtcagcgagggtggcggcccgcctgtcagcggcgcgcgcgcgggggaggagccgatgggccggaggagaggagagagagggagggaagagaagtgggccgagccggccccagaaaggaaggagggggggaaagaggacttcttttagggtttttctttttataaaccttttc

SEQ ID NO: 58865 - DNA, 337 bp, Oryza sativa
  unsure (1)..(337): unsure at all n locations
  Clone ID: PAT_MRT4530_60540C.1
aattcagaagagttgtngagagagagaagagaagccgcggaagggggaaaaaagggaggcggcggaaggggatcggagatgccgctgggcaagtactactgcgactactgcgagaagcagttccaggacacccccgtngcccgcaagngccacctcgacggcgcccagtaccaccgcgcccgcgccctctggtacgangccgttcgncgccaagagcttnacggcggcgtcggcggcgctcctcccctcctccaccagcccggcgccgcgccatcgggttctgccaacacttcgtncgtacggggacgtgcaantttggggattcatgtagatactt

SEQ ID NO: 58866 - DNA, 496 bp, Oryza sativa
  unsure (1)..(496): unsure at all n locations
  Clone ID: PAT_MRT4530_60541C.1
tcgcacatccaacttaagcaaagcaaagtgagagctcgccgatggccatggccgtcgagaggaacaacgtcgccgcggcggcggcggcgctgctggcgctcctgccgatgatgatgctgtcctccacggcgacggcggcgcgccccgtccatggcggcccgcccggcgagctcccgccgatcatcatcacaaccccaccgacggcgataagcggggagagcgacttctccgttctgaggaaggtccccacgggtcctgaccccatcacctccgacccgcctccgccgccgccgccatcgacgccgactcagttctccgttctgaggaaggtgcccactggtccggaccccatcacctccgacccgccgccgccgccattgtcggagttcccggttctgagggaggtcccctcgggtcctgaccctatcacctncgacccgncgncgncgncaccgncattgacggagttcccgattctgaggaaggttccccgagg

SEQ ID NO: 58867 - DNA, 4167 bp, Oryza sativa
  Clone ID: PAT_MRT4530_60542C.1
ggaggatgcttatccggcttcctccgatgccgcggtaggtgaggagaagggcgaattgggcgaggcgccggaggagaaggctccggctctggctccggaggcgaatggcgccgccgaatcggatgtggaggagaagccggaggaggataacgagggggaggaggtggctactgggggtggggatgatggtgaattgggaatggagaaagaggttgatgtttctcctggggccgcggaggcgccgcagccggaggataaggtagctcctgaagctgaagctaatggagatttgggcgacaaggcggaggaggaagcgagtccttcggcggcggtggagggtagtcgaggagagcaatactccagaagaattattcgagaaggctttcgtttcggaggcaaatagcgttgctgccgcgcgaattgggcgaggagccggaggagaaggctccggctctggctccggaggcgaatggcgccgccgaatcggatgtggaggagaagccggaggaggataacgagggggaggaggtggctactgggggtggggatgatggtgaattgggaatggagaaagaggttgatgtttctgctggggccgcggaggcgccgcagccggaggataaggtagctcctgaagctgaagctaatggagatttgggcgacaaggcggaggaggaagcgagtgcttcggcggcggtggaggtggtggaggagagcaatgctccagaagaattgttggagaaggctgtggtttcggaggcaaatggcgtggctgccgccgtcgaattggctgtggaggagaagctagaggataacaagggagaggaggaagaaatggaggcgaagcctgagccagtaagcggggtgattccagtggttgttgacgacactagctccgagatgattgcgcctgtgagtgccgaaagtgcagttgaagagagtactgagaaggagcaaactgttgacgacactagctccgagatgattgcgcatgtgagtgccgaaagtgcagttgaagagagtactgagaaggagcaaactgttgaaagcgaggccagtgaatctgtggagattgttggtgttgagaagcctactgaggatgagagtaatgttgatggcggtgctagttctgttgtgtctcgagaattggctccagaggaaaccaaggaaaataatgttggtcaggaggatgaaggtgttgctgaggttattgaccgtgaagaagacgctgatgatgatgaagagatagttttagctgcagctgatgatgaagatgatggtactaacgaggctgatgacgatgaagatggagtgagctctgacagggggcctgcacgagttgctattatagagagttcagaagctgcgaagcagatcatgaaggagcttggggaaggttctgctagtgttagtcctgtatctggcttgagcagctcgagagagtacactaatagcatggatgggcagattgtccttgatgattctgaggaggatggggatgatgacgataatgaagatgacgatgagaaggggtttgattctgctgccttggctgccctgctgaaagcagcaactggtgcatctgcagacgggaatgtcacagtttcttcccaagatggctctagaatcttctccatggatcggccagctggcctgggctcatcagccccatctctcaggccaacagtcccacgcccagttgcacggtcaaacctattcagcccctctgagctagcagtgactgctgagcctactgaggagatgacggaggaagagaagaagctgcatgacaaggttgagttgatccgagtaaagtttctgcgccttgtctatagattgggggctactcctgaagaaacagttgcagcacaggtgttgtaccgtctgagccttgctgagggtattcgacacggaaggcagacaaaccgagctttcagccttgacaatgcacggaagaaggccatgctgcttgaagcggagggaaaagaggagttgaacttctcatgcaacatacttgttttggggaagataggggtcggaaaaagtgcaactataaattcaatttttggtgaagagaagtccaaaactgatgctttcagttcagccaccaacagtgtacgggagattgttggtaatgtcgatggtgtccagatacggatcattgatactccaggccttcgacccaatgtgatggaccaaggatccaacagaaaaatcctcgcttctgtcaagaaatataccaagagatgccccccagatattgttctgtatgtggaccgcctggatagtctgagccgtgatctcaatgatttgcctcttctaaagaccattacttctgttctgggctcatctatatggttcaatgccattgttgctctcactcatgctgcttccgcccctcctgaaggtctaaatggtgcccctatgacatatgaggtgctaatggctcagaggtctcacattatccagcaatccatcaggcaagctgcaggagatatgcggttgatgaatccagtagctcttgttgagaaccatccttcttgcaggagaaaccgcgagggtcagaaagtacttccaaatggccagagctggaggcatcagatgctgcttttgtgctactcttcaaagatattgtctgaagcaaactcacttctgaaacttcaggatccaaatcctggaaagctttttgggttccgtttccgctctccgcctctgcccttcctgctctcctccctgttgcagtcaagagctcacccgaagctttcaccagatcagggtggcaatgaaggagattctgacatcgatttggatgattactctgatatagagcaggatgaagatgaagaggaatatgaccagcttcctcccttcaagccattgaccaaatctcagcttgcgaggctgacaaaggagcagaagaatgcttattttgatgagtacgactacagggtcaagcttctccagaagaaacagtggaaggatgagatccgcaggttgaaggagatgaagaagagaggtaaaactgatatggatgcttatgggtatgctaacatcgcaggagaaaatgatctggatcctcctccagagaacgtatcagttcccttacctgatatggtgctgcccccttcatttgactgtgacaatcccacataccggtaccgctttctggagccaacttcgactgttcttgcaaggcctgtgttagatgcacacgggtgggatcatgactgtggttatgacggagtaagtgttgaggagacgcttgctctccttaacaagtttccagctaatatggcggttcaggtcaccaaggacaagaaggaatttagcatccatttggactcttccatctcagcaaagcttggggaggatgcatcgtcgcttgctggttttgatatccagactgttgggcggcagcttgcgtacattctccgtggtgaaaccaagttcaagaatatcaagaagaacaagactactggaggattttcagtgactttcttgggcgacattgtggcgactgggctgaaggttgaggaccagctctctcttgggaagaggttggcactggtggcgagcacaggtgcaatgcgagctcaaggcgacaccgcttatggagctaacttggaggcacgcctgaaagacaaagattatccgattggccagtccctgtcaaccctgggtctttctttgatgaagtggcgccgagaccttgctctcggtgcgaatttgcagtcccagttctcgattggaaggggctcgaagatggtggttcgtcttggattgaataacaaactaagtggccagatcactgtcaggacaagcacctcggagcaggtccagatcgcgctgttgggtcttatcccagttgcagcctccatttacaggagcttcaggcccagcgaaccctccttcgcctattagcttcgcatcaagatgaacaatttactcatgtcggctgcgcctcctttcgtcttagcaattttcctatcttatatgaaccataattttctgtctgtttttgcttttaccagtgtactccgaagatcgttcctatcataattttggctgaagagggttgtgaaatttaatgtggaacttcaactgaataatgttgttagatctatataccatccgtttttctattaaaaaaaaaaaaaaaaaaaacta

SEQ ID NO: 58868 - DNA, 614 bp, Oryza sativa
  Clone ID: PAT_MRT4530_60543C.1
aggtccgggtccggatttccggggtcgcccaagccttccggcccaccttctggggaagctagccggaaaaccctgggtggttctcaacatacaggattctgttagtttatgaaacctttcataaatggatatgtttaataatcctgaacttgtgtgatttcattcacatggggataaaagcagtcatgaattctgataatttgttgctgcagatggatgggttaactaaaacagatgatctcgtttttgttctagccgccacaaatttgccatgggaactggatgcagcaatgttgcgccgtttggagaaacgtgtatccttttttctcaaaccatcttgtaatttctttgttcacgagtgctcctaaatactactccgtaattgccagttttgctattaggtaaactcccttgttttgtccgcaaatgcttgatgttttggacaaaatctggttaaacttttgaaaccttgactatcgatgaactttaaaaacttagttcaaaaacataaatatgatatgctttgattttgtttaaaggactttcaacctcttattaaactgattaggattttttaaaccctattttaataataatcatggggaccaatttgc

SEQ ID NO: 58869 - DNA, 658 bp, Oryza sativa
  Clone ID: PAT_MRT4530_60544C.1
gaggcctgccacaacctgctgttcgcgacggtgttcctaatatgtcgacgggggatacctgtagaccggatatagagggtattgtggtccgttagtaccgacgagaccgtagtcgagttggttcaactagatctcccagcgacttggctcctgtaggctccgacttcgtagctgtgatggatgtattggcggtgagattcgatgccttatgtcctgcccagggggtcccttttataccgcgggtcagttgatctccaagtaggactcggagatatcggacccctcacgatatggtaacgacccagtctcgtccgagtaggactcctcccatatgtggattctgtttctatcacgtgatagatttccttaacgtgtacaggaactatccgtatacgcgcgggtataccatatcagtatacaacgtatatccaaggatagagggtatacccgcgcctgtccggcgtaagatacgtgcaggtacgccagtagtgactgatatggtttcaatatcttctattttgtccatttcgaaacataacgtattgtatatgcaaaggcgttctaatttgaaaacattctcaccgcgtcccctatcacagggagacagaatatcacagcaacaacggtctctttattatagagtacggatacagtcatg

SEQ ID NO: 58870 - DNA, 602 bp, Oryza sativa
  unsure (1)..(602): unsure at all n locations
  Clone ID: PAT_MRT4530_60545C.1
ggtacaaatgaagaattccatcactccaattacacgaattatttatatgcataaaaggtaaagaacaagatgaacagatcagaaaaaagatataaagtccatctgcacctcgcttggtgggtgggtggtggggggcaccgaatccggctacccccgagcaccaatgggaagggacagagaggaggaggggccacgctggatccgaccgcttgccgagcaccggatttggccgttcccatgtgctggtggggaggggcgganccggatctggccacccccgagctccaatggatgatatgaaggggcganaggaaangttaangggccgganccggatctggccacgccnccatcgccgtcatctttgccgcatggangttttngggggangaagaagaaaaannaagttccgcngttnttnccnaaaaaagggttnaaaaattgacttcttnccaatccnngcccccccgggggattcccctnattcctnaaccggcccccccccggttgganctcccncttttngttccctttnttnaggtttatttcaacnntnnctttacctggtccnncctttccngtnttaaatnntnccctccctc

SEQ ID NO: 58871 - DNA, 1716 bp, Oryza sativa
  Clone ID: PAT_MRT4530_60546C.1
atggccgccgtggccgtggccatatttacctccggcgagtacacgcatgtgcacgcgatatacatcgagatctttaccctctctttgcccatatcttcccacctcgtaccggagaggatcagggaggtagagctagtcatggagtttgggaggaggaagagctttagcttctttgaggaggactggaaggcgcggccaacggcggcggcgcggacgccggtgcaccaccactacgcgcggtcgccggcgagggaggcggcgccgcacacgccgccgaggctgagcctctcgtcggtgcatggggtggagctgccggggttggtcggagttgggggaggtggtggtggtggtggtggtgtcggggggatgtgctcgccgtgggtgcagtcgccgctgcacgggagggttcggttcccgccgtcgccggcggcgatctaccactgcctctccgcgctgcaccggctcgacggcgacgtgcacgcgctcgccgtggcgaggggggtgctgttcacggcgtccgacagcggccgcgtccgggcgtgggcggcgcccgggtgcttcaaccgcgggtacctcgacgtcgggcgcggccgcgtcccggcgatcgccgcgtgcggcggcacgctggtcacctcccacagccgcgaccaccacgtccgcgtgtggacggtgtgcgcctccgccgtgtgcgaccacatccgcgccaagaaggccgccacgctcccggcgaagggcggcatcctctccttcaccaagcggcggccgccgcaccaccgcgacaccgtgtcgtgcctggtgctccacgccgtcgcgggcctcctctacacggcgtcgcacgaccacaccgtgaaggcgtggaagctctccgacggcagctgcgccgactcgttcgtcgcccacgacggcgccatcaacgccatgctcatcaacgaggccgacggctgcatcttcaccggctccgccgacggcaccgtcaagatgtggcggcgcgtgtacggcggcaccacgcacgccctcatcatcgccctccgctccgagctgtcgccggtgaacgcgctgacgctctgccacgccgccgccgccacgggcgccacccgccggtgcttcctctacgccggctcctccgacgggtacgtcaacgtgtgggagaaggaggcgagcgcggggcggccggcgcacgccggcttcctcaagggccaccgcctcgccgtcttctgcctcgcctccggctgcggcggccgggtggtggtgagcgggtcggaggacgccaccatgcgggtgtggcggcgcgacggcaagggcgggagcacgtcgcacacctgcctcgccgtgatcgagggccaccgcgggccggtccggtgcctggcggtgggcggcggcgaggccggcgatgtggaggggagcatggtggtgtacagcgccggtctggacaagagcgtcaaggtgtggaggatacgcgtcgtcgggaaggaggaggaggaagacgacgacgaggatgacctggacgacgacgacgtcgacgtcgtcgtcggcgaggaggacgcggcggagacgatgtcgacagctgcagggaaggtcgacacggaggcgagggacgaggcggcggcggcggcggcggtggtcgccgaggaagaggcggaggtggtggtcgggctcggcgcgacgccggtgctgtcgccggtgtgggtggagaagcggcggacgagccgagggtga

SEQ ID NO: 58872 - DNA, 632 bp, Oryza sativa
  Clone ID: PAT_MRT4530_60547C.1
cctcatctccttgaataactccttggctttaactgatgagcccttttcaggggggccttgaagaggatccgtggaaggagtcgacctgcatcgtcgaaaccgatttactccttctgacggcttccgctgcagcacattagggttatcagctagcagtgattgctgaatgctgttgtcatccattggattagcctggatctgttacggtcacagccaaaaacctttcctccggctgaggggacgccgcgcgtcgatctcctctccctctcgcccgacctgccctgagccgcctgagacggatgccccgcgcgcgcgcgccactgctgctgcgcgcctgcggggttgagggctctggctcctggctgcaacaccacaccggccaagattctgcgcgtcgttgccgcgtccggggctattctattttaaggcgtccggctaactccaccggaacggtggatgttgtcaacgttggggctagcccaaatctatcaacgagctcagcgtacgcagccgcaggaattgaaaacacaggaaatggagagaagagccctttgattataccacatgataccctcaacaaaggaaagtttcacaagaggtctaacctcttgcttatttttctatggaattga

SEQ ID NO: 58873 - DNA, 319 bp, Oryza sativa
  Clone ID: PAT_MRT4530_60548C.1
agcatggctatcattatttctggtttggtgcatcgctcaaccgccctgcgagtcatctctgtattgtttgcgcttgcagttgttgttccagatgcaggagggcgagataagcatcatctgtatgactgtcttgcgttcacctgcaggcgtcttagcaacgtgtcgcctgctttccgccggcgaggtgacccatctagatgcaggtctacatactacgagctgacttggaccgataacgaggctacgattcagatctacgagggaacgtactgtgtgactggcaataactacagtgattgtaccttctcggttggcgatg

SEQ ID NO: 58874 - DNA, 190 bp, Oryza sativa
  Clone ID: PAT_MRT4530_6054C.1
gccaagcctaaaaaagattgattttttatcaaaggggtcttattttaagggttgccccccaatagtttccaacccctttttcctagagtccttttaaccacccttttacaaaaacccccccctggaaaaaggttgaaatttctcagggcccctttttccacattattggcattttcccccccatcttaat

SEQ ID NO: 58875 - DNA, 342 bp, Oryza sativa
  Clone ID: PAT_MRT4530_60550C.1
atggagaagattatgggggaaaatgagatcaggacccgttcgcccgtttcaagacgagacatggcatccagctccaaggcctcgtcctcgtcgtcggcgtcggcggcgtcgtcggagtggacgaagcagcagaacaagcagttcgagcgcgccctggcggtgtacgacaccgacgccccggaccggtggcacaacgtcgcccgctacatgggcggcgccaagtccgccgaggaggtgcgccgccactacgagcggctccaggcggatgtcgagcagattgaggccggcggcgtgccgttctccttgggctacggcgccacgccacaggccggccgccgctag

SEQ ID NO: 58876 - DNA, 348 bp, Oryza sativa
  Clone ID: PAT_MRT4530_60551C.1
ggggccaaaaaccttcttagaagagaaccaaattcaacttttccccaacaatattttgtttacgagggggattaaaaagtggggccaccactttattttatgcattttactgaagcaaattagtttacaataggtttaagggacaaatggtaaaaaacaagaagccttatgactacgggtcaagagggttcctttaaacagtaaacttttaaatgtcaacagacattttatttcacctttttcaaaaaaaccttgattttttccggggttagaacttttaattaacggggaaaaggaataaccccaatttaaaaattgtggggggggaattgagccctaatttttttt

SEQ ID NO: 58877 - DNA, 787 bp, Oryza sativa
  Clone ID: PAT_MRT4530_60552C.1
atgcagggcgacccagggtacgggtacggtggctacggctacggctacggctatggctacggcggcgccggctacgacatggccggctacggcggcggcggtggagggtactacacgagcgatccgtacaatgccgctcctgctgcttatgaagacccgctcgccgtcgctggtcggaggcagcacgacttcccggcgccgctcaccggtgtcgagttccagccgtcggacacctgccccaagaactacgtcatcttcgaccagacctacgaccggagccgggtcatgttccacccttcgctggccaacaacctgggcaactccggcggcggctacgaccaccaccaccactgcggctacggcggcttcgagcaggactacgccagcaagagcgcctactatggcgtcgaggacgacggcggcggcgggtgctcgatccggcagaaggaggacaccgacgagatcgacgcgctgatgagcacggaggacggcgaggaggaggacgacgtcctgagcacgggccgcacgcctgggtgccgggccgggggctcgccggactccacgtgctcgtccggcgcgtccaggtccgactgcggcggcgggcggaagcccgaggccggcggcggcgagaggaagaaggagcggatgaagaagatgatgcggactctcaaggggatcatccccggcggcgaaggatggacacccccgccgtcctcgacgaggccgtccgctacctcaagtcgctcaaggtggaggtcaagaagctcggcgtgcgtggctcaagcag

SEQ ID NO: 58878 - DNA, 351 bp, Oryza sativa
  Clone ID: PAT_MRT4530_60553C.1
atcagacatttcaacagagtttatgtgcataagacacaaagacatacaagcaatcaagcaagtaagcaaaataaagatggaaatatacacacaggtcatcacaaagttatatatatatactagataaatcaaacagtgcacattttggcacagcatcatgttatagcatcatgcaagatgatttcatgtgggcatatttaagaaatagaaattttgcaaaatacatacaagaatatgttcaatttcacattaaaatttgaaaatccattaattatattttgttggtattatttagcatttatttgttgtgtataattataattgaattgtccaattaaaaaaaaaaaaaaa

SEQ ID NO: 58879 - DNA, 1770 bp, Oryza sativa
  Clone ID: PAT_MRT4530_60554C.1
atggccaagagcgcgatgaagcagggcatctggcgccggaggatcggcgcgcccttcgccgccgtcctcgtcgccgctgtcctcgccgtagtcgtcttctccggccagttcgccaagggccccaacgacttggagagaacggtttcttcaaagctagaaggggaggacactgagcaaattagacttggtaagggcttaaacaagcttctggagatgaaaggagcgcaggaggatctgaataaattgagaaacaggctaagggatcaatacttgaatcattgcttggtcacatttattgagcgtgaggtttttttgaaagtcaaggactgtgatattataaaccgctttcaaaccatgaaggaacgtgcggaaccgtacatcaagtgtacggctcaatctgacataaagatctgtgacctctccaacccccggtttgacatctgtgagctgtgcggcgatgctcgcaccattggacagtcctccactgttgtgtatgtcccacagaaccgtgcttccaatggtgaagagtggattatccgagcacagtcccgaaagcaccttccctggatcaagaaggtgaccatcaaatctgtgaattcctcagaaccagaaccaatatgtacctccaagcatcacatcccagccattgtcttcgcactaggtgggctaacagcaaatgtctggcatgacttcagtgatgtccttgtcccactgttccttactgcccgtcaattcaacagagatgtccagcttatcatcaccaacaaccagccctggttcatcaagaagtattctgcaatctttagccgcctcacgcggcatgagattattgattttgattcagatggccagatcaggtgttacccacatgtcattgttggtctcaggagccaccgagaccttggcatcgacccaagttcttctccccagaactatacaatggtagacttccggttgtttgtccgggaagcctatggactgcctgcagctgaagtggacataccctataaggctgacaaagatgaccctgacaagaagccccggataatgctgattgacaggggcaaatccaggagatttgtcaacgtggcacatgttgtacaagggctggattggtttggttttgaggtggtcaaggccgatccaaagatcgattctaaccttgatgaatttgttcgccttgttgactcctgcgatgcaatcatgggcgtgcatggtgcgggcttgactaacatggtgttcctgcggtccgggggagtggtggtgcacattgtgccatacgggatcaaattcatggctgatgggttctatggtgcacctgcacgggacatgggtctgagacatgtcgagtacagcatcagtccagaagagagcacactgctggagaaatacggttggaaccatactgttatcaatgatcctgaaaccatcaggaagggcggatgggagaaggttgcggagttctacatgtccaaacaggacattgtgctcaatatgacaaggtttggacctagcctgttgaatgcaatagagttcattatgtaagtttgtgaaatgaggtttttgtgtttgttttagctacagcattctacagtcacgaaaaaaatacacttttttgttggccataggtggaataggtattgttgttttagtgctgcttctgtataggattgtcggtgttagatttgaataaccatgatcaactgttacaggaaagatgacaataaacctgtgtgctgagttttcttagagccaaaaaaaaaaaaaaaa

SEQ ID NO: 58880 - DNA, 213 bp, Oryza sativa
  Clone ID: PAT_MRT4530_60555C.1
ttattattgtgcgtctacctcctcgctccggggagcttccattgaggcggacacggccaaccatgccagacaagctgcggatcacgtccaggctgcaaagaactgtcagaatgatccgaaggggcaaaagtaccataacggtatggaccattagctctgccagtacaaccggaatagtgcggtacgggacatcgcgaacctttcatgaggcca

SEQ ID NO: 58881 - DNA, 1110 bp, Oryza sativa
  Clone ID: PAT_MRT4530_60556C.1
gcacgagggacttttgttagtactgtttgcctcctcgtcctcctcctcttccctcctccatggtgccgcacccgcacagcaccacaccacctgcctagcgccaagctccaacagaagccgctagcttgaggcaagtccaaggaaggggggaagaggcaggaggatgggatcccccaagatggccaagagcgcgatgaagcagggcatctggcgccggaggatcggcgcgcccttcgccgccgtcctcgtcgccgctgtcctcgccgtagtcgtcttctccggccagttcgccaagggccccaacgcttcctcgcaatttgctccggtacaagttgacaacaccctgcggcccacgcgcgataagccggtctccgcagatcaagacttggagagaacggtttcttcaaagctagaaggggaggacactgagcaaattagacttgaggatggacagtctcccaacaaagaggcagcaatcgaagagcagaaaccatcccaggcggctgctattgatcaggatgacaataccttaaatcctgggcttaaacaagcttctggagatgaaaggagcgcaggaggatctgactcattgagcaaggaatctcctccacaaagtcaggaaggagacggaggcacagcagagtcaggtgcggaaccgtacatcaagtgtacggctcaatctgacataaagatctgtgacctctccaacccccggtttgacatctgtgagctgtgcggcgatgctcgcaccattggacagtcctccactgttgtgtatgtcccacagaaccgtgcttccaatggtgaagagtggattatccgagcacagtcccgaaagcaccttccctggatcaagaaggtgaccatcaaatctgtgaattcctcagaaccagaaccaatatgtacctccaagcatcacatcccagccattgtcttcgcactaggtgggctaacagcaaatgtctggcatgacttcagtgatgtccttgtcccactgttccttactgcccgtcaattcaacagagatgtccagcttatcatcaccaacaaccagccctggttcatcaagaagtattctgcaatctttagccgcctcacgcggcatgagat

SEQ ID NO: 58882 - DNA, 297 bp, Oryza sativa
  Clone ID: PAT_MRT4530_60557C.1
gaagggcaagacgcggcacaaataccgcatttattgcatcagctgcagctgtgcgtggtgacgacgacgctacggggatgaaggtggtgtggtggttgctcttgtgtcgcgagagcttcgcgcctggggctggtaacctcttcgcccgtctcgacggcgctcccggcacctgaatgctcggccgcagtgccgttggcacatctccgggttaatcttatcttatgcgcataaagatgatgttgattcactcactcattcatcgggatcgggatcctgcgtggcgcgtgccctcgttcc

SEQ ID NO: 58883 - DNA, 399 bp, Oryza sativa
  unsure (1)..(399): unsure at all n locations
  Clone ID: PAT_MRT4530_60558C.1
cccacgcgtccgtcgaggtagccatggcgatgcaggccgccttcgccgcctcgatgttcccgcagctgccgccatgagctggtggtgggcgggcgccatagggangtgaagaagcggcaggaagagaacgcggcggccaccgagccgtccttccagagcgtcgccctcgtcgtcggctccacgggcatcgtcggcacctccctcctcgacatcctcccgctccaggacaccccgggcggcggcgctggcgcaccgggtgaggctggggcgggtggagacggagtggctgcacgtgctgagcgaagggtgggcgagcccgctgcgagggttcatgcgcgaaggccantttcttcaagaatttaattnaaacgcatccgggggaganggggccattgtcaa

SEQ ID NO: 58884 - DNA, 283 bp, Oryza sativa
  unsure (1)..(283): unsure at all n locations
  Clone ID: PAT_MRT4530_60559C.1
gatggntcggtgctcttggacaagacgccgtacagcagcagcacggagaaggnggcggcgaacaacatcggcctggacggcttcgacgtcatcgacgccatcaaatccaagctgggngccgccgtctcctgcgccgacatcgtggtgctcgccggccgcgacgcctccgncatcctcagcggcggcaggttcacctacgacgtcggcacgggccgcanggacggcgtcgtctcctccgccgccgnngccgacgccgtcctcccggagtccaccttcganttcg

SEQ ID NO: 58885 - DNA, 247 bp, Oryza sativa
  Clone ID: PAT_MRT4530_6055C.1
tacaactgttatgacacagagaagtgcaccgttagacgagccgaacagtgaataagggagaggataagggatatggatatatgggaacggtgactggatcaaggcctaacgcctacttgagtctaggggtatagagcaggcacggagccgttgtgtgacttacgcagcttcaaaggccaaactccaaatggtgcactttggttctagtgataaggaagaccagggtgccactcatctggttaatacg

SEQ ID NO: 58886 - DNA, 258 bp, Oryza sativa
  Clone ID: PAT_MRT4530_60560C.1
ttgttttttttaatggtttgtgttttttttttttttatcctatatatttttaatcattcttttttttttcacataaaaaacccttatttggggggattccacaccaaaactaccagcaagcgatgctgaccaccgcttttcttcccaagggagggtttctgcatgctgttttccttggaattccggcacacatatgttgcccattgtaccactcgctcataaattctttccacagacaacacgagatcagcctgattg

SEQ ID NO: 58887 - DNA, 381 bp, Oryza sativa
  Clone ID: PAT_MRT4530_60561C.1
atggagattggagggctccagagatcttcccaaacatttaggaggtctggttcatcaggtttggtctgggatgggaggcttatgtctgaagaccagaaccagagtgatcaaagggcaactggtgatgcagaggctggtagcttagaatccaaagagctaaggcactctcgtagcgttggatccagtataaaggtgcagcgaaggtgcagcgatagcgtggagcgcagcaggtctggcaaccaggcctttcgaactcggcatgttcctcctgctatggatccaccttcacccaaagtttcccgctgcttgttctgcggcatctttagcaaggaagagccctcacagcctcccaagcccagaagtttatattggcagccataa

SEQ ID NO: 58888 - DNA, 496 bp, Oryza sativa
  Clone ID: PAT_MRT4530_60562C.1
ctataaaaactccaccccccctctccatttcccccactccatctactctcgtgtatgtgcacttgatatttcagctatgagttcgtgtgtaccagactacttgatccagggaaatggtactgtttacacgattgattcctgttataaaaacgggggtccacaatttcggtgcatcgccaccctttttattctcattgttttgacgagttttttattcttatgttaggccgatctatcccaattattcgatctaagcgtgttccattggatggattatgtattgttaacatctacagccgattgagtggacccaatagtttccaagtttttatctgcttctgtcgatctgatgcgagttacatcggcatggcttcggacgatacgtcatcggcaacccagctgatcggctatcgatcaaaccatctggcacgctcagaacccaaaggcagattctttggacctgcactagagttaagcagatctcttaggccagtgc

SEQ ID NO: 58889 - DNA, 165 bp, Oryza sativa
  Clone ID: PAT_MRT4530_60563C.1
atgcagtggctgccgccattggagagcatcagaatacttcttcttctactacaaatagtggcagcaacagtagtaggagtacgtatggaaatggagaaggatatatgtaactggggattccgaggaggacgacgacggccgggcagtgggccggcggcggcctga

SEQ ID NO: 58890 - DNA, 207 bp, Oryza sativa
  unsure (1)..(207): unsure at all n locations
  Clone ID: PAT_MRT4530_60564C.1
ctttcgtctgagcagactctctctngtttgagccacggagttattgcttgggtgatttcttgaaagcgaagagtgaggggagaagaagaagaagaagaagaagaagaggggggaggaggaggagcagnatggttgagccccaggaggagcagccgcgggtggagaacctctccgagccgctgctcggcctctcctcctcgtcttcct

SEQ ID NO: 58891 - DNA, 612 bp, Oryza sativa
  Clone ID: PAT_MRT4530_60565C.1
atggtggacactaagccatccgagactcgttcggttacagtcatccagaggtataaactaaaggtggttcccaatagtgattcggaatcaagcacatctaaagatggtaaggccaaaggtgataaagctaaggatgatgaacctggagatgacaagtcagaaggagaagactctcaagagatcaagaatttgcaagatcagattgactatgctgttcatcatgctttgatcaaccaatcaggggtgcttgtcaataccttgactaatatgatcaagtctgtggttgatggtacaattgctgagcatcaagctaaaggaccaacttttctccctaatggtgtgtttccacaatatagggatctggtaactgggaaacaacagcctgtctctggtatcaatccagaacagccgatagcatcaacatcggcttttgcaagtcaacagccgatggcatcaacatcagcttttgcaagctcaggacagccaggattcaaaccccgtgtactgatcagaccacaacctcaacacatggggcagaatatacctctagtaaccccagaacagattgctgctatgtttaaagggaaacaattggttgttgatccagtttag

SEQ ID NO: 58892 - DNA, 2164 bp, Oryza sativa
  Clone ID: PAT_MRT4530_60566C.1
atggcgctcgcctcctcctcccgcctcctccaccgcttctcctcctcctctctgccgcgaccctgccggcgacgggtacccaggccacgcggccacagccgcttcgccgtgcggtgggagcaccgggcggcggcggtggtgctgctgctgccgagagctctcctcggaggaggattccaggatgccgatgcggctgagagtgacgacgaggaggaggaggatgcccatggcgtcctgcgcccgctcgacgctgacgacgtcaacctcgacctccacgcgcctccctccggccccgagcgctgggacgtcctcggcctcggccaggccatggttgatttctcagggatggtggacgacgagttccttcacagattgggcatacaaaagggtacccgagggcattctgccagctaagctcaacagatagccccatgtcagcggcaagatacttaagccattctgttcctctagtatccgtgacagatggtgtgcacggttcatacattggagtgaaaggggaagcgatatacatccctccaccaccatgtgtacctatagatacatgtggggctggtgatgcatacgcttcagggattctatatggcattcttcggggctcttcggatttgaagagcattggcctgctcgcttcgcgagtagctgctattgtcgttgcgcagcaaggtacacgcttacgggttcaggacgccgacagattggccgaatcattcacacttcacctagataacctggagttttgttcagatattgaaacagaccatgtttcaaacttctgatcgttttagctgaaagtcgtaggacttccatttgtatatagcatctgtttacttttaggcctagctagctcattgttcagtacagctgagctacccagcttgtcagtcctttcagacgtttgttacaatttcattccttaaatttggttccagaaaaggatgctacatacttcatagacttcatattaaactgaagatattactcctagataagggagtggcaatagttcatgtctgttcctctggtatccttgacacttgggattcaatacagaattcttagagacaattagaatttgaagagcattggcctgctcgcttcgcgagtagctgctattgtcgttgcgcagcaagatagcggcggctgcctcgccttctccgacgagctccaccgccgagtcgccgccccttgccaggacaggatggtggtggccacggaggaaatggcggtctactgcttcgacgccctcgtctcccactacagcggcgaccagccgccgccgcccgccttcgaggagggcatccacccattgtttgtcacctggaagaaggctaccaatggttcagaaccacgccttcgaggatgcattggaaccttggaggctcgtcagattgtcactggcttcaaggagtatgcgctcacaagtgcattgagggaccgccgctttcctcctatacagtcgaaagaactgccgtatttggagtgtacagtatctatactgaccgaatatgaaactgcacttaaccaccttgactgggaggtgggtaagcatgggttaattattgaattcactgatccagactataacatgaggcgcagtgcaacttatttacctgaggttgctgcccatgaaggatggacacatctagagaccattgactcactgatgaggaaggcaggttacaatggtaccataaccgactctttgaggaagaaactccgtgtcacccgctaccagagtaccttgtacactatgcactatggtgaatacgctgcctacgtcaagaagaacagaggagctgcaccagaaattaacggggcacctataattaatggcttcaaaccaggccattgaatcatctgtattgcatcatctaaaatgactttataatttatctgggagcacctggggtgagaatttgtttggaaaactccaccccttgccgctcattgatatgccatcattttcattcgaaagaaaggggaagctatgacagcatatcccctaaattatgccgcctggacaaacagtggtgaattagttatgtatcttgcaaaaattatgggcttccggtgcccaaaaaatgatggcatgaattgattcaagctgctttgttacccaaaaaaatcacatgtctttttcagc

SEQ ID NO: 58893 - DNA, 811 bp, Oryza sativa
  Clone ID: PAT_MRT4530_60567C.1
cccacgcgtccgcccacgcgtccgcccacgaatataagatcactcttatccatacggccgggaagacaatccagttcctctgctctcgaggtctcgcctgagtcctcatcctgccaagtgctagctatggttgaagtggacgatggatccaaacggcagatcggcgtggattagcagggcggggctgggcatcctcaccgtcaactccggcctcgccatctaccgctccaggggggacgcagccgcggtcgccttcgtcctcggctcgtacaccgccctgctcctcctcttctcctgcctctccgccttcgagcgcgcgccgcccgggtcccccgcgaggggccgcctcaagcgcgcggtgtgggcgctctcgacgctcgtcaccgccatgttcgcgtggaaggtcgcggcgctcatgccgccgcccgtggcggccgtcgtttgggccctcgccgtggcaacctcgctcggaggattcttggccttcttcatctacacctgaagtggtgaagccgatcgatcgctgtttctcggtcgcctgtgatgtatggatgtacatatagctagtaattagctatttagctattactagtttgtacatgcttcaagtgaactatactctgcctctgtacatatatatatagtactttagtaacataccggatgtacatgttttgtacgtatcagcgtatgaatatttctttctttttcagttttcactctttgttccagcgtcttgttacagttccaattgatctaaacgaggaacaagttcactttaggtacaaaaaaaaaaaaaaaatttgcggcc

SEQ ID NO: 58894 - DNA, 568 bp, Oryza sativa
  Clone ID: PAT_MRT4530_60568C.1
cccacgcgtccgtggtggcggctctgccgcgacgacgccggtgggccgccgacgtcgctgggggagttcctcgacatggagaggcagctcgccggcgcggacttcctctgcgacggcgtcggcggcggcggctcggagcgggaggctgcggctgcggctgcaggggcggcggccgtgtcggcaccgcgctgttcgaggacgggagggtgcgcccaccgcagccgcagcaacccgccgccgaagagcgtgggcggtggcgtctgcagagagcgacggagggctcctcctcctcctcctccgccggcgccgcgcctcctcgtcattggcgaggctgccgggtgttgctcaccggcatctgcagcggcggcgccgggtagcgccggtcgggggtcattcttgtaattaagcaagctgtcgaggggtgattatgtgaaagtggagtgaacgtttctttcttttttctcttcctcccatggattcttttgctcttgtcctcttctgttcctttcttgttttttaaaggaatgataataattttccttttgacctttaaaaaaaaaaaaaaaaa

SEQ ID NO: 58895 - DNA, 442 bp, Oryza sativa
  Clone ID: PAT_MRT4530_60569C.1
tcgtccacgcgtccgaaacacaccccgaggataagcggcacacgcgtgcggagaggaggaagatgaccgggtctccgagagagagatagagctcctcgcgagtcggcgatgtcctgcacggtcgccatgctgagctaggcggtgttctcgccgtcgaaccgcccgctctcctgcaaggtcgagaccgcgtacgcctggccggagaccgtattcggctccacgtgctgaccggagcaggccgctcccctcgtcgtatggccggtccgacccttcgcgctgcgcgcccacctgcgcgaggaggtcacgccagagagccatgcgtggtccgtcgcggatgcggaggtctccgtccctgcggtgtccttgcttaagaggcggctcccgtgcgatctcgtggttccacactgcggtaccacggccgttgccgccggcgacgctgcgg

SEQ ID NO: 58896 - DNA, 585 bp, Oryza sativa
  Clone ID: PAT_MRT4530_6056C.1
ggcaaaaaatagcgaaacaaactttgggggggttatgttttactaaagcagggtttaccaatcgatctattgaccctgtgcttaaaaacacaccaaaaccttcgacgggctggtgaccaaaaaatttcctcataaagagatgggaaggaaggcccctttttttttttaaaagctcaggtgggtggtaccctacccatcaacaataacaaatttgaaacattggggaaattattttgcccggtgaaaatactacccttgaacaaagcaacaagttctacaacgggggggggaaaacacccgaacaatttaaaccagttttagcaatcagatttgcagatcacaggactggcaaaacttttcgcatataggaaaccccagttttagtctattttaggaaaagtagcaacatttggggccaaaaaaagccggcgactaactatgacaggggttacccaatctcgggcatgggggaataaaacacaaagtccttcccacaaagcctcctggaaacaaagctgaaaggggcgagcttgtacccgggggtggtgcccccctttgggcccaggaaaaacttcatgatttttc

SEQ ID NO: 58897 - DNA, 549 bp, Oryza sativa
  Clone ID: PAT_MRT4530_60570C.1
atggccatggagatggagatggattcagaggctcacagcaggatgctgtgggagtccagcagcagcaacggcaggaggtacatcagctacgacgccctgaggagcgacgtggtgccgtgctcgaggcagggtgtcccttactataactgcaggatcatgaccaccgccaacccttacacccggggatgcgagaccatcaccaggggagcgcggcgcctcgcaggggacgcggctccctccgcgccttgcctactttttcgtggggggtctgagccaggcactgcattgaagcgtggggagctcgtggacatggcgccctaccccgatatttccccttgtaccctcgccctcatccacagccggcggccggcgacctcctcgtcctcatctgccgccgctgtcgccaccggtggctcgccgttgaccacctcgatgggagagagggagagggatagggagaggcaaatgacggcaatccgcgcgtggctccccgtcggtgacaggcagaggaagaggggtggcggcgcggcacacagcctccagcgatga

SEQ ID NO: 58898 - DNA, 387 bp, Oryza sativa
  Clone ID: PAT_MRT4530_60571C.1
atgcccgccgtcatcgttgccgctctgcccaaggcgcagatccagccggcacgcgcggggctggcggcgccgctcccagtcgcctcctcctcctcctcctcatcatcagtggcggccaccgcgccgcccgccgccggatccactcgggggagggcgggggagggccctgccggcatactactcaagcccgccgctggagctgcgcggggcagggcgagggagccgcggccttcgccattgcccgccgtcgactgcgctgcccaccgcccgttgaccaagccactcgctgccgccgaccgccgtccacgctcgccgcccgccgccgttggccgcaccgcccacactggattgcgagaggagacgagtgagagtgagggagagttatga

SEQ ID NO: 58899 - DNA, 398 bp, Oryza sativa
  Clone ID: PAT_MRT4530_60572C.1
ggaagccgagaaacaattttttacagatccccccccacagagacccagaattacgaggaactaccatcccctaagttcattggaaaaaaactaccggccattggattggctaaccaaaaaagatttttggggttccatccatggatccatcctaaccggggaagaaatcgagggtaaccgtccggggcattcggggggttggacggggaagcggtcggggtcaacccaatagtcgaaaacgagggggggcgcgcccccccacacgagctggggggtttttggtgcacggagagctcctccatggccttttccttccacaagaacctcccctctttgccccacgagctccccgggcaccgcgccacctggcgggggtccgagtccggggggttcgccgc

SEQ ID NO: 58900 - DNA, 1040 bp, Oryza sativa
  Clone ID: PAT_MRT4530_60573C.1
aaaaaaaattagtcacacataaagtactattcatgttttatcatccaataacaataaaaatattaatcataaaaaaatttcaaataagacgaatgatcaaaagttgaacatgaacagtgcaaaactgcacttattttgggactgagggagtagtgctgtggcttgtcagttccacaaagcatactactcgtccataaaaaaaattttggtcatatgtacgttttgcagcttgcaggcttccattccaaaacctcactgtctgcctatatctgcatgtttgggtgtatgtgattgcttctttgcaggacagagacaatatgatcttcctcgtgttctatgtgtctgtggagttactaggagagttctgctcctcttgctcttgtgctcaggttggtttcagtagtccacctcctaccatgcacaagctttcatgcattcattccgtactactcactcttctgcaatcatggctttatcttctttcttgatctcttcccagtgatctaacatttccttgatggatgcttatatttcaggtttatgtggtctacatgggcaaaggattgcaaggcagcactgagaatcggcatgacaggctgaggcttcatcaccagatgctgacagctgttcatgacggaaggtttggaatgagttcatcatcagctgttgatatctatcaatctagcttccatacttgttctgtagcttgactaattggatgcttggtctcagccatggagaaggcagaggcatcgcatgtctacacttacagcaacggtttccaaggatttgcagcaaagctgaacaaacaacaagccatgaaattagccagtaatttccttgtatatgcatggcttctgatgtctttagcatcctgacacgtgatcctggtgtgatgatgactgaaagctaactctgctgcacacttctgcagatatgcctggtgtcatctcagtgttcccaaacacaaagaggagcctccacaccactcattcatgggatttcatgggcttgtccgtcgatgcagcggctgagctacc

SEQ ID NO: 58901 - DNA, 1016 bp, Oryza sativa
  Clone ID: PAT_MRT4530_60574C.1
gcacgccggcattcttcgcctcaacatggtggccactgctcgaatgcacgcttggcagctgctactcgtggcggtggtcatctcttgcttccactgccatctcgccgctcaccatggcgggaagaatgtccggcaaccaccgtcatccgtcgtcgtcgtcgtcggctccgtccactccggctcagacgccaccaaggccgcggtatcaggtgccccggtcgccgtccggtgccacgacggcaacggtcgggatgtcttccggcagcaggccctcaccgactgtcgcggcgagttccgcgtccacctgccgccggaggccaagagccggctggcctccgtgacgtcgtgctcggtgaagctgctcgccagcaatgcggcgcgcccatgcgacgacgccgccgccacgtccgccgctacagccagaggcttccgcctcgccgccacgaagcacaacggcggcgacggcgcccgagtcttcaacgccggagcgttcgccgtccacccggagctctgcgacgacaaagggatcttcttcccgccgctccctctcgtgccggagccgccgaacatcggcggcgtgccaattccgccgaatccaatcacgccggcgccgccgtctctcgtcccgccggtgttccccaccccatctccaccatcaatcctgccgccgctcaccccacaaccgccgccatcgtcgttaataccgccggtgctgccgctgccgttgctcaacccaccaccgcctccaccgcccccgccatctcttctaccgccagtgcccctcctcccgccgttgatccccggcgtgccaccggcttcggcttccaggagtggccggccagtgagtacgccctgagcaacttaacacgctgattattctagctatgtgctaattaagatgtacggcaagcatgtaatcctaagatcaagaatctactgcagtatactgcaatcaatgtatacttttggaatttaccgacatgtcgagtaaaacgaatgtcaaatatattgacgtt

SEQ ID NO: 58902 - DNA, 192 bp, Oryza sativa
  Clone ID: PAT_MRT4530_60575C.1
atgggttatggatggtctagcaaaattgaaagaggggaccaacgggacttgacttatcaattggattttgatgctgcggcctacggtggcacggcaagggcactagggcgggccgcactgccgcaggcgtccagggctgatccaggtgataggggcagccgacgtcgccgcgtcgggcacaatcaggggtag

SEQ ID NO: 58903 - DNA, 1554 bp, Oryza sativa
  Clone ID: PAT_MRT4530_60576C.1
atggacacatggcacaaggcggtgaaagatgctctttggatacttcatcttgctacttgtcctaaggagagcaaagatgctcctaggatcaagaagaagatcaagagaatagtcttcatagtcctcgagtcttcaagagattccgggtatggttttaatagcttttctctcttcttttgtgggccgctggtggtgacagctcagtatgggtattcctccgcgctggaatgtaatcctaagttaattccctggggagggtattcctccgtatttagccccagttgtatggtcatgactggctgtcgtaaggaactcggcagtcaggggtggcttctcaaaacaccaggaggacactgggcttgcccattctgtggtaagcctaaggaggattcaagtgctcaattgcaggaattcctggaaagctgtagcacgtataccgtcagaagagtcagactccacctgttgccgttctctctcctcgggagagcagaacagtggttctacatcaaccgtgcaacggtgaatacccggaataagcgctcaacggcattcctctcaagattcttcccgatgggcaagaccaacgctcctcgtcgaagaatacccagtttgcagctgatgagggatgaaaccattcttaaagcttgggaaaggctgcaggaatacgtcaccacccgtcctcatcatgagatggccgagtggctcatcctgcagagtttcttcaacggattaaccccctcgtcctgggatcacctggatgctgctgctggagggacattcttctcaagaacagttatatgccaaccgattgagaagatgctctcaaataaggggtggagcaaggaacgactccaaacccgtcaatgcgacatgtacaccgtcaagtggacggaaatgctagccgctcagttggatctccttatgaggagactggacaacaatgagaaggacgccgagcagggtaccgttaaggccatggactctcacaagacatgtgaggtcgatggcaatactggtcactctggcacggattgtcggaaaacctgtgagaacgtcaagctcatgaacaacaacgggaatcgtccacaaggggaccaaggatggagcattgctccatggggaaggtgtggcgggttaaggagaacacacccgttcctgtacctccggaactgggtgcctcatccagcaaaattcgttggaggtatggtcgtgctcatcggacctgaaacgacgtcgcccttgccaacaggatgggataaatttgcatgtgtagaagagccgggttcccgtttgcttaccatgcagtttttatgtgccttgctagagtctcctctcgaggggatctgggagaactcatccggaggatggatacacttagaactgcaggcagggaatgagcaacacaccttggaggatcatgtggtacagtcacgggaacggcagcagtctgttggtgcacagctcgcaaacttcaacaccatgatgcaacaacagcaagctgactggcaagcgtttcactgctaccagggatttgatccccaccttgagccatag

SEQ ID NO: 58904 - DNA, 543 bp, Oryza sativa
  Clone ID: PAT_MRT4530_60577C.1
atgtcctggcacagggccggtgtcctgctgctaggggctcagtcctgcctacctatcccggagattccggccgtaggtggggttgggtcggtactcttgtctatgtctaggattggttggaaactatgtcatgtcttccttccatatgccgtggtggctagccggagtcggcgtgaccagggttctggttcggccgaaccagggctagcccagcaggcctccagatttggcagggtcactgacagggatacgattgatttggcggtggccgcagcagcgccagccagggtggatcaggcggcggggagaaggtggtggaggcgcagtgaagggcggcggcaagaggctcctcggctcctccttcaccactaccgggcgggagcagccgggtgggggatggagcggcgggcgggagtaggagccgcaagtagctcagcagcggtggatacggcggtagggagcacagaggcagtagatctgtcaacggggagggcggcggcaattgggagggacgccggcggtggggacctcagtggcagctga

SEQ ID NO: 58905 - DNA, 381 bp, Oryza sativa
  Clone ID: PAT_MRT4530_60578C.1
atgtcctggcacagggccggtgtcctgctgctaggggctcagtcctgcctacctatcccggagattccggccgctagccggagtcggcgtgaccagggttctggttcggccgaaccagggctagcccagcaggcctccagatttggcagggtcactgacagtcgaaattggttcgtaacgaccgtcaaacctaccgtatatttgcaagggatacgattgatttggcggtggccgcagcagcgccagccagggtggatcaggcggcggggagaaggtggtggaggcgcagtgaagggcggcggcaagaggctcctcggctcctccttcaccactaccgggcgggagcagccgggtgggggatggagcggcgggcgggagtag

SEQ ID NO: 58906 - DNA, 237 bp, Oryza sativa
  Clone ID: PAT_MRT4530_60579C.1
atggctccccgtgtccagatctcgctctgccacgtcctcctcgctccgctcgccacggccaccgtgtcccgccttcacgcgtccaggccccgaccggccattaatggtgctggcttctacgtgaaggaagcaactcccacgcctcacgaggccgagccagccagacactgcatcaccgattcaccggagtggtggtacaagcaggccggcacatcctgcggcaggatactgatatag

SEQ ID NO: 58907 - DNA, 921 bp, Oryza sativa
  Clone ID: PAT_MRT4530_6057C.1
atgggttcgaggcgtgcttccaggcgtctgcaggcggcggcggcagcggcagcttcccggcgatggtgctggacttcgacggcggcgccgaccgacatggccttgccgacggcgaactacatcctggaggtgggcgcgcgacgcgacggcgtgtcgtgctggggcgtgcagaggtcgccggcggcgggaactgccttcgtctcaagcgctgccggccaccgctcgccggccaccgccatcaaccgccacggtgtcgtcgtcctcctccatgtatcagctgaaagagggcattcgatcagatataaataccttgttcttgaaatcggccttctccgcctcagagccgtacatatagccggcgagtcccatgaactccggcgaaagactcctcgatgcgtcggcccagaagccgctcgcaaactccagccgcgggccaccggagttggaccggttcttgaggacgtgcttcacgaagcgggacgccacgctggccgcgtcgccgccgccgccgccgccagctgcctccgcgtggcgccccgcgcgcccgcggcggcgagcgccagggagacgtggacggcgggggcggacacggcagcgttcgcggtccccgcgagtggaaggcagaaggcgcgccgcgccgcggccagcgcctcccccaacggccgcggaggtggcatcgcctcctccgctgcgcgggggccgaggagagccgccagtgggcggggaagcgtggacggcggagggctcgccggagcccagcaaacaaacttgagccgcatgaacgtgttcctggtgattgcagttgcaacggttgaaggaataagtctgcgtttgttggccgatgcgaatgaagcggtgatcgagtcagaagaagaccgcgtcggtagcgttcgtgtgcgtgagtttagcgcggttgcgtga

SEQ ID NO: 58908 - DNA, 546 bp, Oryza sativa
  unsure (1)..(546): unsure at all n locations
  Clone ID: PAT_MRT4530_60580C.1
ccgatggaaaatcacatgaattgttcagtgtgtacagcgaatgtaattaaatgtgcgagatagactcaattttctatggggaaaatcagcatggggtgcctcgacactgaatgaacatgcagctacatctataattttttttagaattcttcatgtacataggttgaatatgaaataatacttcagagctactgttaccatgtgcctgcttcatcacttccaaatctttcgatcagctgacacatgagctgtagaacaaacaatgaaatatatcgccatgaaagtatagaccttgaaacttcacttgtctcaccatattgcgtgcaaataatgtgaattaagttgaccatactgagtggtagtaaacaaaggtccaatactggttattggaacaaacagtgtctcaaagttctttcaactctaacatcttgtgggattggcacctgacctctggggattgtcttgattaattgcaacttaaccgngatggaagatgcagggacagagcgctggtgctggaagcgatgcacctctggtttcttcccg

SEQ ID NO: 58909 - DNA, 550 bp, Oryza sativa
  Clone ID: PAT_MRT4530_60581C.1
aaaaagggacaactcaaacatttttgttcaaacgggcgggcttaggaaacagcgccccaaaacccttccaaagcccacaaattagggatttgtcccacccagaaggggttaaaggaagcccacaaaccccataggggaaaaaaaccccccccttttaacaaaacaggttttacaaatctaacaaaaatgaggagcctttgacgggacaagggcccaaaacacctggaaaatcaaatctgaagggaaacccctaagccgggggccttaaaccaacccaggcggggggagagggggttttaaaaaaaagccttttccttttccttggcaattggtatggcgggagcgggggcctggggcaacccaacggaaaccccaaggccctattcgccgggaacttgctgaaagaggggggtaccccccgcccccgccctggaaagcgagggggacccccccatggccccccccaagaactcggccgggccccccatgttaacaaactggcccctcaaaattgcccaaggccccggacattttttgcaggttccccggg

SEQ ID NO: 58910 - DNA, 2935 bp, Oryza sativa
  Clone ID: PAT_MRT4530_60582C.1
ccttcctccaactcccaaccagtcaaccacagaagcgagagaaagagaaccgaaatcacgagaaccgccgccgcgtgacgcgatggagccctcggcggccgtcgcgtcgaggccaccgagcttcaccgcgcagacgaatgccctcctccgcaagaatctcatcttccagaaacgaaacaggaaaggaaccattcggctaatcatagttccgatatacctctgcctcttgctcaccattcttcagagagtcatcaacagcgttcttgacaagcccaagttcagatgtggttgcaagtgtgttgatgtcaacggcacaggctcttgccaaaatgtgtgtggaattcagtactctacactggatcaggctggcagttgccccataccgaaccccccggaatggcctgctctcttgcagttaccgcgccctgagtatcgcgccatgcaggaatcctccttgtatgcaggtttcccagatgtatcatgcagaaaatcacaatcttgcgcagctactatacccttcacaggagcaaatgagaccctatctaacattgtcatgcaaaatttgttcacaagctcaccgctttcaaatctttctgataatgcgagcatatccagtcttctccttgggacagatgtaccgggtacttatacaggcttcattgaacccgcttttgtctcagatcgacccatatatgttcttagacctcaatgcaaagccagtgattcagttacagtccccattacgtttggtgatattaatattcggaaagcagagatgttatgtattcaaggtttacccttgtggaggaatagttcagcaataataaatgaggaaaccttcaacggctacaggaaagggaaaagtcaggaagggataaatgagattccaatggcctatgatttccaagactcaaacgagaagcatttcagcgtgttagctttatataactcaacttatcagaatgtgtcttatgttccaatgccatttggacttctgcatatctcgcgctccttgaacgcggtctcaaatgcatatctccagtttcttcgaggatcaggtgtaaaaatgttgcttgcattcacaaaagaaatgcctaagcaagagactcgtttgagatttgatttttcttctgttatcggccctctcttttttgaatgggttgttgccttgcttttcccggttatgttgacataccttgtatatgagaagcaacataagctccgaacaatgatgaaaatgcatggacttggggatggcccttactggattatctactatgcatatttccttattttgtccatggtgtatttggttctatttgtcgtttttggatccgttataggtctaaactttttcaagataaatgactacagtatccaatttgttttcttttttagtttcatgaacctgcagattgtactagccttcctaactgcaaccttcttttctaaagtcaacactgctcaagcaattgcatacctgtacatatttggatcggggttgattgcaggatctcttattcgcaattttattgaaggtggcaagttcccaaagcactggattacagttctcgagataatacctgcattttctttgtatcgaggactatatgagcttggccaatatgctattagggcttctgaagctggaagtcatggcatgagatggagtgatctaaatgaccatgcaaatggaatgagagatgcgctgattattattattctagaatggttggttttgcttcctgttgcgtactatttggaccattctgcttcagttggacacaaatctagtttcctttccctaataaaaaatctgctgaagaagaacccaacttggagaagggtatctattaacgaagtagttaacgacgctgttcatgtagaaatggtgaagcaagatattattaaagaaagggaaactgttgatcaagtactacaacaacagagtagcggctatgcagttgtctgtgatgatctcaagaaagtatatcatggaaaggatggtaatcctgataagtttgctgttcggggtctatcacttgctttgccttatggagagtgcctgggcattcttggtcctaatggagctggcaagagctctttcattagcatgatgattgggcttacaaggccaacatccggaaatgcattcgtacgggagttcagcatacagactgacatggaaaagatatataacagcatgggggtttgtccacagaatgatatgctctgggaaatgctgaccggcagagaacatctccagttttatgggcggctgaagagcctcaatggctctgatttggacactgctgttaacgaatctttaagaagtgtaaatttacttcatggtggtgctcctgataagcaagtcaggaagtacagtggtggcatgaagaggcgtctcagtgtagccatctcgctgattggagatgctaaagttgtctacatggatgagcccagtacaggattagacccggcttcgaggaagagtctatgggacgctgtgaagcaagcgaagcgagacagagcgatcgttcttactacccattccatggaagaagctgaagttctctgtgacaggttgtgcatcatggtagatggcagcctccagtgcattgggacacccaaagagctcatagcgcgatacggagggtactacgtgctgacaatgacaacatccccggagtttgagcaagaggtcgagaatctggcgcgaaagctctcaccgaacgcgaggaaagtataccatctgtctgggacacagaagtacgagctgccgaagcagcaggtgaggatcgcggatgtgttcatggccgtggagaatttcaagaggaggacggaggtccaggcgtgggggctcgcggacaccaccatggaagacgtgttcgtcaaggtcgccaaaggggcgcagtcgagcgaagaactctcatga

SEQ ID NO: 58911 - DNA, 296 bp, Oryza sativa
  unsure (1)..(296): unsure at all n locations
  Clone ID: PAT_MRT4530_60583C.1
ccaggaaaaaacttgaggaaaatgacatgaaggaaaaatctacccgagtccattaaacaccatacaatcttggatcatcctctgcaaaaaaaaaaggggggggggggggggngggcaaaaagttcacatataaacaaacccaaaaaaaaaacttttntaaccccatggaaccacctttaaaccccaccaacttcaacaccccgcattaaataaattctgcttctttacttaaaaataaacttgaactaacttgacccacaaaaccaacggaatcccttagaaacccttaaaaatcc

SEQ ID NO: 58912 - DNA, 315 bp, Oryza sativa
  Clone ID: PAT_MRT4530_60584C.1
atgggcggcggtggaggacggcggtcggtggcgcaagccgtgggcggcggcgctcagagccacagcggcggcggcggcttgcctgtgtgcgcacgcccgcaggagaggaggacagcggctgtctgcttgggctgggccgattgggctgaaggaaggaaagagaagttttcggcccaaagatctatttctgaattcctaatacaatttgaatttggaggaaattggcaaatgagagattttccaatttatttgggtgcaatattttttgaggtgcaatttgagggaatttatttggaagcactcaataaggaatag

SEQ ID NO: 58913 - DNA, 1200 bp, Oryza sativa
  Clone ID: PAT_MRT4530_60585C.1
atggcacgcttgccttctcatcgtctcgcggctctcctcctcctcctcctcgtcgtggtctcgccgtgtcacgcggcggcggcggcggcggcggacggtgggcagaggccgactaggccgaaagccgtggcgatgccggtggtcagggacggcgcgacgaggcagtacgtggcgacgttccagcagcgaacgccgcgggtggcggtgaaggccgtggtggacctctcgggcggcgccacgctctgggtggactgcgacgccgccgccgggtacgcgtcgtcctcgtacgccggcgtgccatgcgggtccaagccctgccgcctcgtggagagcccctcctgcagctacatcgccagctgcctgggctcgccgccgtctccggcgtgcctcaaccgcacctgcaccgggcacgccgagaacacggtcacgagctccgtcggcagaggcaacgtcgtcaccgacgtgctgtcgctgcccaccaccttcccctcggccccgctggctggcaccttccgcttctcccgcaagttcgcgctctgcctcccttcggtcgacgccggcgtcgtcgtcttcggcgacgcgcgctacgtgttcgacggcatggaccactccaactcgctgctctacacgccgctcatcaccaggacgacggacaggtcgagcgaatacttcatcagcctgaagcgcgtcgtggtggacgaccgcgccgtgccgctgaacgcgacgctgctcgacgtcggcaccaagctgagcacggtctcgccctacaccgtgctggagacctccatccacgaggcggtcacgcgcgcgttcgcggcgtcgatggccacggcggggatcccgcgcgtcccggccgtggcgccgttcgagctgtgctacgacgggagcaaggtggagagcagcgccatcacaggggagccggccgtgccggtggtgttcgagctgcacgtgcagagcgaggtgaggtcgaaggtggcgccgtggatggtgtcgggggcgaacctgatggcgcgcgccgacggcggggcgctctgcctcgccgtggtggacggcggagcggcgccggaggcgccggtggtgatcggcggccacatgatggaggagatcctgctggtgttcgacctggagaagtcgcggttgggcttcagcccaaaccttggggccttcggcttgtcctgcagcaagtttcgcctcgggtag

SEQ ID NO: 58914 - DNA, 1769 bp, Oryza sativa
  Clone ID: PAT_MRT4530_60586C.1
ctgaacttccctaatggtggtttccgagtcgcctccctgtatcgaattggaggtggattgtgtcgatgtttgatgtcgcgattccggtatttgcatagtatagggatcgttggtactaggatatatgcgagacagtacaatatttagggtagcctatctaactgttgtcgacttggcggtctgaagtgctgactcatagtcgacaacagggtagcctttctcctcgaatccacatccggcaagataaaagacaacgctatgtctctcctgacaatatctgtagacaccgtaggggactagccctacttatctctgaagtcgatatctggcatcttgtcttggcgcatgttggcttgtatgttgatcttgtgccttgatctgttgttccgtgtcccctctcctcccaggaggcctccggcgactgcgcgcagaggcttccgccggcgaccgtccacgcaactggggcagtgctgccgccctagcaccatctccccgctgccaccgccctcgcggctccacgccgacgccgcagccgccgacctagatcttacgcagtcgccgccgcgctcgccgaggcgaaacttgctgcaggacaagccgaaggccccaaggtttgggctgaagcccaaccgcgacttctccaggtcgaacaccagcaggatctcctccatcatgtggccgccgatcaccaccggcgcctccggcgccgctccgccgtccaccacggcgaggcagagcgccccgccgtcggcgcgcgccatcaggttcgcccccgacaccatccacggcgccaccttcgacctcacctcgctctgcacgtgcagctcgaacaccaccggcacggccggctcccctgtgatggcgctgctctccaccttgctcccgtcgtagcacagctcgaacggcgccacggccgggacgcgcgggatccccgccgtggccatcgacgccgcgaacgcgcgcgtgaccgcctcgtggatggaggtctccagcacggtgtagggcgagaccgtgctcagcttggtgccgacgtcgagcagcgtcgcgttcagcggcacggcgcggtcgtccaccacgacgcgcttcaggctgatgaagtattcgctcgacctgtccgtcgtcctggtgatgagcggcgtgtagagcagcgagttggagtggtccatgccgtcgaacacgtagcgcgcgtcgccgaagacgacgacgccggcgtcgaccgaagggaggcagagcgcgaacttgcgggagaagcggaaggtgccagccagctgcgcggggagcgcgaggcgggcgcggctgagggacgccatgccagcggcgccggcggcgaggccttgggtcagggacgtgggcccgcaggtgaacaggaacgccggcgcggtggcgagcggcccttgccggaccggggccgaggggaaggtggtgggcagcgacagcacgtcggtgacgacgttgcctctgccgacggagctcgtgaccgtgttctcggcgtgcccggtgcaggtgcggttgaggcacgccggagacggcggcgagcccaggcagctggcgatgtagctgcaggaggggctctccacgaggcggcagggcttggacccgcatggcacgccggcgtacgaggacgacgcgtacccggcggcggcgtcgcagtccacccagagcgtggcgccgcccgagaggtccaccacggccttcaccgccacccgcggcgttcgctgctggaacgtcgccacgtactgcctcgtcgcgccgtccctgaccaccggcat

SEQ ID NO: 58915 - DNA, 380 bp, Oryza sativa
  unsure (1)..(380): unsure at all n locations
  Clone ID: PAT_MRT4530_60587C.1
ttccggccccgccaatacccggnntcgacccacgcaaaccggctgcatactgaancaactaatacacgatggatcgccccaacctcnccgaggccgtggaggggctactggcggcggaggcggcaacgctgccggcgccgncatggcagatcttcaacctattcctccccgccgaccccagccaccgctcctccggcggaggcctcgccaagaggatgccgaagaaccacgaggagtacaaccaaacacaacccctgaacaccatcaatgccaccgaccacatctccgccaacaccatccacccgaacctctaaaccacccaaaaagaccaaagcgacacaaaaagaacaaacaccccaaaaacacaccacccccacacc

SEQ ID NO: 58916 - DNA, 336 bp, Oryza sativa
  Clone ID: PAT_MRT4530_60588C.1
cacattcattttttttggccgggagagagagcatctagctagggagagaaaggaagagacgagaggagagcagtaatatcgccacttattcataaaatgctagcccacttatgaagcctatatgggctgtataattattattttctttttgccctcgaggattttatcaacgttgataatcagccatgtaaaaagattgtttgggatatgatttttttgttagtataaaatgttattcggtagttggtctgttattaattggctaatgccttgcttctttgtttttttcctttattccttattgtgtgggttggtgatttcctttaattttttctt

SEQ ID NO: 58917 - DNA, 1965 bp, Oryza sativa
  Clone ID: PAT_MRT4530_60589C.1
tcaagctttccgaagcacctcaactgccgcaggaggaatcctgaaaagttttctccgaggttgggctttcttattggatttgacatctgatcgaccctctacggaattagtcccaacaccagttgaaccagttcttcttttctttctcttgttaagaccccaatcttcatcttcactctgttcgtcattgccaataggctctccaaacatttgctcattaagttgtgtatagtcaacatctcttcttggcctttggtgggtaagaatctcagccaaactgcccttttcatcttcaccaaaatcgattcctagatttgaactttcacgacagaatccttcagcatcattgaaatctgctgatatgaagtctggaatatcatcatttggagaaattgtccatgacctattactcgctgaacaaagttccagctgaaagattacagttaaactaactctttgcaaatcctcacgaacctaatccgaattatctgtccctccctatatagaatggtaccagttcaccggtatataagttcaaagataaacggggcaagctacactccagcccctcctgtactattttctgatgtataaaatcctatgagcaaatggtcaactgaagcaaagcattgggacccagatgcaaggttaagatgctttatccttgagctcagcagctggtacaagcacaacttcgttttgcaagccactctcagcagccacattgttgtcagttgacgatgacgatgatagcatgttctccttcaaccgctgcagccgattctcgagaccgcacaccttctcgatcacatcgaagaaatgttcatcatcgctcacgtccaagaaatgcagagcgtcagaggcccaagtgtccacccaagaaacagcagtccttcctcagtgccgatgttgttattcatcagttgactagatcagagttgaaatgttcagctgcttccttgaaaatatcactggagggacacttcactgtaaaacttgtccccagatgggcattaatggcgtctaaaattttcatcttggaagaacagtgtttgcaaagccgcccatggcgggtagttggaagaaatacatgttcaggattgacagactcgtgacacccatctggtggaatcacagagtcatccttgctcccactggaactacacaaatcaagttggtgaatgacgtcacggatagcgattttgtatttcatgatctgtttcttagcacgctgtagctccttctctggctttattttctctcgactgtgcccattccaaccatctccagagtatgcatctagcaaattctgctcctgttttattttgataagtaaatatcttgctcttttttccatgcgactgacctcatcactctcatcatttttccttttctgtttatgcttcctccttgttggccctgttgcagactttccggtagccgcatctgaaccccgccgccgcttcagaggactgctatggtgtttgttctctatacatttcgccaggttagcgctacttcttgttgttcgtttgggaggagaatccggcttgcgtggagtattctggcgggttgctctttttgatacagagatcaattccgaagaggattctgtcctctgttgcagtgctcttctagaagtatagcacagtggtttcttttctggggtattcattgctggtgatggatagtattacaacaggttgagaccgagcaggaggaggaaacggaaccccgggcccgggcggatctcccgcctcccccaacggcagcccagcaccagcaccagcagagtgcgggggaggggaggggacgcaccgcgccgcctctcgccgccgccgcggggaagggtaggaggagagggggagaggaggcggcggcgaatttgggggggagaagaggagaggagaggagaggagacaagccgaggccacccccgggggggccacttgagttgggggaaac

SEQ ID NO: 58918 - DNA, 1104 bp, Oryza sativa
  Clone ID: PAT_MRT4530_6058C.1
atgggccaaaaattgcatcaagccacacagcctcgtatcaggttatcaagattccgtaccgccggccgccttcgtcgctgccgactggtctcttcgcctccatggttggtgttctccgccgccgttgctggtggcgacatcatcttcaccaaccggcttgccttaccgccgtcgactggtgtcctcgcctatacgatccagatccggatatgcataatagggattcatggctttaagcttatctcctatgcttcaggaatggatcagtcagaacattatcaccggctcgctgtcgtcaccgccgactggtgtcttcgcctatgcggttggatggtcacatcaccgttgttgggcgtctatgtcttcacagccggcttgccttcgccgtcgccgaatggtgctctcgcctatacggatggatggtcacaccaccgttgttgggcgtctacgctttcaccgccggctgccttcgccgtcactgattggtatctctgcctgcacggctggcctattatgccgccgttgatgggcgtctacgacttcaccgccggctgccttcgccaccgccgactggtatctccgcctgcacggctggcctattatgctgccgttgatgggcgtccacgacttcaccgccggccgcctcgtcctccgccgactggtgtttccgcctacatggctggcctaatatgccgccgtcgttgggcgtctacgtattcaccgaccggccgcctcgtccgccgccgactggtgtttccgcctgcacggctggcctattatgccaccaatgttggtcgtctacgtcttcaccgaccggctgcctcgtccgccgccgattggtgtttccacctgcacggctggcctattatgtcaccattgttggacgtctacatcttcactgacgggccgccttgtatgatgcctactggtgctatcgtcttcacggttggccacgtcgccgccaccactaataggcgtcatgatcttcaatgcaagctatctacatctgctaccaactggtttcttcactcccatggctgcatgattcttccagggttgattggccttattgttttcaccgccggtcgtctcgtctgctgctga

SEQ ID NO: 58919 - DNA, 2784 bp, Oryza sativa
  Clone ID: PAT_MRT4530_60590C.1
ccatcaaggtaggcctgacaagaatgaaattgaaaaataggtgactgaaatgttgaacattggggtaattcaacatagccaaagccctttctcttctcctgcattgctagataagaaaaaagatgggacctggagacagtgcattgactacaggcagctgaattcaatcactgttaaaaataaatatccagttcccataattgaatagttgttggatgagttatctggttcacattggttctccaaattggacttaagagctggttatcacgaaattaggatggctaaaggggaagaacacaaaacagctttccaaacacattctgggcattatgagtacaaggtgatgtcctttggactaacaggtgccccagcaacattcctgagtgccatgaatgcaacattagctccagttctaagaaaaattgctgtggtcttctttgatgatatattaatttaaagtccagatctgataacacacctggaacatttgaggagaattctgcaattactggctgacaacaattggaatgttaagctgagcaaatgctcttttgcacagcaagaggtttcctatttggggcacataattggaccaaaaggagtatccgcagattccaaaaaatacaagatgtggctaattgggcaattcctaccactgtcaagaaactaaggaaacctttggactgatcagtaaacctctcactcaacttttaaggaagggcatcccatataaatggattgcagaaaccaatcaggcttttcagtgctagctctgcctgatttctctaaacagttcattctggaaactgatacaagtgagttaggcattggggttgtcctctcacaagataaacaccctatagcttttctcagtaaggcattgggacccaggactcaagggctgtcgacatatgagaaagaatacatggctattatgttggcagtagaacaatggagacaatatttacagcatggagagtttatcattttaactgaccatcacagtctcaaacatttgactgaacagaggttacatactcagtggcaacagaaagcttatactaaactgatggggctgcagtatcatatatgttacagaaagggagtaactaactctgcagcagatgctttgtccaggaaggaccatgccaattctgcagaactgtgtactgtctcataatgtgtaccttcttggatgcaagagattgttcacagctatgatcaagatccctatgcaacaaagctgatagcagaactagccatcacaccaacagctaggcaacatttctcttcagtacaaggcattctcagatacaaggggagaatttgggtgggacaatactgaattgcaagagaaattaatcgatgcattgcatgctacccccattggtggacattcaggatttcctgtcacttataggagagccaaaagcatgtttgcttggactgctatgaagaaaatgattcaggccaagctgcagacctgccaaacctgtttgcaagccaagccagacagagctaaatatccaggcctcttgcagccactaccagttccaacaggtgcttggcaaaccatctctttagacttcattgaagggttgcccaagtccagtcactataattgcatccttgtagtggttgattagttccctaaacatgcccacttcataccattatcacatatttttactgctagcagtgttgcactggagtttttgaagcatgtttacaaattacatgggttacccaggataataatttcagatcgagataaaatcttcaccagccaattctgggagcaacttttcatcaggtttggcacaaaattgcatatgagcacagcatatcacccccagtctgatggccacatagagagagtcaaccagtttcttgagatctatttaaagtgttctgttcatgccacccctgcaaaatggtcctcctggctgtatttggcaaaattttgatataacagttcttatcattctactttgggcaaaaccccctttgaagtaatctatggctacagcccgagtcattttggcatcagcttgaatgattgtcccatcccatatgtcagtcaatggcttcagcaaaggaaattgatgcaacaacttctgcagcagcacttgaatcgtgcccagcagcagatgaaacacttggcagataagaaaagaagttacagccatatgtgcagtcattagtggtcgtcagagctaatcacaagttatcctttcgacattttggcccctttcaagttcttgcaaaaattggcactgtggcctatggcttgcaattaccagcttctgctcggatccatcctatatttcatgtttcccaactgaagggcgccaagggtttttctcatccggttcagactgagttgccgactgacttcactcggtttcagattccccagcaattccttaattacagagtgactaaaaaacataattctgctactattcaattactaacccattggtcagggggtgcagtggaggacgcaacctgggaggacatgcaggatatacactacaggtttccacaggcacaggcttgggggcaagccggttttcaagattgagggcttgtcaggcctacctcgatgctgccaagggactccaagagcaagactgatcgggagcgcgacgccaagatgatggaaggagatgctgatgaagcagagaagaatggtggcgctgagaagagggtgccggattccttggcccaaaaaccagaaggcccaactcacgtttcgtcggcgagcaatggaccaag

SEQ ID NO: 58920 - DNA, 272 bp, Oryza sativa
  unsure (1)..(272): unsure at all n locations
  Clone ID: PAT_MRT4530_60591C.1
ctttgaggtgggttggcttctcctccccctctttaccttttcctcctcggttcggttcccgtggtttcgtctaagggtttantgggtttgaagangggcggcgcccggaatgtcgaagtaccgcttgctttcgtcgggcggcctcgcctgggccaccgacgacccgttcccttcgagggcccgccttctccacctaacggcgagatccttcgacttccaagatcatcaaccgacagggaagacgggggaaggncacgtngggttttggcttt

SEQ ID NO: 58921 - DNA, 2215 bp, Oryza sativa
  Clone ID: PAT_MRT4530_60592C.1
agtatatcatgcatgcacaaataaaaatattcgctacatttgtggacagagagcgagaattacgcatgcatttggtaattgtccatgacctattactcgctgaacaaagttccagctgaaagattacagttaaactaactctttgcaaatcctcacgaacctaatccgaattatctgtccctccctatatagaatggtaccagttcaccggtatataagttcaaagataaacggggcaagctacactccagcccctcctgtactattttctgatgtataaaatcctatgagcaaatggtcaactgaagcaaagcattgggacccagatgcaaggttaagatgctttatccttgagctcagcagctggtacaagcacaacttcgttttgcaagccactctcagcagccacattgttgtcagttgacgatgacgatgatagcatgttctccttcaaccgctgcagccgattctcgagaccgcacaccttctcgatcacatcgaagaaatgttcatcatcgctcacgtccaagaaatgcagagcgtcagaggcccaagtgtccacccaagaaacagcagtctcctcagtgccgatgttgttattcatcagttgactagaatctgtgatggaaggcttgatcgtaggcggtgtaccctccttggttttatcagttggcgacaagcaagtttcattgtcctgaggtcttggagggctgttaattgattttggcttcttatcaagacctttctgcagacgtgtgggcacgttgattatttcagataagggaagaaagcatgagttgtccatttgatccactttagctgaagtttcagccttttctatgcttgttcttgaccttttgctgggaccagaataacgactttcacccttttcaaaagaaatacccagctctgttgagagattttctttgacactccgggcaggaagctcattttcagcaaaagctttacggagcacctcaactgccgcaggaggaatcctgaaaagttttctccgaggttgggctttcttattggatttgacatctgatcgaccctctacggaattagtcccaacaccagttgaaccagttcttcttttctttctcttgttaagaccccaatcttcatcttcactctgttcgtcattgccaataggctctccaaacatttgctcattaagttgtgtatagtcaacatctcttcttggcctttggtgggtaagaatctcagccaaaccatcttcaccaaaatcgattcctagatttgaactttcacgacagaatccttcagcatcattgaaatctgctgatatgaagtctggaatatcatcatttggagaataaagtggactccctgaacaattggaatcggcagatttattctcttcaccactgctgctggcctcattttcttcagggtcatagtcctcatcacctgaatactcagatagccaatcttggcccagtccatcatcagagttgaaatgttcagctgcttccttgaaaatatcactggagggacacttcactgtaaaacttgtccccagatgggcattaatggcgtctaaaattttcatcttggaagaacagtgtttgcaaagccgcccatggcgggtagttggaagaaatacatgttcaggattgacagactcgtgacacccatctggtggaatcacagagtcatccttgctcccactggaactacacaaatcaagttggtgaatgacgtcacggatagcgattttgtatttcatgatctgtttcttagcacgctgtagctccttctctggctttattttctctcgactgtgcccattccaaccatctccagagtatgcatctagcaaattctgctcctgttttattttgataagtaaatatcttgctcttttttccatgcgactgacctcatcactctcatcatttttccttttctgtttatgcttcctccttgttggccctgttgcagactttccggtagccgcatctgaaccccgccgccgcttcagaggactgctatggtgtttgttctctatacatttcgccaggttagcgctacttcttgttgttcgtttgggaggagaatccggcttgcgtggagtattctggcgggttgctctttttgatacagagatcaattccgaagaggattctgtcctctgttgcagtgctcttctagaagtatagcacagtggtttcttttctggggtattcat

SEQ ID NO: 58922 - DNA, 349 bp, Oryza sativa
  unsure (1)..(349): unsure at all n locations
  Clone ID: PAT_MRT4530_60593C.1
tngangngcggcgctgttcccggacgcgtcgttcccgcgcaanaggtcacacgtgtcaccgtcaggatggccgggcacaacctcaccgacgacgacgacgcgacggtgatcgccgccggtgtggctcccggggagtacgtcatttctctgagccccaggctcatgcaccccgccagcgacaaggccgccgacgccgtggcgaacgcggtgcgccggccgtggcgccattgtggctgtgggacggccgcgggcgccgctccggggcttnacggaggccatggtggactacctctcctccggcgccgacgcnttcgaggccttgccgntaacgacgacgacgacgacgacg

SEQ ID NO: 58923 - DNA, 597 bp, Oryza sativa
  Clone ID: PAT_MRT4530_60594C.1
cagacccggaccagcaatgatgacaacacctcattagattcagctgtgcctcttggtctggagatatcccgctacatgatgtacctcttcacatcgcagccagagatgctcatgcctgggacccgatcgcacctgtttgccaatgcctgtgatgacatcacattcatggcgaagtatagcgacatcgtcgggcacagcatcaccttagcgcagccggcacagcagctcgccaaaggaatccttcacacggcgcgacaccgctgggtttatggggattgcgtgggacccctcattcccaaggcatgcgagcttgctgacgcgctcatcttcttcatggaggagctgctcgaccattctacattggagaaaatggtgcgagatgtgtggattgagatgctctgctacaccgctagccgatgcggggggtacctgcacgctgtcagcctaggcagcggtatagagccgctcacactagtctggttttctcagtgctacctgggcatggagacaatggcagacaggcttcaaaggccagtacctgagcctgagaaagaggaagaaaagacacaaggagcacaagattcaaacaaagaatga

SEQ ID NO: 58924 - DNA, 366 bp, Oryza sativa
  Clone ID: PAT_MRT4530_60595C.1
aaaaaaaaaaaaaaaaaaaaaaaaaaaaaaaaaaaaaaaaaaaaaaaaaaaaaaaaaaaaaagggggggggaaaaaaaaaaagggggaaaaaaaaaaaaaaaggggcggccgtttttggggtcccatttttacttccccttgcttgcaacgccttattttttttttagggccccctaatttcaatccactggccgtttttttacaccttctttactggaaaaaccttggggttacccattttattccccttgtaaaacatccccttttccccagctgttttattagctaaaaggcccccacagatcccctttccaaacatttttccaccctgattggcaattggaacccccctttttccgcccctt

SEQ ID NO: 58925 - DNA, 465 bp, Oryza sativa
  unsure (1)..(465): unsure at all n locations
  Clone ID: PAT_MRT4530_60596C.1
acggccgagtccacngacnagcnagatcttanacgccnctacnaccnccanncgnacacncngcgggggcggaaatagantcattctcangaagcaccccnctggcnacccccangccggcgagnngatcnnccgngaccacctgcgcccagtgccacaccgaccacaacggcgccggccacaancaaggtctanactngaatggtctgtttggnangcagncncggtaccancccagntnanaccnnctctaccgccaacaacnaacatggcngtgatntgggaggagaacacactttatgactaccngcntantcctngnaagtnntccctggaacagnatggtcttnnntgggttgaaaaaccncaaggaacgtgcnnatcnnannncctaccngaacgaanncacctcttngaaagngtggagctctcttnncgtgacacnnacggacanttccttctccc

SEQ ID NO: 58926 - DNA, 687 bp, Oryza sativa
  Clone ID: PAT_MRT4530_60597C.1
ctagtggatccccgggctgcaggctcgcctaagaggagaagaaccggcggcggaggcaactgccggtccccatccctgctcctccgtcctcccctcatgcagcgacagtggatctaacccgcggcggcggtggcggctttcgtgctgctgctcccctgctgccggcggcggccacggttgctgctactcccctgcgccggcgcagcggtggctgctgctcccatgcgacgtcggctaccgcggctggtgctcccctgcggtgccggcggctgcagctgctgcttctgctcccttgtggcactggttgcggtcgctgctccccaacagagccggtggctgctgctgctcgttcttctccgagcagcagcgatggctctctattccctgagaagcggcagcagctccttcttccccaatcgagcaacaccactctgctctaatgacagataagattatttctcaaatcgcaatgcactttatttatttctcaaatcgcaatgcactttatctggacttggaaagaacgagagcaattttgttgtcgttgttgttcgtcactttatcaggcttaatatgaataatttaaattgttgatgaattgttatgtgtatctgtgaaataatgtgtcaaaatttagtctacatgctgtcaaaattttcaacttttttttaaaccgctaaatggctt

SEQ ID NO: 58927 - DNA, 750 bp, Oryza sativa
  Clone ID: PAT_MRT4530_60598C.1
atggatttggagtcggtcaacccggagctcggcgagatccacgggaccaccgccgcgacccctcgatccttgcgataccacagccataggcggtccacgttgaacgagccgcatcggggtttggtctggtactaacaggtggcggagatggtggtcgacgtcgtgaggcatttctttttctgtttgggttttttttgttgcttttggttgatttgagctctggagagcgcgagtatcgtccgttataggggacaggcaatgaacaaggagttggtcaaccctgatgttttcgagatacaaggtcagagcggcgacatgcgccttgcattgcaaaatgggtcccagaagctggataagattaaggaagcaaatggacggatcgggtaactcgaagcactccactaattaaatgcggaattgaaccaacttattgaagaactttatccaggtattccaagatctagacagaccgaccaagagagagtctgttaagagcctatgagcaaggttgttattgagctggattccattcatttctccattaaaaaggcatcacaaatggtgaaagaaattggtaggcaggttgcaactgatcgctgcatcatggccttgctttttctcattgttgctggagtcatagcaataatagtcgttaagattgtaaacccacagaacaagactatccgagacattcctggtctcgctccaccagttagcagaaggctattgagtattgtagaagacatctga

SEQ ID NO: 58928 - DNA, 396 bp, Oryza sativa
  Clone ID: PAT_MRT4530_60599C.1
atgtgctgccggtcagaccggcgtgtatcgcgcggtcagaccggcgcagcccgcgagttcttcgatttgtgtttcatcgggtttcggcggtctaaccggcggcgcaccggcggtcagactggcggcatcccggcggtcagactggcgggtgacctgcggtcagaccggcttcagcgacaggtgacaggagctgatctcgacggtcagaccagagatacaatctcggtcagaccgacggcaaccaggcggtcagaccggcgcatctacttcgcactgatagctgaaagaacaaggatcgatctgctgaccaagttctacaatagtgacatcgacagagtgcttggagacgatgatgttgctggcgagatccttttggagtatgtgaaatggtcttga

SEQ ID NO: 58929 - DNA, 501 bp, Oryza sativa
  Clone ID: PAT_MRT4530_6059C.1
atgacgcctattagtggtggcggcgacgtggccaaccgtgaagacgatagcaccagtaggcatcatacaaggcggcccgtcagtgaagatgtagacgtccaacaatggcggaaacaccagtcggcggcggacgaggcggccggcggaaacaccagtcggcggaggacgaggcggccggcggtgaagtcgtggacgcccatcaacggcagcataataggccagccgtgcaggcggagataccagtcggcggtggcgaaggcagccggcgaggtggccaatgtgggaacaaagtcgtccgtcaataacaatgaagacaccagtcgggggcgaaagaaggcggtcgacggtcggttgataaagtcgtggacgctcaataatggcggcataatagggcagccatgtaggcggagacaccaatcggcggcggcgaagacgatagcaccagtcggctgcggcgagggcgagcaggtcggtgaagacatagatgcccaacaacagtag

SEQ ID NO: 58930 - DNA, 540 bp, Oryza sativa
  Clone ID: PAT_MRT4530_605C.1
gcacgaggcctcgtgccgaattcggcacgaggtggtttccgaagcaaaggtgaggctgaaatcaccgccgccgcctcgccgcgtcatcagtgatctcagatcaaaccacactcacttaaatcttttccgtttgctgatcttgctcgctctcgagcttttcttgccgccaatgaggtcgtctaatccatggcgtgcgtgtgttgggtgtgtggtttgcacgtgagcgtgccgagcagtagcctgttcaagacggtgatggtgcggtgcggccactgcagcagcctcctcacccccgccgccgccgccggcggccgcgcacttcccccactctctcaacctcgcgccgccggccaaccctccccaccaccactccctcctggatgagatatcgacggcgagctccccgacccagctgctggcggcctgatggcgagcgctgcaagctgcaggaacaacgtctgcagaaacaataagaagatgatcgccttcctccgctgggcgctccaacccccttccttcttccgcgcctggcacatcggc

SEQ ID NO: 58931 - DNA, 277 bp, Oryza sativa
  Clone ID: PAT_MRT4530_60600C.1
ttagccaacccccagggcttgttacaacattgtatggcctttccaggctcgtattttgtgtggaatgtgtgacccggatacacaaaggtgcaacaaccagggtaaaccagctatgaacccatgattacgccaagctctaatacgactcactatagggaaagctggttaccgcctgcaggtacccggtcccaggaatttcccaggttcagacacaacgcgtcacgtataccattcccgaagattaaagagggtttggatataaataagcatacactgg

SEQ ID NO: 58932 - DNA, 177 bp, Oryza sativa
  Clone ID: PAT_MRT4530_60601C.1
atgaactgcctccatgttgactcttccaagcccctcgagcactccagtccatcaagctctgcctcccttgagatcaaactctgctacagcgagcttatgaagaacgaagatgggagcaaggcgctggtgtggcgactgggcgtcaatggcacggtcatgccatgtggtaccaagtag

SEQ ID NO: 58933 - DNA, 287 bp, Oryza sativa
  Clone ID: PAT_MRT4530_60602C.1
atgggcggcgccacccgtggcggatgtggcggcatgcacgggcgccggtggctgtggatggccggcgaggctgggagacgcgtggccggcggcgtcgaggacggccagtgtgtgatggctgcgcagcgggaggtgatgtcggtggaggtggagcccggtggtggacggcgggtgaaaacccagctcgtccttgctcggaccgacaacgatggtgctcgagtgtcattccccctcctgagggcgttgtcgtgccgtctcacccctcaagggtggttgccgggcgaaag

SEQ ID NO: 58934 - DNA, 210 bp, Oryza sativa
  unsure (1)..(210): unsure at all n locations
  Clone ID: PAT_MRT4530_60603C.1
ccagcatatagtcttgtatgnctcaatattttaatgccactggcgtctatcttccaagtcagctatcacatgggtcatgtcccaactattgccaacaaaagccaccagtttgttcagtctaccggtggattttgccattattgcatgttatcaagggattattttaataaagtgttaccagagtattattaaaaaaaaaaaaaaaaaaaa

SEQ ID NO: 58935 - DNA, 1033 bp, Oryza sativa
  Clone ID: PAT_MRT4530_60604C.1
acggcgcggcgcggcatggtgaagagctgtgaacgacacggcacggaaagagggcgtggacagcgcgacggcgtggaggcgtcggtgggcgtcgccattgcagcgggaggttggtgtgggtggtgccggcggctgcagggaggccggcatgggcggcgccacccgtggcggatgtggcggcatgcacgggcgccggtggctgtggatggccggcgaggctgggagacgtagccgacaaccgacacggtgaaggagttgcgaccggcaacggtggaacgcgtgtaggcgtggccggcggcgtcgaggacggccagtgtgtgatggctgcgcagcgggaggtgatgtcggtggaggtggagcccggtgaggtggtggcatgtggggactggccgggggagggcgtcggtgcagtgtgcccacgcaccggcggaggtctagatggtggtggagcattggtgtatctgtggtagattggcaggtggtggacggcgggtgaaaacccagctcgtccttgctcggaccgacaacgatggtgctcgagtgtcattccccctcctgagggcgttgtcgtgccgtctcacccctcaagggtggttgccgggcgaaaggtcattctctgcccttttgagaccttggtggatggcggcggcggtgttccgtcgcttatctccttggagacgttgtctaggcatcccctcgccgaaaccacccgagcaattggtgcaagcacgctctagattctcatcctcttgtggtggcgtcttagtttttagaagttggccacgtcggaggggactttgcgttggttgtaagggtcaagttttgggcgatcttggctgtgttccgttgttggcctagcggcggttagtcacgcttagcggcggccggtccggtgctagcctgctcctggacttgtatgttgacactatcggtgtgtgggtggtagtatattttttcgtttttcctggttacgatcttccatggttgtaattatgtaattttttcctgctttatcaatagaacttcgcccgtc

SEQ ID NO: 58936 - DNA, 279 bp, Oryza sativa
  Clone ID: PAT_MRT4530_60605C.1
gccatggacatacataaaagcgtactgacgaaatgcataataacaacatggaaagcacctgcgcaaaaaaaaaacccaagacagactaatgcagccaaaaagccgggctaccgctccaaaactgagcaaaaaagcattctggtatcccaggacgcatgcccaaaaagagaccagaccagccagcactgaggccagggaagaccgaagaacatcgaatcatggcaaaggcccaaaaaaccaccgccggacgacaaaatcgacgatgaagcatcaggacac

SEQ ID NO: 58937 - DNA, 1075 bp, Oryza sativa
  Clone ID: PAT_MRT4530_60606C.1
gcaccacgcgctctctctctctctcactcagcaacagctcgcagctcactctctcactctactactcgtagctaagctagctcgcgccgccgccgccgccgtcgccgccgccatgagcaaggagaagcaccacaagcgggagcaccacctccggcgatgctgcggcgggatggcggcgtgcatcctggcgctggtcctcgtcgtcggcttcatcgcgctcgtcgtctacctcgcgctccgcccctccaagccgtccttctacctgcaggacctccagctccgctccgtcgacctcggcgacccctccctctccgccaccgcgcaggtcaccctcgcctcccgcaaccccaatgaccacgtcggcgtccactaccgccgcctcgacgtcttcgtcacctaccgcgacgaacccgtcacggtgcccgtctccctcccgccgacctaccagggccaccgcgacgtcaccatctggtcgcccgtgctctccggcgagtccgtccccgtggcgggcttcgtcgccgacgcgctcaggcaggacgtcgccgccgggtacgtcgcgctgcaggtgaaggtcgacggccgcgtcaagtggaaggtcggcagctgggtctccggcagctaccacctctttgtcagctgccccgccatgctcgcctccgccggaccaggcggcgtcggccccatgcctctcggcggcgcctccgccgccgtcgtgaacggcaccggcgccggcgccgtcgcgtcgctcaggttcacgcagccgacagggtgcagcgtcgaggtgtgagtcacaaatttgagtagcggctagtggcaatatggtaattaattaagttcatcggtcgcgttaatccgcaagctgttaattttttttttgtgttcatgtagctcatgcatactctatgtgagagaataaagttacgtacgttcatatgtataccattgcaacacattaatttcctatatgaagtgtactagtataatttcgttgctgtaatttttgaattattgttaataatatatattcaggtaatatttctcgagaaaaaaaataaaaaaaacgaaactaacctaa

SEQ ID NO: 58938 - DNA, 1141 bp, Oryza sativa
  Clone ID: PAT_MRT4530_60607C.1
atggagcccgggtgcggggaaggaggaggaggaggaggagggagggatgagcgggtgccgcagtggggcgcgcaggagacgcgggagctgatcgcggcgcgcggggagatggagcgggagtccgccgccgcggccgccgcgcgccgcagcgccaagacgctgtgggaggcggtgtccgcgcgcctccgtgagcgcggctaccgccgcactgccgagcaatgcaagtgcaagtggaagaacctcgtcaaccgatacaagggaaaagaaacatctgatccagaaaatggtagacagtgtcctttctttgatgagttgcatgcagtcttcactgaacgagctagaactatgcaacaacaactccttgagtctgaatctggaccatctgttaaaaagaaactaaagcgaccaagtggtgacctgtcatcggaggactctgatgatgaggaagatggcagtggagatagtggcgatgagaaacccataagaagcagaaagaggaaaattgctgacaagaggcaacaatcgcaacgaatggcagaaaagtcgaggactagcatttcaagcatccatgaattgttgcaggatttcctggtgcagcagcagcgcatggatattcagtggcatgagatgatggagaggcgttcccaggagcggattgtttttgaacaagaatggcgtcagtcaatgcaaaagctagagcaggagagactgatgctggagcacacatggatggagcgagaggagcaacgaaggatgagagaagaagcacgagctgagaaaagggatgccctcctgaccacactcttgaacaaagtcttacaggaagatttatagacactgatgcttcgcctacaactgatagatactttagttgatatttctggcatgttccattcaattctttgtagctcctgcagatgttgttcttggagagaatatttcttgtagcatttctattagattcctaggattctttaccagttttttagtgtactaattttgatgcaatattttattgtggatgtaagtatcagaccaccatcttgatacagtgacccatttatgtttgatgataacaacatttcagcaagctttcaaccttgtacaaaatttatgtaagcaataaggtatgtttggttgg

SEQ ID NO: 58939 - DNA, 1735 bp, Oryza sativa
  Clone ID: PAT_MRT4530_60608C.1
ctacaaaattacgagtacaccgttcttgtcttttggaacaatttttttcctgatcattctaaggcttaattcgtattctcccatcattttgcccgttcttctcccttttggaactatagtcattttctccaattttactgcattcctgaggataaatcttactagggcaatttgacctccattaccattaaatccggtcatgcaagctctcttgagattgtagtaggggcgatgtataatcacgtccctagcaggggggtcctcacaaatatctgcacacgtcatctgcctttgaccctgtcggcctgtgcccttgaccgagccaaatggtgcagctggaccacgattttttccgcccgaacacgcactgacatggcatcgatccaaatgaaggtccactaacaaaggagcagcttccaaaagatatgctagctgcagaactgcgttttttccaaaacgtttagcacttccaaaggttatcctcatgatcagatgccttaaattgataaatttaagagggggctgtgtaaatccaggtatctgaaagacgccaaggaaattctgagtcctcacaaacactttcacatgtagtctctcaacatgaggtaatccatttggaagcccagtgaaaacatactcaaggttgtcctcaatatgagacgcaatgcttgcagtcttaagcttcaagcatttgtgaagtgcaataatcactttaaaacaacctctatactcaaatgtggtgagtttgggggcatggagctcaatcttgttaatcgcacaaccttgtacacgcaaaaattccagccgcggcaatggttcagaaacatgcaaattatgtagctgggagcacattaggatttccaaccattctagggcagggcatttcggtaagaagtactggaagttgtccaatacaagcacatgcttcaaagtaagcattgtaagattagcaaagccacaaaagtcaggagttgggccaaaagtaacagtatcaagttgaagaaccttaaagtgggatccatttctgtcattgaaaagatgacatggaaagctgtaactgttttctcgcaatcctatatatggagaaaagttcaggacgagaacccttgctttcgatgcaatagcaaaggaaacccatccatcaatgtcacgtgcatgctccttccacagctcaaacttcacaccaaaatcactcactcctagaccactgtgtttcctcaagataaaattgattgtgtcaataaacccattggtgctcagcgctctcaactgtcgatcagaagttccaaacaattcttcagtgccaaaaagaagatcaggatggaaaatccaagctcttctgaacacactcgataccatgctcatctgaacagcttgcttcaatgttagttttgacattatccttgacagaatgtcctcagggagagattgaaaatcaacccattgtgatcttatccgcttgctgttatatacttcagcacatgggctgagcgccaatctcctccttttgtttactggacagatcccatcctccatgtgtgctcttctggctgaaatggttgtacctgtgaagccgccacccgcgaccgtgctcgtcgccgtcgcgtccatcgccgcagcgcccgctccaactgccgcctactcctgcgcccaacaccggaagaggggatggaggaggaggccgtcgccgccgcaatgaggagaggaggacggggtggagctgcggacgcgtggg

SEQ ID NO: 58940 - DNA, 302 bp, Oryza sativa
  Clone ID: PAT_MRT4530_60609C.1
ttttgtttgtttgaagtgggaatgtatactctttaataacattccatagtatgtgtaacaactgcccctaaaacgaatgactaaaaaaacggttgtcacagacgaagaaactacttcacacttaacgttgatgggatggcttattcgtaggccaaatggggattaacagagtcatagactcagcaggtagcgccagcactgtagtcactcaaaaacagtggtgtaactcagattaagaaggcattaatctacacaaaaagaagaacccgttctagttcgcatcaggtatttacagcaggggg

SEQ ID NO: 58941 - DNA, 419 bp, Oryza sativa
  Clone ID: PAT_MRT4530_6060C.1
tctgcggcggcggcggctggcgatttcgcagtagcgtcgagagcgcaaggcggcggcgcttgcgaggcgacggcgcgacggcgcgggaggcggcggcacgcacgagaggtggctgagtgcgcgggaagggcggcggcggcagggcgcagcggcaacggcggtggggcggcgcggcgacgacgcgcggcggagagggccgcggttctcctccgcgcgcagccagggccacggcggcgagcctcgacctcgcgcggcccatgggaggcagggcaggcgtgaggccggtccaggacgacggcgaggacgtcatcgagcgcgcgggcgagctgatgccacgcgcggcgacgacaacatgttcataatgccatgtcacaagcaacttaaaagcggtgtcctctgcagttattacacatgcgaat

SEQ ID NO: 58942 - DNA, 405 bp, Oryza sativa
  Clone ID: PAT_MRT4530_60610C.1
atggtggctggtagatcgaagacggcacaagagatcgaagaggctgattgcaagtttttctggcgatcgacagcaaagggtacagcgccgcctgcaagagcatctctctcacctggcgcagcctggttcggtatgggaggtgttgggacgtgcagggatggaaccatagtcacaaagttccctggtccattggatcaaagaacggggtcgagaaacgtgtatatggacgagctcttcgtgaaccatggcgggcatcgtgctggtttcgccgccccttcgccggagttgtgtcatccatggaaggatggtggctcgatcgacaaagggaaaatggttgtgaagactcaccttgcacgatctcggcgacctgatagtacgccggttatcatggaagaagagaattga

SEQ ID NO: 58943 - DNA, 449 bp, Oryza sativa
  Clone ID: PAT_MRT4530_60611C.1
caagatttgcaaaaactcctaggcttgtgtttgatctcgagtacagcaagtcgatcgagagagtgatcttaattttgtcagtgagaagagatggcgtttctggacggactgtacggcagccggaggaggatggcgacagcgaagggcgccggcgtagcagggaggcggcggtcgtcgtcggcggtggcggcgccgcggccggtgaggcagctgtactggaagctgaggtcgaggttgcggtcgtcgtcgaagaggcacgccggcggcgcggcggcggcgaggttcgggtacgacctgcagagctactcccgcaacttcgacgacggcgtcggcctcgtcgtctccggccaccgcttctaggctctctagctaggtagctcattcggttcgatcccgagatcgcgcgccctgccattgctggagaccggagattattgttctggtctacc

SEQ ID NO: 58944 - DNA, 273 bp, Oryza sativa
  Clone ID: PAT_MRT4530_60612C.1
atggaggaagaaaccgaatcattgaaaaagctatgcacattcagggacaggggtgatgaggatgaggcgtgtgctatgctatcaaaggcagaggaaatccactcagcactggcagaggagggctgtatcgagaacagacgacatgacaacttggatcaccaatatgaggggggcagtggcatggattcaagctggaggaggcccgcgtcgctcattcaagccaggaggatgttggtggttactgtagaagtggcagtggcaatgaggcactga

SEQ ID NO: 58945 - DNA, 502 bp, Oryza sativa
  Clone ID: PAT_MRT4530_60613C.1
cggacgcgtggggtaaatatcaaaattattaaattacgaatttcaaatctaaattaaagtattgcagctggtttgttctggcactattcaccaccttctaaccagttatgggctggttaccagttgttttccaaacgctgtcaacatgcactagttcttaaattggtttcctccataaaaacaaacaaaagtttcctaaattgtaggtcattatcattgatccatgtaacctgaattttttttccaacagaactttgttttgaatcatttggtctcttttaggtctcacggagacttgtgctggatctttcgtctccctaccaaatcagatgtgcatgatagggactgttggtcctccagtgccaaatattgatgtctgcctggaatcagtgcctgaaatgaattatgatgcacttgcaactagaccgcgtggcgaaatctgcatcaggggagaaacagtattctcaggatactaacagcgtgaagaccttacaaaaagatg

SEQ ID NO: 58946 - DNA, 492 bp, Oryza sativa
  Clone ID: PAT_MRT4530_60614C.1
acgtcgcgcaggaggcggcgcaaggcagaggccaccggagagcaggcgtcgtcgtcgcgcgaggcgaagaccaccggggagaaggggccgccgccagcggaggaggcggcctgggatttgggggccgaacgaacgaacgaacgaacggggccaccggaggaggagactaaatcgaaccaaaccatgcaccggagaggatgcggcaggacgccgggagacgctgctcgcggggtggagatcggcgccgccggccggcaagcccgcgagttgatggcgacggggagatcggctagggcagggcaggaagggggagatgagaaaacgcacccctccaactccaaccacaggaaacgggcaggaagggggagctcggaactcggaactcggaagagaagaaaagctcaccggcggcgggcggcgggcggcgtaggcggccgtacaccaccgcgggggcgtttgagcccatctagtggtgctggtggtgttccattc

SEQ ID NO: 58947 - DNA, 163 bp, Oryza sativa
  Clone ID: PAT_MRT4530_60615C.1
tgtacatcgaggagtccggcctcgtcgccctagtcaagtggttcaagcacaactccatgacttatccccaaatcgccaaagtagctttgctcatcctctggcaatctggagaaagcgagaaggatgataaagtggttaaggtcattatgtgaaaggagaatat

SEQ ID NO: 58948 - DNA, 213 bp, Oryza sativa
  Clone ID: PAT_MRT4530_60616C.1
atgtcggggagggcttcgtcgctgccaccaccttccctcccgtcaccgcctatcgctgctatcgcttctcctcacgctgccgccgccgctgcctcccctcctaccggatctggtgaaggggagagtgccgcgagaaaagacagagaggcgcgcgtgagaggcatgcacgagagagagagaggcgcggtcctccgcttcttattcgctcagtag

SEQ ID NO: 58949 - DNA, 306 bp, Oryza sativa
  Clone ID: PAT_MRT4530_60617C.1
atggcggtggtgacaatgcccggcgagccgtccgacgccaagctttcgacgctcccccactcccgcgccaccaggattcggccgtaccggaaccatcggcgcgcacgggggagccgcctctctttacaccgtctccaacacgtcgccacactggagccgccactgcacgccgtcccggcctccgccatacgttcatcgccgttccccatggctcctggagccgcacgataccaaatggcgtgggggaacggtattcgggtccggccggtctccgactccgatgaggagtcgggatcgtcggcctaa

SEQ ID NO: 58950 - DNA, 3324 bp, Oryza sativa
  Clone ID: PAT_MRT4530_60618C.1
atggccacggccgccgccgccgccgccgccgccttctccccgctccgccgccgcctcccgcttcaccaccgcggccgccgccttctcgccgtcgcggccgccctctccccggaaccccccgcgcctacccccaccacctcgccgcctcccccgccccgcaagggctacttcccgaagcgcaacgaggtgctcgagctgacatgcgaggggctcgcgttcaaggggaagggcgtctgcagggtggacggctccaccttcgtcctgctctgcgacggcgcgctccccggggagcgcctcctcgcccgcgtccgccgcatccgccggggcgccttcgccgaggccgccaagctccggacgctcgagccccaccgcgacgccgtcgacgcgccatgcccgctcgccgccgactgcggcggctgcaaggcccagtccctcgcgtacgccgcgcagatccgccacaagcacctccaggtccgcgagctgctcgtgaactttggcaagttcgatccccggaagatggagagctcggagcccgatgctatcttgaaacccatcgtgccgtgcgacgagatatttcggtacaggaacaagatggagttctcttttggaacaaagagatggatgcaaagagagtggaaggaggagaaggatgatgaggtggtgaaggaggaaaaagttgaaggtgatggctattcgcttggattgcacgcgccagggttcttcgacaaggtgctgcatgtcgagaaatgcttgctgcagagcgagccggcagataaggttcttgccattgttcaagaaacatggttggatccagctcttggtctcacaccttatgatgtgcacaagcatgttggatttctcaaacatcttatgataagaactggaagaaatatcaccactggagctccagaagtcatggttaattttgtcacatcatgttataagccagagctattggagcctcttgttaacaatatcacaaaaataccagaagtggctgatgttctgtacaagcttattggggaatctgctgggcttaagggagatggctctgagattatccttgacttgttctgtggaaccggaaccattggtcttacccttgctagaagggcaaagcatgtctatggatatgaagtagttcctgaagccattgcagatgctaaaaagaacgctaagctgaatgatcctaatcggccagggatgcatatgaagctaatcaagtggctactagaagttaaagcccctcgaatagtgtacgtttcatgtaatccagctacctgtgcacgggatttggattacttatgtcatggtgtggaggaaaaagatttgaaaggatgctacgagctgaagactgtaatacctgtagatatgttcccccacactcctcatatcgaatacggcggcgaccccttcgattctctaccggcggcgatcgccgccgacgtcctcggccgcgtcgccgacggggccgacatcgcggcgtactgcctcgcctcgcgggccttcctcgccgcctcctacgcctgctcccgtgtccacctccgcgccgccgcgctcgcacggcgccgctccgtcgccctcgccggagggggcgggggcgggccccccggcggctccgccatccgagcggccgccgggaacgccgcgtccctcctcgggccgcacctccgctccctcgagctcgacgcgtccgaggggtggggccacccggacgacgcgacgtgggtggaggagggggagttcgacgagggcggcgacctccacctcacggcccgggaggccgtggtggcgtgggcggacaccgccgccggcaacgctctccgggaggtggacgtcgccgactactggccgcagtcgtgctggcggaaggcggaggcgcttcctgtcatctcccacttctgtcatagtcttttgaaattgcgtctgaagaacgcatggctatccgttgacgggctaaagataatgcctaatctgactcatctgacacttgagttcattagattagatgatgaggatctcaacaaattgaatgagtgcttcccttgccttcagatcctcaatcttattggagttggagggctcaaggaccctaagattcaccttcatcaactaaagacttgccactgggaggtatcaaatgttccacggtcattaacaatccgtgcgcctaacttggttcgtcttgagctgaaatgtgttcgaccagatatgctcattttggataccccatccatgtttactctgaagttaacagttgataaacttggaccaaatgtccaagccgatggccttgtgagtttgaaaaatctgcggatagagtcattggatctaaagtccctcttgcaagtatttgcagagaatcatgatatcactacattagagcttgagctgcccacttctacaaacaaatatgaactttttgaagcagtgaagcccgagtatcttcttcagctgtttgccggcatcagcgaagatgttcctcatcttgcacccttgtttaataactgtgctccatcttgcgaggtgaccattcttttccatgccgactccagcgatgatatccgccaagccgcgacatcagtttggacgctaaggtatccggggatcagatggcagtggggtacctggaactaatccctgcatgtgtgcatcaacatgaagataaaggatcacatgtgacaggactaacactacatctcgcaccttttgttaacatagtagcctcttctaaagtattgcaagctgttattctgttaggcttgctattgctagtagtactgattaatgttggtgagcagatggatgctcaatttgctcatagggctttgtttgcccatagcaactgtgcgcaaatgtgccaagataactaacttttggttgttttctgtgcttgtacatcctacttaatgttggaattatatactcctacattagaatatgtacttttctcttggataccaggatattgtttgttacctcagcccatctgcaggttagcataacatttccttgtcaacagtgaacaatatcatcttcatctttttacccatctgcacatgcatacatatgatatgatcctctcatgcagtgatgcctaatctggtagcaataattaatttaactatggctgtatcaggattagccgagttggtctcggttttttcccttcatcttttcccgccaaaaatgtcttggtcaggagcagagaggcactagttgcggcggcagaaggttgggcagctgcagctgcagcggctgcaccaccgccaccggcagcagcagccgcagcactcgccgcagcagcagcaccaccagctccgc

SEQ ID NO: 58951 - DNA, 853 bp, Oryza sativa
  Clone ID: PAT_MRT4530_60619C.1
aaatgttccacggtcattaacaatccgtgcgcctaacttggttggtcttgagctgaaatgtgttcgaccagatatgctcattttggataccccatccatgtttactctgaagttaacagttgataaacttggaccaaatgtccaagccgatggccttgtgagtttgaaaaatttgcggatagagtcattggatctaaagtccctcttgcaagtatttgcagagaatcatgatatcactacattagagcttgagctgcccacttctacaaacaaatatgaactttttgaagcagtgaagcccgagtatcttcttcagctgtttgccggcatcagcgaagtcaagttggcccctcggttttcatgtgaaatgacgcattgcctgatgttatgcaccagcaaccagtttagaagctgtttgaggagactcctgtttcatctaccgccattgaaggatgttcctcatcttgcacccttgtttaataactgtgctccatcttgcgaggtgaccattcttttccatgccgactccagcgatgatatccgccaagccgcgacatcagtttggacgctaaggtatccggggatcagatggcagtggggtacctggaactaatccctgcatatgtgcatcaacatgaagattcaggacgacatgtgacaggactaacactacatctcgcaccttttgttaacatagtagcctcttctaaagtattgcaagctgttattctgttaggcttgctattgctagtagtactgattaatgttggtgagcagatggatgctcaatttgctcatagggctttgtttgcccatagcaactgtgcgcaaatgtgccaagataactaacttt

SEQ ID NO: 58952 - DNA, 645 bp, Oryza sativa
  Clone ID: PAT_MRT4530_6061C.1
atggcacaggacccctcgcacccccaccgccagagcaaggacaccgccgccgcccctccgccgccgccgccgcaggagcagccgcagcagcagcaacccgagctaatcacggcgccgccgcctcgcgacgacgtcgcccaccaggagcccagcacaagtagcagcagcggtggcggcggcaccgacgccgccggcctgtcgctgcagctcgggctcggcccgtcggcgccgggctcgccgtcgtcgtctcgccggaaacggccaagaaccgacgcccaccatgaggcggccgcaggcccatcaacgtcggcggccgatccgcagctaccggagctgcggctgtcggtgctccacccaggcccagggccttcgtcgtcggcgtcggcggtgggggcggtggtggcggcggcgccgccgccgccggcgcacgaggccggcacgtggttcgtgctccgggcggcgcagaaccagaggagggagccgccattgccgcagattccccggagtttcttgagggttagagatgggaggatgacagttagagtagtgatgaggtacctggttaacaagctgagtcttgaggatgattcacaggtgaagggtgtccgtccaagtgttacatcatgggtgaccccccatgattaa

SEQ ID NO: 58953 - DNA, 461 bp, Oryza sativa
  unsure (1)..(461): unsure at all n locations
  Clone ID: PAT_MRT4530_60620C.1
tagacaacgcaagattggggaggaggcactggaccttgctggcggctacacagcagcggcggcgacntggcagaggtgctagatttggctgtcggtgaggactcaaccggtcttgggcgaggttatnccacatcgtgccgctattcttctcccgcaaacatcagttacttggttctagcagctaggggtagaagaagatgacgaaggtgggtttatttcattggagttttagtgatgttgcaacatattattttatttggttgcactttattgtattaaggtgttttattttgttttgattcagtgttgcattttactgattcttagtgttgcaaccagactatttcagatgttgcatttgattgaaacaattttgttcaagcaatgaaatatttttcctcgatcgatgaaacatctgaaacatttttcatcgagtggtgcaaaaaaaaaaaaaaaaaaaa

SEQ ID NO: 58954 - DNA, 572 bp, Oryza sativa
  Clone ID: PAT_MRT4530_60621C.1
caacagtgaacaatatcatcttcatctttttacccatctgcacatgcatacatatgatatgatcctctcatgcagtgatgcctaatctggtagcaataattaatttaactatggctgtatcaggattagccgagttggtctcggttttttcccttcatcttttcccgccaaaaatgtcttggtcaggagcagagaggcactagttgcggcggcagaaggttgggcagctgcagctgcagcggctgcaccaccgccaccggcagcagcagcagcacgacgaccacgagcaggcgaaccagcagcagccgcagcactcgccgcagcagcagcaccaccagctccgccgccgccgccgctcctcctccggcgtcatctcctcgaacgccgacgccggcgacgccgcctgctgctgctccgcctccttcttcagcggatggtacatcccgccgtagtccctcttcctcggcgacgtcgtcgtctccgccaatatggggaaggcgaagggagaagttgctcgagctgccggcggagccgctctcgtggcggccggaagtcgatggccgccttttgct

SEQ ID NO: 58955 - DNA, 713 bp, Oryza sativa
  unsure (1)..(713): unsure at all n locations
  Clone ID: PAT_MRT4530_60622C.1
gtgcgcgccagccaccgccttctctcctcctcgccgtcctcctcctccgccgccgccgcagcaaccgagagggcgtcgccgccgtcgcccgcagacccggataccgtgcacatgacggatggctgcatccgagtaggtccccgtaccctcctccctcccttcgttcattccctcgcaagatcgtgtctcccgtattctgtgtggaatataggcatataggaggtttctgctgaaaacttttggtaacatgatgttttctgtttgatttggtaagatttgatttaggtaatctgtcgtgatgttctgggaaaatatgcggcctccctttgaggtttttttgggctttgcactgacaaaataccgatatagcgaattngaattcggagtcagctagtcaccgtgtgctatgttaatctgctttggaaatgctacaactggaagcacattttctgaacattttcactangttcagtaagggggcaaaatgcaaaagcctgcatgagaaattcgtttgngtatgacagccacaaaaaatgggtgttggattgctttttttttttctttttctaatgggaaggttatgtttgaagctggggaagtgtaggacaactacaagcaatgaagcataataaagtttgttccaaagcttcagaagtgaaaaactaaaaaacacttattttagacagccgaaacataaatccttgtcagcactt

SEQ ID NO: 58956 - DNA, 135 bp, Oryza sativa
  Clone ID: PAT_MRT4530_60623C.1
aagaatcatggatgtttgtgtacctccaaaatggagcatatacctgttggaactacaataggttaattgcgtgtatcacaaagcctgatagtagaacctgacttattaatattatgcataaacggaaaccttagt

SEQ ID NO: 58957 - DNA, 1081 bp, Oryza sativa
  Clone ID: PAT_MRT4530_60624C.1
ttttttttttttttttttttgggtacattactagtactattatttccctttggccaacatgaagcagctggtaagaacaaaaagaaaaaaagaaagcgaaaataataataataatgctgcttggcagctcaatctgaattcacctcttctcaaacttctccccttccccagtgtacccagccagctcactgccaccccccaccctcctcctctcctctcccctcacctccccggtcacttcaccaccttcttcccccaaccccatgcaaatcagaggtagcagtagtggtagtagtagtagatacaacaatgctatacaccaccggccaattgtcggtttcgtcgtcgccgccgctgccgccaccgccgcagccgccgccgtgtggttcgcgttgccggcggtgtcgcgcagcgccggcggcgacgatagctttgtcggcgcgctctcgggtgattccgccggcagcgcggccggcgggggcgccgacgcgacggcgacgatggcggagtcgctgcggctgaacatttccttcgggaggagcaccttggagacggcgaacacggcgacggggttctggtcgaacaccgtgcgtgtgatggtcgcctgcacgacgccggtgtcgatggcgacggagccgttggcgcgtgtgatgttgagggtgaagcgcccggcctgggtgaactcggtggcgagcgtgggctggacggggttgacgatggactcgagggagccgagcgggtagtaggagtggaggacgtggaagcggagtacgacggcctttcgctcggcggggagggactggaggcggtcgccggcagggaggccggcgaaggcgtcgtcggtgggggcgaacaccgtgatgccggcgccgcgctcgtcggcctcgaactcgtccgccacgccggaggcctccagcatggacgccgccacgttgaaggcccgcgcgtcggcgaggaccttggtgatgttgacggcggcggggggccgcgactccgacgccgcgaggtcgaacccggacggcacgatgaggccgtccacggcgagcacgctcccgttgtacggcacggcggtgatggcgcc

SEQ ID NO: 58958 - DNA, 342 bp, Oryza sativa
  Clone ID: PAT_MRT4530_60625C.1
gttaattttgcccttctcccagttagattattgcattggggagagtatttccccaacgtgtaagggaagtattatgagcttagcaaatgtagtacttgaagtaaaaaaaaaagcctaacaatcagcttgaagcaaaaaaaaaaaaaaaaaaaaaaaaaaaaaaagggcaaacaaaaaaaaagaacaaaagaattaataacacatgcatgcaaaaaaaaaaaatattaaatagagtaacaataaaattaattaaattgtcctaaattttggggggggctgttctgggaaaaccaaggtatttacccatcttagtcgcctctaaactctttttttgggggcacc

SEQ ID NO: 58959 - DNA, 154 bp, Oryza sativa
  Clone ID: PAT_MRT4530_60626C.1
aatcatttcaagaacagctcgtgcttagatcgctctctcgcttgctgttcttccaatccactcctcttgtttgtggcaaagatctgggttctttttttttctttttttgccgggtttttttggagaggttttgcgagcatggagggtctaaggg

SEQ ID NO: 58960 - DNA, 417 bp, Oryza sativa
  unsure (1)..(417): unsure at all n locations
  Clone ID: PAT_MRT4530_60627C.1
tgcaagcaacggctgtttcatcttctgacgagatcacatccatgcaaacgcaagcaattaattaatcccctaatcccccaaatcctcatctccaaatccctcctcgtctcgtcctccaccgtaataatctctgaccaaatcgccaaatcatccgcccagaaagccgccgatcgatctcgtcggagagggcgcgcgaccaatctcgaccgatcgatcgatgatgcctccgaagccggttgcggaggacgtcgccgacgagcagccggagccgccggacgaggaccccgacgtcgccgaggccgaccccaccggccgttaccttcggtacagggaggatcatcggatcaggatcctccaagcagtntncaaggcattttatgcggttgattgcattgaggttgcattgggcaaagttgg

SEQ ID NO: 58961 - DNA, 831 bp, Oryza sativa
  Clone ID: PAT_MRT4530_60628C.1
atggcgctgccggtgccggacgacgccttcgccgagatcctcggccgcctgccgcccaagagcctcgccgtcgcgaggtgcgtctgcaagccatggcgcgagctcgtcgacagccgcgggctgctgctccggcgcctcctgccgcgctcggtggacggcgtcctcttcaactacgtcggccaccgccgcccgcacctcctctccctccgccgcccctcctcctcgtcgtcgtcttcggtgccggcgtcgtgcggcggcggcagggtcgacggcgacctcaccgcctccgtgcccgccggcgaccgcgcatggtgggccgtcgtggaccaccgcgacggcctcctcctctgcgacgtctactggggcagccgcctcttcgtctgcaacccggcgacgcggcggtgggcgacgctgccgcagccgccgccggagcgcgagcccgccgccgcgtgcgccggcggcaagtacctcgcgttcgatccggccgtgtcgccgcactacgaggtgctcttgatccccgccttgccggagaaggcggcggaggatgccgtcgacggcgatgaggccgccgccgcctatctgtcgatggagtggccgccgtcgccgtacaaggtggaggtgttctcgtcggagacggggcggtgggaggagagggtgttcgtccgggaagaagaaggcgaggcggcggcggcgacgacggtggaggacatgaaatcatgggagtatgttttcgcgcggccacgtcaagggtacagcgtgttctggaaaggagcactgtacgtgcattctggaggtcattttgttacaaggtccctctgttttatattataa

SEQ ID NO: 58962 - DNA, 684 bp, Oryza sativa
  Clone ID: PAT_MRT4530_60629C.1
ttagattcccgacgtggcaatacctcatattgccgattggtccgctgggctctcctcccgccgggaccgggccgccgccgccggatccggggggaggacggccgcccgccgctgctgcatatagtatgtctctgtatatatgtacatatatacatatatatacatatatatacatatatgtatacatacatacatacatatatatacatacatatatatatatatatatacatatatatatacatacgtatgtatatatattctcattcatcctgcactatatataagtatatactgtttattggaacagtatatactgttttgttacaagtatgtgctacttattccttggaacagtatatactgttttcatatatatatatatatatataaaccatgcatatatatgtttcaatacatatatatgcatatatatatatatatatatatatatatatatatatatattatattatatgtatatatggttcagtacatatgtacatgcataatatatatgtatttatacatatatatgttatgcaaatgcatatgtgtgtgtgtgtgtgtgtatatatatatatatatatatatatatatatatatatatatatgaccaaaatatatttacattatagaaaatgtgtacacatgcatatagaaacatatgtagtcatgtattaa

SEQ ID NO: 58963 - DNA, 774 bp, Oryza sativa
  Clone ID: PAT_MRT4530_6062C.1
tcatggagtgcccccgcctccgagtccggcgccgctgaccaccttgccccaatcctcgtcgccgtcatcgccaccgccgtcgtcgctcccgctctcctcgtctgagggaagcgcgaggttgaaccgaggggccgtcctctcgaagcttgagatgatcgcgtcggccgcatcccgaacctgctcccaagtcctcgcctcagtccccagggggaaatcctcgagcgcgcaccacggaaggaaaccgaggtcacaaggagcttgatgactcatgaggacaagctccaccgcagcccgcgccaaggaaaccgacgacgacttcacagcatcgccgacctccttctccagcctctccaggtccgccgccatctcgtccagccgaagtgcgagcgccggcctggtgggcgagagcttcttgtcccggcgcatggagatgcccacacggcgtcctgcgtgctccagccattcgatggcatcgtagagttggccgggcccggtgtcgttggtgaggcggagggccgcgatctccccagcctggtcctgtaccaggcgccccagattggcaagagtatcttgggccgcggtgagttggctgaccaactcggcgtcgccgggctgcccgcgcgctgccagttccttctccctggcccccagctcggacaccctcgccgccatcgccgcgcgttcagtacgggcgctttccagatggcgggtctcacgcctagcaacggcctcctcacacttggtgagctgctcgcctagccggcgcgccgccat

SEQ ID NO: 58964 - DNA, 2235 bp, Oryza sativa
  Clone ID: PAT_MRT4530_60630C.1
atggagtgcaacagagatgatgcaattcgatcaaaggagattgctgaaaggaagttcaatgagaatgatatcgctggtgcgaagaggtttgccttgaaagcaaagactcttttcgactcgcttgaaggtattgataatatgatttctgccttggatatccacataagggcacagacgaagattgaaggggagaatgatttgtatggaatattagatatatcggcctctgatgacgatgaaaagatcaagaagcagtacaggaagttggccttacaaactcatcctgacaagaataaattttctggtgctgaaagtgccttcaagctcatccaagatgcttgggatgttctgtctgataaggacaagaagagatcatatgatcagaagaggtttggtggttcctcaagagtatatcagaatggctttgcggaaaatgctaatgccactcctggttccactatgtcaagtatgaatggtttcttctggcaaaattctggtaggcacccttcttatgcaacagacacattttggacatactgtgattcttgtcaaatgagttttcagtactccagggaatacgtcaaccgaaatctggcgtgtagtttctgccaaacagaatttgttgctgttgaaactccacccccaactgctccagtttactataatgtgaccaatttaatggacactagcagtaatatggatgacccacaaggaacaggagtaccttatagcagcaacaagatttttgatcctgtgctgcagccagttttcggttctgtaggcggtgcacacgcctctagatatccagttcaacagacatgcaagcctgctagaaaggaggaggtagctgaagttaatgtagccagaagagaagaggcaactaaaaggaaacatgaacaagcaagttcttcccttggatcatcaagttcagctgcaaaagtcatccacagaagaaaagcagtgacaaaggaaatggaagctgaaaagaggagatgcatcaacaacaaaagtaaagtttctggtcaaaagaacaacacaaataaagttgttgggaagtcaacaagttctgccgctgatggtgattcaggtccacagatgcatccagcaaaaagaaaatctgcttcttccattggaacatcaggaacaaagaggcgtaaaatgccttctgatcataattctggtaatgctaggactagctttggaaaagtgttcctgcagttggagacagagatcccaggcttaaaaatggagaagatgaaacttcaaattcgggacaaactagaagaattcaaaagtagaagggccaacgtagaaaataaaggaaacgtgcatgtgagtttagaaaaaaagaagacatggaagtggaagaaacctgcaacactctttgtatacacaaggagaaaccgtaaggaacacaggaaagagcctggagtggatgccattggtgctggttcttctcacaagcatttggatggcaaatatagttgcttggatcaagtgccatcttctgatgaaggatcttgtgtaatgccggtccccgaagcagatttctacacttttggtgatcatcctgaaacttcttttcaaaatggccaaatatgggctgcatatgatgaagaagatggtatgccacgctactatgctttgattcagaaggtgctctcgagacatccttttaaagttagactggctttcctcaaagcaaaggactgcagtgaatttgtaacttcaaattggatctcatatggttactccaagacctgtggtgatttcatagttggtacgccaaaaaatactgaccaactgaatacattttctcatgttgtcacatgggagaaaggcccaggtggtatcatcagaatttttcccaggaaaggtgatatctgggccctatatcagaactggtctcctgaatggaatacatgtacacctgatgataccatatacaagtatgacttggtccaggttcttgatagctacaacccaagtgcaggcatttctgtcatgcctatagtgaaggttccggggttcgtttcagtgtttacgccccttcttgacccaacgaaaagcaggacaattccgaaggaggagatgctgcgattttctcaccaggtgccattccatgtccttactggagaagaagctaagaattctcccaagggatgctatgaattggatcctggttctactccgaaggaacttcttcaagttgttccacaatctgacggcgtataa

SEQ ID NO: 58965 - DNA, 470 bp, Oryza sativa
  Clone ID: PAT_MRT4530_60631C.1
acgatcccagtagtcctctaatccatcttggctacgggcaattatattcacgacggctttcttatctaacactgactggcgaacgaacaatgtgcgcacaacgtttggatcggcatgatgaacagaatattcacgccataagtcatagcctctctcttctaaacacccctttaattattttttcgggtgtctggaccaatcggcgaacaggcgcttctccgattgggcatttgccgcattggagagcgctcgaccttgagcagagcagagcagcactgtgcctcggtggctcggtacgttggccttacgaaccagcgacagtaatcgctactgaacacatccaagtcttttctacacactttgtcctcacttgtgcgcactcgggaacaatttcccgatcggtcacctatcccgaaattactccacgccgcactcgggaacaatttcccgatcggtcacctatgcacgct

SEQ ID NO: 58966 - DNA, 577 bp, Oryza sativa
  Clone ID: PAT_MRT4530_60632C.1
gcacgagggagaggaagagaaaatcttccgattccggcgaggaggggatggggtcggcgctgctgccgacgctgcggcggaagccggaggtggacgccgccatccgcgacacgctcgacaaggtcctcgtcctccgcttcggccgcgccgacgacgccgcctgcctccacctcgacgacatcctcgctaaatcttcttgggacatatcaaggtttgcgacggtagcattggtcgatatggattctgaggagatgcaagtctacattgactatttcgatatcactttggttccagctaccatttttttcttcaatgcccaacacatgaagatggactcagggacacctgatcacacaaaatggattggctctttcagcagcaagcaagatttcattgatgtagttgaggcaatatttaggggtgcgatgaaaggtaaactgattgtttcttgcccacttccaccagagaggatacccaaattccagctccttttcaaggatgtttgagcaaggaaagtgctcatcacatgcgcatgctaaaagagtgtcttggtcatgatgacagaactatatgaagc

SEQ ID NO: 58967 - DNA, 474 bp, Oryza sativa
  Clone ID: PAT_MRT4530_60633C.1
gcaaaggccagtgtaaagaatttaatatcatatatactttcagaaacatcaaattaatcttacaatgcaaaacgaaaactgtttcggataactacagtttattgggctttaacgtatgcctgattgacagtgagtgaggcagttaatggtttacccatcaatatttggcgtgtggctatccgaggtactttgcttccttaaaaacaagttttgttgtattgctttctttcgtatcgtcggcgaacgtagattgaggtcatttacagtttgtaggggcgcatgtgaaatggatgatgaccctcgaagtaagtctgcctctacttctaacctttgtactttttctaacaaaccacgcagggccttctcccactgtcctgaatttgtagtcctaggtgatctccctccaggagaattacctcccattgaaggactaatatctcccatcccggctccatgtgtaggagtcaaacgact

SEQ ID NO: 58968 - DNA, 257 bp, Oryza sativa
  unsure (1)..(257): unsure at all n locations
  Clone ID: PAT_MRT4530_60634C.1
acgcgtgggcggacgcgtggggtgtcggcnaaagtggcggcgccgacgacggttgaagaggtgggcaaccgggccgacgacgatgacgaggcggcggtgctggctcccacgctctcctgcgcggatctggtgcggggggataggccgccggcgggatgaatgcgcgtagaggcggcggggtggccggattcggcccctcctgtccggatccggcgtgggangccgaactctgaccccagcagcgaggcggcgggggc

SEQ ID NO: 58969 - DNA, 129 bp, Oryza sativa
  unsure (1)..(129): unsure at all n locations
  Clone ID: PAT_MRT4530_60635C.1
taatgnagcctgcgagcgtccagtcttggtacggtggattgattttgcaccaagacgggaccaccgcctgaagcctcggacattcttgtatctgtagaatcgaaggggcaccttaagtggcttattact

SEQ ID NO: 58970 - DNA, 490 bp, Oryza sativa
  unsure (1)..(490): unsure at all n locations
  Clone ID: PAT_MRT4530_60636C.1
cggacgcgtggggtgccagtcaccaacccattccggcggcggcgggggaggagaccgagatggggatggagaacccgccgctccggtggccgccggggttccgcttcagcccgaccgacgaggagctcgtcctctacttcctcaagcgccggatcgccaccggccgccccaccccctacatcgccgacgtcgacgtctacaagtcccacccctcccacctccctgagaggtcggcgctgcggacgggggacaagcagtggttcttcttcagccggatggaccgcaagtaccccaacggctcgcgggcgagccgcaccaccggcgagggctactggaaggccaccgggaaggaccgctccatctgcaacggcggnggcggcggcaccgcctcggggcgcgcggtggggagcaagaagaccctcgtgtaccaccacggccgcgccccgcgcggggagcgctcggactgtgtcatgcacgagtacaccctcct

SEQ ID NO: 58971 - DNA, 1519 bp, Oryza sativa
  unsure (1)..(1519): unsure at all n locations
  Clone ID: PAT_MRT4530_60637C.1
gatagaaggatctgtattagtgtgtgtacgcacggtccccaattcaatacatatagaattgttttttgaacgaaagtacgtatagaattcatccataggagtaggcatgcatatgctgatatgccaggtttacagatagatcacttgacaattaccgtgcatatgccatctatacaatagttaatttgcagcaatgagacgtcgccctggctgtatttactctgtaaattctttgatctcaaattaatcatatgtataatttaggtatgatgtgtgatcagttgttcttgtcgtcgaccgccgacgacgacccgtcggcgccggggggacacggcggcttcgggaatggtataggccaccagggctgtggcggccctggcttcggcttcggcccgggcttcggcggcttcggcttcggcttcggccctggctttggaggcttcggcttcggcttcggccctggcttgggaggcttcggcttcggcccaggcttgggaggcttaggcttcggtccaggcttgggttttggtgggctcggcttgggcttgggcttgggcccaggcttcgggccgtggtggaagcatttatcgccgcacttcttgtagcactgcaccttcgcggagctatatggtggcagcttcgcgcaccagtcgtcgacgcacttgtggtagcaaacggccggcacgtccttgaagcagttgccgaggcactgcttcttgcacttgtagtcatcgtcgagcccgacggcggcggcgccggcggtggcgttggccttggcattggccttgtcgtcgtcgtcgtcgtcgtggcggtgacagcacttgctcatgcaggaggagtagcacttccagtccgtgtggccgtcgtcgacgtccgccgctgcagcctcgccggagcttgatgagctcaggctgccgtcaggaggccaggacttggcaccaaggtagcctcggccatgcgcgctcgccgcggcgaagagcggcgccgccgccacggcgaggaggaggacggcgaccgccgccgctctggaggccatcgccgcagctagctagctgctcgctcggtgaggtggggcgggggtctggtccgggaaccgtgccttgttgctctgacgcgaccggagctgaatgcatcataaatctgtcaagaaccaaatttttgaacgagacaggcaataatgtcccgatgcgtcttttaangacgagccaagcgagccgaccagataaaaattaacaggagactaataatactacattgtcagccttcatccagcctctaaaacatcctaaactggctgagaatcgggaatgctcaactagtcagaagacgcattacaagacgcccagcgcttttgttcttgcgccgtatccaggacatgcggaccctttgggtttaccaagcaagcagaggagcatgcaattcttaatcgcccagcctttgtacattacacgccagccctccccgcgctgtagattccaacccacccatgatcttcttccggggacccatcagaataccc

SEQ ID NO: 58972 - DNA, 682 bp, Oryza sativa
  Clone ID: PAT_MRT4530_60638C.1
ttttgtttttttttttttttttttttttttttttttttttttttttttttttttggtttttgaaccaaaggacctttagaattcatccataggagtaggcatgcatatgctgatatgccaggtttacagatagatcacttgacaattaccgggcatatgccatttatacaatagttaatttgaaccccaagaacatcggcacagctccaatactgtgtaccgcatgaacaatttgattaatcagctggtcctgagtcctgacaagcaagccgaccagataaaaattaacaggagactaataatattacattgtcaaccttcatccagcctctaaaacatcctaaactggctgagaatgcggaatgctcaactagtcagaagacgcattacaagacgcccagcgcttttgttcttgcgccgtatccaggacatgcggacactttgggtttaccaagcaagcagaggagcatacaattcctaatcgcccagcctttctacattacacgccagccctccctacgctctcgattccaaggcaagcatgatcttcttccggggacccatcggaatgcccaaagctttaagatcactgtcagtcatgtgtcttagggctgccatgtcaacctcttctgcctggaaggtaatcgagtacttctcaagtccaagagatttaggaaaatat

SEQ ID NO: 58973 - DNA, 2364 bp, Oryza sativa
  Clone ID: PAT_MRT4530_60639C.1
tttttttttttttttttttttttttaaacaccaacctcatgaacccttttcattagtttttcgcttcttgttcatagacatttccaataaaaggccctagcaaatctctctcaagtcaagatgacactatagtaagctacaacttgataaacatacagaaagcagcaggtagaacaagtgcttagtacttagtgcttacacccttacccccacacctttctcttcactgatctgagcaaggatcaaaccaaaaatgatgtgcagccagctgatcaacttatcttttctgtacaacctaacccagagctaaattaaaagaagtaaacaagaaccctatgaaacagaatatctcctgttcctaagaggtgggaggggagagggcttcacatctgcaggcttagccgacaatggcgggctctgtgagctacctgacgtctctgaacctttgccattctctccctgccccttgctgctccatatcttgtcaaagatcctcctggaccttgactgcagaaggaagccgccaagctggtccttgaagctgttcctgcctcctcccctgtgctcgctcttccggtgctcgacctctctcgcgcttaggctggtcgcttgcttgttcagcgagtttggatgccttggtatccgtctttcgcaaatgtcactctgatccttcataataggctttgcgcacgtgtgtcctccaccatccgttagagcaagcgcattgctggaacccgccctcagctgttggaagaagaggacctgcaccaccaaccggagcggtaggcggtcgttttgcgtggcgtgcatgcttgcatctgttgaaagcttcttgacatctatcagaccgcagatcttcttcttgtcggctttacttatgtttggatgctccttgagatatgcatcaacagctgagtacaagctgtcatgaacaggcctagctgcttctggaaccgctgttgctagttcaacaaatgtagacaatgaaaggtctggatctgaagctacttcagatagatagccatcaaccagctctcctaaagccaaagtggattcttgttcaaagttaagctcaatcattttgtcatcagatttctcaacaaaaccaccattgtgggacatcgctgttcttgcaacaaatctctgcacaagattatggactaacttaacatcgtgtgcgccatcactgggtgaagcagcaggtagtaagagatccttaaccgaagctttgtgcaactggaaactaatccttctcataagttcttccttcacatgttgcccagctccaaccaatatagcaactttcaacagtttcaagagaaacctgcaagaacaacctgatgtcttatctgacggcaataaccatattatagtctcgaccaaacattggttccttctcatgtaatcctccgcgaccaaagcatcataagaatctggcagccatctgacagcatatgctttaagggcttcccctatcaattcaggtgacattctccccttggatttgacagcaaccatcactctcttgtagaggtcaacatcgagctcgcataagtcctcaacccaccagtctttaggagctattgatgttcttcctgttgattcaactatttcagtacagctcattcctttcctgctgtgactgtatgaccaggttacattagctggatccacagatgtctttgaagcaatagcatctatacatctgccgatgaccttcagctcttcggaccaaggtaatagtgcttttgtgctctggagaacaatgatagagtctttccagctacggaggatgctagaatttatgaagacatcgattttgaatatcaagtttcccttgtccacatcttcagtcatttcaaggtactctgctgcacatcttgctgcaacaacattgtgaggactgagggtaacaaccatcccatagcagaacttagcgcatatttcgaacgctgtcactcctccaggaaagccatctatgtggacctcatcagtcccctcctcggtggccttaataactaacctctgaagcttgctgctcttggacagaaggggaaacttatgtaagtaaaatttgacttcgctgacatgcacaatgacatctgttgcgaggtctgagatcacatatctgacgtcggcgccgtcggactggaaggcgtcgggcttggagcccagcttcatgaacttcatcttcttcttcttcgtcctcctcctccctccctctcagagcctcctcctcctactccttcccatgcacgcacaagcagctgagctagctgcctgaagaaagcaacgcagcagcaggaggagaaagagagagagaaagaacagtggcgagtgctgctgctgctgcggcaactatac

SEQ ID NO: 58974 - DNA, 1381 bp, Oryza sativa
  Clone ID: PAT_MRT4530_6063C.1
aaagtcggggcgtaatgacacggaaccaccatgaaccatccaccccatcctcatcgtcttcgccctcgccgccctcttcttcaacctcaacctcttcagcggcatctccgacgtcggcgccatcctcgaccccaaggtccgcgtcatcctctccaaggcgctctcgctcttcctccccgtcatgtcctacctcttctccgaggccaagaacgccggtgccgccgcctccgccgccggcggtagcacgggctcgctcgagctcgagctctcgctgcgggcgcggctgatcctcgtgtggatgctcctcgtcgagctgctccgcaagaaggtggaggagattcggatggaggcatggcacgccggcaccgtcgagcgcgccggccgcgtcgcgtggctcggcagcctcgtcttcttcaacctccgcgccgccggccgcaaggccgtgttcggcatcctgtggactctctgcgccgccaagctggtgcagcggatgacctacaccgaggtcggcaagcgctccttcgcctacggcaagaacgccaagctcgtcatctcctacatggcgcagatgcttcagaacgatgccgaggtcgagctcgagcaccacccccatggctgccatggcggggacgagctcttgaggagatgcaagtatttggtgatgggagaagaaggcctggtgatcgaaccgatcaactccggctacaggatcaccggcgacatcgacgccgtcaccaccgtcggcaagatctggaccctcgccgagagcgaccatctcctcgcgtcgctcgacatggaccatcgcctcaggaggctctgcgtgtcgttcgcgctcttcaagctgctgcgccggagcttcgagcgcctgccgccgatgaccgaggcggagacccgccattgccgggacctcctcttcagaggcctgtacgccggcgccggagacggagacggaggcggagcggaggcgttgttcgaggtgatgagcgatgaggccaacttcgtggccgagtactaccactccgtcgtccccgtggtgctcgcgagccccttcttcctgctcgccaactacgtcctcctcccgctcgtcgtgctcgtgctctgcctcgtcgtcgtcgtgctctgcggcaacggcgacgtgctcttctccctccgaagcatcgagagcgacaactacaccatgtcgtccggcggcgtggcgaccatggcgaggtgcctgctgcgggccgtcgcgacgtcgccggcggcgttcttcacagccatcgacctctccatcacgtcgctcctcttcctcgtgctcgtgtacgaggaggtgtgggagttcgtcgtcttcctcctctccaactggttcatgccggcccaccgtgccgagggtgcggcccag

SEQ ID NO: 58975 - DNA, 424 bp, Oryza sativa
  unsure (1)..(424): unsure at all n locations
  Clone ID: PAT_MRT4530_60640C.1
gaaggagagaagcgaagcgccataagccgtccgatcgagagatccgatggctctggttctttccacctctgttgatgttgccgatgccgccgaggagcgggcgctcgcggcgagggtgactacaacaaggggttacgccgagtaggcggcgtagtcgcagatgaggcggccgacgccgacgatggaagggaagggcgctgcggggatgacgcaggcgaaggacgggtcgtcgtcgtcggcggcgagggaggtgtcgagggtgcccgaccccgtgacgggccactaccggccctccaacttcgccggcggngccgacgccgccgacctccgagccgaccacctcgcccgaagttacgcccgcgcgtgatgcgcgcgacctcgccgtcgtncgaccgacgacgacgccatccatccatatatatct

SEQ ID NO: 58976 - DNA, 381 bp, Oryza sativa
  Clone ID: PAT_MRT4530_60641C.1
atgcaggcgcgggtgcgagtgcgtgacccacgagcaatccgctcacctctccggttccatttgcagcatgcttctcctcttcctctctcctctcctctagaggccctctccttctttgcctcgaggatgcatgagcagatccagaaggtttgccggctggggaggacgaaggagctcgtcggaggacactgcacttatgttgaaggggcgatgagctcgatgaatgacaccggatctggaaactggagcggcaccaccgctgtcaccaccaccgtcttcctcctctcatcgctggcgccatcttccatggctggccatcttccatggcgccatcttcactcccttctacagccatcggattgctgcctgctgtggatctaa

SEQ ID NO: 58977 - DNA, 1488 bp, Oryza sativa
  Clone ID: PAT_MRT4530_60642C.1
atggctactcatcagaggagacaccccagtgtcgccgccgagctggagggcacgctgctcatctccggcgacctcttcccctacttcctcctcgtcgccctcgaggccggcggcccgctccgggccgccgtcctgctcgccgcgtaccccgtcgccgccctcctcggcgtcgccctgcccgacgacgacctcgccgtccgcgtcatgaccttcgtgtccaccgccggcctctccgtcgccgacgtggcggcggtggcgagggccacgctgcccaggttcttcctcgccgacctcagcgacgccgcgttccgggccttcgcgcgccgcgacgccgccgagaggtacgtcgtgacgcggctgccgacggccatggtggagccgttcgtccgggagtacgtcgccgagggagcccgcgtcgtcggggcggagctgcgggtggtcggggggcggttcaccggcgcggcggtgaacggcgaccggagcttgggcgctctgcaagccgttcttgggcgcggccgccgggtcatcgacgtcgggctgtgctccggcgacggcgcggcgaagcggcagccggcgttcatgaagatatgccaggagcgccacgtggtgtccacgccggagaaggcgccggcggcgcctcttccgaggagcgagtacctccggccactgatcttccacgacggccgcctcgtcggccggccggacccgctggcctgcctcgccgtcgcgctctggctcccactcggcgccgccctcgccgtgacacgcatcctcatcgccttcttgccctacagcgtcggcctcctcctcgccgcggccaccggcttccagataagagcgcacctcggcggcgcgccaccgcggtggcgagggggcacgttgtacgcgtgcaaccaccggacgctgctggacccggcggtcctctcgacggtggtgcaccggaaggtgaccgccgtgacgtacagcctctccggcttgtcggagatgatcgcgccgatcccgacggtgcggctgacgcgcgaccgcggcagggacagggtgatcatgcagtccgtgctcgccggcggcgacctcgccgtctgcccggagggcaccacgtgccgggagccgtacctgctccggttcagccccctgttcgcggagatcgccggcgaggtcacgccggtggccgtgcgggccggcggcgccatgttccacggcacgacggttagggggtacaaggggatggactccttcttcttcctcatgaacccggcgccgtggtaccatctgcagctgctcgacccggtgccatcctcttctgccgccgccgacggtgatggcggcggtgacggcggcggcgagtcgagccgcgacgtggcgaaccgcgtgcagcgagcgatcggcgacgccctcggattcgagtgcacggcgctgacgcgcagggacaagtaccggatgatcgccggccacgacggcgtcgacatgcgcggcaacgcccgcctctag

SEQ ID NO: 58978 - DNA, 230 bp, Oryza sativa
  Clone ID: PAT_MRT4530_60643C.1
gatattcggaccaatgtggtaagactcccccctgtctctgcgctcgcacgcagaccccacccagggctgcaaggagatcgaggagacccacagaagccctacccctgatcccatgttgtcccatatcatcggttttctgacaacagtccaatcaagctccaagttaagtgacccctctatcagcaatacaaacccacaaccacttgcgaggtactctcgtcgcacaacta

SEQ ID NO: 58979 - DNA, 1084 bp, Oryza sativa
  Clone ID: PAT_MRT4530_60644C.1
attagagatgcttcataaatgatacatggtgtcaggtctccctccaagaagcctgataactcggaaacacgctatacaggggtcagacgtccgtttaagcgcccagctacaacgacttctacaaccgatcgtcatcgagtacgcgtctacgccatcaagcttcgggttgccgctacgtcgctcccctcgggccgtagtgccgctgctcgtggtccacctccactggttgttggaacgctgagagattccctcctcagtgtggccttactaccggtagagttcttgccgctgcattgacatagagctgctgctgtgttgtcctctcggaccgcagtttcgccgctttcgtcgtcttcctcgccgttcgtgcatcgacaacctcgtcgtctgcactggtcatcgttagccactcagactatctctatatggctaccgacatcgccgtccaggccgttggtcccgctacttcaccttcttcttcgtccaacatggttcatcgccagcgtcgtcgtatcttcctcgactacacttcactcttctccggcaactgcgtgctgctccagcaattctccctttacgccgttctcgcttgtccccgggtctggcaaactcggcgtgatgtctcgtccttcacggttcgactacatcggctcttcagtgtcatctacctcaacgactgccgcaatcgcgtcaccatcatcgtcctgcgcgttctcgcgcaccttggtccacgacgccctcccatgcatccatgaccactctacggcgccccctgcgcaactctgcggctcggctacctcgacatcgactcccgactacggctacatcgaccacggctactctacgcacgggtatctcgaccacggctccctcgcacctttcgctttggctacatcgactacggcacaaagggctatcatccttattgagtactcttgttggtttcttctccagtccaagtgtccgcgctgctcacgcttggactgcggggggatgttagagtatatgtactctatatataccggccccctgaggctcaatacaatgtgtcccatattacgcagtatacctcttctcatatact

SEQ ID NO: 58980 - DNA, 267 bp, Oryza sativa
  Clone ID: PAT_MRT4530_60645C.1
atggacatgcacccgcccgcacagtgcacggtgcacgcaagcatcggcgcgtcatacgggacaccggccgatcagacgagcgggtgggcggcggatgttggctcgcgcgtggtcactggttaccgacaccgtcgaaagatgacgcgcgcgcagggtggtgtgccatgtgcgggggccggggctcgcgagtcgcgactcgggccatgtacggtcgtggacccgtggtgccatgctacggtgaagttccgtgaaaaaaaataccggtaa

SEQ ID NO: 58981 - DNA, 1134 bp, Oryza sativa
  Clone ID: PAT_MRT4530_60646C.1
atggcttcctctccgacgacagatggattaactgagtcagtggccaaaaggaagggctctccttgccaacaagatgatgattgccaagatgacaaacgaataagatcaggtgcagaccttctagaggacattttttggtacattcattccttaatgccacttcgagatgctgctcgtgctgcttgtgtgtctcattcatttttacgatcttggagatgctatccctaccttatgttcagtgaggagctactccgattgcaggagagtgcatttagtgatgatgagagaacgagaaatctcatcagcaaagttaaccacattttacaaaatcactcaggcattggcgtgaagaaactagagcttgttttcttggatagtactgatgtggacttaagttatattgacagttggcttcacaaggctgtcacacgagggattgaagaactcaccctgatactgcctataaacagcaatgcagaatacagcttcccatgttcgcttttatctgatggtaatgatcactctagcattctctgctatgctctcaccaatcttttgtctattgtcccaaatgttgaaaaacttagaatatcatcacaaacacagattgtcagtacacaaactgtaccagggaaatatcttcgcctcaagcacttgcatatatctcttaacaggtccccaaactttgattatctttctcttgtttcttttctcgatgcctctccttcactcgagactttcatcttgcatatatgggacatatacataccactgggtcatatggggcatccttggactcttggagactctgaacagctgaggcagatgccaggacaccgccatgacagtctcaagaaattcgaggtcgtcggttcctgctacgcgaagggcttggtcgagctaacatgtcatatccttgagacgacatcgtcgctcgatcgtattaaactcgacacctgtggttatgttgggctttgtgcttccggcagtggcagatgttacccacattatacagaacaaatcatggaggcctgtaattcagtcttggctatcaggacatacatcatggggaaagttccacctacagtgaagtttgaacttgttgagccttgcagccgttgccctgtacagtag

SEQ ID NO: 58982 - DNA, 640 bp, Oryza sativa
  Clone ID: PAT_MRT4530_60647C.1
atgccgcatgaccatggcgactcctcctcgtcggacgacagacaccggatcatgtcggcgtatgctaacgcgacaaggtggttgttggctccaagcgcggagagagccatcaagagcgtgtccctcagcttcctcatcgcggagccttacctgctgcacgccgtcgcccgcgccgtcgacgacctcctccttgacggcagcaacagcagcctggagagccttgagatggacatgtggaccgatcgggtcgctgccggcgccgcgaccctcgaacagaggcgcctcttcggacaacgcttccagtcactcttcgacgcttacccggccccgttcaggtgcctcaccagcctcaccttgcaaaaccttcggcttcgaggaggacgcgattgctggtctcttcggcagctgcaacatgatgcagctactctcccttggccaatgccaggctgggccgggccgacccaacaaatgttcacatggccgtcacggacagctacatatggaccagttccacggtccaccagcaaagaagcgttcatcccaacaaacccggggcctcatcaacagaacatgaagaagaggggtctacctatgacatgtggacccggtgtttacattgtgcccaccgtcattgacacaa

SEQ ID NO: 58983 - DNA, 249 bp, Oryza sativa
  Clone ID: PAT_MRT4530_60648C.1
agggttcaatagccttccggaatggatagggcagttcatttatctgaaagaaattagcatcttcgattccccaacttgacatctttgccagagagcatatggaacattaccaccttagaattattatatatttatttttgtccaagactggctgaatggtgccaaagggaggatgctaacaagatatctcgcatcccaaagattatgttagatggtgaaatatttataccgggacaagcaatcgatgga

SEQ ID NO: 58984 - DNA, 450 bp, Oryza sativa
  Clone ID: PAT_MRT4530_60649C.1
atggggacgaaggggaaccaggcgtgcgctgccattggatccaaaggctgcgtcctccgcttgtggggtgatggattgggggctctcccacgtggctgtgggagcaacggcgggcggagatggacggggctagagccgagcgtgggggaggtggccgacggcgaggaaggggatagcgaggaggacgaaggctcaccggcggtgagtggcgcggtgctagggtctgaggtggaactcggcagaaggtgggtcgacgtgggtagcggcgggatagggcggagctctggagatcccggatggagatgcgagatcaccgaggggagtggaaaagggggcggcggtggagtggagaaggatgtggcggcggtggcaggtggaggtgatgtggcggagaaggctgatggcgaggagaatgtggcggcggtggcaggtggaggcgcgacgatgtga

SEQ ID NO: 58985 - DNA, 258 bp, Oryza sativa
  Clone ID: PAT_MRT4530_6064C.1
atgggccccacatggcagtgggtgcgggtacgattaggaccacggggggcgtacttgcgctccggtttgagtgggatcggagccgggatctcgtgcaccgccgcggaacaccgcacagcgttcgcgccaccgcggagttcacgagtggggcccagctgcagcctcacgcacgggcacggaaggaggatgcgggtgcgggtgggggtgggggccccacctccgtacggttacccgtcgcgctccgtccgttaccgctga

SEQ ID NO: 58986 - DNA, 342 bp, Oryza sativa
  Clone ID: PAT_MRT4530_60650C.1
tttcccccctttttacaccccaacaacactaggattgctttttattatttggattggaaaataaaccaaccattccctgaccaaaaattccatcctatctatatgacattggcctgaggcaggccaaaaaaaaaaatgctagtaaaatccctctaaatccatcactcccaatggaacaccattccgtgcctgactaatctttgcattgctctttatttctgccctttgcaagaacccaccccaaacatccagtagggccaaggcccaatcctccccttgtatgcatatggcccttgagatgccctctaaaaccctgccattttttttgcaaaaaacctctcc

SEQ ID NO: 58987 - DNA, 414 bp, Oryza sativa
  Clone ID: PAT_MRT4530_60651C.1
atggtggcggcggcgcttgctagcgaagacgagcagggagacgagcatctaccagcggagaggagccgggcttcagcggcggaagtacctcgtagcggactcgagggggcggccggacaagacgagggacacgacgtggacgacgttcttcatgccgacgggcttgcagtggccaccgccattgtggagcctactactggggcggtcagcgaggctgagatggagcttgcggccggccaggaggtgcccgggtcgatggcaaggcagagggagcggacggagccgatgagctcccaggcgtcgcgaagctcatcgtcgaaggcatggaaggcgatgctgcccacaaagcctccggtgctccccgcctgtcaccagccgctctcctcccccgccaaccgcacccaccgcgcatag

SEQ ID NO: 58988 - DNA, 1111 bp, Oryza sativa
  Clone ID: PAT_MRT4530_60652C.1
cccacgcgtccgcccacgcgtccggccgccgccaccgccgaggggcgtggatgatcaattcccttccctcacgctgtcgccgccgttgccgacgaggaacagcaggaggcggcacagggttgggagatttggttcgacggagatggatggcggcgagctcgtactagcgccgtccgacgaccacgacggctgcagccaccaggagccgccagtggccgatgcgtccgggagctcccggtgccgtcgcgacatgttcatcgggagagatggcggccggggcgtggagttccggcgccgggcgacgacggtggatggtcctgaggaggacgccgccgtcgatgtcaaggtgatcacgtcggacgcggacataatcatcgacctcggcgctgacgacgacgacgacacgccggagagggtgctccggcctgtcgtgaccaggcccgcgaggagggagctcgactggtgcgagccggcggaggtgaagcacgtcgacctcgccgagctgatgacaccgagagcgagctctgcctctgcctcctcggagaagagcatcagcacgggcaagccgaggcgttcgtccgtgtcgtctcgacgccgcctcaagacgcgcaccaacagcccgcgcctcgccgcgtgcaggaaaggcaagccgacggcgcgggcaacgacgacgacgccgacgcagccgccgctcgcgcacagcttcgcggtggtgaagacgtcgtcggacccgaggagggacttcctcgagtccatggaggagatgatcgccgagaacggcatccgcgacgccggcgacctggaggacctcctcgcctgctacctctccctcaactccggcgagtaccatgacctcatcgtcgaggtgttcgagcaggtctggaccggcctcgccgctgcctgtggcgtcatgccatgagaaaacgccaagagttcatcgctcaccaaagcctccatgctcattgattgctgcttggtgaatcgctgaatcttgccatgaattattatagtagagtagtttagttctttgatttctagtagatgatggttaattagcagcaagaaattagccataaagcaatagaaataaaatcgatcgaaaagtttggtt

SEQ ID NO: 58989 - DNA, 472 bp, Oryza sativa
  unsure (1)..(472): unsure at all n locations
  Clone ID: PAT_MRT4530_60653C.1
naaggggnnnttgannactgattgccgttgcctaaggctgaattcggctcggtacccctctcgccttcctaccaacgggccaacgccgatcacccacgccgacacctcgccgtctagcgcgacgacgatgtcgtgctcggcctcctctccccctctcccgccactgctctgctccactctgccgacggccgcgcactcgcccacttgctccggtcactcgccaccgcccgctccactccgcctgccgcgcccttgcccgttgcccctcgctgcgggcactttgctccacttcgccggccgccgccgccgcctcgttctgccgccgccgctacctcctccgccgcgctcgctgcctctgccatcgccgaccacccgtccccgcgccgtcctcgccgtgtgcgcagcgcgagccgcgagagagaaaagagcgagagagagagaggagagagaggaatatgttcgttttggcaag

SEQ ID NO: 58990 - DNA, 342 bp, Oryza sativa
  Clone ID: PAT_MRT4530_60654C.1
atggcgaggccgaggctgcgccgcaccaccacctgccgctctggagctcgcggcggccatggcgaggccgaggctgcgccagcaagcttcctcaccggcgaagtagcgccgcaacgcgaccttggcgtggcggagctcgagtgcctccgctacagtgcggacccgccgccgccatcatccaccaccaccacctgccgctcccggccttcgacgccaataccggcgggcacagccactacgcaccgctactggtcctgccggcacctcctccgccgccgccgccggctgctacttccactcgtcctcctctgcgaccacaaagtggtgtcgccggagctgtag

SEQ ID NO: 58991 - DNA, 373 bp, Oryza sativa
  Clone ID: PAT_MRT4530_60655C.1
gaaggacatttttttttggttttgtgttattttttgttttgggggttttttttgcaccaaaaagggctttttgtttgggtaatatccaaaaaaaagcccgtactcaaggggggtgacggacatgggtggaaaatttttaggtagctttttttgggccacggtcaccccgagaaggggcaaaacggtcgagaggaacccccactaggaataaagcttgtttgcctgaccgggcgggccgatcaaactgggggggacacacatgctgggctggggattgaacaaccttaattagctcatttttttattgcagaatacgcacagatacttctaatttggggtgcagagattcgaaggggtccaaaaattgacccac

SEQ ID NO: 58992 - DNA, 714 bp, Oryza sativa
  Clone ID: PAT_MRT4530_60656C.1
ccggccgggatcttctctcaacccctcgccgcctcccgacctcgacgacgacgacgaccgacgacgaggtgcggctgaatttgctggaggattgattgattggccatgtcgacggcggtgaaggcgttcctgaacagccccgtcggccccaagaccacccatttctgggggcccgttgctaactggggcttcgtcctcgcgggtttggttgacatgaacaaacctcctgaaatgatatctggcaatatgacagcagccatgtgcgtgtattcaggactctttatgagatttgcctggatggtacaaccacggaactatttacttttagcatgccatgcttccaatgaatcggttcagctctatcagatgtctcggtgggctagggcacaggggtatttggagaaaaaggagccagaggctcagcagtaaaaaaaagacgcaaagcgcagcatttagcttctcaataagaaaacttgtctcatgtccatcaatgctgagtctgtaacacaatataatctcagatcatatcttccttgtgtgccataagtgcttgcccctaatgttatttgatgtcaaacctgttccagaaaaatcagaatcgcacataatttctggttgtttttctgaaaacctttatgatttcctgtttgtaaaaactcatcacattgtgttgaaaatgattggttccaaatgtaatgcctgctgtttgacgaa

SEQ ID NO: 58993 - DNA, 1353 bp, Oryza sativa
  Clone ID: PAT_MRT4530_60657C.1
atggccgcctccgtctccctcgccgtagccgccaccgccgtcgtcgcgctgctgctcgcgctgcccgtagcgctcgccgagatcaagacgacgccgatcgtcgccgactcgcggccggtcatcctgttcgaggagttcgggttcaagcctggcggcgtgtcggccgtgtccgtccgcggggtgtcatggcgggtggccgaggggtcgaagctccaggccgccgaccctggcctaatggggttcatcctcatctcaaactccctcttctttcagatcaacaacgagtccgactacgccgaggccaccggcggcgccttctgcccgctcaccagcaagtacgtgctgccgctgttccggctcaaggacatcgcccccgacggcaacggcaagggctccgtcaccatcgacgacgacgaccagtacacggtgctgttcagcagctgccaggacggcgtcgaggtgaccatggaggtgcgcaccgagatgtacaacgtgcggcccggcggcggccgcggcgtcagggagtacctccccgtcgggctcctcccgctgccgggcatcttcgcggcggcgtcggcggtgtacttcgtgttcctgggcgcgtgggcgtgggcgtgcgccaggcaccgcgcgacggcggggcagatccacgcggtgatgggggcgctgctgctgttcaaggcgctgaagctggcgtgcgcggcggaggacgcgtggtacgtggagcgcacggggacgccgcacgggtgggacgtggcgttctacgtgttcggcttcttcaagggcgtcctgctcttcaccgtcatcgtgctcatcggcaccggctggtccttcctgaagccgtacctccaggagcgggagaagaaggtgctgatgatcgtgatcccgctccaggtggtggagaacatcgcgtcagcggtgatcggggagacggggccggcggggagggactggctggcgtggaaccagatcttcctcctcgtcgacgtcatctgctgctgcgccgtcttcttccccatcatctggtccatccgcaacctgcgcgaggcgtccaagaccgacggcaaggcggccaggaacctcaagaagctcaccctcttcaagcagttctacctcgtcgtcgtcggctacctctacttcacgcggatcgccgtctcggccttcgccgccgtgctcagctacaggtaccagtgggtggtcaccgtcgccatggaggcggccagcctggccttctacatcttcgtcttctacaacttcaagccggtggagaacaacccgtacctgtacgtcggcgaagacgaggaggaggaggccagcgggcagcttgagatggagggcactttcgagatataa

SEQ ID NO: 58994 - DNA, 474 bp, Oryza sativa
  Clone ID: PAT_MRT4530_60658C.1
cacgccgcgacgcaggtatggctcctgatgtagttgccctcctttttttttttttttggggaaatgtgtattctggggggcaacaaattgcatcaatacaacttacaaattacaaaaatgaaaaggtgaagatataagcagaagaaaaatagaatgaaatgaaggaattatatataatcggataataatacttggacgacatcaatgtcggataacaacgtataaataggcgatcaaaacgggatatatatatgtatgtgtttaccggcgcgaggacccaaacgcacgtaggggaaataataagcggacataaaccccataaatggtcccctattaacccatggccatcatatggtgcctgccctgggggtgccccaggcaacgggcccggggaccccactaaaaaccccccgggggccggtttgtccccaagaaaccgccttggctcccgccccgccccgggggccggggggg

SEQ ID NO: 58995 - DNA, 263 bp, Oryza sativa
  unsure (1)..(263): unsure at all n locations
  Clone ID: PAT_MRT4530_60659C.1
cccacgcgtccgcccacgcgtccgggccgctctttttttttttttttgttggcccctgcgcggggttccacttggcggccgagggtagccgagtgncnnnnnctgtcgcttaacccccaacccgccgtccctagcttcagtggcaagcagccccgnnttgaccgtccctgtcttcctacccgcgacgcctgcgcccgccgccgtgccgcccctctccgcccccccctttatcgcccgtctggcgacgcctgtgacctccagcc

SEQ ID NO: 58996 - DNA, 547 bp, Oryza sativa
  unsure (1)..(547): unsure at all n locations
  Clone ID: PAT_MRT4530_6065C.1
cgcctgcgcataccgtccgaattcccggtcgccccgcgtccgggaatgaggtggccgcgataggccatacccgtttgaggagggcaagctgtttgctttaactgtaacagctggtttggatggctaccatgtcaatgttgatgggagacatgttgcgtcgttcccttaccgcactggttacagtctcgaggatgcaacaggcttgtctttgaagggagaccttgatatcgagtcgattttagcgggacatttgcccaattcacatcctagtttcgctcctcagagatacctggaaatgtctgaacagtggaaggcaccaccactgccaactgaacctgttgagcttttcattggcattctttcagcagccaatcattttgctgagcgtatggctgttcggaagtcatggatgattgacacgagaaaatcatctaatgtcgttgccaggttctttgtcgctctgaatggggaaaaagagatcaatgaagaactgaaaaaggaggcanaattctttagtgacattgttataatgcctttcatgggatag

SEQ ID NO: 58997 - DNA, 257 bp, Oryza sativa
  Clone ID: PAT_MRT4530_60660C.1
cggcgagccgaggacaacagcgcacggggggcgaagccaacaggaggtgtagaggggggccgaggacgacagcgggtgggggcggagccagctggtgcagtgccgacagcggtttcggctttggcagccacacggcggtgggtcttcgtcgccggaggagaggagcagcaggcgacgcgcgagacgagggcgacgagaccgggggtgcagccttaccttccatcgactcgctggagggcggtgggtcggcgcagtag

SEQ ID NO: 58998 - DNA, 657 bp, Oryza sativa
  unsure (1)..(657): unsure at all n locations
  Clone ID: PAT_MRT4530_60661C.1
ccggccggaagttctgaagtgctctctctctctctctctctcgatgtttccccttcggccttctcgtcggccccttctctcctccaccatcctgctcagcgtggtacggttcccactatatgaccgccccgactccgacggacactcccctccctgtggcgcacgctcctctctgcgtcccccgcgtccgcgcggatgctctccgagccgacgtccgacgtgctcatctcagatcaagtgagcctagatcagcatgtgctcctgctatccccgaggagcacctccgacgtaagggtgtaatatattcaccccataggactgcatctcgacagagtgatgaagagaatgcgacaaggtgttataatcatgctttctgtcaacccaaaagggtgagaacccattaatgatatgataattgtactgcatatccactaggctactgcctgctctcttcctgtgttagttgtgaatcagaagattcatacatggacttttgatgtaaagtgtggatgactatcatggtgcatacactaaaaataaaaaccattgnataaaatatcaatcattatgcagacttgttaaaaaaaaaaaaaaaaaatttgcaggcctcaagctccatgttttgtatcctttagatgagacattgtgagcacttga

SEQ ID NO: 58999 - DNA, 196 bp, Oryza sativa
  Clone ID: PAT_MRT4530_60662C.1
ttgaaaagaagagaaaaataaaaaggagccgcattataagtaggtagtggtggtggtggaggaggaggacagccaatcgaggtagccatggcgatgcaggcctccttctccgcctcgatgctccctcatctggctcaacgtatgggaagcgatcgcgcggtgttggtggctccatcttcgccttctccttagagcc

SEQ ID NO: 59000 - DNA, 249 bp, Oryza sativa
  Clone ID: PAT_MRT4530_60663C.1
gcaggccgacgttggaaggtagtctccagagaatccgccccccttttctttttttaatgtgtagtttttaagagggggggcggacccccccccactaaaaatacgccgcggcacgctctagaaagagcgggaaccactctttacataaactatggagcctaaacccgcaccacgtcaactggcaatccacaactgggcaaaccgaaaacaccttgttttacgcaatcaaattatacccctaagaggcgg

SEQ ID NO: 59001 - DNA, 2253 bp, Oryza sativa
  Clone ID: PAT_MRT4530_60664C.1
cctagtgctagatgcacgggggcggcctctcccgccgcatccccctataccttctccctcgaccccgccccagccgaactcgtcgccgctgcaccccttgccgccgcgccggcgtcgcccgtcagccctccccttcatccccgccttctcctacccccgtacgtagattcgcggctttccgatccaggcttcgaatcgaatcgagccatgaaggagcggcacgtgcgcgttgagagagatgcggggtgctgttcgagacgcccgcggggttcgccctcttcaaggtgctcgaagaggggaagcacgacaaggtcgaggatttatggaaggagttcacgacgtctgactcggcgagaaaaggtggttgagctgaaggctttcaacaagtttgaggaacacctctgatgccctttctggtgcaacacctcattgttgacagcatgcctaccaagggttggcgctagttcgtgcagaagcactgactggaagaaagattagctgagaatgactctaaacttggaaatgctataaaggagaagctgaaaattgactgccttcataatagtgctgtgatggagctcatgagatggttcagaaaccagctcactgaacttatctctggtttgggtgcacaagaccttggtccaatgagccttggcttgtcccacaggttgtctagatataagctgaagttcagtcctgaaaaggttgatactatgatcattcaggccattggcttattggatgatcttgacaaggagcttaacacttatgccatgagggttcgtgaatggtatgggtggcactttccagagctcactaaaattgtagctgataacatacagtacgcaaaagttgtgaagatgatgggtgatcggactaacgcagaaagccttgatttctctgagatactttcagatgatgaggttgaagcacagctaaaagaggcggcagtaatatccatgggaacagaagttagtgaacttgacttgctaaatatcagggagctgtgtgatcaggtgttggctctttctgagtacagagcccagctgtttgattatctgagaagcaggatgaacactatcgcaccaaatttgactgcacttgttggcgaattggttggtgctcgacttattgcacatggcggcagtttggtaaatctggccaagcagcctggcagcacaattcagatacttggtgcagagaaggctttgttcagagctctaaagacaaagcatgctacgccaaagtatggtctcatctaccatgcatccttaattggtcaagcagctccaaagcacaaggggaagatttctcgttctcttgctgcaaaaactgctcttgccattcggtatgatgcccttggtgatggtgaagataactccattggtcttgagagtcgagtcaagcttgagacacggcttcgggttcttgagggtaaagaacttggcaggtctgcaggttctactaagggaaagcccaagatagaagtgtatgaaaaggaccggaagaagggtgctggggctttaatcactcctgccaagacatacaatcctgcggctgatctggtacttggacaatccactgaagaaacaccaaagaagcctgaaggtgcttcaaagaagaggaaacatcaagaggcggagcctgcaggtgcagaggaaaccattcaagaggatggtgaccaagagggtcagaagaaaaagaagaaaaagaagtccaaagatagcgaggattctcctgtggccgatgctgatggcggcaagaaaaagaaaaagaagtccaaggagagcgaggagccacctgtagccaccgctgaaggtgagaagaaggagaagaagaaaaagaagaaatctgattcacaagatgccaaggatgttgccatggaaaccgaggagtctggcaagaaagagaagaagaaaaagaagaaacaccatagcgatgaatgaaggatacactggagaaggacatgttatcttgagtagcatagggttgaagaatcgctgctctgtaaaatgcaacattccgagtttttccatgccggttagccgtaggataggcatcacggttggacttgcgtttactcatggaacttgtattgaagcgcctactaaattttggaatagggaaacatatgatgcttttgctcgttctatgtgaactgaaatttttggtccttttggccgggagggtcttgttcgtgcaatattgcaatggctgttaaggtctttcaggttaaaaaaaaaaaaaaaa

SEQ ID NO: 59002 - DNA, 1764 bp, Oryza sativa
  Clone ID: PAT_MRT4530_60665C.1
atggagaggaagccgtcggagtatcgccgtcaactcctgcgtgcgcgctccgtggaaacctcttgccgccgtgtcgccgtcgcctactacgcgctccgaagaaaccctaatcgtcgtcgtcggaggcactcactcttgactccaattagggaaatattttttggttctacttctgttgcgttttgtgtggtattgttgggaagtaagggggagtttgaggttaacgtgagccagagtgatacgacgaggtatattgcaacatgtgcttcagctgattgcaaatggaggatttatgctaagaaattgagatattttagtacatttacgataacgaacattggtccaatatcatcagcaaacaagatgagtggaagtatggaaagtatactggacaaattgcttctgcggttggtgtggatcgtcataattggctattaccagttgcatatggagtgtttgattaagaagaattacgataattgggagtggtttatgcaaaggctgagaaatgcaattagaacacctcctgggtcagtaatacatacagattcaaacaaaaacaaaggtttccaatcagctataagtgatgtatttggtgagcatgttgaatacagggaatgttttagacatttattgttgaatttcaacaagaaatttaggggtggcatttttgactcttacatgtggcatgcagcttggacatatgttagacacaagtatgatgtgatagctcaagcatgccctgctacctttgaacatctagagacataccatcctcatatttggacaagaagcaagttttcccctactagtaagattgagtatgtttgtaacaacctaactgagagctttaatagttggatcaaaggcattaaagaattgccacttgttgatctagcaaacaagttgaggcaaatgattatgaagcaaatgtcaaaaagaaaggtggttgctaacagtcttacagaaaatatcttgccaagtgtggtgagagctctaaatgccaaaagtaggggtttaaattacactattataagaagtggtgaccatggtgctgaagtcacaacttttgataagaagaccaagaaggaattgacatttggggtttgccttgacaaaaataagtgtacctgtaggcagtggcaaatatctgggaaaccatgcttgcatgccataacttttatttgctcaattagaggagcaaagattgaagactatgctgatgagtgcttctcagttgctaaatttaaaatggcctatgagacttcaataacagcaattggagataaaagtcagtggccaaaggtggatccaggatttaagatgcttccacccaagcttggaaggagtgctggtagacctaagacaacaaggatcccaaatagtggtgagggttctagtaaaaagggaagaaagcagtgtgcagatgccatgaatttggccatcatgcaaaaggttgcaaagcacctaagtttgatcctggatgcatggtaccaccaccacaaccaccaaaagctaagaaaagggtccaactgtagtttctcaaacttcacaagaacatgttacttcctctcagccccttcgtgtgaatgcgccaattactcaggaaggttctacatctactactcaaccaattccacgatgcactcctccaagacaagcaaaacaaagggctgcattgagggctgcaacattaagagctactgtatcaagggggaagagaaacctcctggatactgtcatcaatccttaagttttaagtga

SEQ ID NO: 59003 - DNA, 354 bp, Oryza sativa
  Clone ID: PAT_MRT4530_60666C.1
atgacgtcattgccgacggcggctcggcaccacttgcttgccggcgaacgacggcgcggcggcgcaaacgaacaacacctataggtagagggtgaagtggcgaactcaccgagggctcggacgatgacggacgacaaacgacggcgacggcggcgagggcgaggcagcgaagatgttcgggtcgacgacaacggcgatgctccggcgatctttggtggaaacggagtacgggacgaggacggcgacgacttggtgatcccgacggcgaccttcccgagcgacgacgacgaccagagcggcggcggcgcacggctggacttgcggcggcgacgacggcgcacgggctgacgtgga

SEQ ID NO: 59004 - DNA, 1340 bp, Oryza sativa
  Clone ID: PAT_MRT4530_60667C.1
cgggctgcaggaattcggcacgaggctttcactaactttgaacttgtgtataaaattttggtatgtgatgttaacctgcaattttgaagtaggactacccaaggaaaaattcctagctacaccactgtctgccatggcgcctgccggcttcttcgacctcagcatcctccccgacgactccaaatctaccaccaccaacactagcgtagtcgcccgtgcccttgacctcggctactccgcggtcgcgcttgatcaccctcaccgtggcctactcactgactcccatgcacctattgcctcctctctccgggtgtcaccctccgcctccctccaccgccgtcgacatcccttcctacaatacacgcgcatcaccctctccctcgactccgctgccgcctgcgcctccgccctggccccctctgccgctcgcctccttcgcacctatgacatcgtcgccgcgcggccgctcacccaagccgccttcgaccacctctgtcaggccacatttgaccacctcaatattgtctccatcgacttttcccacaagctgtccttccgcctcaagctccccatgctcaagcttgcactgcagaagggcctgcacttggagatcgcctattctcccctcatcgctgatgccgcttcaaggagacaggccatagccgaagccaagctcttggtggagtggactaaaggaaagaatctcatcatatcaagtgctgctcacactgcttctgaaattagaggaccctatgatgccataaacttatcttcttatttgcttggcctttctacccaacgagccaaagctgctctatccgtcaactgcaggtcactggtttccaaggctctgaggaaaaagcacttctacaaggaaaccattagaatcgacaggctgttaccaaataggcagttgaattcagcagacttcaagcttgctgactggattagttgggatcctatgcctcatgaagtagatctgctatctttggaattgccagcttacaaaggagaaccacaatctcttgatataaatccagaaccttctgccaatgaagatgattgaactactgcatttaccttatgatggtgatgagtccctctttgtcgagcagcaagagcagttaagccatggcaacgaaatcctattcccagttgaaactcaagaagggcctgtgcaagttagcagagtgaagtcttatgacttgtgtattgtctgaagaataggtaaattttgtgtttgttcttgagagcgagaacacattctcttgtaccacattccatccatctcagatattgcattttggttgctacttaaatagttacaaaaaaaaaaaaaa

SEQ ID NO: 59005 - DNA, 345 bp, Oryza sativa
  Clone ID: PAT_MRT4530_60668C.1
gatctccagtaccatcttatcggggttgatccaatacctttcctgcacgttcatctacatgaaatccagcagaggaaccaaagtttcagtgttcagagaaacaagattatggtgcttggcagcagagctcctttgggaaggacatgcataatgtatcaggattacccggtcgctagccttccaagagctctcatgccatggcaaagaggcaaggatcgccaaccgctagaacgggatgtggccctggcgctggcggcagagggacccggggccggggacgcatcctcggcgacagagcagccggatcctctcggtagcggtctacggacgcttcctcagcagtag

SEQ ID NO: 59006 - DNA, 1485 bp, Oryza sativa
  Clone ID: PAT_MRT4530_60669C.1
atggtcgccacgcctgtgcggtggccgcgggtgctgactccggcgcacctcgccggcgccatccgccggcagaagagccccctcgacgccgtccatctctacgccgacgcgccgcggcgctacccgcgctcctcctaccgccacaacgacgccgtccactcctcgctcctcgccgcggcctccgcatcctcctccgatctcctcccctccctcctccgccgcatcctcccgtcctccccctccgccgactccctcctcgccgcctccatcccgcacctccctcccgctgccgcagtctccgtcttccgctcctccctcccatcctccctcgccccgtcttggtcacgatccttctccgccctcctccgccgcctcctctccgatggcttgcttcccgaagcggcccgtctctttgcggacttcgcggggaggccggaagtctctctagcgtcagaagacctcacctcgttgatcactggattgtgccgtgcgcggagacctgaactcgctctgcaggtgcttgatgaaatgtctaaccagtgcctcgcaccagagaaggacgcttatcgcgcgatcgtgcctgcgctctgcgatgctggcatgctcgatgaggccacacacgttctctactccatgctgtggcgcgtgtcgcagaagggatgcgacgaagatgttgtggtgtaccgggcattgctggtggcgctctgtgcggctggccgaggtgagcaggcagagattgtgttggataaggtgattaggaaagggttgaggtcctcaggtagccggcgatctctccgtgttcctatgcttgctgggcttagtattgaggatgcccaggaaatcattgatcaggcattggttgttcgaggtgggcgtactgttgcaagctttgaagttatggttattgacctctatgatgagggaagattgaatgaggcagacaatttgtttaaggagatgggcaagaaggggttcaagccaacaatatacatgtatgaggcgaagatcacttctttatgcagggaaggcaggttggatgaggctgtgaaggtgttggaggaggaattacccaagaatgatctcattccgaccgtcacaacatataacttgctaatgaggggactttgcaactcgatgcaatcaatgagggcactcagataccttggaaggatggataaacagcttggttgtgttactcggaaagagacattttcaatcttgatcagcggcttgtgttcagaaagccggttcatcgacgcagcacagattatggagaggatggttaagggtcatcatagacctgaggcaggcgaatttaacaatgtcattgaaggtttatgttctgctggtagaacatatgatgcattgctatggcttgaggagatgatcgaccatggagaaacacctgatgttcatgtttggtcttctttggtttcagcagctttaggattaggagaaggccttacaactgctgctacgcattaa

SEQ ID NO: 59007 - DNA, 495 bp, Oryza sativa
  Clone ID: PAT_MRT4530_6066C.1
atgccgtcgcacagccccctcgcctgccgatcttctcggtggaagaagagaaagtggaggggaaaggggatctcgcgactcccgcgcaggatacgaagcggtcacacggtcaacgaaaaaaagaaacgaagcggtacgcggtggcaattcagagatagtctcacggtgacgaggttgctcagcaaggtggcgaggtatggctcaggaacaaggagatatatccagaatatgcgggtcggcatgatgggatatatggaaatctgcgtcactgaaggagtaagagcgaaggctatcatggtaattcttcaagtgattcgaggcgacggtggagtcaagaggaagaaattacagggagagtggagtctcttgaagacggtgagtctggtgtacgctcgtcgggcggctcgtggtgaagctgcaaaaggaaataatccaagtctggaggacaggtggatcggcatgggagaggatggcggcgtggccatggactcgtag

SEQ ID NO: 59008 - DNA, 1017 bp, Oryza sativa
  Clone ID: PAT_MRT4530_60670C.1
atggaccagggaaaaagacaggttatgcgcaggaccttttccttcggctatgaatgcgacctcaaatcgtacacacatagtacaggcgatacaacggaaaaaagaggaagatccaatgaacgacgccgctgtagtctgtactctgtacatgatgaacagtggcccaattctcggccaatgcagtgcttgctggaaaaaaactcgaaagatggatttcaatcaagtccaaccagctcaagtccgcgcacctcgccttccctccgcgacccgcccctctccctccccgtccttcccaactccgacctctccgtgtccctccccgacctgcataagcttcgccgcaatgagcccgtcacttcgggcatcctccacgtccgcgacctctcattcctccgcccccgcagccacaacggggatgatgatgaggagaccgaggagatgacccgtgagcaggaggagaagtacttgcagtggaggagctccctggtcgagaagctggccgggatcgagctcaacctcgagagggttaagtttcggatgagcgtcgaaatcccgccctccgatgacttcagggcaatgaagaaggaatcctgtgaggaagatagcgaaaaggccagacacaattcttgtccgtggtgtgccatccaggtggtttgcggagacgaggatatcatcgaaagcctccacactggtcacacacactatcatcgaaagctgctaggccaaacaaggccaaacaacgagcgcccgctgcccgccgccgtcgagcccccatccaccgcgtgcctctcccgccgacctccgctagcctctcccgctcgaacggccgctcgtagctggccgcctctcccaccgaaacgggtgctcgtcatcaatggggagaggtgtgatggtgttggtgggttcaagggcgtaaatcggattcggtgtaaaattaagagacctcagatgaacatattctctttggaaacagaaactatcaactggactggcaaaggctccatatttctcgtgcaa

SEQ ID NO: 59009 - DNA, 329 bp, Oryza sativa
  Clone ID: PAT_MRT4530_60671C.1
ggaccttgaggggtcattattttttcaccacaaatatttggttccaaggaaaggggaacactatttttttggggccccaaaaagaaaaaaaggggggtttttttttagggggcaggcgggggggttatagggtaacttagccgggggaaaaaaccaccaagggcaagggggatgtttacattggaaaaagccgggggggttgcccccacccgtttaatggtggcttttgggggggaaggggaaaacctggccagggggggggctttaggggggggaccggggtttttgtaaattaaacaaacaagggggttaaggggggggaccaaaaa

SEQ ID NO: 59010 - DNA, 461 bp, Oryza sativa
  Clone ID: PAT_MRT4530_60672C.1
ataaatccaaactggattttttgtttttagaagggggcaaaaaaaaaaaaaaagaaagcgaaaaaaaaaaggacaaaaagagggcccagaaaaaaaagggaggggccaaaaaaaaaaaggggggtggaaaaaaaggacaagagggaagaggaaaaaaaaaaaagggggggaaaaaaaaccgggggggggggggggaaaaaaaaaaaaaaaaaaaaggaaaagaaaagggggggctgtgaaaaaaagaaaggggggggctaaaggagggggtgtgggaaaggggggggggaattaagcccatactgacctaaagaggaggggggacgacggaggccccggcatggcaaaagggggacaaacccccccggccctgagaaaaggcaaagcctgtggttcccaccccggccatcgaggcggccaaaggggcgtggaaaaacacccccacaaaaaaaaaacccaaa

SEQ ID NO: 59011 - DNA, 162 bp, Oryza sativa
  unsure (1)..(162): unsure at all n locations
  Clone ID: PAT_MRT4530_60673C.1
tcaattanccgccatcacacgcctctgccaatcattaccgcaaactcatcccccgggcgccccaaaccattcatcngcangccggccacaagccaaacatcggcacgcttccccccgctcctccggtccgcccccgcgcaagctcagcacgcccnnttgcaa

SEQ ID NO: 59012 - DNA, 552 bp, Oryza sativa
  Clone ID: PAT_MRT4530_60674C.1
atggcgcggcagctgccccgcacggggtccttctcgggcgtgtggtggaagctcggcgatgacgccgacgagcagcggcgcctcgcggacgaggaagccgccgtcaaagccagcatccagaggcgccacgccaccgcccgcgtcatccggcgcaccattgctttcacctccttcgcccttgaggcagctggattattcgtttatgggttgtggacggcgagaatcaagactgctgcgaataaaacgaagaagaagaagcagctactgctgggtgtgctgttgtccgtgcccgcctttgctgccttgctcttcgccgccattgcccgcttccacaaattcattgacgccaaggaccagcagaagctggatcggcttcgagcagagaggaacaaggccaagatgggccactcgaggggaagccaccacaacatgcaaaagctcctcctcacccacaatacccaggagtctgattcagaatcttgtgcggaagcagcagctaccaagacagcaagccactccagattgagcttccatgtcggagacgatgactga

SEQ ID NO: 59013 - DNA, 1166 bp, Oryza sativa
  Clone ID: PAT_MRT4530_60675C.1
ccctacgaaccaactacccttatcggtatttatattagagaataaatgaattggcttttcctgcttcattgtataagctagttcatatggagtgtgatagaggatatctagggctggaagagttgattgaaaataataatccggtagggatagctgtgtattggctcaaagaacaagaggatttacttttgatgatgagtttatcacaagtgttagtgaaaacattcattgggggccctaacgttaaaaaattttataaaggaacaccactaaaaagaaggtgaatccttcttactccaggatatagatatccgaaacttattggataagcaggatttagcaggaaatatcgacagcatttcttatagaaaagaagcctacttggttgggtgggaggatgaaaagattctcttcctactggaagatggcactgttgaagtctggagagcggaagatatttaagtaaggatgttatgccaggtagcattcggtacaagagtgagacggaggtagctccgtagaagaaagtagttttgcaaagaagcttgttcttcggagtagattggcactacggcactactagcttttgaacagaagaaagagtttgttttctcgtcataagtgccaccaatctcgttcaggcactaaactagtttcggggaggatggatggttgtcccttcttctcaatagaatccgatagacaagaatcgaaagctgcagatttttttattcctcaagtaagtcagttgatgattcaattccatcaaagatggcaagagcggggcatctagatcgattcgtttttaaggttgttataccgaataaaaagaattctgattctctgttgaggcaagctattcatcattaacaggaaagctgtagtttttttgcccgagggattcgaattagcgccgcccgaccgtatttctcctgagttgaaagaaaagacaggaaatctctcttttcagagttatcgtcccaataaaaaaatattcttgtgataggccctgttcccggtaagaaatatagtgaaatcgtcttttccattctttcccccgaccctgctatgaagaaagacgtttatttcttaaaatatcccatatgtggggggaaaccgaggaaggggacagatctatcctgatggtagcaagagtaacaccctac

SEQ ID NO: 59014 - DNA, 573 bp, Oryza sativa
  unsure (1)..(573): unsure at all n locations
  Clone ID: PAT_MRT4530_60676C.1
ccggccgggatcatcaaacaccattactcatctctagttcagacactaattattaacatacacacattaattagtgtgttcttcatcatcgccggcgatcgagcgaaggcgacgatgttttgcttgctgcatcggctgttcccgttcctggttggcacggccgtcggcgtgtacgcggcgcagaattacaaggtccccaacctccggggactcgccgaccgcggcgtcgacgccgccaagcaatacgaggaggcctaccgcaagaagccctcctccggcgccggcgccggcggcgggagcaagaagaggatgaacaaggccgtggggatcgacgacgatgaagagtaactaagttactgatagctagagatgcaagcaggtcgacctacgatgaaccgaacccacttataggtcaaataaataacccgtggattttcgggtcgtggctcggcttgtcacatctatagatgcaagtgaattagtggataatccgcatagntttgcttataaacaggttcgtgggttggtccacttgcattcccaaaaaaaaaaaaaaaaaacccgcggcccccc

SEQ ID NO: 59015 - DNA, 596 bp, Oryza sativa
  Clone ID: PAT_MRT4530_60677C.1
cggcggtggaggcggaggcggcggcgccctccgccagattcgactaggagcgatggccccggtaggaggggaggaggggacggcggcggtgggcggtggtggtagagaaggcggcaacgactccctccaccagatccggccatgagcggcggcccgacaggaggggaggcgggggcggcgccggcgggcggtggcaggtggaaaggtggcggcggcaccctctgccagatccggccgggagtggcggcccagcaggaggataggcaggggcggcggcggtggcgggcagtggtgggagggaaggcggtggcctgacatcagaggcggcggcggcgcctctccaccagatctagccgggaggggaatcggcgacggcctggcggtagtgaatgggagcggaagcgacaacggcggcgtgggtggctgtggcggggggcgggttggcgtggcgggttggtgggtggtgggtgggtgttgtgtggggtgggggtggggtgttcgtcctggggggtcgtttgtggttggagtctggttttttgttttggtggtatggtggttggtgggttggtgggggtgagtgagagaaggaaaaaaag

SEQ ID NO: 59016 - DNA, 128 bp, Oryza sativa
  Clone ID: PAT_MRT4530_60678C.1
atggaccatgatgctcaagaggtgtggacttgctaccgcaggggagaagcagcaatcatcgaggtgcgcagatcggcggactactacaaggaagagctcgagctccacggccatagagtggcgtcagt

SEQ ID NO: 59017 - DNA, 174 bp, Oryza sativa
  Clone ID: PAT_MRT4530_60679C.1
atggcgtcactcaccggcgcacgacggggatggggctcgcggcaacctgacggaggaggggtggacgaggtggacctcgaccacacgaacccaacggcggtagcggtgcggggcggggaggtcgggaacggccgggagtggcccgatttcgccggccaacgtggggaggtggag

SEQ ID NO: 59018 - DNA, 338 bp, Oryza sativa
  Clone ID: PAT_MRT4530_6067C.1
atgtgggccccagacgtcagtggctacaagggttggcacacggtggaccaagtccaccgcggcccaggagacgccgtggacccggaccacagggggtccacgggcggcggagcggcgccagccggccgagaggcggcggcgcgcggccggatggtcgctgacggcgatggccggcaaagtggagatagagggagagggagggatgctcaccgagcggacgggacgatgaggcgaggacgggaaggcagtcggcgacgaggattagcgacggcgctcctcggggaggcggcacggatggcggcccgacggtttccggcgaaggcagagaagcagccgag

SEQ ID NO: 59019 - DNA, 565 bp, Oryza sativa
  Clone ID: PAT_MRT4530_60680C.1
ggacctcaaaggaacttattccaaggaaaaaaccatcactaggttaaagggtttatggaggccttttttaacaaggccgaataccccggcccatcccccggatatgggctttacatactaaacaaaaggccgggcctgaaaatttaattcctggacccaaacagcatgttaaattctaaacgcttttttttttgcagtctgcactgaatagggggcgaactgatctttggggctttgctgatgcagggtcaaattgcctttgaaaaaaacccatatggtacacgattttgcgcacatttttctcataaaaaaaaagaaaactttgattcagggatgaccaccccggcttttttttttccttcattgcagttcgcctaccggagctttgttgacccaaaaaaaggggatgaaatcgtacagtttaacactcaccctaaccttggacggggttggattcaccctcctcatgggggcgggcctcatacgggccaaatagcccatgccccgactccttatttgggtgagggagggaagctcttcccggggttcgggatgtatttccagg

SEQ ID NO: 59020 - DNA, 354 bp, Oryza sativa
  Clone ID: PAT_MRT4530_60681C.1
atggcgagggtggcaactgcggtggacacgggcaacggctgtggatgcgggatgagggcggcagcggcggtggcgtctgtgggcgcgtggacgaggacggcgggacagacgtgggccgccgccacggaggatgaggacaacgggacggacgcgagcgacgatggcggatgcgagcgaggatggcgggacggacgtgagggacgagggacggtgaccgtgggcgaggatggccgccacgcagaggatgaaaacggcaggaccgctggacggacgagagcgatggccacggacatggacggcgaccatggggcgagggtggtgggatggccacgggtgacggtggcgaccgcctag

SEQ ID NO: 59021 - DNA, 3518 bp, Oryza sativa
  unsure (1)..(3518): unsure at all n locations
  Clone ID: PAT_MRT4530_60682C.1
ctcccccgactccacacctcctctctntctctctcgctcgctcgctctcctctcctccctngngcgcgcggccggcgagcggaggagatcggcaggtgcgcggacggcgtcgtctcctcccccgactccgcngcagcctcccaccctccctgtgccgcctcctcgcgcgcnctgccgcgccggaagcaggtttggagttggggggcgacgtggcaggcctgcttgctcctctaaccgaattgaaggaaatggcagggcaaagatctgattcgcagtcagatgaatcgttcgaatacatgttgcttgagagggaccctgatctttaccgtacagtcttctcgggcccgagccagataagtccgtggattgacccgagcgtgctgactttgcagcaccggatagggagaggtccatttggggatgtttggattgcaacccaccatcagaggacagaggatcatgatcggtaccatgaggtcgctgtgaagatgttgcatccaattagagaggaccaactgcaagccttctcagtgaggtttgacgagatctttagcaaatgccaaggtctaagcaatgtgtgcttcctacatggcatctcaacacagaatggaaggatttgtatagcaatgaagttttacgaaggatccattggagataagatggcccggcttaaaggtggaaggatccctttatcagatgttttaagatatggtgctgatttggcccgtggcattatagacctgcactcaagaggaatattgattctaaatcttaagccctgtaattttctccttgatgaacatgaccatgctgtgctgggtgattttggaattccgtccttgctgtttgggctctcactgcctaatccagatcttatccaacgacttggaactccaaattacatggccccagaacaatggcaaccaagcattagagggccaattagctatgagacagactcatggggttttgcctggagcatccttgagatgttgagtggcattcaaccatggcgtggcaaatcaccagatgaggtttatcagttggttgtcctgaagaaagaaaaaccaatttttccatacaatttgcctccagcaatagagaatgtcctttctggatgctttgaatatgactttagagaccgcccccagatgactgatattttagatgcatttgagagtgcaaaagatgtagattacgaaaatactgaccagggaaattctgaaaatctaaggatggtcagtccagccctgccaagccgcactaactggtcattcttcaaggacaagttgcaagtgggagacaaggttcgctcgagaaagcttaaaaacacttgtagtccaacaaccatggaagtccctgatggaaccatagttggaatggaggataatggagagcgtgatggctacattcttgtaaggatccatggtttacatgatcctttgaaggttcgctcttcaacagtggaaagggtaacctatggtttcgctgctggagactgggtacggcttagggaggatgagaagaagcgatctcaggttggaattcttcatagcattgaccgtagtggtactgtttatgtaggtctgattggagtggacaccctctggaagggtgaatactctgaccttcaaatggctgaagcctactgtgttgggcagtttgtgcggctgaaagccaatatttcaagcccacagtttgaatggcagcgaaagagaggtggaggactggctacaggccgtatttcgcagatactaccaaatggatgccttttcataaaatttccaggcaaatttaaccttggtgaagtatgcagttgcttggcagatccctctgaggttgaggtggtgagctttgacaagtgtgaggggatcgtgaagaagtacgagcacctcgaggatttccattgggcggtcaggccgctgttcattgctgtaggtttcttcaccgctctgaagctaggcatctttgttgggaagggcattgctcggccaagaagtcgaaaggttgccagcgtctctgatcagagtgatcatcagcaactacagcagcaagaagtgcaaaacaatgccaatgcagcatggctccctccaactgtggcaaacatgctgtttagagacggtcctacgctttctggataaaatgaaaatcaaaaccagtgcaagatggagagtttcagaactactggataatgcaacgcccaagcaaatcgtagttcatacttagacctgaaacttgtcttgccacaagacctgtaaatatttccaccttcactctactatcatctccatgttcacaaaaacatgttctgtgcttatgtctgtaaattgtaggcttgcagtccaaatcctgatactgtcttttgcttttgtcattacactgcaatctctcagtatccctggattttctgttcccgatccatcaatttgcagttgcatctgcaacgtgatgaacggcatgcgaatatggatgaaaattgccataaacgcttgtgaggatgaggagcaactgccagatgcatcaagtgaaggaccacctgatccatccactggagcttgattcaaccgttctaacaccagcgacctcctcttgcgcaacttcagagaaaacgtggacgcctccaatatgacggggacctggctattagtctgtgccaccttatgcacatgtaaaaaaccaaccatatcctgatatccagtgaggagttttgctaactctttgtcctcatctggaattgctttgattgacagaagtgtgtccgccaggtgctgccatctcttacaaaaggagcttgataaaactgtatttggaaatgttataacagcaactgcattagatgcacgaaccatggccttcagcgatctgataaatgagaccatgtcccagtctttccttctcaaagtatccgcattgtggtgcacatagtgattgtatagcaatccgtccagcatgcgcatttccaccatcttttctcggaagtttggacaagaatgtggaacaacggtcctggaggacaccaagagtgtctccttcttgagtgctctgtgttcagcatgagaagtcttctcttctccaaagtatttcttgtactgccaagctatcctcaaagcctcgtcacttgttcggccatcgctacttgttccagcccccatccctctttgtcgtccatcctcctttgaagatgcaacagcaggtaatgtaccaaggaacaagcggggttccttcataggtcctgcgaagagcagcggttgtttgtgcacaacaccctgcgccatgaagctccgaagcagtaggaggtggtgaggcgcatcagagtcctccatgatcattacaactgatccaataagaaaacccccacctagaatcctgtcgaggtcggggatgcccgaggagacgaaggcggcgccattaggaccaagcttgactcctgcggcggtggatgaggacgccacatgaggtgccgctgctcgagagaagctgctccggccgacggtctggcctccggcggcggcggccat

SEQ ID NO: 59022 - DNA, 387 bp, Oryza sativa
  Clone ID: PAT_MRT4530_60683C.1
atggggctggacgcggtgggctcgagggggacggcggcgagcagacggacgcgcggcggcgggatgcgcggcggctggagggggctagacgcggcaagctcgagggggacggtggagggcggacggacgcgcggcggtggcggcggcgggggtggctggatgcatggcggctggacgcgcgacgcgggcggccggctagatgcacgacggcggcggcggcaggcggccaattggatgggcgacggcaacaacggcgacgatgacagcgggctggataggcgacggcggcggccggtgaccgactggatgcacgacggcggcggtggcctcgattggcgacgacgacgctggatgggcatggacgacgaagaaaggacacctcttttt

SEQ ID NO: 59023 - DNA, 377 bp, Oryza sativa
  unsure (1)..(377): unsure at all n locations
  Clone ID: PAT_MRT4530_60684C.1
cggtaccggcccattcccgggttcgnacccacgnncgtccggcccacgacgtcccgcgccacgcggtcgcgcatggaaaatggagataaaaaaaaacaaaaaaaaaaaaaaaaaaaaaaaaacaaaaaggggagggctggtgatagatgatcaccagcttacatgctcgggctggccaagcaaccgaaagttccgatagaatgggcgaggtggactagggggtctatttttttttgcgcgggcttgctggtaaaactcttttttttcccgatctttaacctgtattagagtggccgtgtttttccacgtgctgtagtggctaatccgcgcggtgcgcccgtttttgcgcttggtcgccctccctttttggggcttgg

SEQ ID NO: 59024 - DNA, 342 bp, Oryza sativa
  unsure (1)..(342): unsure at all n locations
  Clone ID: PAT_MRT4530_60685C.1
gcgtccgctcagcgnccggtttccctcctggggtcggtttcgnggttagtgtatggattagtgggttgagatggcggagccggatggcgagtaccgctgcttcgtcggcggcatcgactgggccaccgacnaccgctccctcgaggccgactgctacacctacggctagatcatcaactacaagatcatcaacgacagggagacggggaggtcatgtgggattggcttcgtcacctagtccatggagcaggcgatgcgcgacgtcatcgagggcatgaacggcagggagctcgacagccgcaacatgaccgaaaatgagggctaatgctgccgatgcggtgg

SEQ ID NO: 59025 - DNA, 2350 bp, Oryza sativa
  Clone ID: PAT_MRT4530_60686C.1
ccacgcgtccggcacggacacggtgggccggagcaaaacacagaccgttggatacgaaatggacggcccgaacgagacccaggatataatacgcagcgcagaagaaaatcaaacggaccaacacgaaaaccctcctcctccgcccaaccccattccttctcacccactctcttctcccgccgccgccgccggaggaggcggctcctcgtcgtcggcctcgacgaccatggcacggatcgtgtcgcgcgccctcccgttcgcctcgcgctcgccgcagctcggcgcggcgctgatacgctcggcgccgatgcgctgcccgcccctccccgccgcggcgcccaccgcctcgctgctctcctggcgcgggttcacgccctcctcagagccctcgcgctcggcgccgccgccaccgccgctgccgatgccgcccttcgcggggttcctcgccggcatccgaagcttccgcaggggtaggcgcggccagtcggcggcgaggcgtgcgcagccccaggaccccatcccttcaccccctcccgcgccgaaggagagcgagatcgagctctacgcgcgaatcggcatcgacgatgacacgcccgaagaccccgaagtgctgaacattgtagaaattctaaaattaaatgttccgatggcgatgaaaattgcactagatgggcttctggattccaactacaaaacacgagacacttcaataagtgatgtcgggaggtatgataaggttgaagtttctgtgttgctatgcaatgacaacttcatccagaaccttaacaaagaatggagaggtgaagacagctgtattgaaatgctctcaatgtcacaatacattcctgatcttgatgttcctattctaatgttaggtgatattgtaatctcagttgagacagctgcaaggcaggctgaggagcgaggtcatacacttcttgatgaagtgcggatactagcggttcgtggaattctacgtcttctgggttttgatcaccaaacaagtcatgagtctgcagttgaaatggagaaggaggagcagctcattttgaagagtctaaggtggaaagggaaaaatcttgctaagagtgttcttgattcgggcaagcgtcatacagaaacatcggatggtacactgctcaacagtaaaagtcaagttacagcaaggaatgcagaagctctgagggaagcaaggtcaaggggagtaaacatagttattgccacagggaaggcacggccggctgtcattgatgctctcaatatggttgacttgtctggaagaactggaattgtctcagaatcatctcctggcatatttcttcagggcctcttggtttatggtttgcaaggaagagaaatttataaaaggaatttagatcaagaagtatgcagagaggcattgttatattctttggagcagaaggtaccattagtagcatttagccaggaccgatgcttctctatgtatgatgatcctttggttgattctctccattatgtgtatcatgaacctaaggctgaaatagtctcgtctattgatcagcttttaggaacagctgagatacagaaagtgctcttccttgaaactcctgagggaatttcttctgcattgaggccattctgggaaaaggcaatagaaggaagggcccgtgtggttcaagcacagcctgatatgcttgaacttgtacctcctgcaacttcaaaaggcaatggggtgaagattcttttggaccacctttgcattagtccggatgaggtaatggctatcggggatggagaaaatgacatagaaatgctacagctagcatcattgggtgttgcgcttgcaaatgggtctgagaaaaccaaagcagtggcaaatataattggtgccactaatgatgaagatggagtcgcacaggctatttacgactatgctttctaacagctgctaactctaaggcgtattgggataggattatctactctttggttctccccagtgccctggattcaccatataacaagacttgatcaccatctatccacaagataatactgggatgtgatctgaagccctgttggagtcaaaacattttgaactattaggcttcggttcattttttggtttggcaaacattcatgaccagccatgctacaatttgtgtgtctggaatatttatagaattgaattccttttgttttcatctttgatgaccaaaggactcccttaacgttaagctgttcttcttcttcttcttttaaccaaggcaattggatgtactgcagacatatgctttaaatttcgacagaaggctgttcatcatccccagacagtgcaatgaaaaatttcattgtagtatttgctaac

SEQ ID NO: 59026 - DNA, 477 bp, Oryza sativa
  unsure (1)..(477): unsure at all n locations
  Clone ID: PAT_MRT4530_60687C.1
tcactgatcactactgacgatataaaagagcccgaaaatctgcgaatcggagaagagatcccgcacggacacggtgggccggagcaaaacacagaccgttggatacgaaatggacggcccgaacgagacccaggatgtaatacgcagcgcaaaaccctnnnnnaggngccaacgagcaaaaccccccaaatgggggagaaccgatttcagttcaaccaatgtttttgcccgcgcccggcgcggaggagagggttcctcggaagtgggctcgacgaacccattggtcaaaacccggggggggaaaagaagaagggacgtgtcgcgcgccctcccgttcgcctcgcgctcgccgcagctcggcgcggcgctgatacgctcggcgccgatgcgctgcccgcccctccccgacggggagcccaccgcctcgctgctctcctggcgcgggttcacgccctcctcagagccctcgcgctcggg

SEQ ID NO: 59027 - DNA, 321 bp, Oryza sativa
  Clone ID: PAT_MRT4530_60688C.1
ggcggtttcatcctctattcggtagagagggcaccgcccgataacacacttatatttaaggcaggtgtttctcgttaaactggtggagaaatcatctttggtcggtcgaccagatttcacaatagtcccggttgtattaaaaaccgggactaaaaacatctttagtcccggtttaaaaactctaaggtacttttcaatctttagtaccggttggtgttaccaaccgggactaaagatctatttgtagtcccggttgataacaccaaccggaaaaaaagatcgccatacgctttactcccggttggtgtcactaaccgggac

SEQ ID NO: 59028 - DNA, 879 bp, Oryza sativa
  Clone ID: PAT_MRT4530_60689C.1
atggatgcatctcaccggaggaggccgattgtgaagagtatagatggactggcacatgccctggggaagatttggtgcccgatcaagggagtcagctgcaaggatctgggagaaaatcattttctcttcacgtttcatcaggcatcggggaagaggcgtgcacttgaggatggcccttggatgtttaacaaagatctagtggtgatgatagatcttgatgagaccaagctgatagaggatatgatcttcgcctttgtcccgatctgggtaagggccatgaaattacctctaggactgatgaccaaggagacgggtatggcgatcggcagggaggttggagaattcatgacgatggatttagaggaggatggatcagctgtgggccaattccttcgcatcaagatccggatagatatcaggaaacctctcatgagaggcgtgaccttgtttgtgggtgcagatgaaaggccgctatggtgcccgctggtgtatgaatttcttcctgacttctgttatatctgtggcatcgtgggtcatacggagaagttgtgtgagaaaaagctcgcagagggggaggcccctttgtttaataaaagcctccgtttcattcctgaacgaaaaatatgggagggtggaagcagtgataaaactagcggcagtcgattccaagtgcaaaggaaatcgggtgccagcagttgtaaaggtagtgacgctccttcctggcaaaaggagattacagatggctcgaaaggaaaggagaaaggcacgcagggtgaggatgaagtaactagccctttgaagaagggctttccagctgagaggtcagatcgaccaaagaaatcattgtttcatccaaaaagggggctgctgtggaggcca

SEQ ID NO: 59029 - DNA, 611 bp, Oryza sativa
  Clone ID: PAT_MRT4530_6068C.1
ggagagagagaactagtctcgagttttttttttttttttttttttcctcactcataaaataatgcctcctgccttttccaaataaatagattagttttaatctcgccacaccaacaagattgactctggtattctcttagaaaataaatttctcctagactgctctacccacaaaatttactacaatcttctctcattgaaataagttagtccctgactattagagtaaaatatttaccaacaaatcgatatagccaaaataaattacaaccacatttttgtctagtaaaaaactacagacatgtttacaaagattcagggacacagatacattgattctacaattaacaaaagtagactcgctattcctattgcatcggcagaggacaaatagtagccgatgatgaagcctgcaccggcaaccttagaagttctgatgggcaggacttgttggcagccacagcagattagctacaggtagaaatcgatggagaaggccaatgacggttggcggcagctagctcgtgcacaagcgatccccatcaagagagggatctgaaaaaaacaatgaaccacaggggcttagaatgcgcacaacaatgaaccatgat

SEQ ID NO: 59030 - DNA, 177 bp, Oryza sativa
  Clone ID: PAT_MRT4530_60690C.1
atgacgacggttgagagtggggccaacaagcggcgcgtgacgtcaactctcctgaaactgatgaagatggcacaaatggaggtttgcatcgacggcgcactaggggcggcggcgaccgtcatcggaaggaagattcagacagaaaatgcagggctcacagcagatagcagcggatag

SEQ ID NO: 59031 - DNA, 882 bp, Oryza sativa
  Clone ID: PAT_MRT4530_60691C.1
atgcgtccccagagctatgcatttcttggccttgttcttctcctcttctccctgcttcctcttgctccatgctctgctgcaaatctaaataatgatactctcctggctggccaagcgctcgccgtcggtgacaagctcatctcgaacaacggcaagttcaccctcggcttcttccagccagacgcaggcaccaatgttgtgctccctggtgccaagtttggttggaacaagatcactggcctgaaccgtcaatgcatctcaaagaagagcttgatagatccaggtcttggctcatacagtgttgaactagacactaatggtaccaagggggtgatcctcatgctccgcaaccctcctaaagtgtattggtatggtctaacatcaccaactcttataccagagctcagatccctgctagcaatggatccacggacgagaggtttgatcatccctacatatgttgataacagccaagaggagtactacatgtacactttatccaacgaatcgccttcttcgttcctctcactggacatgtctggtcagatcatgctcaatgtatggcatggtttactgcggtactggctctacaggaagagaggcggcgacgatggcggagggaggaaggagcagcatgcctggcccggttcttggcagtgggtgtggctcgagaggtcgtcggcttcggcgcggcagctagggcgcggcggcgggtcgcggaggcgcaagagcgggagggcgatcgcctccgtcggtagcggcggcggtggtgctggggcgcggaggcgcaagagcgggagggcgcttttttccgccgccggtggtggcggtggtggtgggctggacagcgctggcatcgagctgcattcgatctatgaatga

SEQ ID NO: 59032 - DNA, 360 bp, Oryza sativa
  Clone ID: PAT_MRT4530_60692C.1
atgtgctcattgagccttggtgctaaatcggctgaacgatttgctgtcttaacggcgcctactgaattggccgcggaggctgttgccttggtggcgtttgctgaactagttgcacaacttgttgctggattggttgtacaacctgctgaatcaggagtgtctgttgaatcggctgctgctgtattggatcaacagcatattgaggcggcagaaacgtggcagcaacctgatcctgcatcagccgattcgcaacctgcccactatgctgtggctgctctctcattaacaaccctcaccagctggcctggtgccaatgctgacggagcaggtaagggagtcgatgccagcgccgtcggctga

SEQ ID NO: 59033 - DNA, 180 bp, Oryza sativa
  Clone ID: PAT_MRT4530_60693C.1
atgggggcggtgctgcgatctgggccgtccacgtcacgggccaatctccatgtccaccacgagcacctcaccgtcttcctcctagacggcgaggtggccggcgagtccttcgacatcatcccctccctcaacctcgccacctccgccgactacctcaccgcggtcgacgacgacggctag

SEQ ID NO: 59034 - DNA, 342 bp, Oryza sativa
  Clone ID: PAT_MRT4530_60694C.1
ccacatgattataaccatagatgatgacgagcttggtatacatgaccgtcataataagtcattccatttcacttacaggtgcagacagggggggactttaccacaatattagtattaaacaaaacgacattgccacccattaccctcagacctactattgcataatagtgaaagtaaaaaaaagatcccatgttgacccatcacttgtcatgcggcctgattgtgtgaattaatcaacggaccttataacatgtcccattgtgctgaagtttttacgccatatttagacagactcataacattttatgacttgatagacccactttaacgttgaattatggg

SEQ ID NO: 59035 - DNA, 897 bp, Oryza sativa
  unsure (1)..(897): unsure at all n locations
  Clone ID: PAT_MRT4530_60695C.1
ggttcggactttgaggctgantcngnttgccgttgtgggatttccacccccaggtcgatggggatgtccgagggcgttgctgatgaagaagcaccccccgttaatgatatggctcgcttctctggctcgagggcgttgcggatgaagaagccccatgctctggctcaggctccgctacggggttaccataccgtaggtggaagttctgttattctaaaggaatcagcatctgccttctagacgccgcagacaccgtcgtggtcaattcctcatcggaagtattgcttggtgcttgtgtattttttccgcatagaaataagatgggatggattttttttctccacagattagttttatatgtttctaagaataggaatatgaagtggaaaatactggcatgtgttctgtatgctaataatctaatagagtggatcacggttggttcgagtttgtttgcaaggcaaaccaacattacctacatagatggcaccgtgataatcatggaattgtttcttctcctttttacatgatcctgtaaatgaaaggaaggtactactgatttattggatgatctttcgtgacttgcggctaaaatgatggtgtagttttaatctctgtattcccgtttcatatcatagaaaaaaagaactaatgtggttaaaaggtgagatattgtatttttgttgaatgtttataatctctaataggtttatttttctggttttgaggcttgtgggcctaatataccttgagacagtggcccatggctgataaccggaaatgagtcctgacttactgctgggacttatcgaagatcctgttttgagctaaatatgatttcatttcaggtgcaagttctgtgattctaaaggaatcagcatctgccttctagaggtg

SEQ ID NO: 59036 - DNA, 376 bp, Oryza sativa
  Clone ID: PAT_MRT4530_60696C.1
ctctccctccctctctctccgacaggtgggacccgtgggcccacctgtcatccccaacctccggccagctccaaccgtcggccacgccgtccactccctccgccgatcccgcgcctccccttgtcccaccggcgtggacccgagtccccttcaccttgggaccacataccgccccactccccttttttcccgggggaattgaagccacgccaagccggcacacccggcaaaaagccgccccactccccctggaaatacgcgggtccccggcctcttctggccccttgagctataaaataactccccgggcctccttttcctttttccctttttcccagtcccccattcctttacgagtcttccaccgatcccatgg

SEQ ID NO: 59037 - DNA, 616 bp, Oryza sativa
  Clone ID: PAT_MRT4530_60697C.1
aaaagagatataacatttaataacactgcaggtgccgccaagcatcaggcgatggcactccggttagtatcagaccattccattgtgtaccagtgttctctagagggaacataggaatctctgtaaccattaacttcattgtcggtgatgcagttgctgtgttacaaaacttctctctttgtttgcacatcgttttcttcgtgggtagcaaaatatcatcgcaattcaaggaaggagtgatgcaactaagaagtctagatttatctttcagttttgcactttgataggtgatatgtgccttggcaacacttgcacaaagacatcgctcggtcatccttggaaaacatacttgcatgtgatgtttgtggataactaactggatggcattataaacccactcgagtatctaccaaggaatggatcaattggcctcagcacaacgtattatgttgagtataataaccacgaagcggacgccgacatgagtagttgggtgaaatggcagggctatgatggaataattagtgtcactaaggcatgacattttacaattgataacttcatctatgggagtgattggatcacaggcacgggcactgcattcatacacgtccta

SEQ ID NO: 59038 - DNA, 667 bp, Oryza sativa
  Clone ID: PAT_MRT4530_60698C.1
ggggaacaatagtaaggctgagtacaaccaccgtactcagcaagccacaccaacgatgcagacgtgcaaggggattcaagaatggctttgggcagtcccctcgagcgccgcggtgaatccggcagctggacaaccggacaccccggccgacccaactccattacgcccacccttgccatcggtgcctaggaaagggttgagctatacttcagatcaagcagttacctactcccgcttgtggtaagcactataagtcttccaggcgaggggttgaggtggcgctgacatgagggccccacccgtcagtgactaaaagggggcggtccacggtggaccgagtacacgctcggcacgagaggcagcaccacgtggcgctcacgcgcgcaccgggcccgaagccaccggcagcgggcagcgtggggagcagcggcacacgcgagcgagcggcggcgcacgcggggcggcgaagaagagaaggaggagggggtcctcaccgagggcacggcgacggagggaggcggccagcggagaaggaagagatggaggcggtggcacacgccgacggggtagcgctcgggaaggggccgacaagcggtgggctacattacagagagggagaagaggtgttagggaggaagaggcggcggcatggtcgaccggagaagga

SEQ ID NO: 59039 - DNA, 231 bp, Oryza sativa
  Clone ID: PAT_MRT4530_60699C.1
taaacaaccccactatttgggcgaatgtgggtacctctaggggcgcggcgcgggtagcgacgttctaggtcttgtagagcgagagagcggcgagatcgggagaggaggagctcgttcgaatcggatcgaactctactagcgcgtccggaggaggagctcatctacggtatagtagttgtaacgcggcgccatgcccgataggagagtgtgctcgggattctcaagctgttg

SEQ ID NO: 59040 - DNA, 501 bp, Oryza sativa
  Clone ID: PAT_MRT4530_6069C.1
atggcccagtccagtggcccacttcccacacttacacactcacacaggcgcgagcggggcgcggaagccggcaggctgcaggcggagcggccgcgcagagaagcgctcaggatcagcgggtcaggcggcgtcgcggcgaggagcagccaacagcagcaggataaactagcgtccgcggtcttcacatcgtcctccatatcttcgcatcgccgcgacgccccatcgtgcgacgccgaccaggtgcgccgccgcgacacccctccacctcgacctgtccgcgccggcattcccgtttgcgcggccacctcgacatccctccaccttcgcctggccgcgccacccatcccctgccacccggaggtcagtagctcctcctgcagttcagcatttgggcgacgtccttgggcagtgggcgtcgcggcgcggctcggcggcggcagcggcagcggcgcggcggcggagcaagatgcatcacacggcggtgggatggccgtggagtga

SEQ ID NO: 59041 - DNA, 645 bp, Oryza sativa
  Clone ID: PAT_MRT4530_606C.1
atggcgtccagcgcctcccggttcatcaagtgcgtcacggtgggcgacggcgccgtgggcaagacctgcatgctcatctgctacaccagcaacaagttccccactgactacataccaacggtgttcgacaatttcagcgcaaacgttgttgtggacagcaccacggtgaatctgggcctctgggatactgctgggcaagaggattacaaccggctcaggcctctgagctatcgtggtgctgatgttttcgtgcttgccttctctcttgtgagccgagctagctatgaaaatattatgaagaagtggataccggagctacagcattatgcacccggcgtgcccattgtgttggttggcacaaaattggatctccgtgaagacaagcactacttgttggaccatcctggcatgatacctgttaccacagcacagggtgaagaacttcgaaaacaaataggtgctgcttattacattgagtgcagctcaaagacacaacagaatgtcaaaggtgtgtttgatgctgctatcaaggaacatgttccgtggaaggaaaatgtcatgcttcaaatcctgattgatcgagatgtcccttacatgatgcaatgttctgggtgcaacctcaagctggcaacctttggagtctga

SEQ ID NO: 59042 - DNA, 264 bp, Oryza sativa
  Clone ID: PAT_MRT4530_60700C.1
tacgtgctcatcctcctcctctacaagtccaatgaggctcacgctaccaggaagaagtgcatcagccaagtcgagggtgacagcgataaggcagcgaccggtgttggagtcaagaggatcaaccgggagtgccaacggtgctggaagatcactgaggacgtgatccaggaagcaatgtggaaggttggagggtgtcgcagtaggatgctggtgctaccggaggatagccaccagtgcatgaccgcctgctgcggcgtggagtag

SEQ ID NO: 59043 - DNA, 383 bp, Oryza sativa
  Clone ID: PAT_MRT4530_60701C.1
ttttgtgttttttttaagtccaatgttttgttctttttttttttcattttgttgggaaaaaataacccatttgcatgcgtgaacaaattttttttccattccgaggctttcatattgggggaatggaatttgctggctgaatttcccctaccaaataaaataagggtccctggtagcccgaaattaaacaggggggcgggcaagctgtttgaagttgaggggtttggttaattgggccgggccgtcggggaaggccggggcgcttagcatgggggcccttttgaagggggggacccggccccaaaaggcccacttgtcggggtcggcgcaaagcggggagcccacccgggagtccttctccgggccacaattttccgtttccg

SEQ ID NO: 59044 - DNA, 260 bp, Oryza sativa
  Clone ID: PAT_MRT4530_60702C.1
gaagaattaagatatttttcattcagtaaaaccaagttccttggttcatcaatgttacaaacatagagtacttgtacttgcaaaggccacacgtcgatctgccaaatcgcaagaggaaggaacgcgctctcatcaaaaattggtagagcagttcaggtctacgtacgtacgttccaacaagaggttgccgtgcagtagcccatacactttgcttttagtactatatagtgccacccacaaggtaggaggccggccagcca

SEQ ID NO: 59045 - DNA, 285 bp, Oryza sativa
  Clone ID: PAT_MRT4530_60703C.1
ggacttgtcccttgtcgccggcaaggctcaccggcatgcagctttgtcgcggaagccgaggagcggtgacaaggcgctacacgtcgcggcccctgcttagctggcagcatcacctcggcccctgcaagggaggtgaagctcaaggctgctgccagccagccattgctgtccctgaggacagcaccagcaccaccataggggggagcaacactcagatcttgcagcccatcatggagcagcagatgtccagccaacagatgaaaacattcaacaaggaaccatgca

SEQ ID NO: 59046 - DNA, 414 bp, Oryza sativa
  Clone ID: PAT_MRT4530_60704C.1
atggcacggatgacgagtccccatcatctcacggaccgagggccggtctcccctcgatcccctttctgctgctaccgtacctctcccttctcccgcaagctcctcggcgcactatggcgtatggcggagtggatcatgaaggcgcaagccgacaagctcataccattgcccttgcttctcccggtgccaacaagtggtagatcagggactcggaccgacgagttccatgtagtgaaaacggtgcagagtagtgcgacaagctccacgatgggagggccctcttctcttcccatcccctccctcactggccacaccattctcccatcctcccatttgtcgcgtccaaccgcgagctctgacacctatcccacttcaccttcctccttcctaggtagcggcaagagcacatcctaa

SEQ ID NO: 59047 - DNA, 432 bp, Oryza sativa
  Clone ID: PAT_MRT4530_60705C.1
cacgccaaagacaatattgggtccacaggtagcatatacgaggggccttgcataattttcagagcatgtatagtggtaggatgctttactagttcatacagctcccaaaccatcaaaatgatgtactaatagattacatgaaaacataaatatctgtgattcataagattccctgtactaaatagtcttcggcataatgacctcctttgtaggtacttcctgtggggtgcttaatcttttcatcacatgcgtagcaatttttttcatcataacgctcctttcgcaaaaaacatccattgagcagcacattcttcaaaccaccaagacagttgccatcaataatacagcaggcagtggtcgtatatccactatattgatcgaaaacattgttgattaaagccaattcagcgaagaagagcttctttgaatttg

SEQ ID NO: 59048 - DNA, 203 bp, Oryza sativa
  unsure (1)..(203): unsure at all n locations
  Clone ID: PAT_MRT4530_60706C.1
nnggntgggcgtagaagcnccgaaatgcttcgggaagttctaaataagcatagtcccgtagattcccaaataggtcagccgtttgnactgnctgctgaatccatgagcagtcaagcnacatcctggngntctnaancatcttagtngccagaggnaaagantgcaaaagcgattccnatagtngaggcgaccnaattanggag

SEQ ID NO: 59049 - DNA, 1326 bp, Oryza sativa
  Clone ID: PAT_MRT4530_60707C.1
accagatcaaacgctagggtttcctcgacttcgacttcgtcttcctcctcgagcagagcagcagcagagatgaagctcgcggggctcaagtcggtggacggggcccacgaggagtccatctgggcggcggcgtgggtgcccgcggcggaccaccgccccgcggcgctgctcctgacgggcgccctcgacgagaccgtccgcctctgggcccccgacgacctcgcctccgccgccgcctccccctcgcggggccacgcgctcggggtggtgtcgctcgccgcccaccccgcgggcgccgtcgccgccgccgtctccctcgacagctacgtccgcgtcttcgatgtggactcgggctcctccgtcgccacgctcgaggcccctccctccgaggtatggggcatccagttccaccccaagggtagtgctctggctgcagctggtggtggcagtggatcagtgaagctctgggacacagagaagtggaagccaattaccagccttgctgttccgcgtccagagggagctcgccctgataaaacaggaagcggcaagtttgtcctttcagttgcatggagtcctgatggcaagctcttagcttgtggttccatggatggcaccatcgctgtgtatgacgcagttcgcatgaagttcctccaccaccttgagggccatcacatgccagtgagatcaatggtgttctctccagtggacccgcacgtgctcttcactgcctccgacgattgccacatccacatatacgacgccaaggagaagagcctcattggggccatgtcagggcatgcgagctgggtgctgagcatcgacgtgagcccagacggcatggcggtagcgacaggctccagtgaccgcacggtccggctttgggacatcaacacgagggcgtcggtgcagacgatgagcaaccacaatgatcaggtctgggctgtcgccttccgaccaccgggtgggacaggagtccgcgcaggccggcttgccagcgtgtcagatgacaagagcatcaccctgtacgattactcatagttttaacactgcaacctgcaacttcattgtagtcagctgtttccaacttgcattggaaaaaaaaacctgttgtacaatcctaattaagctcatgagttgcaagtagagtgcgtttatttccagtattggcctcagagttgcaaactcgctccttattgatcatttgcaaaggagctcaagtgtcaggttgaagtaaaaagagcatcaaatctggcccgaataaaaaaaaggaaaaggggcggccgatctagaagaatccaaggcttacagtacgcgtggcatgcg

SEQ ID NO: 59050 - DNA, 128 bp, Oryza sativa
  Clone ID: PAT_MRT4530_60708C.1
atcctaataaaatgggagttggttctattcttaatgatcttgaggttgcggagaccttggttgctagtatgacacttgacgagattgatgatatggaaaagcaacagagcagtgatgatggagaatga

SEQ ID NO: 59051 - DNA, 321 bp, Oryza sativa
  Clone ID: PAT_MRT4530_60709C.1
attagacgagggaaaccaactattcgagcacagcccggaccatgcagacttcagggttcatacacaatcttgaactacatacattcggaacccgcacagttcatgcaggagagcaactttctagagcctgcatgcaaccgagcaagcagcttacaaactcaaagttttaaactaatctaatgggaccggcccacaggttcacgacaactactcaggcaaaatggccgacatgattatcacgcagaacgggccctggtccagacatggctggaacccaccaacaaccagatccggtaccagtccaggaccatagtaaacggt

SEQ ID NO: 59052 - DNA, 112 bp, Oryza sativa
  Clone ID: PAT_MRT4530_6070C.1
agtcttgtaattagtgtatatttaatgctcaagattagtgcgcaaatatttaatgtgacagactaaacttccctatatccaaacaaggcccaaatatggatgaaattaaatg

SEQ ID NO: 59053 - DNA, 600 bp, Oryza sativa
  Clone ID: PAT_MRT4530_60710C.1
atggccggacgcgaggacgccgccgccgccgccgctgccggagtcaccgacgaagccaagctgtgtaatttgatggaacaggaagtttctgaagatgaatatgttcaggttggtggagtgctggaaagaaggaagaggaaagcaaccgtgacacctggcaagctgcagatttctaaaattgagacacctcataagctgcagatttctgaagttcagacgcctcataagctgcagatttctgaagttgagacacctcatcagctgcagatttctgaagttgaaatcaagagcaaagaagttcaagctcttgtgctggctcaggattctcaaaggatctctcaagagaatgagaatctgaggttgcagctcgctctcaagacaaaggagctcgagcatgaagagaatcagaagctcaggttacagttggagctgaagaacaaggacattgaatccctgaaaaagcagaatgatgaactgaaagctgagatcgagtactacaagaagactacaaaaccacccagagttgcaaggcgctgcagatggtgcgaggaatatacgacccacgactaccgtaattgccctcaaagaaggtcttattaa

SEQ ID NO: 59054 - DNA, 246 bp, Oryza sativa
  Clone ID: PAT_MRT4530_60711C.1
atgtggacggcgcagccgcgcagcgctgaatacaaagatctgggcacgtacgcccgggacgagctcggaaaggcaaaatctgatcaaagccatccagcccagccagcgacgcccacatcttcgcggatcgttacatggcgacaacgagtggtggctggctcgcagccggcatacgcgccaaaaaagaggcgttatttttgcgcgcggtacacgacgcccctctgcgtccccgtcgcaccaggctaa

SEQ ID NO: 59055 - DNA, 3549 bp, Oryza sativa
  Clone ID: PAT_MRT4530_60712C.1
atgaagtcaactcaaaggttctggctaagaaacaatgcagcagctgattcagagttagaacgcagttttcatttggggcaaaaagcagtaggcacaatcattggaatatacgaatataagacaacaagagaaagccacagcatgaacagcaagatgatccgcttgtttgctccatgcccaaaattcattccactcttggctgttttcatcatctcatgctctctgccattagcaatcagcgatgacactgatactgatagagaagccctgctctgcttcaagtctcaaatctctgatccaaacggatccttaagctcatggagcaacacttcccagaacttctgcaactggcagggtgtttcatgcaacaacacccagacccaactccgagtcatggcgctcaacgtcagctccaaaggcctcagtggttcaataccaccttgcatcggcaatctgagctccatcgcaagcctcgacttatcaagaaacgcgttccttggaaaaattccaagtgagctcggacgcttgggacaaatcagctacctgaacttgagcatcaactctcttgaaggccgtattccagatgagctgtcctcatgcagcaatctccaggtactcggcttatcgaacaactccctccaaggtgagataccaccaagcttaacccaatgcactcacctccagcaagttatactatacaacaacaagcttgaaggcagtatacccactggatttgggacgcttcctgagctgaaaactttggatctctccaacaacgccctcagaggtgacataccaccattgttgggcagtagcccgtcttttgtatatgttgatcttgggggcaatcagctcacaggaggaatcccagagttcttggcaaatagctcatcccttcaagtgcttaggctcacgcaaaatagtcttacaggggagatccctccagccctcttcaacagctccacattgacaaccatttacctggaccgtaacaacttagttggttccataccacctgttacagcaattgctgcacctattcaataccttagtttagagcagaataaactcacaggagggataccagcctcactgggcaacctttcttccttggttcatgtttctttaaaagcaaataacttggtggggagcatccctgagagcctaagtaagatcccaaccctagagaggctagttctcacatacaacaatttgtctggtcatgtgccacaggctattttcaacatatcatctttgaaatatcttagcatggccaataactcactcatcggccaactaccaccagatataggcaacagacttccaaaccttgaagccttaatcctatcaacaacacagttaaatgggccgatcccagcttctcttcgcaatatgtccaagctagaaatggtttatcttgctgctgctggtctcactggtatagtgccatcttttggatccttgccaaacttgcaggaccttgatcttggatacaaccagcttgaagcaggggactggagcttcctctcatcccttgcaaactgcactcaactgaaaaagttggccttggatgccaattttctccaaggaaccttgcctagctcagtcggtaatcttccctcacagctcaactggttgtggctcaggcaaaacaaactttctgggacaattccatcagagattggtaaccttaagagtctcagtgttctgtatttggatgagaatatgtttagtgggagcatcccaccaaccattggaaatcttagcaacttactggttctaagcttggcacaaaataacctctcgggccttattcctgattctattggcaaccttgcccaactaaccgagtttcatctagatgggaacaacttcaacgggagcataccttcaaacttagggcagtggagacaattagagaagcttgatttctcccacaattcattcggtggaagcctgccaagtgaggtcttcaacatttcttccctgtcacaaagtttggacttgtcccacaatttgtttactgggcccataccactagaaattggcaacctcataaatcttggaagcatcagtatttcaaacaatcgcttgaccggcgaaataccgtccactctagggaagtgtgtgcttttggaataccttcacatggaagggaaccttcttactggaagcattccacaatctttcatgaacttaaaaagcatcaaggagctggatctctctcgtaacagcttgtcaggaaaagttccagagttcctcactctcttaagttctttgcagaaactcaacctttcattcaatgactttgaagggccaataccatcaaatggtgtctttggtaatgctagcagggttatcttggacggaaactacagattgtgtgcgaatgatccagggtatagcctgcccctttgccctgaatcaggatcacaaagtaaacacaagtctactattttgaaaatagtaattccaatcgcagtgtctgttgtaatttcattgttatgtttaatggctgttctcatcaagagaagaaaacaaaaaccatctttgcagcaatccagtgtgaacatgaggaagatatcatatgaagatattgccaaagcaacagatgggttctctcccacaaatttggttggtttgggatcctttggggctgtttacaagggcatgttgccgtttgagaccaatccagttgctattaaggttttcgatcttaacaagtacggagcacccacaagcttcaatgcggagtgtgaggcattaagatatattcgccatcgaaatcttgtcaaaatcattactttatgctctacgattgatccaaatggctatgattttaaagcacttgtctttcagtatatgccaaatggaagtctagaaatgtggctacatccagaggaccatgggcatggtaaaaagagattcctaactttgggtgaaaggattagcttagccttggacattgcatacgctttagattatcttcacaaccagtgtgtatccccactaatacattgtgacatcaaaccaagcaatgttcttttggatcttgaaatgactgcatatgtcagtgactttgggttggcaagatttatgtgtgctaattcaacagcagcgcctggtaactctacaagtttggctgacttaaaaggatccattggatatattgcaccagagtatggaatgggtgggcaaatatcaacgaagggtgatgtctacagctatggagtgctgttgttagagatattaactggaaagcgtccaactgatgaaaaattcaatgatggtttgagcctccacgatcgtgtggatgctgcatttccccacagagtaactgagattttagaccccaacatgctacacaatgatttggatggtggaaactccgaactgatgcaaagttgtgtcctcccattggttaaggtggccctcatgtgctccatggcatcaccaaaagaccggttagggatggcacaagtttccactgaactacactccatcaagcaagcattccttgagctttccagtggaggaaaagtagtgtga

SEQ ID NO: 59056 - DNA, 528 bp, Oryza sativa
  Clone ID: PAT_MRT4530_60713C.1
ggacctatgacatcagaatctatcccaagttcagaaagccggaaaatataagttaaatcggtggtgttttgcttctttgggtaatcagtatacttgatacaatggctctttaagatggagactctttccccaatttcctagtaaagaaaagtctatatgaatccaggaaacaagatcgagagggttggagcatcgataaacagcggtggggtataaggcaccgagtttactatcgttgcgacatgtctggtttattatgtactgtagggatgcagtctgttttgcatgcattatgccgatggatgtgtttttgttactgggaagtttcttcctgagttttgttgctcatgaaacctgcctggtatctatctctggctgtagaaggtccttcttgaagacgctgtttgattgttcttcaagacaagtgtcctggaatcatcaaggtggaatttcaatcaggccgcctttttttcccattttgttatgttcaagggttgaaatgtaactgtcgatcatgccctcatattg

SEQ ID NO: 59057 - DNA, 1434 bp, Oryza sativa
  Clone ID: PAT_MRT4530_60714C.1
tcatcgttgtgcattgtccaactcggtcatgagtcgggcgaacgcgacacgcgacgagccgccatctttccaggccatggctgcgccatctctgtgcgcctcgacacgctctctaagcttccttccatgctcggactccacgaccagcctcaccttcgcctccacctcctcggcggtcacccacccttccagccatccctccatctccacgccgacgcccatgtcgtccaccatgagcaccttgttgatcctctgctccgcgtacattggccagcagagcatcggcacgcccgcggtgatcccctccagcaccgagttccacccgcagtgcgtcacgaacgcggcggtggcgcggtggcggaggacgctcggctggggcacccaggtgttgacgacgaggccgcggccgctggttcttgccaagaacccctccggtaggagcgcgtcgaggtgttcggtgctgggtgcccgacgaaccacccacaggaagcggtggccggacttgtccaggccggcggcgatctcccgcagctgttgctccgcgtggttcccgccgatgctcccgaagcagaggaacacgatgctgcggtcgggctgcccgtcgagccacacgagggactcgtgccgccggctggtctcgtcaccggcgccggcggcggccttgtcaaccagtggccccacggcgtaaaccggcgggagcaccacgccgtcggggcagcaacgtgggtcggcgagagctcgcagcgcacgctcctccaacgacacgaacgtgttaatcaggattccgtcgaactccgccatgacgcgcgctcccgcggccaccgtggtggcctcgggatccttgctgatcagctcgctcaacgagcgcccgaacaagtccgtcacgtgagaagccgacatgggtggcacgcccaacaactcgaggggagcgctgccttcttctcctcctcccagtttcttgaacccagcaagaagcgaagggatctggatgttcacggcgagggcgccggcgtcgcaggggtagagctcgtaggccggaaccccgagcttcctcacggcttgaatggcgaaaccgcacgacgcgtcgacgaccacggcgtggaggccctgcacggagcagaggaagtcgtggaggtgctcgtcgtagcggcgcacgaggtcgaagtagttggtgaagaacttgtcgtcgtcgaaggcgagcgagggagggtccgggatgcgcgggagcatgtggaaggagacggtggccgagctcttggaggagacggcgcgggcgacggcggcggtgaaggcggcgtcgtcgtccttgaccgacgggttgatgagcgcgacggcgacggcgtagccgtggtccaggaagacgtcggcgagcaccatcatggggttgaagtggccgacggcgaggccggggtagagaaccaccgtcttcttcat

SEQ ID NO: 59058 - DNA, 1675 bp, Oryza sativa
  Clone ID: PAT_MRT4530_60715C.1
cttaaattttccttggtctaaaataaggtcagaagtcaaaacaagggtgcctcaacctcccgagtgaatgaagcaccagacaccagttgtgtggtagtagtccaacgcctgattaaccagaacaaactacttatagagctactacagcaacatcagacgccaattctgaacccgagtcagatgcaacctcaagtgcagtttaaggaagcccaagaactcacaccacaagtcagcgcaccgccagcatcccaactggcccatgatgccatgccacatgtggactcaaaagaagcaagaatcatttgttttatctgtgatgaacaagggcactatgcaaggaaatgtcctcagcggaaaagaaaagcaccaatgcgaaccgaagatgaagtccgtaagatgaccattaccggcacagaatggcctccaccaggaatgacaaaacgtcagagaggaaatttctttcatggtgcaccacagttgacccaacatcttttagctaatggaggtagagtgtctgatagtgaagattcagatcaagtctcctcaagggatgaagatgagaagtctctccaacgtttcaagcagaataaaatggaacataaggcatgctctcattgtggagaaatcggtcacattgccagctcatgtgtcactacctgcgtttattgtgaagaagaccatccacccggcgagtgtccaacaagcaagatcacttgtttcttgtgtgaaggaactgatcatttaccaaaagattgtcagttcagttttctgctgacgaagaagatggacaaccaagcgttccaacagagagaagcatcaaggcaacgcaattccccaccaagactacagtttcagcctaaccctagtgccaggacagaggaatcaaaatgtgaaaagcaaatcccgagttcggcaagatatcagttgcttcaattgtcgagaaatgggtcatttcaccgacaagtgcccgaaaccgacaaacacagctgccagcacgtcagtccacacaacaccttgcaatcagaagcttgctcctcagcgaatggtcatccatgcatctggaagcagtcctatagcccgaattgcaatagctccaactccaatgagtgcactaccacaaggtgtcaatgctcccttccagccccatccacctattgacaagacaaaggccagtatccgcattgtacctttggatgttccagtacaacagccgagaaatcaagtacttgatgaagaacctatgaagaaggacattactccagaaattgtccacgaccaaagcgtaacccacgccatcattccggacattatgcacgaagaagacaggatcacaatatcagggtcactggagcaaatgcagtacctgtcaagcctagtgctagacaagctggtgtcgacgcatgtcatgaaggtggtaacttgtatgaggttgactccaatgatatgaattatgagaagttctggaactgaagccccatcttcaactaccgcaacccagtcgaagtcagcaaaaggtgcaaccagggacaagtcaggtgaagagaagattccatctgcaacaggagatcaagccaagcagttccgagtggggaagttttgctggacaagtttgttatagaagacgcaacggaagaagtcagaaaataagagaagatcgcccaaccaatcttcttgc

SEQ ID NO: 59059 - DNA, 660 bp, Oryza sativa
  Clone ID: PAT_MRT4530_60716C.1
atggatcagcaccacgtgcagcagcagcagtatgttgacccttatcggacaatggtgctgtcaccacagcctgaccacctcaatgccctccagtacaatcaccagcagcagccacagccaccaccgcaagcaactccaccaccaccacaacatcaccatgcctcactcgcctcccacttccatctcctccattgccgctgtaatgctgccggcggccggctagggcgaccagcaccaggccaggacggcgagcaatggcgagtcggcgaccaacggctgagcatgagcagcaggagtagacggcgactcggcgagcagtggcgagacgaacagacacacagccgcgcagatgctgtattgtggtttggaaaaagaaagaaaagaaaaagcaaaaaacgggagtcgaggaggccttccacgacttgcttatgggccaggggtggtgcacgaatttgggccaaggggttcccatgtggtgaaaataaggggttgacgacaagattagctgatgctattggaaagggcacaagggatcaaaattctgatgcactggttgaagatttgaccagtcaatttgctaggtgtcaacaactattaaactccatatcgggaacactaagctcgaaatctatactaggctgtaattcaaatacatggtaa

SEQ ID NO: 59060 - DNA, 1870 bp, Oryza sativa
  Clone ID: PAT_MRT4530_60717C.1
atgccgccgttcgtcaaggtctcaaggacaaccgagactgagttttcacccgatagccacgttagagggggtgagacggcacaacaacgctctcaggaggggagtgacactcgaacaccatcgttgtcggcccagccaaggccgggctgggttcacccgccgtccaccacctgcctatctaccactgatgtatcattgctccaccgccatttaaacctccgccggtgcgtgggcgccactgcatcgacgccctccccccccggccagcctttgtgtgctgccaccggccgcgcctcatcgggcttcgccaataccggcctcgcctcccgctgcgtcggccaccgccgtcgccggctgcacttcctcgcaccacgccgaccagcctcatcataccgcaccggcacacgcctcgcccgagcctccaccacggccgcctccaccgccaccggccgtaccgtgtcggcttccaccaccatcggtcgcgcctccttgcgcctcaccggtctccatcgtcgccgaccggcccgccggctgcccgctgtcgccaccatcgccacgagctccgccgctgccagagcatcctccgctggcccatgcctcccgggctgcgcctctgccgccgcgagcttcgagtcgcgccgccgctgccacgagctcgagtagcgccaccgccaccgcgagctcggcctatcccgatctagccgctgggggctagatccaccaccgagaggccggatcagcctccggcagaagacccccttcctccctctcctcatcctgaagccaccgatggtgaggagcccacctcctccacctactataaggccaccgcctcccatgactacccctctaaggtcagcgatgtccccatctcttccccttccttccacccccaccccctcctcctcctgccaccacctctcctcccaacgccttctcctcctcctctgaaatcaacgcagcagcagcagcagcgacacacgcctccgtctccgtctccgtctccgcggcgcccgccgccgccgccgcctcctcccgtgccggagccggaggagtggctcccgccggcgccggcgccgccccctcctccgccgccgccgccgttgccgacccccccggggcctcttgagcgtccgcgccggctcgtcgccacctcccccgccgccgccgccgccgctcgacccggccgccgacgacgccccgccgttcatctcccctgcccccacgccaccgccaccaccaccaccaccaccacctccacctcccaccccatcacccccgacaacacccccgcccaccccaccaccaccaccacccccatgcccgcatgctctgtgcaacccagttcatgctccactcttgccccccccccccccccccttgccttgtagttgtccctgtttgcccccacctccaccagcatggcgccctcaccaaggaacgagctccctgctccctccgccgcctcccgccccgtcaactcccgcaccaaccccatcatcaccaccaactcatcccccattgcctagctccccaacaaccccgccacggccccctcctcgctggcggcggtggcccagcgcccgcggccaaggagctccaccgcaccatcctggagatgcaagcggcgcacagaagccagtgctcgcggtggtgcacggcgcctgcgtcggcggcggcgtcgaggtcttggccgcctgcgccatccgtgctgccaagaagagagggggggagaggttgtagtgccgtggaaggggaatgggagaggcagaagaagacggcgaggagggactctaagggagaaatgagggcctataggaaagtaacggcaaagtttgccgtcggcttcgaaggcagatgatgcaaaccc

SEQ ID NO: 59061 - DNA, 458 bp, Oryza sativa
  unsure (1)..(458): unsure at all n locations
  Clone ID: PAT_MRT4530_60718C.1
cccctcgaggagggagcatgatgatatagtcgctggtatctcacccagtaagagaattcaagctgagattgagatatctaaggcgggttaactgccccaacttcaggagaaatttgacccatttagttggttaccgggcatgtgaattncttgagacgaaactaaggcccagctaccacaaggaaaatatttggccctgtgatgtttctgtgactcaaagattctaantgcccaccaaccccgaagatggggttgctggttgctaccaaagtaactcccttttcccaaatttgccattactgccaaagaagattccattttcccccatgaggctaagtgctttcaagaggggtcatggagctgggacttgaggcagaggagggccttgcgatcagcactggaatcgttgtggaactcgtgccgaattcctgcagcccgggggatccactagttctaga

SEQ ID NO: 59062 - DNA, 259 bp, Oryza sativa
  Clone ID: PAT_MRT4530_60719C.1
tgtttaaagcgggaggccacctcttccatggggggaccaccaccctgacgccggcgccgacaccgactgactcacccgccggcgagcccacgccgcccaccgccggagacggccatgccccccgacgcaatccagctctacagactcctcttcaagctcattctgcgccgtcgcctatactccctgttcgactacggcggctactgctgctgctcattcgagagagtactcccgcgctgtcgccgaccaccaccacccc

SEQ ID NO: 59063 - DNA, 424 bp, Oryza sativa
  Clone ID: PAT_MRT4530_6071C.1
gagaaacaatgaacagggattcttgggaaaccagatctctccacaatattatgttatatacagctcatgaatggtccagagcagcagcagattacaaacgatgccagtacattttgacaggtccgggaaacaaagtgaagacattgaaatcaaagtatactaagagtacaagaaatgcccaactagtgacctatgtatagttttttccctgtcgtatgtatagagcaaaattaaatgaacaaacggcaactctatctatctgtatctgtatctatcatgctacctcaaaagtaggcttggaacagaagcaggaaaaaaatcacttctggcagcaaacgttggacaccatgacggtactagttccaccataataaaaccgctatcaggacagaagaacagcccgtgtaatcatcatcatcctgcc

SEQ ID NO: 59064 - DNA, 309 bp, Oryza sativa
  Clone ID: PAT_MRT4530_60720C.1
aacagcttgtccaatagtatgttagtgctgatgttaacttaatagtcactgctgtaatgttccaagtagtaggctgtttaccttctaggccagtaattatatatgtttatgaagtactgtttgtctagttgaaggtgttgcgccaagtgagatccacataggcaaattaggattaatgctgtggatggcgttggctcaaagttggtctaattagctccaaaatctgatatatgttatgacagtttatgggtgtgtttagttcctgaaaaaagttggaagtttgaagaaaaaaaaaaaaaaaaaaaaaaa

SEQ ID NO: 59065 - DNA, 1365 bp, Oryza sativa
  Clone ID: PAT_MRT4530_60721C.1
atggcagctgatgcaagagaacatgctcaagccattgctattcaggctgaagctgacaaagagaaagtgaagatggaaaaaatcaagcagttcaatgaactcttaatgattgacacctcatcatacattgagactcagattgaagaggacattagttatcaaattaagaagcaacagagaggtccaccaacccagcagagaaagtatataagaagggagcgtcaagatgctgaggatcggttgaaggcttactactttttagaaaacccaatgtacaacgatacccagtttcgttggaggtataggatgaaaaagcatctatttctacacattgtgcaaactcttagtcattggtctccggtttttcagcaaagaaaggatgcttttggtaaagttggattttctcctttactcaaatgcactgctgctttgcgaatgttagcatatggaacatctgctgatatacttgatgaaaatttacaaatagctgagaccactgtcattgagagcttggttaatttctgcaaaggtattattgattgttttgggccaaaatacctaaggaggcccactgcagaagacatccagaggttgcttcatgtgggagaggctcggggcttccccggtatgttgggaagtatcgactgcatgcattgggagtggaaaaattgcccggtggcatggaagggacaatatacccgtggggatcatggagtgcccactgtcatgcttgaagctgttgcctcacatgacttgtggatatggcatgcattttttggtgtggctgggtccaacaatgatatcaatgtgttgaaccaatcatcattgttcacagcacaacgtcaagggatagcaccggatgttcattttacagtcaatggcaatgagtatgacatgggttactacctagctgatggcatctatcctgagtgggcagcatttgtgaaaacattcaaattgcctcaatatgagaagcacaagttatttgctcaaaagcaagaatcgacaagaaaagatatagagtgtgcatttggtgttttgcaatctcgttttgccattatatgtaccccagcacgtatgtggaaaaaaccaactcttggtgagattatgtatgcttgcattattttgcataacatgattgtcgaggatgagagggattcatatgagggccgagctgactttaactatgagcagggaagctctcctgtaccactgaatggatatggacaagggccaattcatggatttgatagggtgcttgaaataggtgtggctattcggaataaagacatgcatcatcgactaaaaaacgacttgactgagcatatatggaacaaatttggaggcaaccaacctgagcactag

SEQ ID NO: 59066 - DNA, 471 bp, Oryza sativa
  Clone ID: PAT_MRT4530_60722C.1
atggccagctttgtgtgtgcgatgctgtgcacagtgctcttgctggggtccaaaagtggcattgtttgtccacatagacagattgcatgtgtggagaagaaaagggatggggacctgcgcgtggggggcgccccgcgtcctctgtcggtggctgatgaggacatcctccactattacccgctggcaaagacgccaaagtcgggcggcgaccgtgggggccgcgcctttcctcgagtgggtgtaccgaagaactgttgggggggtgggaatgatgaggacatcctccactattacccgctggcaaagacgccaaagtcgggcggcaaccctggatactgggcctttccccgagtgcgtgtgccgaagaactgttggggtccggacaaccttaatttgttgggcctcggccaaccccacctggaccagattgttatcaatgggacggggcgtacctgcccctactccgcttga

SEQ ID NO: 59067 - DNA, 333 bp, Oryza sativa
  Clone ID: PAT_MRT4530_60723C.1
atggtccatcaaaatgggctcctcgtgcttgtgcagatgcaacgtaaagtgtggataagttacgtgcatggagagaagcgcgtacaccacatgcacgtgaatggtccatcaaaatgggctcatcatgcttctcatcggcgtgcatcggtgatcgggagatcagatctccggaaccttcatcatcaacgtcctgcaccaggagaaagcgacaataaggtttttgaaaacgcttcgcgcgactgcttgctggtcttccacgacgactcgtcttcctctacgctcgagggctgcgtgccgacgacaacaccttgcactgcacgttgctcctgcggt

SEQ ID NO: 59068 - DNA, 2201 bp, Oryza sativa
  Clone ID: PAT_MRT4530_60724C.1
atgcctgcggcctccgccgccgtcccagcgaggctgaagcgggaggactacccacgcaccaagcacgactccctcttctccccatggaaggttcttgtcgggccgtcggactgggaggaccacgccgccggcaaggaagggatccagaggtacagggtgctcaacctgccggagaacttccctggcctctacgagctgggcgtcgcgagggcctccgacgagggtatcagggcggctcggcggtggaatggatccggtggtggtggcgtcgtcgtcgtgtacctcgggcaggccgacagcgtcagggcgaggctccagcagtacggccggacgggatcgcacttggacgccgggaacccaccgccgtccgccggcgaagcggagacgaatacgcgggcgacggggaatgggttgttcagggaagttttcgtcagaggctactccttggtgttccgatgtgctctgatgggtaacaaacaagaagctgagaagactgaggctcggctgcttagagtgtttgattacgcatggaacaagcttcagaacggtggtcttcgccgtgaagaaatacttatcaagttagaacaaggggcagtcaacaatagatcatctctgcttagcagagtacggcacttcaaacaggaagtgttcagagagaaagcaggtataaagataagcagaaatgggtctgttgatgtctcatctggcattatgaaaaatatgctcccaagaattcgaacatttgttggcttcagacctcagctagttaactctggtgacaatgttgacaaggaaattggcattcgctggaaaaatacatctgaaggtaacagttatggcaaacaagcacgtcgaagttctgaaggatacaaagtcaaaagagtcaatgttataaaacgaagaactatgccagaacaagattctaacgatgtttgtggagtgatgctggaagatggctcctcttgtcttgaccatccagtacaaggaaggaagaggtgtgaattacacaaaggtagaagactaggaagaatcacagtcaatcctaaaggctcctcttgtagctattcttgccaagttgagattccagttgttgaatccatatctccactaactgaaaatgaaagcgagtcagatcaagcacagcaaaccagtgaactcctctccaaatttttgccagcaacagtgaaaaaatcatcaagaccatggtatagctttgaagcgaaagaaataaaaactggagaagctcctatagaagatggaaaacaggaaacctctgaggtcattgatatctgtgaagccaaaaagagtgacaactctgcctgcaccaacaaagtaatttcaggaagtaaaaaatgtcagctgcataatggttgcaaagcagaagagtttgtttcatctcgagtcattgatttgctccagaatgaagaaaaggtcaaaagcatgacagttgacaagctcagtggggaggagatttctcatggtaaatatcagtcccaagagaatcagccttccggaagaatgtggtttgagctgatcaaattgcagaatcctaccagcacactgtcatccaaaggccagggacgtcagaaaagagtgacaggcaatgtcgcagctatctgtgaagcgttgacggacaacagatgccgtgaaacaataccaatggcaggaagagaaagatgcgatgcgcatgaaggaataaaggtcaccgatgcttcctctgtaccgttttccggaagctcaggatggccatcaatctgtggtgctcgagcttcggatggttctccttgtaagaatcagccaattgcagggagaaagagatgcgcgatgcataaaggccaaagagcatgtcggaccccctcaatcgactgagcagacatgatatgagtgatgctcaattgcttacgttcattcagtcatttgttgtaatagcattttcagtaaggaaaagtaaaccaaagaaagctgttttcttgccccgagttttgattggttattcgttgctgcttgtaaaccaaaatagacagtcaaacaaaccatgtaacttgatacaactttttttagggactcaacctctattacctgaacatcgcgcatttgccatctaatgccccatagggcattggttataaacttgtgctttcaaagtgcaaagagatacactcttccaaattccaatcaatttcatgattatttgatttaaa

SEQ ID NO: 59069 - DNA, 1710 bp, Oryza sativa
  Clone ID: PAT_MRT4530_60725C.1
atccccggcctccgcggcgcgcctgctctccgcgcaggcgcgcgggaggggactactggagagagagagagggtgagcgaggggatcttcactcctccagttcctccccatttcttgcatcccttccggatctatcagccccgtcaccaaccttcttccatccacgcttccatctgtagatcggagcacgatgatgggcgatttcctctccagggtcctactgttggcctttggttatgcttatcctgcttatgaatgctataaaaccgtagagctgaacaagcccgagattgagaagcttattttctggtgtcaatattggatattagtcgcgctactgacggttttggaacgatttggtgattttgcaatatcatggctaccactgtactcagaagcaaagctgatgttctttatatacttatggtgcccaaggacaaagggaacctcctatgtctatgagactttctttaggccatacatttcacagtatgagaatgatatcgactgcagtattcttgatttgagagtaagagctggggacatgcttgtggtttactggcagaaggttgcaattattggccagactacattctttaacattttgaagtatgcttctgcacagtcaccagctcattcatcaaggtcgcgctcaacacaggagattcaaacaccagaaacaaagatatgcccgcgcaatcgcgtggattaccttcctagttatattaataataaaataatctgctcaacacaagatttaggtgggattagtgttgatcactcatcagcagtaatatatcttttcctatttattacacttccttatcagcaatcgtatccacaaaaacagcagcaagcacaaccccaacaaccgaagcaatcactgccccaacagcaacagaagcaatcactgccccaacagcaacagcagcagatgccccatgaaaaaccaacaacgcttcgcagagcagcatctgctgccgctcgaacagctggaattatgcagcagtcggaggacacgaagattgcttactctaaccccaagaccaggcgtctactacccacaaagtctgctccgacggcttccacaaggtccacggttgcagcaacgaaaccggtcgaggatcttaagagcagtggaatgaagcttgcgtctgcggtagcgccacctccatccagtaatgctgccatgccaggctctgagcctagtgcgccgccactcccgaaatctgcagaagatgacatgtctatcgatgaggttgacattcctatagaggacatggatgagcctgttgccactccagaggagacaccaatggaggaggcgattcgagtgacccgtgggaggctaaggaaacgtattgccgcagtttccactgctgatggcggtgcagcaaattaactgcatgccatttgtcatctatttccacaaaatatgtgcttcagagctttagggcgatcacctgtttggttgcagcagatatctctgtttccacattatgttcttcgagctttagggtgatctgctgtttggttgcaggcagcagatgtcttggttggtttaatttattgctttgaacctgcttccttaagtagtgtttcttccacctgttttgctaatttgctaatatgcctagacctagaagatgtaaatattgcagggcatctgtatatatgttgggcaagcgaatccttatttgtttagcattg

SEQ ID NO: 59070 - DNA, 985 bp, Oryza sativa
  Clone ID: PAT_MRT4530_60726C.1
catcgaaatcgatggatcgcgatctgaccgaggtagtcgtgccggtctgaccgtctgaaagccaccggtctgaccgagattggaactccggtctgaccgcctgatcagctgccgcttgctgtcgccgccgccggtctgaccgcccttacgccgtcagtcggaccgccgcgatgccgccggtctgatgctccccctctatttatacatgaggtaggcagcctaaagccacgaaccaaactcatactaagagtcctaaacaccttaggaaaccctctagtacaagaaagaaactttacataaccaatcgtaccaaatttggactccttccaaattcgactccgcatcccatacgcacacaatacctccatcgtatgccatatggaatctccatcaaccacgtgtatcaactctagccggcaaccaccgcccggtctgaccggctccgacaaaacagtaaaccctgttcatcacctgaaaatcaattatctccaaaaccacttcgataataatctccaattatcaaaactaataatcacatatgtcaattgttcatcttacagtaagatcttcggttcttcgccaacgccggcggggccacaaattttggtttcttggcgatcttgaagattgtggcggtgcaggtgctgcagagactggccgagaagatgaagcaggacgtcgacgtcggcatcgtcgccgacttccagagattccggcgggagaaggccgccgccgccgccgccgccgcaacggggaaggtgaactccacagctgacagagaaacctgaagcatggatatctgaaaacctggccaaaatttcatcaaaatttgattcatatgctacatgattcattttgctcgtgggaagatcaattcttgcaaaataatactagaattttctgcgaaggatatatccacaatatagagtgtgttggactatgtaattttgtaatgtgaaattaagtaatgttaaattacttaagt

SEQ ID NO: 59071 - DNA, 1008 bp, Oryza sativa
  Clone ID: PAT_MRT4530_60727C.1
atggagaggggtggggtttttataggggagagggggaaagagagagaggaaagaggtggccggcttaatggcgacgcgacggcggcgcacggggctcgggacgatggcgacgcgcggcgacgcgacagcgcggggcgcgaggcggcgaggggatgggcgcacggcgacgggacgggcgacgcgacggcaacgggcgacgcgacggcgacggcggagcggggctcgaggcgacggcgacgcgcggcaacggcggagcggggctcgaggcgacgaggggacgggcgcgcggcgacggcgacagtgacaacgacggcgacaggacgacggtgcggcgcggcagcagcgagcgtgcggcaggcagcggggcgcgaggcggcaggcacgcgacgcggcgacgggatggcggcgctgcgacagccatgtccaatggagatgactgggaaaatgccggctagggtcaagcggattaggtttgccgattcgcaaaacgagtgcgaggtcgtcctgccccaaacacttgctagcggcggagcgtcttcgtcgagggagccacctgagacaaagggtcataacctcacatgctgtagcgccgctctagcggcgcaggcttgtagagcgctattagccgtacaccatgagaaattggaggagattggacttgaagcggtagcgtgcatgtctcttgaaagccttgagcagccagacctaatacgatggctcatggacaggactaatcccgtgtcgcgcccggaaaaataccttctccagaacgctagtgtattaatccccgtcctaggaaaagccaggactgagccacaaactacgccttacccactagacatgtggaagtacggtagtgctttgcaacagaggcccgagcttaatccttatagtagcctagagacaatggccttccgaaccttcggcgatgaccgcgaaccacgcttcaagaacctccggaacgacagaagctacgcaaagcacacaagcaaagctacaaacctataa

SEQ ID NO: 59072 - DNA, 598 bp, Oryza sativa
  Clone ID: PAT_MRT4530_60728C.1
acgcttggttgtttttgtaagatcaaagtgtgttttgattcttattctgtgatgaacaattggcatctgtgattattggttttaatatttggagattatcgttgaagtggttttggagataatcaaaggtgatgatcggattctgttattttatgtgtccggtccgaccgggcggaggttgccggctagagttgatgcacgtggttggtgaagattccatatggcatacgatgaaggtattgtgtgcgtatgggatgcgaagtcgaatttggaaggagtctaaatttggtacaattggttatgtaaagtttgtgtcttgtactagagggtttcctaaggtgtttaggactcttagtatgagtttagttcgtggctttaggctgcctacctcatgtataaatagagggggagcttgtgtttcaccgggtttcggcggtctaaccggcatctcagcggcggtcagaccggcggcggcgacagcaagcggcagctgatcaggcgatcagaccggagttccaatctcggtcagaccggtggctttcagacggtcagaccggcacaactatctcggtcagaccgcgattcatcgatttcgagg

SEQ ID NO: 59073 - DNA, 809 bp, Oryza sativa
  Clone ID: PAT_MRT4530_60729C.1
tttttttttttttttttttttttttttttttttttttttttttttttttggacacaaaaacactggaaccttttttttgataggacacagggatactgcaatctctttatactcattctgtttacagattacatacaccattcacttctctgtaaatgacattgctcccttgcattcgcgaattagatgtatatacataaacactgctactctgctctaccactttcatttttgtcgctctttacattcttacccactataaagatatagtaaatcctaccaatacgatccgacattctaaaaaccacatcagcaattcagcatcgtagggagaaacaccataactgacagaggccaccaccacttccttcaagtagcaaaaggtgccttgaggtatcgacatcaatttgcatgtcctgtataactcttccacaggcgtctggaaattatcttcagagagtacacatttttggctcagaaaagtccagtggtccaattcagttggttgatatagtcggggggcgctcaattatgcattggtggcactggcatgaaccacttcgtctgaagaatcatctgccttggtcgcagcagatctcaacgtgctttgctgtctcttgtagttagccatgcgacggttgctctccatccaaatgagaagaacagtcatatcagctgggctcaccccgccaattctgctagcctggcctattgtttgtggccttacctttgaaagtttctcaccagcttcaagtgacaggtttgtcattgaatgataatctaagtcttcaggaagccgtacgcgtggg

SEQ ID NO: 59074 - DNA, 1047 bp, Oryza sativa
  Clone ID: PAT_MRT4530_60730C.1
atgtggccgcgcgtggaaagagcgaagggcgcgcggtctcagggtcagctgtcgtggaaaaggggttgcgacgcgcacacggtgacgcgggacccgaaggtcaccggcgacgcacaggcggcggcgctaagcggtggcggaaggggcggcacggcgcgagagcgagaggggaggccggcggccatgaggcaacaagggggagatcaaggggatccccgagagcgtgttggagcatctacgcgaggtcgcgagctcattccaccggtcgagagggcacgggcgacgccgagagaggccggcgacggcgagcgacgaccaggacagagcaagggcgcgcggcgagatgtgacgaacggtggcgggcgcggcgcggcgtgcgacaagggaaaaggggttcagtggggagctcaccgacgagagaaacggtgtcgacggcgcggatggagtcgcggcgaggcggtcgcgtcggcggggtggcgcggcaccgagagggcgcggccggggaagaagagatggagaggtgcaaggatggggcggcgcggagctccttgtcgactcctcgtgctcgctagctccccgacacgcacgacggcagaggagggcgagaacgacgacgaacggcgagacggcagtggtgtgatggaggagaggaagcgggagggaatgggtgccatcgggaggaagagggtgacggcatcggagaaggagatcatccaccactcatcctgcagctcatccgtcgccgggaagggcaactgcgtcgtctactcgtgcgacgggaggcggttcgagatcccgctggcgtacctccgcacgccggtgttcgtggagctcctgaggatgtcacaggaggagtttgggttcagcagcgatggtaggatcacactgccgtgcgacgccgcggtgatggagtatgtcatgtgtttgctcgggagagaggcctcggaggaggttgagaaggctctcctcagttccattgtgatgccctgcagccaccacccaagcaggatggcgcagcaccagcattttgctgtatgcagcatctga

SEQ ID NO: 59075 - DNA, 1156 bp, Oryza sativa
  Clone ID: PAT_MRT4530_60731C.1
tcgccggcctcggcatcccgcgccccgacatcgccaccgccgtcgccgccgacccgaggctgctgtgcgccggcgtggagggaaacctcgccaagcgcgtcgccgagctcggcgacctgggcatcccgcgctcccagatcgcgcgcctcgtccccctcgccaagatcccctttcgcagcagctccctggccaccaacctcgccgccgccgccggcaaccgccgtgacgccatgattcacctccggaggtgcgtcctttctcgcctcctccagccaccgtgcctcaccgccgccacgcacgccaattccctcctctccctccacctccgccgcctcctctccggcgccgccgaacccttcgccgtcgaggactacctcgtggagtcctgcggcctgacgagagcccgcgcggagaaggtctccgggaagctctcccacctcaggtccccctccaagcccgacgccgtcctcgccatcctctccggcctcggcctcacgcgccccgacatcgccgccgccgtcgcctccgacccaaggctgctgtgcgcccgtgtggacaggacgctggatgcccgcgtcgccgagctcggcggcatcggcctctcccgctcccagatcgcgccggccgccggctaatccttgcgccgccgccgcccgccgcccgccgccatgattcacctccggaggagcttcctttctcgcctcctccatccaccgtgtcccaccccggccaatcccctccccctccaccgcctcctctccagcgctgccgccgccgcgcccatccccccggaacccttcgccgtcgaggactacctcgtcgactcctgcggcctgacgagagcccgagccaagaaggcctccgggaagctctcccacctcaggtccccctccaaccccgatgccgtcctcgccttcctctccggcctcggcctctcccgcccggacatcgccgccgtggtcgtcaacgacccgctcttcatctgcgccagggtggacaagacgctggccacccgcgtcgccgagctcaccgacctcggcctgtcccgctcccagatcgcgcgcctcatcccggtggtccgcagcctcttccgctgcaattcttcaagaagcttggttggtcacaggacgatttgtcattggcggtgaggagcatg

SEQ ID NO: 59076 - DNA, 662 bp, Oryza sativa
  Clone ID: PAT_MRT4530_60732C.1
aagtcaacctcacgtcttaaacgctctaataatttaaaaatgtagcgttaggcatggtgatgcaaaatatggatcacagaagtttgcatgcagagctgcaggcagatgcatctaagtacttgatcctggtcacgatatgttcgtggccgcaggagcagggtggatgggttgattctgcagtggtgtcggtaagattactaacaatcagtgccgccgcttgccgccggtctgaccgccggtatatcaccggttagacactccccctttatttatacccgaggtaggcagcctaaagccacgaaccaaactcatactaagagtcctaaacaccttaggaaaccctctagtacaggaaacaaactttgcataaccaatcatgtcaaatttggactccttccaaattctattccgcatcccatacgcacacaatacctccatcgtatgccatatggaatctccatcaactacgtgcatcaactctagccggcgcacactgcccggtctgaccggacccaaatccagcagtatcctgtagatcacctgtgaaatccaatcatctccaaaaccacttcgtgaataaattctaaatatcaaaaccaataatctccaatgccaattgttcatcacagaataataatcaaaaacaactttgattttacaat

SEQ ID NO: 59077 - DNA, 3688 bp, Oryza sativa
  Clone ID: PAT_MRT4530_60733C.1
ccgctaggagccggctccccgccattaccacccatatccccgccgcagaaaccccctccccggccctcgccggcaacggcgccgtcgcaaccctaggcacgacccgcggcaggaggaccgggtggccacgatctgcgagccatgactgactctgctgcaacagaaactccaaatacgtaccgcaatacagcccctcttcccccacacccccggggccaccgccacggccgcatgcacatgaggcggcgaatccaccctgtccatgccgatggccgccacctcccccccgcgggtgcgccctccctacgacgcgcgccgggggaactcgtacaacttgcaggctcacacgatcggggccgcagagcacacgatagtcctcccctccttagcctcattagcgactgccgccacccgatcgtcggtttgctcgaggcacgcgagccctagccgccagccgactcgaccagcgcccggaggcggagcacccgccgccgccgccctcgccatcgtcggcttcacccctcatcggcaacctagtgcaggttgttttctgaagatggctgacgatttgggccctcccactgtgctccagaagatacatgggcagtccatgatgttcagcaagatctcaccttattctttgatgaagaatcccgcactctacaatgccaacacttcttacagtgtgcctctgaagtcatacaatgggatggatgggaacaatgggttctcatctgtcacatctgtatccccagtctttgcttctgccccaaaggagaaaggtctttctgggtttatgattgacttcatgatgggtggagtttcagctgctgtctccaagactgctgctgctcccattgagcgaatcaagcttctcattcaaaaccaggatgaaatgatcaagagtggtaggctctctcacccatacaaaggtattgcggactgctttggccgcacaattaaggatgaaggtgtgattgcactgtggagagggaacactgctaatgtcatccgttactttcctacccaggccttgaactttgccttcaaagaccatttcaagcgcatgttcaactttaagaaggacaaggatggttactggaagtggtttgctggaaacctggcttctggaggagctgctggtgcttgctctctcttctttgtgtattctctggattatgctcgtactcgtctggctaatgatgccaaggctgcaaagaagggtggtgggaggcaattcaatggacttgttgatgtttaccgcaagacccttgcgtctgatggtattgctggtctgtaccgtggattcaacatctcctgtgttggtatcattgtctatcgtgggctgtactttggaatgtatgattctctcaagccagtcgttcttgttggcaaccttcaggataacttccttgccagcttcttacttggttggggcattaccattggtgctggccttgcttcatacccaatcgacactgttcgtcgtcggatgatgatgacatctggtgaggctgtcaagtacaacagctccttggatgcgttcaagcagattgttgcgaaggagggtgcgaagtcactcttcaagggcgctggtgctaacattctgcgtgctgttgctggtgctggtgtgcttgctggatatgacaagctgcaggtggtcgtctttggtaagaagtacggttctggtggtggctaagactagatgatgatgataagcagtggggaactatggacatattaggtgctttcggatgctgttgcgtttaaataaatttaacgtatggacaccgtttacatgttattaggcgtcaggtgaggtttctgagtgtgtaaaatcggtggcagatgcttatgccttttttgttgggggatcgagcaagacgagttttcctagttgaaaacatgccaaattattgtctgtgaaagcgtttcttgagattgttattgatgtggttcctagtcgattatatagattatcactccattgtagcaacataagaatacatcgtcgccgcctgcggcctcacccgagcccaagcagccagggcttcggagaggatctcccacctcaggtccccctccaagcccgacgccgtcctcgccttcctcgccggcctcggcatccccggcggagcgccgccgccggcaaccgccgtgacgccatgattcacctccggaggtgcgtcctttctcgcctcctccagccaccgtgcctcaccgccgccacgcacgccaattccctcctctccctccacctccgccgcctcctctccggcgccgccgaacccttcgccgccgccgcccgccgcccgccgccatgattcacctccggaggagcttcctttctcgcctcctccatccaccgtgtcccaccccggccaatcccctccccctccaccgcctcctctccagcgctgccgccgccgcgcccatcctctcccacctcaggtccccctccaaccccgatgccgtcctcgccttcctctccggcctcggcctctcccgcccggacatcgccgccgtggtcgtcaacgacccgctcttcatctgcgccagggtggacaagacgctggccacccgcgtcgccgagctcaccgacctcggcctgtcccgctcccagatcgcgcgcctcatcccggtggtccgcagcctcttccgctgcaagtcgctcgccccaaggctcgccttcttgctcaccgtgtttggctccttcgacaggtgcctcgaggttatcaagaccaactatggcgtccttagctccaacgttgaggcggtcatcaagcccaacctcgccgtactcaaggaatgcgggatatctatagcggataggccctcatacgcgttcgcatcgcgggtgatcagcaggcctactaagcacctggaagaagctgtggtgcttgctaacgagtttggagctaagcagggaactcgggtgtttactaatgcggtcatgatttttggaatcctcggacaggagaagctcgccaagaagttggagttcttcaagaagcttggttggtcacaggacgatttgtcattggcggtgaggagcatgccacacatcctagccatgaaggaagaaaggatgcgtcgaggtatgaagttcttgaccgaggatgttggtctagagataccatacattgcacgaaggcctgcactcacgatgtatagcattgagcgccggttgttgccacggcattgcttgatcaatgttctcaaggggaacggattgctcaaggccaattatgacttctataatatctctgtgattagcaacgatgatttcatggaaaaattcgtgcaaccatatgtggagagtgttccaggccttggtgatgcatatgcttctagctgtactggatgtggagtgcaccagttgaagctgctctcaaagcgtaagacaaagtgctgatgtttcttctagtaataccagcaagttgggacaattttaaggttagtttatcactttgattcattcacttcaggagccaaatgaaattgggctttgctctcaacaagccaaactaagatttggtcttgattaatggtgtcactatgccattcaaagactgaactttctattaaatggattagatgaatcttaatggattgagctgacatattttgtagcactaagtcgatcgaattgctatagacttttgtcactgttgcttggatttacagt

SEQ ID NO: 59078 - DNA, 329 bp, Oryza sativa
  Clone ID: PAT_MRT4530_60734C.1
attgtaaaaccaaaggtgtttttgattattactctgtgatgaacaattgggcattggagattattggttttgttatttggaatttattcacgaagtggttttgaagatgattggatttcacaggtgaatctgcaggatttaatgtggaccggtcagaccgggctttggtagccggctagagttgatgcacgtggttgatggagattccatatggcatacgatggagttattgtgtgcgtatgggatgcggagtcgaatttggaaggagtccaaatatggtacgattgattatgtaaagtttctttcttgtactagagggttttctaagg

SEQ ID NO: 59079 - DNA, 589 bp, Oryza sativa
  Clone ID: PAT_MRT4530_60735C.1
cctcaatttcgatgagatcggtctgaccgaagtagattagccggtctgaccgaagcgagccgccggtctgaccagtgttgatctaccggtctaaccgccgagatcgcctgctgcttgctatcgccgccgccggtctgaccgccgtgttcccgccggtgtgactgccgattgccgtcggtctgacgctccccctctatttatacatggggtaggcagcctaaagccacgaaccaaactcatactaggagtcctaaacaccttaggaaaccctctagtacaagaaagaaactttacataaccaatcgtaccaaatttggactccttccaaattcaactccgcatcccacacgcacacaataactccatcgtatgccatatggaatctccatcaaccacgtgcatcaactctagccggctaccagagcccagtctgaccggtcacatgaaataacaatcctgcgattcacctgtaaacccaatcatcaccaaaaccacttcgtgaataaattccaaataacaaaaccaataatctccaatgcccaattgttcatcacagaataataatcaaaaacatctttaattttacaat

SEQ ID NO: 59080 - DNA, 1734 bp, Oryza sativa
  Clone ID: PAT_MRT4530_60736C.1
ccggccgggaagcgagaaagaaatctcgctctcgcctcctcgccaccgttctccgtccatccaccgagtcaccgacaggaggcgcgtctcctccctcctcacctccatctccataaacacagcaggctcacgcacacgcctccgccccggaggaaggaaggaaggaaggcaaggaagccaagcccgcgaccccgacctacccccaccaattcaaccctccctcctcagatccaccaccaccgagcgcccgcgatgacggccaagggcggcgccgcgccgtcgccgggcggcgcgggcggcctcccgaacggccgcttcttcaccgtggggctcgtcaccgcctggtactcctccaacatcggcgtcctcctcctcaacaagtacctcctcagcaactacggcttcaagtacccaatcttcctcaccatgtgccacatgtccgcctgcgccctcctctcctacgccgccatcgcctggctccgcgtcgtccccatgcagctcgtccgctcccgcgtccagctcgccaagatcgccgccctcagcctcgtcttctgcggctccgtcgtctccggcaacgtctcgctccgctacctccccgtctccttcaaccaggccgtcggcgccaccacccccttcttcaccgccgtcttcgcctacatcatgaccgtcaagagggagtcctgggtcacctacctcaccctcgtccccgtcgtcaccggcgtcatgatcgccagcggaggagagcctagctttcatctgtttggattcatcatgtgcattggggccactgctgcaagggcattgaagacggtgttgcaaggaatcctcctttcatccgagggggagaagcttaattctatgaatttgcttttatacatggctccaattgctgttattctcttgctccctgctaccatcttcatggaggacaacgttgttggcattacaatagaactggccaaaaaggacaccacgattgtttggttgctgctgttcaattcctgtttggcatattttgtcaatttgaccaatttcttggtgactaagcatactagtgcattgactctacaggtcctaggtaacgcgaaaggtgctgtggcagttgttgtctcaattctaatattcaggaatcccgtatctgtaaccggaatgctcggttacactcttacagttataggcgtaattctttacagtgaatccaaaaaacgcaacaagccctgaatattttagaatgccgtaaatatggctgtcctttctcattccggtggatgcccagggctaatatatgacggggaactacatcggggacaattgcaacaaatcctgcactgtatggagcctgattggatagcaaggatagaagtccaataatacatgtagtttgcccatgggatctgggaggcattttgttttgctaatggaaatgatcaatagaatattttttttttgtgtttagagaactgtggctcacgttgccaacattggttaatacggttagttcgtggaaattgtttgagtcattcatcggttattgtaagttcatgttcccccattttgttttttctctgaagattgcctgtaccaaactttgctccaggaccccctaatatattatgacagtgaatttaatcccaaaaaaaaaaaaaaaaaagaaggctgccaggaccccctgaatgatgattgatggacagtggaatgttgaatgcccccccccaaaaaaaaaaaaaaaaaaaa

SEQ ID NO: 59081 - DNA, 764 bp, Oryza sativa
  Clone ID: PAT_MRT4530_60737C.1
cctcgaaatcgatggagatcggtctgaccgagattgatctgtcggtctgaccgaagcgtagccgccggtctgaccggtattgatcttccggttggaccgccctggaatccctgccgcgcctgatgtcgccgccagtctgaccgcctcgccctagccggtctaaccgtcggtgcttcgccggtctgaccgccagtgagtcgccggttagacgctccccctctatttatacatgaggtaggcagcctaaagccacgaaccaaactcatactaagagtcctaaacacctcaggaaaccctctagtacaagacacaaacttaacataaccaattgtatcaaatttggactccttccaaattcgactccgcatcccatatgcacataatacctccatcatatgccatatggaatcttcactaaccacgtgcatcaactctagccggcatacacagcccggtcggaccggtcacataaaataatagtgaatccaatcatcacctaaaaattgattatctccaaaaccacttcgacgataatctccaaatatcaaaaccaataatcacatatgccaattgttcatcacagaataataatcaaaacataaaataatagtgaatccaatcatcacctaaacaaagcttcagtagttttttcttttttcgctgcaattgtcttcgtggtgaggactaatagcctcttttgtaagaaagtttggaactaatggcatatttattttagattctttccaatagattggtattctcat

SEQ ID NO: 59082 - DNA, 330 bp, Oryza sativa
  Clone ID: PAT_MRT4530_60738C.1
atgggacggcacatacctacctccacttccgccggaggcaggcgcgacgtgggaacgtggctgtctgctgacgacatgaccagtgtcagactgatcacaaatcggtcattcttgtccacgatgcgtcagcttaacagtatgcatgttcgcccttcttcacacaacatcttgcctgtaatggttaggatgaagcctggcgtatatctgacggggactaacgtgccatctctgggaggtaacacgctagctctagctggggacgcgtgcctagaagctctcgtcctgacgggatggggcgaggcgtgcgtcagaccgcctgtcgccacctaa

SEQ ID NO: 59083 - DNA, 264 bp, Oryza sativa
  Clone ID: PAT_MRT4530_60739C.1
atggcggttgtgaccgttttcgacactccaaccgtcagcaggaggacaaaaggcaagaagagagtgaagatgtccttagtagggttggcaacagggtggggtgggggcgggttaggtaggaatggccacgcccccgctcacttccggacggaggaagaagcgaaaccggagagaagagggcatggggaggcgactggagagggtgggaaaacggcgcaggacaggatgccaatagccggctggctggcgggatacaggagatag

SEQ ID NO: 59084 - DNA, 595 bp, Oryza sativa
  Clone ID: PAT_MRT4530_60740C.1
cctcgaaatcgacggagatcggtctgaccgagattgatctgtcggtctgaccgagtggatgccgccgatctgaccgatgtagaatgatcggtcgaactgccaaagtcgcctgccgctcgctgtcgccgccgccggtctgaccgccacaatgccatcggtctgaccgccggtgagttgccggttagacgctccccctctatttatacatgaggtaggcagcctaaagccacgaaccaaactcatactaagagtcctaaacaccttaggaaatcctctagtacaagatacaaactttacataaccaattgtaccaaatttggactccttccaaattcgactccgcatcccatacgcacacaatacctccatcgtatgccatatagaatcttcaccaaccacgtgcatcaactctagccggcatacacagcccggtcagaccggtcacataaaataacagtgaatctgatcatcacctgaaaattgattatctccaaaaccacttcgacgataatctccaaatatcaaaaccaataatcacagatgccaattgttcatcacagaataaaaatcaaaacacacattgatcttacatgat

SEQ ID NO: 59085 - DNA, 948 bp, Oryza sativa
  Clone ID: PAT_MRT4530_60741C.1
acaacaagcgcgggtggctgatggcggtggccacgctgttcgtgggcatggcattccaggcggcgatacagttgcctgcctggttccccgatgactggcctcaggcgtttagctcccacaacatgaagcatagcggtataatattccgagccacggtcgcctctgctccttccccgataagtccctcgaaatcgatggagattggtctgaccgaagttaccttgccggtctgaccgctcggatgccgtcggtctgaccggtatagatcaaccggtctgaccgctgaagctgctcgccgcgcttgtcgccgccgccggtctgaccgccgtgctcccgccggtctgacagccgcaatgccgccagtttgaccgccggtgagttgccggttagacgctccccctttatttatatatgaggtaggcagcctaaagccacgaaccaaactcatactaggagtcctaaacaccttaggaaacccactagtacaataaagaaactttacataaccaatcgtactaaatttggactccttccaaattcgactccgcatcccatacgcacacaatacctccatcgtatgccatatagaatctccatcaaccacgtgcatcaactctagccggcaaccaccgcccggtctgaccgatcccgacaaaacagcaaaccctgttcatcacctgaaaatcaattatctccaaaactacttcgacagtaatctccaaatatcaaaaccaataattacagatgccaattgttcatcacagaataagaatcaaaacacactttgatcttacaactgtcaacaataggattgtggtcactccgatcatcttgttggatacgcaagcataccgacaagggcttctcttcaacactctcctaaaagatatataaatagcaagggtgagtaccaaccgtactcagcaaaccaccacaacaacaatacat

SEQ ID NO: 59086 - DNA, 307 bp, Oryza sativa
  Clone ID: PAT_MRT4530_60742C.1
caaaagtataagaactagaaacccaccacaatgaagatcattttcttctttgctctccttgctattgctgcatggcaggcctttgcgcaatttgatgctggtactcaagtttacaggcaatatcagctgcagccgcttctcatgttgcagcaacagatgcttagcccatgcggtgaggtcgtaaggcagcagtgcagcacagtggcaacccccttcttcaatcacccgtgtttcactgagaaactgcaagtatgcagagcagtgctgcaacagctagatgatcgacacagttactgcagccattaca

SEQ ID NO: 59087 - DNA, 550 bp, Oryza sativa
  Clone ID: PAT_MRT4530_60743C.1
aggctgtaaaatcaaaggtggttttgattattattttgtgatgaacaattgggcgttggagattattggttttgttatttgaaatttattcacgaagtggttttggagatgattggattcacaggtgatcccagggtttattatttcatgtgaccggtcagaccgggctctggtagccggctagagttgatgcacgtggttgatggagattccatatggcatacgatggaggtattgtgtgcgtatgggatgcggagtcgaatttggaaggagtccaaatttggtacgtttggttatgtaaagtttctttcttgtactagagggtttcctaaggtgtttaggactcctagtatgagtttggttcgtggctttaggctgcctacctcatgtataaatagagggggagcgtctaaccggcgatctaccggcggtcagaccggcgacaaagcggcggtcagaccggtggcgtgcgggcggtcagaccggcggcatctactcggtcagaccggtagatcaatctcggtcagaccgacttccgtcgatttcgagg

SEQ ID NO: 59088 - DNA, 1387 bp, Oryza sativa
  Clone ID: PAT_MRT4530_60744C.1
tctctctttttttttacaagaaacatcatcacattttactatgttctcctcccctatctttctggaatcaacttttactactacaatcttacagtcagggcggcaaaaatggtaaaaaaaaaaaaacagagctgcaaagtgacagggagcacactcaggtcactcactcacaccgagtcacacaaacggtgtgtgctctacctgtttcagaagtagtactacacaacaacagcacacggcagaaaaacgtgtatatatagaacaaacaacaaaaggaggcacgcttccaaggacagacttgtaaaaaagacaagtctctcaaccgcatctctttctatcaacatgaccaacagcaacattgcgtgtttcgagtttcaaggttcgctaccggatgatgcgctgggtgtcgtcgtagatgtttgcggcttccctctgcccatggcgaacccgcgtgttccgtcaggcatgcgtggccctggaggctgcttgtttgctcctgctggtggctgtggctgtgctgtggctgtggctgtggctgtgcctgctgttgctgctcgttcttggcaggatggttggatggcggcgttccaactggatgggcggcgttccggttgttgctattctgatgattatgctgctgatggttgtggtagctctgttgattgttgttgtggtagtggtagccacgccctcggcctttacctccacggccacggcctttgccacgccctcgtcccatatccccagcgctctcatcaggcaattgctctccctgtgcatctggtgtttgcagtgcttcttctccatgtttctcatttgattggttagaagtggagacatcatcctctacaccatgtccatcattgatatcatggccaccctttttccctttgcctccctttgtcatgcaagtattcaataatcgaactctcagcccatttctccagttcctctcatcattaagttccacgatcgctttctcagcatcctctacagtatcgtactcaacaaaagcatgcagcttgttagcaaaaagcatatctagcttggcagatctattagtaactggaccagtgccatttggggtttgaggatagcatgttcgaattgtcttgacactgccaacagttgaaaaaagcttcatgagattctggtaacaatgatcatctggaagattttctgcaacaacgattcgggcctggagctcttctaaatctgactctgtaaacggttgctcacgttttactcttgttccatcattactaacaacgagttttgatgatgtccgaagagctgaagcaagcattgcattactttgtatcaaagccttaatcttcttaaagccagcaacaactgatatcggaacatatccttctggatccttggt

SEQ ID NO: 59089 - DNA, 789 bp, Oryza sativa
  Clone ID: PAT_MRT4530_60745C.1
atgcctctcctcgcccgcgcgccaccgcctccaccaccgctccgccaccgcggccgcctcctcccgcgcttcacctcctcctccagtccccgccgccgccgccgcccacgcgccgcccgcgtccgcgcctccggctccgacccgccgccgcagcagcagcagcagcagaggtcggaggcactcgggctgtgcctggccgcgttctcggcgactctgccgtacctcgggaggttcctagaggtggggaacgagatgggtgctggtgctgctgaacgtgtgcccttgcctgaggggagcaggcaggtgtttgccatgtctgatagcctgtcagcagcacagaaggaggacatggcgtgggcttcgtacgtcctgctgcggaacacaaacaccacatctgtcgtatctgaagaaagaaaaacctcaatcactggtcacagcctgaccatgaagtaccgaaagttgtgcatacgaggatattgggatccgcctgaagatatttccaaatatgccatgattgagtggttcaaaagtcagatgcaggaagctggaattgttgatttgagggaggatttgtacttccctaccttttctgacactcagcttgggaagcttctcccacaggggattctttctgtgctggcacaaccagttctaaacaaccctgatccaactaacagtgaaataaaagctgaaggtttcatcctactggcgtccaattcgagttacgcatacagcgagaaacatagggtttggattagaacagttgcgaataaatttcaatgtacataa

SEQ ID NO: 59090 - DNA, 396 bp, Oryza sativa
  unsure (1)..(396): unsure at all n locations
  Clone ID: PAT_MRT4530_60746C.1
gtgtanattactgcagtacagatcanatggtgtattgcagtattgggtagttggatatccaggggaggtggatcagccgatgcanatggtacttcagctaaagcacccgtcgtcgctgggcggcntcaccttccgcggggaggaggaggccgtctaggcttcttcgagttcggcgctgtccgtgttcaaggccaaggaggagcagatcgagaggaagaagatgnctgttacgaacaaagtgttcactcacctctaaccccttaaagaggaaaccaaacgccttcccttcatccgaccctaacttgaagggatggcggatcccaccaggaaggaggtggaggtgaaccagaagaggatcgacgtggtgaaccgtcagctcaagtctctcggcaaaac

SEQ ID NO: 59091 - DNA, 505 bp, Oryza sativa
  unsure (1)..(505): unsure at all n locations
  Clone ID: PAT_MRT4530_60747C.1
gcgcgcgtcacggtgggcgngaggggtggcggtaagncctgcttcggctgcnaggtcctagccgagcaggacgtggagatggaggacacggacgcngaccagcagcacctctgtcgcgtcgtgttctttgaggggcggtctagctcgaggtggacctttggtgagaccggacatagcatctgttttgggggtcccgctagattctatcacgagcgccagtccgtggagaatgtgggtcaagtttggggatggggatacacagtgtctgcgccgcggaccttgattcacagccgatggcgtcgatcgggtcttgcaggactggggagtggcttagaatatgaaagctcttttattattgatgcaattagtcttgtggttggttcattcttcttgttcacatcttagcttcgtcagcttgcaacgtttctacatctgtttttgaagctcgtttttcgttgactggctcttttttttcatctatggatctgtgattaccttgtttttt

SEQ ID NO: 59092 - DNA, 414 bp, Oryza sativa
  Clone ID: PAT_MRT4530_60748C.1
atggatttgtcaccaccctatggccccaccaccaaggtttctcaaaccgtcgggaccggagttaccgcaccctcatggtctacaggatgggacacaagcacacgccgatgtacagtgcagacaggagtaatttgctggaacgatcccaaggacaacataaaatttgaaggcggcagatcaaaacaaatctgcgtgcaggtccttcgagaaataacgcacagcttccgaggcacattaggccactgcaacggtacagaagaccacacgatacaggcagtggcggcaggcgattggcagacgacccccaagtatgctcgccttgaacaccaaggaacaaccctagttacaaatgaacaaacagggtacaatggcaagtttgcatttccacaacagatgacaaagtgcagcatctga

SEQ ID NO: 59093 - DNA, 2407 bp, Oryza sativa
  unsure (1)..(2407): unsure at all n locations
  Clone ID: PAT_MRT4530_60749C.1
gaacccatctcgctagccgccgccggccacaaccattcctcacgacgggaggatgacgaaaaaaaaaaaaaaatcccactccgtgttggtaaaatccgactaccacttcggcctgtctcaatccaagaattcaagaatcgaactcctttggggtcgcctcgctgaatcttccttatatatacgcgctctcccattcgcgtgtgctccaaatcgtagtggggggaagtggagttgacgagctgtggaaaaaaagcctatcgcaatggagtccatcgccgccgccacgttcacgccctcgcgcctcgccgcccgccccgccactccggcggcggcggcggccccggttagagcgagggcggcggtagcggcaggagggaggaggaggacgagtaggcgcggcggcgtgaggtgctccgcggggaagccagaggcaagcgcggtgatcaacgggagcgcggcggcgcgggcggcggaggaggacaggaggcgcttcttcgaggcggcggagcgtgggagcgggaagggcaacctggtgcccatgtgggagtgcatcgtctccgaccacctcacccccgtgctcgcctaccgctgcctcgtccccgaggacaacatggagacgcccagcttcctcttcgagtccgtcgagcaggggcccgagggcaccaccaacgtcggtcgctatagcatggtgggagcccacccagtgatggaggtcgtggcaaaggagcacaaggtcacaatcatggaccacgagaagggcaaggtgacggagcaggtcgtggatgatcctatgcagatccccaggagcatgatggaaggatggcacccgcagcagatcgatcagctccccgattccttcaccggtggatgggtcgggttcttttcctatgatacagtccgttatgttgaaaagaagaagctgcccttctccggtgctccccaggacgataggaaccttcctgatgttcaccttgggctttatgatgatgttctcgtcttcgacaatgtcgagaagaaagtatatgtcatccattgggtaaatcttgatcggcatgcaaccaccgaggatgcattccaagatggcaagtcccggctgaacctgttgctatctaaagtgcacaattcaaatgtacccaagctttctccaggatttgtaaagttacacactcggcagtttggtacacctttgaacaaatcaaccatgacaagtgatgagtacaagaatgctgttatgcaggctaaggagcatattatggctggtgatattttccagattgttttaagccagaggtttgagaggcgaacatacgccaatccatttgaagtctatcgagctttacgaattgtgaacccaagtccatacatggcatatgtacaggcaagaggctgtgtcctggtagcatctagtccagaaattcttactcgtgtgaggaagggtaaaattattaaccgtccacttgctgggactgttcgaaggggcaagacagagaaggaagatgaaatgcaagagcaacagctactaagtgatgaaaaacagtgtgctgaacatattatgcttgtagatttgggaaggaatgatgttggaaaggtctccaaacctggatctgtgaaggtggagaaattaatgaacattgaacgctactcccatgtcatgcacatcagttccacggtgagtggagagttggatgatcatctccaaagttgggatgccctgcgagccgcgttgcctgttggaacagttagtggagcaccaaaggtgaaagccatggagctgatagacgagctagaggtcacaagacgaggaccatacagtggcggccttggagggatatcatttgacggagacatgcttatcgctcttgcactccgcaccattgtgttctcaacagcgccaagccacaacacgatgtactcatacaaagacaccgagaggcgccgggagtgggtcgctcaccttcaggctggtgctggcattgtcgctgatagcagcccagacgacgagcaacgtgaatgcgagaacaaggcagccgctctggctcgagccatcgatcttgctgaatcagctttcgtagacaaggaatagagtctctctcaagagagttgattttgttagttcttgttcatggttcttctcgctgcatgtttagcaggaaaggtatcatcagtgagttgagagaagcaataagcctatgttgtcatgtgaatcgaataaactggaggttatggtcgtgagctattattagctgtgttcattagaaaggtatatgcttttagattgttttgtttggtggaggcatgtatagtgcgctctctggctaaatcaagcaagggcttaacaggggtattgtcatccaaaaaaagcagccgcaaaaaagttcttctccctatnaaccaaaanccaaaaaaa

SEQ ID NO: 59094 - DNA, 569 bp, Oryza sativa
  Clone ID: PAT_MRT4530_6074C.1
gacttttcgagtttcatttagaatcaaagtaattacacctccaagtgtttttataaactgaactttgcagttttacaagcttctcggccatacttagggccttggaagaccaagtgtacgatgaaaatcaaagtttttatttggctcctctttgatgatctgctaaacacaagagacatgcttgataggaagaaatgtgctccaccagatgctgacctaacatgtttttttctctgcccttctcagcacagagaaactattttacacctcttatccctcagtcgtttcagtgaaaagtgctggtagaaacttggtatcttttggaatacctctcttcttgatttctttcaaattgtgatcttagcaagactttggttcagatagaaaggtttcttagaagttttcttcacagcttgctagcacatttggaaacagcaaaatggaaagatatttcagaatattggtcctttctttgatagttggtggtctgctattcaaaatgaggttcttttgcatatgtataggatgaatgatcccttaagataggtgctgattggttacaacgcttg

SEQ ID NO: 59095 - DNA, 1851 bp, Oryza sativa
  Clone ID: PAT_MRT4530_60750C.1
atggagtccatcgccgccgccacgttcacgccctcgcgcctcgccgcccgccccgccactccggcggcggcggcggccccggttagagcgagggcggcggtagcggcaggagggaggaggaggacgagtaggcgcggcggcgtgaggtgctccgcggggaagccagaggcaagcgcggtgatcaacgggagcgcggcggcgcgggcggcggaggaggacaggaggcgcttcttcgaggcggcggagcgtgggagcgggaagggcaacctggtgcccatgtgggagtgcatcgtctccgaccacctcacccccgtgctcgcctaccgctgcctcgtccccgaggacaacatggagacgcccagcttcctcttcgagtccgtcgagcaggggcccgagggcaccaccaacgtcggtcgctatagcatggtgggagcccacccagtgatggaggtcgtggcaaaggagcacaaggtcacaatcatggaccacgagaagggcaaggtgacggagcaggtcgtggatgatcctatgcagatccccaggagcatgatggaaggatggcacccgcagcagatcgatcagctccccgattccttcaccggtggatgggtcgggttcttttcctatgatacagtccgttatgttgaaaagaagaagctgcccttctccggtgctccccaggacgataggaaccttcctgatgttcaccttgggctttatgatgatgttctcgtcttcgacaatgtcgagaagaaagtatatgtcatccattgggtaaatcttgatcggcatgcaaccaccgaggatgcattccaagatggcaagtcccggctgaacctgttgctatctaaagtgcacaattcaaatgtcttctatatcttatttcattttcactccagacccaagctttctccaggatttgtaaagttacacactcggcagtttggtacacctttgaacaaatcaaccatgacaagtgatgagtacaagaatgctgttatgcaggctaaggagcatattatggctggtgatattttccagattgttttaagccagaggtttgagaggcgaacatacgccaatccatttgaagtctatcgagctttacgaattgtgaacccaagtccatacatggcatatgtacaggcaagaggctgtgtcctggtagcatctagtccagaaattcttactcgtgtgaggaagggtaaaattattaaccgtccacttgctgggactgttcgaaggggcaagacagagaaggaagatgaaatgcaagagcaacagctactaagtgatgaaaaacagtgtgctgaacatattatgcttgtagatttgggaaggaatgatgttggaaaggtctccaaacctggatctgtgaaggtggagaaattaatgaacattgaacgctactcccatgtcatgcacatcagttccacggtgagtggagagttggatgatcatctccaaagttgggatgccctgcgagccgcgttgcctgttggaacagttagtggagcaccaaaggtgaaagccatggagctgatagacgagctagaggtcacaagacgaggaccatacagtggcggccttggagggatatcatttgacggagacatgcttatcgctcttgcactccgcaccattgtgttctcaacagcgccaagccacaacacgatgtactcatacaaagacaccgagaggcgccgggagtgggtcgctcaccttcaggctggtgctggcattgtcgctgatagcagcccagacgacgagcaacgtgaatgcgagaacaaggcagccgctctggctcgagccatcgatcttgctgaatcagctttcgtagacaaggaatag

SEQ ID NO: 59096 - DNA, 1617 bp, Oryza sativa
  Clone ID: PAT_MRT4530_60751C.1
atggagccggctcatgcccccggcagagacaggctcagcgccctcccggacaacgtcctccgccgcatcatgtccttcctcaacgcgcgccagtccgtgcagacgtgcgtgctgtcgcggcggtggcgccacctctggcgctccctgccacgcatcaacgccgactacaccgagttctgcttcgcctgcttggatgagaagaaagagaaggtgcaggaggcgcggttcaagaagttcgtgagcacgctgctgctacgccgtgaccccgtccccttgctggacaagttctggctcaggtaccaggtgtctgacggcaacaacaacgagaaagcttcagcagaagctggtctgtggatcagccatgcgttgcagttgcagaccccggtcgtggaggttctcacatttcaatttccattgatgctagaccatgctgtatttacctcagactacttgagaaaattgggcctctccaatgcttatctccgcatgggtttcttcgagcaactcagcagaggctgcccacagttggaagatgtgttcttgaatgattgcatcattctggatgatgagatttcctcaaccactctcaagactttgaacatctatgcttctcggttttcggaggactaccgtgcttctatttctactccgagcctcacttctctgacattgtataaacctgatgccagtgtaccttcactaaaggacatgaaatcactagtgtctgcttccattattctcgacgataatactgatatccatgagttgctcatgagcctttctggtgtcagaaatttggacttggagtgcccgcagaaaatggtcacaatcgcaaaaaatacgcaatggtgtccagaattcaaagatcttgtaaacctgagtctgggtcagttttgtctgggctcaaagttatatgcattaactgtcttccttaagaactcaccgaaactagagaagctgactctggacccccctgaggtaatcattgataagcttgaagaaagatcatttgaatgtgagcaccttaagattgttgaagtcatatgctcggaggatgatagtactttgctcaagctcgtggaggacatctttgttactagtggcatgaactctcttcagattaatcgcaaaagcagttacaagcagtactattcagatgatttttttcagatttgattacgacagtacgactgcacaagaacatgcggaatgacaaaaggatcatgcattcacttgtcactagtcgtcaatatgatcacgctgtttgttggatgagcctaagtgcatgcatttcttcaattagaatttgaaggcagatagacatgtttactgcactcgtttgctgatatggcttgagaacaaacaagtgtgtcttgagttgcatgtaaggtctcaaattccgacagggtggtttacttgtttggaaaattttccccaaaaaacagtgataacagaatgtgtggctacttctgttgatgctcaaagaacaaagtgaactgcatgttacattacatgttttcagtattctatgtggccgttttatgtctttctgagtcctgacattatgttacaatctgaagacctgctttcacttcaaatttcactattttttaaccc

SEQ ID NO: 59097 - DNA, 1783 bp, Oryza sativa
  Clone ID: PAT_MRT4530_60752C.1
ctcgaaagcaccaccggatccgacgaccccctcctcccctttctcccctcctcacgaaaccgcctcgccttcctcttcttttctttttcgctcgcttcgcatcgctcacatgcccctgcctgccgccgcagacggggcgccatgtcgcgtagcggggtggaggtggtcgtgagcaggggttgctccaggctcgtcctccccgggatgcagccttcctccgcctccgccgcttcctcctcctccttctcgcgcggcggacatggcggcggcggcgaccggaggccgctgcccgatggccccttcgccggattggtcatctgcgtcaccgggctatccaaaggacggcatatgcttttccttagcgcgcagcacagcttcgccggccgcaagtttgagcacgcggtcaagcatggcgcgaagaatggcctctttgttgtaacacttggttggcttgtggattgcgtgcggaggagcatgaggttggatgaatcgttatatagcatcaagaacattggggagaatggaatgccactcggggagttcaaccggcttgtcggcgctcctgttagtgggaattcttgccttccaccgatgatgtttcaggaaaaaacattttcagacacgaccgaaaagcatcggcttcagacatctagaaaagaacatgaccatgatgaatttctctttacaaacgactcgatctacattgaccctgggatatctggtgaaatgaggaagaaggtatctgatgctgctactagagaaggtgcaaaattgttggaccactggtttattggctgtcatgcgacatatgttgtgtgtgaggacgcttctgtcaagagatatgttggtcattcagacaacattgtaactccactttggatattgaaaaccgcaaaggaaaaaggtttgcagcgtcttgtccatttgtcttcggacctggctaggcaggttgccacgattcttgaaaatgcccagacatttcaagagaatagaaaaattggggatgttccttctgtcaattcaaactccagtggagtaccatcaacccaaggggagatagatgaaattcatcaagagaggcaaaaatttgttgaagtagcaaagaaaaatgtccgagatcgccgtgctcgccgtatgcagttttcatggtcagacgatgcctttgagcaacaaagcactactttcttcgatgcgaatggggatggcaaggatgatcagtcaagcgatagtttcacccgcccactaagagaaagtgagaagagtgaagtgatctttaagaaccacttccttaccgtactcttccccattgatcgttttggtgagcttggaccttcctcaaggacattcttcagcaatggtggtttcacacgcatacaagtgcttgatcacatctacaacttctaccaggaaaatatgtcttccgatgagataaatgtagccctgcaaacggattcacgacatgctgatcgacttcgctcgctgtacgcaagtactgaatcagcagaaagaggttttgtaacattcaaaagaattgattttttgggaagccgaagaagttttgaggggctaaaacgcctcagcagagagaacaatagcaatgtatatgagcttgtgattagggcataaactgcaccatactcggtgttatttagtcaaatttgtttgttgtttacaggttgatagtgatgtactaccatgtatgcacgccgaataaaattgtaggagataatgatatatttatagatcaatgaaaaagatcatgttgggcaaaaaaaaaaaaaaa

SEQ ID NO: 59098 - DNA, 417 bp, Oryza sativa
  Clone ID: PAT_MRT4530_60753C.1
atgctgttcgttcgcgccatcgccggcccgggcccggcgctcctccctcctgtcaaggacgaggatgccgacggcgatggcaacccggaggccagcggggaaggaggcggagtgcctccggtgacgataagattaaatcaacacattaatttcacagtaccaatcgcctacaactacaataacactgctgatcacctagtgaagaacacgtccatgtcgagccgtggttcatcaacagaaagaggattagaagattcaaagaagaagctcgatgaggagaagaccaagaaggttgaagccgtgcaagttggatcaaactctgtccatggagggagcccggatgttcatcagtttgcgaagatagtagtggttgaacgccggggaccaacgcctcaccctaagaagcacaacttatga

SEQ ID NO: 59099 - DNA, 348 bp, Oryza sativa
  Clone ID: PAT_MRT4530_60754C.1
atggaaggaagaactagaccgcgggccgcgtcggcgtcggcgtcggcgtcgcccccactccaaaacctagccgtgctcgccgcccgtgcgggcaagcgcgatggggggagaaggctagggcacggtcgggaggggatgggatgggatgctcgggggagaggggaggggcgtctgcgccgcgcccctccggagctgctcgctggggcggtggggatgggagcgcgcagcgatgagggcgaggtggcggcggcggcggcggggagaaggccggcggccgcggcggcggtggtcggctacagatcggagagagatttggagagagatgggggaggaagaggaggagagtag

SEQ ID NO: 59100 - DNA, 651 bp, Oryza sativa
  Clone ID: PAT_MRT4530_60755C.1
ccggccgggaagcgccgcatctcctctcctcgcgctctctccgcatccgccaccatcagcgccgctatctcctcgtgctctctcgccccctcgccgccgtgcgcctcccccttgcgtctcctcgcccttcgcctcaaccggcatcgcccgccgccgccgatccggtctcccgccgcatctcctcgcgctctctcgtcccctcgcgtctcctcggcctccgcctcaactggcatctctggacacccgcgccgcctccacagccaaccgtcgccaccgtcgctgacttcaccgtggccatcccgctccgcctccacaacccgcgtcgcgcccatccttcgccggatcctcttctccaatcaaccccatctcagcgtggcgtcgtagcccatccttcagtgtccaccgtcaccgactccccttctctgagcgggtgcaaatcctgctgatcgaccccatctcagttgactctagtggagcacaattactgagaacaactgctgtcaagggcgtcgcctcgctgtcacttcagactacggcatcgccggtgattatccatcccagtatcactgcgaacagctgctactgtccctcacaatctcattctctggattgaagcccgtctctccttccagctgacccagatgatcgtcg

SEQ ID NO: 59101 - DNA, 392 bp, Oryza sativa
  Clone ID: PAT_MRT4530_60756C.1
atggtcggcggcggggtacgtgacggcgacgaggaggcggcgctatggccgcggccgatcatgctggaggaggactactactccagacggcgccgcgcccgcgagcacgaccggcgccgcgccgccgccctcagggaggaggagtccaacgagcggctcgcgcgggagtgcctggatcactacaacgccctgcacccgggcgacgagcacgacctcgcgccgggcgacgtgacgctgtgcagcgcgccatgcaactccaccacctggacgcacggcaacttcgtggctcgccgccgctccggctgcctcgcgtcgttgttcctgccctcccggccgcggacgctcttcttcttcgagcacatgtccagcaaggacttcctcggcgtcgtcac

SEQ ID NO: 59102 - DNA, 1323 bp, Oryza sativa
  Clone ID: PAT_MRT4530_60757C.1
actcctatagggcgacccgggctgcagccggccggcgcggccgcctcctcctcccaaaccccacaagcgaatcctagggtttctcgcctcgccgccgcatcgccgccgggaagtctccgccgccgccgcgatgttggagctgaggcttgtgcaggggagcctgctgaagaaggtgctggaggcgatccgggagctggtgacggacgccaacttcgactgctcggggacggggttctcgctgcaggccatggattccagccacgtcgccctcgtcgcgctgctcctccgctccgaggggttcgagcactaccgctgcgaccgcaacctctccatggggatgaacctcaacaacatggccaagatgctccgctgcgcgggcaacgacgacatcatcaccatcaaggccgacgatggctccgacaccgtcaccttcatgttcgagtcgcccaaccaagataagattgcggatttcgagatgaagctgatggacatcgacagcgagcacctcggcatccctgactccgagtaccaggccatcgtccgcatgccgtcctctgagttttccaggatctgcaaggatctgagcagcatcggagacactgttatcatctcggtgaccaaggagggtgttaagttctcgaccgctggagatattggaactgccaacattgtctgcaggcagaacaagactgttgacaagccagaagatgctacaatcatagagatgcaggaaccggtgtcactaacctttgccctgaggtacatgaactccttcaccaaggcaagcccgctctctgaacaagttacaatcagcctttcatctgagctgccagtggtggttgagtataagattgcagagatgggctacattagattttatctggcgccaaagattgaagaagatgaggaaatgaagtcgtgattgtcgcataaggatatgacaaaataccccctagtcttcagaccatcatcctttgcttaacaattgtttgtaagcaaaatgatgttatgcttatcatcgcttacgacggaatgctttttacctttgtatctgtgacttctgtaaatccttggatttacagtgatgaatgttaggtttagtagatttgtgagtttatgactgcattgctgtagcatgattgtgctgctgtttgtttgttcaattcggttgttacatatttgttgggagaggagcttcctttgggttgacactcacttcatcagtgtttggacccagaattgctatcatcctcaagctgtgaaagccaaacttccatctttgagaaggcttccaaaagaaaaaaaaaaaaaaaaaaagcggcc

SEQ ID NO: 59103 - DNA, 500 bp, Oryza sativa
  Clone ID: PAT_MRT4530_60758C.1
ggtctggaggtattaagccatgtgtttcatcctttggtgctgatcaatttgatgacactgatccagttgagagaacaaagaagggtgctttcttcaattggttttattttgctataaacatcggttctttgatatctggcacagttcttatttggagatatagatatcagatacctggaggaagcccccttataagagtatgccaggtggttattgcagccatccacaagagaaatgttgatttgccggttgatagttctgttctttatgagcttcatgtggcaactgcagcattggttgagattaagcgtctggagattgcaagcgattcctcggttgattctgccggcacacatgccgtctgcgatttcctctacaatccagcaatttcagttgatttcgtcagctcctttgctcctacctcctcaattgattctgctacaagcggtaaaaagaagtcagaaacaagtgttgaagctagtggtacagagatgcaatag

SEQ ID NO: 59104 - DNA, 3858 bp, Oryza sativa
  Clone ID: PAT_MRT4530_60759C.1
atgggggaggcggaggaggggctgatgcacaggaggattgagttccacgcggcgaggaggccgccgcgtgcggtggagggggcgggagggaggttttgggtggagatcctgagcccggatgccgataaggcggcggtggtggcggcggcgaggagcgaggggctggtcagggggttggagaagggggagggtagcgggggtgggatcgacccggagcttcgcgtcgcgaggatgtacttgcggagaattgtgagtgtaatacattttggaatagttatgcgcaaaaatttgcatccgcgtattgaaggtcctttttactggagtaatctgctcattcacctgaaacacgaggctttgcaagtgaatacttcactaaagatgccctattgccctatctatgtaaaacagggagctggcttgcaaaattttggcaatacctgctacctcaactcggttctgcaatgcttgacgtataccgagccgttcgtggcctacttgcagagtggggagcacatgtcctcatgtcggactatcggattctgtgctttatgtgctcttcaaagacatgtaggcatttctcgtagtttccgcatctcaaggcaggaagacgcacatgagctaatggttagcttgcttgagtccatgcacaaatgttgtttaccttctggtgtaccaagtgggtcgccaagtgcttatgagaagagcctagttcacagaatatttggtggtctcttaagaagtcaggtgagatgcacaacttgctcacactgttccaacaaatttgatcctttcctggatctcagccttgaaattgccaatgctgctactctggtaaaagcacttcaacactttactgcggaagagctactggatggtggggaaaagcagtacaactgcgagcactgcaggcagaaagtagtagccaagaagaggtttatgattgagaaggctccctctgtgttgacaattcatctaaagcgctttagtcctttcaaccctcgtcacaagatcgacaaaaaagtgcagtttcaaccaactttaaatttaaagccatatgtcagcaatcctgagggtatggagttcaaatacagcctttatggtgttttggttcatgctggttggaatacacagtcaggtcactattattgctttgttcggacttctagtggcatatggcacaatcttgatgataacaagagaacttgttttgtcaggcaccttcttcgtgcactatattatgtagtggtctacagtcaacttaagggaggatatggggaatgtgttcactttgagggatggagggtttaccaagttcgtgaggcagatgtgctgaggcagaaagcatacatgctattttatgtgcgcgacagaacaaggagctcagtgatgtacagtgataattgtactgttaatttatcagtaaataaaatgatctccgagaagatcacatgtatgaatggttcaattaaaaaagatacagtggaaacgaaaacactgagagttccctcacttgtcaaagaagatgtgaacttgaagaaacagaactcagaaaatggtcaatctagcaatattagcaatgctccacaggaccagtgttcaaaaagtcatagcaacactgaagtgcttgaagctgcagcatccccaaacaatgacccagcttcaacacagaaagcttcttgcatacgtccagatacagctgctgttaacttgcccatgaaaacagagcaaacagctccagacaatcgaagggaaataacatctccagcacaagctgatgtttctgttcttcacaatgcaagtttcaatcagaagttgtatgagaagcagctacaggagcatcaactagaaactgatgatgcacttactgattccaggaaagatgcccctgctgccttgtgcacatatggtgttggggatggtttgttggggagaaatggccagtcttctgaacctcacataggtccatgccctgctgctcttcctatacacaatggtggtgaaggattgctgggggcaaatggccaggcatctgaagctcactcaggtccttgctcttctgcctttcctatacataatggtggcgaaggattgttgggggcaagtggccagtcttctgaacctcacacaggtccatgccctgctgctcttcctatacacgatggtggtcaaggattattggggccaaatggccaggcttctgaacctcacacagattcttgccctgctgcctttcctatacacagtggcggtgaaggactgttgggggcaaatggtcaggcttctgaacttcacacagatccttgccctgctgcctttcctatacacagtggcggtgaaggattgttgggggcaaatggtcaggcttctgaacctcacacagatccttgccctgctgcctttcctatacacagtgccggtgaaggattgttgggggcaaatggccaggattctgaacatcgaacaggtccaatccctgctgcctttcctgtatggaatggcactggtgtaatattggagaaatatggtcaggtttctgggccagcagatccattttgcaagccaactcctaccataagtgatacagtgtctattgcacaaatcatcccaactgagcatgctgctgtttctaatggaacagtatctagtagtgatgatttaactggcaatactgaagctaacgagtcatcagagtttgtaaagaattacggcgaacaagttatggtgagggatctttctgcagagacctctggtgatagagcaaatgcagatgagcagatgtattttcatccatgctgtggtcccatattacaatggatataccatgtgttctctgctgttctatgcatgaaaacagaccttttattcgtattggtgcatacttcaatgcagaataacacactggaagttggtaaggatgttgcaaaggacactgataatgtggcaaatgccgaggagcaggtattgaaccaccccttggccgagcaggtaaaatctgagaagcaaatatatcctggaatttctacaacattgatttgctctgaagacacaacacagttgatagataaggatacaggcagtggcaaattaaataaaaagatgaattgcaagtcaaagaggcaagtgaagtatcctgctgttcgcatgttttttgggcccaaacaactgttactggcatcagtaaaactgcacaagaaaaggaaacacaagagatccaaaaaacaccatgcactttctgtgcacattgaaagcatcatcactgatcagcagacatcaacatcagaaactgttttctcaaagatcatatcacataaatcccgtggacagaaacgttcttgtgccagtgcaagttctgaggatggcactcagctgttcaacaagaaacagcatatcgaaggaaccaccaacagtgttcccatggacaacaacgatacaaaacttgctagcgctgacagcaacgatgcaaaacttgctagcgccgagctaccaagctcatgtacaaactctctggtgaaccagactgattcaagaaacaatgtaaatgcaaatgagagaggcccctggcattttaatctcctcacaaggggtttaagagaaattactgtgccacgttgggatgacactgagattaaaaatacgaaggaaacagagatactacatccaaggactagaagcatcggctatgtgctagatgaatgggacgaggagtatgatcgcggcaagagaaagaagatcaggaaaccaaagcatggcttcagtgggccgaaccctttccaggagacggccaacatcagatcacggcagaggatgagactacagtctgaccagaccaaatctgggaaccagcctctcaggatataa

SEQ ID NO: 59105 - DNA, 238 bp, Oryza sativa
  Clone ID: PAT_MRT4530_6075C.1
gagtggacaaccaccagaaagggcctgagatggagaatgagaacaagcattgaagaatctagggctgaacctcggctagtgaggccgaaagatgcaacatactggcaggcattctaagctagcaagctttacattgagcagatcgggaagaggattaactgcatgaaagcaagctgtaattgaaaagagtgaaaccctaacagccaaaaagaaagtggtggcatacaatttatataac

SEQ ID NO: 59106 - DNA, 181 bp, Oryza sativa
  Clone ID: PAT_MRT4530_60760C.1
gcatagggtgctctatattcaatacagaggaggtccggcccacattaacaaccacatttgtgtgaggtctacacgagagcaatttgttcaccaagtgcaacacactttattccctagtgccgagcaatcacacatttgtgcttttctgtacatcataccgcgaaggtggggtctttttaca

SEQ ID NO: 59107 - DNA, 318 bp, Oryza sativa
  Clone ID: PAT_MRT4530_60761C.1
gctctctacaggagatctatgtcagcatatttttctacttggaatagattaaataaagagagagagtaaagctatctactaacatggagatggtctgtagagaaaaacgaggcatggaagagagagctaaagatacccatgtagacatactattgaggtggtttactattaatctagtctattgctgagatgtatatgttttatagagagcaccttactttaccttgcgggtgcaaatattatatgaactggctattagattagttatagatgaattggaactaagtattggactatgctattaaaaaaaaaaaaaaa

SEQ ID NO: 59108 - DNA, 186 bp, Oryza sativa
  Clone ID: PAT_MRT4530_60762C.1
atggccatcatgatcatgttcgtcgctctcgacgtggaagctaagccgcgtgacgcggtcgtcggcggcggcagcggcacgggcgaaggcgtcgcggcggggcgagcagagctgtggttccgatgccgggcggtcgtcgccggtcgccatcggtcgtcgatgccggcggccggggggaggctatag

SEQ ID NO: 59109 - DNA, 323 bp, Oryza sativa
  unsure (1)..(323): unsure at all n locations
  Clone ID: PAT_MRT4530_60763C.1
agtcaaaaaatnntatggtcagtcaataataggtacagggttgattccattgagtantacgattacaacaattaacgactattaanagaaaggggtggcttnctatgcgcatagagaggcaaatcatggggtagcttaattacaacttacaaactaagctcttatctatcaagtctgatttgattgatgcacctcaagaagaagaggaagaagactaccatnatnatgcaatcagctgctgacttacttttcgattatggtggcgagggtggtctttgggactgcgcctatgaccctctccttcttctcccccttcttgaaca

SEQ ID NO: 59110 - DNA, 762 bp, Oryza sativa
  Clone ID: PAT_MRT4530_60764C.1
cctcgaaatcgacggatcgcggtctgactgaaggtgttgcgccggtctaaccgcctgatgaacgtcggtctgaccgatgtagatcgatcggtcgaaccgccgaagtcgcctgtcgtgcctgtcgccgccgccggtctgaccggccgtatgtcgtcggtctaaccgccgcttgccaccagtctgaccgccggtatatcaccggttagacgctccccctctatttatacccgaggtaggcagcctaaagccacgaaccaaactcatactaggagtcctaaacaccttaggaaaccctctagtacaagaaacaaactttacataaccaatcataccaaatttggactccttccaaattcgactcagcatcccatacgcacacaatacctccatcgtatgccatatggaatctccatcaaccacatgcatcaactctagccggcaacacctgcccggtctgaccggtcacatgaaataaaagtacctgcgattcacctgtaaattcaatcatctccaaaaccacttcgtgaataaattccaaataacaaaaccaataatctccaatgccaattgttcatcacataataataatcaaaaacacctttgattttacagtgccatgtggcggcttgagagcgtttgtaggagtgccacatggtggctttggagcgtttgtagggagtttaatagatttttagtatataatagattttggatgggtttgtcagatactgctttaataattcctgccatgtctggactctt

SEQ ID NO: 59111 - DNA, 1095 bp, Oryza sativa
  Clone ID: PAT_MRT4530_60765C.1
aattctgatagtatgattgtttagcgttaaaaatatcggtagcactattccgcgctctacagcgtgaaatattagttcgagcgccgcacaacgccctctccttccgtttttttccttttttcccacccctcgaaatcgacggatcgtagtctgactgaagctgtcctgccggtctgaccgagattagatctccggtccgaccgccgagatcagctgccactcgctgtcgccgccgccggtctgaccacagtgctcctgccggtctgaccgccgcttaccgccggtctgaccgccggttgatcgccggttagacgctccccctctatttatacatgaggtaggcagcctaaagccacgaaccaaactcatactaggagtcctaaacactttaggaaaccctctagtacaagaaagaaactttacataaccaatcgtaccaaatttggactccttccaaattcaactccgcatcacatacgcacacaattcctccatcgtatgccatatggaatctccatcaaccacgtgcattaactctagccggctaccagagcccggtatgaccggtcacataaaatgacaaatcctgcgatcacctgtgaaatccaatcatctccaaaaccactttgtgaatagattccaaataacaaaaccaataatctccaatgcccaattgttcatcacataataattatcaaaaacacctttgattttacaattaacagaacaagcatgcattaaagtataaccattggcggagctcgtggctcctcaccgggagaccgcgcaggcccccctttgccagttcggccgggggcttagggtgagatctcaagctctcgctgtgtgtggaaagatcgctcgcccggaagaaacacgagacacggcgatgtatacaggttcgggccgccgcgaagcgtaataccctactcctgtgtttttgtggatctccacttctgcctgaggcgggcacgtcgtgggaaggtggctgtgtgctgacgacatgagcagtgtcagaccggtcacaaatcggtcattcttgtcctccacacgtcggctcagcaacgtgcatgtttgcccttcttcaaacaacat

SEQ ID NO: 59112 - DNA, 942 bp, Oryza sativa
  Clone ID: PAT_MRT4530_60766C.1
atggcgtggccggggcagtggcgaaccagaaaaggcgcgttctcgcgcgtcctttcattatcgagcgaggaacctagcttcgaggagagcgaggccggggttggcggccgggcggggcaggggctggcggctggtggcggcaggctgcacgtagggcgggggatggcgaccggcggcgtggccgtgcggagggctgcgcggcaagcggtggcctgcggctctgccggaggggaagcaggaggcggcagtggggcgcatggatatgtggggggcctcgagggtcctgccgccacgccacgtttttcccaatcttttgcgattgcatggcgagcgccgagcgaggccatggagtactggtactggatagatacgggggccgcggctggcgggcggcgggcgggcgaggacaagcacctctccaagtggaccgacgccgacgtcgacgagttcatcgcctccgatcccgtctacagcccgcagctcaaggcgatgagggaatccaggaagtccgcgctcggcggggctctcgtcggcggcacgcacctcggcggcatcgccctcaagtactccaaggccccgcacgatatcatcaccaatcgcgacctatctaatcaactgctgttctgtgctgtgcgcgtgcgtttggtgcctgatttggttgacgagaccgcggtcgcgtacaacgccgaggccgacgcgtgggtgccgctcccggacatggcgacggagcgggacgaggccagggggctctacgtcggcggtgtgttcgtcgtcgtcggcggcggtggagacggagctcgctcgggcagccacgacggcgccgcctccgccgtgcacgccttgctcctcgctgccgcctccaccatgtacggcgtcggcggtggcggcggcttcaacgcgccctccacggcattcgcccggcggccgcaaccaggaggatga

SEQ ID NO: 59113 - DNA, 2889 bp, Oryza sativa
  Clone ID: PAT_MRT4530_60767C.1
atggccgccgcgtcgacgttccctctggctctgctgctcgccattgttgccgcatgctgcgtcgccgggggcgagggcggcgcgctggtgggcgacacgtgcacggcgtcgtcggcgtcgagctgcggggcggggatgcggtgcgccacctgctcaccgctgcccgggatgggaccacccgtgtgctcgcggacaacgccccttgaccccaaggcgcacgggacggacctcgcgttcaaccggtacacatggctcacgacgcacaactccttcgccatcgttggctcgccgtcgcgcaccggcacgcccatcatcgcgccgcccaaccaggaggacaccgtcaccgcgcagctcaagaatggcgtgaggggcctgatgctcgacgcgtatgacttccagaacgaagtgtggctctgccactcgttcggcgggaaatgctacaacttcgctgcctatcaacgcgcgatggacgtgctaaaggagattggggcgttcctggatgcgaacccatcggaggtgataacggtgttcgtggaggactacgctggtccggggagcctgggcaaagtggtgggcgggtcagggctgagcaagtacctgttcccgcctgccaagatgcccaagggcggaggcgactggcctctgctcaaggacatgatcgcccagaaccaccgcctgctcatgttcacgtccaagaggggcaaggacggcagcgacgggttggcgtacgagtgggactacgtcctggaaacccagtatgggaacgatgggctggtgggcgggtcgtgcccgaagcgagcggagtcgatggcgatggactccaccaagcagtcgctgatcctgatgaacttcttcagcaccaacccgagccagagctgggcctgcggcaacaactccgcgccgctcgtcgccaagctcaaggcctgctacgacgcctccgccaagcgctggcccaacttcatcgccgtcgattactacatgaggagtaagggcggtggagctccgttggcgaccgacgtggccaacggccgccagcaatgcggctgcgacagcatagcatactgcaagcctgggtcagcgttcgggagctgcagtttgtcatcgcctcctgcagcgccaccaaagatggctgctgcttcaccgccggcagcggctccagcaccagcaccagagatggctcctagttcaccgccggcagaaccaccagagacggcgacggaggctgctggttcagcggtgcgaccggcgtccatcaaggggagcagcagcgacgcgcgtccaaggcaggcagagcggggcgcggtgggcgagcggcggttcgcgagttcggctgcggtgagcgcggcggcgacgggcgaggggcggcggcggtggcgcggcagcagctggtgccggccggagagggcggagatgaggccggcgggagagggggtgggcgccgccggctcgcggatcctgccgcccccaccctcgggagcagcggaggtggagacaaaggcggccggcgcccccctctccgatagggcgacggtggcggcgacgctgttccaggtgatcgacaacgagctcgggttcgtcaccgactactaccactccgtcctccccgtcatgctcgcgagccccttctttctcctcgtcaactacatcgtcttcccatcctcgaggtgtgggagcctgggagtcgccgtcttcctcctctccaactggttcaccgtctccatggtggtgcgccgtcgatggccgcggcagagtgcggggacgagtcgccgtagtcggccatggtggcgacgagtccctgctcgcgctgcgcacgcctacgggataaagaccgcgccgctgctggccttctacgcctcggccagttcggcgctcgtcgctctgagcgtcagcgtttgctcgccggagaagaagctggtggtgccggagagcgtgtgcgggcggccgttggggctgcagttccaccacgcctctggcgacctgtacgtggccgacgcgtatctgggcctcctgagggtgccggcgcgcggcgggctggccaaggtggtgacgacggaggccatcgatgtgccgttcaacttcctcaaccggaaagctttgcggcaccacacaaaagaaccttttctgttcttcctcaacggcttcgacgtcgaccagaggaccggcgacgtctacttgaccgatagcagcagcacgtaccggagaagggtcggcgtgagcttagcagagacgagagctaggaagagcaagaatattcgtggtgacaaacacaatcgcacacgtggcctggcacctccgagggacgtcgggcccgagggtgatgtgttcgccctcctcttagtccccccgagggggtcgggccgcacccgcctcggccccgagggccgaggcgccccgacccctcgtgggtctttgctctgcgtgtatgggttagaccggtcagatcgcgggttaggtggcgacaggcgatctgacacacgcctcgccccatcccgtcaggacgagggcttctaggcgctcgtccccagctggagctagcgtgttacctcccagagatggcacgttagtcctggtcagatatatgccaggcttcatcacgtgggggacaagaatgaccgacgtaactggtctgacaccggtcatgtcgtcagcagacagccacgattccacgtcgcaccggcaaaggggggcctgcgcggtctcccggtgaggagccccacgctccgtcagggtctcagtcctgctcgccgctcttcgcccattgtctatctccgccttgttagccgtcctccgctgtaggcctccacagaccttgagtggagatgggagggtcgaggcggaggacgggaggaggagaaggaggtggcgaacccgcagccaccggctactcac

SEQ ID NO: 59114 - DNA, 923 bp, Oryza sativa
  Clone ID: PAT_MRT4530_60768C.1
ttaattttcccaagcccagatgaggagctccttgaagatgaaggctttggtgtctagctcgtgcctgccgtcaagcgcctgtggtcgtcgccctagtcttccgctgtttttcgttgtctttgtgtgctgggccgttgttgcccgtgtaataattttatatacgcttccgcttgttaaactctgatttgtatcaacttttggtgtaccttgcctcctgaccgcttcccttgggaagggaaattgctctggcataacgccgggggctactgtcggtgatatgggaccgggagtatcatgaccagaggcttgaggcagacgcaattgcccacgtggcctggcaccttcggggacgtcgggcccgagggtgaggtgtccgccctcctcctgatttcccccgagggggggggttgcgcttgccccggccccgagggccgaggcaccccgaccccttaaggaagtagcatttattgcagtctggtcaagcgtgtcacgctgcatgcgacgcagtacagcgcgttcctttatccggttggcggtctgacgcacgcctcgccccatcccgtcaggatgagagcctccaagcactcgtccctagccggagccggcgtgttagctcctggaggtggcacgttggacccggtcagatatatgccaggcttcatccgatttgtgaccggtctgacgctggtcatgtcgtcagcagacagccatgttcccacgtcgcacctgcttccggcggaagtggaggtaggtatgggccgtcccatcagaaggtcattcggacggtaaccatacaaatcttgcccacttagaaagggggacgactctggggacgactctggggaggagcttctcagcggcccgaacctgtatacatcgcccgtgtcttgtgcttcttccattctcgtgaactttccactcac

SEQ ID NO: 59115 - DNA, 544 bp, Oryza sativa
  Clone ID: PAT_MRT4530_60769C.1
acactcctatgctctgtcgcttgaacaaatatccgaacaaatggttttccccaccggagtggtaatctctaagtttaatcacacatagatgacccatgataccacaaaacggttctcagctcgaacgattcgcacgagcgacctggatccatcattatcatggaaggatatagagtggctcaagtccataaccagcatgccgatctttctccaagggcatcgtcaccgctgaggacggtaattactccagttcatccatcatcttggtcactgaataattcactgtcatgcatgttaaatatatgtgatccgaattttgggctcatagtatattcgtattagttatgtaatagactctactttataggattagtttcctattaggactcctagatttctcctatatatatcccttataagccgcaccagggagggtgcgatagcccaatgtattccctgcgtttgtatccaactcttctatagtgatcattgccggtcggcgcccgtggttttctcccgccaagggttttccacgtaaaaaaaa

SEQ ID NO: 59116 - DNA, 194 bp, Oryza sativa
  Clone ID: PAT_MRT4530_6076C.1
tttttggtttttttactagcaggggttttacattttttataaattacaatcaaaccaggctggagaaggagactgtactgtccacgaggggccgataccaaaaacagctagtaagcagggcggattcccaaatgaacaggcccacataataaacaagtgcgctctggtttgaagcgcacgtttgcacaatggaa

SEQ ID NO: 59117 - DNA, 2343 bp, Oryza sativa
  unsure (1)..(2343): unsure at all n locations
  Clone ID: PAT_MRT4530_60770C.1
atgggtcaaaccacttccaagtctgccggcgacggtaagcccaaacccaaaaccacctcggcggcggcagcggcggcggccgtcgtgagcgagacagcaaccgggtcgatgaccatgaggatcgccggctactctcaaaccaaggggatcggcgtcggcaacagcatcaactccagcaagttccacgccggaggccacacctggtacatagcctactaccccgacggcgaccgcgaggagtactccgactgggtctccgtctacctctgcctcgcccggccagctgccggcgccgcggccgacgacgtcgtcgaagcgaaattcacgctcagtctactcagcgggacgtacggtgcggtggtcgaagagaagatctgcacggccaagaaattctccttcgccaatggctactggccaagttgggggcatacaagattcatcaagaggaagaagatggacagtcgattgtggtcgtgtctacatctagacggtcaaagtttctatatcagatgtaatatcaccatggatattatccgctgtgaggcggccaccacggcggtggcggtgccaccgccggacctgcaccggcacctcgccgccctcctcggcagcggggtgggggccgacgtgcgcatcagggtcggcggcaagctgttcgcggcgcacaagaacgtgctcgcggcacggtcgccggtgttcatggcggagctcttcggcaataatggcgggaaagatcagaaggaggcgaaggctgctgctgcggcaactggcaatggcgttattcggattgatgatatggatttgagggtgtttcgggccatgcttcagttcatctacaccgataccctgcctaagatcgacaagggagacacggcgttcatggctcagaatctgctcgtcgcggctcataggtatgggattgagaggctcaagtcgatcagcgtcgacatgatacgcaaagcggctagaacgatgaacctgatagccatgatcattagaaataatgatgaaggaatcgccacccagctgcgcacgcgcgggcggctgggcctccatctccccgatgctccagaaaagcctcatcgatgccggcgtctgttcgagctgacgctgtgctacttgtccctggactcgacgctgctaattcaagctgctggtgatgcatctacccgaagctgcgacctcgccgagatgccggacgtccttgatttgcaagcttcaccgcactggagcgggctaaccatggaggaggtcatcgggaagccgccctgccggagcgcgccgaggatcgccggagctgccaccgactgccaagatttctatccattcccatgccggaggtcaagtatcacgcatggcgtcgaaaccagcacgatgacgatggaggcaagtatagctgcagcacaggaggaaggacgacggggaggacgacgagnctaggactgttgaacaccaccggcaacaagctagcagatgcatgctaattaagctaattattgcggcaacgtggccgaccaaccggagggtgacacatcatcaccatgctacagtgctatgcacaagaagttgtccctgcgatggctaaacaaantcctgttatttcaagtttttttaattagatgcagagctgtgattaaatggccggctgccatctacatcaaccactagtgctgtcaaaaaaaaaagctcgaggctcgcgagctaggctcgattcaagctcggctcgagctccaattgagccgaccccgagcttgggcaaaagctcgcaagctttaccgagccgagctcgagcttctaccgagcttaactgtgtacaatttatattgtgtaaaatcaaaggtgtttttgattattattctgtgatgaataattggcatctaagattattggttttgatatttggaatttatttacgaagtggttttcgagatgattggaatttgcaggtgaataggaactgctggtcgtgatgtggtccggtcagaccgggcatgtgctgtcggctagagttcaatgcacgtggttggtgaagattccatattgcatacgatggaggtattgtgtgtgtatgggatgcagactcgaatttggaaggagtccaaatttggtatgattggttatgtaaagtttgtttcttgtacgatgaggtttcctatgcggattaggacttctagtatgagtttggttcgtggctttaggctgcctacctcatgtataaatagagagggagcgtccaaccagacgatcaacaccggtcagaccggcggcacaggcgcagtcagaccgatctacatcggtcttccccgccgagactctcgccattttccccattccttgctacag

SEQ ID NO: 59118 - DNA, 668 bp, Oryza sativa
  Clone ID: PAT_MRT4530_60771C.1
tctttagctctgtgcgtcgtcagctctcctgcccgggacagtgatgagggcaaggagccatgcttgtcaggttaggcgtcgttgttgtagcctccgtctcagctttaactcttaagagagccaacagtggctacagagatggccaagcaaggtaaggacaggataaaactatgtgccagatgccacatcatctctcttttctcccttcctctctctctcattggattggccgggccggtggattgacgccgccaccgcacaccgccgcggaggcggatgcggacgtcaccagctcgtcgcaccacggggagggcctcctcgatgaccatcggcggaatcaccctaaactcgtcggcggagctggagcgcggacgacgacgtcgacgacgacttccaggctgccgccgagccaccgacaagcgagcgagcgagacacggcggaagagcgcgagggggagacggcggtccgtgggaggaggacacgcattccggtggccgggctgctcgagcacttcaagctcatcggctgcttcgacgacggcagcgtggagttcatgaccgtcgctgcacgtggcatggcgccgagatcgtcaccgtcgggcgtcggctggtacagcggcaaggaccagagaaagctcctcctctactgctacttccgcaccggctaa

SEQ ID NO: 59119 - DNA, 2526 bp, Oryza sativa
  Clone ID: PAT_MRT4530_60772C.1
atgggacggcccacaactacctccactttcgccgggagcagacgcgtcgtggaattgtggccgcctgctgacgacatgaccggagtcagaccagtcacgtcggtcattcttgtccaccacgtgatgaagcctggcatatatctggtcaggactaacgtgccatctctgggaggtaacacgctagctccagctggggacgagcgcctagaagccctcgtcctgacgggatggggcgaggcgtgcgtcagaccgcctgtcgccacctaacccgcgatctgaccggtctaccccatacacgcggagcgaaaacccacgaggggtcggggcgcctcggccctcggggccgaggggggtgcagcccgaccccctcggggggactaagaggagggcgaacacatcaccctcgggcccgacgtcccccgagggtgccaggccacgtgggcgattgtataagacattttgttgctcgagttggtaatttgcattctgttgttccctgccgagcaagctctcaatctcctctgcattgtcttcagcttcagcccatgggtgctgctggtatctccttaacatctccagcctctcagcaacctctttcatcgttggccgttcttctccattcatgcttatgcatcgcatcaggaggtatgtgatctcttctagcatttcagcgctcatctcattccttacttggctatctagtagctcttgatggcgaccaactttcattgctgtggtgaagcatgacaccaggctcctgttttcctctggcccgtccaagtacaatgctttcttccttgtcagaagctctagcatgacgacaccaaaactgtaaacatcgctcttatcagtcaactggcatgtcataaggtattcggggtccaagtacccgcaagttccctgcaccaacgttgcaatctcggcctcatcagttggtgctagctttgatgccccaaaatcagaaactttggcgttaaacttgtcatcaagcaagatgtttgccgtcttgacatctccatggaggattgggggtgaagccgatgagtgcatgtaggagagtgcctcggctgactctgccgctatccgaagacgagtatcaagtggtatgtcagctttgggttccttgccatggatgtagtggtagagggtgccatttgagacgaattcatagaccaacatgggcacttcaacttcgaggcagcaaccaagcagcttgacgacattccgatggttgatttgggagaggatgaacatttctctcgcaaactccttggtctcggcctcctccatcatcttcgacttcttgatggccactactgtcttgtcttcgaggacgcccttatagacaacaccgtgaccaccacgacccagaacacggtcagaggcgaagttgtgggtcgccctcttgagttcttctgtcgagaatatcctgaacccatgggtgcctccgccggagtgcatctgctgccggaggatcactccaccgttatgctcgaagaacttctgcttcgttctgatgagcttcctcttctggagccccaagtagagccagaagcacatgaacactgacaagaagacaccgacgctaaccccgtcgaggtaggggttgccctcgtagccctggcagcagttgcaccggtagccctggccgtcgatggtgtcgaagcactcactgttcgtgctccggcacgcgtagtccgtcgcgttgcgcttggcggcgctgcagttgtagacgttccggattgcccagtcgagcacgacgggcacggcctcgaagtcgctccggttgaaatccttcgtgtcgttgtacacggtgttgatccaggtgtgctccaccaggaacacgtacctgcacggcgtcgtgccgccgcggagctcgttgtccaccgccgccgtcccgttctcgaagttgaacatccgcggcacgtagaagttgagggtaggtggtatgatgctctggcagcaccgctcgccggtgcaccgccccggcaaccgcggcactgtatcattgcccagcgacgggcggcggcacgcggacatgcagccgctgacgtagttgccggagccgtcgacgatgtagccgaggttggggcagccgagcgcgacgaggcggttcttctccggcgagtagcggtaggtggtgctgccgttgatggacgtgtacgagaaggtggggacgtcggaggacctctcttctggaggagggtagcacttgctttccggtttgaggaggacccgggcctcgccatcggccagggacaggctgacgagctgcgggtgttgctcgaactgaagcgtgagtaggcgcggtggcgacgcgctgtcgtcgcagttgagctggaagccttcatcgcgggcgcagcgggcgccgatgccgaaggggtagggaacgttgatgtttccgcacttgtcgcggcagcctgtcagctgctgagccgacgctgctggtgtcaccggcgaaaggcgacagatgagcaagactgctgctaatgcaatcgcctgcaggtgcagggtattggtagccat

SEQ ID NO: 59120 - DNA, 885 bp, Oryza sativa
  Clone ID: PAT_MRT4530_60773C.1
atgcagcaggacgacggcacccctgctctgcacgcgagatggagatcggcgcaggcgaaggagcgcagacgagacgggagagtccgaatccatcatgcacgaatgctttccccgtttgatctctccgttgttcctgaacacaatcgcccacgtggcctggcaccctcgggggacgtcgggcccgagggtgatgtgttcgccctcctcttagtccccccgagggggtcgagccgcacctgcctcggccccgagggccgaggcgccccgacccctcgtgggttttcgctccgcgtgtatgggttagaccggtcagatcgcggattaggtggcgacaggcgatctgatgcacgcctcgccccatcccgtcaggacgagggcttctaggcgctcgtccccagctggagctagcgtgttacctcccagagatggcacgttagtcctggtcagatatatgccaggcttcatcctaaaccattataggcaagatgttgtgtgaagaagggcgagcatgtagattgctaagctgacacgtggtggacaagaatgaccgacgtgactggtctgataccggtcatgtcgtcagtagacagccacgattccacgtcgcacctgctcccggcgaaagtggaggtagttgtgggccgtctcatcagaaggtgactcggacggcaactatacaaatcatctcccaaaacacaggagtagggtattacgcttctcagtggcccgaacctgtatacatcgcccgtgtcttgtgtgtttcctgtctcgcgagccttccacatacagagagcttagaatctcaccctgagtccccggccgaactggcaaaggggggcctgtgcggtctcccggtgaggagccccacgctccgtcaccgtctat

SEQ ID NO: 59121 - DNA, 192 bp, Oryza sativa
  Clone ID: PAT_MRT4530_60774C.1
atgcagccccgcgtcaggttccaggcacagcggctgtgcctggaggcgacggcggcggctgcaacctgcagcagcgacggcgatgaaaacagcagcggctgtgacctgcagctccacatggaggccgcaacggtggcgcccggaggcggcggctgtgcgtatgccagcaccaagcatctgcggcggctgtga

SEQ ID NO: 59122 - DNA, 1758 bp, Oryza sativa
  unsure (1)..(1758): unsure at all n locations
  Clone ID: PAT_MRT4530_60775C.1
cggacgcgtgggcggacgcgtggcggacgcgtgggcgcgagcgccgccctttttttttttttttaacaagcagcacaaaagggtactacgcggttgatcttgataggaatggcgagcaatgatattcgacatacataatatttttgtaccaagtataaaaatgccgagggcgtgcagtatctaatatctacattctatgagttgaggatgcattacctgaaatctacagtatattgtatggtactaaggtataatttgactgctgtgccatcccagcatccttcgatctaagtaaggctgttcttattgctggttatcttcaaaaatgcacagcttgcagttcctgatctcttgttgctaatggaggatttacacagcaagagcacggcatcttctgtgtactacagcctccaattgctcaggaattctggaacttgacgggggagcccatgaaacgaatctaaatgctgcaccccaaaagctttatcatgagctcacacctgcggaagcttgtggaacaaatctcgaaccgatatctctgattcgcaaaccatttccccagtatgatgctagagtcaaaccaaatatggccatgataacaactgagcatgctgcaggaactgcctggctacttccaagaaattgtgtagcaagaagtccagcgagggtggagctctgcatgccggtacatacagaaatagttctgcaaacgggctcttcttgcctcaacataggcaacttggaaatccagtaacccacaatgaaggcagcaatgtggaaagtcactatggggagaagtaacaggaatccttctgaagataagatcttgctcctgttgatagcaagagggcttccaatacaaagcgatgtgcacaacatagcaacaaatggcattactggttgaatgacattaacgactgcttttgcatatgtattcagaagaagacctagtgtgacaggaacaagaaccacctgcaaaatggatttcgccatcgcgatcccatcaacaggaaccacagaaccaatcagcagtccagtgagaacaggtgtcacaaccaccgaagatatcgtcgagcagcttgtcaacagaatgctcaatgcaacatcccctttgctcaggaagctagcatagctcgacagctgcgcgccggagacgcagcaagtaagaacaaagcctgcaaagaacgccgacggcatcccgaaggccctcgcgatcagcacgcccatcagcggcttcacaatgtactgcgccatatagccgatcgtcagaggcaccggcctcttgaatgccaacgcgaagtcgtcgatggataatttgatgccaatggagagcatgatgccgccaagtgcaggcgcgtagtactccttggagacccatgagaaggtagcggggttgccgagcgcggcgacggcggtggcggcgacgacgagcgggagcagcgcggagagcgcctgggaaggatcgcccgccgccgccgacgacggggaagaaaccgggccggcgcggaacgacagcagccaggcggcaccctcccgccgggggcacccgacgcggccgagcgacggcgcggagcagaacgtggtcggagccacccgccgcggccgccgccagaccagccccccgggggagcccggccgggaaggggaaccccacaaagcgggcctgccggtgncggtgggggtggaagccggtggtacgccgacggcggcgcagctgctggaggaggaggaggagnagnccgccaccgcggcggccat

SEQ ID NO: 59123 - DNA, 478 bp, Oryza sativa
  Clone ID: PAT_MRT4530_60776C.1
tgtgaggataggtgatctggcaagtgctgtttgatgtggctagtgtaaaattctcacattaacactaaccaaattggtgaatacgaagaaagccatgaagtcccataagtttggtacatgcagctctgcattgcctgaatatgcaaactaggtggatctaggtttatgtgatgagatcaaaagaatctgatgaaagatccatttccagaaagcaaggccagtgggttggaaataacaccagaagttgaagtggatgtccagtgacgctgctccggtggtccttataatcgtttcagtcatactgatcactatgaactctgaaggcatccatgaaattcggctgttgaacaggtgtgaaaataacgtgtaaccaaacgtggatcggctgttgtacatggcgttgtgaaaacagcagccaaggggaacgcaacctgtcttctccttaatttaccggaacagtgtagtctgttggtttaat

SEQ ID NO: 59124 - DNA, 6622 bp, Oryza sativa
  Clone ID: PAT_MRT4530_60777C.1
atgtccagattcgtgtgctactcgaacacaatcgcccacgtggcctggcaccctcgggggacgtcgggcccgagggtggtgttcgccctcctcttagtccccccgagggggtcgagccgcacccgcctcggccccgagggccgaggcgccccgacccctcgtgggttttcgctccgcgtgtatgggttagaccggtcagatcgcgggttaggtggcgacaggcgatctgacgcacgcctcgccccatcccgtcaggacgagggcttctaggcgctcgtccccagctggagctagcgtgttacctcccagagatggcacgttagtcctggtcagatatatgccaggcttcatccgatttgtgaccggtctgacactggtcatgtcgtcagcagacagccatgttcccacgtcgcgcctgcttccggcggaagtggaggtaggtatgggccgtcccatcagaaggtcattcggacggcaaccatacaagtctccgtctgtttatgaaaaggtgggcctgctaccacagcagggtgccccgccaaagtttgctcaactctacatatacgatactgaaaatgaggtcagcaataggatgcgtgtattcgataaagagagctccactgatgaacctgacccatttattgttacagagttaggtgctatgcttgatgaacacaacgaccttgtcaaatccttccgctttgctaggaaacgtttaaaagatcatggcgatgaaaaaattgcgcttaggctccttgggtgcaactcaaaagatgaagtgcagtataacctaccaacaagtggtgaaatagcggggataattgttggcgattattcaaacgataaatacacatacgatgttgttgtccagtcctgtgatagtaggctaagacgagtatcagctttgcatccatcctatatggcgctgcaataccctttgcttttcccctatggggaacgagggttccacttaggtataaaatatactgatttcccgagcataactggaacatcacgacgctatgtgacaatgcttgagtactatcggtaccgcctacactatagactaaataaaccaaacccatatacgtgttgcggtcgtcttagtgattctatatgtgtagatatgtactcgactgttgagggctcgagactaaagttcattgctgacaatcaacctgatttgcgatcagaatgtgtgcagggaattgcggatgcaattgaccatggtcttgaatctggtgattctgtgggccagaaatatgtattgccttccagttttactggaggccgtcattacatggtccaaaattaccaagatgcaatggctgtttgtcgtgtatttggttcccctgacctttttgttactttcacgtgcaattcaaaatggcaagagatatacgatgccctcctatttgaaccaggccaggtaccgagcgatcgttccgacatgattgtgcgagtatttaacatgaaagttaatgaattcatcactgatattagggagggaaaaacttttggcccagtccttgcagtgttatacacagtggagttccaaaaacgtggcctaccgcacattcactgccttgtgtggcttgcagcaagcaccactgatttcaatgctgctactgtcgatggtttcagttctgctgagattcccgacgtatttactgaccctttaggttatgctttggttgatgagtttatgatacatggtccttgcggtgagaaaaataaatcatgtgtgtgtatgaaaaacaatcagtgctctaaacatttccctaagtctttccaggacgagacaattatggatgagtttggcttcactgtatatatgcgccgaaacaatggacgatatgttgttaaaaatggaattaaacttgacaatagatgggttgtcccatacaacatgaaacttctgaaaaaataccaagcccacattaatgttgaatggtgcaataaatcgaacatgataaaatatcttttcaaatatgtaacgaagggatctgatagaactaaagtatattttgaaactactggtaacacagcaaacaagccaaccgacagtaatgcagcaccacgaaatgagatagacgaatacatcaatgctagatttctatccacttgtgaatcaatctggcgtaccctagagtttgatatccattatagggttcctgctgttgagcgtttggctgtgcaccttccaaacatgaattttgtgcgatatcagaaaggaactgacctcaaaaaattacttgaaagccctgctgcgaaaaaaaccatgttgacagaatggtttgaagctaataaaaaacattctaaggcacgacacctcacatactgtgatttcccgaaagaatggacctgggacaacagcgcacgctgttggcgtccacgaacaccggttgaaaaaatcggtagaatgtactatatcaacccagttgctggagaactatactacctacggatgttgctgatgatagtaaagggtgcgacgtgctttgccgatataaggacctacgagggtgttgtttacccaacttttagacaagcatgcgaggcaagagggcttcatgagaatgataacgagtggcacttgctctttgatgaggctattgtgtctgcgtcctcctaccaactaaggcagctgtttgtaaccgtggtaatgttttgttctattggaaatgtgcgatctcttttcgataaatattggacatactttacagatgatatacaacaccgcgttagaaaaatgttgtcaaacccttcttatgttatcccccatgacaggcttctatctcttttgattaaagaattaaaatctgtttttgcaaatagcggcggtaatatagacgattacgacctgccacagtcaacagcacgcacagatgacgattctgggaataggatggtcaatgaagagttagctcttgatagtgttgctcttgctgcccatgctgattccatcataccgaaactaaactcggaccaaaaaagggtatttgacacaataatgtgccgtgttaatgaatcgaaacctggttttttcttcgtttatggtcatggtggaactggtaaaacatttttatggaatgcactgatttctaaagtaaggtccgagaaaaaaattgtcctcgcagttgcttcatctggggttgcttctctcctcttgccaagaggacgcactgcccattctaggtttaaaatcccgattgatataaacgaaaatagtttatgcactatcaaaagagggaccatgcttgctgaacttattcaaaaaacatcactaatcatatgggatgaagctccaatgactcataggcggtgctttgaggctctagatcgaactttacgagacttgctttccgaacatgctccttccaacggtttggtgccctttggtggaaaggttgttgtcctaggtggcgattttaggcagatattaccagttgtaaggaaaggctcccgtgcttctataatcgatgcatctataacgaattctccgctttggagtcatgctgttcttctaaaacttactgtcaacatgaggctcctacagtgtaatcttggtgaacagcagcagcaggagctagaaaagtttgctcagtgggtcttggcgcttggtgatggcaagttgcctgtgtcaaaaaggaacgatgaatctgaagcaacctggattgacatccctgatgatttgttgataaaaacaactggtgataaaatacattctatagtaaacgaagtattcccaggttttgcatctaagtatacagaccgttcttacctagcatcgcgtgctattgtatgcccgaataactcaactgttgacgacataaatgaccgaatggttgatatggtacctggtgaggtgaaggaataccttagttgcgacactatttcgaaatcgtctgagcacataccagattttgatcttctgtacccaaccgaattcttaaattcaattagcgccaacaatttcctagcacataaacttgcgctaaaaaagggtgtcacagtgatgttgctacgaaacctaaatcaatcaatgggtttatgcaatggaaccaggttgttagccctttctcttgggcaacgactcttagaatgtcagatcttgactggaacaaacattggagatagggtgttcataccaagaatagcgcttacaactacgagccctaaatggcctttcactcttcagaggaggcaattccctgtgcgtgtatgctatgcaatgacaatcaacaaaagccagggccaaacccttaaaagggttggcgtataccttaaaaaagctgtcttcacgcatggacagttgtatgttgcggtgtctagatcgacttcaagagacggccttaggattcttattgagggtgatgatgaggcatgtagttccaagactagaaatgtggtgtaccatgaggtgctgcaaacagtggatctgatgatgggacacaccctgctctctgatctctcccttggtgacgacaacgagcgcatttgtgttcgggtttcgcgattttgggctttctgtgaccaaaaggatgatgacaagattcttcactttggcttggtcctgattgatgagaaggggactagcattgctgctcagatttatcccccatgtgatgagatattcaggccaatcatcactgaaggcaaggtgtactacattaagtacttccgtgtgaggaagtgtaacaggcagtacaaaccagtcgacaactgcatgtccatctatttcacaaggtggactaaactagaggagcgtgtcgatccaccagctgagattcctttgtatacttattcactctcaccatttggcggtcttcgctcacgtgttggcaagaaagactcattcacaggtaactcagcctgcaagtggtacattaacgcagacacacctgaggtcatctctctgagaaacaggagaacagcaaggccatatggaaacgcatacaagtgccagaatgagtcatgccctcctcttgtgggagcatcacctaggttcaagcttagcgttgtggcaggtgatgacacagctgacgctaagttcgtgctctttggccgcctagcacagtgtcttattggtcgatcagtggagattctgttagagggcaacgctgccggcaaggaggccatacccaaggagatcacaaatttgcttgaggaaaatttcacctggaaagttgctattaccgagaataccatgtcttcaagcaatgtctcattccaagtgaatatgattgtcggaaacggcaacagccagaatcctgccacccacaatctccatctgcatctcaggcatcctccatgtccgttggttgttggagccaaggacaaaaatgatgatgttgaatgccagtccaagactccagttcaggtccttgacgaagaagatgaggatgatgacaatttgcccctttcccaaatgggtggtcattctgctactaagaaaaccacatccaagtcccacaacaaaagggcaaggccatctcctggcactggcacagctaagaagttgttcaaagaaagtggtgacgataccgctgatggcagatcaaggttcaacgctctttcctgggaaaaggagcagctgaggatggagtttggctatggtggtgagctcagcgtagcacaacctcggcggccttcttcctacggaacacagcgaccattggttgcgacaaagttctcagggtgtggagagatatcgcagctgcttgctgatgtcatctatcagcaggctgttgttgtgaaagtccttggagctggtgatccaaacagcacaaggatatctgctatgatgtatattgttctattcatggatgctgacaagcaacaagaaagggctgaaatggcctgcaacaaaaaaaaattcacgttcaagacaactcgcctcgagtttgagcctttcaagatgaatcttcatagtgttacaaacccactgcgtcaaagggttatacttgcccttgaaggagtgccgccggaatcatggaataagcaggccataacagagctaatggacaacagttgcatggttgaagagttgtatggagagcaccatatacatgacctttctgttttcaagctagctgcctggaccaccgactgtgaccttatacccaaggcgattagatggaacattgagaccaaacagggagcacgagcatcagccaatgttagctggaaccacaacgcagctcactctctgattctggtacacatggaaaaactattcgactacaccgacgaagacagtggcagtgatagcgatggtgaacttcttagacaatatgagcagcaaaggcctcgcctacctgttgtcaagacatttacctgggtatcctgtcaaattgacctagacaatggaccaattgaagggttcagggaggacgttctgacggtgtgctgcggagggggcgggccgtacaacttcaacgagagcgtggcgtgcggcggcgcggcggcgacggcatgcgaggacccgtcggcgtcgctgtacttcgacggcgcccacttgacggaggcggggtatcgccacgtcgcggatggatggctgagcagcataaactcttgtctctgtgcccaaccgcacacgatgaaacttcgtagggcttaa

SEQ ID NO: 59125 - DNA, 327 bp, Oryza sativa
  Clone ID: PAT_MRT4530_60778C.1
atgggacggcccatacctacctccacttccgccgaaagcaggtgcgacgtgggaacatggctgtctgccgacgacatgaccagtgtcagaccggtcacaaatcggtcattcttgtccaccacgtgtcagtttagcaatctgcatgttcgcccttcttcatacaatatcttgcttgtaatggttgggatgaagcctggcatatatctgaccgggtccaacgtgccacctccaggagctaacacgccggctccggctagggacgagtgcttggaggctcttatcctgacgggatggggcgaggcgtgcgtcaaaccgcctgtcgccacc

SEQ ID NO: 59126 - DNA, 2465 bp, Oryza sativa
  unsure (1)..(2465): unsure at all n locations
  Clone ID: PAT_MRT4530_60779C.1
atggccgagccagcaaaggcgcacgacctctccccgagtatgagcggtgacgacggggagccaaacccacgccgtcgagctcgtactccaccgccccctccacgccaaagtcctaggcgggagaaggcgctcgagagggctgaaggatccgcgacttcgacatccacaggaggtggagaagggcggcgagatggggagcgtcgcctcctcgtctacggcgacggcagcacgccccagggcgcgctccaagctgcaggcgcgctcctacgtcacccgcccgtcgtccatgacccggagtctccagcccaacgttggctggacgatgtggccaaattggtcatgactgcacggcagcgcctaggtgctggtgggcggtcctccgccaccaaggcctctggtgctgctaccaccggctccgcgtcgtcaagacggagggcacgaagagcggcagccgctgttcgccattcggccgccactccttcgtcgactccttcgacccgggaagatctgcgtggggggccggacgcccgcaccagcatcgagcgccggcgtaatgaccgacgtgctgcccacgcaacggagggcgcttcctcgtccagagtgtcacctcaacacggacgcgggaatcagccctccgtgcccccggttggtggtgtcggctgtagagcctttgtggcgagtcttcggaatgtccgttggcccccaaggttccggcccaccatcgccgaaaaatatgacgggagcgtcaaccccgccgagtttctccaagtctacacgaccgggatcgaggccgccgggggtgacgacagggtcatggcgaatttctttcccatggccctgaaaggacaggcgcggggttggctaatgaacttgccacccgcgtctgtccactcttgggaggatttgtgccaacagttcaccatgaacttccaaggcacatatccgcgccccggtgaggaagcggacttgcacgcagtacagcgaagggatgatgagtcacttcgctcgtacattcagcggttctgtcaagtccgtaataccataccatgcatccctgcacacgcggtgatttacgcgttcagggggggtgtgcggcacaaccgcatgctcgaaaagatcgcctccaaagagccccagactaccgcggagctttttcagctcgcggaccgagtggctcgtaaggaggaggcatggacctggaacccctccggttccggtgtggcagcttcggccgcccccggatccgccgctcagacagggcggcgtgataggaggaggaagaagaggtcagcccataccgacgacgagggtcatgtcctcgccgtcgagggcgctccgcgggccacccgaaaggggaggcctgcgggtgacaaaaagaaagaggccggcgctcccagcagggagcgcccaaccggcaagtggtgcaccgtccacaacacttcccttcatgacctcgcggactgccgtgtagtcacagaccggtcagatcgcgggttaggtggccacaggcgatctgacacacgcctcaccccatcccgtcaggacgagggcttctaggcgctcgtccccagctggagctagcgtgttacctcccagagatggcacgttagccctgatcagatatatgccaggcttcatcctaaccattacaagcaagatgttgtgtgaagaagggcggacatgtagattgctaagctgacacgtggtggacaagaatgaccgacgtgactggtctgataccggtcatgtcgtcagcaaacagccacgattccacgtcgcacctgctcccggcgaaagtggagctccttcatacacagatctcccaaaacacaggagtagggtattacgcttctcagcggcccgaacctgtatacatcgcccgtgtcttgtgtgtttcctgtctcgcgagccttccacatacagagagcttagaatctctccctgagtccccggccgaaccggcaaaggggggcctgcgcggtctcccggtgaggagccccacgctccgtcatctggcgcgccaacttttcctgttcagcccaatggccgagccagcaaaggcgcacgacctctccccgagtatgagcggggacgacggggagccaaacccacgccgtcgagctcgtactccactgccccctccacgccaaagtcctaggtgggagaaggcgctcgagagggccgaaggatccgcgacttcgacacccacaggaggtggagaaaggcggcgagatggggagcatcgcctcctcgtctacggcgacggcagcacgccccagggcgcgcttctacgtcacccgcccgtcgccatgacccggagtcttcagcccaacgttggctggacgatgtggccaaattggtcatgacttgacngcacgcctaaatgctgtgggcngtccttcgcaccaaaggctntgtgctgttaccatggctccgattntaaaattgaggcgcgcaagcgcacc

SEQ ID NO: 59127 - DNA, 636 bp, Oryza sativa
  Clone ID: PAT_MRT4530_6077C.1
atgagcgagccggccaccaccacccccacccccacccccgccggagaccacgacgcagccgccaccgcatgcaagcctgcggagacgaccacggccctgatcacctgcaggagcagcagctgcagcgcccagcagcagcagcagcagcagcagcagcaggaggagccgctcggcgacgaccagctgggtgagctgcgggagatcttccgctccttcgaccgcaacggcgacggcagcctgacgcagctggagctcgggtccctcctccgctccctcggcctcaagcccagcaccgacgagctggactccctcatccagcgcgccgacaccaactccaacggcctcatcgagttctccgagttcgtcgccctcgtcgcgcccgagctcctctacgaccgcgccccctactccgaggaccagatccgccgcctcttcaacatcttcgaccgcgacggcaacggcttcatcaccgccgccgagctcgcccactccatggccaagctcggccacgcgctcaccgtcaaggagctcaccggcatgatcaaggaagccgacaccgacggcgacggccgcatcagcttccaggaattctcccgcgccatcaccgccgccgcatttgacaacatcttctcctga

SEQ ID NO: 59128 - DNA, 152 bp, Oryza sativa
  Clone ID: PAT_MRT4530_60780C.1
ggacgttacccgtgctacgagtcgttctggaagaactgttctcggtggatggagccatggaggccagctagctgcagacgcagctggctcttccgttcacctggagagcatgcaccaagaggcacccttcctatacttgctagtctacccag

SEQ ID NO: 59129 - DNA, 358 bp, Oryza sativa
  Clone ID: PAT_MRT4530_60781C.1
tcttttcgttccgatcggcgagctaaaagcatgccgacccgctctagatgacctggcgatcacgatgaccgggcagtaccaatttatatctacttttccctatcgtccataagcttgaagagtagtgacctgctcaccacccatgacgatcagtgcataaaggacctgctcctgaacgcattcaagtgggctgcgaccaacatggactaattgagctgcccatatggcaagtcttgtgctgaagctgacgacaaccgttttgctggaatttcaccatacaatgttcaatttcagaaactgctagtacatataggatcttaccaaagatagcgcagccatagagacatagctttttaaa

SEQ ID NO: 59130 - DNA, 399 bp, Oryza sativa
  Clone ID: PAT_MRT4530_60782C.1
atggaggcggcggcgccagccatgctggcgccctcctccctggggcggcgccagcatggtataacagaatacttatttcaaagtaacgtaccagcgtcaaaccagccagcaaatacagtagaaaacatatcatcgacggccgatctcgagccaaggcaaatggatcccgaggagatcgccttcggcgaagagccagagccaccgcacgccgacggccgcggcggaggcgcagccaccactcgcgccgcgttcctgctgatggtgtccggcgccacgatgatcatcgccgccgtcggcgcgtccgcgggcgcgggggaccgggtgccatggcctcggctgctcgccgagctgctgatttggctcgttgggtgcatcactctgttcgcgccgtggctctga

SEQ ID NO: 59131 - DNA, 2068 bp, Oryza sativa
  unsure (1)..(2068): unsure at all n locations
  Clone ID: PAT_MRT4530_60783C.1
cacttcatgtttattactcaaatggaatggtgtacaccagtgtgaaagataactgtccaggtgaaacagcatccttggaggaaggcaacatcaatatctacatgctactacggacaaggaattgtttataactgacagccgaagccctgataccacagaacataaaaatgttaagagaaaagagccctctcaagtacttcagctcgttcatgtacacgtgctgcttcttcttccacccaagaccaaaatactcaaataccatggctacaagaattggccttagcatagtaagagcttccttctcagcttcaagataagatttggattcagagacagcttgatgcttcctattcacatcaagtgagagcttttccaggttttgttcctcagtcatgacctctagactttccatggctagtctatcatacatcccatcaatctctgacctcaaattcataagttcctgattctgatgttctagagctgttctctctttcagtaagaccgcaagttccttttctctatctgttttctcatttgcaagctcttgcagcacatgttgaagctgcttatcaactgcaacctcacggatttcctccactttcatcttgtcctcccaatatctttttatatctcctctattaattaactcttccattatttcacccataacagaaagctgggattgattctctgcttctagtctgttcaattcatcacgtattacttcttccattcggccactggtcagtgcagcagctgcttgtgcttttgtaacaggtttatgtggttgaaggcatcttgtgtttccaaaaactttgctgatgatgctctgttcaccacccatcaaatctacaagtatagatgatggtacatcaggccaagccctcaaatccaaaatgcgaacatttttactcagcatcttctggtctagttcagttgcaaatggatgctccactagtgctttccaattaacaagatcaaaacgtgatagataactgttgggtaggaagtttgaatttccactgtcactagaagaaccacttgttgatgttcccaggaagttcgataacttgctagatacaatgcctgattctcctaaagattggatgtacaagaaatctgggtcatcagcatctatatcgtcgaaggcacttctgactgatccaaaagttaatctattagggatgatcctatgcatctttttcctttctaattttgagtgtaacttaatgaaccatcttgcgaattcccttcgagaacaaaagtcgctggagctagcatctttttcaattatctgtagcttcttcaatatagagaaagcctcctcgtgcatgggatctacaggagctctaaatagaacatgtacaccaccagctggcatgtggttttggcttgaatcatcagtttttgtatcaaccctctcgtcattagctgtctttgaaacatcaatattatcccactccttgtcacctgcatcctcctcgggagtctcttttgactccagtgttgataacttctcttgaacatagtgtaatggggcatgtacaaattgctgcaaacacttcctcgacgacggcaagtgccacatcatccccaccaatgcgatcgccgccgaagcccccagcccgaccgcgagagctcttcgggaacccgcaatcccaatccccagctagctgctaattggccagctcatacataatcagaaagaagaagaagagggtgctttgtaatatctgcaccatatctttatacacaaattaactattttaatttgttacggttatatcaaaatataatcatctcaaatagtaggtaccaaaagaatcacatcgccctacaggcagactatgattaagaaatatcctctcttaagagcctaatgatgactgttagcttcaagagttcagagagcttcactagctttgccaatgggagttttgcacttgggtctcttccctatgtacagattgtcattcttttccttgatcagtntggcctaagcaggttngaactnccattttcatgtgggcctgattgctgctgaccatggaagtttggtgctgaa

SEQ ID NO: 59132 - DNA, 309 bp, Oryza sativa
  unsure (1)..(309): unsure at all n locations
  Clone ID: PAT_MRT4530_60784C.1
attagtagatagggaaggaagagcagagagagcaaagctcccgccgttcatctcctcgtctcgccccgctccaagcgcgcngncatggccaccacctccttgtccctgcatggcgtcccatcccccaccgtcaccaagctctcctcctcctttctcggcgccccgctccttcctccggcgacgcgccgcgctcgctgccccctcgcgagggcgtcgcgnaggcatgcgcaccaagccggggaagcnagaagtgtgggctataagtgcgtgaggcggagcacgcgcgcgcgtcgcccggttggtgcaagg

SEQ ID NO: 59133 - DNA, 702 bp, Oryza sativa
  Clone ID: PAT_MRT4530_60785C.1
aagtgtaaaggaaaacacatgcttcacttcatgtttattactcaaatggaatggtgtacaccagtgtgaaagataactgtccaggtgaaacagcatccttggaggaaggcaacatcaatatctacatagatcatggtaaatgaaactatgaacaaaccagggttttaccggtgacactaaaaggcaggaagtcacgaggaagcacaaaatgaaaataatgattctgggcccaaggcaacatgcactgactttaccctactacggacaaggaattgtttataactgacagccgaagccctgataccacagaacataaaaatgttaagagaaaagctgacatacaacaatgcaagggcaggttagtttgcaggcttagtcagctgggactcgccatctccttacagccctctcaagtacttcagctcgttcatgtacacgtgctgcttcttcttccacccaagaccttagcatagtaagagcttccttctcagcttcaagataagatttggattcagagacagcttgatgcttcctattcacatcaagtgagagcttttccaggttttgttcctcagtcatgacctctaaaccggacacgtgggcggacccatacatcccatcaatttctgacctcaaattcataagttcctgattctgatgttctagagctgttctctttttcagtaagaccgcaagttcctt

SEQ ID NO: 59134 - DNA, 201 bp, Oryza sativa
  Clone ID: PAT_MRT4530_60786C.1
atggtgtacaccagtgtgaaagataactgtccaggtgaaacagcatccttggaggaaggcaacatcaatatctacatagatcatggcttagtcagctgggactcgccatctccttacagccctctcaagtacttcagctcgttcatgtacacgtgctgcttcttcttccacccaagacctgatatcatttggccagtgtaa

SEQ ID NO: 59135 - DNA, 1700 bp, Oryza sativa
  Clone ID: PAT_MRT4530_60787C.1
ccatccatccagctagctgctaattggccagctcatacataatcagaaagaagaagaagagggtgctttgtaatatctgcaccatatctttatacacaaattaactattttaatttgttacggttatatcaaaatataatcatctcaaatagtaggtaccaaaagaatcacatcgccctacaggcagactatgattaagaaatatcctctcttaagagcctaatgatgactgttagcttcaagagttcagagagcttcactagctttgccaatgggagttttgcacttgggtctcttccctatgtacagattgtcattcttttccttgatcagtgtggcctaagcaggttagaactccattttcatgtggcctgcttgctgccaaccatggaagtttggtgctgaaaccccattctcctggctctgtccattctcaatatggaaaacactttggagatcatcctcccagaagttcctttgctgcaagtttgcgccggctgttccatcttgaaaagcatactgtgcagcatttgtagcctgagatagagccaggtccaactgattcagggtgcactggctttccatgctgttttgagcaaactgttggaaaacatctccttgttcggcaaaccgaaaagcagaattggagctttctaatgagaaaaccgagcttgctgaagggccgcatgcttggaacatatctttctgcagcagagtaggcaggttactgaaatcaagtggattcacagttgctagcttcatggacaggaactcaacttgccgttgaagcgattgcacgtagtttatgatctcatcaagcatgagtgccttgccaattaccttgttgcatcctggaaccaggtcctggagaaccttcatcctctggctgatcctctctcttctgaccctctcagcgaggctgtggctgtcagtggcttggcctcgcctcgcccggacatggacatagtccttgggtggctccaccggcttggcattcttccccttcccttgcttctgcccgccaccgccgccgtcctcgacggagctgtcgctcccggcctgctccgccttcggcttcaccgagctctccttctcgccattgcccgtcttgcacctcttgccatctgattccttctcttccccaaccggaggctccttgcctttgcccttggcggcggcggccgccgccgccgtggacttcctgttcttggcattggcggcggcgtccttcatcgccgacgaggccgggtcggacacggaggacgcctccctggagccacctccggcgaagtcgccgggagccggaggaggcatcccgaagagccccgcccccgcgccgccgtaccgctgcccaacaccgccgccgccgttgttgaagctggacagccgcgcggcgcgctccgcgaaccccgggtcgccgcagagcttgtcgaggccgcagtcgccgccgccgccgccgcctcccggcgccacgatggcgtccagcaccggcacgccgaagtcgagccggggggaggagctgaggaggctggaaatgtagtcgcccccgaccctgccgccgtccatcgccgccgccgtccaagaaacggcacggtgccccttctcttggctcctgtaggggggagagcttggggtggtcggcaatggcggaggaggaggtcaaagaggcggaggcggtgaaggtggaggttcagcccttt

SEQ ID NO: 59136 - DNA, 503 bp, Oryza sativa
  Clone ID: PAT_MRT4530_60788C.1
cccacgcgtccgcccacgcgtccgcccacgcgtccgctggagtcaaaagagactcccgaggaggatgcaggtgacaaggagtgggataatattgatgtttcaaagacagctaatgacgagagggttgatacaaaaactgatgattcaagccaaaaccacatgccagctggtggtgtacatgttctatttagagctcctgtagatcccatgcacgaggaggctttctctatattgaagaagctacagataattgaaaaagatgctagctccagcgacttttgttctcgaagggaattcgcaagatggttcattaagttacactcaaaattagaaaggaaaaagatgcataggatcatccctaatagattaacttttggatcagtcagaagtgccttcgacgatatagatgctgatgacccagatttcttgtacatccaatctttaggagaatcaggcattgtatctagcaagttatcgaacttcctgggaacatcaacaagtgg

SEQ ID NO: 59137 - DNA, 457 bp, Oryza sativa
  Clone ID: PAT_MRT4530_60789C.1
gtacatccggggtcattgtaaactatctcaattgtaaactatctcaacgatcaatacaattactctcggcacatcgccaccttttttaccgaggttttttacttatcattcgtctagcctgcttcttgattgccaataagggtttcatcggggttttagccgatgagttatctggacgttgcatcagcttataaagagtacatccgattggtttctactggattagattgttgtcttattatattaccatccgccgattgtctttatatcattatttacatcaagtgtcagattctacattaaccatatagccgattgttcaagacctatcgacatcggctggatcaaattgactggcacgcccgcatcccatcaacctttagatctgcactagagctaagcagatctcccagaccaccgtgttttcacatcaacaatgtgtaatgcctctagctta

SEQ ID NO: 59138 - DNA, 261 bp, Oryza sativa
  Clone ID: PAT_MRT4530_6078C.1
tgctgctggctctgatcctgtcgctggcgttgtgagccgcggagctggcggccgaggtgccgctcggctgagagctcggggtcggcgtcggcggctgcatgccagcgacgacgactgcttcggcttctccggggcggctgctgactgctcctgattgttgtgacgcttgcatgcttgcttgaaatcattttactgtaaatagctgatgtaaatttatgtggatatttgaatgcttgggtatatttctgtgaataaaacaaa

SEQ ID NO: 59139 - DNA, 1174 bp, Oryza sativa
  Clone ID: PAT_MRT4530_60790C.1
ttttttttttttttgtaagaaaccaggataattctactgtccaagatttccaaaataatgtcagctactattttactacgtatggagaactctgtgaatccagtcaatttacatgcatattacagccacattttcatttgtgcatgtgcacaaaagcacatgaaaaatgctatttctccgtcacacagactataaccagtagacagaaaagcagccatgatgcatataatggcagaactctgagaatactaacatcatatacacaaattagtggaacaagggaaaaaaacatttttctggtatattagcagaaaaggaaactgcgagtcctgtgtgtttcctaagtagtttctgagataagacgaacttcatatagatcatcaccaccttttccaatttctgccttaatcccaggaccaaaaaaggatgtgaatttggcctgtctcttctcaaaatcggatatctccaatgctttggcttcaaatacaagtactaaactgtacttcccatcatcagttacttcttcccgaatgttttgtaaaataggtgcactacgccttggaattccaccacccaaaccatattgaaagatcctcttcagtgcttcatccaggtgctgctcatcaccgtatctgtaacgtgtaacatcactcctgacctgattgaggataggggtagcacacttttctcttagagcaaaagcatcggcgtaggttgtgcaaggcaccggtttcagttcagcataatgggggatagttcttgccttcaatgccatgccgatgatggtgagtggaaaaccatatgttagcataagtgcagaccactccgaaccaggaagcaggttgaaatacgccccgaatccatacgacaagagggtgccaccgacacctagcccaatcacaccgaacgaaaccttggcgagggtgaactcctcgtcggggacgacggccttcccggccgcggccccggacgacggcggcgcgggcgccgcggccggcggggacgactcggccgccctgaccggcgcgacggaggcagcgcgcctcggccggcggggcgaagacggcacggcagcaacagcgacatggctcgccccgccaacgcggcgcgagcgcgacgtgcccgccgccgccgggagcgccgcgagcggccggaccgcgcactgcacagacat

SEQ ID NO: 59140 - DNA, 433 bp, Oryza sativa
  Clone ID: PAT_MRT4530_60791C.1
atggagaggagctcgagcacgcagccgccgaccaccgctcgccgtgaccaccgtcctccactcgccgcggccgccaacccccacgcggcgcagcgcgcagcccgccggcccccgttcgacggcgcccgcctctcctccgcgcgccacggccgccggcccccgtgtggcgcagcgcgcagcccgccggcccccgcgcgacggcgcccgctgcccccgcgtggcggcgcccgccgcctccgctcaccgcagcctccgtcctctacgctttcgatgctgtcgcccaccgccgtcatcggcaccattgcccgccgcgacctccgccgtcctccacgccgtagccaaccacgaccgccgctgaacctcgctcctcctcgctccccgccgcacctaccaccgccgtcccctccccacttgccgcctgcttcctgccaaa

SEQ ID NO: 59141 - DNA, 495 bp, Oryza sativa
  Clone ID: PAT_MRT4530_60792C.1
atagaagcaacatgtataaatttatatttggggacccacaaccatatctatttcttacaaccaccatttacttaaagttataaaccaacttaatttacgaccccgatttttgacacccgatatacatatgtttggcacagacgcacacgcactctgatggatatatccactctcacacaagcttgatccatcacactggagagcatgtttatttatttaataattacacaagttgatacattggcaaatatacatatgaatgccttggccttatcacctgcagaggtttcacctgatggtggagccacaggtttattcatgggcaacctcgccagattcagctgcctatgctcaacccccttagagggccctttctaaggtgcaacacctatgacagagggtgcagtattggtggaggaggagatcttttcagacaagtcagggtacatctttccgcgaacaccgtcacatccgtatgaaccgcatttgcaactt

SEQ ID NO: 59142 - DNA, 216 bp, Oryza sativa
  Clone ID: PAT_MRT4530_60793C.1
atgagcagaggtggaccctcgtcgtcgtctgctcgtggtgtatggctcatggcagcagatctggcaggcgacagaccacagaaacggggtgaagaggatcccaggcgaaagcctagcctagcgcttgattgggctggcagtagctacgcctttggacgcggtaaccctcttgagggtgttgccgaggtaccctccttcctcgacgggggtctctag

SEQ ID NO: 59143 - DNA, 848 bp, Oryza sativa
  unsure (1)..(848): unsure at all n locations
  Clone ID: PAT_MRT4530_60794C.1
ccggccgggnnaaaacccggcccactcctcttcctcctcctcctctctcgctctctctctctctcttccccttccggcttccgcctccgcgcctcgacgaccagggtagctcggccggcgactccgcgagcggcggggagggagctggagcatcatcgcacgtgactggagagggaggaccccccccccccccccccccccgaagatttgattcgagatgaatgctcccgaccgctacgaacgctttgtggtgcctgagggaaccaagaaggtatcatatgagcgggatacaaagattgtgaatgctgggtcattcacaattgagcgtgaggaccacaccattggcaacatcctccgcatgcagctccacagggacccaaacgtcctctttgctggttataagctccctcatccccttcagtacaagatccttgtcagggtccatactgcaaaccagtccacccctactcaagcgtacacacaggcaatcaatgatttagacaaggagcttgagaatctcaagcaagcttttgaggatgagaagatccgctacgaggaaaggcctaagcagggatactaggccaacactccttaaaatgcagaacctctgttgatgttagatctgatgcctgagcattagtagaaaaaaaatgctactatgctgatcaatgaactcttttaagaaacttgtttatgcttaaactcgtacaacgcagttcatcctgatgcatttctgttgtctgtgcttggagcatgctctattaaaacttgtcatttatgaactgcccttgcatgaaaaacattaaaattgaagtgctacacatcgaaaaaaaactactggcatgggg

SEQ ID NO: 59144 - DNA, 228 bp, Oryza sativa
  Clone ID: PAT_MRT4530_60795C.1
atgggtggggggtggtggcgcggccaccggagcacgtggcctccaacacgacctccaaatggacagcgggttgatggcagcatcgacggtgttggtgtcagcaaccgggagctcggcagagtggcttggcgggaacagggagagagcagagggattgaggtggaggcggagaacaaggtcggtgttgggaaggagagcggaggagaggaggcaacgacagcgatatag

SEQ ID NO: 59145 - DNA, 335 bp, Oryza sativa
  Clone ID: PAT_MRT4530_60796C.1
ggcccgacccacccatccggcccgactctgctctaacccagacaccaagcccaaaggggggggcctttgaaaacaaaccgaccctgacacacccaatagaggcagcatatactaagaccaaaactaaggtcagcacattgcccctgcaacaactacccgacacaccagtgggcaggagctgaaacactcagctccaaagctaaagagaaccaaagaagcgaaaacgacaccggctcatcttcaaatgggaagccatcagaaaagcgaacaggcagccctgcataccaggcaaaccaatgccaaaaccagaagtgaaagggcaggactggtctagt

SEQ ID NO: 59146 - DNA, 4189 bp, Oryza sativa
  Clone ID: PAT_MRT4530_60797C.1
tcggtttcccagctataccgcctctgactctgaggaaggggcgcagcaccaccgcccgatggggaagcccaagcccgcctccgccacagccgctcctcgagggcacaagaggcgcccgaagaggacaaggccctcggggaagggaggaggacccgagccgcgcgaggagaagcgcaagaggcgagagctcgatggtgtcggcctggcggaggagtcgccgccgccgggttccagcctaggcaaaatcttaagtaccgaatctggagcaataggcctagagcagagtgatgaagatgacatggaagatgaacacactgttcctggtgacgatgagacaaatgatatgataaacaataaagatgatgcttttgatgaaatggaggcttcatgttcatttcatcgccatgttagtcgcatcataacgaatgaagaagtcaatgcattactaaagcagaagtgtaaatttaaatgggaggtgcctgcagaggacattccaaaatccaaatgggttggaacagaagagatatctgaccaaggatatttgctagctgtcgacactcttccgttcatttctcctcttgttattatcctgcccattcctgtctctatttgctatggtgtatgcctgtatggttgtggcctgtggggagcttatgttgatcttattggtggtgtcaaaggaaagttgagggatcattggcagaataccctctctgatcagttgaattctagattgaatttcttctcactttgtagtagctatcgtgacataatgcattgtaataagaagccattttatctaaaaggaggtagcactgtggattccagtacaatggactcctatcttatgcatgctttgaatcatattaacagaacgagagagattgttgtaaaaaatgatgcgaagcttaggagtgaccctagcaaagatattttggatgataactcattcctcgatcagggctttacacgtccaaaggttcttttcctgttacctctaaaaagcattgcgaggcgtgttgtgaagaggttgatccaactgtccccactgtcacaaaaggatatcattgcaaaattcgaagggaagtttggcgaatcagatgatgaagtagaggagcctgttcaaagtaataaacctgcagactttgacctactgtttgctggagatactgatgatgagttcctttttgggataaaatatacaaaaaaatctatgaatctgttcagcaacttctactcatctgatatcattgttgcatctcctttggcacttataaaggtcaaggacaagttgcttctccaggaggggagagatgtcaggtggggagttcactacaactgtcgccagaaggttacaccggcaacagaagggtttggtgcatttatgtttctcttttgtttcatccacaagaaaatcaatggagttgatgacaacggaaaggaacctgccaaggaaagggattttgatttcctatcatcaattgaatggttgacaagcaccattcacacattttatagggatgtgcatgctcatttaatatcatttttatctgacctaaaatggagttgcaagatagatcttgtgtccaatatgttaaattttagcatgtggaattctcttcacgttgcaaaatacatggacaagtttactctgatagtggtggttgatcacgcagatgtgattcttatgcagagttggtcacatctgtatgctgtgtttgaacaattaaatcagttgccatcaaaggaacatggaaccaatgtgatgcgtattaggccatggtacttggatcagcatgcacgttactatcggcaaacaatactcttgagctcttatcttactccagagatgaatgctttattcaatggattatgcttgaattatgaggggaaggttaagctggtgactgaatttaaaggtgttctttctaaaatacagtttgaagcaccgcaggtgtatgaaaggtttgatgcatcttctattactgaagttgatgatgctcgctttgatcatttctgcaagaaggtgtacccaaagattcaggagtcagatgagctgggcatatcacgcaaagagcaaccactgaacagtaaggatgggtcacaggccaccaacctgagggaggtatcacccaatgaaatactactagcaaaaaataatttactctacagcctaagactatgcattgaattaactgtgaagaaagtgaagcaactacagaggctgggacggacaacatcgcaacaagatatatcacgtgcaagactctggttttttgagggcaagaaaaaaatcttactttatagtgagagatctcatttctaccacagatacaagatcaggggagcacaccatttgattatctactctttgccagggagaaaggaattttacccagaggagcaagatgaacttcactggaacctcacttccaatggggtcttctcgatcaaatctgattacttagctctggttcattcgagcgccccgaatatcaatagatgtatttggagggttataactcccttcgtttcacaatgccccattcctttgattctctttccatgggcctttgataagaaacccgaagtcctcaggtggatatcccggagactccagaaaggtgtcttaggtgcccggagttccaatccaggggaccttgggcttggggcggtggcgctgccctttgagtcccagggactacgagggttaccccggagcctccggtcatctccttcgggtgccggaggcccctattacgggggccctgggcttgagcgtggcggtgtcgcttctttagtcccagaggccctaagtggatatctcggagtttctgggaaggtttatgtggtgctcggaggttatattccggggactccgggctttactctgcagcaacgcatacggtgcctcccggagactctaagatccacctcggtactccgggactgcgtagccattgccgaaatggctagtggctgccggctaggcttctcccacgagcttccaaattgtgtagcaaggccgagaaagtttgtgaaggctctactccacatccgcaagaaaaatgaggaagtcatgatgaccgagacaagtcaaaccgaagagaagccaccacctgtggagattacaccttccgaagaggagaactccacctcgaagaccaatccaccttcaaagggagttaccattccttttgattacactaagtttaacccttctaaccactacatctccgtgccttccgggcatgccccacactttgatgggactcactattccgcttggaagcatacgatgaagttgcatctaattgctttgcatcctagtctttggagaatggtgtgtacatatttgaatgtgcccttggaaaatatgaacctcactccggatcaagagcaagctgtatattgcaaagctcaagccaccaatcccatacttgttgctttgagtctcgaagagttcaacaaggagaatccgaacttcaagaagttcaatccaagtgaggtgctcaggaggatcacttcacatgagcttatggaggaagaggccaagcttgcccacattggaatgaggattttgtcagaacttctaaaaggtgtacacatccttgggctttctaatgttatctttgagaaagaccaccacaagatcattggggctattgcatatggacctctttggacaggtgaaactcaagagaccttcaagaaatttgcaagaatagctcaaaatgagtttgagctcaagatcaagaagataggcttgagtcagttcgtattttattggccttttctcaatgatccgatttcagaattagttaatgtggagcaacctctaggatttgaagatccaaatttcccaaatcacgtatacaaacttcacaatgcactacatgggctcaaacaagcccctaggacgtggtatgaatgccttacggattttcttctcaacaacggctttgtgatagatgtcaataatgggggagttgaagttcttacttggatttcaaatcaaatcaagaaactcaaagaaggtacttccatttgtcagaccaagtatgtgaaggacatgttgaggaaatttgacattgaaagtgccaaacacatcaagacgcttatgccaaccaatgggcatctcgatctcaacaaagatggtaagccgggggatcaaaaggaatcatattaa

SEQ ID NO: 59147 - DNA, 1271 bp, Oryza sativa
  Clone ID: PAT_MRT4530_60798C.1
atggcgaaaggaaggaaacagatcccttcctcagtgcctttatactcttgccaacgctgtgcccggctcctcgcttctcgcgcccactatttcgccccctcgtttctcgcgcccacgcttccactaatcccattcgcccgcttgcggcgcatgagacacaatcgcccacgtggcctggcaccctcgggggacgtcgggcccgagggtgatgtgttcgccctcctcttagtccccccgagggggtcgggccgcacccgcctcagccccgagggccgaggcgccccgacccctcgtgggttttcgctccgcgtgtatgggttagaccggtcagattgcgggttaggtggcgacaggcgatctgacgcacgcctcgccccatcccgtcaggacgagggcttctaggcgcttgtccccagctggagctagcgtgttacctcccagagatggcacgttagccctggtcagatatatgccaggcttcatcctaaccattacaggcaagatgttgtgtgaagaagggcgagcatgtagattgctaagctgacacgtggtggacaagaatgaccgacgtgactggtctgataccggtcatgtcgtcagcagacagccacgattccacgtcgcacctgctcccggcgaaagtggaggagctggcggttcggcgacgcggccggccggcggcagcggagccagagatgacctcggagacgaggacgccggggagctgcgcctggacggggacgccggcggtgattgttgttactggactcagagttggtgttgttgttgttgagctcaccgtggtcgtgaaaatcaacgatatcgccattgctgctaatgggatcgagcttgagggaggttcggcggccaacgatgccgcggcgaccccccgtctgacctcctcgccagcgtcgagtcggtcgcctccgccacctcctgcggcatccacgtctccaagttctccgtcagctttccccgacgacgaaccggactccggcttctcgcccgacgacccggacctcctgcgcaaccgccccgtccccgaccggctcctcgtcgtctccgccggcgtcgcagccaacctcctcttcgccttcctcatcatctacacccaggcgctcgccgtcggcgtccccgtccaggcgcagctccccggcgtcctcgtctccgaggtcatccctggctccgctgccgccggcctgccgcatcaccgaaccgccagctcctggagagaggagaggggagatagggagagaggaggaagaagatga

SEQ ID NO: 59148 - DNA, 600 bp, Oryza sativa
  Clone ID: PAT_MRT4530_60799C.1
gctgtaagatcaaagtgtgttttgattcttattctttgatgaataattggcatatgtgattattggttttgatatttggagattatcgtcgaagtggttttggagataatcaattttcaggtgatgatcagattcactgttattttatgtgaccggtccgaccgggcggaggttgccggctagagttgatgcacgtggttgacggagattccatatggcatacgatggaggtattgtgtacgtatgggatgcggagtcgaatttggaaggagtccaaatttggtatgattggttatgtaaagtttgtttcttgtactagagggtttcctaaggtgtttaggactcttagtatgagtttggttcgtggctttaggctgccaacatcatgtataaatagagggggagcgtcagaccgacggcattgcggtggtcagaccggtgggagcacggtggtcagaccggtggcggcgacagcgagcgacaggcgactttggcggttcgaccaatcgttctacatctgtcagaccagcggcatccactcggttagactgacagatcaatctcggtcagactgatctccgtcgatttcgagggtaactt

SEQ ID NO: 59149 - DNA, 435 bp, Oryza sativa
  Clone ID: PAT_MRT4530_6079C.1
cttacacgttccaagcctctctacactcttctcttctcttatcgacgcgaccgctttcttcaccggacagccgccgatgtcaccaaccgccgtcgacgcgggagccggtgcagaggatcacattacagggctctctcggtggacgctgcgcctctgtgcgggatcctccgacgcttgaggtctggcggattcggggggacgtcggagccgttgtgagcgccctcggtggctatgaagcttatgggtgcgcactcttacagcatccgcagcttgccgatgttgctgttctggtcccgggggcagccgcagatgccgacctagagcatcttgcggtggaagtacccgacgagagctgcctatgtaacgcgcggtgtatggcttgcccgacggtccgggctcgttgaggctgtccatgtagatatcgagcttgtcggg

SEQ ID NO: 59150 - DNA, 392 bp, Oryza sativa
  Clone ID: PAT_MRT4530_607C.1
ctttgttttttcctgttttttttttttgcctcaagtgaaggttttttgcaccaacttctatgtgctctttttacatgcggaaccacttgcttgaaacatctgatcatatcctcatttatcttggactatgggtttctagtaacacttccttcccaaacacgcggggggggaacttaaacatccggtgggtttgggggggggccacgcactgaggaagcgggtcttgtgtggcgatggttaccctgcggcccactcaggttcggtgaactgggtctgtggccctgagaatcaagtgcctccaataactcagtcagaccaagggcgggggacacgccgtttactgctgtgcggcgggggtccttggtgctgttctggtttttgtgccccttctg

SEQ ID NO: 59151 - DNA, 286 bp, Oryza sativa
  Clone ID: PAT_MRT4530_60800C.1
atgcacgcgtggccgggccttggagcactggagcccgatgatgatacgcgcgccgagagcaatgagcagggcgacggccagcgagagcagcagcggagacggagagcgagcgtggccgcggtaggcgaagcaggcaggagcggggcgacggctggcaagagcagcggcggactgcgggcaaccgcggtgggaggtgggggcgggatccggaggtggcggcggaaccgcggcgcgttagggtccccgaacacgaggtcatccttgagcccgctgtccaccgagcggg

SEQ ID NO: 59152 - DNA, 406 bp, Oryza sativa
  Clone ID: PAT_MRT4530_60801C.1
atgggacggcccatacctacctccacttccgccggaagcaggcgcgacgtgggaacatggctgtctgctgacgacatgaccagtgtcagaccggtcacagaccggtcacctttgtccaccgcgtgtcagtttatcaatctgcatgtttgcccttcttcatacaatatcttgcttgtaatggttaggatgaagcctggcatatatctgaccgggaccaacgtgccatctccaggaggtaacacgccggctccggctagggacgagtgcttggaggctctcatcttgacgggatggggcaaggcgtgtgtcagaccgcctgtcgccacctaacccacgatctgatcggtctgtgactggtcacagaccggataaacgagcgcgctgcactgcgttacatgcggcgtga

SEQ ID NO: 59153 - DNA, 583 bp, Oryza sativa
  Clone ID: PAT_MRT4530_60802C.1
gtgtcggtgatatgggaccgggagtatcgtgactagaggcttgaggcagacacaaccgcccacgtggcctggcaccttcggggacgtcgggcccgagggtgaggtgaccgccctcctcctgatttccccgagggaggggtcgggtgactccagcctcgcccccgagggccgaggcgccccgacccctcgcgttttgtcggtcaaatcgcgggttaggtggcgacaggcggtcagacgcatgcttcgccccatcctgtctagacgagagctcctaggcactcgtccccggctggagctagcgtgttacgtcccagagatgacacgttagccccgatcgatatatgccaggcttcatcctaaccattacaagcaagatgttgtttgaaaaagggcaaacatgcacgttgctgagccggcgtgtggtggacaagaatgaccgatttgtgaccggtctgacactgctcatgccgtcagtacacagccgccttcccgcaacgtgcccgcctcagtcagaagtggaggtaggtatgtgccgtcccatcagaaggatgttcggaggacgaccgtgcaaatctccgtccat

SEQ ID NO: 59154 - DNA, 252 bp, Oryza sativa
  unsure (1)..(252): unsure at all n locations
  Clone ID: PAT_MRT4530_60803C.1
tggagtngtatgaggccgctacgatgtggcggcggcgcgatgctccagttttcatctggactcttcgtgtgctattgcagtggtgccggtggtcgaggagtcgtttgcaggcattgcaaaagtaaactgctgttgttgattttttttggatgttatattggaaaatttgttgagtcatattggaatcttattttccccaactatcaatatcaatttcaaggtctattatcataaaaaaaaaaaaaaaaaaaa

SEQ ID NO: 59155 - DNA, 211 bp, Oryza sativa
  Clone ID: PAT_MRT4530_60804C.1
gaaataacataatttctaatgccgcatgtttcacatcaagtggagaccacacaccacaaagcccatctatcccaaagtaacatcacctagcaaaacacttgatcctgctagtcctacaaatttatcacatattcacaacacccagggcaaatcctgcaggccacctcctgatcaaacaccccgaactcaaacccccacacaaacatcatca

SEQ ID NO: 59156 - DNA, 606 bp, Oryza sativa
  Clone ID: PAT_MRT4530_60805C.1
atggcgaaaggaaggaaacagatcccttcctcagtgcctttatactcttgccaacgctgtgcccggctcctcgcttctcgcgcccactatttcgccccctcgtttctcgcgcccacgcttccactaatcccattcgcccgcttgcggcgcatgagacacaatcgcacacgtggcctggcacccccgagggacgtcgggcccgagggtgatgtgttcgccctcctcttagtccccccgagggggtcgggccacacccgcctcggccccgagggccgaggcaccccgacccctcgtgggtttttgctccgcgtgtatgggttagaccggtcagatcgcgggttaggtggtgacaggcgatctgacgcacgcctcgccccatcccatcaggacgagggcttctaggcgctcgtccccagctggagctagcgtgttacctcccagagatggcacgttagtcctggtcagatatatgccaggcttcatcacgtggtggacaagaatgaccgacgtgacgggtctgacaccggtcatgtcgtcagcagacagccacgattccacgtcgcgcctgcttccggcggaagtggaggtagttgtggcccgtctcat

SEQ ID NO: 59157 - DNA, 1250 bp, Oryza sativa
  Clone ID: PAT_MRT4530_60806C.1
ctaatccccattcttcttcctccgctcggtgaggcatccctcgaacccgaccaaagcgggcgcgacggcgagtggcttcgggctcatggatgactgtcgggagagtgcgacgatgacatcgtgctcaactgccgctgccagtcggcttgcatcatgtttgcgggcgaggagggaggcggcactcgtcgaccgggcgaggagggaggcggcgctcatcgaccgggcgaggagggagggctccgacccggatgtgaccatcgaggacgtcggcggtggcggccaggcgaggaggaaggcgcactcggcgaccgggaaaggagggagggctccaacccggatgtgaccatcgaggacgtcggtggccgggcgaggagggaggcggcgctcggcgaccgagcgaggaggggcggcgccgttctgctgggcatcgcgggtggagcggctgacggcgtggagcccgcgctcgccggcgacctcctcctctgcctcttcctcctccggccacctccgccgggcgttgaccccgcccctctgctccgccctccgtcctccgcccgccactcgtcgccgttgctccgcccaccgctccacgacggacttggccggctgggcgttgagccagcggacggtgtgtgaggacccaaaataggacctcgcctcgccccatcccgtcaggacgagagcctccaagcactcgtccctagccggagccggcgtgttagctcctggagatggcacgttggttccggtcagatatatgccaggcttcatcctaaccattacaggcaagatattgtatgaagaagggcgaacatgcagattgttaaactgacacgtggtggacaagaatgaccggtctggcactggtcgcgtcagcaacgggcagccagtatcccacgttgcgcctgtctcccccggaagtgaaggtaggtgtgggctgtcccatcggagtgtcattcggacagcaaccataccaatctccgtccataaaaaaaagaaaagtccagtttggaaaggggtgggtgcatgtggtatccccttgaagtataaaaggaggcccttgcccataaaaaagggggttttttttgattcttttccagatttaaagcttagaacgggggaaaagttggctcccactttgtagctcattcatacccaaatccccaaaaacccaggagtagggtattacgcttcgcaccggcccgaacctgtataaaaaaaaaaaaaaaaaaaaaaaaaacaaacaaaaa

SEQ ID NO: 59158 - DNA, 711 bp, Oryza sativa
  Clone ID: PAT_MRT4530_60807C.1
atggcgaaaggaaggaaacaaatcccttcctcagtgcctttatactcttgccaacgctgtgcccggctcctcgcttctcgcgcccactatttcgccccctcgtttctcgcgcccacgcttccactaatcccattcgcccgcttgcagtgcatgagacacaatcgcccacgtggcctggcaccctcaggggacgtcgggcccgagggtgatgtgttcgccctcctcttagtccccccgagggggtcgagccgcacccgcctcggccccgagggccgaggcgccccgacccctcgtgggttttcgctccgcgtgtatgggttagaccggtcagatcgcggattaggtggcgacaggcgatctgacgcacgcctcgccccatcccgtcaggacgagggcttctaggcgctcgtccccagctggagctagcgtgttacctcccagagatggcacgttagtcctggttagatatatgccaggcttcatcctaaccattacaggcaagatgttgtgtgaagaagggccaacatgtagattgctaaactgacacgtggtggacaagaatgagcgatttgtgaccagtctgacactggtcatgtcgtcagcagacagccataatcccacgtcgcacctgcttccggcggaagtggaggtaggtatgggccgtcctatcagaaggtcattcggacggcaactatacaaatctccgtccat

SEQ ID NO: 59159 - DNA, 2846 bp, Oryza sativa
  Clone ID: PAT_MRT4530_60808C.1
gggactcttcggcgactactgcgaagacatgggcatcaagctctgcttcgcctcacctgcccaccccagaagcaatggtcaagtggagcgcgccaatgcagaaatcctcaaaggccttaaaaccaagaccttcaatattctcaagaagcacggcgattcatggatcgaggagttgccagcggtgctctgggcgaaccgaaccacaccaagccgagcgaccggggaaacgcctttcttcctcgtctatggcgcagaagcggttctcccatccgagctcaccctgaggtctcctcgggccaccatgtactgcgaggctgatcaagatcagcttcgtagagatgacctcgactacttggaagagcgaaggcggcgcgcggccctccgagccacgcgctaccagcagagcctgtggcgctaccatcagcgccacgtccgggcccgatcactctgcgtcgacgacctcgtcctacgccgcgtccaaacgcgtgctggattgagcaagctctcaccaatgtgggagggtccgtatcgagtgatcggcgtcccccggccgggctccatacggctggccacgggcgacggcactgagttgcctaacccgtggaacatcgagcaccttcgtcgcttctacccctgaggggggggggtcagctaaaatcgccaaacggggcccagagccgagccgtgccccggggcgtggtgaactccgggggggaatcggcaaaaacccataatcgggtcacccataaccctcggtcaccacgttcccggcctggccagtctcgacatgtggatctccccaggcactagccttgacccgcgccgtttgaggccccaggatggccccgaggccactgcgggaaggccgcgcatgtcgccctctgaccccgaggtcgtcggcacagaagccgagtgcgccccgcgtggcctctcggatggagagcgccctggagatgtggcccctgacgaagaagatcggccccgccgaaaggtgcagcggcccgtctacttcgttagcgaggccctccgggacgctgagacccgataccttcaggcccagaagatgctttacgctatcctgataacttcgaggaagttgcgccattatttccaggcgcatcgggtcacggtggttacgtcttatcccctcggccaaatcttgtataaccgagagggtactggacgccctctgggtgatgtagttcgacggcacctgtaggaaccggccccacgcctcgccccatcccgtcaggatgagagcctccaagcactcgtccctagccggagccagcgtgttagctcctggagatggcacgttggtcccggtcagatatataccaggcttcatccgatttgtgaccggtctgacactggtcatgtcgtcagcagacagccatgttcccacgtcgcgcctgcttccggcggaagtggagaccaagagtttagaacctcacccagggcccccggccgaaccggcaaaggggggcctgcgcggtctcccggtgaggagccccaagctccgtcagaaggtgttcgccaggtcacctgaaaaagacgagaagcagtgcccagggagtaaccaagctccatgtcagtctaccgacaagaaggatggtactttgcagcccaactctggagcaaacaggacagtgatatggaagatggataatggcaggaccatgatcatcaccggttcagaatttactcctgaagacgcagcaaggatacccaagcgtcagagaggaagaaataccttccgaggagcgcgtcagctaacccgtcatctcataaagtacggtccgcctagacccgaagatgatgaatcaggagaacggttttctgctgatgacgatgacgacaacgatgatgataatgatgacaatgatgatgcgacccttgacagtttcagggaaagagagttgaagttcaaagcatgtgctagatgtgggatagtcggacacactgctagtttatgcctccccacatgccgctgtggtgaatatacccattactcaaatgcatgccctttaaggaaggtcacatgtttcttgtgtgaaggaacagatcatgtgcctaaggactgtcagttaaacgcggtcatagctaagaccaagaaagaacaagggacaaccgtgcaacccattcgtcaaccaatgacaatcgacaacagcggtcacaatccttctgctcttcctccaactccagctccagtggaagccaaccatggaagaagcaacgtcaccaaggatgttcataagtctctgcttgttcccgtttcagctgccaaagtgcataatcagaagcctgcaccccgagaccaagcaagtcgattctgtcgcaactgtcataagccaggacatcgtttcagtgattgtcctcttccaagagcagcaaaggcagttcgtcgtgattcacaagttaccagcactgcccatgacaccaatcgacacctgaatgtgcaacctccgccccaacggattatcgtcaagggcaccgtcaaaggtcgcattgttccaccggcaatcgtttcaagcctacagcaccaacgccagcagggtaagcaatgtcaggagaacaacagctcgctacagctacaaagaggcggtacgctccctcgtcagcacccgcggcaagtgttgtcagcaacaggtcgtccaactgttgtcagttctagcaatgcacctcgtattgctccaatctggaggcccatcgacaaatcaccgctcggtaaccccacgggcaagaagatcctacccgttacagctgacaagacagttgcccctccaccatcgaagatcaacaagcagagcaacgttcccggtgagacttctggtagtaggaactaa

SEQ ID NO: 59160 - DNA, 606 bp, Oryza sativa
  Clone ID: PAT_MRT4530_60809C.1
ggtggcgacaggcggtctgacgcacgcttcgccccatcccgtcaagacgagagcttctaggcactcgtctccggctggagctagcgtgttacatcccagagatgacacgttagccccgatcgatatatgccaggcttcatcctaaccattacaagcaagatgttgtttgaagaagggcaaacatgcacgttgctgagccgacgtgtggtggacaagaatgaccgatttgtgaccggtctgacactgctcatgtcgtcagcacacagccaccttcccacgacgtgcccgcctcaggcagaagtggagatccaccaaaacacaggagtagggtattacgcttctcagcggcccgaacctgtatacatcgcccgtgtctcgcgtttcttcctagctggcgatctttccacataccgagagagcttgagatttcaccctaagcccccggccgaaccggcaaaggggggcctgtgcggtctcccgaaccgattggtccccaaggcccaactgccattacacgctcttaaaaagatcaccgtgtattcccatttcggagtccaatatcgttgccacaattctacaaacaagaagcaacaatcaaggttggct

SEQ ID NO: 59161 - DNA, 107 bp, Oryza sativa
  Clone ID: PAT_MRT4530_6080C.1
gatcggggcactgccaagtggtgagacctccggcgattgactgcggggttgaaagttcaatgcaccaaaaatcttttagcactatgacagaagatcaggcccatcag

SEQ ID NO: 59162 - DNA, 228 bp, Oryza sativa
  Clone ID: PAT_MRT4530_60810C.1
atggtggttcacaccaacgaatgggataaaagggtggcgcccgcgctgatcacctacttcgccgctgccgactctgcccgcgccgcggaggtgctcgtcgtcttcgccaagtccagcgagagccgccacgagctctccagtatccctagcatcgtggtcgtgctcgccgcagacaacatcgccagcagtggcaatgcccgtgcaatcaagccgaggtctcccggctag

SEQ ID NO: 59163 - DNA, 1074 bp, Oryza sativa
  Clone ID: PAT_MRT4530_60811C.1
gcacgaggccgccttcgtgcttgcgtgtcgtcgcctcacctcgcgcctccgctactactgcttgtctgctgctgcagctgctgttattaccataccgcgggagaaggggggccgaacccgaaggcgtgcgagagggaggtgaggtgaggtggagccgtggaggcgcttgtttcgcgtgcgagacggtgcttcgtttcgcctcacgttttccgagggctacggcgacttggtgggagcgcggagaaaatctagcgagccgtcggagttgggtggcgcgcggccggctgtgcttctgaaggaggagtaattggagtagttgcttgccatggccgagatctgctgcgaggaggccatgtcgccgccggccactgccacggctgctgtcgcggcagcggtctccgcctcggccgccgcagccgtctcctcggcgatagacaggcggcgccgcaggatggagatgaggcgcatccgcatcgcaagtgatctcgagctgcaggccggagaggatgggcgccctggaaagcggcagaggctggcgcgcacggcgtctggcgccccgcgtcctgacgaggattcggcgtctgagcggccgagttgtggccgtacggaggagttcccgaggtatggggtcaccgctgtgtgcggcccgccgtcgcgagatggaagacgccgtgtccatcagaccggacttcttgccggcatccggcaagttccatttttacggcgtcttcgacggccatggctgctcccatgttgcgacgacgtgccaggacaggatgcacgagattgtcgccgaggagcacaacaagggggcctccggcgaagtggcgccttggagggatgtgatggagaagagcttcgcgcggatggatggggaggtcggtaaccgggcgtccacccgcagcgacgacgagcccgcctgcccgtgcgagcagcagacgccttcgcgtcgcgaccacgcgggttccaccgccgtcgtcgccgtcgttagcccaacacaggtcgtcgtcgccaacgccggcgactcccgcgccgtcatctcccgtgccggcgtccccgtcgcactatccgttg

SEQ ID NO: 59164 - DNA, 210 bp, Oryza sativa
  Clone ID: PAT_MRT4530_60812C.1
atggcgactatagcaagcagcggcaactgcggcaggacgccaggcaagcggctcttccccactctctctctctctggtaccgtcaggagagtggacccgagagttcatccgcaagcgcacagatataccattgtagcatttcacccgagagtattccaagggtatcgaatttattttatcccgtgggaagatcatgtagagagaacttga

SEQ ID NO: 59165 - DNA, 1103 bp, Oryza sativa
  Clone ID: PAT_MRT4530_60813C.1
ctaaggcccctgacgaccggagttggccctttgcccgcttgtcagacgacgccaggagcccccgacccccaggacggccccgaggccactgtgggaaggccgcccctgtcgtcctccgaccccgaggtcgtcggcacagaagacgagtgcaccccgcgaggccgcttggacaaagagcgccccagggatgtggcccctagcgaagaggatcggccccaccgaaaggtgcagtggcccgtctactttgttagtgaggccctccgggacgccaagacccgataccctcaggcccagaagatgctttacgctattctgatggctgcgaggaagttgcgccattatttccaggcgcatcgggtcacggtggttacgtcttatcccctcggccaaatcttgtataaccgagagggtactggacgggtggtgaaatgggcaatcgaactctctgaattcgatttgcgctttgaaccaagccacgcgatcaagagccaggccctcgccgactttgtggtggagtggaccccagctcccgagctcgtctccgcccccgaggccagctcgagcccatcgcagctgcctcacaccgccctctgggtgatgtagttcgacggcaccgcttccctcggggagggcgatcgccgcctcgccccatcccgtcaggacgagagcctccaagcactcgtccctagccggaaccggcgtgttagctcctggagatggcacgttggttccggtcagatatatgccaggcttcatccgatttgtgaccggtctgacaatggtcatgtcgtcagcagacagccatgttcccacgtcgcgcctgcttccggcggaagtggaggtaggtatgggccgtcccatcagaaggtcattcggacggcaaccatacaagtctccgtgatcagagagggagagagtaagagctctctggttctccagctcttttgtagcttcttcatacatagatccaccaaaacacaggagtagggtattatgcttctcagcggcccgaacccagggcccccggccgaaccggcaaaggggggcctgcgcggtctcccggtgaggagccccacgctccgtcaaagtgttattaaattttt

SEQ ID NO: 59166 - DNA, 389 bp, Oryza sativa
  unsure (1)..(389): unsure at all n locations
  Clone ID: PAT_MRT4530_60814C.1
cttatggtcacttccaatacattttcctaattgncatcactagcttctagctaggcttattaattaattagccatggcggaagagaaacacccaccacacccggtccaacacaaggagggccaccaggccggccaccgagtaaacttctaccgggagggccgctatccactcgaaaccgtgaccaccgaagtgggcccccgcgggccagaccaataccagagggtcaagaaggaggagaagcagcacaagcacaagcaggaccttggggagggccggggcctctgcgccggcgcctttggcctgtatgagaagcaccaagcgaaaaaagaccccgaaaacgcgcacaggcacaagatcacggaggagatcgcggccacggcggcggtcg

SEQ ID NO: 59167 - DNA, 2490 bp, Oryza sativa
  Clone ID: PAT_MRT4530_60815C.1
atggcgacaaccacccccccgcggacccctgggcgagatggcgaggagatggattctcctgccatatggtattttcataagttaattggtgaggatgtgagactgttggaggatggccagattccagagttgtttgaaatgtatgtagaagagagccactttgagcttattgtatccatcctggatgctgcaaagggtgtgccatttgctataaatgctttaaatcctatatgtgtggtgcctcctgaaatccctgctgaaatccatcctgaaatccctcctcaattccctgctgacatccctcatgaaatccctgctgacatccctactgttggaggttctgaccatcctacaacagaggaagcagaagttagagaggcagatatctttgacaatgaagaggagtatattggtgttgatgatgagcacatatatgttcctgcatctaaacagcaaggtcaacctggatctgaacctcagggggctgcagctactgctcagagtggagagaatggtgctagtgctagtgctatggcagctcctgaggcacagattacagatcatgatcctcagatttataacatcattcatgaccctgagaatccaaacattgtcaaagatgctttgttccctgacatgatagctctcagaaaagctgtaaggcattatgccatcgtgaaaggttttgaatttgctaaagatgatgtttacttatgtgttgcactacttgtcatgcagattaaggttcttccatttgagcacacttgttcttctacaaagctacatgaagggaagatggctactcaaggctggtgtgcaaacaggctacatgattggctcaagaccaatcctggcaagggaccaactgattgtaggaagaagcttgaagaaaaatacgagatcaagctgaaatactccaaagcatggtctggtatgaagaaggcaattgaccagatccatggtacatatgaagaaagcttccagcttcttttcaactggaaggctgcactgcagaacaagtcaccaggtacaattgtagagattgagttgcagaaagtaggcaagaagatgtgctttaagagaatttttgttgcattgaaaccttgcatagatggatttttggctggatgtagaccttacataggtgtagatgcaactagattaactggtaaatacactggacagctagcttcagccactgctgtagatggacataactggttgtattatgtagcatatgctgtgtttgactcagaaacagatgataattggctttggtttatgcaacaactaaataaggccataggagacacagagggtttagttatttctacagatgcatgtaagggtttagacaaagcatgtaaggctttcaagaaggtagagcatagagaatgcatgaggcatctctatgctaatttcatgaagaagtaccaagggccagtgttcactgatcatctgtatccagctgctagatgctatactgaggataagtttcagtggcatttgaagcatatatgggatgtcaggcctgatgcaatagagttcctagagaaacaccactcaaggatttggtatagatgtggattttcagaacttagcaagtgtgattacctgacaaataatgtttcagagagtttcaacaaccagatcaagggcttaaaaggtttgctcttacatgagttggttgattccatcagagaaatgatcatggagaaatttgcacttagaagagattgtgccagcaagatggatgatgaaatcctgccaagtgtcatgaaggagctaaacactgcaactagtaatttgaaggtggttaaggtggccagaagtgaccatgggtttgctgaagtcacaatggttgagagtgataacagcacccagaggcacattgtggacttggacaaccaaaattgttcttgtagggtatggcaggtcactggaaaaccttgcaagcatgcattggcttggatatgcagcaacaggggcaagattcaggactttgtgcatccatattacagtgtccagtactttagagcagcttatgcagggaggattcaacccatgactgataggtcacaatggccttcagttgatcttgagttcaaagtgcatcctccaagactaagaagaggagctggcaggcctagagtgcaaaggataaggggctgtcttgagcctgggagaaagaaggtgaaatgcaagagatgcaaccagtttgagcactttgagaaaacatgcaaactggctgaaccactatgtgaagatgacatggctactgaagaaacacccaggaaaaggaggaggccatctaatgtgaatgctgaagctagctcatcagcaccaaataagaagaaacatgaaactccaaagaagaagcgaacaccacaaaagaggagagttcttgcttcttccagtgctccaccaagaactgctcctagaaggctatcagattggtttgaagggtctcaaccaaccaacccagcttga

SEQ ID NO: 59168 - DNA, 1698 bp, Oryza sativa
  Clone ID: PAT_MRT4530_60816C.1
atggcgacaacccccctccccgcggacccctgggcgagacggcgaggagatggatctaggcgaatccaatccgaccatctgttcaaggccatgagtatccctaaccctaaatcaattgaaacctatagctttaacgttgagtttgtgttgagtagccttgttgagttaacttggggcccaaaccaatctcctaccatatggtatttttgtaagtcaattagtgaggacgtgagactattggagaatggccagattccagagttgtttgaaatatatgcagaagagagccactttgagcttattgtatccatcctggatgctgcaaagggtgtgccatttgctataaatgctttaaatcctatatgtgtggcgcctcctgaattccctgctgaaatccatcctgaaatccctcctgacatccctcatgaaatccttgctgacatccccgctagtattgttggaggttttgaccagcttacaacagaggaagcagaagttagagaggcagatatctttgacaatgaggaaaaagttgtaaggcattatgccatcttgaaaggttttgaatttgctaaaggtatgaagacagatcctacaaggtttattgcaaaaggtgcagctgatggttgcccttggtgtataaatgcatctctgattgaggataagaagactgtaaagattatggtccttccatttgagcacacttgttcttctacaaagctacataaagggaagatggctactcaaggctggtgtgcagatagactctctgattggattaagaagaatcctagcaagggaccaactgatgccaggaagaagcttgaagaaagatatgagatcaagttgaaatactccaaagcatggtctggtatgaagaaggctatggagcagatccatggtacatatgaagaaagcttccagcttcttttcaactggaaggttgcactgcagaacaagtcaccaggtacaattgtagagatagagttgcagaaagtaggcaagaagatgtgctttaagagaatttttgttgcattgaaaccttgcatagatggatttttggctggatgtagaccttacttaggtgtagatgcaactaggttaactggtaaatatactggacagctagcttcagccactgctatagatggacataactggttgtattatgtagcatatgttgtgtttgactcgacaatagatgataaccgactctggttcatgcaacaactaaataaggccataggagacccagatggtttagttatttctacatatgcatctgctagatgctataccgaggataggtttcagtggcacttgaagcatatatgggatgtcaggcctgatgcaatagagtacctagagaagcaccactcaaggatttggtatagatgtggattttcagaacttagcaagtgtgattacctgacaaataatgtttcagagagtttcaacaaccagatcaagggcctaaacggtttgctcatacatgagttggttgattccattagagaaatagtcatggtgaaatttgcacttagaagagattgtgctagcaagatggatgatggaatcctaccaggtgtcatgaaggagctgaacattgcaactagtaatctgaaggttgttaaggtggctagaagtgaccatggatttgctgaagtcacaatggttgagagtgataatagcacctag

SEQ ID NO: 59169 - DNA, 287 bp, Oryza sativa
  Clone ID: PAT_MRT4530_60817C.1
ggcacgagcaaatgtcaaacccccgaagagtgggagcgtgacaaggcttcagcgacgggcgcagatggtccgtctatggatggcaccgttggtggtcacgtggatggcgtcaaagagtgactagagagcatgggataaaaatgtcaaccttttatggatgctggcccgcagatggatgttgaacttggtctcagtacagaatttcatggccaagacctcgattttgccgactataaagtaagcatagtagaaaggatgggttgaatttcaaaaaaaaaaaaaaaaaa

SEQ ID NO: 59170 - DNA, 160 bp, Oryza sativa
  Clone ID: PAT_MRT4530_60818C.1
gaagggaatgatattagaccattggtactaataactgctcaagtaaggattcacaagctacaaatggagagaaaaaaaatgaaagaaataactcatatgtatcataactaaagtcagggattattcatgcagaaacatgtaattatgataaatgctaact

SEQ ID NO: 59171 - DNA, 138 bp, Oryza sativa
  Clone ID: PAT_MRT4530_60819C.1
gcaaattttctcaataaagttggctaaagtttttggggttgatggctcaatggagttgtatggatacattgcggcacgggatcttcgggacccattacttaattatattgtcaatattggcagagataatcccataat

SEQ ID NO: 59172 - DNA, 495 bp, Oryza sativa
  unsure (1)..(495): unsure at all n locations
  Clone ID: PAT_MRT4530_6081C.1
cctcaggttggatgattgggtgctgtgccaggatttacaaacaagaaggcaggctggagaaccaccagccacgcggtgcagcagcaggggatggtgagcaacaggcagctggcatcgagaggaagccagatggtgggggtgaacagcagcaggtgagcttcctccagccggagcagaaccggtggtggcggggccggcgttcccaggacctgcggcgtactacgaccaggccgtcaggactcgatgccgcggctgcacgccgactcgactgctcggacaggtcatgtccncggagttcagcagtgcgaggtgcagagccagcccaagatcagcgagtgggagcgcacacttcgccaccctcggcccatcaaccccccgcctccatcntcgaccccccggctccgcagcntcncagcatcgcgcagcagcacgaccccctcctccagacatcctcattcctnggcaaccatttagacgaccaaaaaaaaaaaaaaa

SEQ ID NO: 59173 - DNA, 3195 bp, Oryza sativa
  Clone ID: PAT_MRT4530_60820C.1
atggctttaggatctctagtatgcttatcagctttgttgttgatccccctgtccactgtgtctgctgcttcttctccaggtctgaccgagagcagcaacaacgacactgacctcactgcacttctggctttcaaagcgcagttccatgatcctgacaacatccttgctggcaactggacccctggcacgccgttctgccagtgggtgggcgtctcgtgcagccgccatcagcagcgtgtcgttgccctggagctgccgaacgttcccctgcaaggagagctcagctcccacctcggtaacctatctttcctctccgtcctcaatctcaccaacactggcctcacaggcttgttgccggatgacataggaaggctgcatcgcctggagctccttgatcttggccacaatgccatgttaggtggcatcccagccaccatagggaacctctccaggcttcagcttcttaatctccagtttaaccagctatctggtcgaatcccaacagagttgcagggcctgcgtagccttatcaacataaatatccagacgaattacctcactggcttggtaccaaacgacctattcaaccatacgccttcattgcgtcgcctgatcatgggcaacaatagcctgtcaggaccaataccaggttgcatcggctccttgcacatgcttgagtggcttgtcctacagcacaataatctcacaggcccagtgccaccatccatcttcaacatgtctaggttaactgttattgctcttgcctcgaatggcttaactggccctatcccgggcaacacaagtttcagcctcccggcactacaacggatctacattagtataaacaattttactggtcaaattccaatgggactggcagcatgcccataccttcaaaccatttccatgcatgacaatctattcgagggtgttttgccatcatggctgtccaagttgaggaatctcactggcctcaccttgagttggaataactttgatgctggtccgatccctgcaggacttagcaacctcaccatgctgactgcactagatctcaacggttgcaacctaacaggagccatcccggtggatattggacagctagaccaactttgggagttacaacttttagggaaccaactaacaggaccgattccagcttctcttggcaacctgtcttcattagcacgcctggtattgaacgaaaaccagttggatggatcggttccagcatcaatagggaacattaactatttaacagactttattgtctcggaaaaccgtttacatggggatctcaacttcctttctacgttttccaactgtagaaatctttcctggatctatattggcatgaattacttcactggaagcatcccagattacattgggaacctatcaggtacactgcaagaattcagatcacataggaacaagttaactgagtcaatcatggagatggagaatctccttgagcttgatcttagtggaaatagcttggttggctccatcccatcaaatgccggaatgctaaagaatgcagaacatttattccttcaaggcaacaaattctctggctccataccaaagggcatcggcaacctcaccaagttagagatcctaaggttatctaataaccaattatcatccactttaccacccagcttatttcgtcttgaaagccttatccagctaaatctgtctcaaaacttcttgagtggtgcattgccaattgatataggccaactgaagcgaataaacagcatggatctatccaggaaccgctttcttgggagcctccctgattcgattggggaacttcagatgataaccatcttgaacctatcaaccaattcaatcgatggttcgattccaaattcttttggcaacttgacaggcttgcaaactttggatctatctcacaacagaatttcgggtacaatcccagaatatctggccaattttaccatcctcacaagcttgaacctgtctttcaacaatctgcatggtcagataccagaaggaggtgtcttcacaaacatcacgctacaatccttggtgggaaacccagggctatgtggtgttgcccgtttaggattttcactgtgccaaacctctcacaaaagaaatggccaaatgctaaaatatttacttctcgctatattcatatcagttggagttgtagcttgttgcctatatgtaatgattaggaagaaagttaagcatcaagagaatcctgctgatatggttgacactataaatcatcaattactctcatataatgagcttgctcatgctactaatgatttcagtgatgataatatgttggggtctggaagctttggaaaagtttttaagggtcagctgagcagcggtttggtggttgccataaaagttatacaccagcatctggaacatgccctgagaagctttgatactgagtgccgtgttcttcgaatggctcgacatcgcaacctgataaagatactgaacacatgttccaacctggacttcagagcactggttcttcagtacatgcccaacggaagcttagaggcactcctacactctgatcaaagaatgcaattaggtttccttgagaggttggacattatgctagacgtgtcgctggcaatggaatacctgcaccatgagcactgcgaggtggtcctgcactgtgacttgaagcctagcaacgtactatttgatgatgatatgacagcacatgtgtcagactttggcattgcaaggctgctgttaggtgatgataactccatcatttctgctagcatgccaggaacagttgggtacatggcaccagagtaagggactctaggaaaagcatcacggaagagtgatgtgttcagttacggcatcatgctgcttgaagtgttcactgcgaagagacccacagatgctatgtttgtgggagaactgaacatcaggcagtgggttcaacaggcgtttcctgcagagcttgtccatgtggtggactgcaaacttctacaggatgggtcttcttcttcttcaagtaacatgcatgacttccttgtgccagtgttcgagctgggcttgctctgttcggctgactcccccgagcaaaggatggcgatgagcgatgtggtcgtgacactgaacaagattagaaaggactatgtcaaattgatggcaaccacagtgagcgttgtgcagcag

SEQ ID NO: 59174 - DNA, 765 bp, Oryza sativa
  unsure (1)..(765): unsure at all n locations
  Clone ID: PAT_MRT4530_60821C.1
cggattgcctggtttgacccacgcgtcctgntttgatattttttttttgggagtatcattggagcatatggaatctctactctggacagagcttttgggcttcctcactttttcatattccaatgatcagattagcattggtcgttgttgtgacaagcattcctcttataatgtgagcagctgtcccacatttcgcttcctgctttatcgcaggattggaggtgcactctttacatgcgaccaaccacccgctgaaaacttcgtatgtgctatttcgccacattgaaaatgtgcaaatcacttgccgctttcatcatttgaactgatgaatggactcaagccatccaggattccagtcccagatgatgctggtggagcaaagacaagaggtctcagatgatttttttgcgctggtgaaccggctgccggagaggggcagccgaatcttttgccgccgacctgactgacggtgcaaatccccggtgcgggatacggcggaaggcgatcggccgaacccggtctgctacacggctcaattcattcatctgcaatgcgcgcatctactgaagaagctgataagctgtctggctgggctaaccgaatgtcgtgtgcttatgcaatggcatcgtcagctcgtcctgtcgtggatggcgagntgtccacgcgttggtgcgtggccgtgcgtctgtcttttgcttcgcacgatcatcagttttgcagttgccttcttcgtggctttatttgaccatgagctccggccatctg

SEQ ID NO: 59175 - DNA, 268 bp, Oryza sativa
  Clone ID: PAT_MRT4530_60822C.1
ggataaggtgcatcaatgagtaggacaaaattggatgattgcatgtgcaacagaactgcaaagtacagcatggagctaaaataatacgcagaaagtgaatgatcacaaatactttgggggacacaactgagtaacaaatcagaataagaggaggaacatatcacatttatcataacatcctacagactgagcatgaaatgtgtaatgtacaagatggacagagagagtactctacaatgtctgatgaaacatatactatacaaacttt

SEQ ID NO: 59176 - DNA, 139 bp, Oryza sativa
  Clone ID: PAT_MRT4530_60823C.1
atggcgcagctagggtacgcgcttggcacgtgggccccacctgctagagcacgagggcgatcgacaaggcgcgagaggcagggcgtgggaaggagcagggaagaggaggttgggtcagcgggaaaggatggcccaagag

SEQ ID NO: 59177 - DNA, 447 bp, Oryza sativa
  Clone ID: PAT_MRT4530_60824C.1
ttgactttatcagcctatttttttttttttttcgatcagccctttctctcgataaaatacttttttttgggtaaccgcttctgcttttttttgaaacaaaaaaatcaaactagtacaagttatttaaaacaaaaaacaagaaatggcattcgatagcaacgctggtaaacaacccggattggaaatctggcgcattgaacagatgaatcctgttcgtgtggacaagaaagattatggtcgtttctacactggagattgctacttggttctcaagtctactgagaccaagggctccatggctcaagatttgcacttttggttaggagccaattccagccaggatgaacagggagctgctgcctatcgaacagttgagcttgatgatcaactcggtggagctcctgtccaacaccgtgaggtgcagggacatgaaagcgccaagttctt

SEQ ID NO: 59178 - DNA, 1245 bp, Oryza sativa
  Clone ID: PAT_MRT4530_60825C.1
atggtcaccgcctccggcctcgcgccaccgcggctggcggtctcctgcccgcgtgcggcggggcgcggctgcggcggacaccaccgggttggcttcctccgatccgctcccgtggcgttggcggggcccgcggccgcgcagctccggtgctgcgcctccaccgtcgacgacggcgtcgtctccgccgcggcggcccccaagccccgcctccccaggagtctaaattattttcgactgtggaatgaactcataaaattaatgggaacctgtagggtcgtcggtatgggttcaaaactcattggatgcggatcggccactccatcgcttagcgtttcaaatgatgacctttctaaaatagttgaaacatcagatgaatggatcgcagcacggactgggattcggaataggcgagttctttcaggaaatgagacactgcgcgagctttcagtacaggcagcaaaaaaagctcttgagatggctcaagtaaatgctgatgatgttgaccttgttctcctttgcacgtctaccccagatgatctgtttggaggtgctgctcaggtgctggcggaggtgggatgcgcaaatgcatttggctttgatatcactgctgcatgtagtgggtttattattggtttaattacggctactcgttttatcaaaggtggaggcatccggaatattctagtaattggtgccgatgctctttcacaatttgtggattggacagacagagtttttcaggcatgcagtgctgatgaagatggcttgctaggtttttgcgttcaaagtgatggcaacggacaaaagcacttaaattgtgtctcgtcgcatgttgagtctatcctgtcgaagaccaatggtgtccctagcttcccacctaaaaaggcaaccttctccaacattgaaatgaatggaaaggaggtttttcgctttgctgtgcgatgtgtgccacaatctattgagaaggcattggaagaggctggtttacctgcttccagtattgattggttgttgctgcatcaagctaatcagcggattattgatgctgctgccagtaggttggatatcccatctgacaaagttatttcaaatcttgctaattacggaaacaccagtgcggcctcaattccattagcattagatgaggctgttcgagctggcaaggtgaaggcaggcgatgttattgcagcatcaggttttggtgctggacttacatggggttcagctattgtcaaatggtgctaa

SEQ ID NO: 59179 - DNA, 618 bp, Oryza sativa
  Clone ID: PAT_MRT4530_60826C.1
atggcaaccgctgaggttcagcaagtggttccagcagccgccgtgcacgacgacaacaacggccgcgacgtccacgacacgcccaacaccaaggtagcaggagaggaagaagaaggagcacctcttgcagttgcagaggacgagctgcacaacaatggcggccccaactccaaggaacaggagatcgtcgtgatcaccaaggagcaggaagccgccgccatcaccgtcgtcgttgacgacaccgcagacggcgacggcgacggcgacggcggcggccatgatatcgcgcatgaggtagaagccaagctcgccgtcgagacccctcctgctgctgctgacgcgaaggaggcggagcccgaggaagaaggaggaggaggacgacgccgtgtgcaggcaaagaagacgaccgagaaagcggcgtccaaggcggcgatcgtccccgtcaacgacgacgacgacgatgatcaggctcacgaggatgtcgtcgtcgctgcgccggtggctgctgagcatcaggagacggcggaggcggcggcggcggcggccggcgaggaggaggaagcgccggaggacaaggaggaggatgcgtgtgagaagagcaaggttcatgaggagtag

SEQ ID NO: 59180 - DNA, 493 bp, Oryza sativa
  Clone ID: PAT_MRT4530_60827C.1
gcagctccggtgctgcgcctccaccgtcgacgacggcgtcgtctccgccgcggcggcccccaagccccgcctccccagggtcgtcggtatgggttcaaaactcattggatgcggatcggccactccatcgcttagcgtttcaaatgatgacctttctaaaatagttgaaacatcagatgaatggatcgcagcacggactgggattcggaataggcgagttctttcaggaaatgagacactgcgcgagctttcagtacaggcagcaaaaaaaagctcttgagatggctcaagtaaatgctgatgatgttgaccttgttctcctttgcacgtctaccccagatgatctgtttggaggtgctgctcagatgtgcacaattttgcattaaaaacatctggtaaaaatataaacaggtgctggcggaggtgggatgcgcaaatgcatttggctttgatatcactgctgcatgtagtgggtttattattggttaattac

SEQ ID NO: 59181 - DNA, 462 bp, Oryza sativa
  unsure (1)..(462): unsure at all n locations
  Clone ID: PAT_MRT4530_60828C.1
cgctnaattaacccnnacnnnaangggacaaaancctggatnancaccngcaggtggctggcctgcatcntagaacntaggtggatcccccgggctgcaggaattccggcacgaggcgcaaatgcatttggctttgatatcactgctgcatgtagtgggtttattattggtttaattacggctactcgttttatcaaaggtggaggcatccgggaatattctagtaattggtgccgatgctctttcacaatttgtgggattggnacagacagaggtacatgcatcctctttggtggatggctgctggtggctgttttggttcagggcatgtcagtgctgatggaagatggcttgctaggtttttgcgttcaaagtgatgggcaacggacaaaagcacttaaattgggtctcgtcgcatgttggagtctatccctgatcgaaannccaaatgggtgcnccctt

SEQ ID NO: 59182 - DNA, 408 bp, Oryza sativa
  Clone ID: PAT_MRT4530_60829C.1
atgagcagcgacaagtcgtcgtggccggaggttgtggggctgccggcggaggcggcgaagcacatcatcctcaacgaccggccggacgttcacgtcgtcgtgctgcgcgtcggatccgtcgtcaccaccgaggtcgaccccaagcgcgtccgcgtcttcgtcaacaactccgccaccgtcgctcaggccacctttggcagcccgggatcccgggggatcccagcccattcccttgggagaaaggcccacgagtctcttctctcgcgcgcgaccaatgttgggcgccgccgcgcctcctcctccggcgagacaccaccagcgctgccaccgtaccaggtgcgccagtgccccatcccccaagtcaacctcgacagcaaccaagagcggttctccagtggccgtcactaa

SEQ ID NO: 59183 - DNA, 1141 bp, Oryza sativa
  Clone ID: PAT_MRT4530_6082C.1
cccacgcgtccgcccacgcgtccgcccacgcgtccgctggacgctcaccggagatggccttcgccgtcgcgccgccggtagcgccgcctccaccttctcccgcggcggcatgggggaggcgccgcgcgagggcaactcctccgcggttcgcgctggcggcatctaccagagacggcgacccggccccgccgacgttcgagcggctgcgggagcagctcctacagctccacgcagaagccgacctcacccaatccaaagcaaatagcacgagggtaaggcttgtgcggttgactgaggctgctgagaatcttaagaaaagagctgcggtcagcatccgaatgggcaaagagaatgaggcagtggatttacttgtgcaaaagaagaagctgaccaaagctcttgaaagcataaaacagcgcattgaggtgcttgataagctttccatgaaaatcagtgaggcaatttcagtgaagcagaacatgttaattgaacatgcattgcatccagggatgtctaatggcaaagaatccaatgacaacataagagttttctctagtaaagttggtgatgaggctgatgagactactagctctcctgcgaaatcatctgaaaaggcatttgatctgcaacatgtggtgcattcaggcatgactggccagttggagcaaagtgaacttcagacgtccgatagcttctcattttccagtgatcttgaatcaccaaacagcataactaaccattcttcttatgatgcttttctagaccatattggttttcagctggattcattagaatgtgaaattgaacaatatatcagttcccaactagcagaacaggtggacattcagaagccaataaatgccaagtggcaaaaattgtctgacgtattgaagcttgtaactgaaactagagaaaggattgcaaagattgtggataatacagtaaaggaggctggatctgaggactgaggtcatagcgaagtatataaagcaatgtattgatgacatcaaaccctgtttcttttatttgtaacatggtaagttgtgtcattgttttgatttcactgcacatagcttagattatcactattttcttgtatgagacgatcttatgattctttaatatcaattgtttattgtct

SEQ ID NO: 59184 - DNA, 1311 bp, Oryza sativa
  Clone ID: PAT_MRT4530_60830C.1
gttgatccgtatattggagtctagttcagaatatggagagttgtatttctctgagttggtcaacacgaacatcattaccccagtaggagagaactatggacccaatcttgatgaagatgaattgtgccagtggcaggtcaatcctttcgttctgagttttcttgcctccagagcagccgagaagggtcttgtttttaccagctcaacactcacctcattaccaagctgtggtggcaacaacactcggataaaacggcgcctagctctccaccaccctgatccgctacttccagctatgctgcaacaaatggatttgtctcagactcgttcactactcatatctggtgcagtcgacagaacaacagtccctctagacaagtttgcctatctggtgttgttggatcttcaagctgggagaatttgaaggatgaggacctactgcaaatatgcaaaatgtttatgctgaggtatctgagcgtcaggaacacaagggtcagcaagctcccacctcagatcaaggagctgcacatcctgggggcattggacatcagccgcaccaccataagtgagatcccatcagaagtgtgggagctaaagcatttgaagatgctggacctaagaggcacatggataagacatcttccagagaaagtcaaggaattgactagcctagagagattggatataagccacaccaagataagtgatctcccctctggagtgtgccggctacctaatctggagacgctggacctaagaggcacactaataagccagttgccagatcaaattgtgcggataaagtggttgagaaatcttattgttggtgctgctggagctggatctggaatgattgattccgaccaaacagtgctaacaaagatacccgagacgatccaccaattaagatatctaaagacgctagcaactatcgatttaagtgaattctctgtaaaatcagtacagtctcttggtgatctgaagcagttggaggtcctcacaataacatggtcctttcaccagtgcagtgacaaagactaccaacaagccctacgatcatccatagaaggatggtgggagcttaagtccatgactattcattgtgggctcggttgttccatggagttcctcggttctctaacagaaccacctgaaaatcttgagaaatttaaggtaatagctggaaaattttcccgtgttccccaatggatcgaaaggctcgaccgtcttactttcttgcagatcacggtctgcaaacaagtggcagatgatgtcaagatcctcgcgggcttgatcaaattacagcgcctg

SEQ ID NO: 59185 - DNA, 350 bp, Oryza sativa
  Clone ID: PAT_MRT4530_60831C.1
gatggacaagcggatgcattaattcataatcttgggggtttttatttttcaaattaccaccatgcaagtagccgttaaccaccaacccatgaacaattggctatctatccatggatctatctatggatagttcactttagataggatagggcacttgtgcacataggaaggctattgcatcgccattgttgaaggtgacataaagtggaaatatggcggatcaagcgtgctgcatgcctgcggatttgaagtctatgtatgggaaaactgctgagctccggtgtctgagccttggtccctgtcgggttatttccatcgattttttccctacgacattggtcggattaggt

SEQ ID NO: 59186 - DNA, 2358 bp, Oryza sativa
  Clone ID: PAT_MRT4530_60832C.1
tcactggatggccgatatagccttctgcctaatctgctctacttcttctatggcttgggcatcctgagcatcggttccagggataactttcagagacttggttagatcagcaacatgcttgatggccgatttgagtcttgctttctgttcttcaatagactttgggagatcggctagctttttgtgctccatatctagctcagcgttacattcttcaagttgtgctaagagttcaatcttgcgagcctcaagccgatcaatgttagacttgattgggccttcacataattggtcaagcttggacttctcttcatgcacaagttgtcgattagcttggatagtggcctcaatatccttgtgttctcgccgttcagccagtcttaacttggctttctccagtttgaattggtgttgctcaaggtaaacggttggagtaaggatatcggctaactcatctgggattaaagcttgaatctcgtgtagccgagccctgattgagccacagtcaaccaccaagctgtctagcgatgatgcttctagccgatctaaaatgcttcctagagttttcttcacatcatcagataaaggagccaaggctttgcttgtggtatcttcttctccttcatcaaggtagtctctgatgtcaaaagagaaaagatcggttaatactgggatagcaggagcagctggttgttcttcttcttcgacgtgatgacttcccgcagctgaaggggtctgatcacttgatgattgttgaacaggaggagaaggaggaggtgaaggccttgagaagtgaaccggagcagaaggagttggaggggtttgcttaggcgaagccgatggtgttctttcagtatcacttacctcggctgcggcctgatcaacctcgtcttcaattacctcttcatccagagcttgttcgatggatggatctagggtaggcagatcatcagctggcttggttttctttgtcttcttcttcttaattggggctacgatgcttacagccgacgatctggttttcctctttttgccggcatcggctggttctctgacgagcccttgaagaagagctgaggtcttgggtgcatcatagctgataaccggaggagatagcccacctccgttaggaattaaacctggggcatattggatgtctttgccactgttgctttgatgaggagggaaagattctgttgtttgagggacaacatctggaaagtggtctgtcatgtacagtgaagctggttggtggaataaatgcagtttccattcaccccaccacctgtcaaagtttttgcttctgaatgttgccagttctatgttgtcaatactacccagagggggtccttgaaggctaagcagccgatccatcatcagggttgatgaaatccctcctcggcattggatcttgtcagcaaagaataagccgattaggagttggcccatttcgagttgtctagctgagctcattggaagatagaattcataagaagcttggatgtttcttccttgatgaatgccaacaggaaggatgcatgggctgattgcagccgagaagatttccctggatgattggtatacttcatagttgatgtcttcgaatctgaagtccactgggtgttcaagttgtgcagagtcttcataaaggaaccagactctagcatctttttgaaagccttcatagaagatacaaaaccaatcgttgagcagttcagccgatagttttgctccagcatcagttggtgtagaagcgtattctccgtataatgtgcatctccgatgagtgcgctcttctccatcatcccctcctatgcttttggtcttgaagtcatattggttctttgtgttcaaactcatagggttggccgatgaggtgacattcagacctgtgatcatactgatatctatgagggttggagtcatcggcccttgattgaacagaaaggcattggtagtgtttgaccagaagtaagaagcagctgccatcaggggttcatctttggctgagttcgctataataaggtcaagtgcttggccgattccaatttcatcccagtgaaccctcttgctggctgatacacgtttgaaccatgtggtccagctcttttctggtggaactttctctagagatggccaggatttgaaggtattcttccagtaacctagatctgggttggttaatctgaaggggatcctattggtttcaccaataatgaactcggtggggtctggattgccgactgggccaagaaagtagtgattttcatgcgacaggctgagaatcgcaactaggttggaaaggtactcagcgtattcggccgatggtgcaccaggtgggctggcggaagacgacat

SEQ ID NO: 59187 - DNA, 373 bp, Oryza sativa
  Clone ID: PAT_MRT4530_60833C.1
atggacggagatttgtatggttgccgtccgaatgatcttctgatgggacggcccatacctacctccacttccgcccggaggcaggcgcgacgtgggatcatggctgtctgctgacgacatgaccagtgtctgaccggtcacaaatcggtcattcttgtccatcacgcgtcagtttagcaatctgcatgttcgcccttcttcatacaatatcttgcctgtaatggttaggatgaagcctggcatatatctgaccgggatcaacgtgccatctccaggaggtaacacgctggcttcggctagggacgagtgcttggaggcgctcatcctgacgggatggggcgaggcgtgtgtcagaccgcctgtcgccacctaa

SEQ ID NO: 59188 - DNA, 2094 bp, Oryza sativa
  Clone ID: PAT_MRT4530_60834C.1
atgactccaaccttcatagatatcagtatgatcataggtctggatgtcacctcatcggccaaccctatgagtttgaacacaaagaaccaatatgacttcaaaaccaaaagcataggaggttggtcaggctatgtagcagcatacatgggccagggctcggtcacccctcgagaacatgtggcctttctattaatgtggctagaaaaatttcttttctgtggatcaagttgcggccccacaactaactggcaatttctggctgaagctctagaaataaagagacaattccccttgggcaaaattctcctcggctatctataccagatgttgagcaatgcatcggctaagataacagtcggctcagtagttggagcaggtggaccctggtggctgctacaaacctggttaaacctgatagtcatgaaggttgtcaatcggccatccgtatcagaagctgagttcccaagactagagccgattgtaggggatgatggagaagagcgtactcatcggagatgcacatcatacggagaatacgcttctacaccaactgatgccggagcaaaactatcggctgaactgctcaaggattggttttgtagcttctatgaaagctttcaaaaagatgctagagtctggttcctttatgaagactctgcacaacttgaacacccagtggacttcagattcaaagacatcaaccatgaagtataccaatcatccagggaaatcttctcggctgcaatcagcccatgcatccttcctgttggcattcatcaaggaagaaacatccaagcttcttatgaattctatcatccaatgagctcagctagacaactcggaatgggccaactcccaatcggcttattcttcgctgacaagatccaatgccgaggagggatttcatcaaccctgatgatggatcggctacttagccttcaaggaccccctctgggcagtattaacaacatagaactggcaacattcagaagcaaaagctttgacaggtggcagggtgaatggaaactgcatttattccaccaaccagcttcaatgtacatgacagacctctttctagatgttgtccgtcaaataacagaatcttcccctcctcatcaaagcaacagtggcaaagacatccaatatgccccaggtttaattcctaacggaggtgggctatctcctccgagaatcagccgatgccggcaaaaagaggaaaaccagatctcggctgtaagcatcgtatccccaattaagaagaagaagacaaagaaaaccaagccaactgatgatctgcctaccctagatccatccatcgaacaagctctggatgaagaggtaattgaagacgaggttgatcaggccgcagccaagattccgtcgtttccggagagtccgttttcgcagaagaagagtttgaagaattccaaggccagcaaggcaactcctggtttggaatggtacattcctggtttggagatagaactgtgcagccggggtggttgttcagaatggttgggcctatacaacaggaaaaagaagactgcggtgaagaagaaatcggctgcaacaacatctaaaccagctccaccaccttcacctcctccttctcctcctgttcaacaatcatcaagtgatcatacccctttagctgcgggaagtcatcacatcgaggaagaagaacaaccagctgctcctgctatcccagtattagccgatcttttctcttttgacatcagagactatcttgatgaaggagaagaagataccacaagcaaagccttggctcctttatctgatgatgtgaagaaaactcaaggaagcattttagatcggctagaagcatcatcgctagacaacttagtggttgactgtggctcaatcagggctcagctacccgagattcaggctttaatcctagatgagttagccgatatccttactccagccgtttaccttgagcaacaccaattcaacctggagaaagccaagttaagcatagctgaacggcgagaacgtaaggacattgaggccactatccaagccagccgtcaaattgtgcatgaagagaagtccaagcttgcatgcctgcag

SEQ ID NO: 59189 - DNA, 490 bp, Oryza sativa
  Clone ID: PAT_MRT4530_60835C.1
ttaggaggcgacaggcggtctgacgcacgcttcgccccatcccgtcaagacgagagcttctaggcactcgtccccagctggagctagcgtgttacctcccagagatggcacgttagccccggtcggatatatgccaggcttcatcctaaccattacaagcaagatgttgtgtgaagaagggcaaacatgcacgttgctaagctgacgcgtggtggacaagaatgaccgatttgtgaccggtctgacactgatcatgtcgtcggcagacagccacgttcccacgacgcgcctgcctccggcagaagtggaggtaggtatgtgccgtcccgtcagaaggatgttcggagggcaaccgtgcaaatctccgtccatttatgaagagaagaaaagtccagtttggaaagagaggggtgcatgtggtatccccttgaagtataaaaggaggaccctgcccatggggaagggggatgatcttttccagattcagtag

SEQ ID NO: 59190 - DNA, 2334 bp, Oryza sativa
  Clone ID: PAT_MRT4530_60836C.1
atgtcgtcttccgccagcccatctggtgcgccatcagccgaatatgccgagcaccactccaacctagttgcgattcccagcctatcgcatgaaaaccactactttctcggcccagtcggcaatcctgaccccaccgagttcatcattggtgaaaccaacaggatcccctttagattaaccaatccagatctaggtcactggaagaatactttcaagtcctggccgtctctagagaaagttccaccagaaaagagttggactacatggttcaaacgtgtatcagccagcaagagggtttactgggatgaaattggaatcggccaagcacttgaccttattatagcaaactcggccaaagatgaacccctgatggcagctgcttcctatttctggtcaaacaccattaatgcctttttgttcaatcaagggccgatgaccccaactctcatagatatcatcatgatcacgggtctggatgtcacctcgtcggccaaccctatgagcttgaacacaaagaaccaatatgacttcaagaccaaaagcataggaggttggtcaggctatgtagcggcatatatgggtcagggctcggtcacccctcgggaacatgtggcctttttgttaatgtggctagaaaaatttcttttctgtggatcaagttgcggccccacaaccaactggcaatttctagctgaagctctagaaacaaagagacaatttcccttgggcaaaatcctcctcggctatctataccaaatgttgaacaatgcatcggctaagatagccatcagctcagtagttggagcaagtggactctggtggctgctacaaacctggttaaacctgatagttatgaaggttgtcaatcggccatccgtatcagaagctgaattcccaaggctagagccgattgtaggagatgatggagaagagcgtactcatcggagatgcacatcatacggagaatacgcttctatgccaactaatgctggggcaaaactatcggctgaactgctcaaagattggttctgcagcttctatgaaggctttcaaaaagatgctcgagtttggtttctttatgaagattctgcagaacttgaacacccattggacttcagattcgaagacatcaaccatgaaacaatagaatcctctcctccccgtcaaagcaacagtggtaaggatatccaatatgctccaggtttaatccctaacggagatgggctaactcctccggttattggctatgatgcccccaagacctcagctcttcttcaagggcttatcagagaaccagccgatgccggtaaaaagaggaaaaccaggtcgtcggctgtaaacatcgcagccccaagtaagaagaagaagacaaagaaaaccaaaccagccgatgacctgcctaccctagacccatccattgaacaagtgctggatgaagagataatcgaagacgaaattgatcaggctgcagccgaaaaaaagaagaccgcggtgaagaagaaatcggctgtaacaacatctaagccatccccaccgcctccccctcctccttctcctcctgtacagcaatcatcaagtgaccagactccttcagctgtggggagtcatcacgttgagcagaaagaaccaccagctgctcctgctatcccagtcttagccgatcttttctctttcgacattggagactaccttgatgaaggagaagaagataccacaagcaaagctttagcccctttatctgatgatgtgaagaaaactctaggaagtatcttggatcagctagaagcatcatcactagatagcttggtagttgattgtggctcaatcagagcttggctacatgagattcaggctctaatcccagatgagttagccgatatccttaccctagccgtttaccttgagcaacatcaattcaaactagagaaagccaagttaagactggccgaactgcgagagcgcaaggacattgaagctactatccaagctaatcgacaacttgtgcatgaagagaagtccaagcttgatcaactttctaaaggcccaatcaagtctaacatcgatcggctcaaggctcgcaagattgacctcttagcacaactcgaagaatgcaatgccgagctggatatggagcacaaaaagttagccgatctcccaaagtctattgaagaacagaaatcaagactcaaatcggctatcaagcatgttgctgatctgaccaagtctctgaaagttatccctagaaccgatgctcaagattcccaagccatagaggaagtagaacagattaggcagaaggctatatcggctatccagcgatacttatctcaataa

SEQ ID NO: 59191 - DNA, 1371 bp, Oryza sativa
  Clone ID: PAT_MRT4530_60837C.1
atgaccatggaagatggaagctgtcctccagcagtcgcccccagtggcagccaagccgaagattacggatcatggacactgaagcagaagcttgaggatctcatcaactgtgatcctatccatggtatcatgccaaaaaatcctaaatataaagcatatttcgaggaaaagttcgaggagaagttaagtttcatgggactgggagagtttctttaccctgatatcctcaccaacatggcctcccagaacgctctgcgttgtgccagggtcgcactccagggcacctctcctctcttgcgttgccgccgccgcgctgaccccaacacccgccaccgctacggcttcgcccccctgcacatggccgccgagaacttcagcgtcgacatggtcaagctcctcttccgctgcggcgcgtccgccaacatccgcaccaagggcgacaacgtcattgagggcctcctccctctccatgttgctgtggagaatgccagcatgcacaagtacattgaggatcattgggctcatggggaccatatcatcaacctcatcttcctcctttgtcttcctgagatgacggacaacattgtcgacgaggtatggaattacattcagcatgaagagaagcatgtccaggcagcaattttgctgctcgctgctgaaaagcagctccgtggtcgccttaacaagagcagtggcaaagcctctctgaacgggtttgatattgttaaaagccgcattggtgatgctcttagcaccatacatcttgagggcttaaatatggttcaagagggaaagaatggcagggcactaaagagattgaaagacaaaaaggaagcccttcttacagcacttgtactagtgtgcattgttcacaaagctggtgaagctcttgacggatacattcaaactcattcacagccgccgccgccgccgcggaggtggttctccctcgccggcgaattgagcctccccaacgatggagcggcaagctcagcaacacgggggctcgtgagcggcggcgctgagcaaggcggtggggttgtcgaggatcgcgaggagcgaggtggggtcgtcgaggagggcgaggagcaggcgaatcaagcaacgactccaacagcgcagatttccttcgccgcgtgccctcgttgcggcgagaaaacgtgcatcccagataggggccaagcggctgagctagggtgcgggcctcgtcgccacgtcgacctgaatccgagctggagcaacgagatcacgcgccaggtcggtgcacttcgttcacggcacctcctcctggcgcaccagctccggatccagctcctgtcggcggcggcgcaccagctcctgtcggcggcggcgcaccacctccgccggtag

SEQ ID NO: 59192 - DNA, 2863 bp, Oryza sativa
  Clone ID: PAT_MRT4530_60838C.1
acagacggagatttgcatcgccgccgtccgaatgaccttctgacgggacggcccatacctacctccacttccgccggaggcaggcacgacgtggaatcgtggctgtctgctgacgacatgaccggtgtcagaccagtcacgtcggtcattcttgtccaccacgtgtcagcttagcaatctacatgttcgcccttcttcacacaacatcttgcctgtaatggttaggatgaagcctggcatatatctgaccaggactaacgtgccatctctaggaggtaacacgctagctccagctggggacgagcgcctagaagccctcgtcctgacgggatggggcgaggctactattaaacttgctctaaacctctttgctcattacctgggccatccgatgggagccttagtacttgtggcaaccagcctgatgctgctgatactacagcatagtggtgcatctgacggggctagggctgggtctggaagtatctggcagccccagcccgattgtccagctccagcgaagtgcggcaacgtcaacattccctacccgtttggcataagagaaggttgcttccgaccgaagggcggctttaatatctcatgcaagcaagaacaagcttatattggaccggacattagggtcacgaattttgatgtagtccagagtgaggctcgcatcctgaccgatataccatcagggacggtagcatggaagtacaacaatgaatttgatccaattgcatggacgtccagaggaggattacgacttggtaatcaccatatggtttccagcgccaagaacagattcacagcaatcgggtgttcaactgttgcattcatctacggcagagacaaaaatggtagcaatggacagtttgatcagttcaccagcttatgtggatcgttctgcttcgacgagggtagcatcgaagacggcccagagtgctccggcatgggttgttgccaagtccccatttcaaccaaccttaggaggttcagtttaggattctataattataacacaaccaaaaaagttcttaattttagttcacgcagctatgcgttcgtggtcgagaaggatcaattcaagttcaagagttcctatgccaaagcagacaatttcatggaggagctcgctcgtgggattcctataattctccagtggattgctggtaatgaaacctgcaaggaagcagccctgaaggagtcgtatgcttgcgttgccaataacagcaaatgcatcgatgtgatagaggcgcccgggtacagatgcaactgcacccaaggttacgagggaaatccctacctcaaagacggctgccgagttgttaatattgcagacatcaatgagtgcaacgccacaagattcccgaattcttgcaagggcatctgcactaacaccgatgggagctacgactgtatttgcatcagcatcatcttcctcatcatctgtatctccactctgctgatcaagattcagagaatgaagctggaaaaagagaagcagaggttctacgatcagaacggtggccacatattataccagaaaattatctcagggcaagtcaatacagtggaaatattcacagaagaggtactaaagaatgcgaccaacaacttcgacagcggacaaaagcttggcgccggtggtcatggcattgtctacaagggcattctcagggacaacaatgtcgtcgccgtgaagcgctccaacttcctccacgtgacagacgccgaggaattcgtgcaggagatcatcatgctctcgcagatcaaccaccggaacgtggtcaggctcatcggctgctgcctggaagttgaagtgcccatactggtctacgagttcatctccaatggcactctctcctacctgatccatggcgatagcaggcggtatgcttcactgaaacttcgtcttaggattgctcaagaatcagctgaagcattggcatacctgcacctgtcgacgaaccggcctatcatccatggcgacgtggagtctctgaacattatgctcgatgatagctacacggtgaaggtgaccgacttcggggcatcacggtggctgtccaatgaagctgtcgagcaaattgcgatggtgcagggaacccgagggtacctggatccggagtacctgcaggagaggaagctgacggagaagagcgacgtgtacagcttcggcgtcgtgctgctggagctgatcactgggaagaaggcgatctaccgccacgatggcgatggcgacttcgagagcctcgcaggatcgttcctgcgggcgatggaggagagggtggagaacatcttggacacaagcttggctggtgccagcatggaggcgctgcccctgctccaggaggtcgccaaggtggggagtatgtgtctgagcgccaaggggaaggagaggccatccatggcggaggtgaccgacatgttgaaagctgtaagaattgcgtggagggatcttctggtttcatcggagtacaacgtgacggaggttttcgtcgacagttcagaagctcctccatctggcaacccatcttccgctgtgttctggacgccggacatgcagtctctagaagttgaaactttgaggtgatgtttacagtctagactgtttgcagatattcagagttgcattgtctgcagacgagttgcaaaggtgtttgttcttgttataaactattcctatgtggttttcgtgactgttctagctgtcaattctcaggtttgctatctcaaaatggctattacttagctttgccagcaatgattttagtagtctcaagtgtaacagtagagtaaagcatacattgatatctttcaaacaggtttcagatggcataaagtattcagaatatgatat

SEQ ID NO: 59193 - DNA, 2127 bp, Oryza sativa
  Clone ID: PAT_MRT4530_60839C.1
atgtcgtcttccgccagcccatctggtgcgccatcagcagaatatgccgatcacctctccaacctagttgcgattcccagccagtcgcatgaaaaccactactttctcggcccagtcggcaatcctgaccccaccgagttcatcattggtgaaatcaataggatccccttcagattaaccaacccagatctaggtcactggaagaatactttcaagtcctggccgtctctagagaaagttccaccaaaaaagagttgcactacatggttcaaacgtgtatcagccagcaagagggttcattgggatgaaattggaatcggccaagcacttgaccttactatagcaaattcggccaaagatgaacccctgatggtagctgcttcttacttctggccgatgactccaactctcatagatatcagtatgatcatgggcctggatgtcacctcatcggccaatcctatgagtttgaacacaaaaaaccaatatgatttcaagaccaaaagcataggaggctggtcaagctacgtagcagcatatatgggccagggctcggtcacccctcgggaacatgtggctttcttgttaatgtggctagaacaatttcttttctatggatcaagttgcggtcccacaaccaactggcaatttctagctgaagccctagaaacaaagatacaattccccttgggtaaaatcctcctcggctatctataccagatgttgaacaatgcatcggccaagatagctgtcggctcagtagttggagcaggtagaccctggtggctgctacaaacttggttaaacctaatagttatgaaggttgtcaatcggccatccgtatcagaggctgagttcccaagactagagccaatcgttaatgacgacggagaggaactcactcatcggagatgcacatcatatggagagtacgcctctacaccaaccgatgctggggtaaaactatcggctgaactgctcaaagattggttctatagcttctatgaaagctttcaaaaagatactcgagtttggtttctttatgaagattctgcagaacttgagcacccattggacttcagatttgaagacatcaaccacgaaatataccaattgtctagggagattttctcagctgcaatcagcccatgcatccttcctgttggcattcatcaaggaagaaacatccaatcttcttatgaattctatcatccaataagctcagctagacaacttggaatgggccaactcccaatcgacttattctttgccaacaagatccaatgccgaggagaaatttcatcaaccttgatgatggatcggctgctcaacctccaaggaccccctatgggtagtattgacaacatagaactggcaacgttcagaagcaaaaactttgacaggtggtggggcgaatggaagctgcatttatttcaccaaccagcttcaatgtatatgacagacctttttccagatgttgtccctcaaacaacagaatcttctcctcctcatcaaagcaacagtggcagggatatccaatatgccccaggtttaattcctaacagaggtgggctatctcctccgcctcctcctccctctgaacatcaatcatctagtgaccagactccatcagctgtagggagtcaccatatagaggaagaaattcaaccagctgttcctgctatcccagtcttagctgatcttttctctttcgacatcggagactaccttgatgaaggagaagaagacaccacaagcaaagccttagcccctttatctgatgatgtgaagaaaactctaggaaagaagtccaagcttgatcaactatctgaaggcccaatcaagtctaacattgatcggctcgaggctcgcaagattgacctgttagcacaactcgaagaatgcaatgctgagctggatatggagcacacaaagttagctgatctcccaaagtctattgaagaacagaaagcaagactcaaatcggctatcaagcatgttgctgatctgaccaagtctctgaaagttatccctagaaccgacgctcaagatgcccaagccatagaggaagtagaacagattaggcagaaggccatatcggctatccagcgatacttatctcaataa

SEQ ID NO: 59194 - DNA, 378 bp, Oryza sativa
  Clone ID: PAT_MRT4530_6083C.1
atggagctcgactgcggcggagctcgtgtcgtggtggtggatctagcggcgcggggagtctcgggccacgggcaacggggaggggttggatccggctcggcggcgtgtctcgacgacgacgtcggcgcgggcaacgggtccagcggcgggctctccttctccctctccctcctccaccgccacgagctgccgtcgccaccactgccacgagctgccgtcgcctctaccgctgcgagctcgggtccggccggatccggccgccgcgacgatgggggaggccagatccgccgccacgacgacgggggtggccggatccaccgccgacgccgacaggggcagcgccgacttcaaatttttggtgatttttgtgatgcttga

SEQ ID NO: 59195 - DNA, 482 bp, Oryza sativa
  Clone ID: PAT_MRT4530_60840C.1
tcgcaccaacatggcctcccagaacgctctgcgttgtgccagggtcgcactccagggcacctctcctctcttgcgttgccgccgccgcgctgaccccaacacccgccaccgctacggcttcgcccccctgcacatggccgccgagaacttcagcgtcgacatggtcaagctcctcttccgctgcggcgcgtccgccaacatccgcaccaagggcgacaacgtcattgagggcctcctccctctccatgttgctgtggagaatgccagcatgcacaagtacattgaggatcattgggctcatggggaccatatcatcaacctcatcttcctcctttgtcttcctgagatgaaaatgttcttggacacgactagattaattgccaaacagacggacaacattgtcgacgaggtatggaattacattcagcatgaagagaagcatgtccaggcagcaattttgctgctcgctgctgaaaagcagc

SEQ ID NO: 59196 - DNA, 735 bp, Oryza sativa
  Clone ID: PAT_MRT4530_60841C.1
ccctgtccttcttccccggcaagaagcttcgcagccacctacccgccctgcccatgatctctcctctcctcttctcctcctccacactaatccactagaccaccgcgagctcgcaaccggcgatccgctcgcgccgccataggctgtaaaatctaaggtgtttttgattattattctgttatgaacaattgggcattggagattattggttttgatatttggaatttattcacgaaatggttttggagatgattggatttcacaggtgatcgcaggattcgtcattttatgtgaccggtcagaccgagctctagtagccggctagagttgatgcacgtggttgatggagattccatatggcatacgatggaggtattgtgtgcgtatgggatgcggagtcgaatttggaaggagtccaaatttggtacgattggttatgtaaagtttctttattgtactagagggtttcctaaggtgtttaggactcttagtatgagtttggttcgtggctttaggctgcctacctcgggtataaatagagggggagcgtcagaccgacggcaagcggcagtcagaccgacggtggtgaggcggtcagaccggcggtggcgacagcaagcggcacctgatctcggcggttagactggagatctattctcggtcagacgaacgacaaccaggcggtcagaccggcaggacagcttcggtcagaccgcgatccatcgaattcgaggg

SEQ ID NO: 59197 - DNA, 1141 bp, Oryza sativa
  Clone ID: PAT_MRT4530_60842C.1
atggacatgtcgtcgatcgcctcccgcctcggcctctccggctcccgccccgtcgtccgcaaggccgccgagctccgccgcctctgcgacgtcaccttcgactcctccgtcctcggcatcggggaggtgtgcaaggcgatcatctgcctcgagatcgcggcgtccaagttccaggtgatattcgacagggcagaggcggtgcggatgagtggcatgtctgagaaggcgtatatcagatcattcaacgcgctgcagaatggtcttggtgtcaagactacattggatgtgcgtgaattgggcatccagttcggctgtgtcaggctgatacctttcgtgcagaagggattgtcgctctacaaggagcgttttttggcggcactgccaccttctcgccgggcaagcactgactttggtcgaccagtgttcactgcagctgcattctatttatgtgcaaagaggcataagcttaaagttgacaagctgaagttgattgatttatgcggaacatctagttctgaatttacaactgtttcaacatccatggcagacctttgctttgatgtttttgggattgccaaagagaagaaggatgcaaagtccataaaagggagtagagaactgctggatgttttgcctagcaaaaggaaacatgatgacgacagtgattcatctggtgaatcctcaggggatgaccaagatgaactagacctgccaacttacaaaagacacaagaaaatggaaaaggaagcttacaatgactggaagtcatcggttctctccaacaagcaaaccaaaccagaccctgcaaaaccaaggaaacaagctcagcttaacttcaagaagaagccgtcagacatggccctagaagtatcatcggcagccaactaaatttttctcaacggaggcaaaaaatgctcttagcatcatagaagttcctcctgaatgcatgaaggaaatcgttgcccccctttctcatttgttctaagatgctgacataatggtatcaacaaaaaaaaagttactttctcgcgacattcttgtgtaaatgatgacatgacatatttgttttttcaaaaaaaaagtgacttttttaaatgtaaaaaaaaaaaaaaaaaaaacctgcagcccggggatccactag

SEQ ID NO: 59198 - DNA, 2080 bp, Oryza sativa
  Clone ID: PAT_MRT4530_60843C.1
aactagtggatccccgggctgcaggatcggcacgaggcttccccaaacctagcctcctccactgctcccatacctgccttccgtcgccgccgcctaccctcgcactactgatctaccttgctgccgtcggcggccagcgggtgcccagcgcaaccgcaccctctcctctccagcagcggcgacccctcgcctcataccctttcctgggcaaggccgggaggggatcaatctagggtttccgccgccgccggttccccggacgttgctgcatgacgatggaagatggaagctgtccttcaccagtcacccccagcgaagccgaagctggagccgaagattacgaatcttggacactgaagcagaagattgaggatctcgtcaactgtgatcctatccatggtatcgtgccaaaaaatcctaaatataaagcatatttcgaggaaaagttccaggagaagttaagtaagtacgtccgtgttgtattgccgaaacttcgtccagcaattcagaaggatagcgtcaagcaattctttcaagtctacaattgttggtcaggtttcatgggacggggaaacttccttttacctgatatcctcaccaacatggccaacgagaacgctctgcgttgtgccagggtcgcactccagggcacctctcctctgttgcgtcgccgccgcgctgaccccaacacccgccaccgctatggcttcgcccccctacacatggctgccgagaacttcagcgtcgacatggtcaaactcctcttccgttacggcgcatcggcgaacatctgcaccaagggcgagtatgtcattgagggcctcctccctctccatgttgctgtcgagaatgccagcatgcacaagtacattgaggatcattgggctcatggggaccatatcatcaacctcatcttcctcctttgtcttcctgagatgaaaatgttcttggacacgactagattaattgccaaacagacagataacattgtcgacgaggtatggaattacattcgtgaagaaaagcatgtccaggcagcaattttgctgctggctgctcaaaagcagctccgtggccgccttaacaacagcagtggcaaagcctctctgaacgggtttgatattgttaaaagccacattgatgatgctcttaacaccatacatcttgaggggttaaatatggttaaggagggaaagaatggcagggcactaaagagattgaaagacaagaaggaagcccttcttacagcacttgtactagttggcattgttcacaaagccggtgaagctcttgagggatacattcaaactcattcacaggtgcgccatgacgaaattgttgaacatgtttcatcaattctaaaaagcaatggcattgctcattctggggaaagcattgacactggaaaacttgaatgctaccaacatggtggggggatgtcgattggcaagtcagattcacaaagagtgggctatggggaaactattgaagcggacaagtcatcttctgatataggcgaagttagtaaaatgatcctgggaaagcaaccacctaaaggatcagccatacgcgaagtgagagatatgttcttcccatactggaaatcggtgttgtctcgacggttgcagctaaagatagttccatcctgtcaactaagcaggaaggacttgctaagtgctgaagcgagcacgaaggggaccaagagtatggaccacccgtgtaacccaatcaaatcaatgggaaatcttggttcgatgggctggcccccattgtcaagtgagtccagaaggatgctttatactgttgcttcaatgtcccggaaggtgtttaagcgcacttgactacagaaaatctttggcggtatgcttgttgaaacacttttttttctataataagcctctagaatgtattttggtcatagatgagaaggggagaaaacagcatatcctgacttctttcactagcaaatactgagttactagtaggatttaggaccctcacatgatcaaacaacaaacatactaaacattgttacaggtttcaaaacatataatgaagccacatgtataaaccaaaaacc

SEQ ID NO: 59199 - DNA, 897 bp, Oryza sativa
  Clone ID: PAT_MRT4530_60844C.1
cattgccgatgtgcgtgatttgcgaccgttgggtttctgcccaactgtagagaccagccccacttgtcaccaggcctaagtaagtggcgtcacgcccgaccgcttccctcgaggagggtgatcgccctggcataacgccgggggctagtggcctgaccccctcgggggggtcgggcccgaaggtgatgaggccgcccctctctttgtctccccgagggatcggaccgctcccgtttcggccccgagggccgaggcgccccgacccaggcggtctgacacacgcctcgccccatcccgtcaggataagagcctccaggcacttgtccctagccggagccagcgtgctagctcctggagatgacacgttggtcccggtcagatatatgccaggcttcatcccaaccgttacaagcaagacattgtatgaagaagggcgaacatgcagattgataaactgacgcgtggtggacaagaatgaccgatttgtgaccggtctgacactggtcatgtcgtcggcagacagccatgttcccacgtcgctcctgcttccggcggaagtggaggtaggtatgggccgtcctatcagaaggtcattcggacggcaaccattacaaatctccgcccatttatgaaggaaaggcgggcgaagttttagaaaaaagaggatgggtccccaccaaaaagggaaataggtagaagtggtgcatgtggtatccccttgagatataaaaggaggaccttgcccatagagaagggggttttttttgattcttttccagatttagagcttagaacgggggagaagttggctcacactttgtagctcattcatacacaaatccacaaaaacacaggagtagggtattacgcttcgcacccgcccgaccctgtataacc

SEQ ID NO: 59200 - DNA, 2217 bp, Oryza sativa
  Clone ID: PAT_MRT4530_60845C.1
atgacccaaactcttatagatatcagcatgatcacgggtttggatgtcacctcatcggccaaccctatgagcttgaacacaaagaaccaatatgacttcaagaccaaaagcataggaggttggtcaggctatgtagcggcatatatggatcagggctcggtcacccctcgggaacatgtggccattttgttaatgtggctagaaaaatttcttttctgtggatcaagttgcggccccacaaccaactggcaatttctagctggagctctagaaacaaagagacaattttccttgggcaaaattctcctcggctatctataccagatgttgaacaatgcatcggctaagatagccatcggctcagtggttggagcaggtagaccctggtggctgctacgaacctggttaaacctgatagttatgaaggttgtcaatcggccatccgtatcagaagctgagttcccaagactagagccgattgtaggggatgatggagaagagcgtactcatcagagatgcacatcatacggagaatatgcttctacaccaactgatgccggggcaaaactatcggctgaactgctcaaagattggttctgcagcttctatgaaggctttcaaaaagatgctcgagtttggttcctttatgaagattctacagaacttgagcacccactagacttcagattcgaagacatcaaccacgaaatataccaatcgtctagggagattttctcagctgcaatcagcccatgcatccttcctgttggcattcatcaaggaagaaacatccaagcttcttacgaattctatcatccaatgagctcagctagacaacttggaatgggccaactcccaattggcttattctttgccgacaagatccaatgcggaggagaaatttcatcgaccttgatgatggatcggctactcaaccttcatggaccccctctgggcagtattgacaacatagaattggcaatgttgagaaacaaaaactttgacagatggtggggtgaatggaagctgcatctattccaccaaccagcttcaatgtatatgacagacatcttcccagatgttgtccctcaaacaacagaatcctctcctcgccgtcaaagcaacagtggtaaggatatccaatatgccccaggtttaattcctaacggaggtgggctatctcctccggttattggatatgatgcccccaagacctcacctcttcttcaagggcttatcagagaaccagctgatgctggcaaaaaaaggaaaaccagatcgtcggctgtagacatcgcagccccaactaagaagaagaagacaaagaaaaccaagccagccgatgatctgcctaccctagattcatccattgaacaagctctggatgaagagataattgatgacgaagttgatcaggccgcagtcgaaaaaaagaagactgcggtgaagaagaaatcggctacaacaacgtctaaaccagctctaccaccttcccctcctccttctcctcctgtacaacaaacatcaagtgaccagaccccttcagctgtggggagtcatcacgtcgaggaagaagaacaaccagctgctcctgctatcccagtattagccgatcttttctcttttgacatcagagactatcttgatgaaggagaagaagataccacaagaaaaaccttagcccctttatctgatgatgtgaagaaaactctaggaagaatcttggatcggctagaagcatcatcgctagatagcctggtggttgattgtggctcaatcagggctcggctacatgagattcaggctctaatcccagatgagttagccaatatcctcaccccagccgtttaccttgagcaacaccaatttaaactggaaaaagccaaattaagactagccgaacggcgagagcgcagggatattgaggccactatccaagctaatcgacaacttgtgcatgaagagaaatccaagcttgatcaactatctgaaggcctaatcaagtctaatattgatcggctcaaggctcacaagattgaactcttagcacaacttgaagaatgcaacgctgagctggacatggaacacaaaaaactagccgatctcccaaaatctattgaagaacagaaagcaagactcaaatcggctatcaagcatgttgctgatctgaccaagtctctgaaatttatccctagaaccgacgctcaggatgcctaa

SEQ ID NO: 59201 - DNA, 807 bp, Oryza sativa
  Clone ID: PAT_MRT4530_60846C.1
atgggtttctgcccaactgtggagaccggtcccacctgtcaccaggccttaggaagtggcgtcacgcccgaccgcttccctcgaggaggacacaatcgcccacgtggcctggcacccaccgggggggggggggtcgggcccgagggtggtgtgttcgccctcctctttgtctccccgagggggtcggaccgctcccgccttggccccgagggctggggcgccccgaccccttgtggattttgcgccgcgtgcggtctgacgcacgcctcgccccgtccagtcaggacgagagcctccaagcactcgtccctagccggagccggcgtgttacctcctggagatgacacgttggttccgacagccatctcccacgtcgcgcctgcttccggtgaaagtggagctgattcttgctctgttctcggatcaatctccaccttcgactccaccttgatctaatctccttttccgatgctgatattaccaaatttggtcgttaacatatcgcgactacggtattttgatggtatggcaatcgttggtatatgcgagattgaggtaaaagagatgaagacagggatttttatacaggttcaggccccttatctgacaggtaatagccctacatcctgttggccgaagccagtgttgctctttgttcaacaactcgtagtcgatgacagcgtagtcttcctcctcgaatccatactcggcgagattagtgatggcgctagatccctcttgccggcttccgtatgcaccggatggggtatgtctaggcttatctctgatgttgatatccggcgactt

SEQ ID NO: 59202 - DNA, 2173 bp, Oryza sativa
  Clone ID: PAT_MRT4530_60847C.1
ctacgataagtattgctggatagccgatatagcttgctgcctaatctgctctacttcctctatggcttgagcatcttgcgcatcggttccaggaataacttttaaggacttggtcagttcagcaacatgcttaatagccgatttgagcctagctttctgctcttcaatggactgggggagatcgactagcttcttgcgttccatatccagctcagcattgcattcttcaagttgtgctaagagatcaatcttgcgagcttcaagccgatcaatgttagatttgattggacgttcggccagtcttaatttggctttctctagcttgtattggtgctgctcaaggtaaacagctggagtaaggacatcagctaattcatctgggattaaagcttggatttcatgcagccgagccctgattggaccacagtcgactaccaagctatctagcgatgatgcttctagccgatccaagatacttcttagagttttcctgacatcatcagataaaggagccaatgctttgcttgtgacatcttcttctccttcgtcgagatagtctttgatgtcaaaagagaaaagatcggctaggactgggatagcaggagcggctggttgttcttctttttcaacatgatgacttcctgcagctgaaggggtctggtcacttgacgattgttgagcagaaggagaaggaggaggtgaaggtggtggagctggtttagatgttgttgcggccgatttcttcttcaccgcagtcttctttttccttgagaagtgaaccagagcagaaggagttggaggggcctgcttaggtgaagccgatggtgttctttcaatatcacttacctcggctacggcttgatcaacatcttctccgatttcctcttcatccagagcttgttcaatggatggatctagggcaggcaggtcatcagctggtttagctttctttttgatcttcttgtttggagccggggctaagatgtctacagccgatgatctggtttttcttttcttaccggcatcagctggttctctggtaagcccttgaagaagagctgaggtcttgggggcatcataaccgataactggaggagatagcccacctccgttaggaattaaacttggggcatattggatgtctttgccactgttgctgcgatgaggagaggaagattcccaccacctgtcgaagcttttgctcctgaatgttgccagttctatgttgtcaatactgcccagagggggtccttgaaggctaagcagccgatccatcatcagggttgacaaaatccctcctcggcattggatcttgtcagcaaagaataagctgatcgggagttggcccattccgagttgtctagctgagctcattggatgatagaattcataagaagtttggatgtttcttccttgatgaatgccaacaggaaggatgcatgggctgattgcagccgagaagatttccctggatgattggtatacttcatgattgatgtcttcgaatttgaagtccactgggtgttcaagttgtgcagagtcttcataaaggaaccagactctagcatctttttgaaagccttcatagaagctacaaaaccagtccttgagcagttcagccgatagttttgctccggcatcagttggtgtagaagcgtatttgccgtatgatgtgcatctccgatgagtacgctcttcttcatcatcccctacaatcggctctagtcttgggaactcagcttctgatacggatggccgattgacaaccttcatgactatcaggtttaaccaggtttgtagcagccaccagggtccacctgctccaactactgaaccgactactatcttagccacatctggtatagatagccgaggagaattttgcccaaggggaattgtctctttgtttctaaagcttcagccagaaattgccagttggttgtggggccgcaacttgatccacagaaaagaaatttttctagccacattaatagaaaagccacatgttctcgaggggtgaccgaaccatggcccatgtatgctgctacatagcctgaccaacctcgtatgcttttggttttgaagtcatattggttctttgtgttcaaactcatagggttggccgatgaggtgacatccaaacctgtgatcatactgatatctatgaggattg

SEQ ID NO: 59203 - DNA, 579 bp, Oryza sativa
  Clone ID: PAT_MRT4530_60848C.1
atgggacggcccatacctacctccacttccgccggaagcaggcgcgacgtgggaacatggctgtctgctgacgacatgaccattgtcagaccggtcacaaatcggtcattcttgtccaccacgtgtcagtttaacaatctgcatgttcgcccttcttcatacaatatcttgcctgtaatggttaggatgaagcctggcatatatctgaccggaaccaacgtgccatctccaggagctaacacgccggctccggctagggacgagtgcttggaggctctcgtcctgacgggatggggcgaggcatgcgtcagaccgcctgggtcggggtgcctcggccctcggggccgagacgggagcggtccgacccctcggggagacaaagagaagggcggccgcatcaccctcgggcccgacccccccccccccccgagggggttaggccacgtgggtgatcgtgtcttcctcaagtctctaagtcatgatactcccagtcccatgtcaccgacagcagcccccggcgttatgccagggcgatcgccctcctcgagggaagcggtcgggcgtgacgccacttcctaa

SEQ ID NO: 59204 - DNA, 288 bp, Oryza sativa
  Clone ID: PAT_MRT4530_60849C.1
atgggaacggaagatacacacaaattaccagcgagaaagccgcggcgccgcacggcggacaacaacccaaatgcgaactacgcccatgcgcaaatggtgcacgaaaatcgcgacaacaaacaaaccaccgatgaaaaccctggagcaaacgaccaacacaagccgccccagccaccgccacccacgccaaaccgcgtaccccacggcgtagcgagcaagatggaattagacggcagcaaagctcccgcactcgccctgccaccaagacagcgacccacccaatcgtga

SEQ ID NO: 59205 - DNA, 917 bp, Oryza sativa
  unsure (1)..(917): unsure at all n locations
  Clone ID: PAT_MRT4530_6084C.1
gcgcccacccgtccggcttgttattaagatgtatccccaaggaagaatggctcatcattttcatnaggtgaaaggtnntnactatttatctgtgagaggacctaagggtcgcttcaaataccaacctgggcaagtaagagcatttggaatgttagctggaggatcaggcattaccccaatgttccaagtcacaagagcaattcttgaaaacccaagtgacaatacgaaagtgcacttaatctatgccaatgtcacatatgatgacattcttctaaaggaagaattggatagtatggttgaaacctatcccgatcgcttcaagatatactatgtattaaatcagcctccagaaatctggaatggtggtgttgggtttgtgtcaatggaaatgatccaaacccattgcccggcacctgctgctgacattcagatattgagatgcggacctcctcccatgaacaaagccatggctgaacacctggagaatcttggctacacgaaggaaatgcagttccaattctaagcctccacagtggaacaataccgaaataacagcgatggacaacattttcgttcaccttcagtagaaattgtctgaccctagtgccatttaatcaagatataggcgaactttaaacccgataaaagtagaatgtcaggtcagcatattttgagtgaaagcaaaaaacaacacctacttgagttggggtcagaagttcctgtagcccatcatttttgtgccaatgctgttcaattccagacagacagaatgaaactaattatttttttttcaatcagaattttggacacaaggttggaacgttcattgctccagctaactcaatgctcaggtgattaaagaatgaccaacttgtccccttttattatgagaagaaaaacaactactgtacgtgccc

SEQ ID NO: 59206 - DNA, 2559 bp, Oryza sativa
  Clone ID: PAT_MRT4530_60850C.1
ctactctacttcttctatggcttgggcatcttgagcatcggttccagggataacttttagggacttagtcagctcaacaacatgcttgatagccgatttgagtcttactttctgttcttcaatgaatttggggagatcggctagtttcttgtgttccatatctagctcagcgttacattcttcaagttgtgctaagagttcaatcttgcgagcctcaagccgatcaatgttagacttgattgggccttcagataattgatcaagcttggacttctcttcatgtacaagttgtcggctagcttggatagtggcctcaatgtccttacgttctcgccgttcggctagtcttaacttggctttctccagtttgaattggtgttgctcaaggtaaacggctggagtaaggatatcggctaactcatctgggattaaagcctgaatctcgtgtagccgagccctaattgagccacaatcaaccaccaagctgtctagcgatgatgcttctagccgatctaaaatgcttcctagagttttcttcacatcatcagataaaggagccaaggctttgcttgtggtatcttcttctccttcatcaagatagtctctgatgtcaaaagagaaaagatcagctaacactagtggacctggtttagatgttgttgcagccgatttcttcttcaccgcagtcttctttttctcggctgcggcctgatcaacctcatcttcaattacctcttcatccaaagcttgtttgacggatggatctagggtaggcagatcattagctggcttggttttctttgtcttcttcttcttcttaattagggctacgatgcttacagccgacgatctggttttcctctttttgccggcatcggctggttctttgacgagcccttgaagaagagctgatgtcctgggggcgtcatagccaataactggaggagatagcctacctccgttaggaattaaacctggggcatatcggatgtctttgccactgttgctttgatgaggaggggaagactctgttgtttgagggacaacatctggaaagaggtatgtcatatacattgaagctggttgatggaataaatgcagtttccatttaccccaccacctgtcaaagcttttgcttctgaatgttgccagttctatgttgtcaatactgcccagagggggtccttgaaggctaagtagccaatcgatcattagggttgatgaaatccctcctcggcattggatcttgtcagcaaagaataagccgattgggagttggcccattccgagttgtctagctgagctcattggatgatagaattcataggaagcttggatgtttcttccttgatgaatgccaacaggaaggatgcatggactgattgcagccgagaagatttccctggatgattggtatacttcatggttgatgtcttcgaatctgaaatccactgggtgctcaagttgtgcagagtcttcataaaggaaccagattctagcatctttttgaaagccttcatagaagctacaaaaccaatccttgagcagttcagccgatagttttgccccggcatcagttggtgtagaagcgtattctccgtatgatgtgcatctccgatgagtacgctcttctccatcatcccctacaatcggctctagtcttgggaactcggcttctagtacggatggccgattgacaaccttcatgactatcaggtttaaccaggtttgtagcagccaccagggtccacctgctccaactactgagccaactgctatcttagccgatgcattgctcaacatatggtatagatagccgaggagaattttgcccaaggggaattgtctctttgtttctagagcttcagccagaaattgccagttggttgtggggccgcaacttgatccacagaaaagaaatttttctagccacattaatagaaaggccacatgttctcgaggagtgaccgaaccctggcccatgtatgctgccacatagcctgaccaacctcctacgcttttggttttgaagtcatattggttctttgtgttcaaactcatagggttggctgatgaggtgacatccagacctgtgatcatactgatatctatgagggttggagtcataggcccttgattgaacaggaaggcattagtagtgtttgaccagaagtaagaagcagctgccattaggggttcatccttggctgagtttgctatagtaaggtcaagtgcttggccgattccaatttcatcccagtgaaccctcttgctggctaacacacgtttgaaccatgtggtccagctcttttctggtagaactttctctagagatggccaagatttgaaagtattcttccagtgacctagatctgggttggttagtctaaaggggattctattggtttcaccaacaatgaactcggtggggtcaggattgccgattgggccaagaaagtagtaattttcatgcgtcagactgggaattgcgacttggtgagaaagatgctcagcgtactcggctgttggtgcaccagatgggctggcggaggacgacat

SEQ ID NO: 59207 - DNA, 1590 bp, Oryza sativa
  Clone ID: PAT_MRT4530_60851C.1
atggggaaaaaattgggtaggaatttttgggggaaacggtggaggctgaggtgtgcggtcggggagaaccaggaggcctctgggggaaaatgcccgcgggagaatagcggcggtggcatggcatggtgcatggcgaggccgtggccgcccgagaggcggaggaggaggaggaggagagaggagagagagggaagcggccaggcgaggaaggcgaaggagtggcgtcgtcgcggggttcacgggtcgcggctgctttctagctgggccggtctggcgccacggggccacggggaggtccggcggcggcggccggcgacgtgggagaagggcagtgggcagggcgtcggcggcgagagcgctggtgccgggagctgcacgactgccgacgagaagcagaggaggttcgaggtgtacaggagcaacgttgagcttgttgagaagttcaactccatgtgcaatggctacaagctggctgacaagaatgatgatattctgccgaagagcgtagattggaggaagaaaggagcagtggtggaagtgaagtaccaagaagattgtggttcttgctgggcgttctccgccgtggcggcgatagagggtgacggagcgtggggctcctcaccgggagaccgcgcaggcccccttcgccgatgcgacgtggaatcgtggctgtctgctgacgacatgaccggtatcagaccagtcacgtcggtcattcttgtccaccacgtgactaacgtgccatctctgggaggtaacacgctagctccagctggggatgagcgcctagaagccctcgtcctgacgggatggggcgaggcgtgcgtcagatcgcctcgcaaaacccacaaggggtcggggcgccttggccctcggggccgagacgggagcagtccgacccctcggggagacaaagagaagggcggccgtatcaccctcgggcccgaccccccccccccgtgggagttaggccacgtgggtgatcgtgtctgcctcaagtctctaagtcatgatactcctggtaaagaggagggcgaacacatcaccctcgggcccgacgccccccgagggtgccaggccacgtgggcgattgtgtatcacccaaagggcggtgtgaggcggcggcgatgggctcgagctggcctcgggggcggagacgagctcgggagctggggtccactccaccacaaagtcggcgagggcctggctcttgatcgcgtggcgtggttcaaagtgcaaattgaactcagagagttcgattgcccatttcaccacccgtccagtaccctctcggttatgcaagatttggccgagggggtaagacgtaaccaccgtgacccgatgcgcttggaaataatggcgcaacttcctcgaagccatcagaatagcgtaaagcatcttctgggcctgaaggtatcgggtctcagcgtcccggagggcctcgctaacgaagtagacgggccgctgcacctttcggcggggccgatcttcttcgtcaggggccacatctccagggcgctctccatccgagaggccacgcggggcgcactcggcttctgtgccgacgacctcggggtcagagggcgacat

SEQ ID NO: 59208 - DNA, 322 bp, Oryza sativa
  Clone ID: PAT_MRT4530_60852C.1
ataaacaatttaatttaacatacgggaacttatattattacaatgttattctattacaatgtaaatattaattttagttcaatttttttatagacggaaaaaacaagacatttctgaaatacaacacccattattggaatcaacatgggaccgctatacggataagacaagggaaaaagaaaaacatcaagatgggaagaaaaactgaacaattttagtatattatgaagatgaaaaaaaatctccttaggaccgaaaacaaaaaaactttgttgatgctccaatgggggggaaaggaattttccttcggacccgtgttcat

SEQ ID NO: 59209 - DNA, 2499 bp, Oryza sativa
  Clone ID: PAT_MRT4530_60853C.1
ttagtatcgctggatggccgatatagccttctgtctaatctgttctacttcttctatggcttgggcatcctgagcatcggttccagggacaactttcagagacttggtcagttcaccaacatgcttgatagcggatttgagtcttgctttctgttcttcaatagactttgggagatcggctagttttttgtgttccatgtccagctcagcgttgcattcttcaagttgtgctaagagttcaatcttgcgagcctcgagccgatcaatattagacttgattgggccttcagatagttgatcgagcttggatttttcttcatacacaagttgtcggttggcttggatagtggcctcaatgtccttacgctctcgccattccgccagtcttaacttggctttctccaatttgaattggtgttgctcaaggtaaacggctggggtaaggatatcggctagctcatgtgggattagagcctgaatctcatgtagccgagccctgattgagccacaatcaaccaccaagctatctagcgatgatgcttctagccgacccaagatacttcctagagttttcttcacatcatcagataaaggggctaaggctttgcttgtggtatcttcttctccttcatcaagatagtctctgatgtcaaaagagaaaagatcggctaatacttcggctgcggcctgatcaacttcgtcttcaattatctcttcatccagagcttgttcaatggatggatctagggtaggcaggtcatcggctggcttggttttctttgtcttcttcttcttcttagttggagctgcgatgcttacagccgacgatctggttttcctctttttgccggcatcggttggttccctgatgagcccttgaagaagagctgaggtcttgggggcatcatagccaataaccggaggagatagcccacctccgttaggaattaaacctggggcatattggatgtccttgccactgttgctttgatgaggaggggaggattctgttgtttgaggaacaacatctggaaagaggtctgtcatatatattgaagctggttgttggaatagatgcagcttccattcgccccaccacctgtcaaagtttttgcttctgaatgttgacagttctatgttgttaatactgcccaaagggggtccttgaagtttgagcagccgatccatcatcagggttgatgaaatttctcctcggcattggattttgtcggcaaagaataagccaattgggagttggcccattccaagttgtctagttgagctcattggatgatagaattcataagaagcttggatgtttcttccttgatgaatgccaacaggaaggatgcatgggctgattgcagccgagaaaatttccctggatgattggtatacttcatggttgatgtcttcgaatctgaagtccaatgggtgttcaagttctgcagaattttcataaagaaaccaaactcgagtatttttttgaaagccttcatagaagctacagaaccaatctttgagtagttcagccgatagttttgccccagtgtcagttggtgtagaagcatattctccgtatgatgtgcatctccgatgagtacgctcttctccatcatctcctacaatcagctctagtcttgggaactcagcttctgatacggatggccgattgacaaccttcataactagcaggtttgaccaggtttgtagcagccaccagggtccacctgctccaactactgagccgacggctatcttagccgatgcattgttcaacatctggtatagatagccgaggagaattttgcccaaggggaattgtctctttgtttctagagtttcagctagaaattgccagttggttgtggggccacaacttgatccacagaaaagaaatttttctagccacattaacaaaaaaggcacatgttcccgaggggtgaccgagccctggcccatatatgccattacgtagcctgaccaacctcctatgcttttggtcttgaagtcatattggttctttgtgttcaaactcatagggttggccgataaggtgacatccagacctgtgatcatgctgatatctatgagagttggagtcatcggcccttcattgaacaaaaaggctttaatggtgttcgaccagaagtaagaagcagctgtcatcaggggttcatctttggccgactttgctatagtaaggtcaagtgcttggccgattccgatttcatcccagtggaccctcttgccggctgatacacgtttgaaccatgtagtccagctcttttctggtggaactttctctagatctgggttggttaatctgaaggggatcctattggtttcaccaatagtgaactcggcggggtctggattgccgactgggccgagaaagtagtggttttcatgcgacaggttgggaattgcaactaggttggagaggtgctcagcatattcggctgatggcgcaccagatgggctggcggaagacgacat

SEQ ID NO: 59210 - DNA, 584 bp, Oryza sativa
  Clone ID: PAT_MRT4530_60854C.1
gtggtttgtgaccgttgggtttctgcccaattgtggagaccggtcccacctgtcaccaggtcttaggagtggcgtcacgcccgcccgtttcccttaaagaaggcgatcgccctggcataacgccgggggctactgtcggtgacatgggatcaggagtatcatgactagaggttatctcccaaaacacaggagtagggtattacgcttctcagcggcccgaacctgtatacatcgcccgtgtcttgtgtgtttcctgtctcgcgagccttccacatacagagagcttagaatctctccctgagtccccggccgaaccggcaaaggggggcctgcgcggtctcccggtgaggagccccacgctccgtcaataccgtcggatcgtccatcataaacgggccgatgcgctcctcccccctgccaaaactggtccggccagaccacgcctgatgtggggcccaccgctcgaactgggaacgtggggccccttaccttccacacaaccacacgcgcccatcgtttacgcgccggggcaacgacacaatgacatcccggtcccacacgcggtgggacccacccgccagtag

SEQ ID NO: 59211 - DNA, 3756 bp, Oryza sativa
  Clone ID: PAT_MRT4530_60855C.1
atggcgatggagtatcttcaccatgagcattatgagattgtccagcactgtgaccagaagcctagtaatgtgctatttgacgaggaaacgacggtgcatgtggcggactttggcatcgcaaagctgctgctgggtgatgacacctccaagatcaccaatcacggcaagcatgcccaccagaataggggtaaactgaagcttcgtttgagaaaatcttcactggaaagcgacctacggatcgatcgtttgttcgttggagaagtgaccattaggcagtgggtcaatcaagcattttcggcgaagcttgttcatgttctggacgacaagctacagctagatgagtcctctatcgaagacctgaatcaccttcttttgccaatatttgagagttgtaggcaatcattggttggcgttgatggaccgcgttggtttgatacagccaatgaaggctgtttaccagcagtcctgcacacggcggagttgttgatcatctcgctgacagtgacagcccttgcagcaggtgcctcttcttctccatctccatccatcaacagcagcagcggcggcggcgccgcagccgacctcgcggcgctgctggctttcaaggcccagctcgccgatcctctcggcgtcctcgccggcagctggacgaccaacgtctccttctgcaactgggtcggcgtctcctgcagccgccgccgccggccggagcgcgtcaccggcctgtcgctgccggacgcgccgctcggaggggagctcaccgcccacctcggtaacctctcattcctctacaccctcgacctcaccaacaccagcctcgtcggccccgtccccgccgacctcggcaggctacgccggctacggagtctcctcctcggcgacaacctgctatcggctgccatcccacccgccatagccaacctcacgatgctcgagctccttcacctgggcaacaacaacctctccggggagatcccgcccgacctgctgcacggcatgcgccgcctctcgaggatcgctctgcacatgaaccagctgaccggagacctgccgccgcttctgttcaacggcacgccctcgctgacgttcgtcaacctcgggaacaacagcctgacgggcggcgtaccgcacggcgtggcgtcgtcgccgtcgtcgctgccgatgctcgagtacctcaacctgcgcggcaaccgcctcgccggcgcggtgccgccggccgtctacaacatgtcgaggctgcgagggttggtgctctcgcacaacaacctgacagggtggatcccgacgacgagcaacgggagctttcacctgccgatgctgcgcacgttctccatcagctccaacggcttcgccggccggattccggcagggctcgcggcatgccgatacctgcaaaccctgtccatttcgtcgaatagcttcgtggatgtcgtgccggcatggttggctcagctgccatacctcactgagcttttcttgggtggaaatcagctcactggctctatccctcctggtctcggcaacctcaccggtgttacctcgctggacctctccttctgcaacctgaccggtgaaattccttcagagttaggccttatgagaagtctctcaactctgcgtctcacatacaaccagctgacaggtccaatcccaacttctcttgggaatttatcgcaattatctttcctagatttgcagatgaatcaattgactggggcagtgccagcaacactaggcaatatcccagctctcaactggctcactctgtcactgaataatctagaggggaaccttggcttcttgtcttccctttctaattgccgacaaatttggatcattaccttggattcaaattctttcaccggggatcttcccgatcataccggcaacctgtctgcgcaattgagtatattttccgcgagcgaaaataagctaacaggtgggctcccatcgtcactgtcaaatttgagcagtcttgaacagctacaacttcctggaaaccagctcactgggccaatcccagaatccatcaccatgatgccaaatctcgtaaggctagatgtgtctagcaatgatatctcaggccctatcccgactcagattggcatgctcagcagcttacagagattggatctccagagaaacagattatttggctccataccagatagcatcggcaacctgagtgaattagaacacatcatgttgtcccataaccaactgaactcaacaatacctgcaagcttcttcaaccttggcaaactggtgcgactaaatctttctcacaactccttcactggtgcactaccaaatgatcttagcaggctaaaacaaggtgatacaattgatttatcgtccaattctttgcttggaagtatcccagaatcatttggacaaatcaggatgctgacctacctaaatctatcgcacaactcatttggagactcaataccgtactcatttcaagagcttgctaacttggcaacattggacctctcctccaacaacctctctggtaccataccaaaattccttgcaaatttcacatacttgacagccttgaatctgtccttcaataggctagaaggccagataccagatggtggtgttttctcaaacattacgctacagtccttgatcgggaatgctgcattatgcggtgctccacgtctaggattttcaccatgtcttcagaagtctcactcaaacagtagacacttcctaagatttctacttccagttgtcaccgtagcatttggctgtatggttatttgcattttcctaatgatcagaaggaaaagtaagaacaagaaagaggattcaagtcacactccaggcgatgacatgaatcatttgatagtcacctaccatgagctcgctcgtgccaccgataaatttagcgatgacaacttattggggagtgggagcttcggaaaagttttcaagggccaactgagcagcggtttggtggttgcgataaaagttctagatatgcacctggaagaagtggccattagaagcttcgatgccgaatgccgtgtgcttcgcatggctcggcaccggaacctgataaaggtactgaacacctgctccaacatggagttcagagcactggtgcttcactacatgcccaatggcagcttagacatgctcctgcactctcaaggcacaagttctttggggttgttgaagaggttggacatcatgctagatgtgtcgatggcgatggaatatcttcaccatgagcattatgaggttgtcctacactgtgacctgaagcctagcaatgtgttatttgatgaggaaatgacggcgcatgtggcggacttcggcatcgcaaagttgctactgggtgatgacacgtcaaagatcacggcaagcatgcctggaacatttgggtacatggcaccagagtacggatcactcggaaaggcgtcgcgcaatagcgacgtgttcagcttcggaatcatgctccttgaagtctttactggaaagcgacccacggatcgtttgttcgttggagaagtgaccattaggcagtgggtcaatcaagcatttccggcgaagcttgttcatgttctggacgacaagctacagctagatgagtcttctatccaagacctgaatcaccttcttttgccaatatttgaggttggcttgctctgctcaagtgacttgcctgaccagaggatgtcaatggccggtgttgtggtgacactgaagaagattagaaaggattatgaagaaaaaaattga

SEQ ID NO: 59212 - DNA, 2337 bp, Oryza sativa
  Clone ID: PAT_MRT4530_60856C.1
atgtcatcttccgctagcccatctggtgcgccatcagccgaatacgctgaggatccccttcaaattaaccaacccagatctatgtcactggaagaatactttcaagtcctggccgtctctagagaaagttccaccagaaaagagctggactacatggttcaaacgttgaaagttccaccagaaaagagctggactacatggttcaaacgtgtatcagccagcaagagggtccactgggatgaaatcggaatcggccaagcacttgaccttactatagccaactcggccaaagatgaacccctgatggcagctgcttcttacttctggtcaaacactattaatgcctttttattcaatcaagggccgatgaccccaactcttatagatatcagcatgatcacgggtctagatgtcacctcatcggccaaccctatgagcttgaacacaaagaaccaatatgacttcaagaccaaaagcataggaggttggtcaggctatgtagcggcatatatgggtcagggctcggtcactcctcgggaacatgtggcctttttgttaatgtggctagaaaaatttcttttctatggatcaagttgcggccccacaaccaactggcaatttctagctgaagctctagaaacaaagagacaatttcccttaggcaaaattctcctcggctatctataccagatgttgaacaatgcatcggctaagatagccgtcggttcagtagttggagcagttatgaaggttgtcaatcggccatccgtatcagaagctgagttcccaagactagagccgattgtaggggatgatggagaagagcgtactcatcggagatgcacatcatacggagaatacgcttctacaccaactgatgccggggcaaaactatcggttgaactgcttaaagattggttctgcagcttctatgaaggctttcaaaaagatgctcgagtttggttcctttatgaagattctgcagaacttgagcacccactagacttcagattcgaagacatcaaccacgaaatataccaatcgtccagggagattttcttagctgcaatcagcccatgcatccttcctgttggcattcatcaaggaagaaacatccaagcttcttacgaattctatcatccaatgagctcagctagacaacttggaatgggccaactcccaatcggcttattctttgccgacaagatccaatgccgaggagaaatttcatcgaccttgatgatgcatcagctactcaaccttcaaggaccccctctgggcaacctcttctcagatgttgtccctcaaacaacagaatcctctcctccccgtcaaagcaacagtggtaaggatatccaatatgccccaggtttaattcctaacggaggtgggctatctcctccggttattggatatgatgcccccaagacctcagctcttcttcaagggcttatcagagaaccagccgatgccgacaaaaagaggaaaaccagatcgtcggctgtaaacatcgtagccccaactaagaagaagaagacaaagaaaaccaagccagccgatgatctgcctaccctagattcatccattgaacaagctctggatgaagagataattgaagacaaagttgatcaggctgcagccgagaaaaagaagactacggtgaagaagaaatcggctgcaacaacgtctaaaccagctccaccaccttcccctcctccttctcctcctgtacaacaaacatcaagtgaccagaccccttcagctgtggggagtcatcacgtcgaggaagaagaacaaccagctgctcctgctatcccagtattagccgatcttttctcttttgacatcagagactatcttgatgaaggagaagaagataccacaagcaaaaccttagcccctttatctgatgatgtgaagaaaactctaggaaccaaattaagactggccgaacggcgagagcgcaaggatattgaggccactatccaagctaatcgacaacttgtgcatgaagagaaattcaagcttgatcaactatctgaaggcccaatcaagtctaatattgatcgactcgaggctcacaagattgaacacttagcacaacttgaagaatgcaacgctgagctggacatggaacacaaaaaactagccgatctcccaaagtctattgaaaaacagaaagcaagactcaaatcggctatcaagcatgttgctgatctgaccaagtctctgaaagttatccctggaaccgacgctcaggatgcccaagccatagaagaagtagagcagattaggcagaaggctatatcggccatccagcgatacttatctcaataa

SEQ ID NO: 59213 - DNA, 639 bp, Oryza sativa
  Clone ID: PAT_MRT4530_60857C.1
atggagggcggttttggccgacgtagcgtctacgtggctgacggagcgtggggctcctcaccgggagaccgcgcaggcccccctttgccggttcggccgggggccctggacggagacttgtatggttgccgtccgaatgaccttctgatgggacggcccatacctacctccacttccgccggaagcaggcgcgacgtgggaacatggctgtctgctgacgacatgaccagtgtcagaccggtcacaaatcggatgaagcctggtatatatctgaccgggaccaacgtgccatctccaggagctaacacgccggctccggctagggacgagtgcttggaggctctcatcctgacgggatggggcgaggcgtgcgtcagaccgcctgggtcggggcgcctcggccctcggggccgagacgggagcggtccgacccctcggggagacaaagagaagggcggccgtatcaccctcgggcccgacccccccccaagggggttaggccacgtgggtgatcgtgtctgcctcaagtctctaagtcatgatactcccggtcccatgtcaccgacagtagcccccggcgttatgccagggcgatcgccctcctcgagggaagcggtcgggcgtgacgccacttcctaa

SEQ ID NO: 59214 - DNA, 2388 bp, Oryza sativa
  Clone ID: PAT_MRT4530_60858C.1
atgtcgtcttctgccagcccacccggtgcaccatcggccgaatacgctgagcacatttccaacctagttgcgattcccagcctgtcgcatgaaaatcactattttcttggcccagtcggcaatccagaccccaccgagttcatcattggtgaaaccaataggatccccttcagattaaccaacccagatctaggtcactggaagaacacctttaaattctggccatccctagagaaagttccaccagaaaagagctggaccacatgttgcggccccacaaccaactggcaatttttagctgaagctcttgaaacaaagagacaattccccttgggcaaaattctcctcggctatctataccagatgttgagcaatgcatcggctaagatagcagtcagctcagtagttggagcaggtggaccctggtggctaccgcaaacctggctaaacttggtagtcatgaaggttgtcaatcggccatctgtgttagaagcagaatttccaagactagagccgattatagatgatgacggggaagagtgtactcatcggagatgcacatcatatggagaatacgcttctacaccagttgacgctggagcaaaactatcggctgaactgctcaaggattggttttgtagcttctatgaaggctttcagaaagatgctagaatctggttcctttatgaagactctgcacaacttgagcacccagtggacttcagattcgaagacatcaaccatgaagtgtaccaatcatccagagaaatcttctcagctgcaatcagcccatgtatccttcctgttggcattcatcaaggaagaaacatccaagcttcttatgaattttatcatctaatgagctcagccagacaactcggaatgggccaactcccaatcggcttgttctttgctgacaagatccaatgccgaggagggatttcatcaaccctgatgatggatcagctgcttaaccttcaaggaccccctctgggcagcattgacaacatagaactagcaacattcagaagcaaaagctttgataggtggtggggtgaatggaaactgcatttattccaccaaccagcatcaatgtatatgacagacctctttccagatgttgtccctcaaacaacagaatcttcccctcctcatcaaagtaacagtggcaaagatatccaatatgccccaggtttgattcctaacggaggtggactatcccctccggttatcggctatgatgcccccaagacctcagctcttcttcaagggctcgttagagaaccagccaatgctggcaaaaagaggaaaaccagatcgtcggctgtaagcatcatagccccaattaagaagaagaagacaaagaaaaccaagccagctgatgatctgcctgccctggatccatccatcgaacaagctctggatgaagaggtcattgaagatgaggttgatcaggccgcagccgaggtaagtgataccgacagaacaccatcggcttcgcctaagcaaacctccccaactccttctgccccagttcatttctcaaggaaaaagaagactgcagtgaaaaagagatcggctgcaacaacatcgaagccagctccacaaccttcacctcctccttcttctcccgtccaaccatcatcaagtgatcagaccccttcagccgtgggaagtcatcacatcgaggaagaagaacaaccagctgttcctgctatcccagtcctagccgatcttttctcttttgacatcaaagactatcttgatgaaggagaagaagatatcacaagcaaagcattggctcctttatctgatgacgtaaagaagactctaggaagtattttggatcggctagaagcatcatcgctagatagcttggtagttgactgtggctcaatcagggctcggctgcatgagattcaagccttaatcccagatgagttagccgatatccttactccagctgtttaccttgagcaacaccaattcaaactggagaaagccaagttaagactagccgaacggcgagaacgcaaggacattgaggccactatccaagccaaccgacaacatgtgcatgaagaaaaatccaaacttgatcaattatctgaaggcccaatcaagtctagcatcgatcggcttgaggctcgcaagatcgacctcttagcacaacttgaagaatgtaacgccgagctggatatagaacacaataagctagccgatctccccaagtctatcgaagaacagaaagcgagactcaaatcggctattaagcatgttgctgagctgaccaaatccctgaaagttatccctggaactgatgctcaagatgcccaagctatagaggaggtcgagcaaattaggcagaaagcgatatcggctatctaa

SEQ ID NO: 59215 - DNA, 711 bp, Oryza sativa
  Clone ID: PAT_MRT4530_60859C.1
atggtagggaaaggaaaggggtatgctaaaacaacgcctccaaggaggggaacgacgccaaacggcgtcgccgttgtcagccagccaaatggctcggcaaggctttcgcccgcgattccctgtccaaacccacaccaccaatccgcacaagaaggatcgtcgtcggtcaacaacattatcccttcagcgattcggccaaggccaccacccacagttgttcctgcccacggtatagcaaagatttcaaggcttgattttgttccaactatagctaattttgataagactgcctacaatgaggctagaaatcaagaggctaaagccacacacgaacaattcagaagactcggtcaggacttggctgcaccaacaattcaaaatgcaagaactaccaacaaccacactgttacttcagagaagaaccaaagagagcttgacaccaagctggcctttgatccctcccccaaaggcatacagtttaccggattccatgagcgcgaacgtatgcggggattcagcggatccaaaggagtatgtatcgccgttatcggagacaacaaaggtggtgtattcaccggtggagacatgcacagccttcacattgctcaatccttgaaccacagtggggagaaccctgtactcctcatcgccatgtcccaaacaaccagtatggccccaaccccaggtgcagacacgcccatcgtcacctag

SEQ ID NO: 59216 - DNA, 1473 bp, Oryza sativa
  Clone ID: PAT_MRT4530_6085C.1
atggcgatcgagatgggaaagcggaagcggccggtggacgacggcggcgactcatccgagcccgagctccccgccgacatcatcacccacatcaccggccgcctcacctcgcaggtcgacttcctcaactgccgcaacgtctgcccgtcctgggagcgcgcgctgcgcggcgaggcgcgccgcctcgccgccgcggtggagcgcgtcccgtggctgctcctcgccgccaaggccgatggctcctacctcggccgccgtcaagcgggtgacgtcgcggctgtgcagctccccggccgccacgtgcgcctcggccgccgcgagatctgcctcgggtgctcgtccgggtggctcgtcgtggcgaacgacttcgggtacgcgcgcctcgttaacccgctcaccgccgccaccgcgccgctcccgccgctctggaggctgccctacctcgacgccgcccacggctacgacgggtgcgtcggtagcttcctgtacgtggacgaacaccaccgcggcgggccgggcgtggcgttctcgttcgacggcctctgcgacctcgtcctgctcaaggccgtcgtcgtcgacatcagcgacggcggcgccaccgtcgccgtcctctacaggagggagagggagttcgccatggcacgcacgggccagcgctcgtggcgtctcgtcaacaacaagctggacggaatcgtcgacatggcgaggcacggggacggcaagctctacacggtgcacctctccggcaaggtcgcgcgctggaagttcgactgcaacgtccgcaggtcgccggagattctcgagtcggtgctggtcatcgactcgccctaccactacgtcgtcaaggcggacaacaacgtcaacgccatcaccatgtcccgggaatacgaacacgaccaccgcgaccgcgccggcgagtgctgctacctcgtcggagcgccgcgcggcacgctctacctcctcaagcgggtgtacaagcacaagcaggtcggcagcgacggcggcggcggaggccggacgcagcgcaccacggcgacgttccacgtctggcacctgacatgggccagcgacggcggcatggagtggccggccaccatggacggcgccgccatctaccataacctggcgacgttcgtcagctacaccggcgcggtgtgcgtcggcaagagggacgccgacgccgtgctcgccggtggcgccgtgtacttcaccgaggacgccgccggctacgccggcgccgccatggcggaggacttcggcgtgaggaggatcaacatcaggaggcaaaaaagcaggaggatcacgaggatgacgcggttagacgacgagtcgatgaagaggatcaaggacaagttggaggatgaggagagcgaggaggtgaagccgctcgggcgatgcatgaactggcctcctccgttttggttcatcccaagtcttgatgatagccttggagctgcgccgccggggaagtaa

SEQ ID NO: 59217 - DNA, 1019 bp, Oryza sativa
  Clone ID: PAT_MRT4530_60860C.1
agcgcgtggagcggcgggaggatgtgaaggcgttcaagacgcacctgccgtccaaccagaacaacctggaggctcgcgaggagactcgctctccggcgtcgctcccctgctcggcgctcatcaacggtgaggcgggcggcgggcaggcggcggcggagagcgcgctgtgctgcgaccggagccactaccggagcgacgtgtgctacctccgcggcgacgtgcgcacggacccgtccacctcgtcggtgctcctgtacaacgccccccgcggcagcgcgccggagaaggtgcggccgtacacccgcaagttcgagggcagcatcatgagcaccatcgacgaggtcaccatcgtgccggtggtcgacgccggcagcggcagcaacggcaccaccgccggcgacaccggcaaggacagcctgcggcggcggtgcgacgtgcggcacccgccgggcgtgccggcggtggtgttctcgacgggcgggtacaccgggaacgtgtaccatgagttcagcgacgggctgatcccgctgttcatcacggcgcagcggttcgccggcgaggtggtgttcgtcgtcctcgagtaccactactggtggctgggccgctacggcgccgtcctcgagcgcctcaccaactacaaggtggtcgacttccgctacgaccgccgcgtccactgcttctccgagatgatcgtcggcctccgcatccacggcgagctcgtcgtcgaccccaagctcatgcccaacggcgcgggcgagataatggcgcagattataatacgccgcggtggatggatggacggatgggtgagcgagtggattggcaagaaaagatggcttttgcaaaagcgctgcggggaaaagcgggtttgttcctcacaaatgcgggggtgcgagacggacgccggtggtcgcatcggccagccaatcggcgcctccaccaccgctgctcaacgtgctcgtgtcccccgccgtttttgtgcttgctcggaaattagggcctccttgggaacaaaatga

SEQ ID NO: 59218 - DNA, 1833 bp, Oryza sativa
  Clone ID: PAT_MRT4530_60861C.1
atgggggaatttgaggcggcggatttgggagattttgtgatgcgcgcggggatcggggatggtggaactgtagactgtgtggccacgatcatcggatcatggatcgatcctcttgtttccgcttcgctcttcttctcatctgttgatcgtgtcggagatgagcggagagaaagatcattgtgtagtattgagttccactgtaagatggttcctgatctaacaagggttcatactgagtactctgctcccataatcctatttatccacacagcgaggggcactgcaagaagcatgcagtgcccaatggacgcagctgcaagtggaacttcgcctgtgatgcagttccatggcattgttgatgagccaccctcccattcatctccgctgcacacggcgctggaacgttcgcagcgccattgctatggtcatgaaaccccaggagaattcccccttgctgctacatgtacattcttcagtaaacctgcaaatttcgagccaaactttgctctatcgcttccagaggttgcggcatttgatatgtgccataaaagacccatggttaagctaatggcacagcaggaacgggagcaactgaagcagaggtgtggtggatcttggaagcttgttttcaagtatattgtggctagagaaaggaattactctcggattgtcgccgggccgggccatagtattgttgtcaccacaaagggagatgcatactcatttggggctaattgctggggccagcttggccttggggatactgaagatcggttcaagccatgccttattaggtctttgcaaagcatcaaaatcacacaggctgcagttggatcaaggcagacaatgcttgtgagtgacacaggaagtgtctatgcatttgggaagggtagctttgtgtgggaagagctttctgatgcagctgatcacattaccactcctaagatagtggagtcgctaaagggtgtgtttgtagttcaagcagccattggtggttacttctctgcgtttctatctagagagggtcaggtttacacgatctcgtgggggcgaaccgagaggcttggccatagttcggatccttcagatgttgagcctcgtcttctctctggaccacttgagggtgttcttgttgcacagatttctgctgggaattgctatctccttatgttggcctaccagccaactggaatgtcagtgtattctgtaggctgtggtttaggaggcaagcttggtcacggatgcaaaaacaataagggcacccccaagttgattgaacatttcctgacattgagctttaatccggtttcagttgcggctggcacttggcatgctgcagctctaggtgacgatgggcgtgtctgcacctggggttggggccatactggttgtttgggacatggcgatgaggagtacagggttctccccactgtggttcaaggattgagcaatgtgaaggctgtgcatgtctccaccggtgaatacaccacctttgttgtctccgataacggcgatacatactcctttggatccgctgaatccctgaatataggtttccaggaggatgaggaagcagcagatgatgcagatttttctaccccaagcttggtagaatcactgaaggtgttgaatgataaggctgtacagattagcacaacaaattcttcatattggctcaactcagaaatgggatacccgcatacgttcgcgctcatggaatccggtaaactgtatgcctttgggggagggatcaaaggccagcttggtgtcaagctctctgagggtcaagaaagagctcagaacccagagcgagtcccgatcgatctctgctaa

SEQ ID NO: 59219 - DNA, 472 bp, Oryza sativa
  Clone ID: PAT_MRT4530_60862C.1
tcgctaactcgacccacgccctcgtaccctttataggttgaccagccatccttactcgcatagttattgagagctgcctaagatttctggtacaacagtatctgcctatgctatcaagtgatacacatcgtagtttttcagacaccagttctgtataaccgaaagggctcaaagagcatgtgctatttcatacgtagatggtggctgaataccatgaatatgtagcataagagttctagcgtgctactgcatgggcgagaactacatgaccacacttataccagccctgcagctgactagtttgtgcctctttttgcaccgaaaaggaatgatctggattcaaacattgccgctcattatagatcattgcaggctttataacaagccaagctcaatcttcaccatgagcataaggccaaagcgttttttcattaataccatgatggcaaatgaggacagtggacttactgcg

SEQ ID NO: 59220 - DNA, 193 bp, Oryza sativa
  Clone ID: PAT_MRT4530_60863C.1
atgaagttaagcatgaaacgaccctcgtacaaccgtacttctcgtatgggtatagacctagcggagtacatagccgagcgaaggcagtatccctgcatagtggttattcttggtgtgtgggagtcagggcctacggtggggcagccattggtggggccgcgaggggcgagtgcctaccctggtgtcgccatcg

SEQ ID NO: 59221 - DNA, 2058 bp, Oryza sativa
  Clone ID: PAT_MRT4530_60864C.1
ggggctagaaatcaagaggctaaagccacacacgaacaattcaaaaaactcggtcaggacttggctgccccaacaattcaaaatgcaagaactaccaacaaccacactgttacttcagagaagaaccaaaggtaagtgcccctagtatttacatcgatgctaacatttgagttcctcctatgaaattcaggagggcatgctaaccacagatcacagaatatgtcattgcaaatggtcaccagaatgctggttgaaattagcagagatcgatcgggactcgctctgggttctgagctctttcttgaccctcagagagcttgacaccaagctggcctttgatccctcccccaaaggcatacagtttaccggattccatgagcgcgaacgtatgcgggtatcccatttctgagttgagccaatatgaagaatttgttgggctaatctgtacagccttatcattcaacaccttcagtgattctaccaagcttggggtagaaaaatctgcatcatctgctgcttcctcatcctcctggaaacctatattcagggattcagcggatccaaaggagtatgtatcgccgttatcggagacaacaaaggtggtgtattcaccggtggagacatgcacagccttcacattgctcaatccttgaaccacagtggggagaaccctgtactcctcatcgccatgtcccaaacaaccagtatggccccaaccccaggtgcagacacgcccatcgtcacctagagctgcagcatgccaagtgccagccgcaactgaaaccggattaaagctcaatgtcaggaaatgttcaatcaacttggtggtgcccttattgtttttgcatccgtgaccaagcttgcctcctaaaccacagcctacagaatacactgacattccagttggctggtaggccaacataaggagatagcaattcccagcagaaatctgtgcaacaagaacaccctcaagtggtccagagagaagacgaggctcaacatctgaaggatccgaactatggccaagcctctcggttcgcccccacgagatcgtgtaaacctgaccctctctagatagaaacgcagagaagtaaccaccaatggctgcttgaactacaaacacaccctttagcgactccactatcttaggagtggtaatgtgatcagctgcatcagaaagctcttcccacacaaagctacccttcccaaatgcatagacacttcctgtgtcactcacaagcattgtctgccttgatccaactgcagcctgtgtgattttgatgctttgcaaagacctaataaggcatggcttgaaccgatcttcagtatccccaaggccaagctggccccagcaattagccccaaatgagtatgcatctccctttgtggtgacaacaatactatggcccggcccggcgacaatccgagagtaattcctttctctagccacaatatacttgaaaacaagcttccaagatccaccacacctctgcttcagttgctcccgttcctgctgtgccattagcttaaccatgggtcttttatggcacatatcaaatgccgcaacctctggaagcgatagagcaaagtttggctcgaaatttgcaggtttactgaagaatgtacatgtagcctccagtgcagcgagatctttaggatctagctcgcaggtggagagcacatgtagcacaatggaggggctcacagcaagggggaattctcctggggtttcatgaccatagcaatggcgctgcgaacgttccagcgccgtgtgcagcggagatgaatgggagggtggctcatcaacaatgccatggaactgcatcacaggcgaagttccacttgcagctgcgtccattgggcactgcatgcttcttgcagtgcccctcgctgtgtggatcaataggattatgggagcagagtactcagttggagaattcgtctggtgacgatgggttcatccgatcctcgcaaggctgcagaggctgcaacctcggggaaccggatgtggggggcggtggggaggaggtggtcacccctcgtgccgaattcctgcag

SEQ ID NO: 59222 - DNA, 661 bp, Oryza sativa
  Clone ID: PAT_MRT4530_60865C.1
agataatggaatataatatcccggcctttgcttaaaaagaactacaaccaattattacaaagatccactccagaagagagtgttagttcaatacaagttgaacacaccaaataagagaagagaggacccaaactgagaaaagcaaaacaaaatgtggagctagaaggccttgtcaaggcctaggactgaagtttgaagccaatgcatagaccaatgacaatatccttgcacgaagaggtttctccaaagcgatgcccccaaggaggatgcgacgtggatcgccgccaccgcttgtttagaaccgaagcaaggttttcacccggagaatatggtagggaaaggaaaggggtatgctaaaacaacgcctccaaggaggggaacgacgccaaacggcgtcgccgttgtcagccagccaaatggctcggcaaggctttcgcccgcgattccctgtccaaacccacaccaccaatccgcacaagaaggatcgtcgtcggtcaacaacattgtcccttcagcgattcggccaaggccaccgcccacagttgttcccgccgtcgacagcgcgcccgctcccggactcctcctgccccgcctccacatatcgccgccgccgacgacgcaccgtcagccggatgatggccttcaaccatcgccgccatag

SEQ ID NO: 59223 - DNA, 612 bp, Oryza sativa
  Clone ID: PAT_MRT4530_60866C.1
ggagagagagaactgtctcgagttttttttttttttttttatatctcaccaaattattccatattactactgtttttgtgacgtcacatcgtgcccccgccggcggcgaaggggtcgaggtggagccccaccgccgacagcagcggcgggcctcgccgcgacgccagccacaccctcaccgtccgccccgccacgggggcgcccagcctgtgcagccgcttgtgccccaccgtcgtgccgctcgccaccgccgcgccgccgccgtccacgtacacctcgtgccgctccacccgctgccccatcgccacgtgctcctggatcctcaccacgttgaacttcctcgccgccgccgacgccggccgccgcagctcgatccagtacccgccgccgtcctccgcctccgccgcggccggtgcccagtacgtgtcgtcgcggccgtcgagcacgttggccgccgcgaacctgccgccgcgctcgctgctcgccctcgccgcgctgcccgcggcgaggtcggtgccgaagatggccgtcacggcggcgcggaactcgcgcagcctggcgatgtcggcggcgtcgacgaggcccgtggtgttcggcggcgcgttcagcagc

SEQ ID NO: 59224 - DNA, 646 bp, Oryza sativa
  Clone ID: PAT_MRT4530_60867C.1
ggagcgatgtttacttgtgtcactataaaaaaccattactaatacaataagaattaactagtaatttcatttttttattattactagcaatagtacccgtgcgttgcaacgggaaaaacaccatttgatattgtgacaccttgaaaacattcggcctaggtcttctcatccggtccaaacttgggctggcccatcttcgtcgagctgagtcaattcgacagcccgcaagctgagcagctgagcgcggcccacatatgcggggacagtccgatgcacttccgcggcccattgggcacagtgtaatcggcggtgccggtctgacgttgggcaaatctgagccgtccgatctaatggatgctccgatcgtccccgtgctagatgaagcgccgaccgggagagaggggcaaaaccctagctcccaaatccctctctcccgatcctatttctctccggcgacgagcgagcagaacaacagcgaaggcagcgacggcagtccggtgagctagtgagcgctcctgcttcgctggctgggtggcgcacccgagggtggtgcaaagttgtgccacggtgttggaggttcggctaggcaagcgcgcaaacggcgctgagcgctgagcggcatagaggtgcgcgcgttatgaacgcc

SEQ ID NO: 59225 - DNA, 369 bp, Oryza sativa
  Clone ID: PAT_MRT4530_60868C.1
atggacgccggcggctctagatgttggcgacagctgcgacttcagcgcggcggcagacacagagggcacggcgaggaagaggagaccgagaagagaaggggtggacggccttcccaaggggagcgaatgtcaggggtggagcttggccttgcggagccgagggaggtggcggcgcaggttggtgacggccgaggcgacggcgaacgacggctggagttggtggcggcgacggagagagacggagctcgcttggagaggtggctaaggcatgggaggctcggcagatcaagacgattccattctcgcaaccaacttgtgaaaaagagtaatggggaggctggatttgacggaggacgcggcgtcggctag

SEQ ID NO: 59226 - DNA, 288 bp, Oryza sativa
  Clone ID: PAT_MRT4530_60869C.1
atggagtgcgccgtgcagaacaacgtcgacgaagtgccgcacggcgactggggccttccccagccagcagacggcggtggcggcatgagaactcctccccggcccgtgaggcggagcgaagctctttgccagcctacaggcggcgttggcaacgggtacatgtgggcctctgccacaggtcttccgcccggttggtcggcgagaggtatccaggcgctcgctggctcggttgttgatggcaactcctttttcgtggagggacttggcggctgtggtgctggaaagtag

SEQ ID NO: 59227 - DNA, 410 bp, Oryza sativa
  Clone ID: PAT_MRT4530_6086C.1
catgcaagcagcatggtgtttccacacaagctcagggctgggtgagcacaacatgctgcactgaccaggccaatgtgagtgattgttgcaaagcgattgtggcaacagcggacaaactggcaagcaatttagtgggtgtgctaccttttggatgcagactgcaaagctgcaaagcccaaactgctggtgtgaccttgcaaactgggccatgccataatcgtgggtgatgctgaccctgaactgacctgatgagtggctgcccaggagcattccactgttgtggttctggtactgaattgtacatataatagttcgtatgttaaaaataaagtcatacatcatcatgtgtgactgttgaaacttaggtcatatacatctaataaaatcatcttacctattaaaaaaaaaaa

SEQ ID NO: 59228 - DNA, 2727 bp, Oryza sativa
  Clone ID: PAT_MRT4530_60870C.1
atgggaagctccagattcgtgctcttgctcctcctcctcctcgccgtggcggcttgcgtcgcgcgggggcaaggcggcggaaactcgagcagcgcggcggcgccggcgccggctgcgggggcggggccgttcgtgccgcgggacgacatcctgctcgactgcggcgcgacggggaaggggaacgacacggacgggcgggtgtggagcggggacgccgggtccaagtacgcgccggcgagcctcggctcggcgtccgccgcggggcaggacccctcggtgccgcaggtgccctacctcaccgcgagggtctccgcggcgcccttcacctactccttcccgctcggcgccggccgcaagttcctcaggctccacttctacccggccaactactccagccgcgacgccgccgacgcgcgcttctccgtctccgtccccgccgccaacgtcacgctcctctccaacttcagcgcctaccagaccgccaccgccctcaacttcgcctacatcgtccgcgagttctccgtcaacgtcacgaccccgacgatggagctcaccttcacgccggagaagggccaccccaacgcctacgcgttcgtcaacggcatcgaggttgtctcctcccccgatctcttcgacatctccaccccgaatctggtcaccggggatggcaacaatcagccattcccgatcgacgctggcactgctctgcagacaatgtaccgacttaatgtcggcggccaggcgatctccccctccaaggacacgggcggttaccgttcgtgggacgatgactcgccatacgtttttggtgcggcgttcggggtgtcctacccaaaagatgacaatgtcaccattgcctaccctagcaatgtgccggagtatgtggcgccggtggatgtctatgctacggcaaggtcgatggggccggacaagaacgtgaacttggcatacaacctcacttggataatgcaggtggatgctgggttcacataccttgtgaggcttcatttctgtgagatacaatatccaatcactatgatcaatcagcgggtgttcaacatttacatcaacaaccagactgcttttcagggcgccgatgtgattgcatggactaataacaatgggatcggcagtccagtgtatcaagactttgtagtgacaacagttggttcaggggctatggatttgtgggtagctctctatccagatgtccaggctaaaccacagtactatgatgctatcctcaatggactggaggtgttcaagttgccgcttagtaatgggagccttgctgggctcaaccctgttccaactgttgagccatcgttggatggtggagcagtgaagaagtcaagtgttgggcctattgttggtggagtgattggaggtctggtggttcttgcacttggatattgctgctttatgatctgcaagcgtcggagcagagtggggaaggacacaggcatgagtgatgggcattctggatggttgccactttcactctatggcaactcacactcatctggctcagccaaatcacatactactgggagctacgcttcatcgctgccatccaacctgtgccgccatttctcatttgcggagatcaaggctgcgacaaacaacttcgatgagtccctcctccttggcgtgggtggtttcggtaaagtgtaccgtggggagattgacggtggagtgaccaaggtggctatcaagcgtgggaacccactgtctgagcagggtgtgcatgagttccaaaccgagatcgagatgctgtcgaagctccgccaccgtcatcttgtgtcacttattggttactgtgaggagaagaatgagatgatcctggtctatgactatatggctcacggaactcttcgtgagcacctgtacaagaccaagaatgcaccactttcatggaggcagcgcttggagatctgcattggtgctgcccgtgggcttcactaccttcacactggtgcgaagcacaccatcatccaccgtgatgtgaagacgacaaacatcctcctcgatgagaagtgggtagcgaaggtttcagattttggtctgtccaagactgggccaacgatggatcacacgcatgtgagcacagttgtcaagggcagttttggctatcttgaccctgagtacttccgcaggcagcagcttactgacaaatctgatgtctactcttttggtgttgtgctgtttgaggtcctatgtgctcgccctgccttgaatcccactcttgctaaggaagaagttagcttggctgagtgggcattacactgccagaagaagggtattcttgatcagattgttgatccccacctgaagggaaagattgctccacaatgtttcaagaagtttgcagaaacagctgagaagtgtgtttctgatcagggcattgaccgtccttcgatgggagatgtgctgtggaacttggaatttgcccttcaaatgcaggaaagtgcagaggagagcggaagccttggatgtgggatgtcagacgacagcactccccttgtgatagttggaaagaaggatcccaatgatccatctatcgagtcaagcaccacgacaacgacaactacctcgataagcatgggtgagcagagtgttgcaagtattgactcggatgggctgacgcctagtgctgtcttctcgcagatcatgaaccccaagggacggcatgatttattctttaaacgtattctcatgagtttgtga

SEQ ID NO: 59229 - DNA, 489 bp, Oryza sativa
  Clone ID: PAT_MRT4530_60871C.1
atgcacgtctgctggtgtggaagcaatcgtcctagcccattgccgcacgccgaggtggcctactttccagcaccacagccgccaagtccctccacgaaaaaggagttgccatcaacaaccgagccagcgagcgcctggatacctctcgccgaccaaccgggcggaagacctgtggcagaggcccacatgtacccgttgccaacgccgcctgtaggctggcaaagagcttcgctgttagggactgacgcaaaggctgcttgccaccgggaggagccccatcgtcgccgccggaaggggccccgtagcctccactatccgcaactctggaagttgctcacctccgcctcacgggccggggaggagttctcatgccgccaccgccgtctgctggctggggaaggccccagtcgccgtgcggcacttctgcccgaccaccaagctggcaccgacaccaccactgccgcacccagccgccgtcccgccggttag

SEQ ID NO: 59230 - DNA, 420 bp, Oryza sativa
  Clone ID: PAT_MRT4530_60872C.1
tttttgtttttttttttttttttttttttttttttttttttttttccagaggggatatgaaactttggaagtttttttttccccttaaagcatttatctcatgattttgttcccagcaggttttaaaaaccctatccaaatcaatgatgtagttccaggggaacttacatatagctggcaaagaagtaaaaaaagtcggggttaaaaagaaccaaaagaaggtccaaattaagttcccactatcccctacttcttttcttctctaacacctaaaaagctatatacaccttacaaagttgcaagttacacatctgagagagcattactttaacatacaccttttttaaaatgggctccctagttcaattcactgcatgcagctaactacctaatttttaaccaggttaaattttgcaagca

SEQ ID NO: 59231 - DNA, 129 bp, Oryza sativa
  Clone ID: PAT_MRT4530_60873C.1
cggacgcgtgggctcgtggcagtctgttcctggcgggcccacacaccaccatggccgtcatcagctgcggtcaggtcaactccgccgcgtctccctgccttagctacgcccgtgggggtttcgggccgt

SEQ ID NO: 59232 - DNA, 666 bp, Oryza sativa
  Clone ID: PAT_MRT4530_60874C.1
atatagaatatagattttttttttttttttttttatgaaataggacaatatatatatattgaagaaaggaagatgcaacaatttccagaaatgtagctacctctctagaacttcttgcatcttggacgactttgttcatcctagaacccaaacacgcttggctttcttgaaactaattaaacaggacagatacactccaaacttttattaaaaacagcataatctccagatcgaatagcttagagtactccaacttaaagacaacacacatagttctccaacttgaacataaaagcacatatataggatgcatgcaggtcttccatggaatggagcgccatacttgcagtttttattcttgagactcagttcacttccttcacactcgatcaatttgcttcattcatgccatcaccatccttatcttcaccatcaccggcagactcatcactcccttcctccaaagaggaggggtcaatggtgcagctatggggcgaggatggatcattgcgagctggttgcccaggaagtcaatgaaagtgaacttggctttccctttgcatccgcatagcatgaggggatggataagctttccccctaacatcggccaaatggaccagggagggataacaaaaagggcggggcacgcctggctcttcctggtag

SEQ ID NO: 59233 - DNA, 301 bp, Oryza sativa
  Clone ID: PAT_MRT4530_60875C.1
acacatgctttttatgatcatttcctacttactgtttattttttttacgaagaaacttaaacgtgcccctgctgggtaccctacaccattctacactaacaaatgggctaaaatatctatccctagtaaaggggggggtggaaccaaaggtgaaactgtccaatggcaggtggcctggctttccaagaaactgcatcttggttcagaccaacccccagcccgaagacttacaagagagcagagtggtgacattaaaacaaattctggtgggtatataaccacccggtaagattagctaagt

SEQ ID NO: 59234 - DNA, 368 bp, Oryza sativa
  Clone ID: PAT_MRT4530_60876C.1
ttttgtttttaaagatccacaacatctcaaatatctttaactcatactcatgtttaatatgtccctaacaaaaggaacacactaaacactttcatccaagcacatgatatctcaacatagggagttctaagttctaagttttagttaggatcatacaacttataacttaaatacacatggccgattggctgaatagatagggtcgcggaagcatcttctacccaaaagaactttcatgccaccgacttggattgacccttataagaaccatcctggaagaaagaaacttccccaaccaaatcatccttcacaagagtgaactcacctgcaaccaaattttggtctttcactccttggttaaatacaaa

SEQ ID NO: 59235 - DNA, 503 bp, Oryza sativa
  Clone ID: PAT_MRT4530_60877C.1
atttttttaaaaaaaaaatcaacagataaatcagcagccataagatttgcacacctatttccattcagaaaacaaaaacaaaaacaaaaaacttgagatgccagaaaagtcctttggtttatggcttgagcctgtacagttgaggagaatttaatttgaggggcaccaagggcaaagtttgaaacttttaaggcaaacaaaaaacaaaagtggaataatttatatatatatatttgttttttttacagggacagcctgacctactctttttctactgctactgctactgcccttctctctcccatttggtattacacaaaatttggggctttgactaaaagtcttgagctaaaaaagctttcattttttagagcttttgctgctcctcccttctcttctccctcgaaagaaaataaaaattcaaaaataaaaaaaaaaaaaaaataaataaagtaatataaaaaaaaaaaaaaaattaagaaaaataaagaaaaaaaaaaaaa

SEQ ID NO: 59236 - DNA, 1921 bp, Oryza sativa
  Clone ID: PAT_MRT4530_60878C.1
gtagtaataaaacctcctcctgtcggcttcctccttcctcctcccgccgccgcacagcgcaaaccccgcccaaaaccctagctaagcctagccgccatggacgccgccgcgcaggaatccctcatcctggagctccacgccatcgaggccatcaagttcggcaccttcgtgctcaagtccggcatcacctccccgatctacctcgacctccgcgcgctcgtctcccacccgggcctcctctcctccatcgccaccctcctccacaccctcccggcgacccgcccctacgacctcctctgcggcgtcccctacaccgcgctccccatcgcctccgtcctctccgtccaccgctccgtccccatggtcatgcgccgcaaggaggccaaggcccacggcaccgccaagtccatcgagggcgccttccgcgccggggaggccgtgctcatcatcgaggacctcgtcaccagcggcgcctccgttctcgagaccgccgcgccgctccgcgaccaggggctcgtcgtcgccgacgccgtcgtcgtcgtcgaccgcgagcagggcgggagggagaaccttgccgccaatgggatcacgctgcactcgctcatgaccctcacggaggtgctcgccgtgctgctcaagcacgggaaggtgaccgaggagaaggcgagggaggtaaggcagtttcttgacgccaataggaaggtgaccgttcccggagcggcgggcgccgttaagcccaaagcggtcaggaaggggtttgctgagagggctggattggccaagaacccgatggggaagaggcttttcgaggtgatggaggcaaagcagagcaatttatgtgttgctgccgatgtgggaactgcaaaggagctccttgagcttgcagagaaggttggtccagagatttgcatgctgaaaactcatgtggatatcttgtctgactttactccagattttggagctaagctttgctcgattgccgagaagcacaactttttgatatttgaagaccgcaagtttgctgacattggaaacacagtgactatgcaatatgaaggaggaatatttcgcatattagactgggctgatatcgtcaatgcccatataattcctggacctggaattgtggatggtctgaagcttaagggtttgccaaaaggaagagggctgcttttgcttgctgaaatgagctcggctggcaaccttgctcatggagagtacactgctgcagctgtaaagattgctgagcaacattctgattttgtaattggatttatatccgttaatccagcatcttggtcagttgcgccatcaagtccagcatttatccatgccactcctggagtgcagatggtttctggaggagatgctcttggtcaacagtacaatacccctcattctgttataaacgacagaggcagtgacataattatagtcggacgagggattataaaggcgagtaatccagccgagaccgcgagggagtaccgcatccaagggtggggagcataccaatccagcttgccatgagaaattgagaatgtgtttaggccatgtttgtttcagcttatgattattataatctagattattaagccagattgctataagctggattataataagctgacatagaataagctgtgagttgtttgtttgtctggattattggaggcatggattattgggtttgaaaggctaaagtctataataccctcagctatctgttcggttgatggcaaaaaaaaaaaataatctcaagcatgtaggggtagtgggtctttagccactcaataatctgaaaaaagctcctttagagcagcttattagattataataatctggcttatagattataataatctgctacaataatctacttgtttgtttcagtttacaaaaaataaggtagattataata

SEQ ID NO: 59237 - DNA, 360 bp, Oryza sativa
  Clone ID: PAT_MRT4530_60879C.1
atggcggcctggcgggcttccctggctgtggctgatgggcagaagcagctcacccgtgaggcccggacttataatgtaaatacttgccgactattttttgatgaaaaatatggcgccataaatataactacactcctgctacagaaaaacaagaagcccaactttcagctgctgatggcgctggccttctcggcggcgccgctgacgctgtacgtgccgccggtgcggagcctcagcctcttcgtcgaggcgatcgaggccgtcttccgcgactgcgcgccgtactcccagggcgccatcttccgcttccgcctcggcctctcccgcatcctctccggcctcgcccgcgccctccgctag

SEQ ID NO: 59238 - DNA, 219 bp, Oryza sativa
  Clone ID: PAT_MRT4530_6087C.1
atggcgccaccggctcatcggccagccagctgccggacttcgccggccgcctcgccgtgctgcgagtacagtgccgcgtgcgccttcagggcaactgcgatgaacatgcagagagtagtagttgtagtgcttcatcctgaactgtcaactgaagctttggaacaaagaacaacaacagcattggccagtgtggccttggattggattgctgaaagctaa

SEQ ID NO: 59239 - DNA, 467 bp, Oryza sativa
  unsure (1)..(467): unsure at all n locations
  Clone ID: PAT_MRT4530_60880C.1
cagccacatttccacaagcgaagaattcgccgcacagtggaaagctatagcagcagtcatggccaagcaccacaatcgtcgtctctccgtcgtcgtcgctctgctgatgctagcggcgtcgatcgtcctgctgcttcttgcgccgccctgcgatggtaggagacagctgaggggaagcgaggccaccagaggcggtggagtcggcgaggagaaggcgtagtgctgccgcctccgatacccaacctgccgctgccgcccatcgtccccgggaatcctcctgctcgcaactccgtcgtcaacaacaaatctccatagctctcttcatcatcatgtctttttaagataagcttgttgttgagaggtagtaataatactctgttgtgtaccaaagcagagagtccttgagaggatcgttgtggggtgttctttacgtgaaaaccatcggtctttttatgaccnggtcnnaa

SEQ ID NO: 59240 - DNA, 1307 bp, Oryza sativa
  Clone ID: PAT_MRT4530_60881C.1
acggtggaaaccggagagacgacggtagcatcgagcgcttgatccggggccaacaactttcagtctggggatggcggcggcggaagtatgttgaattggaaatctaaatgcagtaccagaagtccacggactacagttgctggtgcaaagcctgatgactctgaatttgaaagtgtcaatgcaccactcgagccccaaacgtgggaaggaagcttcttgtgtggtttgttgaagaaccagccacaagtactcccagttgctgcggcaaagcaacttcaagaactatctaatcaaagaaaggacaccttgatccgctgggaacatagcatcggttctcctgaggactgccttcacaggaggattgctgaaatgaaggagcatgagtgccagactgctattgaggatatcatgtacactttgattgtttataaatttttcaagattgaagttccattggttccaaatctatcaaagcttatcagcaataaaagactacaaatatggccaccaagggaggcagaactagaatcaattcatggacctgaggtgctaggtttaattagggaacacttgaccagtattatcagatgggtacatagaaatggtcccaagatcaatcgctcaacacttagaatcaaaagaatgcaatttagtcggatttattctgcttcaataatgtacggatactttctgaaatctgtcactacaaggcatcgtttggagctgattcttgctcagtcacaaggaaacaagaacaggaagagtccattggaggttctgcagaaatatcatcttcctcaaaaccgagttctgttgttgatctgcatgacttgaagagttacatgatgggctttgatccaaagaccttggagttatgcgcaaggctgcgctcatgcgaagcttctaatctcattgagaagcacagttgggcactgttcagagaaagcatgaaagatttcctagagcctgatgaggcagtgatactcgatccgtcatccctaaagagattgttgcttgaagccattgcatttggttcctttctttgggatgttgaggattatgttgacgagatttacaagttgcatgatagctgaaaaaagtacatgcaggaaactcctgatgccttggatatttagcttcttatgcatgtaaatcttcctgtcaaaattttgctatttctagcatcccagattgccagggtgctgaatgactgccgtaatttgctactcctataaaggttttggtacgatttctggaaaaaaaaaaaaaaaaaaaaaaaaaaaaaaaaaaaaaaaaaaacctcgtgc

SEQ ID NO: 59241 - DNA, 249 bp, Oryza sativa
  Clone ID: PAT_MRT4530_60882C.1
atgtctaagacatccacatcaacggtggccaatagaacaaaccaggaagaaaggattgctaacatagtagtagaagaaacagggaaaacacccctaactgaagtagaacttgctgaattggtccaagcacaaggggctgtcatggtaagtaagggacaatatgaggagttacaaaaagagttgcaaagattgcaagctctacacaaccaggcagtaggagcaggaggatcaagtgatcaaggtctataa

SEQ ID NO: 59242 - DNA, 974 bp, Oryza sativa
  Clone ID: PAT_MRT4530_60883C.1
agatgaataaagagtaacactggcttcgaccaacaggacctcaatctcgcatataccctggtgccagtgatccctatatcatacaaataccgtagtcgtgacctaaaatgacaacagtggcacgcctgtacttcccccgacgagatcggaatcatcatcatcaacaatttgatctatcaagaccatccaaacttcaagacacgtggcgtaacaaaagatatcaaattgtatgatgtcgaacggatacgcaacatgatacatctagcatgtgtctacaaagaaaaaaattttcaggaacaattgagcactcgaataggttaaggtcaagtacaccccataatcgagaacgttctcgacaaaggccgagtggtcggaccaaacctaccaatgaagaccgacgacttatctcatgtatagcgtcggccatggctggactatttgagaataggttgttaacgaataattcctcgcaaatgttgtcggcttgatcacccgacataattgtgaacgcacatctagatatgctacaagttgggtatgttagtcatgctggccacatgagatgcacatacgggagccagcccacggagaggactaccaaagcctcaatcactagggtagttcttcctacactccgaaggtggtaaactccaaaccactcacaatcggcgccgggcctcctccacaatctccttggagaggtcaccgggcaacacctccacaagccatctaggaggcggcaacctccaagagtaacaagtctaggatgcttgctgaggatgatcaagtgctgcactagcgcagtatagtggccggtcagaccgtccacggctcggtcagaccgccgtcggcttggtctgaccggttgcggctctgatagatctgtatcgctaccaaaaaccagaccagtggggccggtcagaccggccttaccacgtaggtcagaccggctaacagccctggtcagactggcc

SEQ ID NO: 59243 - DNA, 1062 bp, Oryza sativa
  Clone ID: PAT_MRT4530_60884C.1
ggaagtatgttgaattggaaatctaaatgcagtaccagaagtccacggactacagttgctggtgcaaagcctgatgactctgaatttgaaagtgtcaatgcaccactcgagccccaaacgtgggaaggaagcttcttgtgtggtttgttgaagaaccagccacaagtactcccagttgctgcggcaaagcaacttcaagaactatctaatcaaagaaaggacaccttgatccgctgggaacatagcatcggttctcctgaggactgccttcacaggaggattgctgaaatgaaggagcatgagtgccagactgctattgaggatatcatgtacactttgattgtttataaatttttcaagattgaagttccattggttccaaatctatcaaagcttatcagcaataaaagactacaaatatggccaccaagggaggcagaactagaatcaattcatggacctgaggtgctaggtttaattagggaacacttgaccagtattatcagatgggtacatagaaatggtcccaagatcaatcgctcaacacttagaatcaaaagaatgcaatttagtcggatttattctgcttcaataatgtacggatactttctgaaatctgtcactacaaggcatcgtttggagctgattcttgctcagtcacaagaattttgcccaccaattcagtttctgaatgcacaatttaatagcacccagaaacaagaacaggaagagtccattggaggttctgcagaaatatcatcttcctcaaaaccgagttctgttgttgatctgcatgacttgaagagttacatgatgggctttgatccaaagaccttggagttatgcgcaaggctgcgctcatgcgaagcttctaatctcattgagaagcacagttgggcactgttcagagaaagcatgaaagatttcctagagcctgatgaggcagtgatactcgatccgtcatccctaaagagattgttgcttgaagccattgcatttggttcctttctttgggatgttgaggattatgttgacgagatttacaagttgcatgatagctga

SEQ ID NO: 59244 - DNA, 954 bp, Oryza sativa
  Clone ID: PAT_MRT4530_60885C.1
ttttttttttttttttaaacaaaaaatagctcatctgaatttttattggtaataagtgcaaatcattagtgataggattaccaacattgtacagtgttctggattgataataccaagtgaagcgttgaacacagcactatcagtcaaagttttgccaaacatctccaaaacttgatggtcacagtaaactcgaacaggcttggagcaccatgtagctgctggctattttatgtgtttacatgacacaagatgcattgatacataattccagccctcattacatttcaatatggcgcagcaaattatgcttccctagtggattttacttattcgagccgttccatcttccacaggccatcatttagatagtgcatattgtcaactccaattcctttgttgatagtcttaatgtcctttgctgacatctttgtatatccaattgccaatgcatgctgtttgccttcagccattatagccactggtgtttcctcctcaacttcaacatccaaggaaccacctggagatgtcaatccaggacacattatgtttgcaccagagagaacaaacttgatagcgcctctatccacttggaacttcttcatgatgtcaggatactgatgaagaaggcgcaaggttggcatgtaaggaccatcacggatattgaaaaacagtgggacattattcaccaccacaagattcagatgattttggcatttaacaacaatcataggcgacttctttggaagtaagtcatctagtagaggttcgaggccagggtactcatcagcaatactttgccgaatcttccgctgcacagaggccttaacttgattctgcgcagatatatcttcaaaagagaactttttgaacatggtcgccggcggccggcggtgcgattaaagcggaggagagtcgggagaggaggtaaaacctaaagctaccgcccccgggcgg

SEQ ID NO: 59245 - DNA, 611 bp, Oryza sativa
  Clone ID: PAT_MRT4530_60886C.1
ttggatcacgtgcgagcaagaggattaatgggtccacaagtcagcgcaaaccgactttggatcagaccaaactacaaggaaccgtcatagtaattgtgctagttggcagtcgaaagtggtacttaacgactgtcaacacccagctccatcgcaaccaacgacagttgttgctccaacaccactttcctgttaacagggaaatttggtaagtcccgaagttatcatcgacctagagtcagtattggcttcattgtcctggaatcggccgacgagaattatcaagtcgctaatagtcggattcttgctatattcggttgtttcactgtttatctaaatcatttggattttatgacatcggaccttcagccgatgtatgctttaaccatcggatcagtgcttatcctatcatattattattagccgactggtttctattggattatattattgttatatcttattatcatcagccgattgtctttgcatcattatctacgttggacatatagccgattgctcaaaaccctatcgacatcggctagaatcggcatcggctaatgtcggctatcggctggaattactccatcggcttgtcagccgatcggctgttt

SEQ ID NO: 59246 - DNA, 1659 bp, Oryza sativa
  Clone ID: PAT_MRT4530_60887C.1
atgtcgtcttccgccaacccacctggtgcaccatcagccgaatacgccgagcacctttccaacttagttgcgattcccagtctgtcgcatgaaaatcactacttccttggcccagccggcaatccagaccccaccgagttcattattggtgaaaccaataggatccccttcagattaaccaacccagatctaggtcactggaagaataccttcaaatcctggccatccctagaaaaagttccaccaaaaaagagctggaccacatggttcaaacgtgtatcagccagcaagagggttcactgggacgaaattggaatcggccaagcacttgaccttactatagcaaactcagccaaagatgaacccctgatggcagctgcttcttacttctggtcaaacactactaatgcttttttattcaatcaagggctgataactccaactctcatagacatcagtatgatcataggtctgaatgttacctcatcggccaaccctatgagtttgagcacaaagaaccaatatgacttcaaaaccaaatgtatagggggttggtcaggctatgtggcaacatacatgggccagggctcggtcacccctcgagaacatgtggctttcctgttaatgtggctaaaaaaaattattttttgtgggtcaagttgtggccccacaaccaactggcaatttctggttgaagctctagaaacaaagagacaattccccttaggcaaaattctcctcggctatctataccagatgttgagcaatgcatcggctaaaatagcagtcggctcagtagttggagcaggtggaccctggtggctactacaaacctggttaaacctgatagtcatgaaggttgtcaatcggccatccatatcagaagctgaattcccaagattagagccgattgtagatgatgatggagaagagcgtactcatcggagatgcacatcatttggagaatacgcttctacaccaattgatgccggagcaaaactatcggctgaactgctcaaagattggttttgtagcttctatgaaggctttcagaaagatgatagaatctggttcatttatgaagactctgcacaacttgagcacccagtggacttcagattcgaagacatcaaccatgaagtataccaatcatccagggaaatcttctcggctgcaatcaacccatgtatcctttctgttggcattcatcaaggaagaaacatccaagcctcttatgaattctatcatccaatgagctcagctagacaactcggaatgggccaactcccaatcggcttgttctttgctaacaagatccaatgccgaggagggatttcatcaaccctgatgatggatcggctgcttagccttcaaggaccccctctgggcagtattgacaacatagaactgtcaacattcagaagcaaaagcttcgataggtggtggggtgaatggaaactgcatttattccaccaaccagcttcaatatatatgacagacctctttccatatgttgttcctcaaacaacggaatcttcccctcctcatcaaagcaacagtggcaaagacatccaatatgccccaggtttaattcctaacggaggtgggctattgtcacgccctgaagtacccctcccttgctctaaattcataaaataa

SEQ ID NO: 59247 - DNA, 1414 bp, Oryza sativa
  Clone ID: PAT_MRT4530_60888C.1
ttagaaaagactcttgtcaacattgtcacaagtcaactctgagcccaaccaaggcttgttttcctcctttgaactgaaccaaaaccatcgaagacgaatagctctagagaacttgttaaggtctaaaattctgaggcctcctaaatttttcagcatgcaaactatgctccagttaactaggctgcttcctaggctgacattgtcggggtcgtctcctttccaaaggaacgctttgcgaaaacgatcaatgcgtttgataacccacttaggtgtttggattcctgtcatatgataaattggaagagcagcgagaactgatttaacgagagtttcacgtcctgctgaagtgaaaaactttcctttccaacccggtaagcgtgcaccaaatttgtcaatcaagggaatgaagtccactttccttagtttgcgcgtgtgcagcggcaaaccttttacaatatcccatgccaccttgaagaaaccaccagtaaaaccatcaggtctcggggccttctctgccgtggcattaagctcttcttctgttatatttgtctccacttccgccggaagcaggcgcgacgtgggaacatggctgtctgctgacgacatgaccattgtcagaccggtcacaaatcggtcattcttgtccaccacgtgtcagtttaacaatctgcatgttcgcccttcttcatacaatatcttgcctgtaatggttaggatgaagcctggcatatatctgaccgggaccaacgtgccatctccaggagctaacacgccggctccggctagggacgagtgcttggaggctctcatcctgacgggatggggcgaggctccgcagtccccactctcgagtctggactcctccgctgctctccactcatcaatctactcctcgctcgacctcggtgtctccgtctttgccgcggtgccgccgtgtcgctgctacaacggccttcagtctatggccttcttcgcaggaagctcgaaggcgcctgcatctgcaagattgaagttgcgccggcaacatgatcagcaaagagaagtctgcgatgcgctccctgtcccccacctcctgcaatccctcctgcttctcgggccagcggccggatccgcagcccacgataccttcgcccgccgcatccggaagacaactcccatattcccaagccgatgtgattatcggcgcaaaaatctggtagtgagctttggtgctggacaaagcaccagccgatggccagtgccgtccctcttctttctccccgggttcattggatctggcaagtctgtattgggacgggcgttctcgagggtgactcctgccgaagacgagcccaacgccgttgagggagaacatcagaacatgaagcgggtggtcggccgcaacgcgcgggtggcggaggagccggtggattag

SEQ ID NO: 59248 - DNA, 568 bp, Oryza sativa
  Clone ID: PAT_MRT4530_60889C.1
ggaagaattatggggcctgattcacgtatgtgtgccttcatattgaaagagacagtattacagaatgcggatacacagcaccctgcaaaaaaaaaagaacatgaccaactgttgaagcaaactgcaaatctgtcttgcagtttctgctgactcacaaagctgaaaagcggctacctcgccgaagatatttgaacacttaaactctggctgatcccccgatatcactaccatctttgcatgctgatttaaaccctttcatacatctgcccattttcttgttcttccatggagcaaccagtttctactgatcaaagactcatgaagtctgcggtgaggagccccaacaacggccggaaatggaggcacatttggttatagagacccccctttaatgggcaccatctttatcttcttgctaaggaagatgccttttgatacttgagcggcttgacaaccttccatgtgaaaactggatcctcgcggccgaaaaggccgtacgccgaggtcttgatgaaccggctgacggccctcttgaggacgaggctgagggtcatccttccgggcctaa

SEQ ID NO: 59249 - DNA, 270 bp, Oryza sativa
  Clone ID: PAT_MRT4530_6088C.1
atgttgtcatgttcagggaggaagcaccatcgctacaacgggtgcttcgactctgttgaggacgctacgctctgggcagagagaatgaaaacacaggaacgacaggtaggtttggggatctcgatctacgaggaaggcttgtcgccggaccagggaaatggctgcgtaggcatcgggtcgacgagggcgctagacgggccaggccgtgatgagtggtcacaggttgggccagcccggaaacttgctagggcagatataaatgtcgagtaa

SEQ ID NO: 59250 - DNA, 492 bp, Oryza sativa
  Clone ID: PAT_MRT4530_60890C.1
atggctgcggggtcgtcgcagcggccgccggcggatttggcgctccactggccagatctggcaccctcttccgatgagggaggccatctccccatgcagcggaacgacgacaccgacgacgagtgctcccaggctcctcccggcccatggggcggcggtgacaacggcaaagctccccggggccagctggcaatggtggtgattgtcctaaggatgtcggtggcagtggagcggcagcaacaacggaggatctcggcggcatgctcctctccggcgcaccggcggtactttcgtcctgctgcggttttcgttcttggaggtgttggcagcagtgcaggaaagaaggccacctcgggttttgttgttgtcctcttggaaagtcggagctgcttcgtgcttgtgagcttggcaacgatgatccaagttggacttcgtctcttgtgtttcgttctggttgttgttatgaccctggtgttcctgacgaagtcgtaa

SEQ ID NO: 59251 - DNA, 755 bp, Oryza sativa
  Clone ID: PAT_MRT4530_60891C.1
gaatgtcgtctccacgacgaacatcattatgaggtatatcaccttccaaagatgaattctccacaaggagaatcagaggagtatcctcacatccaacatagccattgagagataatcaacacctccaacaatgacatatccacaaaaatagtgggatgtgtcggagcaactgtcgttgtcacagcgagctcaacgcatgcaacacgatgaacttttacatggcttacagacgtccattgcgccagtatgcgacaggcatggtcatcaacccatgggcgatcaaccagcacaacctaggagtagtcaccgactacgagtgtgcgataaaacgcaataacagcaggtttcaaataatattgagaagatttatgcacaccaagggcaaccatatgaacagtgtcattccaccacatggaaaacactttacatctttcaccggaccggaacacaacacgcaaacggacaatatgcgcaatgaattcggcaaaagcatggatcttatacaacaagtatatgtgactcaatcttgtagacacatcgagatcaccatttatgacgacggcgatgacatcactcccgtgtggcaatttggtgcgttggcactcgatggcacacgacgcagctccacgtcgacccgcgcatcctcatgacagcggcgaggcgaactgaatgacagcaactgaggccccaacaacagcaaccaaattgcatccggccatatcgtcttggcggaggttaatccggtagcaggcagc

SEQ ID NO: 59252 - DNA, 487 bp, Oryza sativa
  unsure (1)..(487): unsure at all n locations
  Clone ID: PAT_MRT4530_60892C.1
cccacgcgtccggcggcggctgcggacggtttggagtactacgganggcctcacnacgcgccggcggatgggtgcgagctcggggcagggcgtgtgtgcctatggtccagccagccggggtgccgggcgtacctgctgcggcggtgcggcggcggcgacccgccgggggtgcgggcgcggtgctgccaccagctgagggaggtggcggcgcgctgccgctgcgacgcgctgcgcgccatggtggaggtgctcatcaaggacgaagacgcgccgctggcgtgcaagaagggggccatggccgccatcgccgaggggctccccgggcgcgacgagtgcgacctctacacgcgcgccgacgacggtggatcgcgccaatgccacttgattatcaattgatattgctaaggacatccctcaagatggtatttctatttttgtgttctagattcaaaaaaaacagatggtatcttttgaaaaaatttataaa

SEQ ID NO: 59253 - DNA, 604 bp, Oryza sativa
  Clone ID: PAT_MRT4530_60893C.1
aaagtcagaggagcctgatcccaatatctcatattcccagggacccctccgtaaatttgtgtttttgcccacgaagaaataggaaatcgtctcgccgttcgccaccacggtgactcgactagtatttcccctcgctcgccgtcgactcctccgctcgccgccgccgccgccctcgccgtcgccgtggcctccgccgatccgatcccaatccatcccggcgaccgcgagcagggcgcggggcttcgtcgttcgtcctgctgattccgccgcatcgcgtcgcggttttcatgactgccctatagatcagctcctgattggaaggactgtagttccatgagatagaagggcatattgaagtagaatttggcctttggtgaatctaaatggacagtggcttgggaagaagttcagagacatccttgaaagccttgccatcaatggcaagtaatgcaacaaggaatactgatcctgaccaacagggtgttcgattcagttccatggaccagcctccatgttttgcaagacctggtcaatcgttccctgcttttcctccactctttggggttcagtcttccagcttgtatttacctgatgacattgaagc

SEQ ID NO: 59254 - DNA, 358 bp, Oryza sativa
  Clone ID: PAT_MRT4530_60894C.1
ttgcacatcggcgccctcgtttttgtcccctccaaccaactctaggacttgcagacggttagaaacgtgcgccaaatgctctagacgtgacatgagtttaaaccgtgtccaattaatatttttctggttccataccgattaaaccgcggtttttggatgattcttgtctactataccatccctaacacacttgttctaacctttttcggggcataaacccccatagttttcttttttctaaaaaaaaaaaatcactttctttttggggggggcttttctccaatgccatgatctgtttcctacatccatctactccctaatcgcgactctagaatttataccgcttcaccccatttaa

SEQ ID NO: 59255 - DNA, 2659 bp, Oryza sativa
  Clone ID: PAT_MRT4530_60895C.1
tttttttttttttttttttcacgttagtcacttttcttctctctatacagataatcgttttgaccatcctgcatgagagcatcgcttgggtttttctggagcgggctcatcagaaagagaattttattggtcatgtacatgttgatgtcatgttatgacaagggtgtaggcactacattttttttttttttttttttaattagaaacgcttcttgcatatatataccaagattgggctatctcaatctataaggaaagataaaaagtacttgatcattactgatgatcataaaataaagtacacttcaggaagaaggaatgacctaaaatggctccttcaacagaggaagaatagggctagacaaggtacacaaaggtaggcaaggccattgccgtcatcgttaacgttggcctcgatcagctgtctccgttctgctgcccgaagctgcatgatcctgagggcaagaaggagaagggattctcagagatgtcaaatccaggtcgagtgaagtcatcaagccccaccgaagcaaggatcaaagctcaatggcgagaaatagcgtggatcatcggccatcttcatgtcaagatttgggatgtcgtccgatgagctaccggggaagttatacccagcgctccccaccatggtgttcatcgcctcgctgccttgaggttgctctgatgctcctgttactttgatatcatccatagggagtgcaggcgtgtgcccttggaaaagagcaacatgcccaaataacttgtcttttcttgagaaggtagttccacacgagcatagccacttgtcgcggccacagtgcttttcatgagtcttcaagtccgcgataactgagaacttcttggtgttgcaacggctgcaggtgtagctcttgtcacagtggcttctcttgtagtggttcttcacacacaggattgtcttgagaggctggaacttcttgtgctctttgttccgcttgcagccaacatatgggcacgagtaccttgtaactggtgcagactctaagctagaatctttcgaaggtttcgcaagagctgcagcagttttgtactcgtctccatggcccctcatgtgcatcctaagattagcatctcttttaaaacccttgccacagatcaagcagaagtgagtatgtggtgctaaaatctcctccttctctaattgcaatactacataagacccaggggggagattctctctctcaccaccatcatcactctccttcacatcatggtcttccattggaatcggttctgacccttccccaccacaaggattttggcagttcatcatctcatcgctttctgcctgagtagtattaaggctattcatcagctcctcatagtcatgggtcttgctaatgtcaggaattgtggcttcgtcgtttgcgcttggtcgcaggttacaattggtgcccaggatcataggagcacaaagtgtgttactgagatgtctgagtgccgggttgctgctgattgggttcttcatcgaaggaagcaaggaaccagctgttgaaataagctgaattataatacaagtgagatcagcagtgacaagctgctgctttgcttgtgcctcgctggaaccaccagcaacttggctctcacgattactcatagactgcacgatgtcttttacctgcttgatcttctgctcaaggaaggataagttgctcagcattgcctgagggtcccaatccattgtaggattattcggggaaggatttgattcgaactggttaccgattttagcttcaatgtcatcaggtaaatacaagctggaagactgaaccccaaagagtggaggaaaagcagggaacgattgaccaggtcttgcaaaacatggaggctggtccgtggaactgaatcgaacaccctgttggtcaggatcagtattccttgttgcattacttgccattgatggcaaggctttcaaggatgtctctgaacttcttcccaagccactgtccatttagattcaccaaaggccaaattctacttcaatatgcccttctatctcatggaactacagtccttccaatcaggagctgatctatagggcagtcatgaaaacgcgagtagaatttgaggctccaccccgggcgcaccacgaaaccccgcgccctgctcgcggtcgccgggatggattgggatcggatcggcggaggccacggcgacgccgagggcggcggcggcggcgagcggaggagtcgacggcgagcgaggggaaatactcctcggcccaccgtggtggcgaacggcgagacgatttcctatttcttcgtgggcaaaaacacaaatttacggaggggtccctgggaatatgagatattgggctcaggctcctctgagcgagtagaatttgagctaaaatgggactcgggagggcgggtgggtggctttataggaggagcagccctgctggttcctggctcccgttgaccttaggcaattttccattggttaaattggataacgagtttttcctttggttaattggatactgagttgtggctccgctcgtttagctagcgaaaagagcctctgctcgcgagtcgcgtcgattaacgacgtaaccctcacatatttgctactctctttatcctaaaaatacgaactaaaaatattaaatcggacgcgtggg

SEQ ID NO: 59256 - DNA, 427 bp, Oryza sativa
  Clone ID: PAT_MRT4530_60896C.1
cggcaacggcggcggtcggacgaggctcgtggcgatggcggcggcgcggatccagtccgcagcggcggtggcggctcggacgcggcccatggtgacggcggcgctgtggatcctgtccgcagcggcggtggcggctcggccgctgcggtttcagtctgcagtggcggcggcggctcggacgcggcccgtgccgatggcggcgccgcggatccagtctgcagcggccacggcggctcggacgtggcccgtgccgatggcggcgccgcggatccagtctgcagcggccacgacgactcggacgcgacacgtagcgacggcggctccgcggatccagtctgcagcagcggcagcggctcggacgcggcccgtggcgacggtagcgtcgccgatccagtccgtaacggcagcgatggtgcggacgcggtct

SEQ ID NO: 59257 - DNA, 295 bp, Oryza sativa
  unsure (1)..(295): unsure at all n locations
  Clone ID: PAT_MRT4530_60897C.1
cggacgcgtgggcggacgcgtgggcggacgcgtgggcggacgcgtgggccgcggcgggcttccccaccccatcggaaggaagaagacgaccagctcgcgcgctcggatctcagccatggagaaggcgatcgatcgccagcgcgttcttctcgcccacctncttcccttctnctnctncgaccaatcgctcctctccgcgtcggcgtgcgccgccggggacagcgccgcctaccaagaggacttcgcctacggggacgacgtcgtcgtcgtcgctggctacaggacacccatatgc

SEQ ID NO: 59258 - DNA, 1133 bp, Oryza sativa
  Clone ID: PAT_MRT4530_60898C.1
gggctgcaggaattcggcacgaggacgcaccaccggcgccaaaccaaccacccaccatccaccggtcgaacacttggcgctctcgcccgccttagctcgctctgctcgtggtgctcgacccgaacaagaacggacatggctcccaggaacgccgccgaggccgtcgccgtcgccgtggcggagggcggaggagacggcatggagcccaggttccgcggcgtgaggaagcgcccgtggggcaggtacgcggcggagatccgtgacccggccaggaaggcgcgggtgtggctcggcaccttcgacaccgccgaggccgcggcgcgcgcctacgacagcgccgcgctccacttccgcgggcccaaggccaagaccaacttccccgtcgccttcgcgcacgcccaccaccacgccccgccgccgccgctgcccaaggcggcggcgctggccgtcgtcagcccgaccagcagcacggtcgagtcgtcctcccgggacacgcccgccgccgccccggtggcggccgcggccaaggcccaggtgcccgcctcgccttcgctcgatctgagcctcgggatgtcggccatggtggccgcccagccgttcctgttcctcgaccccagggtcgcggtgaccgtggccgtcgcggcaccggtgcctcgccggccggccgtcgtcagcgtcaagaaggaggtagctcgcctggacgagcagagcgacaccggctcgtcgtcatccgtggtggacgcctcgccggccgtcggcgtggggctcgacctgaacctgccgccgccgatcgaggaggcgtaggttgcagcgcccgatgacgacgacaagacccccccacaaatccctcgtagaaaagtctagagcgacgtgtaatagtaagaggttaatcgtccgtttaattgccaggattgatcaactaggtgtacatagatcgtgtcctttttgcacggggagataggtatgaggaaaaggctactactcccggtgttacagttcctttaaagaaagaaggaaaaaaacaagaaaagaaaaagaaaacattttgttgttcgatgtaacatattgatcatcaatctctgattaatgagaaatttacgttattttgttcttaaaaaaaaaaaaaaaaaaaa

SEQ ID NO: 59259 - DNA, 429 bp, Oryza sativa
  Clone ID: PAT_MRT4530_60899C.1
atggtcattgctgagttgcgtctcgtgactgtcactacatgggctcgaactgactgtattgggatgcaaactgaggttgagccaatccccctggccgatactgggcttgcggggaaggaggttgatattgataactcaggttaccctcttggtaattgtgagggtccggccagatattgcgcagcaagtgctcaggaacaacctgaggcattactgtgccatccggctgtacgtggtgaaccaaatgttctgggacaacttggtttaaaagttgttgtacaggctaaccaccaggcgttgcaaactcggccgatgcgctcactaaaccttggtgctggatcgactggacgatctgctgtctcaacggtgtttgctgaatcggctacagagactgctgccttggtggtgtttgctgaactggttgtatga

SEQ ID NO: 59260 - DNA, 1113 bp, Oryza sativa
  Clone ID: PAT_MRT4530_6089C.1
atggacactttctcccatgtgccacctggtttccgctttcaccctactgacgaggagctcgtcgattactacctgaggaagaaggtggcatcgaagaaaatcgacctcgacgttataaaagacgtcgacctgtacaaaatcgagccctgggatctccaagagaagtgcaagattggcatggaagaacagaatgactggtacttcttcagccacaaagacaaaaagtacccgacgggcacccgcaccaaccgggccacgggcgccggcttctggaaggcgacggggagggacaagcccatctacgcccgcagctgcctcgtcgggatgaggaagacactcgtcttctacaagggccgtgcccccaatggccagaagtcggactggatcatgcacgagtaccgcctcgagaccaacgaaaacggcaccacacctgaggaaggatgggtggtctgccgggtgttcaagaagcgggtggcgacggtgcggagaatggccgacggatcaccgtgctggttcgatgaccacggcgccgtcggtgcgttcatgccggacctcagctcgccgaggcagctactgccgcaccaccaccaccaccacccgggctcgtcggcggcgctgtaccacggccaccaccaccagcagctgcagcagatgtacggtcactgcaagccggagctggagtaccaccacctcctgccgcaggaggccttcctgcagcatcttcctcagctggagagccccaagccgccgccgccgcctcctgcggcggcggcctacattggcggccacctcggatcgtcgtcgtccaccgcccttactactcacgacgacgaagcctccggctccgccgcgcagcagcagccgccgtcgttggaggctgtttacatggccggcgccggcgtcggcatcggcgtcgacgcgtcggtgacggactggaggctactggacaagttcgtcgcgtctcagctgctcagcaaggagtccatgtccagctacggatcccatccggctcaggtgtttcaggctgcagacggtggcaagcatgaagaggctttggactacgcttcgacgtcggccggctccggcggcggcgaggctgatctgtggaaatag

SEQ ID NO: 59261 - DNA, 1106 bp, Oryza sativa
  Clone ID: PAT_MRT4530_608C.1
aagaacgaacaactcttctccccctctccccctccttccgtcctcctcctcccatcttgtctcctccctctctctcgcaaagtcgcaacgcgctcctcctcggtgaaacgggagtgaggtgcgtgcggccatggcgtccagcgcctcccggttcatcaagtgcgtcacggtgggcgacggcgccgtgggcaagacctgcatgctcatctgctacaccagcaacaagttccccactgactacataccaacggtgttcgacaatttcagcgcaaacgttgttgtggacagcaccacggtgaatctgggcctctgggatactgctgggcaagaggattacaaccggctcaggcctctgagctatcgtggtgctgatgttttcgtgcttgccttctctcttgtgagccgagctagctatgaaaatattatgaagaagtggataccggagctacagcattatgcacccggcgtgcccattgtgttggttggcacaaaattggatctccgtgaagacaagcactacttgttggaccatcctggcatgatacctgttaccacagcacagggtgaagaacttcgaaaacaaataggtgctgcttattacattgagtgcagctcaaagacacaacagaatgtcaaaggtgtgtttgatgctgctatcaaggtagtaatccagcctccaactaagcagagggaaaagaagaaaaagaaatcacgacaaggatgctctatgatgaacatgttccgtggaaggaaaatgtcatgcttcaaatcctgattgatcgagatgtcccttacatgatgcaatgttctgggtgcaacctcaagctggcaacctttggagtctgaatgtgctggtagagttagatgcaaagttcttgtgtatatttgcatcttttggtaattaattactagagttagatggttaaactagtctgcttatgtaccgcacaatgctcttattattagctcttgttggtctagaaagtctgatagatgccaaaggaacaaggagacaccgttctgtcaggacaaaatcacagattttgtaatcgatctgaagtctcagtatcgtcattagaacattttatgattcgatggtagaactg

SEQ ID NO: 59262 - DNA, 945 bp, Oryza sativa
  Clone ID: PAT_MRT4530_60900C.1
tcagtcctgatgtgtctgctgatttctctcgagcgtgtaagcttttaatagatcaagtcctaaaaatatgttgagcagattcattcctgccatgccaaaaagagctagtggaagctcaattccactatcaaacttgtgggcatcaatgatcagtttgtatgtaatcagtatgtggcatgccacccttgctgatacaaatgtagtccagttgaggacccattccagtttcacaatttttctgttgtaatcccgaaatccagccattcgcctcaatttccttatgtgcaaaaatacggagtgcagctcgcatacaagagttagaattaggtagttgatcgtcacattccgatacagagctagtgtaaagcaaatgagcagaatcaggtggtgcatgagaattccaggaatccgtccactgtacagtcggtaacgaagcatatctaattgatcataagcaaaatagccacaagaaaagcacagagcagaatatgctccaacccaactgccaccaaacaattcttcatgctcaaacatgttcttgaggtccttattatgccatcggttgacaagaacaaagataacggaggccgacgtgagcgaggagtgcaggagcgaaacggcggtgttgacgaagagcgggtcgcgggagacggcggcgcgcacggcggcgctggcggcctggaagaaggcaaaccctgcggccacgggcgccagctcccgccgcccgcgcgcgccgatctcgaaccccaccgacaccgcccacagcaccagcgtcgccgcgaagaacgcgctcgtgtcgcggccgccgccgccgccgcgatggggcggaggaggcatggggctcgtcgtcgtcgtggcgagcggagaaccgcaccgcacgatagactccgttccctcttcccctccctcggcgagacgcgcggcccacgcggttgatgccggcat

SEQ ID NO: 59263 - DNA, 637 bp, Oryza sativa
  unsure (1)..(637): unsure at all n locations
  Clone ID: PAT_MRT4530_60901C.1
ttactacgaggatgtgatccgcgaccaaaatgtactgaacacacacaaattactgaaacagtaactactgaaatagtaacatgaatcctcaggctactgaactgaccaccaatccccattcaaattactgaactgaccatcaaattactgaaatagtaacatatttttccccatactcaaattactgaaacagtaacattttttttttcatgcaggcactgtcgcgagttcaagagttccttggagttccagcgatgaggttgtccagcaggcatgtgaagatccacacaagccctcttcctgaccttgttgataattgggaggaagtgagcgagaagctaaatggggacagagtacgctcgttttgttgatggtgcagattatgacaagtgatatttggtttggatttcatcagggatccaataggtttttttggtttttttgagggaatcaggatccaatagttgatacttgatagcttcattttacacaaaggggatttgaaagttgtttcttttttattcctttcaaaagtatagggatccttttggtagaaagaactacacaagttacatagaggaggaaagaaatgaaggaatatgagttttttttgtccgttttaaaaaaaaaanaaaaa

SEQ ID NO: 59264 - DNA, 685 bp, Oryza sativa
  Clone ID: PAT_MRT4530_60902C.1
gcacgaggcgcagacaattctcctcctcctgaaaatccagtgaactgcagcgcccgcggcagcagcagacgagccagcaaccatggcgtcgtccacggcagccgacggcgacgacgaggtggtacgcgagttcggcccgatcctccgggtctacaagagcggccgcctggagcgccccctcgtcgcgccccccgtcggcccgggccacgacgccgccaccggcgtccactcccgggacgtccacctcggcgactactccgcgcgcctctacctgcctcctcccgccgccgccgccgccgccgccgagcgcctccccgtcgtcgtctacgtgcacggcggcgggttcgtggcggagtccgcggcgtccccgagctaccacctcttcctcaaccgcctcgccgccgcctgccccgcgctctgcgtctccgtcgactaccgcctcgcgcccgagcacccgctcccggcgggctacgacgactgcctcgccgcgctccgctgggtgctctccgccgccgacccctggtgtcgccgcgcgcggcgacctcgaccgcgtgttcctcgccggggacagcgccggcggcaacatctgccaccacctggccatgcaccaccaccacgacgcgccgccgcgccgccgcctcaggggcgcggtgctgatccacccctggttctggggctcggaggc

SEQ ID NO: 59265 - DNA, 2025 bp, Oryza sativa
  Clone ID: PAT_MRT4530_60903C.1
atgctcatccgagcaactggccatagactcaacataacacgcaatagaagcttgaattcacttgagctcactgaggcagtgagtaattcagttaacataagtgcaggagatattgcttccctcatatacttgtggaacccctgggcgatagttacttgtgtgggttcatgtacatcaccaatcgagaatttaatggttgtgataatgatctacggagcctgttcacgtcttgctccccttgctgcctttggatatgttatgtctacacatcttactctttatcctgcaattctcattgtaccgatcattcttttattgggatatggtccagatactcctccagcaaaagtatttcgtctaaaaatatcaagtgccagtaaaactgaggtaccagacaatgatagattctccacctcgagagatgttcaacagttcatgtggaaaccagtattctactttgtattgtggatgtttttctggtcatgttatgtgttgctattgagcagcatgattctcaataaagtggatggtcttcaggagatgtttgaaaagacttatggttttatcctcacagttaaggacctatcaccaaatattggtgtattatggagcttcttccttatagtcatcaatatgaacattgtttttatggtattgccgttggcaattcgtctaaagcatcgtccatgcttccttgccttcgtttacacagcaattgttgcaatgttgaaatcgtatccatctgttggagattcagctctctatcttggtcttctgggcctatttgctactgaattagcagagatgaagttaacttttttcttgttttttggatatatcggagtctctctccttagcccagtcatgcacaacctgtggatctggagggggactggtaatgcgaatttttactttgccaccggattggcttatacctgcattcagaccgtgttggttgtcgagagtaaactccaccaccgctacctgagaatggaagcttgtccggtgaatggcgctaccgcagtccgcactggcccagccagcgcgccaaacacagattcacataaaccaaaggcgccaaacacgatcgaaccgagcactcaaaaagcactaaaaaaatttggtgaaaaggaacgacgagccggcgacgagagctccagaaccctagccatggcgggagaggcagggggagacccccgagcgtggcttgccgtcgacgagacggcggcggccttcctctcccgctccctctcggcgcggccccccatcctcctcccgccgccgctccaccgcgctccgctccgcccgggcaacgtcgtcgagatcgctggcccgtccaactccggcaagtcccagctgcttctcacggctgcagtacaatgcatattaccgaaggagtggaagggtacctattttgggggcctgggtaaagtggtcatgtacttggatctggactgccgatttgatgtgctgcggctggctcaaattctgagaaatcgcattggagagtgctgtggctccacaaatccaacaaatgaagaatttgcaaaggatggcgctacaaatagtttttccgaaaacacgctattttctgagtgcatgaagcgtttcttgagaactctatcactgcagagtatgacagaaacagttgtccaaaaattacgcaattttttgcaacttcaacctgttttggtgatggccaccaaggcacccatatatggcgaaggattcactggaaatgatttccaaaggggtacttcaaaacagatgttagaggattcaacaatgagatgcataggtcaggaggaagagaaaaacatctcataccgtgaattcatgccgtcagtatggcagtcatttgttacacacaggataaagctacaagatttaggacaagaagcagaacttttctctggtcaggaaaacaaggagctacctttacgtacttctgagtggatgcagccttccctcaacacaaaggataagttttctattacagatgatggtgttattcttatccactga

SEQ ID NO: 59266 - DNA, 804 bp, Oryza sativa
  unsure (1)..(804): unsure at all n locations
  Clone ID: PAT_MRT4530_60904C.1
ccaaaatcgcagagaaaaaaaaatctccccncgaagcgaantcnggaatcgncttctcaagatgcatatctttgttnagaccctcaccnntcaanaccancacnnngnanngttnnntnntctgacatcagaangagtncnannttcnnggnactgnngnnnncnnggtgnnngtannnantgngtnnntnnngnagngngatannttcgctgnngnnngnngantnnttnngnnannganggnagnnnnttnnnnnnngnannanngnnngcgngnnanagtnnnngnnngagtagggnangngnngnngtnttgngnagnnntnnnnntnttntaannttggngtgnancttnttgatagaagnnannnnncagtnaggnaggngntgnngngntnngannnannnntggtanttcnggnnntanntntagnagntngttnanannnngtnagnnttttntgnnngngacntnnngnantntganttcnnantnnnnagancagngtnnnngngntanncgagttgtnatntnagcncnnttgntnttnntagtagngtannttnaanatcnngnntannctntattnnnngnnanncntcnnnnagnnggttnnantnnntnnangnngtgtanngngnnnnnngnntnnangtnntgtntnngnttnntntggngtgtgnacnnggnanntngntnatnactngntgtcntntnntgnnanttnnnnnantnnngngnttnnttngnngnncgtanngtnncgntnnnttnnntngntnnnnncnnnnatntnncncttt

SEQ ID NO: 59267 - DNA, 285 bp, Oryza sativa
  Clone ID: PAT_MRT4530_60905C.1
atggcgcggcctggcacaaagccgaccggccggccatggcaaggtggcggcggcgaccggcgcgagggcggcggtgcgcacaggaggcggcgacgcgcacgggtgaaggagaggaggagagggggggtttctcaccgaggttggccggcgcgagaagagatgacggcgaacgacgccggcaagcggtggatggcgaggcaagcggcgacgggaggtggcggccgaggtagcttccgcggcggcgaagctatcagcggtggtggtgcggcgcagcgagggcgctag

SEQ ID NO: 59268 - DNA, 819 bp, Oryza sativa
  Clone ID: PAT_MRT4530_60907C.1
atggccgccgccgtcatcgtggaggtccttgcgggcgggcgcctcgtcgcggctctcccgccgccgccgccggaatctgagttgctgccgacgcgagacgtcatcgcttcgtttcccccaccgccgccgctgcagtctcccgtgcggaaggccgtcgcggccgtcctggcgcgcagccgtctcgccgcggcggccgccgacgcgctcattgcggccatggccgcctcgcacgtcgcggtccgcgtccaaggcgagggctcccgcgcgaacgccgtggcgttgcaggtctccctcgccgccagtctcgtcgtcctgccggtcgtccccgtcgcgttgtcgctgcacgccatccgcatcgccgtctccggcaccggcgaagacaccgagccagacaagcctgctccggagagctttgcagcatcagtgagggcatcgttcagtcaccccatcctagctgcatccgccgctataacgcctttcgccgtgctggtgcctgttggcaatctggtgaaggggatctcagctgccagtggatcacgcggggagagaatcggttctgcgatcgaggttgtggggctcgtcggcttttacccgatgttcctcttcttctttcttcccactgctgcgtggatggtgtggaggagggtcaagctacctgcaggccatggccagcgtgttgctccgctgtctggtatgctccatcatgtcttgaggttcattgaaatacatcctcttgtcaagtcaggtgaaattgatactgtaggcttcaagagaagtgctgtgaagatggacaaggacctagaagatgactcttgctga

SEQ ID NO: 59269 - DNA, 252 bp, Oryza sativa
  Clone ID: PAT_MRT4530_60908C.1
atggcgcggcctggcacaaagccgaccggccggccatggcaaggtggcggcggcgaccggcgcgagggcggcggtgcgcacaggaggcggcgacgcgcacggcgacgggaggtggcggccgaggtagcttccgcggcggcgaagctatcagcggtggtggtgcggcgcagcgagggcgctagtggcgacggcgtgcggctggagatgggcggcggcgatggcagctcggggagagcggcgcaatggcggtag

SEQ ID NO: 59270 - DNA, 224 bp, Oryza sativa
  Clone ID: PAT_MRT4530_60909C.1
ctggcaactggaatggtgttggtgcctgaagttatagggcttgggtgttggctgacgcaatggctgacacgctgatgttgggagggtgagctttgaagtgatgtgatgcgcatgtgcacgaactgtggtgatgttgttgactgattgacaatgctgtgttggaatgggtgctggtgatgtatacgccctggtgctggttgtgacatgggaaaaaaaaaaaaaaa

SEQ ID NO: 59271 - DNA, 291 bp, Oryza sativa
  Clone ID: PAT_MRT4530_6090C.1
atgggtggtgggggaggtggtggcggtggcacaatggtcgcttgtgcttatgcctgtgtcaacgagaagcagatcttgggtggaagttgttgggatggagatggcagcatagacaaatgtcggtgtggtggtggtgtatgcgagcgccggcataggcttgccgtgtttggtggtgtccggcttgtcggtggtaatggactcgcagaggagtgggagggtgagcgatggcttcggctctggtggctttggcccttgacggagaaggcggaggagtggcttgggctcatatga

SEQ ID NO: 59272 - DNA, 1117 bp, Oryza sativa
  Clone ID: PAT_MRT4530_60910C.1
aagcgggccctgcatgtcagcggctcatagagcgccggttcaccgtggaccgggaccacacgggtggtccatcgccggtccacgggaccaacggtccggatcgaccgggagccgatcagatggcgcggcggcggccaggcatggcgcggcctggcacaaagccgaccggccggccatggcaaggtggcggcggcgaccggcgcgagggcggcggtgcgcacaggaggcggcgacgcgcacgggtgaaggagaggaggagagggggggtttctcaccgaggttggccggcgcgagaagagatgacggcgaacgacgccggcaagcggtggatggcgaggcaagcgggtggacgacgtccggagtgacctaggaaagcaaaaaagaggattcagagggagagaggtggttcgcggcaactggcaacaccggccgaaggcgagtaaaatggaggggctcaccggcggcggggaagacgatttccggtgggatttcagcgacgggaggtggcggccgaggtagcttccgcggcggcgaagctatcagcggtggtggtgcggcgcagcgagggcgctagtggcgacggcgtgcggctggagatgggcggcggcgatggagctcggggagagcggcgcaatggcggtagagagcacgggaggatgcggcgagagcggaaaaagagagagggggcttgggggaatgttttataggcgaagggggaggcggacgtagccggggaggggcccaatttgccggcgacatggagaggtggagagagagagagagagttggggaaggggaaggtgggcggcgacgtggagggcgtgtagtggggtgcggaaggcggaggaggtgggcggcagcggcggttggggcaggcggcggcggttgccggctagaggaggaataaggggccgacaggtgggccccacctgtcggtgacccggagggaggagggaggggacgtgggccggcccagcaaggaggagggcggcgcgggaggagtgggccgacggcccaataagaggaaaaagagaaaatggaaaatggatcctctagagtcgacctgcaggcatgcaagcttgagtattctatagtgtcacctaaatagcttggcgta

SEQ ID NO: 59273 - DNA, 390 bp, Oryza sativa
  Clone ID: PAT_MRT4530_60911C.1
atggaggataacgatggccggccggccgcctcgagcacacgcaactcaaccctgcctcaaagctcaaaaccagtagaaggaaaaaagaagtcaaagttatgttttggagactcgtgtcgctgtcctaaacgacttcttttacgagtatgcagatcgagccaacgacatggacacgtagcctactggctgactacacgattaattaagcacatgctaatagcgttggacaaaccaaaaacatcgaacaaaagcttcagttacccagcattgtcagcattaatatgtctaaagttgcagcagcagcagcagcagcagctactacgtgctcggatcagacaccacacatatatgtacgtctccatctacattatgtttgtcgatcgaacagcg

SEQ ID NO: 59274 - DNA, 258 bp, Oryza sativa
  Clone ID: PAT_MRT4530_60912C.1
tttggttttttttttttttgggtttttttttctttgtgttttttaaacacagccttgggcagaaggaaattaagtaacaagaacagtaattcatgtcagtaaacgggccagagggacaaaagcatgacacattaacaaacctcatgttgtgaccaggcttccactacaattcaaaaggttggaagtttaagaaccacatgcattattgatacacagtctgagagggtggaaggtaaattcatgagccagcccccatag

SEQ ID NO: 59275 - DNA, 621 bp, Oryza sativa
  Clone ID: PAT_MRT4530_60913C.1
atgtcgtctcccctctcaccggcggtgctgccattgctcccatctctgcaccacccccgtcctctgtctgctttactccacacaccatctcaccctccatatcaccatatgggcgtcgacaaggactactggagaggtagactgcactcagattgtcgagtagaccaaggtggccttgggaggaggcgagtgaagctcatggaggagttggaggagctaggtgacttcggcgaccacgttgatgatggctcagtattcggcctcagcactggagcgggagatcgtgacttggtgcttggaggacctggacaccagaatccgtttgagagcattgaggcgtggctcacgaggatcatgcatgtggaggcacatttgctggactgcgtaggtgatgtcattgcggatgaagatgaggttttgaagagccccaacgagactgcggaaatccatcgggtcgacaactggcatgctgtcagtggcagaaagcttggtgcaaatgtcaacgggagtggtgcaggacttgcaatcaaccatgcaagtgtggtccaggatgtcaaggcagcactggtgttgactgaggagaaggccagagggccgcaaggaaatgatgtaggtcactga

SEQ ID NO: 59276 - DNA, 264 bp, Oryza sativa
  unsure (1)..(264): unsure at all n locations
  Clone ID: PAT_MRT4530_60914C.1
ggacgtgncngnagcagggcaaccgacgggtgtggggaggagaccggtgggggaggcgggagacgggactccggcggtcggcgacgggcgacgaggnggcggcggcgacgacggggagcaggagggcctccccccacgccgccgccgngtatggaacgcagngtgctgccttaggtgggctctccggaggaagtcgncggcggtgtgacggcacatgcggcgaaggacaagancttcggcacgtngtaggcggcgagggacaag

SEQ ID NO: 59277 - DNA, 354 bp, Oryza sativa
  Clone ID: PAT_MRT4530_60915C.1
ccccggggggtcgaccccacgcggtccggggaggaattccttgttggagtgtacctccaaagggtgcgctggatgccagtagttgtcagcttgaggatggggacaagggtgaaaactatgtccctgtgatccactgactgccaaaaggagtaagcttggttgtacaaccaaatggcagctgggtggatcccctgttggttggaggcttcctctcaacaaattgggttcaacacaaaaagagcattggagggactgctggtggataggctgggttgtctaatggcccgcaaaatggtgtgatgcatcccaggcgtttgctgggctggcacctgtgacccctggaggaacgcctgg

SEQ ID NO: 59278 - DNA, 2134 bp, Oryza sativa
  Clone ID: PAT_MRT4530_60916C.1
tggttccacctaccggtaatatccaccgcccatccgcgcctccattcgatgatgccgccctagccgtgctccatgcccaggcagtcagcttcctcaacatcacggctcttgttcccgtcatcctcaacgtcgtcgccgccaactacacaagatggcatcacttctttgtggtagccctcggcaagtattccctcatggatcacatcctctcagatgccttccactttgatcatgccaattaggtgcaaatggattgtgttgtactcgcgaagatctccaccaaccatctccaagatgttctctctgccgacatcattgctcccatcattttgggggtctcgaacaccaatttcccagtagctgcaagaaacgagccctcaacttgatgatagagttccacaagctgcaattaggcgacctcacatctcagagtgctgccgcaagatgaagcccatcgccaaaggcctcggcgaccttggcgttcccaccttttcccaggttccagggatgaataggttcacccttgccgatctacattggcactccgtcaaataaaaggagttctctgccctcctcaccaaccgcacatgggagctcatctcgcaccccccaagcatcaacatagtcatcgacaaagtcgatcttcaagcacaagttccagtctgatggctcccttcattgctacaaggctcggtgggtcctccgcggctttacacaatgccttggcattgacttcgatgagacctttagtcccgttgagaagcccgccaccattcggaccgtcctcagcttggcggtccactagcccatccatcaactggacgtcaagaatgtcttcttgcacgggacactttaggagacattctactgcacctaaccactcgggttcatcgacagctcccaccccaggcgacatgatgtgctgcctcaacaagccattatacggtctcaagcaagcaccccactcgtggtatagccagtttgcttccttcctcctcacgctcacattttctaaggccaagtccgacacctccctcttcatcctccaatgcggcaccgacatcgtctaccttctactatacgtcgatgacatcgtcctgaccgcttcctccaccgagctttttcgctggtctatcttggcccttcagtccaagttctcaataaaggacctcagtgacctacatcatttccttgcggccctctggccttctcctcagtcaacaccagtgctgccttgacatcctggaccacacttgcatggttgattgcaagtcctgcaccactcccgttgacatttgcaccaagctttctgccactgacagcatgccagttgtcgacccgatggatttccgcagtctcgttggggctcttcaaaacctcatcttcatccgcaatgacatcacctacgcagtccagcaaatgtgcctccacatgcatgatcctcgtgagccacgcctcaatgctctcaaacggattctccggtacatccgaggcacgatggacttaggactacagatccagtgttccaccacggtagaccttgtcatctactccgactgggctggctgccccaacacactatgttctactttaggctacctatgctcctaggcaacaacctggtgtccaggtcctccaagcaccaagtcacgatctcccgctccagtgctgaggccgaatactgagccatcatcaacgtggtcgccgaagtcacctagctcctccaactcctccatgagcttcactcgcctcctcccaaggccaccttggtctactcgacaatctgagtgcagtctacctctcctccaacccggtgcaacaccaacggactaagcatgtcgagattgatatgcacttcgtccgggagaaggtcgccattggcgcaactcgggtcctacgtgtacccatctcctctcaatacgttgacatattgtaccagtcttcacctagtttcactccaatctcaacgtctattagcatggcgtcgtgacttggaaggggggaggggtgatgttttaatacttctactcaccgagcaaatcgccggctgagaagtccttgttgtttcccagctggcgacgccgaaggaccggcccttgctcagtcccgcgggcacgaaatcgaggagcggcta

SEQ ID NO: 59279 - DNA, 148 bp, Oryza sativa
  Clone ID: PAT_MRT4530_60917C.1
cgtacgcgtgagaaaattctcttctgatcaagtcctacagtgagagtcacatgcctctgaggtgcgtaacctacaatgtgatgacagaggcgagggagatcgttttagaagactggtattctatcaacctcctattgtaaaacaagct

SEQ ID NO: 59280 - DNA, 135 bp, Oryza sativa
  Clone ID: PAT_MRT4530_60918C.1
tcttagctgagcggcccgcccctgtttgttcgtcgtgtataaaatgaggtacatgacctggattaaggcttgatacacacttcgatgatcgcacttaatccttgctaacacatcttggcttacattttgcgcacg

SEQ ID NO: 59281 - DNA, 224 bp, Oryza sativa
  Clone ID: PAT_MRT4530_60919C.1
tggtacccctgcaggtccgtcccggtattcccgggtggacccacgcgtgccgattcaatggcgtttacggccaggtcacattctgatcattcccccaagactgacgctgtcttgtaagaaagcagagcatgaaggatgcccagtacatgttcatgtcaagacccaatgcacaaactccatggtgacacacccttgcagggaagaacgcaatattcccggcccat

SEQ ID NO: 59282 - DNA, 117 bp, Oryza sativa
  Clone ID: PAT_MRT4530_6091C.1
aaatccaaatctgcaatgtttgggtccaatggaagaatgcaatggattgttgcgaatttatccccttcattataggtaccttttcaacatacatattataatggcagcatctcacaa

SEQ ID NO: 59283 - DNA, 406 bp, Oryza sativa
  Clone ID: PAT_MRT4530_60920C.1
atgcgaccagtagaggtcaaggaggccttagttgggtgcgcgagcgagtttctcaacgtagaccctgaggccacgatcggcaatttgctgctgtgggaagaggagcagcagggaggtggggcgcaggaggaagaagaagagggagcggaggagcatggtggggacggggaggcacgccatggccgtcttccaaatctcgctctgcttgcttcagatggaaggagccaccatggtctcgctcattctgtttgcttcacctactctctcccgctgctcccctttttcacttccacgaccattctcctggggctttccatcatgaagttggatgtggacaagagcggcgacaacgcgggggcagctggtcttctgttgcttctagtggcgcccgctgtgtccgtcatag

SEQ ID NO: 59284 - DNA, 509 bp, Oryza sativa
  Clone ID: PAT_MRT4530_60921C.1
aaagaaaatgaggctgagctcatagcagtaaaatcatcaggcggaacaagcacaagtaaccatcattttcctgtaaatgtacactgatctaagcatcaggtgacaactgacaaacatccacgaactgttaaataagtttatgcacaaatctttttcatcagatttcactttcttgttttgttcctgtagctaccaagcgacgataaaccgccagagaacactgacgtttgcgaatgtgtggaagacgactgaacacgaggaatgggtgacaggcagctcccattgctctttggaagatccaaatcgtacaggccatttgcaaagcctgctggtggcacctcaacatcgggttctctaaagtccagaagtgcatccccagactctagcttttcaggctcggctgttacactgtagagatcggtcagcgattttagctgacgaccgaggttcgcaatcgtcttctggcactccacgagttttccagcagcactggagagctctttatcctg

SEQ ID NO: 59285 - DNA, 362 bp, Oryza sativa
  Clone ID: PAT_MRT4530_60922C.1
tggttagccccgacagcgcggggcattgagatgggttacctcttgcgaagaactcgctggaaaattaatagatacaattgccttaatcaagctctatcttttattggcataatagttatcccaatctagggccgtgccgagcccaagtcatgttgtatcggctgtatcggccatcggcttcatcaagcttcgaccagcttcacactctgtttcagccgatatggtatccagccgatgtgcagtcagacttcaagttcggttcgattcaacaccaaatccgcttcgatttctttccttattttccgaatctgatgccaaattatgttgttaacacttaggtatgtttgtaggagtgccacgtg

SEQ ID NO: 59286 - DNA, 1660 bp, Oryza sativa
  Clone ID: PAT_MRT4530_60923C.1
ccacgagcgacgggaggtcggagcgagcagagaagaacgcatttgattcagaaatctccatttgaatctctctcgtctcccctcgatccctagcttcctccctgacaccatgctgccgtcgcacctcaacggccactcccccctcgcgcgccgctgccctcgcctctccgccgcctcgccgccagccaccggggattccgatgcggcggcggcggcggcggacgctccgctggcggagcacgaccgcatctacttccagtcatactcccacatcggaatccacgaggccatgatcaaggatcgcgttaggacggatgcttaccgctctgccatcatgcaccaccagaagttcatcgaggggaaggttgtgatggatgtggggtgtggaactggaatactctcggtgttctgtgctcgcgctggtgcaaaatgtgtgtatgcagtggaagctagtgaaatggcaactcaggctcgtgaaattgtaaaggcaaataatctggatgataaggtcgtcgttgttcatggacgcgttgaggatgttgaagttgaggataaggttgatgtgataatatcagagtggatgggttatatgcttctctatgagagtatgctgcctagtgtcctgtttgcaagggataaatggcttaaacctggtggtcttatccttccatctcatgctacgctcttcatggcacccataacaaattctgagaggtatgaaggaagtgttgatttctggtctgatgtctatggcataaatatgtctgcacttgtgccacttgccaaaaagtttacatcggaggagccctccattgaaataatcggtggagagaatgttttgagctggccatttgtggtcaaacacatagattgctacacttttaaggccgaggagctcaaatctttcacaactaaatacaaagtttcatccatgatgttagctcccattcatggctttggtttatggtttgaagtggagttcaatggcccttcaaatcccacagacaaatctccttccgatttgaatccactcgatgttattcgtaagaaaaggcgccgaggatcagaagatccagtggtgctatccacagccccagaggatgagccaactcattggcatcagactattctgtacttccctgatcctatagaggtgaaacaagaccaaattatagaaggctctgtaaaagtgtctcagagtgaggaaaacccacgttttctgaatattcaactagattgcaccacgggaggccaaacattggtgaaagattatgccatgcgatgaatggtgttcttagtttgctgatctggattccccgacttctgatggtaagatcctacaacttgcaagagggtctcttccagcaatcatgaactgaggtcattggcaattgatgctgaattgttgtatgcatgttgataacagtaacgagaattcctccacttattttctttcctttattcttttgagtttttccttgtgtttattttttctagttttcactggcgatgtagatgaaccgagaatgcaaattttcggtttaagtgcagtggagataggattgcattatttcagtttgtcgaatgctttagttttgtggatgctttttcgttggtatcttgtctgactttgatgtgcttaaaaaaaaaaaaaaaaaaa

SEQ ID NO: 59287 - DNA, 629 bp, Oryza sativa
  unsure (1)..(629): unsure at all n locations
  Clone ID: PAT_MRT4530_60924C.1
gaaatcacttagaccttttccgtaaacnatctttttccggaggaaaacccatcaagcatttcaacctgacantatctaagtagtctggacttgtcatacaaccatctcacaggaagaataccgtcaggtggtcaactcgacatcctctatgcggagaacccatctatgtaccatggcaacaatggtctttgtgggtgtcctcttcggagaaattgctcagatgatggcaataatagtctttgtggttatcctcttcggagaaattgctcagatgatggcaacaatggtctttgtggttatcctcttcggagaaattgctcagacaacagttgtccatcgaagcatggtgttgaaatcaaaaaatattcagacacaatgttcttgtattttggactaggttcaggatttgtggctggtctttgggtggtcttctgtaccatcttgttcaagaaacgcatggaggatggcttacttccgcctattcgacaaggtgtatgacnaagtgtatttgtttgttgttgttacatgggcacacgtgtgccaaaagtcaggcacgcgttaagccatcgctataaattaagaggccagagtccttttggtgcacccaccaaaaaaaaaaaaaaaaaaaa

SEQ ID NO: 59288 - DNA, 243 bp, Oryza sativa
  Clone ID: PAT_MRT4530_60925C.1
gaacaagtatgaagcatttcacttcttcgatcagatgttacatatctatactgttacaagaactatgaggtgcaaacctttgatatgacactgcttgaacaccaaattcaatatgaatgagagcctagcaatcaatagaccatcaaagaagaaaagaaaaaagaagatggagacccaaaaggagtgtacaccaggcctaaattgaggcctaaatttctggtttgccttcctagaccctcgtgc

SEQ ID NO: 59289 - DNA, 440 bp, Oryza sativa
  Clone ID: PAT_MRT4530_60926C.1
gatgttgaagttgaggataaggttgatgtgataatatcagagtggatgggttatatgcttctctatgagagtatgctgcctagtgtcctgtttgcaagggataaatggcttaaacctggtggtcttatccttccatctcatgctacgctcttcatggcacccataacaaattctgagaggtatgaaggaagtgttgatttctggtctgatgtctatggcataaatatgtctgcacttgtgccacttgccaaaaagtttacatcggaggagccctccattgaaataatcggtggagagaatgttttgagctggccatttgtgactattctgtacttccctgatcctatagaggtgaaacaagaccaaattatagaaggctctgtaaaagtgtctcagagtgaggaaaacccacgttttctgaatattcaactagattgcac

SEQ ID NO: 59290 - DNA, 474 bp, Oryza sativa
  Clone ID: PAT_MRT4530_60927C.1
atgctgccgtcgcacctcaacggccactcccccctcgcgcgccgctgccctcgcctctccgccgcctcgccgccagccaccggggattccgatgcggcggcggcggcggcggacgctccgctggcggagcacgaccgcatctacttccagtcatactcccacatcggaatccacgaggccatgatcaagggaagccgccatgcccacatccgtacccgattcagtcgccctcttcgtacaaaccctaaacccccacaacccctgggccgacccgtgttgacggatgcttaccggtctggcatcatgcaccaccagaagttcatcgacgggaaggttgtgatggatgtggggtgtggaactggaatactctcggtgttctgtgctcgcgctggtgcaaaatgtgtgtatgcagtggaagctagtgaaatggcaactcagatattgaatattagtgtcatatttatagtaatctag

SEQ ID NO: 59291 - DNA, 261 bp, Oryza sativa
  Clone ID: PAT_MRT4530_60928C.1
atgggggctctcgtgtaccaggtgcttaggaagagcttcaacgagttcgagctaggaggcgatgctcgcaaccatcacggtcgcatgcgtgttgaggatctagcagtggcgctccgaatcaaggatggcaacaagaaggaatggtgtccttccacctctaaggaagatagccatatcatctttgtgcttgccttgtctcttttcccttgtcctcatggctcttatcggcatgagggcctagtatccatgaaacatgcttga

SEQ ID NO: 59292 - DNA, 411 bp, Oryza sativa
  Clone ID: PAT_MRT4530_60929C.1
atgcagctcaacccgaaagaaagaactcgtcgaaataaaactaaagcaaaagggtggcgatgcgccgaaattgtattgaacaaaaatgccactactattcatgatattgcggatggtgtcaaggatggcggcggcggcggcggcacccgagacctcccattgcggatgcgatcgaggacagagacggcgacagtggctcccgagcgctcccacgcggatggcgtcaaggacagcggcggctgcggctgcagggccgacaatagcggtgacggactgacggcagtggctcccgaggccttcacggaggtggtcgatgacggcggcagctacggtggtggtcgacgacattggtggagagagaggaaggggagagagaagagaggggagggaggtgaagatgaaactgacagc

SEQ ID NO: 59293 - DNA, 1809 bp, Oryza sativa
  Clone ID: PAT_MRT4530_6092C.1
atggagcagctgtcgggaggaggttggagaggaagatggagaggagaacgggaggagaggaccctccacagcttctttgcaagatatcaaaatgaggattcaagaagtaagcactcgggaagccttcaggaagatgaagcactcagtattgatcatgaaccacgaagactggaactcggctatgaaggtcttgggggctactgtggaaaatatggataccagttggcagaggggcacgttcactactcaacaaagccttctggtcgtgtccccgcgtccctgaaagcgaggttctcgaagatgtctttgacgaaaagtaggaaatatgtatatcttatttgtcttgacgctctcctcaaggaaagagatgcatctcacacgggtataggagggcccgggtcccagaccaggctgggacaccggctctctttgcctataattttaagatttagattttatacgtctcgaggctcctcccaagctggtcccctacaaggacatagggggccccggatcccaagctggtctgggattcaggctccccttcgtacattttctgaagacataaatcttgtacgtctcgacactcttcttgaggcaagagcttaatcttaagatgtatatcttgtgtcacagctaggcaatggctgacgattatacggatggaacgaacgaggccgcagcctccactgtcgtgattggcgaggtatggtgatgaacaaaaccgaaaagattaaggaactcgctccttcgacaccgtgcgcctgctgccgagatcgtcgatgatatggaatgtccccccacatgacatctctcccctccttgtgaagcagctcgtcctcgagctgaaatgatggatacacacggcgaaattcatccatagttccctacgccccctcttctactggcaaatcaacccattgcaccaaaattttacgaatgccacgacacactcgagctcacacaatcgcagccacctgaggcaccacacgcccatgatctaagagtggcagtgggggtgtcgaagaggcggatcaccacaaaatggtttcagtagactgacgtgaaaaacatcatgcaatagagaaccagcaggcagccgcagcttgtaatcaacatctccggtccgcgcaagcacttgataaggcccataaaacttaggattaagcttagaacgggaaggcactcccagagagaccgcagaacgccgaagcaatcgcaaccacacacaatctccagtatggaagaccaagtcacggtgcttggcgtcatagtatttcttataaacctgttgagccggaatgccatgcagatggatgatatcatcaaagaaagcgacagctaaaccgacaaaatcactgattcaccatgaaccttgggaaatccttccatgaaatccatagagatgttcgcccagacttcggtcataatcggcaaaggttgtagcgagccagcggggtgcaaatgttccactttgttcttctggcaaaccgtattgacttgcacaaactcttggaccatcgcgcgcaagcgaggtgtatgtaaatctgcctttacacgatgcagtgtcttctgtatcccttcatggccggtattgtgggctgctgcaacgacagtgtggaggtgtaccgaatctagcggcaagtatatcttcccaccaaatgttaggaggctatcaatctccccccaaggcccctccattgtaccagcatgtagttgctcccggaacaccattctccgctcagagtaggtcgaacaactcaaattagggggcgaaaagtgctatagcctgcggcacagtatcggcat

SEQ ID NO: 59294 - DNA, 441 bp, Oryza sativa
  Clone ID: PAT_MRT4530_60930C.1
gtcctcctgatcatcgccatggccatggcggcggcggcgacggtgtcgccgtcggcggcggacaagtgcgagaaggacctggacctgctgatggggagctgcgaggggtacctgcggttcccggcggaggcgaaggcggcgccgtcgagggcgtgctgcggcgcggtgaggagggtggacgtggggtgcctgtgcggaatggtgacgccggaggtggagcagtacgtgtgcatggacaaggccgtctacgtcgccgcctactgccaccgcccactcctccctggctcctactgcggcagtaagcttacaacgctcggcggcatctgcgagtggcagcactggcatgaggagacagaggcggactcatggcgtggcaccgagctccgaaacggtgggaaggcggcgctcgacgacgggcggcatctgtcggagttgaggaag

SEQ ID NO: 59295 - DNA, 372 bp, Oryza sativa
  Clone ID: PAT_MRT4530_60931C.1
tcacgatattgcggatggcgtcaaggatggcggtggcggcggcacccaagacctcccatcgaagatgcgatcgaggacagagacggcggcggcggctcccgagcgctcccacgcggacccccgagacctcccattgcggatgcgatcgaggacagagacggcgacagtggctcccgagcgctcccacgcggatggcgtcaaggacagcggcggctgcggctcttgccacagacggcagcggcggcgacagctcccaaccctcccgccgcggatagggccgacaatagcggtgacggactgacggcagtggctcccgaggccttcacggaggtggtcgatgacggcggcagctacggtggtggtcgacgacat

SEQ ID NO: 59296 - DNA, 154 bp, Oryza sativa
  Clone ID: PAT_MRT4530_60932C.1
atgggtgatgctcgggaacaagcgggggaagcccgcgctgcaactgatggactgggcgggaatatcccccaggccccggagccccactctcggtttccttttcatcgtccttacaccgtgtttgcctcgtgtgcactgatggtcccggacccgg

SEQ ID NO: 59297 - DNA, 423 bp, Oryza sativa
  Clone ID: PAT_MRT4530_60933C.1
atgatttggcggaacaacgatattgtggagattagagaggattgttggtcgtgttacaagtcacagctagctgggattttatttacttcccgcaagagactattgcagccgttttgtagccatcaactattgtgcaccacagagccaacaatggctgtctactgccatgacctgcttacaatggacgtgcatgtggctgcatgggaacttgcattgcatggaacttgtttgcagcgagataggctcgttgcaaagcgcctagctgcagcaatgtggagtagcttggtgtattttaaagctttgaactgctacaaaggcgaaaagctggagtacgtgtttgtatatactactctcacgtactgtactcctactagaagtactccactccgtactctgcacacgctcttcgtcatcatgcacatc

SEQ ID NO: 59298 - DNA, 357 bp, Oryza sativa
  Clone ID: PAT_MRT4530_60934C.1
agcgtggcaacctgggaatacgtccctgatgcattctcataaaacgtacacagcgatcgccatcaggattgacaactcattaattaccaaaaccaccagcccacatgacaacatagttttgcacacaagcaaaaatcatataggcgggccaatacaataaattaaccacttattcttagatgccaaagaacatgaataacgtgtgcaaaatcaggaacacgggaacaagaccagacaggaaaacaagaaacttggggaaccaaaaaacaatggattggaagggaactgaacgggcatatgggcacacgaactgcgcagcgttgaggtctagtcacttggcatggtatgtcgacttag

SEQ ID NO: 59299 - DNA, 483 bp, Oryza sativa
  Clone ID: PAT_MRT4530_60935C.1
atgggggagaggaaggcagcgacggcggaggaggagcaagagaggcggaagagggaggcagcgacggcggaggaggaggccgttcccacgaccagatccgccagcgccacacggggggacggccgtcgtcggatccgcacgggcgacagccaccgcacctccccactgccgtcagatccgcacagttgcgcccctaatccaccttgccctgttggccgagccctccaccgccgtcaggagggaggagaggggagaggaggagtgggggagaagaggaggacgaggccgttcccgctcgtcaggtcggggcggggcagcggcagcggcggcggcggcaactgcggtggaggcagcgcacgaggtcctgtgggcgcatgggctacggtacaacaccacggtggacggggtcatcagctacgcgttgacggcagtgcggcaactgcggtggacggtggcgcgggggcaagggggcggccaccgtag

SEQ ID NO: 59300 - DNA, 2055 bp, Oryza sativa
  Clone ID: PAT_MRT4530_60936C.1
atggcaggcatggtggccttgtggaacgagtgggaaatccgcgtgcttgtgctctccagcctcgcgctgcaggtgttcctcctcttctccgccgtcatccgcaagcgcaacgtctccgccgtgctcggcctgctcctctggctcgcctacctgctcgcggactccatcgccatctacgcgctcggctacctctcccagacgcgcgtccccagaggcgtcgacgtgcggtccttccgcaacacccaccgcatccaagccttctgggcgccgttcctcctcctccacctcggcggccaggacaccatcacggccttctccatcgaggacaacgagctctggaagcgccacctgctcagcttgctctcccaggttgccctcgctatgtacgtcttcgcgaagtcgcgcccaggcgccgatatccttgcccccgccgtgttcatgttcttgagtggtattctcaagtacggcgagaggacatgggcgctgaagtgcgcgagcatggacaacctgcggagcggcatggtgacgacgcctgacccgggtcccaactacgccaagttcatggaggagtaccgcttcacgcgcgaggcgggactccaggcggagatcgtcattgagccggagcgacggggcggctgggtcaccgccgcggccatcgccgaggagagcgtgccgtacacgacgatcatcaccgacgcgcgccgcttcttcgtcaccttcaagcgcctcttcgtcaacctcatcctcagcttccaggaccgaacgcggagccaggccacgttcctgcggctcacgccggagcaagcgtacaagatcatcgagatcgagctgtcgctcatgtacgacaccctgcactccaaggcggcggtcatccacacttggtacggccgcctgttccgctgtgtcacgctcctctcgacgtcggcggcgtgcctcctcttcaatctgcttgacaaggatcggtacgagtcgcacgacacccgcgtcgacatcttcatcaccaacctgttgttcggtggagcactctgcttggaggtttacgccattggtatgatgctcatatcctactggacgtacgccgctctgcaaggttgcaactgccgcacgctgagccatcttctgttcaaaagcatcaagtatttccggccggaaagccggccgaagtggtccaatctgatggcccaacacaaccttatcagctattgcctccatgacagagcaacgttgctcaccaaggtcatcaccatggtcgggctcaaaggacattgggatagttggatgcacatccagcacatagacgtgttacccgagctgaaaaccttggtgttcagggagctcaaggacaaggcggtcagcatcgtcgacaatgccgagagctaccgcaagttcagcaaccacaggggccagtgggcgctgcagtgcaagggctactacaaggagcttggctggagcgtcgaggtagagttcgacgagagcattctcctctggcacatcgccacggacctctgcttctactacgacatcgacggcagtgacggcgacgccaagctcaccgagtacgttggcatcagcagagcggtgtcaaactacatgcttttcctgctcgtcgcgcggccgttcatgctgacggccggcatcgggcagatccggttcggcgacacctgcgcggaggccaagatcttcttcgagcgggaaatggcgctgccggacgagcgagcggcggcggcgatggtgctcgaggtgaacgcggagatcgcgccgagggacgtgaagggagacaggagcaagtcggtcctgttcgacgcgtgccggctagccaagtcgctgctggagctgcagcccggcaagaggtggcggctgatccgcgtggtgtgggtggagatcctctgctacgccgcgagcaagtgccggagcaacttccatgccaagcagctgagcaacggcggcgagctgctcactgtcgtctggttcttgatggcgcatctggggatgggggagcagtacaggatagaggctgggcatgcaagagctaaactaattgtagagaagaactga

SEQ ID NO: 59301 - DNA, 352 bp, Oryza sativa
  Clone ID: PAT_MRT4530_60937C.1
tcctgtaacccgccactcccgacgcagataccctgttccaccgtaggtccactgtgtacctgtgttaacaatgtccacactggttctaccgttgggaccgttggaggtgtgatcccttctagatgccctggccaagctcccccatggaccataaacccgtcctgaaattgcctgttctacttgtactcctaggctcatgagaactgatctatatctcggtttgattttattcggacacaaaaggttttaaagagaacccccgtgtccattcgtaagtgtgctttagatttgtagaacgagaagagtcatgtctttctgagatgaatctgttcgtcatttcagtctaaaaaaa

SEQ ID NO: 59302 - DNA, 1584 bp, Oryza sativa
  Clone ID: PAT_MRT4530_60939C.1
gcagaggccaaccaaccaaccagcggcggtattcacgtcgctgcccgaggatttgatgctgcccctagtttctcccctccctgtttctagcgccagtatatctctccctccctcgctgcttcttgcacctctccccacgcgcgcattgcttcttgattcttgattcttgctgcttcttgcttcttgttgctgttgttcttggttggatctttgatgaaggtggggaggggatcgagggggggaggtggccgcgatggcggcggcgtggtggaggaggagaggagtggcggggtggaggcggcgccgccggtgaagaggaggcgggtggcggtggcgccgtcggctggggccggggggagcaggcgggtgcaggcggaggcgtcgccgctgcagcggctgttccgggcttgccgcgccgtcttcaggggcaccggcaccgtcccggcccccggcgaggtcgacctgctctgctccatgctcgataaaatgaaacccgaagatgttggccttagggcagaccaagaattcttcacggctagagatgatgacgaaggaatcccgctcattaaaaacactacattatatgaatgcgacaactttacgatgattatcttcttcttaccacgaaatgcgatcatcccactgcatgatcaccctggaatgacggtgttcagtaaactacttatcggatcgctgcacataaggtcgtatgattgggttgatcctgagcctgccttaagttgtagttcatcgtcgggtgatcaattgaggttggcaaagagagtggtgaatggcgtttttacagcaccatgtgatacatcagtcctgtatcctacaacaggagggaacatgcaccggtttcgagctattgcgccgtgtgcaattctcgacattcttggccccccttattccacggaagatggccgagactgcacatattaccgcgctattccctactcacgtcattcggtgaaaaatggcgcggccgatcagctcaccggagtcgacgaagaaggccatcgcctctcatggctaacggagaccattccgcggatgctgaggatgcgccagatccggtacggcggcccgccgatctccgatgacgaatgaccgccggcttgtcctgatctgaaagagtgatattccgacatggacggccagcccagctgtgaatccgtcgacgtctaaccatgtagtagacagcagatagccatagatgcaaatgcgaatcaatcatgcagagttgagctttcagttcttgcatgcctgatgctgtctttcagtctcagtgatgcccttttcttaatctttggtcagtagttcgttcagtacttcagtacatgtatgcgtagactccaatatttcagttatgttggatgccctttttgtattgaaaagtaagaatcgatctattggggttaaaatgtaagggagtaaatttagacattctctctcttcttttaatttttcagaattgtaaagtatatggttgggatacgactgataaaccgtataacttttctaagaaggcaactactccctcatttccaaattgatcatgtatcaagaccaagaaaaatttaa

SEQ ID NO: 59303 - DNA, 594 bp, Oryza sativa
  Clone ID: PAT_MRT4530_6093C.1
atggccgcggccgccgccgccgccaccgccgacgcggctgaccgtcaggaggagattggggaggaagatggagcagctgtcgggaggaggttggagaggaagatggagaggagaacgggaggagaggacttctttgcaagatatcaaaatgaggattcaagaagtaagcactcgggaagccttcaggaagatgaagcactcagtattgatcatgaaccacgaagactggaactcggctatgaaggtcttgggggctactgtggaaaatatggataccaggtttgggcgaaaatcgggggtgtccccaagggcatggcccgaaggggtgtccagactctgttggcagaggggcacgttcactactcaacaaagccttctggtcgtgtccccgcgtccctgaaagcgaggttctcgaagatgtctttgacgaaaaattttatacgtctcgaggctcctcccaagctggtcccctacaaggacatagggggccccggatcccaagctggtctgggattcaggctccccttcgcaatggctgacgattatacggatggaacgaacgaggccgcagcctccactgtcgtgattggcgag

SEQ ID NO: 59304 - DNA, 163 bp, Oryza sativa
  Clone ID: PAT_MRT4530_60940C.1
aagaagcaacgaaaaagaggcccaaatctagggtgttgctagttagggtgcttacacgcttacacagcacacagaaaacagaccacaacgcagtctcccgactcatgcctaatcaaattctagaaatcacaaactgggcacaactctattgcgcgacctcctg

SEQ ID NO: 59305 - DNA, 641 bp, Oryza sativa
  unsure (1)..(641): unsure at all n locations
  Clone ID: PAT_MRT4530_60941C.1
gnaattgtaatacgactcactatagggcgaattgggttccgggccccccctcgtgttgttaacaatcacatttcatagaagcacgacaacttgctcaagattaaaacagcaagcacctttgatgctgtacatcatatcatcattcttaacaatacccccataattatctggtgaaacattaacaggaagacgcacaccatcaacatccacatgtcaaaacaataccacatcccgttactcagggggggcaggggcacaaaaccaaaatgagatgccactttgcactctagggtaacttctgttggtgaccacggtcgcagccgcctaaacagtggattctcataatctatcaactaattcacttttatttagcaaaccaggcagtctgataacttttttttatctcttttggagatacatggcaccgctaacctgcgaacagaantcagaaccagaactcttctttctctaaaaatattttcacccatctctgaataattgaagtcgtgtttatccccagggtctcaaaaatanttaacactgtcncaaggtatgatccacctaatcttccttgtccaaatacacctgggccatcatttccccaacatcaaacaccaatggttnttatccntgcgtancnc

SEQ ID NO: 59306 - DNA, 1335 bp, Oryza sativa
  Clone ID: PAT_MRT4530_60942C.1
attcgcgagaatgtgggccccggccccaacgccgcgcgtaaggccggcggcaagcgttttacgagtgcaggcggccggcgcggcggcggcgcggcggtgccgggggctgcgcggaggcggtagctgcggtgggcggccgctcggcggcgaccggcacggcgctggccggccagcgcggaggggaggaggggaggcggcagtggtcgccggccggggccgggtggtggtggttggttttgcggaggcggtgacggcatcggcgccggaggtggtggcgttggcggcatcggtcctggggacggcggttgtgttggcggaggcggtgacggcatcagtgccggaggtggtggcatcggcggcatgggtcctggggacggtggctgtgttggcggcggtggcgacggcatcggcgctggtggtggtggcatcggcggcatgggtcctggggacggcggttgtgttggcggcggtggcgacggcatgggtcctggggacggtggttgcattggtggaggtgacggcatcggcggcatgggtcctggggacggcggttgtgttggcggcggtggcgacggcatcggtggcatgggtcctggggacggtggttgcattggtggaggtgacggcatcggcgccggaggtggtggcatcggcggcatgggtcctggggacggcggttgtgttggcggcggtggcgacggcatgggtcctggggacggtggttgcattggtggaggtgacggcatcggcgccagaggtggtggcatcggcggcatgggtcctggggacggtggctgtgttggcggcggtggcgacggcatcggcgctggtggtggtggcatcggcggcatgggtcctggggacggtggttgcattggtggaggtgacggcatcggcggcatgggtcctggggacggcggttgtgttggcggcggtggcgacggcatcggcgccgggggtggtggcatcggcggcataggtcctggggccggtggttgcattggtggaggtgcacggcatcggcgccggtggtggtggcatcggcggcatcggtcccggggatggtggttgagttgggggaggtggtgacggcatcggcgccatcggtccgggagacggtggttgtgtgggcggtggtgttggtggcattgttggcgccacaatgggtggcggaggggctgggggccggggggagggcggccaaggtgacacgggagtgggctgacgcgcggaggcatcccatgtcgggagtaaggagaaagagaggggggggggggggtttcttggttttcttgggtttttcccaatcaccaagctagcacacagaagcatgca

SEQ ID NO: 59307 - DNA, 442 bp, Oryza sativa
  unsure (1)..(442): unsure at all n locations
  Clone ID: PAT_MRT4530_60943C.1
tatagggaaagctggtaccgccctnccaggtaccggtccggaattccccgggtcgacccacgcgcgtccggttccctcctcccacattatacctgaagccttgttcgccttaaaaggtggttcctgttgtgtttnnctgggcccgnattgtacctgtttgtgaattagttcctntgcgacccacttcccctcttgttgaaggaattccacgtgtccttgcggcgtagattggtgggttggagattttcaccgagggatttaccttgtaatgtgggcgcaattcctagttgttatacgctgcgccccactttgtggtgtttcaccttaataagttagattgttcacctgtttggacattggaagtactctcgataattaataccaaggatattggcttcnctttattgcattgccatgaatagaaaaaaaaaaaaaaaaaaaa

SEQ ID NO: 59308 - DNA, 1716 bp, Oryza sativa
  Clone ID: PAT_MRT4530_60944C.1
cacgaggcgcacatgctcatcgctgcttctttcctccgacgactcgccgccgcctgaaatctctttcttgattcgtgcgctcctgagctaccccgatggccgcccaatcttccactccctcgccgcaagatggttctggtagaggtgaattctcagacaatttggtacttcaaaccccacagccaatgcgggaggattacatacagaatgctgttaactttcttggacatccaaaagtgaagggttctccagtattttacaggcgctcttttctggaaaagaaaggccttacaaaggaagaaatcgacgaggccttccgtcgggttcctgatccacagccaaacagtacagatgttgcagctgttgcttcacaacaagccggcatcgcaaatcaatctgctggagtacaaccttacgagacagttcaagcaccacaagccattaacactggtcctatcgttccacatgcgcagccgcaacttagctggtcccgtactctcattggtgtaggtgttttcctcggagttggggctagtgctgctgtcatcctcaagaaattgtttgttcctaggctaaaatcttggatccaaggagcccatgttgaaggggatgaaatttctgggaatgaacttaaatccaagttttatgaagaaatcaaagcagccatacaagattctgcatcagcgttttctgatattgctaaaacaaaccaagagttgcttgcttcaaaggatgaagataagaagatacttacaaagttggcacaagcatttgattcgcaagcagaggcgtttagatccttgagtgattccttgaatcgtatgagtgagaataggttttaccagtacaatctaatggaggatcattttcaatctgccccatggaatgggccaactacaaattcatggagagcttctcagcaaacaaacgcatacaacacatcaccacgcagtgattttgactccgggaggcatccgttcatgccagtaccgggagaaccttcacctggagcatttccggcgagatcctatgttgagcagcagcggatgcagaggcctgggtacggatttcagcctcagatgagcaatgacaggtggaaccctggctcgccattgacgaactaccacggtgctcctccgtatcagcagtatcaccatggatccaccaacgccatcgatgaagctccagctccagctccagttccagctccagctccaccagctgaaagcccgttccagcgtcgctgggttcccccacagccaccgggcgtcgtcatgccggaggccgtggccgccatacggcagccgaggcagcaagttgcagcggcatcgagaccgtcggaatccgccgcggcgacagagcagccacagtcaggtgacgtcgccggtggcgccgccatggccaatgcgggcaatggcgaggccgagcaagagcgggaagctgctgcttaattactccatttcttttttttttgtttgccacgcgatgcatgcgtctctcgtgtacaaaatacagactagtgacgattacctatgagaaaaagaagaggaacaaatgttgtgtattcattcactgtgggtgtgaatactgactctactgagattatactctgtctgtctctaaatataagggattatactaaaaaaaaaaaaaaaaaaaaaaaaaaaaaaaaaaaaaaaaaagggggggcctcgtgccgaattcctgcagcccggg

SEQ ID NO: 59309 - DNA, 1000 bp, Oryza sativa
  Clone ID: PAT_MRT4530_60945C.1
gttctgctggaatgaagggatgaggctgccatcaatagaagaatgccctagatgcagtgataatgcagggagctcgagccgatcctacaatagaggaaatcggctaaatcagaaaaaattgcctgttcatcagaggttgggtcctgtgcaccaagatcgttttcaggatgaggatgaaggcaggaactcacagtggtgtccttttggtttttttactaagaatcagaagtggagggtccaaaggatgaaaaacagggagcgttttaaggaggtacaacaagagatcaaccatcggttgaagaagacaaagcaagaatggcgtgttaagagtaaagttacaacagccgatgaagttgaagccaacaaggcgaagaggttgctcaaggccaaagctgttgcgtcttcatcagtaaacatggtttttatgctacctgcagaatatggagctaatcaagccgatgttgatgatgtagatgagacctctgctaagttgattttgtcatcggaacaagcaatttttgagaaactagaggggacagaaaatcggcatctcaagccattgtacattaatggatttgttaatgggaagccgatgtctaagatgacggttgatggtggggctgctgtgaatttgttgccatatactacattcaggaagctgggtaagaatgcagatgatatcatccagaccaatatggttcttaaagattttggtggcaacccttcagaaactaagggagtattgaatgtggagttgacaatcggcagcaaaactgttcctactatgttttttgtcatcgatgggaagggtgacaagattgagatcgtgccagccgacagccaattgaagatggagagcccaaattattacattgagggcgccgtggagggttcaaatttctacaccaaggacacggtagatgatttcgatggcaagttaggacatggtttcatgttggctgatgatctggaagaagttgaatataggtctaggggatag

SEQ ID NO: 59310 - DNA, 195 bp, Oryza sativa
  Clone ID: PAT_MRT4530_60946C.1
atattgcaattcggttttttaaagaggcccccaccaccgggttgtgttttgttccccaccttttgcaggctaatggattggcctacctacttaaaggcgctggcacaaagaatgtggttgcggttacaagagggaactaaactgcctagctgagcatgagattatgcaaattcctgtcgggaggttggacaccca

SEQ ID NO: 59311 - DNA, 510 bp, Oryza sativa
  Clone ID: PAT_MRT4530_60947C.1
tcagcgggtgccgttgaggcactgacatgtgggcccttctatcagtgtctcgacggcacacatgccgttacggtgaaggatcagcttcctcattcttcctgcaggtctcctcatctgaccagctgtcttcgttgaagggctcacccgttggccagttgggattattgaacactgcgacaactcaggattggtgggtcggccggaggtgacagggctggcgacatggaagacgccgtcgcagccggcgatcgccgccgcgacgctgccgtagtcgagcacgtcggccttgaacagccgcagtctctcgccggcgttctccagcgccttcagatgggcgttcttgccctcacctttctctctcccccggtttggatcaggggcctcagcgatgaccttctcattcctctccaccggcagcttcgtcgcgcaactatggaaggcgatggcgggggagacgacgctcctttggaacctgaggttcgtggaggtcacagatgaggcgccatacat

SEQ ID NO: 59312 - DNA, 403 bp, Oryza sativa
  Clone ID: PAT_MRT4530_60948C.1
agctgtttttgggtttttatttttttatttttttttttgggtgttttttttttttttttttttttttttttttttttttttaggaaaaaaagaggctttatcatcattagtcgaaagactggaccgtacataacatcaaaacaatttcttgcaatttgttggtttaattattctttatccccaagcccacctaaaaggattctgccccattataaacctcttggtagctcttgtattggattggagtgaatgcccccaactcatctcctctattatgcttgagcctctgagcctcttcttttgaaaagccatatgcccttgctagaacatcatttgggagagcaccgaaaatggaaccctttcctgcaatggggcttaccataaaattaggattggtcttgaa

SEQ ID NO: 59313 - DNA, 459 bp, Oryza sativa
  Clone ID: PAT_MRT4530_60949C.1
ctctccaaggaccactacgtcatcaacggcaccgtgcgcgacctcggtgagggcaagaacgcccatctgaaggcgctggagaacgccggcgagaggctgcggctgttcaaggccgacgtgctcgactacggcagcgtcgcggcggcgatcgccggctgcgacggcgtcttccatgtcgccagccctgtcacctccggccgacccaccaatcctgaggtagatatcatcgctacggctgtaactgggacactgaatgtgttgagagctagccacgaagcaaaagtgaagcgagttgtggtggtttcttcagttgtcgcagtgttcaataatcccaactggccaacgggtgagcccttcaacgaagacagctggtcagatgaggagacctgcaggaagaatgaggaagtggtacccctattacctttccaaaacactggcagagcgtgaggcttttgagta

SEQ ID NO: 59314 - DNA, 1377 bp, Oryza sativa
  Clone ID: PAT_MRT4530_6094C.1
tcgaatttcatttccgggtggagtacaaagccaagccgtcaaaataatgtcgctgatgccttgtcctgctgcgatgccgatactgtgccgcaggctatagcacttttcgccccctaatttgagttgttcgacctactctgagcggagaatggtgttccgggagcaactacatgctggtacaatggaggggccttggggggagattgatagcctcctaacatttggtgggaagatatacttgccgctagattcggtacacctccacactgtcgttgcagcagcccacaataccggccatgaagggatacagaagacactgcatcgtgtaaaggcagatttacatacacctcgcttgcgcgcgatggtccaagagtttgtgcaagtcaatacggtttgccagaagaacaaagtggaacatttgcaccccgctggctcgctacaacctttgccgattatgaccgaagtctgggcgaacatctctatggatttcatggaaggatttcccaaggttcatggtgaatcagtgattttgtcggttgttgatcgcttttgtaagtacacacatttcatcgcgcttgggcacccttattctgcttcagtagctgtcgctttctttgatgatatcatccatctgcatggcattccggtgtcgattgtcggtgaccgagatccggtttttacaggccacttttggcaagaacttatccgtctagcaaatgtgcagctgcacatgagttcagcttttcatccgcagtcggacgggcaaacagaggcagtaaacaaggcaattgctatgtatcgacgttgtttagttggtgatcgtcctcgcaagtggcttcagtcgcttccgtgggcagaattttgttacaatacttccgttcagtcatcgctgaaggagacacctttcaaagttgtctatggcagggatcacccaacaattcaatcatatgagccaggtacagccaaggtggcggccctagatcagttatgtgtaattgggatgattttttggctgatattcgtgatcgattggaacaagctcaacaggtttataagaaatactatgacgccaagcaccgtgacttggtcttccatactggagattgtgtgtggttgcgattgcttcggcgttctgcggtctctctgggagtgccttccccgttctaagcttaatacctaagttttatgggccttatcaagtgccttgcgcggaccggagatgttgattacaagctgcggctgcctggctggttctcctattggcatgatgtttttcacgtcagtctactgaaacccctttttgggggggatcccccttttttaaaagcccccccttggcccctttttaaataatggggcgggtggggggccccaaag

SEQ ID NO: 59315 - DNA, 345 bp, Oryza sativa
  Clone ID: PAT_MRT4530_60950C.1
ggtgttcacccccacgcagctgctcgccatggtgctctccaacctcaaggggatcgccgagggcaatctcaacgccgcggtcttcgattgctgcattggcatcccggcgtatttcactgatctgccgaagggctgtcgccgatgccgccgccatcgcgggcctccgcccgctgcgcctgttccatgagacgaccgccacggcgctggcttatggaatttacaagaccgatctcccggagaaggagtggttgaatgtggcgttcatcgatgtcgggcatgctagcatgcaggttagcatcgtcgggtacaagaaagggcagcttaacatgctctcgcatgcgtatg

SEQ ID NO: 59316 - DNA, 2605 bp, Oryza sativa
  Clone ID: PAT_MRT4530_60951C.1
ttttttttttttttttattaatagtctacgtttaatatttataattagtgtccaaacatccaatgtgatagggacttaaaaacagggcccaagcacaccaaggaaaaaagacgccccacatcacggttgcagacaaagttgcagattccagcaatgacgcaattaaaaccgaaaattatctctcaaccatccattcgatccatcaactcatgcggtgatcgatcgatcagctggagagaaagttccagtgacaggttcatcaaaattaagccggcaggcaagcctgaaagctaccgttaacgcattttatttttttcagaacaactgacaccggccgtgtatttactccacttaatagaagcacctctgatcaggctgggtgatcttctccgtcagctttttacatcatatctactccgccaagttgcatccacggatgtaagggtgatcatactttatataccttgtccaatatggtctgtacttggtcattgctaactccagccatggcttcatgttaccgttgtaatgaacaacagcagcattatctatctctgagcgatcaatgcttgggttgtatcctaatccaaggacatgccacgacttgtcaaggggatgcgtcaacttgtagaaggttaagaggccaggtggaagcgtcccaagcttccaaagaacccggtcttcattcatgctttgccacttgtggtagatcccagtgatatctttcttcttccactccttcagatcaaagatgttcattccataagcccagccacatgcatttggatcaaagttccgagcaatatgtggattggaaaagttaaggtacttgtcaaaacgatggaaactctccccacaggtctccactgcaccattgaccttcccattaagatcaacgtcccataatcctgtcaaatctttctgcacgactatgtcatcatcaaggaaaagtatcttatccaactttggatagacctgtgggagataaaatctcaagtggttcagcatggagaggtacttggggttacgatactttaggtttgaagaacccgcagagagagtggtggggcggtcagccttgaaataatactctttcatggctgcagactcaagttgtcgtaaaacaggacagtacgatgagttcaaccacttaaattcatctacgttctcaacatggatggtggccttcccaggtgggttcagcaaaaaccacatgttcatggctccaaagttcaacttatcagtcacaagatggaaaacatgcttctcaggctccttagcattcattatggttgagttcacaacaacagatgctgccaagacattgtctgagaaaagtgcatagtggtagagctctggattttccaagttctcgctcctcgggaacttccttttctccaacgggaggagatagtaatctattgttaagcgcatcgacaaacaatgaatgctgtttggaattgtcttcgcagccaactggctaagaaatgtactctgcttcttcaagctcctgacttgttcatctgctgactgaagcatagctctaagtctctgagtaaccgccttgcaatcatacacatcttctctagccttggatagaagttgacccattactctgactttctcaggtgcactatgatgaaggtcagaatcagcagtagcctctccaacagccctctggctttccttgatcctggtttgcagctcttgataaagatcattcttgttctttgatttagcaagcacagaataaacacgtgccatgataatctggtctctcatcaatctaactgttgaatctgagttctcattctcattctcttttctccaaatgctgtatttcccaaggacagcagaatctacagcctttgatcgttcaatagcagcattctccagcttaacacgtgcttcatcatctttccttaccaaatccattgccctcttttcacgccttttctcccttagtttccttcgagcattttttgcaggtgcatcgacttgatgttcagcagtatcatccttgggtgttttatctgtcagtgataactcatgttctgcagaactgttttcagatttaaccttgtcatcaacatccaaactagcattgctcaggtcattgactagatcatcagttttccaagagggagatgcacgttttctgaaaaaatcaacactcaaagtgcctgcttcttgttgactagaagctaaagcatcgatcatctccttggacaaaatagatttcaggttgtttgttgccagttgtttttgccaatctgtttcctgattaccttccctatccttgggatcggaacctgaggcgacgtggacgtggcccccattgcgcgcgacgaagaagatcgacggcgcgagcacgaagaggaacacgaggaccaccagcggcgccaccacgccggagccggaggcgccgccgcgcctcccccctcctcctcctcctcccccgccgccgccggccgtggagtacgggagccgcttcgagttcgccatccgccggatccggccgccgcggcggcgagggcgacgttgccttctccgagacggagagtggggtaggaggggagtgccgcgggccgaattcctgcagccc

SEQ ID NO: 59317 - DNA, 589 bp, Oryza sativa
  Clone ID: PAT_MRT4530_60952C.1
gatggtgaacttagctatcaatgcaaacggaacacatattagaacatgatgaagggaattgtgaagcagcgtctctctccagcacgatacaaaacacctgttgagtgcacttctttgattactcgcatagcgaatgggcttggggttatacctaatgatcaaattgcttacatttccaccccccgttgatgaaacttatttagtgcaaggtcacatacttaagcatggggcagataactctcttatattcttttttcttggctgtacgaatgaaattccgttacctaacccggggtatcatttgtacaactgtcatgatttaaccattctcctacagacgataaaagaatttcgtgtagcagtgcggatgtatgaggctgactaggatccgaccggagatgctcccagatggacccaagcaccacactatgagttgccaaccatcccgatctagcaaaatgccaaatcaagatggcggctggcacacgcactacaagcaagtagcaatggctaaaatttaatctaacaaaacccgagataccctcaaggggtacctagctatttaaggaggtgggaggacaacctagtg

SEQ ID NO: 59318 - DNA, 201 bp, Oryza sativa
  Clone ID: PAT_MRT4530_60953C.1
atggctgagacgcatagagagagaggaggagatcccgttgacctgccgcttggtggactccgcggtgttgaggatgatggtggggacatggtcggtggcagcggaggcgtgaaggcgagggccggtgccagaacgtgcccgcgccatcccgccatcgctgttgctccgctctgcgcatcagacgttggaaggaggggatag

SEQ ID NO: 59319 - DNA, 480 bp, Oryza sativa
  unsure (1)..(480): unsure at all n locations
  Clone ID: PAT_MRT4530_60955C.1
aaaaaatattgaaagatgagtttacactactaaaaaactctcatagagaccggttcataggtgccggttcatttaaaaccggcacctatagagcttttcctacctccttgcggtgaaaaaatgtagaaccggcacctttaagaacatttgaaccggcacctataatatagatgctggttttttaaaagaaccggcacctaataatttttataggggccggttgtttttaaaaaccagcacctatagcgtttggccgagctgattcgagccgagcccacgcacggcacccatcgcgtccttatctatccctccccttctcgatctctcacgtctctctaactctgctctctctctctctcgctgtcctctctctccctcccctctcccgccgtctngcggtcggcggctggccagcggaggcggcagcggtggtcgcgccctcccctccgtcagatccggcnggaggggaggcggtgggct

SEQ ID NO: 59320 - DNA, 819 bp, Oryza sativa
  Clone ID: PAT_MRT4530_60956C.1
atggatctcgacccgaacaacatcaccggccgtccgtacttcgtcgacgtgcttcagtccatcggccaccccattcccgcgaccgcggtccccgacatcaccctgccggtgccgccgggggaacgtcgcaccacccgcccggagtccgagaccgtctacctcaacttcacgccctccccggagatgctctacttctccaggcgcttcgcctacgcctacatcacccgcaccaccgcccccgccgacgccgacgacgcggcctccaccatccgcgacgccatccacgccgtgctccctggcctgcagctcgacctcctcccgcccagctacggcgcccacaagacggtccgcttcctcacccccgacgaccgggaggccgccatggagaagcagccgttcgcgctgggcggcggcggcgaggtgaagctcgtgcgcgagggggagaccagcaacgtggagcgcgtcagcctggaatgcgtcgtccacgccgcgctgctcgactaccccaaggagcagcggaacgagggcgacatcggccgcaactgcggcagcttcggcctcctgatggaggtcgacccggcctgctacgcggcgcccgacatgtccccggtccgcatcgtcgtcaacaacaagagccctagcgagatcccgcgggagatccggatcaggtatgctaatgataggatcccgccctacatcgtctctcgccacgtcgtgccggtccagatcctcggcatctgggtttgggacgagtcccagtcccagtacgtcgacgccaacggcgcgaagtacgtggcgatgtacaaccatgctccttaa

SEQ ID NO: 59321 - DNA, 614 bp, Oryza sativa
  Clone ID: PAT_MRT4530_60957C.1
cgccacccttccccccccccctcccccccccccccccccctttcttttttttttttttttttttttcccgaaaatcacaacgatttatttccttgttcactcaggaaacccttcacctttgccaaaaaaaaatgagggaaaaaacctccggttttttggaaacaaaccaccccagcaaagcttttcattttttgcattttaccccaataaaaatgaaattgttcttaggggtcttgcaaagcacgattcctgaatcttcaagggaggtctaaaaagggattgaatgcttttaaattactcctttcgccccacaaaaaatcaacctactttttgggggtgatttttcctaatacaacgaatttgaacaaaaggttgcctaaattcgttatactagggaatatcccctccaatcccaggttggttttttatgggatggagggagtccttggctccaggggtgacttttattttttccggaacaagaaatgcgcaaccatccattcatggcctttgtgtgatccaaaaagctcggcaactgaaatgaaaaacgtgcgccagtaacctatccatttggaagctgattccttcccgaaagttttctcaaattttggcct

SEQ ID NO: 59322 - DNA, 105 bp, Oryza sativa
  Clone ID: PAT_MRT4530_60958C.1
cccttttcttatagaatacaaactcacccctcgaagcgaagcgttgattagccttgtcaggatgcacacctttgagaagaccctgaccggccagaccatcaccct

SEQ ID NO: 59323 - DNA, 186 bp, Oryza sativa
  Clone ID: PAT_MRT4530_60959C.1
atggagcctgagattgagttcctcctcgttgccagagacatttaccctcttgatccccggtcgcaaatagttgagccaccgcaactgatggagcgatgggcgacgggatttagcggccatctagatgggtacaaggaggacagcgacgtgttagaggaggagaaggaggagacggcggcgccatga

SEQ ID NO: 59324 - DNA, 1002 bp, Oryza sativa
  Clone ID: PAT_MRT4530_6095C.1
atggcgttgtcgtctagctcgacgaactccaatccacttcaaggccacctgatcacagagaagctcgggaaggcaaatcatgccctctggaaggtacaaatcagtgctgccgtcagaggagcacggcttcaaggccatctgactggtgcgacgaagaagccaccggcgaagatcagcgtcacggtagatggcgccacaaacaagacggcgaacccggtgtacgacgactgggaagccactgatcaacaagttctgggcttccttctctcgtccttgacgagggatgtgctcatgcaggtttcaacctgtgaaactgcagccgaggcttggagcgccattgaggggatgtattccactcatactcgcgccaggtgcatcaacacgcgcttcgctctcaccaacacgaagaaaggtaacatgacaactcctgagtatttcgctaaaatgaaatctctaggagatgagatggcaattgctggaggccgccccatcgatgaggaagaattgatccagtatatcatcactggactcggagaaggctacagtgaggtcatctcagctatctgcgcaagggtagagcccatctctcacgacaagccatttatagtggaacgcaagaggtcaatcttgcgaaccgcggcaacttcagccaaggtgggcacagcgacaacagcagccgtggccgcggcaatccgggaggtggtcgtggtcgcggcaacccaggaggaggacgaggtcgcggtcgcacgtctggaggaggcgttgacaagaggcccatctgtcaattgtgcttcaaacgaggacacacaactaccgactgctggtgtagcagcggctaccagctcctatggtgtagacacaaattggtacatcgacatgggtgccactgatcatattactggggagctggacaagcttactgtcaaggaaaaatacaacggaggagaacaaattcacaccgcaagcggagcaggatcgaatcaccaggagaacgcttcttag

SEQ ID NO: 59325 - DNA, 208 bp, Oryza sativa
  Clone ID: PAT_MRT4530_60960C.1
agggggccgccttttttttttttttttaaataaaaacgaatgtcttaccctactgatatacaagtacccgccatgctgttaacacgacccaaattacagacatttacttccggatagacctcaagaaaacaaaccttacacagtagagacggaactgtcattcacaaccgacagggagataactttttttcttcgaaccccataatga

SEQ ID NO: 59326 - DNA, 194 bp, Oryza sativa
  unsure (1)..(194): unsure at all n locations
  Clone ID: PAT_MRT4530_60961C.1
atacgtggacgcctgagagcagaatggctgtggtcgaaaggcgtanctcgaaagagcatcacatggatgtgggatactgtagcctatgctcttggatncatagactgtgatacatatgaatgcacgtagcatgctgactattttcaatctgtgtgccacagaaacagaggcttctatattacgcatgctaaaag

SEQ ID NO: 59327 - DNA, 498 bp, Oryza sativa
  Clone ID: PAT_MRT4530_60962C.1
atggatgcctccacggccacgctgccggtcatcgaagcgccctggccacctccgtcatcgtgtcttgcccgtctccttcgcgatcagccgtcccacccggcgtcgacgccgggagtctggagggactctccaattggtcctgtcacctatgatcttggtcctgtcgatgtccgcctctgctacaccacctatgattttgggtatggaataactgatttatcttgtgatggattcatcaccaatggtttgccgctccgaggagtcgctgccatcgcctgctgctcctgccatagcgctgaggatcgccgtcgctgccagcttgctcctggccacgccgaggagctgcgccgccacctgctcccggccgcgctgaagagctgctccaccgcctgcttctggcgccgccgcgccaaggacttcgggatgggaatggatctgggggaaggaggatatcgaacatgggcaaacggcaacttcgttcagagaaagcgggggtaa

SEQ ID NO: 59328 - DNA, 234 bp, Oryza sativa
  Clone ID: PAT_MRT4530_60963C.1
atggcgagtgattgtgacaagacccctcgcataactcaactcaaagcaacgcacctttcctggatcataatcacctcctcaataaccagaggcatgaactccccagcgacccccacggacttctcgccgcttcacagtctggtgcaccacgagaggcgcagcggctcggactcggccgagcggctggaggaaggagaagaccccgacatgtgggccccatatgtcggcggctga

SEQ ID NO: 59329 - DNA, 498 bp, Oryza sativa
  Clone ID: PAT_MRT4530_60964C.1
atggatgcctccacggccacgctgccggtcatcgaagcgccctggccacctccgtcatcgtgtcttgcccgtctccttcgcgatcagccgtcccacccggcgtcgacgccgggagtctggagggactctccaattggtcctgtcacctatgatcttggtcctgtcgatgtccgcctctgctacaccacctatgattttgggtatggaataactgatttatcttgtgatggtactcctgccgcctcctgctgctcgcgacgccgtgttgaggagccatcaccgccgccttccggcctcgccgaggagttggagccgcagcttgctcctggccacgccgaggagctgcgccgccacctgctcccggccgcgctgaagagctgctccaccgcctgcttctggcgccgccgcgccaaggacttcgggatgggaatggatctgggggaaggaggatatcgaacatgggcaaacggcaacttcgttcagagaaagcgggggtaa

SEQ ID NO: 59330 - DNA, 939 bp, Oryza sativa
  Clone ID: PAT_MRT4530_60965C.1
atgggcatcgccgagtccctcggcgccgagacgcccttcgcctccgtcgccgcgtccgagctcttctccctcgacctctccaagaccgaggaggcgctcacccaggccttccaccgctccatcggcgtccgcatcaaggcggaggcggagataatcgagggcgaggtcgttgaaatctcaatcgaccgccccgtctccggcggcagctccgcgccttccggtgttgccgcggctgggaagattgggcggctcacgctgaagacgacggacatggagaccgtggacgagctcggcggcaagatgattgaggccctggggaaagagaagacacagggttttcttgcacttttcactggtgacactggtgaaattcgtgcagaggctcgggagcagattgatacaaaagttgctgagtggagggaggaagggaaggctgagattgtccctgatatcgaatgcttctcctttctaaaccgtgcattggaaaatgacgtgactccaattctagtcattgcaaccaaccgagggatcacatccatacgtgggataaactaccaatcactacatgggataccacctgacttccttaatcggctcctaatcatcacgacacagccttacaccgaggatgatatcccgaaggtcctagacatcaggtgcgatgaagaagatgtggaaatgtctactgcatatgccaaggtattgctcacaaagattggagtggagacggccctgaggtatgcaatccacctgatcacttcggctgcattagcttggcagaaacacatgggtaagatcgtggagatggaggatataagcagggtctaccagctcttcctggacgtgaagagatcggcgcagtacttgatggagtatcagagccagtacatgttcaatgaagtgccaggtgaaggaggagataatgccatgcagtcttag

SEQ ID NO: 59331 - DNA, 473 bp, Oryza sativa
  Clone ID: PAT_MRT4530_60966C.1
tcaccagctctccgtcattccgcctcccgttgaccggcgctcctccacatctcctctccatggtcgcgtggatccgccgtcggcggcgacggcaggggtggatccaccgagctccatcatttgtccgcccccgctcgcgccgatccaccgcctctcgcgtcggcagcgacgggaggggtggatccggcgacctccgtcgtctctccgcccccgctgacgccgatccaccgcctctcccgtggatccgccgtcgacggcgacgggaggggttgatccggcgacctccgtcgtctctccacccccgctcgcgccgatccgctcgggctcgtcgtcgcgtcgtttgtgggctgcttcttcacgtccgtcgcctcgctcatcatctccaagctgcatccgccgtcggcagcgacgtgatgggcggatccagctcatcccttcagtcccaactctgtctgggtgttcaggaagagacc

SEQ ID NO: 59332 - DNA, 2725 bp, Oryza sativa
  unsure (1)..(2725): unsure at all n locations
  Clone ID: PAT_MRT4530_60967C.1
ctgcaggaattcggcacgaggttttttttttttttttttggaaattcttcagnttaaccaaatttttcttcatcatcgctgccggctcatcggcacagcaaaaaccaccgagatttttcatcatcatcatcatcactaacatgacagcaaaaccagcaaaattttgcatcctaaaaccccttctagcgcttctccttgcccttcctctatagcggcagatcgagaaaccaaatgagaaagaaaaaaaagaaattaaatcaaagatcttaggcctatatacacgaatcctaattaaccacccttcgaggttcgatcgattcgaggctaatttggtcttaaaccttctcttcgagaagccaaaagcgccgcgtccgagctcttctccctcgacccacgaggcttaaccttcttttttttttttttttttttttttttttgactggaaattcttcagttaaccaaatttttcttcatcatcgctgccggctcatcggcacagcaaaaaccaccgagatttttcatcatcatcatcatcactaacatgacagcaaaaccagcaaaattttgcatcctaaaaccccttctagcgcttctccttgcccttcctctatagcggcagatcgagaaaccaaatgagaaagaaaaaaaagaaattaaatcaaagatcttaggcctatatacacgaatcctaattaaccacccttcgaggttcgatcgattcgaggctaatttggttgggtcacttgatgatcactagatcaaggacacctctaatcgagagaccccctcgtccgcgagagccgcttcaagaactcgtaggtggtgaccatggtggccgccgagagcgacatggatccccacctcggcccgagccctcggccgcccacccgctagcttgagcaggcccgccttcaccgcctcccgcgcccgcccggccggcgccctcgggagaggcgcctcttgcggcgcccaccggcacggtcacgcgcgccgacgcgccccacgcgggcggaactcgttccccccctttcgccttaaacgttcttctcttttggaacgctagggaagccaaaagcacctcgtcggcggcggcggcgggtggtggccatggcggagctgaagcggctgtcggagagccgcgacctgacgcggatcgagcgcatcggggcgcactcccacatccgggggctggggctggactcctcgctggaggcccgcggctcgtcggaggggatggtcgggcagctccccgcgcggcgcgccgcggggctcatcctgcagctcatccgccaggggaagatcgccggccgcgccgtgctcctcgccggccagcccgggaccgggaagaccgccctcgccatgggcatcgccaagtccctcggcgccgagacgcccttcgcctccgtcgccgcgtccgagctcttctccctcgacctctccaagaccgaggcgctcacccaggccttccgccgctccatcggcgtccgcatcaaggaggaggcggagatcatcgagggcgaggtcgttgagatctcgatcgaccgccccgtctccgccgcagccgccgccggcagctccgcgccttccggtgtcgccgcggctggcaagaccgggcgcctcacgctcaagaccacggacatggagaccgtgtacgagctcggcggcaagatgattgaggccctggggaaggagaaggtgcagagcggggatgtggttgcgctcgacaaggcctccgggaaggtgaccaagcttggccgctcaatcgggaggtcgcgggattacgatgctgttggtcctcacaccaagttcgtcaagtgccccgagggcgagctccagaagcgcaaggaggtcgtgcattgtgtcaccttacatgaaattgatgtcatcaatagccggacacaaggttttcttgcacttttcactggtgacactggtgaaattcgtgcagaggttcgagagcagattgatacaaaagttgctgagtggagggaggaagggaaggctgagattgtccctggtgttctgtttattgatgaagtccacatgctagatatcgaatgcttctccttcctaaaccgtgcattggaaaatgacatggctccaattctagtcattgcaactaaccgagggatcacatccatacgtgggacaaactaccgatcaccacatgggataccacctgatttccttgatcgtctgttaatcatcacgacacagccttacaccgaggatgatatccggaagatcctagacatcaggtgcgatgaagaagatgtggaaatgtctgcagatgctaaggttttgctcacaaagataggagtggagacgtccctgaggtatgctatccacctgatcacttcggctgcattagcttgccagaaacgcaagggtaaggttgtggagatggaggatataagcagggtctaccagctgttcctggacgtcaagagatcgacgcagtacttgatggagtatcagagccagtacatgttcaatgaagtgccgggtgaagcaggagatgatgccatgcagtcttagtgggatattggttacagactttacggttgggttggttttacggttcattatggatacccattggtcttctagatgaataggggtaagcgtaagatgacttaccctgacaaacattgctctgtgggtgcagtaaattgtgttagtgctgtagctagatttaagaattgaatgtatcttgtcttcatcc

SEQ ID NO: 59333 - DNA, 656 bp, Oryza sativa
  Clone ID: PAT_MRT4530_60968C.1
cttgggaactgctctgctactaaccctgtattattctgcaggagagaggcagattgcccaaaaagccctcacactgtcccacactcccactgctcgccaagtccaagaaagggaaacaaaaaaaaaaggggggaggagagacgaagagagagacaagaacaagaaagggcaaaggcaggggaagaaagcagcgaaaggtttcaacgcagctcgcgaaggccgcgatccgccgcctcgcctatccttcttgacagccgaccttggggcggatttaccgaacatatttgatcgttctttgctggagtttatcaatggcagcaggggtcacttttaactggattaaaaccccacttgacatccggagatttcatgacttttctagtttaagttttcgatgccgaaatacttttggatcaatccaaccttcctggctgacaacagaccaggaaccatctttttccaaagttcgagtggctgcagattactcagattctgttccagattcaaagtacacaagagatcggggttaccatcctcttgaagaagttaaagaacgtccaaaaaagaaggacctgtcactgacagatgtggaaactgctagaactgtagtagaggccaatagcaagggattacttgtgttccctgcaagagtgcat

SEQ ID NO: 59334 - DNA, 2079 bp, Oryza sativa
  Clone ID: PAT_MRT4530_60969C.1
atgccgccgacacaccagattatcaaggtgatgcgactctctctccgcgcgctagctccccatcttctccttgcattcgctgagattatagtggcaaggacagaggatttctcgagtattgggaaacatggccgctacttcgatctcgtcgacttcagcgtcatcgaggggttcaaagtcccggcggacatgaccatctgcagtttcaagggaaaaagaaacgctaatgatcgagcatgggcctgtcattgtaatgtttcctactccagtactgatagattcaacttgtcacaggagaggctcacagaggaatttggaacccctgtgcaatgtcaacgcctgtggtggtggactagacggcagaacaacacataccgtgttgacaggccattgacaaccgaagaggagaaaatacctgtggttcacactcttgccataccgaaatggctcaacagagatgattacctggtgtttctaaagctttatgacccagaaaaagcacggcttcgattcatggacggtttcacatgttcttcaaacactaagaaatctagctggttgcgtggaagtggcagaatagaattgtataaggaaataaaatttgacccatgggtgttgtgcgaagccattgaccttcatcgtaccttttcagaaaatgagattgtaactggggacattatttgctaccagaaaatcttgaagacacaggacttgccaaaatatcattctgttgcatcttttctccagcatatttgtgatcagaaggaagaagaaatgaagagacaaattttagaagagaagattgctgggttagaacaccaggcatcagcagatcgtcttgagaaagtagagacactgatagcgtatgatcagatgaaacatgaacgagacaatgctgtgcgacaagtgaacgagctgcgcgatcagagcacacacgccattctcaaattctcccgttgtgacctggaacaagcgacggagcatttcaccgatgcctgtaaggttggtgatactgaatatggccgcacatacaaagccatcatgcacggtaccgaggtggcgatcaagctgtccagcaccgagagcttatttcaacaagaggttactgttcttggtcaatgtcggcatccaaatatcatcacatttatcggagtatgctcgaaaatctccgccctagtgtacgaatggttaccaaacggaagaaacctcgaggaccacatcgtttgcgcgaacaattcaacacctctaccatggcaaaaccgcacgcagatcatcggggagatctgctgcgcgctgctcttcctccactcgaacaacaagaatcctcctactgctgctttgatccatggcgatctcaggccttgcaacatcctcatcgacgacgacgccagctacagaagcaggctctgcaacgtcggcctatcgagcctgttcttgcagcccgggacctgcccacccaacctgatggagaggctgtcgtacatggaccctgagttcatcaccaccggggagctcacaacactctccgatgtgtattcatttggtgtgatcatcctacggctattgaccgggatggcaccgttgaatctgtccaagaaagttgcagcggaattggagagtgataacctgcacaggctgatcgataaatctgctggagactggccttacaaggaggccaaacagctggctgtccttggtgttagatgcgctgaaatggcaagggagaaacggcccgatctcttgaacgatgtgtggagagtcgtcaggccactgatgaggaagccctcttcttgcccgtactttccaccggcatcaccagaagtttgtatccctgctcctttcatctgtccgatcctcatggagatcatgaaagatcctcaagtcgcatctgatgggttcacctatgaaggagaggccataaggaggtggtttgatagcgggaataataggtctccgatgacgaacttggtccttcccgatctcaaactcatccctaatcgtgtcctccgttcttccatccatgagtatcttcggcagcagaaacaacagcagcagcaggaggagggttcagtcacctaa

SEQ ID NO: 59335 - DNA, 322 bp, Oryza sativa
  Clone ID: PAT_MRT4530_6096C.1
atggtgcggtaggcgggcgccgattcactgcccgttgtggctttggaggtcacggcttgactggccagaagggttgcacccaagcggagggtggcggaactggacgtcgaatcacagcaggcaagtggaggaaggcgaggtggatgtaggcgccatggtggtgggttgctcggcgccgacagcgtccaggtactcaccgacgagcaccgtggtggtggggtgctcggtggtcggtgccgacggcttccagttactcaccgaggagcagcatgcatgtggatacttttctgatgcggagcgacattcagtatgttgttgattc

SEQ ID NO: 59336 - DNA, 204 bp, Oryza sativa
  unsure (1)..(204): unsure at all n locations
  Clone ID: PAT_MRT4530_60970C.1
ncccacccgttctcaacaatgatcactactactacaagaccgttcgtttctaanccagggtatggctaattagattatcagctttcttatcattttcaccntcttcctnatttttatcatactcactacanctcctctattaaataaaccctactatcacttactctattggatctacctcaccttttcttacttcaaaacttc

SEQ ID NO: 59337 - DNA, 628 bp, Oryza sativa
  Clone ID: PAT_MRT4530_60971C.1
cgcgcacacacacacacagacacacacacacacattctttttctcacattatcctccatcatttcgagtgataagtgactaggtatagttccctgttactatacagcaggctctcattgcttatctactccaaatgcaatagtttgcatctattaactttaaatactactttagagtttttactactcatatgctttatctatggaaaaaaaggagcatttagtgatgtaagcatatttttatggtacatggatattgtgagaataaaaagaattgggtctaagctacagcaatagtctttattctccatacattagtcatggtctcagtgttgttttttccagttaatatgcctgcttttgctttactctggcaattaagtggatatagcactgcagatggtactaagttctaattattttcattttctcgagtacattcatttaaaaaaatgtttcttttaagattgagaagaatattttacagcaagtactagatattcagaactgttttccattctgtatcatgtcctctggaagcaaactatataaatctgcatttcgattaattttcatttaaaaagaaaagtgcaaaaacataaatgattagaatgttctgggaagtccca

SEQ ID NO: 59338 - DNA, 126 bp, Oryza sativa
  Clone ID: PAT_MRT4530_60972C.1
atgaataggagcaacgaccggctttggccaacaggattagaattcaccctcgggatcaaggacttgttcattgatgaatcccatcagttgttcttgaacagccgcgataaattccttgtgtgttag

SEQ ID NO: 59339 - DNA, 1689 bp, Oryza sativa
  Clone ID: PAT_MRT4530_60973C.1
ctaattaatcacagaatattttgtaccggtgtaacactcaacatgacatgatactgatacaccaggatggcaagaggagccaaatttaactaggaaacatctcccctccttatcaccaccatctccagtatttctttttccacgtgacagaaggtccaggccgtacggcatactatgatacgaggacccagctgatggtgctccttgcttaagctgccatggtgcaggctgcctactgggagaagggatcacctttgattcatttagccacctctcagcaaagggtgacttcacaggcatgtctggtctgtcagtatccattgtgcaggatgcctcgttaaggtttatcccacggacgcttgtttccgtcttgtcatgatccaatttcggtgatgaagagaatggtgttgaagagacatttggcgtccaaattgcttgattcaagtcatgggtctcggtttttgcactcggtcgactaaatggaccaattttcttgtcttcctcctcttttacaatgaccatgtgatcaggctctgcagcttctgagctctttagcttagcactgtctaactgcttatcttgataaagatctttaccagacgatgagcgcgatgaataaatggtggtcattgggaaagctttctctggtggtgtagctggtgtatagttagggggtagcaaatcatcccaattctccaacagttctttatacactttacgcagagtaacctctgtaaggcctgttaccttacagatctctgcctgagttttccgcttgtcttcaagctgacacgcaagatagatagctgcagctgatatgcttatgggattcctccgtgtgcagaagcatttattaacaacaacctcaccaatatgggctgcaagttcctgagcagatttattgagctggagtaggctgcaaaaccgaggcatatgaactgctattgagttgctgttaagaggttggctcagtttcagtgattcaccaagtattttgatgtattttccaatttctttctggggaagattgctagcagtagagatttcctgcaaggtcctgggctcctgcgcctcgcggatggcctgcacgagtgcggccgtggcaagcgcctcgacgctgcggttcctgaggcacgtagcggaggagcagtccttgaagagctcgaaggcgtggtcggctatgtcccggtccagcctcaggatggaggcgacgtccacgatctggacgtaggcgcggaggctgtcgacggagaccataggccccgcggggtccggagtggaggaggccgcggattcgacggcgagcgcgcgctcgagctcggcgagttggccggagaaggcggacgcggagcgggcgaggacggggtggcgctcgagggagaaggccgagaaggcggagacgaagccggccgggaggaaggggtcgtcgtcgtcgtcgtcgtcgccggaggcggaggcggccgagggggacggcgacggcgcggcgtcggcgaggtcgggggtgacgagggggagcgggtggagcgaggggaggagggggaagaaggggtgggtgtggaggtggcgctcgaggacgaggcgggcgcaggaggagcactcggagacggcgcgggagagcggcggctgcgtcgtgacgcagcgcgccgggccggaggcgcggcagtaggggcactgcgtcggctgcgacat

SEQ ID NO: 59340 - DNA, 268 bp, Oryza sativa
  Clone ID: PAT_MRT4530_60974C.1
tcggccactcgtccgagcggtggctcgctcgggatcggtggttgcactcacagcttcttcgggggatttaaggggatgtactaatggagtcaacgggtggcataaagaattctagcactacacgatccttgacgtatgaacctccgcttgcctacagcattgacgacgtgctacctgctggaggcgtgaagaaattccatcctgatggttactccaactgctcgatgatgccatcctgagagcccttgcagcttcttcatgctactag

SEQ ID NO: 59341 - DNA, 1645 bp, Oryza sativa
  Clone ID: PAT_MRT4530_60975C.1
actcatggctgcggcatcatcttagttataatttctcctcgaggggcaagttttgagtttgcttatactattaaaccctacgcgaccaataattaggctgaatatgaagcagttctcaaggggttgcaattattgaaggaagttgaagccgatgctattgagataatgggtgattcattgttggtgatcaatcagttggcaggggaatatgaattcaaaaatgatgtgctactgatgtacaatgagaagtgccaagaactgatgaatagttttcggttggtaaatttgaagcatgtctctcgggagcagaacgttgaagctaatgatttggctcagggggcatcaggatacaagccgatggtacaagacattgaagttgaagttgctgcaattacagccgatgattggagatacgatgtgttccagtatttaaatgatccttctcaatcggcttcacggaaattgaggtataaagctttgaaatatgccttgttagatggtgagttatattatcggacgattgatggggtattgcttcgatgtttgagtaccgatcaagccaaggttgtgatggagaagtgcatgaaggtatctgtggcactcatcaatcggcttataaaatgaggtgtactgggtatttttggccgacgatgttagaggattgcttatgataggctcaaggttgtcaagatcgccacacatttggagcgactcagcgagcaggagcatcacctatgaatccgattattaagccatggccgttcgtaggatggggcattatatgatcggtcagaataatccacattcaagcaagggacataagtttacattagtagcaccgattatttccccgaatgggcgcaagcggttcctgtgtagaaggttgattctagagatgctatccagtttgttatagaatagatggtggaccgaattggtgttcctcaaaccatcgcccccgatcaggtttcaatctttgtgttggatgagtgtgttcagtttactgccagcatgggcatcaagttgttagattatctgccatacttactgcgcaagttaatggacaggcttaggcatataacaagagttttatacagttggttaataaaaaaatatgtgatttcctcggcaatggcatataagattagccgaagcattgtggtattatcagatggagtgtcatgggtcgattcaggttcctccttacaagcatgtatatggacatgaagcagttctaccatgggaaaatgccatcggctcaaggagaatagatttacaggataaattgacagtcgatgagtattaaactcttctggtggatgaaacagaagatttaattcagtccagattacgtgctttggaaaaggtgacaagagataaggaacgagttgctggtcattatagcaagaaggttgtacctaaatccttttcagagggaaagttggtttggaagttgattttgccgataggaactcatgataataaattcggcaagaggtcgccaaattgggaagaaccatttcaaatatacaaaattgtatccaaaggagcttagatgttggaatggctttatggtgaagtttttggacgagcactaaacgagaagtacttgaagaaatattatccaagtgtttggattaattca

SEQ ID NO: 59342 - DNA, 885 bp, Oryza sativa
  Clone ID: PAT_MRT4530_60976C.1
atggaccgggaccacacgggtggtccaccgccggtccacgggactgacggtccggatcggcctcaaagacgatcggacggcgcggggaaggcggctaggcacggctcggctcggcttcaaagccgaccggcagccatggcggccggtggcgacacgcgcggtcaccggcgagggaaggagggaggagaggagctcctcaccgtgagcacggcggccggcgcgaagaatgaacacggcggcgatgaccggcgatgcggaggcacggacgggcggtggcgacaccctaggagaagatggagaggcgttaggagaggggacgacgaccacggcggcttgaattgccggccggagatggaggggagggaaaaactcaccggctcgcgaggggagaggcgctccgtggcggcgcgcggccgaaggcggcgacaagcggcggagctcgggtgtcacggcgcgggcgcggtgcgggagggggcggacgtggccggggaggtggccgatttggccggcaacgtgggggtggagagagagagaatggagggattcaaattcgaatcccgccccttgcgagcgcgcgcgagggccgggagatgggggggagagggcggcgacgtggggaggacgcgggagcggcgcggcgtgggcgcgggaggagcggaggaggcagcggcgcggcggtttcggcggcagcggttggagcttcggctccagcggccggaggtgggagacgaccgacagggttgcatcggctttcaatctccggcgaagaggggagacgaaagcgctatctctgatcttgtcgggcacggattcgaggaggaagactaccctgttgtcgactacgagtcagaccttcagactgccatgtcgacaacagttagatag

SEQ ID NO: 59343 - DNA, 651 bp, Oryza sativa
  Clone ID: PAT_MRT4530_60977C.1
atgccgtgcttgggccgggccaaaatggcgtgcttcgggctgggccgcgtggtccttgggccttatagccatctatacaaacggcaatcaactgcctcatcatcagataatgaagaactttcaaaacaagagctggcatccagggtttccactgtcatctttcttgccgccgtcattctcccactcttctcattcgcccaagcccaacaacctcaaactcctccaagaagaaatccaccacgtgcaccgccatcaccaaggagagcaccgccaccatcggtgtctgcagaaccaacaccggcaccggtcatagcaccatctccaccaccagttgtagcacctagccagccgccagccgtagcacccacgcagccaccaacaccatctggcggtagtcaatgcccaagagaaaatgtaattgcacttaatgtgtgcgcacaacttgatttgtccacgctgctcaacaacccgactaaggctatgcaagactgttgtccaccaatcaacagtctctcaagcaccattgccgctggttgcctatgtgaggctgcgaagattaacctcggtgtcaccgccgatgtcctcttccttgaggcagtgctccgcgtgtgtggcaaggctgagctcggcaacctcggctgcttcctctga

SEQ ID NO: 59344 - DNA, 505 bp, Oryza sativa
  unsure (1)..(505): unsure at all n locations
  Clone ID: PAT_MRT4530_60978C.1
ngnattcggacgagctcgtgccgaattcggcacgancggacgccgcgtccccgcccaanaccgctcggccgcctcccgtggctcgccggcgggttcctgatgggtgctacncggcgccggcgttcaacacggtggtggggctggggctgtcnctnacagtggcggccggggcgcggcacccngaagcgttcnccgtggaaggcggggcggcggtnttcnttgcggtggggttcctggcngcggcnctngtnttggcggtggcngtgcttcccgccaaggggatnaagctngaccccgtgctcngggtggggctcctcctcatctacttcntcttcctctgcgtcancctccccattctcacccattgccttcaccacattaacttcatttttcttctttgcaaattgaattgccaanatgaagatggtgatgatgctanattggttgggttggttggtgtccaatnttaatttgggtnattaattattaattaattgcatggtat

SEQ ID NO: 59345 - DNA, 312 bp, Oryza sativa
  Clone ID: PAT_MRT4530_60979C.1
gataaaaatatatgtaaaagtggcaaaaaaagaatggcgtcacgcataccatctagagaaaagttagagacagggcatacgacgaagactacaatcagtgataaaaacccaggggtgcccacctacccgcatttatggcgacccgaacggtcgcgccacgccgcatttaatgcggtgtgcagtgcactcaaccggtctgtgaccggtcgaatgactgatgggacccaggatgtctggcgcaccatcgcgtatgtcaggtgacgttcagcccgacatatcccatcaaataatgatggtgagaggttctcatcc

SEQ ID NO: 59346 - DNA, 3465 bp, Oryza sativa
  Clone ID: PAT_MRT4530_6097C.1
atggcgttgtcgtctagctcgacgaactccaatccacttcaaggccacctgatcacagagaagctcgggaaggcaaatcatgccctctggaaggtacaaatcagtgctgccgtcagaggagcacggcttcaaggccatctgactggtgcgacgaagaagccaccggcgaagatcagcgtcacggtagatggcgccacaaacaagacggcgaacccggtgtacgacgactgggaagccactgatcaacaagttctgggcttccttctctcgtccttgacgagggatgtgctcatgcaggtttcaacctgtgaaactgcagccgaggcttggagcgccattgaggggatgtattccactcatactcgcgccaggtgcatcaacacgcgcttcgctctcaccaacacgaagaaaggtaacatgacaactcctgagtatttcgctaaaatgaaatctctaggagatgagatggcaattgctggaggccgccccatcgatgaggaagaattgatccagtatatcatcactggactcggagaaggctacagtgaggtcatctcagctatctgcgcaagggttctcaacttcgaagcacgacaagccatttatagtggaacgcaagaggtcaatcttgcgaaccgcggcaacttcagccaaggtgggcacagcgacaacagcagccgtggccgcggcaatccgggaggtggtcgtggtcgcggcaacccaggaggaggacgaggtcgcggtcgcacgtctggaggaggcgttgacaagaggcccatctgtcaattgtgcttcaaacgaggacacacaactaccgactgctggtgtaggtatgatgaagattttgtccctaacaataagcatgttgcagcagcggctaccagctcctatggtgtagacacaaattggtacatcgacatgggtgccactgatcatattactggggagctggacaagcttactgtcaaggaaaaatacaacggaggagaacaaattcacaccgcaagcggagcagctgtgcaggctgccacctatctcatcaacagagttcctagcagagttatccaaaatatgagtcctcttgaaaaattgcatcatcagaaacctgattacacctccttgagagtgcttggttgtgcctgctggccaaatctccgtccctacaataaccataaactccaatttcgatctaagcggtgtgtcttccttgggtttagtaatatgcacaaagggttcaagtgcttagaggtgtccactggccgtgtctatatttctcgtgatgttgtttttgatgaaacaatatttcctttttctgagcttcatgccaatgccggcgctcgtcttagggggaatgaacaaccaccaaaccatgtgactaatccacaccctaatgatttttctgatgagaatgagtcccagggaagcgatgcagagtggcaggatgtagaagatcccaccggggctgacggcgctcacctccagcttgattcgccatcaatttcagcgcccacagatctcagcagtagctttggcgacatgattcctggcgacaaatcgtcgggcgacacgttggccagtggccaacctgatggcgacaccggccaatccggtggcaacacgggtggctccagccccgacgctggcaggcactcccggacaatggagcacgcgcggcagcatccgatcggctcccatcatcagccgacagggggtgcagagcaacaacagccgacaggaggggctaatgatgtcgctgatgatgtcgatgtgacatctgcagacgatgtgcctcaggaccacgttagacctcgcatcaggttgcaaagtggggttcgcaaagaaaaggtatacactgatggcactattaaatacaaaaactcctggtttactgagtctggtgaacctactactgatatagaagcattaaaggataaaaattggaaactagcaatggatgctgaatatgaagctctaagagggaagaatgtcataggttgtaagtgggtttataaaattaagaggaaagctgatggtactctagacagatataaagctagactagtagcaaaaggttttaagcaaagatatggcattgactatgaggatacctttagtctagttgttaaagctgctaccattagaattattttgtctttagctgtgtctagaggatggagtcttagacagctagatgtacaaaatgctttccttcatggttatcttgaagaagaagtgtatatgcaacaaccacctggatttgaggatccaactaaaccacagtttgtctataaacttgacaaggccctatatggactaaaacaggctcctcgagcatggtttgcaaggttaagtaaaaagttgactgatcttggttttagtggttccaaggctgataccttgttgttctttctgaatagaggtggtgtcactatatttgttctagtatatgttgatgacattattgtagccagttcttcagagagggcaactgcagctctgcttcaagacctgaaaggggagtttgccctaaaagatctaggtgagttgcattattttcttggtatagaagtgagcaaggttgagaatggtattgtcttgacacaagacaaatatgccaatgatctattgaaaagggttggacttaagatccataagtcaggttctactctagttagtggtttctctgatgcggattgggctggtagtttggatgacaggagatccacaggtgggtttgctgtgtttctggggtcaaatctagtatcttggagtgctagaaaacaagccacggtatctagatccagcacaaaatctgagtacaaggcaattgcaaatgcaacagcagaaattatgtgggtacaaactcttcttgcagaattggggattaaaagtcctcaagcagcaatgatctggtgcgataatcttggagcaaaatatttatcagcaaatccggtgtttcatgctagaactaaacatattgaagtagactatcacttcgtcagagaaaggcgcacagcactcgtgctgctgtttctcccagaaactttccacaggatagaaccagaggtgggcaacgcccggcggtggccctcgttggcggcagcggcgctcgctagcgacaaacggggaagtagactggcggagaggagctgggcattggcggcggggagacgggaagggggtggcggccggcggggagaggcgccagcgacgaatgccgcgtcagcggcagcgaccgctttcacgccgatatcgtatatcctcgctgcgctcgacgcggccatccacgatggcgtccgcgtcctctccatcttctccggccacgacgccggaaaccacctcgccagaatccaagcattaaaccgtcgccacgcaattctaccaagccacctacatgctgctcgtgatgacagccaccacattggaagccatcattgcggcggaaccatgcgcactcgccggtga

SEQ ID NO: 59347 - DNA, 636 bp, Oryza sativa
  Clone ID: PAT_MRT4530_60980C.1
ggccgcaaattttttttttttttttttgaaaatctaaaagacattatttgttcatttttaatatttattttacaatattaaatatcccactcacattggccacaattccccacaaatgactcaaaatagattattgccaatggacaacctcacaaattacacttatcctaaaagacaaagccatcatcttcatgcttgatcatatccaattattgttgtagagacggaatcgtgtagcttccacacttggagccaggctgtagtggcttcttgcaatagtcagcaacatacacgaccttctccatgcacactatcttctcaatctctttagtgaccttggagcataaacatgggacgtttgccttttggattacgctacagcatgcgtttgagggttctatctttgggtttgcaggattcataacatatttttgacactccataattaagtcctgaagatcacgactgcaaccctcatcggattttgtaccagccaccgtagccaataccaaggccataacccagaacaaaccataaagctttcccatggctattgctttagtataaagcagctaggatagacctttttcttgatatcaatacagtggctatattgttgtggtgtgtcccggccgg

SEQ ID NO: 59348 - DNA, 332 bp, Oryza sativa
  Clone ID: PAT_MRT4530_60981C.1
aactagtggatcccccgggctgcaggcagacacttacatttgcatggtgtgaacttcttcttttcgggttttgttgcaggtatgcactttatagtgtatgctactgtgtgtacctgttcttctgatatgccgattccatgtttatatatttatttaattgctgctccaaaatcatcagtgttaagtattaactagtataaaaatacatcaccattcaagccttggcaaactgatatgatgtgtactacgttgttctcatgtgagatctgtctttttttatttgaggcacaagtgcattgaaatggttgtcatgtaatgcactggtggatccc

SEQ ID NO: 59349 - DNA, 127 bp, Oryza sativa
  Clone ID: PAT_MRT4530_60982C.1
tgtgatgcgcatagcacaagctgactcaactcaagagttgctggtctcacatctgctaatttcagtaaacttaaggaggttgacctaaatgagacccccacaaggcaaaacaggaggttgcgagaac

SEQ ID NO: 59350 - DNA, 291 bp, Oryza sativa
  Clone ID: PAT_MRT4530_60983C.1
tgtggttgtgaagggccccatgaatgccgcagcctagctgataacctgtgccacgccagtgtgtggcgtggatgctgctgactgtgtggatgcgggaatgcctgggctgcaaagctgcaaacctctggttgggctgtgtggaacggtggccaatcctgagatgatgggtgatgctgaccctgagggtgactttatgagtggcaacccaaggtgacccaattgacccaccccttgggccaagtgttgctgtggtaaatggatgttttaaccaagtaattactggtttccgga

SEQ ID NO: 59351 - DNA, 314 bp, Oryza sativa
  unsure (1)..(314): unsure at all n locations
  Clone ID: PAT_MRT4530_60984C.1
gtccaacgtcgcgcgaggcgaggcgaggcgaggcgagaggaggagtggagaccaccgccgccgcggcgcgcgcgcgctcggagatctcgccgcggtagcgcagcgcgggtgccgtgccctgatccgtccgtgcgatgaaagagcccgcgcaggtgaggacggcgcggggcggcgcggcggatggggtggaggtgggggtggaggaggaggaggagccgccgcgatatgcgacggtgaagcaggaggaggcgaacgcggtgctcggggcggaggggtcccgcccgttcnccatgcgggagctcaaggaggaccac

SEQ ID NO: 59352 - DNA, 384 bp, Oryza sativa
  Clone ID: PAT_MRT4530_60985C.1
atgtggcacgtcaatgtggcaaccaagggtaaaaacagtgtggggcctactagtcagtctcacccttcctctctccctctggttcggcgtgcagcgctgagcacgcagtggcaccagtgcccggtaatcattgtcatcgccattgacgactatgagagccacataaaggcaacgacacgaaggtggttgtcccagtctagagccagcagttgtaggagcactcggggcaacaccgccgatggctgcggcggattaagcctcaccataaccgtggaggagcacggggggctggtcaatgtttggctgtgcaagtggagccgaacggtgttcatgggccatggcatgccggagatggcgaatgggtcaccattgcctggggattag

SEQ ID NO: 59353 - DNA, 365 bp, Oryza sativa
  Clone ID: PAT_MRT4530_60986C.1
tcgtaataatcagtaggtcgtcccagggcagggccttgctccgatccccaatccgtccctcgagcgagcagaggcgccgccgtcgctcgtcctgctgcttccgccgccaccgccgccgccgcctgcgccgatccccatccatcccgcgagcgagcatcctggattaggatgagttcgaagaaggttccattccaccgacataaggagaacgaagaggcgaggaagaagagagagcaagatgaagcggcacgtgtgtacgaggaatttgtggagtcattcaagggtgatagcacatctgggtcgaagtttgtccgaggaggtgtgattgatcccaatgcccaagctgagattgatttccaaggtat

SEQ ID NO: 59354 - DNA, 244 bp, Oryza sativa
  Clone ID: PAT_MRT4530_60987C.1
atgggagcgaattttccaggatttttcggcgttgtgctttcagtggtaggcgacgtatccgtcgacagcgaggcgcctatggtgacttcgtcaatctctccaggatttgctggctcagtcttcgaagatgtttatagggaagtggtcgcctaccgccctctgggagggctatttttaaaaatcgccatcccagagggcggcgaaagtcacgtggcagaggcccgttcgctctcgggcgacgccc

SEQ ID NO: 59355 - DNA, 373 bp, Oryza sativa
  unsure (1)..(373): unsure at all n locations
  Clone ID: PAT_MRT4530_60988C.1
aatgggaacccacatgtcattgagaaaaggggcaaaagttaaaagcccctttgctggagcaaaatgtttttcgctggcaaatttgtacaacctaaaaagaaaatctactagagggggctttcaatcaattggaattacacacacacacactatgaggaaaaatttttttctcacacttcaggttttgcaagcctaaaaagaggggcttggtcattcttttcaacaaactaatgcctttggatacgaattaaacncgcacatttagaaacggttcaaaagggaaaagtctagatttaaccccccaaaaactgggcaagaaaaaaaattttgacaacaaaacagaaacagcacaaaagatcattggcaatggcaa

SEQ ID NO: 59356 - DNA, 590 bp, Oryza sativa
  Clone ID: PAT_MRT4530_60989C.1
gaggaagatgagttcttaataaatcgctgtgacgggccttttgggatgtgatgaccagccagtgcgctgtcacaatggtaaggaaagagctgatgacacacaatgatccggaaagatgctcgccaagagctagttcaagaggctctgcgacggaactcatgcgacaacctaactgtattggttgtgtgcttctcatcagacccaccacctcagatcgaggtcccaagatttcgagtacgaagaagcatttcgatggaaggattgcatatgttaaagggagctcttgacagtaatgcctgagttctcaaaacctgccttctctggtaactttggttgtatgatcttgtttttctgttgggtccttgaaagttttgctctgttctttcagctataggcttcgaaataagttgtgtagaattactgaaattttgttgaggtgtaggctaatcattttgtgaggcgatgatttatctgtaccggcgccagcatttggttgttcacaatgtaattgaccataccagcattcatattctggtacaagtgccagttataatagttgatcagttttgttctaaaaaaaaaaaaaaaaa

SEQ ID NO: 59357 - DNA, 1023 bp, Oryza sativa
  Clone ID: PAT_MRT4530_6098C.1
atgggggacgcgctgtgggagatgctgggggaggagatggcggcggcggcggcggcggccggcgagcacgggctgccgccggggttcaggttccaccccaccgacgaggagctcgtcaccttctacctcgccgccaaggtgttcaacggcgcgtgctgcggcggcgtggacatcgcggaggtggacctgaaccggtgcgagccgtgggagctgccggaggcggcgaggatgggggagaaggagtggtacttcttcagcctccgcgaccgcaagtacccgacggggctgcgcaccaaccgcgccaccggcgccggctactggaaggccaccggcaaggacagggaggtggtcgccgccgccgccgccggcggcgcgctcatcggcatgaagaagacgctcgtcttctacaagggccgcgccccgcgcggcgagaagaccaagtgggtcctccacgagtaccgcctcgacggcgacttcgccgccgctcgccgctccaccaaggaggaatgggtgatctgcaggatctttcacaaggtaggagatcagtacagcaagctgatgatgatgaagagcccagccagctactacctcccagtgagccaccaccaccccagcagcatcttccatgaccttcctccggtcccattcccaaaccctagcctcgtccccttccaccatgatctccccacaagcttccatcctccattgctgcagcacagccatgcgaacagcaagaacagcagcagcaacaatggcggcttcgtcttccccaatgagccaaacaccacaaacagcagcgataaccacatttcttgcaatggcgccatggctgctgctgctgctgctgcttttccttccttcagctgtgctagtactgtcactggcaaggggggcccaccggcgcagctcggagtcaacgccggtcaacaggagccaccgccacctacctggatggacgcttacctgcagcacagtggattcatttatgagatgggcccacctgcagtgcccaggggcgcatga

SEQ ID NO: 59358 - DNA, 186 bp, Oryza sativa
  Clone ID: PAT_MRT4530_60990C.1
atggaggcttctttgaatatgacctttgcaaatgagaaaaagaatctccttgagaactctgatcgaccgttcgtcggcggtggagagcttcggcagcggcggcggcagggcctgaatgttcgccttcaacaatggcatggagcatcaggagagcacaggccgatttcaagagaggagatgaactga

SEQ ID NO: 59359 - DNA, 1759 bp, Oryza sativa
  unsure (1)..(1759): unsure at all n locations
  Clone ID: PAT_MRT4530_60991C.1
nnnnacaaaaggaaaacatgtgtaaaattcactatagttttgaagatgcgtacactgataaaagacccaaacgaaatgggaagaaaatacaactgttacacgtacgtgcaacatctaagtagccggccgattgattaatccggcccaaattgacacaaagaatgaacaattaaacgggcttccaaaacagaattggttggccccaatgaacgcgattcatcgcgtcggcgccgtcgtcgccgctgcacttgtattaactacttgccttttgccggtggacttgaactcgagtaattagtcgccttcgctgacgcagtggaattactcgtcgtcgctgacgcagttgagtagctagtcgccgtcggcgcttctgcagttgaattgctttcctttttattagccgatgcagttgagttactactcgccgtcggtgcttccgcggttgagttgctcgacgttgaagctgagctagatgacgttgatgtcccgtctggtgggatgagccaggagtcgccgtagatgtagtgcgtgccgatgaagggcttggcctgctcctcggtgaggtcgagcgcccaacccaccctcttcttggcgtcggagccggggccggtgcacttgaactcgccgtagtagatcccgctgctctccggcttggcgatgttccagccgtcccaacccacgggcaccacctccttggacatgtcggtgtaggcgtacaccacccgcgacgattccccccatgctcgccccaggtagatctgcccttctcccttgatgctgcagttcttgaaggagaagccgctctcgagggcgccctcgatggtcttgctcctctgctgcgccgtcagcacggacacctccttggtgacggagacgatggtgcagccctcgtagtacgatctcccgaacccgaagatgaagtcgacgctgcccatgatgaggcaatccttgatgtagtggaggcccttgtggtcgtacagcgtgtcctggccgccgtcgatggtgcagttgtagatggccgccttggtgccgaagaggcggagcgccaccgcctggccgccctcggcgccgggcttggccatcggcgcgtcgttcttgaacacgacgccatgcgccacgaagtagtcggactcgatggcgacggtggtgctccccacggtgccgacgggcttgccgtccttgcccctggtcgccgccgtgtcgctccaggcgatcaccgccgggttcttggggtcggacttgaaggtgatgaagggcttgctgaggttgaggaagatcttctcccggaactcggcgccgggcttgaggtcgaggatgacgcgcttcttgttcccctcggggaccttctccagcgccgccgtgatggtggtgaaggtggtgtcgcccggcgtccccttggggtcgatcacccacgtcaccttggcctcctccgccgccgtcaggttcgcgtccagcttcttcccgccgagctcctccgcggtggccatggtgtgcagcgccttcttctccacgtactcctcctggttcatcgccagccacttggacaaccctttgccggagccggaggtgctggtgatgagcttgttggctggctgctgctgcccccacgacggcgccggcagcgtcgccgccaccgccgccactagcagccccaccgcggccacggcgacgttgggacgatccatcgtcatcactttattagttactagttgctgcaactgcagctgcaactgcagcttcttccggacgcttcgatcat

SEQ ID NO: 59360 - DNA, 345 bp, Oryza sativa
  unsure (1)..(345): unsure at all n locations
  Clone ID: PAT_MRT4530_60992C.1
cgccgcncgccgccgnncgncgccgccgccaccgccgccgccccgagggagnngcccncgacccacagcgggcaggccggngcccaggncgggaacgcgngccgggagcncnancgccccgagcanggcanccancccganggacggagggggggggacnannaccgcgggggaggggacgangcnnncaacaccccccccagngagaccggngcngggaagcccgccccccgggccgnccgcgncggcccngggcccaccgngannggngaggcgaggaccggngacnaccggcagcncnnccacccngggcagcncagcngnggcaaggggggcgccggcaac

SEQ ID NO: 59361 - DNA, 270 bp, Oryza sativa
  unsure (1)..(270): unsure at all n locations
  Clone ID: PAT_MRT4530_60993C.1
nacgcatcccctcccccatcctccctattccctccccttcctccgccaccccctcccgctcctgaggcgacgaccaccttcgagagcgacgacgacaacgacgagaaggtccccgaagacccatccgccgccgcggcggagaatgcgtcggagggggaggaggaggaggaggaggaggaggagcggaagcgcgggtgggcggacgtgatggggatgcttaacctgcggctttgggggatttggagtccggccgtggagagcgccacctag

SEQ ID NO: 59362 - DNA, 1600 bp, Oryza sativa
  Clone ID: PAT_MRT4530_60994C.1
atgggggagccgccccctgccggagaggggagcggcatgatgatgccggccaagcgccgccgcgagcgggtgttaccgtcgcggttcaaggactcggtgctggtgctcccgacggccgccgcgaagaagggcaagcccgcggaggccgcggcggaggggggagttgtggacggggagctctacgacgtggagctggaagaaggggatcccggcatgctgtggaccggcgacgagcggccggtgcagacggaggaggagctgtactgggcgtgcaggaacatcaggagaagcagcacctccacctccggtagcttcagcagcagcatcttcagcggtagcagcgcggtgacgtccttgagcaatgccggcggcggcggggggaatgggcggccggaggggaagcccacggtggtggtggagtgcaagccgaagagcgatggcggcgagaggaaagaggatttctactggccggaggaattcgtgctcggggatgttgtgtgggcgaggtcggggaagaagtgcccggcatggcctgcgctggtgattgatccactgcttcatgcgccaagggtcgtcttgaactcctgcatcccgggtgcactctgcgtcatgttcttcggatactctaatagcggcctcagggactatggatgggttaagcaagggttgatctttccctttgtggagtacctagataggtttaagggccaaactttatataagatcaaggcaagcagattccgtgaagcaattgaggaggctttccttgctgagcgtggcctttttgagctcgaaacggatgaggggtgctcactagagaagtctgtcaatgaccagtccatccctgacgggttactggaagggtctggttctaataatgagcaggaatgccaatcggaggctcaggttgttggcaaatcacctggatgtgatatttgcggtaatcgtcttccatgcaagatagcaagcaaaaagaagcaagcgggagaacgattactctgtaggcactgtgataagctattacagtcaaagcagtactgtggcatatgcaagaaaatttggcaccatacagatggtggaaattgggtttgttgtgatgagtgtcaaatttgggttcatgtagaatgtgaccagacatgcatcaagatggaggacttggaaaatgctgattatttctgtccggattgcaaatcaaaacgcaagaatatctccagttgaacaaatgaacacccctaacagttcagagtgagttaatttccttgaaagtctgttgaaactgtgatagttggaactaatatttgtcatttgtgcagacatgtagtatgtagggactagtgagggtggtacactggtactgaaactgtattgtgatatggtcaaacgggttctggtgccgtcatgttgttttgttagacgtgctttagaaaatagcattgtccataaactgtaatcactattttctctgtgacaatgtgacctaccaactagaaagcctgtactaggatccctatccgcaatgtagtatccacaaaggcacaaaccagcgtgtatgttgtacataaaccatgcatgcatatatgttgtaaatattaattatttg

SEQ ID NO: 59363 - DNA, 1351 bp, Oryza sativa
  Clone ID: PAT_MRT4530_60995C.1
gggctgcaggaatgcgccacgccctctctctcgcttctgccactgctggctgtgctgcttccctagctcctcggttggatcaaagagaagagttaatgctgatggcctccgaggcgtggctgtcgccggcttcccgcctcttccaccctccccgctcctccaccgccgccttcttctccgcttccgggctcccccgcctgcctcgccgctcctcctgtgcactcgcaacctccacgcgtgggcggcgcctccgccttggcgccaccgatcagcagcagcagcaaggcaaacaagatggtgatgaggttgtggacagcaacgtgctccagtactgcagcatcgacgggaaggggaagaaggccgagaagaggtcgctgggtgagatggagcaggagttccttcaggctcttcaggccttctactacgaccagaaggccatcatgtccaacgaggagttcgacaacctcaaggaggagctcatgtgggaaggcagcagcgttgtcatgctaagccctgacgaacaacgcctgctcgaagcctccatggcctatgctgccggcaaccccatcatgtctgacgctgaattcgaccaactcaaactcagattgaagaaagacggaagtgacattgtcaccgaaggtcccaggtgcagtctacgcagccgaaaggtgtacagtgatttgaccgttgactacctaaagatgttcctgctacatgttctcgcaactactcttgctctaggactgttcttcttcatcgatgagttgactggctttgagatcaacatattcctttcggtttcattttcacatggtttgctgctttgcctctaatattgttcatagcacagtcgataactaatgccatagtgaacgacttcttaatcctcaaggggccatgtccgaattgtggcgctgaaaacctttccttcttcgggactatcctgtcagtgtctagtggcggtgaaacaaacaaagtgaaatgtgcagattgtagcacggagatggtatatgactcgaaatctcggctcatcacccttccagaaccatcgcaatgaaatgaatggtgaattcttcaaggtacgatgccagatggagagatgcaaacaaggaggtgatcaggtaggaaacaacaaataaaatggaattattgtaacggatgggtgttcacaaattgcatgcagagtgtatatatactacagtaagaaatgtagatcgacttctatactactaactattaagcgctgttgtgtacagtatataaaatgtagtacatacatgtttactgatatctgactcaactgaaatactacacacatatgtgtgttggagatagaaaaaaaaaaaaaaaa

SEQ ID NO: 59364 - DNA, 4049 bp, Oryza sativa
  Clone ID: PAT_MRT4530_60996C.1
atgttgaatttagcacatatttccttgtttctgtacacagatccgaagtcaggctctgtacggttctacgattatttgatggagcatgatatgacagttgaagattttattagaactaatgggttaggggcaagtggattgatagagaccaataatcaaggtgtatccacttcttctgtgtctgattgtcggtcctgcgagcatgtcgagaatgggagcccttccacggcccctcccttttgggactctgatggtgaagatgacgatcctgttacctcagggcctagaccttcagatttatttgggcgatatacttggagaattgaaaacttttcaaaggagaaaaaaagagaaatgaaaagcgaaccatttgaagctggtggttacaaatggtacattctagtttaccctcaaggatgtgatgtctccaatcacttgtcattatttctatgtgttgctaatcatgacaaacttctcccaggatggagccatttcgcacagtttactatagctgtgggtaatcttgatccaaagaaagttaaatattcagacaccctgcacaaattctggaagaaagaacatgactggggatggaaaaaatttatggagttgtcaaaaatccaagatggtttccttgttgatgatgttcttgaaatcattgctcaagttcaagttatcagggagaaagtggatcgcccatttcgttgcctcgatcgcccttatcgacgagaattactccgtgtctatatgaccaatatagagcaaatttaccgacgctttgttgaagagcgcagaagtaaactttgcaagctcattgaggacaaaatgagatggtccagtttccgtgccttctggcttgcaattgaccaaagcacaaggcatcgcatgtcgacagagaagagtgatgtcatactgaaaataatagtgaaacatttctttgtggagaaagaagtaacttcaacgttagttatggactctctgtatacggggttgaaggcgctcgagtgccagagcaagagcaagagcaagaaaggcataatagactcagtggattttgtagagctgccagtgcctatggtccatgttgatgtggacatgtttgttttggctggtgatgtcatagctttgcttgagagggcagctttagaacccttgccttgtcagcctgtgtctccaaaggatgacaaatgttcccagagccgcactaaggatggcagttctggagaagttaacaaagtttcgattgaacgtgaagaaaggcgcctaactgaacttggtcagaagataattgaaacatttgcactatcccatatattcagtgggattgaggttgcctatcaagaagctgttgctttgaagaggcaagaggagcttattcgcgaagaggaagaagcctggctacttgaaaatgagatgaaggggaagcgtggcagtaccactgaaaaggataaacgtgcaaagaaaaaacaggcaaagcagaagaagaacaatcgtaaggttaaagacaaagatagagaagaaaaatgtgattcaaattttccagaaagaagtcaagatgaaaacacaattcatgacagggaagactctaaacaggcaggacaaatatccatgaaagtagatacctctgaagaaggtgcctcagatgtttcagacaatttagatgggtcaattgagattcagaagaaacattctactatggagaataagtcattgtcatgttcatctgagtctgctactatgaacaatgcgcaaggcaaaataaataacttgttagaaagtaaagatcagatatcacgcaacagagggaaagctcgcagcaggagcacaagcaatatgaacattaccgaggatgtggatgatcttccatcaagcacgactagctcagacaggaatacatctggctgtggcccagctccaaagcttgatcaagagactgttctacttaccttgaaagataggcttcggaaacttgggcaacgtttacatgagaaggaaattgagggcaggaaactactccaggctcatttggaaaagaaggcagcagctgagtcagcaactggttcatcctcatcactctcatccaattctttagaagagactccagaggttctgaagagcccagatcaatcttcagtaactatctctgatgctgatattaatgcatcaccttcaaagtttggtgccagtaaagaagtcactccagtaacaccaaccaccatcctaagcactgagcctgtgcctactgttgcttccaccctgagtaaagatgagccagttttgtgtgaagatcatgtatcatgttcaactccacaaattgatactccaatcacctcaaatccaccgcaagttgttaaaactgttacccttccttcaggcatgctgcttgttggtcacgctattcaagcaccgtctagatcaccggcaccacaggttgatagggtctctaaagctattgctgctcccaccaaatcacctgctccacaggttgataaggtctctatagctgttccgactccctcaaaatcacctgctacacagggtgagaaagtcgctaaagctattctggtgcccccaaaatcacttgctccacaagttggaaaggttgctaaaaccatcccgacaccaaaacaacctgcacctctggttgacaaggttacgtcacttgaccctgtatcaaagcaaatgtcttccacgtctaattcagaagcccgagaagctattcttcccaaaaaggctgcagtcctgtctgtttcccaaactcctgcaatatcgaggccttcaagtgctcctctgttccaggtaccaagatcaactttaccacctacgccagcagttcaagttcccccaatgctttcccgctcaatgaccctggctgggcgatcgaggaatgaaccatccccttctgttccaagttatacagcacagacctaccgaaatgccatcattggtaagagtaatcttgatacagcatcagcaagtcttgatcattcaacttcttttggccaaaacgtcgcactttcacagccactatcatcgtatgcatcagcagcatctgccatggtacctccggtcggaaggaatggccaattaccaggtaaacagggcttcatgtttgggcaaggaaagtccgaagcaattgataactggaacccatggaaaggtgatagtaatgctaacaaatacatgtggaaagatgattctccttaccatcaaatgaccaagggtgatgcacatactcaatcttggagggacaattcttatcagcaagcaggatgcagtggaacaggggaacaaggcgaatttggggggcttcaatataggcagttccagagggagattccaacaaaccttgtctcataccaattgccagggccagttggagaagaatttccacaccttgatatcatcaatgacttgcttgaggaggaacaaagcagtgggagtatggcagagcctaccctccacggatatcatacattgggcttgccgtattcttccagaggaaacttagtagactctgaagtgacttccataagtagttctggccggttaaacttggccgatcattactatgacgagggctacccgatggcttatgacaggctgaatgctctttataggttaagagaagggcaaaattccacattggatgcttattccaatggaaggatggactcgattacttcaaaaccttggctacataacttctcaaatccagcagtgaaccttggagttaacccaaatggattttcacagcaaatggggaactacaccaatttagggagtgggagggtgaatggagaacatctgtatcgccatgccaacgggcaatggtgatgcctgtacacaattgataataaatcctgctataagttgtcacagaccatggtggcagatgtaagcgtcgccatggccaccaggttgtaacttttaattttaaaggggcaaagaaataatacattgtgtaaagcattccagtgtccgttaaattttctgtcggctgctttcatagttttatggttcttctttatttcttttttggttggagt

SEQ ID NO: 59365 - DNA, 718 bp, Oryza sativa
  Clone ID: PAT_MRT4530_60997C.1
ttaaggaagctgtgaaattacatatttgcccctgtgtcttctcctcatcggcgcaggaggaatccccaaaaatcgaccggcctccgacatgccgccgcggtgggcggcctcctctccgacctccgtgcccgtgtctcccaggtgcgggcgtgcacgccgccacccgccgggatcccctccctctcgtttttgccatcccatcccgccgggcctgcttgaccccgacgcctccttcctcgagctctcccaggtcggaaacgccggccgccgcgccaaccaccggggctcaccccaagacgccggcgaggccctcctgctccaagcaccgtgctcctgtgccttctcctcgtcaagccgcaacatcaagccgccgccgcggaaagaaagaggcggaaacgccggccgccgtgccagccgccggggctcacccccaagacgctgccgccacccatactcgtcggagccgtcgccgccacccctccttgccggagccgccggcagcaccattctcctgagccaccgaaaggtctctaaacttgcagatcactcgtttagatccttcaacttgttcagttgtgtcaccacggtctccaaacttggatttgaatatcatctggggaccgggatgacacagtcgaacaagtttgaggacctgaacagtcgatttgcgagtttatggactgggatgacacaacggtacaagtttagggaccggtaa

SEQ ID NO: 59366 - DNA, 987 bp, Oryza sativa
  unsure (1)..(987): unsure at all n locations
  Clone ID: PAT_MRT4530_60998C.1
gcaacgcggccacctaccatctccgtctcgtccaccctactctaacccctgatctcctcctcttccccaaaatctctctcaccttctgctccaacaaaatctctcacttcccgtgcctaaaccctccttggaatcctcctatacagcagcagcagatcagatcttcgactcctccaagaagtgaacaatcaatccgactggatctggggatgatggaggaggacagcttcatcaacaacgatgttggggaggaggtggtggttgcgaacggtggtgacggcgaaggggtcggggggatggcgaggagcgacgacggcggcgatgggggagngggggaatgtggtgcaggacccgccacttagcttaggtgaggtgcgagggatcctggagcagaaccacacgctgatccaagagatcagccaaaaccacaaggcccgcgatgccgatcgcctcacccgcaacgtcgccctcatccgggatctcaacacaaacatcgcccgtgtcgttgacctctacgccaacctcaccggctcctctcactcccacaccacatccgacgttgccagcgccaccaacaccaacgccaccaatagttcctccccgtccgccgccgccgccacagctgaggtgagcaagcaaccccacaccaccgacaccgacgctaagtagagcacctacaactccagcaattcgatctcttctcctttcttttatgtctagaattttagatttactgagcaacaggaggagaggaggtagatttggaatcctgctaaacttttttctcttaaatttccgttttctttctctcgatgtaattcagcgatgagatagacatggacaaccgtaaacacccaacttatcagagatcaaagaaagatgcagacatggtaacaatgccatgccagcacccctcattgtagtgagaatggtagggacttttccgaccgtgccaatgcaaatggtgtatggttttttcaaccaagt

SEQ ID NO: 59367 - DNA, 915 bp, Oryza sativa
  Clone ID: PAT_MRT4530_60999C.1
atggtggcggccgacacgggaggcgacgggaacggcggtccgacgacgcccgaccatggcggagccgcggccgagggccggcaagacctagggaaaatattggagcggttagggagagaaataggcgaccggagcggcgagaataccacgccagagaggagaggaatggtggggctcaccggcgaccgagagataccccgttccggtgggtttccggcgaagaggggcggcggccaaggtcctcctcgtccttgcggagctgagggaggcaacggcgcgagtcgacgtcgaccgaagcggcggcgcgacgcggctggaggcggtgaaaggggcggcggcctcgggtgtgcggtgggagtggtgctcgaggggtggagagggggaaataagaggcggccggacttccccttgcggtggcgaagctggcggtggcggtggctcggcgcggcgacggctgtggcggcgggaaacggcgaccgaagctcgccggagtgtggcagcgcgtgggtgcggcgtggggagagcgagggagagtatgccgggctcgggaaaaatggggaaacggacaaggggagcacggggattgattttatagctcaaaggggcgaggagagggccggggagcggcggatttcgaggggaagtggggcggcgtcgtgggggaagagagagacgcgggaggcggcgacgtggccggattttgcggggagagtggggggaaacggcgcggacgtgggcggcgaggtcccacggacaaacgcgcgcgcgcggggtggaggaggtgggcggaaacggcggcgacgtgggcggttttcggcggccatggcggcaacggcagctgccggcctgaggttggggatgaccccgacaggtggggcccacctgtcggcggctcggggagaggagggaggatga

SEQ ID NO: 59368 - DNA, 436 bp, Oryza sativa
  Clone ID: PAT_MRT4530_6099C.1
cccacgcgtccgtagccactctacctatcctttttgcgctcaggagcttaagacgtgaaccacgtcctactcgactgtgtgttcgctcgatagacctggcaccgtgtgttgtcgccccttagctggactgccctctcctcctccgtggcatttcgcttcaagactagtgaccgtcttctagggcttgcttacctgagcacctttgctccggttttgactacttggtcctcctgatctcttggcggttgcgggaggagtgaaactccaaggttttcgacttgacactccgctcggtctttgtggttttagagtccatcaatttggaaggccgtctgtggtcttccgtaggcattgccgcttttgggggtttgctgagagtgtagggtggctctgcctcctccctcttgttgtcctggagtagccttttttcacaata

SEQ ID NO: 59369 - DNA, 738 bp, Oryza sativa
  Clone ID: PAT_MRT4530_609C.1
atggctttagatggccatatggctcgaggcccacagcccagcccaaggcatgccattttggctcagctcgataatcgggccatgcttgggctgcaccctcagcacggatggcgggtgggcggtcgctggagttgtggacctggaggcagcggcggtggcttgtcacggtggaccacgattgtggtggcgccgtcgatagtgttgcgcagccatgcacaggaggtgaacttcgtccgctactgccgacagatcgagcaggggctatgggccatcactgacatcttcgtcaacctgcagcgcgacgcctacttcggcgtgccaccgctgcgttcccgccgactcccgtcgggatgcctcatcgctaacatggccaatagctactccgaggtgaccagggtcgaacacatggaggtggaggagaagaacccgatcaacgtgctctaccgtgacctcgtgctgagcggcgatgtattcggggcgcactgctggctcgccgcgctccagcgcgcgtgcgaccgctacgcctccctcgtcgcgctcggcgtcccgcaccacatcaccggaggtatgcacacgctatgccacgcacctagcccagatccagagcttcgaatcggccacgacgggcggctagaggacgggccgcaaggaggagctgctcctgcgcctgtcgcccgaggccatgactgggcagtgtgggctggcacgacacggcccgacgtgttggtcgagccgtga

SEQ ID NO: 59370 - DNA, 246 bp, Oryza sativa
  Clone ID: PAT_MRT4530_60C.1
atgtctttcgtgattagtctcacccttctcaccataatagaagatgctataactggtaataatttgattagctcctggtttggaatggtatattcctggtttggagatagaactgtgcagccgggatggttgttcagaatggatgggcctatacaacagggtatgttgtatagtgttggattaatattgtttaaatacttaactgttttaaattctcaaatgtttgctaaatgctgcttttgcaaa

SEQ ID NO: 59371 - DNA, 379 bp, Oryza sativa
  Clone ID: PAT_MRT4530_61000C.1
gaagggggatcctctagagtcgacctgcaggcatgcaagcttgggaggacagcgccgccaatcgagggaggagggcgccgacagggggaaggaggacggcgcggccgaccaggggagggcgccgacggagggaaggagcggcgctggcgcgttgctgatgagaggaggaggacaaggcggtggcacccacgcgcgctcgccgcctctagcacttcctgcgcgcgtgcaagcgcttgctgctcacggcgtcttgatggcgtgcaaatggagcagcaagcagagccacacgcattttgaagcagagcagcaagtggagcggcaagcagagccacacgcagcaaccaacgcgacgattccggagcgagtgttgccatcttga

SEQ ID NO: 59372 - DNA, 1263 bp, Oryza sativa
  Clone ID: PAT_MRT4530_61001C.1
tcagcaaggggcagccggcgccgacacgcgggccccacacgtcagcggcactaagaaagggagagggggcggctggcaggcgggccccacacgtcagcggcacagggcgccggtccaccgtggaccgagaccaccgaggcggtccaccgtcggtccacgggaaccgacggcccggatcggcccaaagccgatcggacggccacgaggcggcgcggctggggcacgggcgcggccgagaccgacccggccggccatggcacggcggctacgcgcacgcggccagacgaccaccggcgacggcagcgcgtcgcggtggcgggcatggggagcggcggatggggaaaaaggagagggggcggtggggattctcaccgaggacggcgacggcgagacgaccacggggaggtggccggcggcggaaaagatggcggcgaccggcacgggaggcgacgggaacggcgttccgacgacgcccgaccacggtggagccgcggccgagggccggcaagacctagggaaaatattggagcggttagggagagaaataggcgaccggagcggtgaggagcggtggtttgagacgacaacggcggtagcggagctcgggtcgacggcggaaaggtggttgcggcgatgaaatggggaaacagagcagaggccgaggtagagcttggcacagcgttgccgacgacgcaaacgacgaggtgcggcgacgactaacgcggcagcagcggccggctgaagacggcggcggcgggggagagaggtggtgcacgaggcggcggtgttccagaggcggagaggggaaatggagtagaggccgggctgcggcacggcgccgcgaagccgacagtggtggcggattggcgcggcggtgggtggagcggcggaatcggccggccggagctcgccggaaagcggtggtgcacgggagcacggtggggaggtgtgtgagtcgtttatataggtcccggagggggagaacgtggccgggagaggcggatttgaagggggaagaggcgccggcgatgtgggcgagtggggtggttcggcgccggttttggagggggaaagtgggggaggagagcggggtcgtgggcggcgaggtcccacggacaaacgcgcgcgcgcggggtggaggaggtgggcggaaacggcggcgacgtgggcggttttcggcggccatggcggcaacggcagctgccggcctgaggttggggatgaccccgacaggtggggccgcgggtcccacctgtcggccaa

SEQ ID NO: 59373 - DNA, 1629 bp, Oryza sativa
  Clone ID: PAT_MRT4530_61002C.1
ctcttcggcccctttggccggttcgtgcccctgctgtgccctgcccggcgggtcatgcctgccagtgccgggttcttcacaggtgcactccacggttccaggaccggctagcggcctcctgctccgctcattgttcggcacaacgcgccccacctccccgttgtcttgcgcctctagctcatcttccaagttggaattcgttgccctgccatagcagccgcttccatctcatgatgcaggtgagtaagagaggattagtaacagtatcaacagaatcttctcaacagtcaacaccacaatgtcaagatcgtttgtaccagagtagacttgacgcagggaaaaactaccgatctgagatatttgggtagtggcaagcaaagcatgccttgatcaccagttcaccacccaagaccaagagcacaagtccttttctttgtaaggccggcctttggtggcatgcacgagcaccataactacagagttctagacagcgatttctcaaactggccatgaggaaaaaaccaacaatgcttcaccgggcaagaatcacttcgggtagagaatgtcgtagtgaccaggacggtagagcaaagtaatgtaaggtttctcagcagcagcagcaccgtccgatgaattggcctcagggctgaaatcatggtggttcacacttatatttccagcatcacatgagcttctgtctaggtacatcacacggattggcacacccaacgcatctgatagggcaattatgtggacatggtcactttcctcgcccatcggctccacggaagccttgcagaactgaaccacagtcgaatttgtcaagccagagatgaatggttcgaagaactcggccctcctttggatttcaccagaggtgacaaacctaaagaacatgacaacataatcagaaaccatctgatccctggttctttctagaagctcttcggcccctatggaggattcatgtccctgcagaacactttccagctgatcaatgaatatagagaagaaatcttcaaaggtgaactcaatgtatccaagatctgcaagagtcttcttgcactgctcaattttttttagaatgcgctcaacctcagctttgtcttgtgtctctaggatatgttccaagtaggaaaacataaagcttcgataaaagcagtttccatctcctcgtgtccttcttaaagcatcatactgttcaccaagcaactttattttctcctgtaaaatggggctgccagactgaaactcggcggctaaagtggagagaggttccatccagaggatgaaaatggacacaactgatatgaacttgttcagccaatctccattattccaggcaccacgacacgattcagacccatttctaccacatgaacaaatcttgtccccgacgtacggcagcttgggcccctcgggcgcgcggaggtcggggtcggggtcgccgcagcacgagtggtagtagtccccgcccatcgagagctcgaccgacacggagtccgagcaccctccaccacctcctcccccaccgccgctagggttaggattcaacccctcccccccccctcctcctcccccctcgacgaccggctcgggggccgcggctgccgccgccgcctcccccat

SEQ ID NO: 59374 - DNA, 277 bp, Oryza sativa
  Clone ID: PAT_MRT4530_61003C.1
gaactcacaagaaccaaccataaaaaaataaactcaaacggacgaaatatgtagcatgtggaattttccaaatgtctaccgaaaaacttctctcctcaaaaacacaatcttgcaagcagaatttggaggttttaatatcgtcgaacccggcaaagccaataagaatcggatgtaactttttctgtagatgtccgtggatatattattttcctgattctgagtccgtatgagaaacgggccgtcgaccaattctcatgtttgacagcttatcatcgaa

SEQ ID NO: 59375 - DNA, 375 bp, Oryza sativa
  Clone ID: PAT_MRT4530_61004C.1
gctcatacacatcgaggaaagatgaaaggggcataccctttacccttcgatatacgttgcatatcgatatggcatacccacgcgcatgcggatatttcctgtatattctaaggaaacctttcgcgtaatttacagtagggaagaatcctacccggacagaactgggtcgttgacgtattgtatagggtctgatacctccaagttctacttggagaccaccagatctgcgatataaaaaggaccccccggggagggcttaagacatcgaatctcgaaaccaacacaacccacacagtctacgaagccggagcctacaaggagcaaagccattgagatccagtcgaacctactcgactaagatctcgctggatccga

SEQ ID NO: 59376 - DNA, 2263 bp, Oryza sativa
  Clone ID: PAT_MRT4530_61005C.1
gcgcgcgcgccggatgggggagggggtgaaggcgatgctggcgaagccgatccagctcgcggaccaggtagcgaagcaggccgggtggcagtgcttccgggcggagtgcatggacctgcggtcgcgcgccgagaagctggcggcgctgctgcggcaggcggcgcgggcggagctgtacgagcgccccgccgcgcgcatcatggccgacaccgtgcgggcgctcaacaaggccgccgggatggcggccaggtgcttccagagccactcccgcctccgccgcttcttcacgctcaacccggtctccggcctcccccgcaccctcgccatgctcgacaccgcgctcgaggacgtcgcctggctgctccgcatctcgtccccgcacgccgacgctggcggcggcggcgacgacgacgactacgacctccacggcctccccaacatcgcgcagaacgagcccatactgttcctcatctgggatcacatcgcccggctccacaccggcaacctcgccgcgcgcgcggacgcggcccacaacctcgcgtccctcgcccgcgacaacccccacttcgccaagctcatcatcgaggaggacggcgtcgcgcccctcgtcaagcttctcaaggacggcaccgacgacggccaggaggccgccgccacggcgctcgggctcctcgcccgcgacgaggagagcgtggataagcttctccttgccggtgtctgctccgtgttcgcggccgccttgaaagtgccgccgatgcgcgtgcaggccgccgtcgcggagtccgtcgcggctctcgcgcatcacaaccagaaatgccaggacctgctcgcgcagaccaacgccgtgcgtcacctcgtcggccacctcgccgccggaaccatccaggagcacagtagatactatgttgcctggaccggctcgaggaacatgaacatgacatcccttcactccgttgtgcttgccaagacgctcagcgtgcatcaaggtggctctggttcccctgccaatgaaccgccgagctcgtcggaatatccgggtagccagcagcaagcaggaaagaaccagatgcaatcggtggtgcaatctgccatggctgccaagaccacggcgaacggagccacggttccacccggctgcaggcaccagctgacccccaacggctcgagcggtcgtggatcgcgcgaggccgaggacccggccaccaaggctcacatgaaggccatggcggcgaaggctctctggaagcttgcccgcggccatgtcggggtctgcaaaagcatcaccgagtctcgcgcgcttctctgcttcgccaagctcctcgagcaaggcgacggcggcgccggcacggacctgcagttctactccgcaatggcgatcatggagatcacccgcgtcgccgagcacaacctcgcgctgcggcagtcggcattcaagcccagctcccctgcggccaaggccgtcgtggagcagctcctccgcatcgtgtgcaagggcgacgtcgacgacctgctgcgcccgtgcatcacctccctcggctgcctgtcgcgcacgttcacggcgagcgagacccgcgtggtccgcccgctggtggagctgctcgacgagcgcgagctgccggtcaccaaggaggccgtggtcgcgctcaccaagttcgcgtgcaccgagaaccacctgcacgtgagccactgcaaggccatcgtcgacggcggcggcgcgcggcacctcgtccagctcgtctacctgggtgaccaggtgcagatcgaggcgctcatactgctctgctacattgcgctgcacgtcccggagaacgaggagctcgcgcaggccggagttctcgccgtgctcctctgggcgtccaagcagccacacatggtgcaggacctgcgcgtcgacgcgctgctcccggatgccaagggtcggctcgagctcttccagtccagagcatctcggtgatcaactggtgacggcattggcggcgatcaccggagttcaagaagatgagttagccctcgatttactgcaaaatcgaagtagatctatgtcgattgttcattagtagttccaaattcttgttgttttgttgttagaatgtatatatcaccgcttcaatttgttgctttgtctcaaagatgtcagtaaaagtattgattagtattgaattgtaattcaagaggcttttaaacagattatatgtgtacctgtaaagttggacaaaatttagctgattgtttttcttgttacttctaaaaaaaaaaaaaaaaa

SEQ ID NO: 59377 - DNA, 2059 bp, Oryza sativa
  Clone ID: PAT_MRT4530_61006C.1
tgtcacttcgtcgctctcgaggccggcgttttaaacgccccccccacacggctcctcgctgccgacacctgtccggtttcctctcctcgcctcgccgcggcgcccgcgtcctcctcaccaacgccagagctccacatcccacctctcctcaggttcccgtctctgatccctcgttgcgttacggggaagcaggcgtggtggttgctccccgtgcggagttttcgattggtttggttgggtgagtttggtgctggggtgttggggattggttggttggagtttggagatggattttccgggagggagcgggaggcagcagcagcagcagcagctgccgccgatgacgccgctgccgttggcgaggcaggggtcggtgtactcgctcacgttcgacgagttccagagcacgctgggcggggtcgggaaggacttcgggtcgatgaacatggacgagctcctccgcagcatctggacggccgaggagtcgcacgccgtcggcgccgccacgacgacgacggcgacgacggcgtccgtggcggcggcggagcacgcggcggtgggggcgccgcccgttcagaggcaggggtcgctgaccctcccccgcacgctcagccagaagaccgtcgacgaggtctggcgcgacatgatgtgcttcggtggcggcggcgcctccaccgcgccggccgccgcggagcccccgccgccggcgcaccggcagcagacgctcggggagatcacgctgaaggagttcctcgtgcgggccggcgtggtgagggaggacatgtcggtcccgcccgtcccgccggcgccgactcctacggcggctgctgtacctcccccgccgccgccgcagcagcagacgccgatgttgttcggtcagagcaatgtgttccctccgatggtgcctccgctctcgctgggaaatgggctggtctcgggagctgtcggacacggcggtggtggtgccgcgtcgttggtttcgccggtgaggccggtctcgtccaatggcttcggcaagatggaaggcggggacctgtcgtcgctgtcgccatcgccggtgccgtacgttttcaaaggtgggctgaggggaaggaaggcaccgggcatcgagaaggttgtcgagagaagacagcggcggatgatcaagaacagggagtctgccgcgaggtcgcgccagaggaaacaggcatatatgatggaattggaagctgaggtagcaaaacttaaggagctgaacgatgaactccagaaaaagcaggatgaaatgttggagcagcaaaagaatgaggggttaggtggcagcatttaatgagccgacaagttggaccgacagcaaagagaatttgccttcggaggactctgacgggtccatggtgatcgaagctaaaggcctagttacctgtaactagaacacagtcctttcaatgtgagcagtgatcatagtagttgtaggatggtgaagctgaagacctggttacctgtaactagaacacagtcctttcaaagtgagcagtgattacagtagtagtaggatggtgaagctgccagttacctgtaactagaacacagtcctttcaaagtgagtatagtagtaggttagttcagaatcgccagatcgatctgcccttgtaggccaaccattagtccgtgggcttgtctcttgggcggacaggctgcctgagatattcactcgataggttttagttgtctgagttatatccaagcattgtatgtaacctatttaaccatggtgcctgctacctgtattgtattttgctgctgtaggaacctatgtcggtgttaccatcttgttcttaatttgtgtacttctcttgccattttggataagatgtatctgaacttatacatatgtacttttccttgccattttggacaagatgtatctgaatttacatgaacccattttggacaacgtgtatctgaatttatatgaaccatggcactgggctgtgtgtgtatactgtatagcattgtgccaaatttgtgagaaacggattgcttatcatggataacacttggacaagatgtatctgaattt

SEQ ID NO: 59378 - DNA, 144 bp, Oryza sativa
  Clone ID: PAT_MRT4530_61007C.1
atgcgtctctggcttcccgttgttatactctacctcgagctggagtttgacctcccaacaaccagggagatcgatcttctttccaagcgcgtggaggtgacgctgatggagcttcgtcaagaaagagagaagaaacaaagataa

SEQ ID NO: 59379 - DNA, 433 bp, Oryza sativa
  Clone ID: PAT_MRT4530_61008C.1
cccatgcgtacagcgaagctagcccagggcgactagcggtggtgacgaaatggacgaagtgctcctcggctgagagcccagaccagagccaccgggaccgacacagtcacggacatgggcatgtcatggggggaggtcaagcgcccacgacgctcgaggtcactcaggtgcacatgacccggaaccggataccaggtaagagttctagaagatagagcgtcgatgatgcacttcgtaggtgatcgggctcggaaagatggcgctgcaggatgcatatacgaatccttcgctggaggcagaaatgagcttccaggacatgttccatgggagggccacaggatgctggatgctgaaggctgctgacggtcgaatgatgagggaagtgctcagcttgttatcttccacctatacaacgatcggcatagacgtatga

SEQ ID NO: 59380 - DNA, 558 bp, Oryza sativa
  Clone ID: PAT_MRT4530_61009C.1
gccagggttaacttaaattgtttactgttaggtgtcaattagcttttcttttgttgataagctggtgatccaaagaaaagaggacatgtggatctcgtgtaacaattctctttgttaagtgttaattttcatttgcatccaagtgtgctagccacccaagtagagctgaaattctttttgtcatggatagatgagtgctgttagtgggatagatagcccctcgtcaaaggtaccaagtgtcaatcaggggatagttctatttggttgaagcagagttgacaagtaatataatacaattggtgtttgattagcgtatacccttcactcctacagaaatagtgagttaaattcgtaggcaaagatagggcaatcctactaggcgatccaaccagatattgaattctgtcatggatcaaacctagtctatattgaattccgccaggaatcaaacccagtcaatcatttttgttgcattgaaccttggatgctctcttgtttctcttatcattgcactgatttttcatgtattagccccatgacatgtagactttagtcctt

SEQ ID NO: 59381 - DNA, 288 bp, Oryza sativa
  Clone ID: PAT_MRT4530_6100C.1
gcgttatgctcattccactgattttacataggttattaatttctatacaagggatgggaggaaaaacctagtggcgaggccaaaacagagaaacaattacacgagtgacacacaaagagggacagaaccaagggaaaagataaaaacaggaaaattgggggcgctaggaaacgatatggtcgtcttgtatgcgatgaacacaagaagggggaaaccaaacgggtaagattggtggaacccgcttttaaagatagggaaagggggaaaaaaggggccgaaaaaggggaa

SEQ ID NO: 59382 - DNA, 1124 bp, Oryza sativa
  Clone ID: PAT_MRT4530_61010C.1
cccacgcgtccgtgcagttgctggcgttgcacacgactacgtaatacgtaggcgagatttctgcagcgacgatggagctgaaatccgccgtgctcgccgtcgcggcgctgtgcctcgcgctcgcgctcctgctcccgcgcgtcgcgctgtcacagaggctagctacagcggacgcccccgcgccggcgccggcgccgcgccacgtcgacctcgccgagctgctctccctcgccgggccgtacggcacgttcctgggctacctcaccaagacgggcgtgatcacgacgttccagagccaggccaacgacaccgccgccggcgcccccggcgtcaccgtgttcgcccccgaggactcggcgttcgcggccgtcggcggcggcgccgcgctgtccaacctcaccgccgaccagctccgcacgctcatgctgtgccacggggtgccccggtaccacccgctctcgtcgttctcggcgctggccgcgtcgggcccggcgcccacgttcgccggcgggcagcagtacgccgtgaacgtcactgacgccgccgggacggtccgcatccagtccggctgggccaccgcgaagctcgtcagcagcgtgtactcgacgtcgcccgtggcggtgtacgcgctgaacagggtgctgctgccggagcagatcttcccgaccgcccctaaggtcgcacccgtgccggccccggccccggcgccggtgcacggggacaaggcgaacgacggcgcaccgggcgcaggcgagcttggcgcctcggacgtcaagagttcgtcgtgccgggttggcgccgggcgccttctcgccatcttggctgtaatggtatccagtttttctgatgatatagtggtgtgatttttttttttttggcgtgggtacatatatacagtacttccctcgtttcataatgtaatactttctaccattaacatttatatgtatgtgggcaatggtaaaaagtcttacattgtgaaacggagggagtaatgtttatgttttttgtcaattcgtttgtcgcatctctgtatgtaaacattcattttgcatgaacatatctgcaaataacattttctggcagtttaaacgaaataagattctacaaaaaaaaaaaaaaaa

SEQ ID NO: 59383 - DNA, 1392 bp, Oryza sativa
  Clone ID: PAT_MRT4530_61011C.1
ccccaacccaactctcatcacacacaaaaccaataaaccatcaccacaccgtcctggtcgtcgtctccaaccaaccaaattcttgcacacgcgcagctcgagccatggccggagtgagcaccagcgtcgtcggcctcaagcccgccgcggcggtgccgcagtcggccgcctcgccggtgccgaagcgcgtgcacgtcgctgtgccgcccaaggaggagcagggcggtggcaggcgcgccgcgctgctgggtctcgccgccgtgttcgccgccaccgccgccgggcaggggcaggccaaggccggcgtgttcgacgagtacctcgagaagagcaaggccaacaaggagctgaacgacaagaagaggctggcgacgagcggcgccaacttcgcgagggcgtacaccgtcgagttcggcagctgccagttcccctacaacttcaccggctgccaggacctcgccaagcagaagaaagtcccattcatctcagatgatctcgagatcgagtgcgaggggaaggagaagtacaagtgcggatccaacgtcttctggaaatggtgatgatctgatgatgatcatcgatcgattggccagccatgaaaacattcctgtacctagaacctttgtgatatgacacgacaagcgttcaattatgcatgcagttgtgtcatatcacaaaggttctaggtacaggaatgttttcatggctggccaatcgatcgatgatcatcatcagatcatcaccatttccagaagacgttggatccgcacttgtacttctccttcccctcgcactcgatctcgagatcatctgagatgaacgggactttctgcacgcaacaacacaagaggtttcagattaaatcatgtagtactgtcctccgttccataaaaaaacaatttagtatcggacgtgatacatcctaaacgaggtttggtttttgataggacgaagagagtggaatttgtgaaagtaataaaagtgatgagaccttctgcttggcgaggtcctggcagccggtgaagttgtaggggaactggcagctgccgaactcgacggtgtacgccctcgcgaagttggcgccgctcgtcgccagcctcttcttgtcgttcagctccttgttggccttgctcttctcgaggtactcgtcgaacacgccggccctggcctgcccctgcccggcggcggtggcggcgaacacggcggcgagacccagcagcgcggcgcgcctgccgccgctctgctgctccagcttgggcggcgccgcgacgtgcacgcgcttcggcagcgccggagaagaggaggccgccgcggcgggcttgaggccgacgacgctggtgctcactccggccatggctcgagctgcgtgtgtgcaagaatttggcctcgtgc

SEQ ID NO: 59384 - DNA, 315 bp, Oryza sativa
  Clone ID: PAT_MRT4530_61012C.1
aagaaaaccagaatgtttaaaggatcaccaccagggcaggggttgccattgtttttcacaaacaaaaacagggtttgggagcccaaaggcatacttttacagggtacatgacaacgggttatcagtactacaaaacactggggagctgagcaaactggaacatttggaacttttgggggtggcacaaaaaactactggcaaaaacatgcaagcattttttttttcttttccaccctaaaatggggagacaccggaggtggcgaatcggcgcgaaatgcttttgccaacaatggggactggccccatggttgacct

SEQ ID NO: 59385 - DNA, 393 bp, Oryza sativa
  unsure (1)..(393): unsure at all n locations
  Clone ID: PAT_MRT4530_61013C.1
gtatgttcctgtttccttttccttctcagattcccaccatggtgaatgctactttgttatgcaaaattgaaccagctgtagttttgggaatgtttgcctacgttatttcagcacaacttgagccattagacacaaatttgcattgaagcaacacttgaaaaggatcttcatcatctacaaatatttagtagtctattacacccatctggtgtacagtttgttttgtcattggagtgcttacnagatagttagggtggatcaactgctctttccatcctaggggagaaggaatttcacactattatagnctatacaacttctttgcngcggcctttttgatgccagcattttggancaattcttttctggaactcaccacagttgtcttaacca

SEQ ID NO: 59386 - DNA, 2507 bp, Oryza sativa
  Clone ID: PAT_MRT4530_61014C.1
attggcatacatgttttatctgcaaagggcgttcatactaccgatgcttttgttgtccggatcactctgtttgtcgtagttgtgtgaaacaagcagaatttgtcccagtcatgaggcaaacaatgggattttgcaacaactgtttgaggatggcaatcatgattgagaagaacgtcgatgttgactctgatggggagagggttgatttcagtgacagggagacatatgaatttttgttcaaggattactgggacataattagagaaaaagaagggttgacattggataatatgcgagaagcctatactcttctcagaagtggcttaaactgtaatgaactatcagatatggagaaacttccaaatagtgagcagagttcagatgatgatttcttgggcaatagtgatgacgacgatgagccagtttatccatctgtttcaaatggaacatcaaataaagtgaaaaccatactgaaggaaggaaaaacaaagaaacaggtttatgtgggatggggttcaatagaacttattggattcatgtcatcaataggcaaagatacatcaaaacctctagatcaatttggtgctgctgaagttgtgaagcagtacattcggcaaaacgatcttttgcagaaagataagaaaaaacaggtcctttgtgatggcaagctttggtctctgtttaggaaatcaaaactgaaatataacaagatatatagcttgttggaaaagcatattgctgaaaatatcacacccgaggatgaatcacttgatagttccgaggacaatactgattcaattatggaaaggaaaagtcggatcatgaactctgaattgagtactccagaagaggtgtctgaaagatacaggagatgctttgcttctcttgtccgtgaaaacattaaattaatctatttgaggagaactttagttattgatctgctaaagcaaccggatacgtttgaatgtaaagttattggctgttttgttagagtaaagaatgaccccagagagtatagtcgccacaagcctcaaaaactataccagcttggacaggtgacaggcattaggaaatcctcggaagaatacaagataagggacatatctacagatatccttttatgtatttccgacatgtggtctgatgtcaaaatttcagtgttgtcagatgaagactttgaggaggaagaatgtgaagatcttcgttcattgtcccggaaagaaccttctaaaaggcaaactgttgctgagtttgaggagaaagcgagaagtatgcatgcagacataatgagtcattggatcaacaaggaacttcagagactggaaaaattgattgaaatggcaaatgagaaagaagtcccgcgaattattccagatgtagaggatagtaaggactctggatttctagttatggcagcaaacaaatcttctcaaaggaatacaggtttgtttttaggactcctagaattgtttcgtgttcttctgcttgacaatgaatctggacggggtcacatcctctcctaggttgagtttttttgggacggagggagtatgctctaactttaaaatcgatggcagtggaacttcactatgaaatagctcccactatgttctatatgcatgtctagattgcatcattaaggccctagaatatgtgttcgcttagcaagttagaagtctctatcctctggtgtgggctaataagtgagcaaaccattgactgttgttacatggcataacctcaagttttaatgctggtagtatttgaaactggagtaaatagcatttgcctactgaaatctggcactatatcttgtaagaaaaatcctttggttggccactttccatgtttttattgttcttattaaatgtgcaggtagcaaaggcgatgctgatgcacctggaacgtgtttagaaaaggtcatcactaaaggtttgctcttactgcccgtccttccactagttgttccaccaggcactagctgtggagacatgactgttgatctggattctgatggaagtgaggaccatggtacgagacaacatgaagctaagcctaaattatgcagtggtcagaaagctgtcgaagcgaaggaagaaatctcagagcacgcaagtgtctggtattacaatgatcctcaaggtgacgaacaggggccatttccgctgcggattctgcgtcactggtcgaaagctggatacttcaaggaagattttagagtctggagaacaggccaatcttgtgactctgccatcttgctcaaagatgctttgctgctgacaagttagcactaatcaggagcctcactgtttaaccaactatatgtctactagatgtatctacatatatggcagaatgcaggagggcctcaattcttgtcccatattgcccctctgtagtattgtgggggaggccagtcaggcggtgtatgtatatatttgtctgacactagaatgccttagccaatttttggatcccaggcaccgtgccttttggccttcggatgt

SEQ ID NO: 59387 - DNA, 494 bp, Oryza sativa
  Clone ID: PAT_MRT4530_61015C.1
gcacgaggcaggaatcagctccctgaacgttgtcgtgaggaatatcctcgatggcggtgtgaattcttcgagaaggattgatcggcacgggaaaactctatcagatctcatcttgtgccagaatgttgtcttgcctccgtgatcgcagatatctatctggttctgtagcttccgaccggggcttttagaagcttgaaaatttggcatgcaaatagccagaggtgaaccgatccctttacctacatgaagctgcattcgcttattgtatgtaccatgagaaaaataccaagaaccgtcaagtatgtgcatttccaagacataccttggttgctatattagttgatgagattttaatgagttccaacaaatcttcgatgtcatctctcattagtaagtaccattccaaattagtcaactctactttgatatcgagtttgtgaataatgccgtttggattgagctggctaataaatcaattcagctgttgctacgtt

SEQ ID NO: 59388 - DNA, 143 bp, Oryza sativa
  Clone ID: PAT_MRT4530_61016C.1
ggaggaaaatcggggggttctggctgttctattattacctaaattattctggacaatttgatactggtcatgacaatggcttgacatttttgacagaacgaccacattggggggtttcttttttcccaacgctggacatggcg

SEQ ID NO: 59389 - DNA, 1512 bp, Oryza sativa
  Clone ID: PAT_MRT4530_61017C.1
atggcggcggcggcgaggtcgcagggtctctcgccggggttcaagttcaatccgagcgaccagatgctcgtggagctcttcctcctgccgtacctgatcgacggcgagctccccgtccgcggcctcgtcttcgtggaggacgaccacctggggggcctgccgctgccgccgtggatcctcctcgaccgccacggccgcggcgacgaggacgaggcctacttcgtcgccccgatgggtgccggcgatggggcccggcaggtgcgctccgtcgccggcggcggcaagtgggtgaagcagaggtcggaggggaaaggtgaggtggtggtggcccccggcggcgaggcgttcctgtgggagaatttcagcctcaacttccaccgcgacgatcgccggagcggcagcaccgggtgggtgatgcacgagtacatcgtctccccacccgccggctccgccgtcgccgcctcccaccgggccacccacatcgccttcaccggccacggccagaaccgcaagcgcgtccccgacggctacgtcctcgtcctcgacgacgccgtcccccccgccgccgccgctgcagcacctcctccggaatccgagcagagcaatcaagaggagcaagaatacgctgcttacaccgaccaaatccagcagcagtgcttcgtcccggagcagcagatgagcaaccaggaatacttcccggaggcggcggcggagcagagcaaccaacagttcttcgtgccggcggaggagcagagcagccatcagttattcttgccggcagaggagcagagcaaccaacagttcttcatgccggcggaggagcagagcagccatcagttcttgccggcggaggagcagagcagccatcagttcttgccggcggaggagcagagcaactaccaacagttcttgccggcgttggagcagatgacgcagagcaaccaagaatttgcttacggcgagcaaagccagtgctacattgtgccggagcagcagcagctgagcaaccaagaatacgcttacagcgaacaaagccagtgctacatcttgccggagcagcagcagctgagcgaccaagaatacgcttacagcgagcaaagccagtgctacatcttgccggagcagcaggagctgagcaaccaagaagcagaatatgctttcgtctgctacgacgagcagcagcagcagcagcaacagagcaatcaagaagcagaatacgctttcgcctgctacgacgagcagcagcagcagcagcagcagcaatacttacatggagatctcacatcgtggcaagaaccctttgtgacgtcgtcgtcctcgtcatcacagcagtttcttggtcaggaacagctgctgcctgatggcctcctcctcgacggctttggcgagatctcacagcagcagggcgaccaagaatacgcgtactgcgaggaaagccagtgctacatcatgcctgaacagcagcagcagagcaaccaagaagcagaattcgctttcgcctgctacgactag

SEQ ID NO: 59390 - DNA, 265 bp, Oryza sativa
  Clone ID: PAT_MRT4530_61018C.1
ccgccaacgctcgggctccgtccgctggtgcccctctggccgagctctcaccggccgcctcgtctccctcaaccttgccgtcgagcaacgccgccaccgccactccctcccatctccaacccacccagcagatgaggaggcggatccgctcctcgccggccttccttgttcctccctcgccgtcgtgccctcgccatcgagctgccctaccgctctcgtcatgccaccgatggccgacgctgaggaaggactcatgcgccgttaa

SEQ ID NO: 59391 - DNA, 323 bp, Oryza sativa
  unsure (1)..(323): unsure at all n locations
  Clone ID: PAT_MRT4530_61019C.1
gtcaagttcaangtgcgctgctccaagttacctctacacctctgcgtcttcnacgccganaaaggcaacaagctcaagcaatcgctccccccaagtttgactgtccaagaagtttaagcatcaaaaccanaacatgctgtttgtttcancaagaatgcttgctcccgttcgcattaataacttanatgctgaaaattttatctgtcatattttccatgttacacccanaatttatgtgctgaaacctcnantcangttgcgaagttactcccttctggananaactacaatcgtactgtccnnaaacacctgaaatttgctcc

SEQ ID NO: 59392 - DNA, 428 bp, Oryza sativa
  Clone ID: PAT_MRT4530_6101C.1
tttgtgttttttttttttttggggttcttttttgtttttatgtttctcttgttttttttatactttgcttgtttttttcttctcgggaccaaaattggtgcaaggttgggggtacatgtgcgcacaaacagtggacgatgatgggcccgggggacccccgggcccccaaaagtttggccggggggcccgttacggaggggaatgaccaccctgccaaaacaaaacccaggcgcacaacagtgggcgggaaccaaaggatttttaccatcccgaaaaaaacggccccacgggggctcgaaacttggcaccagcgcggacggggaacgcaccagcccccggttggccaccataagcggggcggcctcgggatggccccccagaccgaaagggggtaaaatcctggggctaccccccgccggacggggggc

SEQ ID NO: 59393 - DNA, 487 bp, Oryza sativa
  Clone ID: PAT_MRT4530_61020C.1
cccacgcgtccggatcgatcctgtagccctagccgccaggctcctgcgccctgccgctcctgccgcgtttctaccaccaccggcgccgtctctacgccgccgccgttggtgcagtgtcgccggtcgccaccaccaccgtcgccgctgtgctgctgctccgttttctgctgctgttcggtggattgatttgcagagcagcaggtttggttctgcttcttgatttgtgtttgtctccagcgtggtgaagtcccaatttctcctactgctgtgtgtcctgaccagctacttcgtgagttgctgcagtagccaacaactagggggcagggcaggaagagcagagaagtcaaggaattgggaggaagagaggcaaggtgggggattttattttccaagatttcacaaattgatctcaaagttgatttttctcacagtagggctgaagggtagctccttttagtcctagaaattcaattgcacgtgggatcga

SEQ ID NO: 59394 - DNA, 159 bp, Oryza sativa
  unsure (1)..(159): unsure at all n locations
  Clone ID: PAT_MRT4530_61021C.1
gattgcaacaaacatntgggattgggattgattgatgccaannggaggtgattacacgcactggaaccaactgaatgcccaaaanaaaagggccggccgctctaagatatcctcgagggcccaagcttacgcnnacccagctgtgctgggacaaatggc

SEQ ID NO: 59395 - DNA, 326 bp, Oryza sativa
  Clone ID: PAT_MRT4530_61022C.1
tgtatatcgttaaaaggccatgctcgaagttcaggtgtcgttagtcacctggaaaagccgttattcaaagggcgttctacgtcccaggtcaatgtgcgtgatcattcccgcaatactacctgtcctggaagaaaccagagcatgaaggatccccatatacatttcattcaagaccaatgcaaaactccagggtgacccacccttgcagggaagaactcaatattccgtcgcccatcccagtcgatgtgatcgctaatgcttccgcatatcgagggacaagcacgaacccttaagaataataggggagaagagctcggccttcactc

SEQ ID NO: 59396 - DNA, 279 bp, Oryza sativa
  Clone ID: PAT_MRT4530_61023C.1
aagagccctgggaaggcagaacaaaagaggggggactttaattgcaattcacatgcccccccgaaatggctgccagtctacactagctgcctcctgagacccatcatcaccccagctgcaacccaaacacactgcgaaccaaacaaacattgccgcgttcagcacacaccactctttggacaaacgacggattttgtgatgaacacatttgaaacagaaagcatggtttccaatttacacatcttgtaccgtaaacaagatcaaaaggaaccaattttc

SEQ ID NO: 59397 - DNA, 219 bp, Oryza sativa
  Clone ID: PAT_MRT4530_61024C.1
tcgctcacgcgtactcattcctatgccaagagaacccagggagagagctctagctggggggctggccttcgatctcaccgccggccgtgattaagacgaatcttcgccaatcctatatcttacacgtttcatactcttctcaccatgccgaatattattccttttgaattcatcctctcttcgagcagccaatctacgggaacgctgtctggcccaccg

SEQ ID NO: 59398 - DNA, 379 bp, Oryza sativa
  Clone ID: PAT_MRT4530_61025C.1
ttttggttctaaggcgggcagggggtttgccttttatactgatagagtaggagaaaatggactatttacaggactgaccaacaagtttatttcctttgaaactcataatgaacagggattgagttgggcgcttgcctgagaattcatgctagtatgaacacagcttcccaatcagccagtacacagtaatcacagtggtggcgccagctcatgcatactttgtcaattgtcacatgctgttgcatatcttgtcaatagccaaataccacctgtttttccagcatttgtagctacttccctcttcaaagtctgaagtgagccacttttgctgcttcttcataagcttcatgtctgcttgacaggttgatgcagtagttta

SEQ ID NO: 59399 - DNA, 273 bp, Oryza sativa
  Clone ID: PAT_MRT4530_61026C.1
atgaaacaaccaaattggagcaatgatcaaatttcagttgttggatgcttcacgataaaagtttacccgcgaccactcgcgctcccgtgtcgtccacgcctgggcgaccggggtcaagctcggccaggctcggtagaagctcgagctcggctcggtaaagctcgcgagcttttgctcaggctcgagttcggctcgtttggagctcgagccgagctcgaatcgagcctaggacgagccaagctcgagctgctcgcgagcctcgagcttttttga

SEQ ID NO: 59400 - DNA, 1549 bp, Oryza sativa
  Clone ID: PAT_MRT4530_61027C.1
atggacgcgaaggacatcctcggcctccccaagaccgccttcccgtccgtccaggagaagaagccccgcgcgcccaaggagccgcagcggaagcccgatggcgtctcgcgcgaggtgtacgcgctcactggaggggtggggatggctccactcatgccgaccatcgaggcttcgcacctgaagcggcgaccagctgttgagaaggagaagatagcatggcagtggctacctttcacgtcctctgcacggactgacaaccttcaactttaccattgggttagagttgtaaatggtgctccacccactggtgactatcactttgcaaaatacaacaagaaggcggatgttctcaaatacaccgatgaggagtatgagaagtatttaaccgatcctgcatggagcagggaggaaacagataaactatttgaactatgtgaacgctttgaccttcgcttcatagtaatagttgataggttcccaactgatcgcagcatggaggatttgaagagccgttattattctgttactcgtgctcttctgattgctagagctcggtcatttgatgaagttgctggtaatccccttgtgaaggaaacattcaatgctgctcatgagaccgagagaaagcgtgctttatctgcacttctctcccagacaaaacagcaagaacgaaaggatgctgagattttagcagaagcaaaacgcattatggaaactcgtgctgctagcaaacatactgaggaagcgggagcactggcacactttgataatgttgatggtgtatctcccttgagcaacacacacccattgtcaactgctacacttccagctgcagcagtgaataactccatacctgcttcactgcgaatggtgaatttgaagcccaaggtcccgacgaaagcagtttgcgtcgagcatcttgaactacggaatgagatacttacactgcttaacttacagaagcagctgcaaaataaagaagctgaagtttcagctaacagagaaaattcctttacagaggcaccaagcacacctaagcgtgctaatagagatgttgatagaccctttgttcctgatactgttgggtttgcaggtgagagagcaggcaagcgggaccacaagcggaagatagtgctatggatcaactccattcttgcttggaagcttcccggcgtgcactttcaccaagagtttgctcccgtcggtagaagccgttcttggcttttgtctgtacagtgcatctgccctgagaaggttttcttcgtactcctcgttggaagatgagacgaatcaggtggaagcagctgctggcgtcactgagaagtgatcgccttgagcccttgacgtctccccctactcaacgaagagtgtaactgtttcttttgtttgtttgagctgtagctaccgtttgtaaaatgagttatctgacaataccgtgtttgttcaagtagaactgtaacacaactgtttacacccaatcaatcctgtaatcttggacaatttaacgaggaaccgcgatcccaatgcaaacctgagcctggtttccatg

SEQ ID NO: 59401 - DNA, 1012 bp, Oryza sativa
  unsure (1)..(1012): unsure at all n locations
  Clone ID: PAT_MRT4530_61028C.1
cttttgctcggtcttttttgcttgcttcgcaagaagaagaagaagaagagggcggcggctatggcgaggcggctgatcccgtcgctgaaccgcgtgctggtggagaagctggtgcagcccaagaagagcgccggtggtattctcctgcctgggacgtccaagcatgtcaactctggacaagaggtggctgatagtcctggctaacaggtctaggttgcgcctcctttcctttatcctctcaatgcacgcgactcttgtcccccatgcctatccgtctcatcccacgctttccttctgcttgtgtttgaccccccgtttttctagtgcgcgtttcttaattcgtttcactcttgcacgttgcacaggctccttttccttttctttttctaacttcttctgtctcccgccttctctcgtctttttcattcaaattacgatccctcactgacagcatccccggagtgcttttctttcccaaccaccccttaatcactgtctgatcttaagcactctcttcatcccatctgctgtccttgcctcctatatatctttcctctcgtccttatcctccacccctctccatctttcccttgtattgagctctatccatctcctcctccaccacccctctcctcctcatcactcgcttcactcttttctatgtgcacacttctctctatcccctcttatacctttttataatcactattaattgctttctttttcgttattatcttagagtaagtgcattccttctcttctcctctaccgctgtcttacctagcatctgctcactgtctcattttgtcatgctataatatactatcttcctctctagatattacaggagaacttaggcgtgtgtatacctatggcacagcccgctctctcccctccctccgcccgactgctcgtgccgcattaagatatacagtcaaatcagccccgtctcaagtgttatatgaccgtccgcctctcctgctcctactcttccaaggctacactagctacn

SEQ ID NO: 59402 - DNA, 1636 bp, Oryza sativa
  unsure (1)..(1636): unsure at all n locations
  Clone ID: PAT_MRT4530_61029C.1
atggacgcgaaggacatcctcggcctccccaagaccgccttcccgtccgtccaggagaagaagccccgcgcgcccaaggagccgcagcggaagcccgatggcgtctcgcgcgaggtgtacgcgctcactggaggggtggggatggctccactcatgccgaccatcgaggcttcgcacctgaagcggcgaccagctgttgagaaggagaagatagcatggcagtggctacctttcacgtcctctgcacggactgacaaccttcaactttaccattgggttagagttgtaaatggtgctccacccactggtgactatcactttgcaaaatacaacaagaaggcggatgttctcaaatacaccgatgaggagtatgagaagtatttaaccgatcctgcatggagcagggaggaaacagataaactatttgaactatgtgaacgctttgaccttcgcttcatagtaatagttgataggttcccaactgatcgcagcatggaggatttgaagagccgttattattctgttactcgtgctcttctgattgctagagctcggtcatttgatgaagttgctggtaatccccttgtgaaggaaacattcaatgctgctcatgagaccgagagaaagcgtgctttatctgcacttctctcccagacaaaacagcaagaacgaaaggatgctgagattttagcagaagcaaaacgcattatggaaactcgtgctgctagcaaacatactgaggaagcgggagcactggcacactttgataatgttgatggtgtatctcccttgagcaacacacacccattgtcaactgctacacttccagctgcagcagtgaataactccatacctgcttcactgcgaatggtgaatttgaagcccaaggtcccgacgaaagcagtttgcgtcgagcatcttgaactacggaatgagatacttacactgcttaacttacagaagcagctgcaaaataaagaagctgaagtttcagctaacagagaaaattcctttacagaggcaccaagcacacctaagcgtgctaatagagatgttgatagacgcggtgttcctgatactgttgggtttgcaggtgagagagcaggcnngcgggaccacaagcggaagaccactggaagatttatagatgcacctccctcaccaccccagtccaagaggcctcggaagttgaaagcatctgattgatgagtttcagattgagctgcatagaatttcaacaagccaaaacccctgatagtgctatggatcaactccattcttgcttggaagcttcccggcgtgcactttcaccaagagtttgctcccgtcggtaaaaaccgttcttggcttttgtctgtacagtgcatctgccctgagaaggttttcttcgtactcctcgttggaagatgagacgaatcaggtggaagcagctgctggcgtcactgagaagtgatcgccttgagcccttgacgtctccccctactcaacgaagagtgtaactgtttcttttgtttgtttgagctgtagctaccgtttgtaaaatgagttatctgacaataccgtgtttgttcaagtagaactgtaacacaactgtttacacccaatcaatcctgtaatcttggacaatttaacgagg

SEQ ID NO: 59403 - DNA, 171 bp, Oryza sativa
  Clone ID: PAT_MRT4530_6102C.1
aacgcccacgcgtacgacacacgtccgactagatctagatcgcgagcggctcgcctgccaagcagtacgccgaggagtacgaggcccaggagaaggagctggtgcaacttaagcgtgaggctcggatgaagggtgggactatgtcagccctgacgaaaagttgctgtttgt

SEQ ID NO: 59404 - DNA, 178 bp, Oryza sativa
  Clone ID: PAT_MRT4530_61030C.1
ggtggttatgactgttgtggaggtagattcatccacaaccatcattagggagcaatcaggagctgccacgtatggggtggagatgagagccggccatggcggttcagctgacccttgggtcccactcttctccaccccctttcaccaggggttgacaagtgggccctatggcggttga

SEQ ID NO: 59405 - DNA, 1812 bp, Oryza sativa
  Clone ID: PAT_MRT4530_61031C.1
atggcggccgaggcgaccacctcgtcgtcctcgtccacccaccacccgccccacgccaccgcggcggtcccggcccccgccacgcggcacgaaatccaggcggccatcgccaaggccaccgagctgcgcgcgctccacgccgcgctcctccagggccagggcgccgcggcggccaatgccgggagcgcgtacagccgcagccccgccgcgtcgctcatccgcctcccgcctggcgcgtcgcccgcgctctccaaggccgccgccgccgccgtcgccgaggactaccccgtcttcactccgacttatgatgaagaggcacttagtggaatgaattatattcgccaagacaacaggagcctatctgagaactggagcggaatcggcttggatcatgaaggtcaggaagatgaggtggctttctcagatttcgacaatcacaacacattctcttcatcaaacagtgagctccacttttcttcatcgaacgagcatcgacggaacagaatgggatgcagaaaccatccatccttccttcagcctgctctctccaccgacagtttcatcaaatcggctagcaagaggacagatttggcagaattcaaagctgtgactacttgcaacacctgcaagcctgcaacaatcagtaggcaccctgaagccgatgtcgatgctctcaagaacctcagcagtagagtgccgccgcagtcaaattaccacccatccatctgctcaaggccaaggcagaaggggccacatattctctcgtggctcttacccaagtcaaagaggaaagtgaagtcggacatgtcgccaaacaccgtcgaatgcgagaacatgtcacagcttcttaaggaatggggggtgttttctctagaatctctgaaaaaggagcttgctgaggccaatgaaaatagggatgctgctcttcaagaagctgcagagatgaaatcgtcgttaggagaactgaccaccaagctagtgagcttggaagggtactgctcggaactgaagaaggctttgaagcaagcgaccagcaccaagaacatgatatctcactcgaaaagatcagctagatcacttgctgttagtagagacaattctatgcccgtcagtcatgaagtaatggtggagggtttcttgcagatagtatcagaagctcgcctttccatcaaacagttctgcaaggtattaatccaacaagttgaagatgctgacaacggactatctgataagctaaacttactcctacaaccttatcaagtcacgctaaccgacaagcacccgaaggtagtactgtatcatctcgaagctctgatgaaccaagcaatgtatcaagattttgagaactgcacattccagaagaacgggccacccaagtatctcgacccaaaagaagatcgtcaggagaactttgcttcatttgttgcgcttcgcaacttgagctggaatgaagtcttgaagaagggcaccaagtaccactgtgaggacttcagccgcttctgcgatcagaaaatgagctgcattgtctccatgctgaactggtcatggccatgggcagagcagctgctgcagtgcttctttgtggcttccaagtgcatctggttgctccacctgctggcattctcattcagcccacctctggtgatattgcgcgtcgaggagaaccgggcattcgatcagatgtacatggaagacatccatcttgacaagcaaaggtcacagaacccttgccaagtaaagatcatggtgactcccgggttttatgtccaagatcgggtgctcaaatgcagggtactcggcaggtacagctag

SEQ ID NO: 59406 - DNA, 549 bp, Oryza sativa
  unsure (1)..(549): unsure at all n locations
  Clone ID: PAT_MRT4530_61032C.1
gcgcctggagctcgccggaggagttccgcccggagaggttctttccggggggcggcnaggcggaggcgatggacctgaggggcggccacttccagctcgtcccgttcggcgccgggcggcgcgtgtgccccgggatgcagttcgcgctcgccaccgtcgagctcgcgctggccagcctggtccgcctcttcgactgggagatcccgccgcccggggagctcgacatgtccgacgacccgggattcaccgtgcggcggcggatccctctccggctcgtcgccaagccggtcgggtcagaagacgacaagtagccgaatagtgtgatctgtgtgtttttttttttttttgtctgggagacgggagaccgcgtggactgtgttaatttaggaataaataaataatgggccgaatcgcgcgtgttaatcgctgggagctttttgtccagcccatcttggttctagtttgcaagttcatgtgtgtgcagtaattttggcaggaataagttcatcagagttccctttaacttttggcgaaagcggtggtgatgcc

SEQ ID NO: 59407 - DNA, 389 bp, Oryza sativa
  Clone ID: PAT_MRT4530_61033C.1
gcgtgtgggtttttttttttttttttttatatggacacatgtatacctgctggcctacacatgtatcatcattcagtcttcagttggataagttgctgcgtacgttgcttgcgagctccggcgccggccggacgtacgtacgtaagacgatcggggggggaggagttagttgtgcgcctcggggcgggacatggggtccgggttctcgtggggggttgagcagcaactgaggcagccgccgtgggatccgtagccgacgtagcatccgtgatggcactgccgaccggggtagccggcgccggcacctccgtgaaggacgaccctacggggtcgaggagccatgggtggacgcccgggccgtcagcagtatgctaattcttatgttcatg

SEQ ID NO: 59408 - DNA, 2944 bp, Oryza sativa
  Clone ID: PAT_MRT4530_61034C.1
cccacgcgtccggcaagatctgcagcgacagccatggagatcgagctctcacccgtgctcctcctcctccccttcctcctcctcggcttcctctacctcaccggcggcgtgctccgctccggcgggaacgcgcggcggcgtctcgctccggctcctcggggactgcccgtcatcggcaacctgcaccaggtgggcgcgctgcctcaccgcgccctgcgcgcgctcgccgcggccaccggcgcgcctcacctgctgcgcctccgcctcggccatgtcaccgcgctcgtggcctcgtcgccggccgccgccgccgcggtcatgcgcgagcacgaccacgtgttcgcgacgcggccctacttccgcacggcggagatcctcacctacgggttcaaggacctcgtcttcgcgccctacggcgagcactggcgccacgcccgccgcctctgctccgagcacgtctctcagcgccgccgctcccaccgatacggacccatgagggagcagatggagatcgagctctcacccctgcagcacctcatcttcctagtgcatacaagttagctcatcatcagcactagtacagtactactagacagttgtacgtacaagtagaagtagctacccaaccttgggagagatggagattccagtgattgatctcaaggggctcgccggcggcgacgaagaaagggagcgcaccatggcccagctccacgaggcctgtaaggactggggcttcttctgggtggaaaaccatggcgtggaggcggcgttaatggaggaggtgaagagcttcgtgtaccgccattacgacgagcacctggagaagaaattctacgcctccgacctcgccaagaacctccacctgaacaaggacgacggcgacgtcctcgtcgacggcggcgacctcgccgaccaggccgactgggaggccacctacttcatccagcaccgccccaagaacaccgccgccgacttcccggacatcccggcggcggggagggagtccctggacgcgtactatggcgcaggcggtgtccctcgccgagctgctcgccggctgcatcagcaccaacctgggccctcgccggcgccgccggggtcgtggacgccttcgcgccgctcatcgaggagaacgcgacgctgctcggcgggttctgcgtcggcgactacttcccggcgctggcgtgggccgacgcgttcctctccgggttcgccgcgagggcgtgcaggaacctccggcggtgggacgagctgctcgaggaggtgatcgcggagcacgaggcgaggctacgcggcggagacgatggcggcggcgaagagcacagggaggaggacttcgtcgacgtgctgctcgcgctgcaggaggagagccaacgccatgatgggagcttcaagctcacgagggacatcatcaagtcgctcttgcaggacatgttcgcggcggggacggacacgtcgttcatcacgctggagtgggccatgtcggagctcgtcaagaacccggcggcgatgcggaagctgcaggacgaggtgcgccgcggcggcggcgcgaccaccgccgccacgccctacctcaaggccgtggtgaaggagacgctccggctccacccgccggtgccactgctcgtcccgcgcgagtgcgcgcgggacaccgacgacgacgccaccgtgctggggtaccacgtcgccgggggcacccgcgtgttcgtcaacgcgtgggccatccaccgcgacgcgggcgcctggagctcgccggaggagttccgcccggagaggttcttgccggggggcggcgaggcggaggcgatggacctgaggggcggccacttccagctcgtcccgttcggcgccgggcggcgcgtgtgccccgggatgcagttcgcgctcgccaccgtcgagctcgcgctggccagcctggtccgcctcttcgactgggagatcccgccgcccggggagctcgacatgtccgacgacccgggattcaccgtgcggcggcggatccctctccggctcgtcgccaagccggtcgggtccggcagaggcgtggtggcccgaggccggcgtgccctcaccatcgtggcccctgcccccgtttccaccgtcctccgggcggcccttcgacctcgacgtccggtggccggcggccatcgacaggtgacgcggcgatgcgggagaaggggcgacgcggcagcgcgggcgacatgggagaaggggctacatagcggcggtggactcggtggactcggtgccccggcctgctcccgcgccgccgcctccctctccccgtgggctcgccactacgacgagcatctcgagaacaagttctacgcctccgacctcgccaagaacctccagctgaacaaggacgacgactacgacgccctcgccgatcaggactgggaggccacctacttcgtccagcaccgccccaagaacaacgccgccgacttcccggacatcccgccggcggcgagggagtccctggacacgtacatcgcgcaggcggtctccctcgccgagttgcgggccggctgcatcagcaccaacctgggcctcagtgacactgaccgcgttagggacgccttcgcgccgccggtcgaccgcgtggccgtcgccgaggttgagcttgtcccctcgccctggtccgcccccgggctcgacgccgtcgtgcgtggcgtgacccgtcggccggcttgctcggagtcccagagaggagaagaagagtgagatctgtgtgttttttttttttttgtctgggagacgggagaccgcgtggactgtgttaatttaggaataaataaataatgggccgaatcgcgcgtgttaatcgctgggagctttttgtccagcccatcttggttctagtttgcaagttcatgtgtgtgcagtaattttggcaggaataagttcatcagagttccctttaaataaaaaaaacaca

SEQ ID NO: 59409 - DNA, 390 bp, Oryza sativa
  Clone ID: PAT_MRT4530_61035C.1
atggctcttcttcgcctccatgggaccctgcttgctgctgctgtcgtctctgcttctgcagctgcaggccacggcatgggaagacaaggatttctcagctactgcccgccgtcgcggtgcagcgagcatggccccgagatcagcccatacaaggtgaccgccatagattacaagcatactaccctcaccatcatccctatcggagacttggattcatgcaaagtgcagaaagaatcctcaattttgctgacacgacggtctattggagatccttcgcaaacccagccgcttacaattgctcacagtgtgaacaacaaggccgacgctgcgcatacagctcacaaagaaatcaaacattctgcatgcgtcgagccagcaaaacacacatga

SEQ ID NO: 59410 - DNA, 459 bp, Oryza sativa
  Clone ID: PAT_MRT4530_61036C.1
atggagaatacagacccaacagattgcaatccatccttagacccagccataaaagatctcagctttggggatgcaatcccaaacccctccaaatcccctaatctaacaaaatcaaccggtgctaatctgtcgcagacccacacccgagagtcccaacgcacccaaatcccggccaaagcagccaccaaccaagctcgcgagcgagcaagcagccgcccaaatcacgcccaatcgcaagggttcacctacgggagggaggaaaccctaggcgcgggatccgtacgggaggggaaaggggaagagggtgggaggggctcacctcgacggagcggatgccggagaggccgcctgacttcgccgccgtccgccgccgccgccgccgccgcagccagcgaaaaccctaattgggagaggtggaggagcagcagcgagcagagcacgcttcgaataacggaatag

SEQ ID NO: 59411 - DNA, 676 bp, Oryza sativa
  unsure (1)..(676): unsure at all n locations
  Clone ID: PAT_MRT4530_61037C.1
aaagcggcggccatggcggcggcggcggcggcggcgagcaccacgagcatgatgacgaggccgcagctgctccacctcttctcccgcttctccttcctcacctccctcccagaggtcaaggcacggatcgccgacgccgtcagggacaagcaggaggctgtagcggtgaccaccgagatacaggaggagattctccgcgagatgggaatcgatccaagttttggtattggctgccttggaaaggtgaacgttatgtatgaggatgacatggaattgatggttaagttctatcagtttgttgccaaagaagagatggctattgatgaagctgagcttgaccctatagagtttgctgaaaaaatacatgctcagcataaattacaggaacagcaactgaagatgttgattcagatgagaaaatataacccagtgagccaatccgtcatactcgaaactttgcgcaaacagttggagagtgctaatttcgataccgacgcgtcgatcttgactccggagcagatccaagagattgttgagaactagatcaaaaaaccatatcaacagctattgtgcatatgttctgtttaaatctgattgctgtacatttctattgctcatacaagatataccagcttaattaagtgttactcagctctcgccatggtttatggcntcc

SEQ ID NO: 59412 - DNA, 293 bp, Oryza sativa
  unsure (1)..(293): unsure at all n locations
  Clone ID: PAT_MRT4530_61038C.1
aattaaaacaataatatgtatttaacgtggtgaaatagagaagggaaagaataaaagacagaagaagtagaaggaggactagatggttgtaacatgagaggggcacgaagaaccgggggacgagcccacngnttaagataaacaccacaatgtataaggaaaggatagccggcgggggggtaggatgatccccccccccgtaatgatgagtttatattaatgtatagggaaaccctgaggctgaaaaaaaaaaaaaaaggacggacggtaggtgataagtggtaaacgcggac

SEQ ID NO: 59413 - DNA, 235 bp, Oryza sativa
  Clone ID: PAT_MRT4530_61039C.1
aagctttttttttttggtcaaagggaattttatttcttgtaaatgcagagtgcaattaattccatactcatattgtacaaatcatcttgcatttgttgattatcagtgaggggattactctttgagagggcacaatctttgaaatattctcctcccctcaactgactcctgtcaataagggagcaatgaatggaggtctgagctccgtgtaccttatccttactgaccaaagctt

SEQ ID NO: 59414 - DNA, 216 bp, Oryza sativa
  Clone ID: PAT_MRT4530_6103C.1
atggaggaggaagacgtcgaggagatgggtttggctttaacgggacttacccagatccgcgtcggcgtcgcgtccccgatcccgaactgcccccatccacgccactcgctgcgcctcggatcccatcagatggattcaaagccacagcagcgccacgacctgctcgaggacgacatggccatggactacagattactgaagagaagcgtcggatag

SEQ ID NO: 59415 - DNA, 192 bp, Oryza sativa
  Clone ID: PAT_MRT4530_61040C.1
tcacgctgcccgtgtagctggggatagagcgaacgggtcaccggagctgagctcatcgtctggcgaccggcgttgagctggccttaatggacaaaggcggcagcggcggcggacgcggacgtgcgcgacgatggtggcgcggccctggacttggtgctccgacgcaggcaacggcgagtagcacgggtgcat

SEQ ID NO: 59416 - DNA, 711 bp, Oryza sativa
  unsure (1)..(711): unsure at all n locations
  Clone ID: PAT_MRT4530_61041C.1
cggacgcgccggccgggcaatctccgccgccagttacccactgtcccccccccccactctctctctgtctctctctctctcttgccgcgagatgaagaggaacgaggtaaaggagaaggagaagacggacaagccttcgacccgccgccgcatcctcggcgtcaccgccttcatcgccgccgccgccgccggcaccttgttcctgctgtcggcgatcggggagagcagtggagacccggacaagacggcagatgatgatccgccgacgacccggacaatgaaggcgccgggctttgacggcaaggtgatgatctcccgcgacaagttcgagggtaacccgaaggagtacttcagggccagccggaagggagacgaggaagacgttggcgctttcaagtaacggatcggaggacgccggcaactaaacacagcctatatgtgatctgaaaactctgcatgtaccagctggcctggatgttagcttaaataagtacgtatagtacgatgtactatgtcagtatatgtgtgtgatcgaggcgatgagtctcctacatgatgtgtcttaaggtgatatcctatcgttgtttatatatcacttagaaaattataaaaaaattaaaaaaaaaaaaaaaaaaaaaaaaaaataaaaaaataaaaaaaaaaaaacaaaaaaaatcggtgngtgaaaaaaaaaaaaaaaaaaaaaaaaaa

SEQ ID NO: 59417 - DNA, 1666 bp, Oryza sativa
  Clone ID: PAT_MRT4530_61042C.1
atggcctacctcccgccgcacaagcgccactccaacgcctccacgcccgccccgaccccggcccctcctcctccctccctctcctcctccctccgctcgctctccctctcctcctccccacgcggccgccaccaccgcggcgccaccacccgcccttccagcaagatcgtccacgccgccggctgcgtctcccgctggtccacgctcccgcccttccccgacgacgacggcgacgacgacgggtcgctccgcctcgagcccttcccctgcgaccccatcgagcgcaggaccggcgccaagcccctcgccctcgtctcctcctccgccgccgaagcctcctccccctgctccgcggcggccgccgcatccaccgtcaccgagaggttcttgccggacctcctcgccgcggcttggagggcgaaggcgggcgatgtgcctgaggaggaggaggaggtgaagctgagcgtcgtggccagggtggggaaggtgctcttcgaatcgtccggcggcggatcacccgtctccatgaactcgctccgcgaagccgtgaaagcaggagaagagggctcgaggagcaatcttcataaatcgttctataccaatgtgcctagtgagtgcttggatgatatggagcgatccgctgcggagaagatggggctggagtttgattcctccaaagagcactaccatgtgaaggtctttgacaagcgtcaaagtgattctacaataacgtgcaaatgcaccgtgcaagaagatggaaagcttgctatccataaggttcagttgaaccaggtacgccacttggtggaagatatatcctgtctgttcaaggatctggacctgaggctgatgttgtctaccaaaagaatccttaagaacttagatgctgaagtgaaaaatgcaataaattgcttggtatcttctgctgttattgatcctgatgtcaaaggtggacttagatggcctcttgggaaagaatcgattgatgagaggttcagcatagttggagtgtggcatacaaactacaaagctttcagaaatgagaagttgaggctcaagctaaggcatgctgaccggtttgaccatcgaagctcaactggagaggtttctaatgaagttacctttaaactaattggcatatctgcaagtctggaggctgttgatcaggaggcgaattctctgcaggagatgctggagtctgtggtaggaatgatctgggagagcggtttgagctacaagaaggcgccctgagcacagttattgccgagtggcggcatcctggccactcctccgagaccttcttgccgatgttaccgtctgactaccttctaccctggagctaacgggcgttgatctcagcccaccccatcatgtacagtttcacgttagcctgtctctactgtagtgtcagctgtgtcattctggttagcaggttaagtagtagtgagtagtctatgggcatggtcgcatggtatggtaggttttccacttacttccttgctccttggcgtcataggttgatcgaaccacctacatgagacgctaaattcaagtgaagttgaaatgactatgcacttatgcattcttctgttaaacgagaatggcatattttataatataactttgagtaaattgcactcaagatacaaaaaaaaaaaaaaaaaaa

SEQ ID NO: 59418 - DNA, 344 bp, Oryza sativa
  Clone ID: PAT_MRT4530_61043C.1
ttgataccaacgagattgtagtcgagttggttcgactagatcacccggtgacttggctcatgtaggctccggcttcgtaggctgtggtggatgtgttggcggtaagattccatgccttaggtcctcccaggggtcccttttataccgcaggtcaattggtctccaagtagaacttggagatgtcggaccccatacgatacagtaacgatccagttctgtccgagtagtactccttccatctgtggactccgtgatgaatttccttaacgtgtacatggaacatccgtatacgtgcaggtataccatatcagtacacgacgtatatccaagggtagagggtatac

SEQ ID NO: 59419 - DNA, 219 bp, Oryza sativa
  unsure (1)..(219): unsure at all n locations
  Clone ID: PAT_MRT4530_61044C.1
taacaantcggctggctaattaccgtggctcatggtgctgtggattctgtgaagnccaggatntgattgctttttcattatcatttcagtcctttgtattcnttgtgtttcangtgtaatntgcccttnttttgggagnttctttgcaaaatcaactgtnccctcagttgctaaaaaaaaaaaaaaaaaaaaaaaaaaaaaaaaaaaaaaaaaaaaaaa

SEQ ID NO: 59420 - DNA, 409 bp, Oryza sativa
  Clone ID: PAT_MRT4530_61045C.1
ggaggaagtagtacataatactactataatattcccatcaaattacagacttcgtgaatgacgttggctagttcaaaacgtcaaacatttcataatgcaagatagtatttttccactctgcttaaatcaaatactagctagtactcgctccctccgtttctaaatatttgacaccgttaactttttagcacatatttaaccgttcgtcttatttaaaaacttttaagaagtatataaaactatatgtatatatataagtatatttaacgatgaatcaaatgataggaaaagaattaataattacttaattttttttaaataaaacgaacggtcaaacatatttagaaaaataaacggtattgaatatttagaaatagatggagtattttatagacaatttccacacccg

SEQ ID NO: 59421 - DNA, 451 bp, Oryza sativa
  Clone ID: PAT_MRT4530_61046C.1
ttttaaggggaaaactgcgcacttgtttgacctggagaaaatggaccactggaccacggggtgggtgcgccctgatgaaggtatattgtggcgtgcttgtgttggggagtttgtggaaatggaaaatgacgtgtgcccacaaaatgaggatggccacaccaaaatgcaccacaaaaatggagtgcgcaaaacggaatgtttggttgcttttaaggggcacaagtgactgaaatggttggataatggtttgtgtgtgtgctgctggtgtgaatggtggtttggtggtgaaccttggcaatgatgtgccacacaatgcctgaggatgtggtgagagcaccctggttggatgactgaatggggttacagtttctgagaatacgtatgattcaaaattcaaattccgtcacacaaaacacattaaattcagcttcaaaaaaaaaaaaaaaaaaaa

SEQ ID NO: 59422 - DNA, 163 bp, Oryza sativa
  Clone ID: PAT_MRT4530_61047C.1
cgtaccagcccacaattctctggctctacccccgcgttcgatacgaacgcatgcttcctttcctacagatcaccatgatatgatacaaccgagcgctaggtttgatcaccatgaacgataaacttgactgcgacgtggcagatcatgctctggttgctcgcct

SEQ ID NO: 59423 - DNA, 1429 bp, Oryza sativa
  Clone ID: PAT_MRT4530_61048C.1
ttttttttttttttttttttttttaaaaccccaacgactctgtttattggccgccacttccaggaataatttattctccatcaaataccaggttaataaacaactaaattagtacccccaaaccctaaatacaatgatggtacacccaaaacattcacatgtatttgtcttgcatccagggtccagggatgaccccacctctattccttatatccagtaaaagtcaaaacaaaaaaaatgtacaaactgctccagtcgccacattaagcctcgatacccagttagaaaattttctataccaaccatcagatgtcctctatgcagatccctcctggatcaaatagaacacttgaaagcttgtaaaccattgaggcaacaaagcatcaatgctggtgtttttctttacatcaaccagacgaccgataaccccacctcagtataaatcatgatttctggatggcagctttgccaaactaatgcaaactcagttaccccgttatgatgtccaaactactcagaatcagtatctattgataaacagagtcgaggcctaacagaccgaggctggcgaggatgagaaaatatattttctatccttcttggatttaaatcagctccgctacgtctttcaatgtttgtgctcagaaatgcagaagcagcatcggtcaatggttcgatccctgtctctgttgatggaatttgtggctgtgaattgacatcagcaggtgcaggctcttcgttaccacctccacccgctgcgagtgtaagggatatccaatcatcagactgaaccccatttggtgcattagcacgctcgctaagttcttcctgaagaggaacagaggaaggttgacttggaagaaaaatttgcaaggatggatcatcgccaaccaaagccagtgggttatcaaccaaacttccatgcatttcattactattccggcagactgaaagagcaggagttaccgaagcctcctctacgccaacattacaatcaagagaatagtcatttggtgctaagccaaaggaattgtgtgaaccaacaaaagtattatggacatcagtatcattcccaaaaaactggaagccttgttcaggttgttgataagaagaatgcatttgccagttattcatctcaaaatcatcaacattgttactcaataaaccaaggccacttgtaccaacgccggcatcttcctggtacctttcagtatatccagtaccattagtggtgaaaggaaaaccactaccatttgcagtggtagtattgtcatagacagctggtggacaaaccatagcatcattctcttcatcagaatcactaagaacaatgacgtctgtggcattatgttgttgctgtggtctatcatctgtattgcatgcttggccaaaatggggcgggagcccggggacccattattacctgtcc

SEQ ID NO: 59424 - DNA, 148 bp, Oryza sativa
  Clone ID: PAT_MRT4530_61049C.1
tccttggtggcggtgagcggcgatgaccatggcaaatcctcctcgcccgaaatctctttttcaccaagcatatcacagggcttcaaacttgcccaacacgtggccccgagctatgggttcctagctcctgagctgaggcatggtcgag

SEQ ID NO: 59425 - DNA, 141 bp, Oryza sativa
  Clone ID: PAT_MRT4530_6104C.1
atgcagagaagggatgatacagcagcacttcacaaaaaccagacacaacgggtccctcaaatatcaaaactagtgcagatgaggtccctcggcggtttgagggcggttttggctgacgtcgcgcctatgtggctaatttga

SEQ ID NO: 59426 - DNA, 474 bp, Oryza sativa
  Clone ID: PAT_MRT4530_61050C.1
atggaaacgacaatgactactcagattatatccatattggtttttctagttctacttggacaaggggacacctataggtataaatacaagaccctctaggaggagaggggacacaatcaacatacacggaacaacagatcaagacacaagatcaacacacaagccaacatacgtcaagacaagatgccaaatatcgacttcagagataggcatgactaatcccctacggtgcctatggctgccgtcaggagagatatagcgctgtctctgatctcaccggatacgaactcgagaaggaagactaccctgttgtcgactacgagtcaaaccttcagaccgccatgtcgacaacagttagagaggctaccccaaatattgtactgtctcgcatatatcctagtaccaacgatcccgatactatacaaataccggaatcgcgacatcaaacgtcgacatgcgacacccggtggcctg

SEQ ID NO: 59427 - DNA, 279 bp, Oryza sativa
  Clone ID: PAT_MRT4530_61051C.1
atggctgagctcgatctcgggctcgccggcggcgtttggtggcttgaggagttcatggtggtgtttgtggggcagaagctcggcttgagatccaccggattgacaggaacggcgacgcgatccacggcggcgctccaggcttgctccagatcagcgatggcgaggtccgcgttcccgaacgtccactgcatgaaatcgactgaacttaaggggaacggaacctgcactgagaggagacaagggaacggacaagagatcgagacaaccgcggctcaatag

SEQ ID NO: 59428 - DNA, 468 bp, Oryza sativa
  Clone ID: PAT_MRT4530_61052C.1
atggggcctgaaaaaaaatgcaaaatgctcgtctggcttgtcatgcagaacagagaccaaaatttgcacaaggagctttccgtcgccttcgcccctagtgcaccgtcgatgcaaacctccattggtgcaatcttcatcaatttcagggccgctggtgccgataggaaccgccgctgtcctggacgaccgcagcccctagggccaccggcgccgacgatagccgccgcagcccctagggctgctagcgccaatgggagacgccgctgtcctccgccgcaacctctaaggttgttggtgccgatgggagccaccagcacagcccctagggccgccaacgccatcgggagccacccccgtcctccatcgcaacctctagtccgccgccaccacctggaaccgccgtcgccacaacccctagggccgctagtgtcgacgagagccatcaccgtcctccgcagcagcccctaa

SEQ ID NO: 59429 - DNA, 516 bp, Oryza sativa
  Clone ID: PAT_MRT4530_61053C.1
ggcacgaggtctgcctgccttgtcagcattccatttccctccctttagctagtagtatagcttcctcacctcgccggccaccgctccatcgctgccgtgccggcgcgccaccgtgagatctctctcccccgacattctctcggagacacagagagagcagcagggacaaggaatcggacgaacagtttgtgtcagagagagagaatagacgagagctcggatgcaacgcaagagatcggattccatgcttgctccgccattgccattccgttcttggcaactttgatccctcgcttgctccggccatccacggcaaccaaccccaaccaggaaggtcaccggcgagaggaggatcggaggaggataagtagccgtgggtgcttgccgcctcgctgatggcccttgccgccgtcgccgccggtgatgcttcggcgtggcggggtggtgttgttggtggtggtggtggtgctcgggctgctcgccgcgcggtgcgacgggaagaaggtgccgtcgttc

SEQ ID NO: 59430 - DNA, 467 bp, Oryza sativa
  Clone ID: PAT_MRT4530_61054C.1
gaaatgtccaacaatccactcctaatattgataagaaagaatcaaccctctgatttacttgtctaatgttcactatgaaaagaatactctgcaaaactcagaacggggtgacaagaactggaagaaatatgatcccctagggagtcttaacacttgacgcaacagttttctatagaaagtcctacaagtatagtttctccccccaagatttctactagtttctcccccaagatttggacgcggacaactctttctcagtttttgtgcgttaagaaggtgaaaaggcttatgttacctctctctctcgtaatatttacacaaccacacgacccgctgattcttatctctcaaaatggaaattgtgcatcatcttctagcaccttaaaatgttgaggatgcctaccagagcaatgcaggttccacatatgtaaatatgccctctccagattctttacccatcgagctgt

SEQ ID NO: 59431 - DNA, 252 bp, Oryza sativa
  Clone ID: PAT_MRT4530_61055C.1
atgaggggtaaaattgttagcaccgccactgctgacactgatgtgccttcccaaaagccaaaagaaacgaaaaagagagaccagatcgaagaatcaattcatggagtcgatgcttttgagtgcccctaggctgaggatactgccacctctgctgcttatcatggaagtactgtagcccgtgctggtgttaaggttgccaaggacatcgagaaggcaaaggaaggcaggtcggtgaggttagaggaggcctga

SEQ ID NO: 59432 - DNA, 342 bp, Oryza sativa
  Clone ID: PAT_MRT4530_61056C.1
agaaaattaacccgtaacaaagcacgcgtattttttcgggtgaaaaaaaaataaaaaactgaaaaatttagtctcagggaaatttatttgagcatggggtcccaaaactcatggggggaaaaaccaaaaaaaagaagcttagccaagggaaattttcaacaaaattgccccatttttggggggggtttgcttaggggcacttcagggaacgtggccatggggatgcgattatgagaagcagaaggtctttccacacgtaaatcgttccggggaagcaccaaggcaggcaggccatcttgaatcccggggggttcccgccgccatgcccgaaccggtccgggg

SEQ ID NO: 59433 - DNA, 171 bp, Oryza sativa
  Clone ID: PAT_MRT4530_61057C.1
atggcccagcctcacaaattccgcgtcagtggcgccgccacatcccaaggtgcttgttggttgatagggagtatgaaggtgtatctggattactcagagacagtggacgactggcgagaccatggagaaactgttcaaattggcagaggtgacacctttttgatgtactaa

SEQ ID NO: 59434 - DNA, 2466 bp, Oryza sativa
  Clone ID: PAT_MRT4530_61058C.1
atggcgcacctgacgaacggcgcggtggactcgctgctgggtgtgttgtcgaaggtggtgaaggacgaggcgaagctgctgggaggcgtggagggcgacatccagttcatcagggacgagatggacagcatgaacggcttcctcctccacctcaccaagtccaagacgccgcacaacgaccagctccgcgcctggatgaagcaggtccgcgacgtcacctacgtcgccgacgactgcatcagcctctacatgcgcgacctcatcccgccggaggccggcctctggccgtggctccgccacatccccaagcgcctccgcacgattccggcccgccaccgcctcgccaacaagatccacaagctcaaggaccgcgtgcgcgaggtcggcgagaggcgcctgcgctacgacgtcaagctcccagaactacacaattcggaggagtcgtcgtcgttgctggtcgcccgagacagcaaggtcgaggagaagagggacgaattcctacgtgccatcgaccatgtccaccatgctcctccttcaccttcagcgatcgagatgctccctcttgatcttggaaaggatgctctcgaacacctacatgatatcaagaaatgcctcgatgggggtcatgtcgccagcatgaagatgctgcttcgtgctctgtatgcctatccctacggtaccatagaagaattgaaagacttatccaacagtcttaagattaaaggagcagatgtggccaaattggtgatgattttctgctacagcaagctgcccacgcattgcaagagctgcctgcagtacctggctgccatgggagaggaagataaaatcaatagggcgtgcttggtcaggcgatgggtcgccgagggcctcctgcccctcagggtcgtcgaaccgcctcttaccaccaccatggaagaagccggcgaactctgcttcaaggagctcgtctttcgaggctttcttcttcctgctccttctcctacagatcatcctcaagatgacgatgtagctgttggtacatgcagcctaaatctcaagagctgtgtcgttgataatgcagtcaagaaattcatccccgacatctccaagagcgataattttgtggttgacctgcctacccaccttcagcttcagctcaaaatcagacatatggttcgatcgacctttcctgcaactgcgtcagcagaagagaaacagcaaccacagcagcagctgaatcccatggatgggatggtgaagctcctcaaggagttacctgaagagtatcggctgaacgtgatagatctagggggctgccagagattggagaagagccacctcaagagtatctgcaaggtgacctccctcaagtatctgagcctccggaacaccgacgtttccagtctgcccaagaagatggaggacttgtggcagctggagacgctcgatatccgggacaccaaaaagatgccggccaccgccatgaggcgcatctacctcctcaacctgaagcatctccttgccggcaacaacatcaataccgacggcggtggcgaaggcaagaaaaatgagtcaggctccaccgtgctggtacctcacaggatcgggaagaagacggagacattgcgccatgtccggattaaggacggccaagccgaccttgcacggattgggtctctagagcagctgaggaagttgggagtcgtcctcgacggcagccaaggtaacatcactcatttgcttgaagcaatctccaagcggagagataccctgcgctcactgtcagtctggatcacggagccaccgccaccgccggctgcggagcacatggccggcgacgacgtgttcgtgactcttgaccattcacaagaagaaatcctagctcccagtaaacttgagagcttagacctcaacctcaagtgcttcttcaagggaggaaatggcggcgacaagagaggctacaagctccctacatggatcaacgaaaagttccaagcgctttccaagatcactctacgttacaccctactgcgcgacgacggtctgcggatcctcggcaagctgaagagcttgcgctgcctcaggctgcttcgcaaatcatacatcgaaagcgaggtcaccctcgaggagggggagttcggggagctgaggctcctcctgcttgatcatgtctctgataagacggccttgttgatcaaagcccgtgcagctcccaagctggagaagattgtgtggaacttgaacaagacgaagacgttggtgacgatctcccccgacgacattgctgggatcaataacacggccatacttcgcttcaaggccgccgatgcagcagctcctacgaaggagaaggttgactggaactgcaacagcacgaggaagatcactccggacatcatccggggttcaatcgaattcaatcaagtccaagagggagctcaagaattcctcaagtaagtccacataccgtctccttcaagatcc

SEQ ID NO: 59435 - DNA, 1129 bp, Oryza sativa
  Clone ID: PAT_MRT4530_61059C.1
ggatgggatttttggggtatgtacttatgcttaaacattgaggtcatgcttatcagctactgagcagtagctgcatatgcttcacctggcatttaaaatagtaacaccaatgccggccgtgacgaaacacaagttcgaggagagaaaaccaaaccctagctaggctaaggcggagtggagaacccccgccgttgccggcggcggaggcagcggcggcggcgcgcggagaacactccgtcgcggtcgattccgtatcaacaatgtcagatcctggaagggatagcaacatgcagcagctcatcccgatagcacctccaccaaaggcttcttctggtaccactggcaaggagctcgtggtcgtggatggtacgggaaaggcttcaggaggagtcaagctacgggaagacgaggaggacctggaggtgaagctcaggcgcatcatggagaacgtccctgtccgtgtcagcaacacctccggatcctctgctggttctggctctggtgatttccaccagtatcggcaaatgaggaggagagaacaggaccgtcttgcaaggatggatgctgattaccagaagaggaaacagatggctgagtttgaattgaggagggaggaaaggctaaaagaagcagaggagcggacagcaaagaagcgcctgaaacgccaaaagaagaagcagcggaagaaagagaagaaacgatctaaaactaataatggtggcgagcaacctaacggaggggagtcgtctggtggtgatgaggattcagacgatgaagataagccataggcaagtggcacacatcaatcggatttgaagttgctattagactactgttgaaccatttcttggagattacttctgaagtagagctttgagcatgaactaatattggcaggctgcaggcccccttgtagttttttcttggaaacactcttaagatgagatgtggcttgttttccttgctctgataaagtgactatggagtatggatggatagatgaatcattttctggttaccttgtttgtttcttctgaattatcatgtctggggctccctgtcccttacatagcttactcgtgacatttaaatgaatgaaatttaactgtttagcaaaaaaaaaaaaaaa

SEQ ID NO: 59436 - DNA, 322 bp, Oryza sativa
  Clone ID: PAT_MRT4530_6105C.1
cggacgcgtgcgcaatgagatctcgcctcctcctcgcttagcaacgagcgtcgatcttgactcaagcgggttccattcctagtgggttagcttgaaagctcacaagattactgcatgggtctctcggggctactgagtggtgacacaacttgatcaaacttttgtgtaacttgaacatatctcttacacgatgtagctcgcaatgaacattatccacaacacaagcaggatgtatactgtcgaaaacgacggaaaaagagttggatacgtattggattgagcagacagaacttaatcccttcactaggcaactgctttgata

SEQ ID NO: 59437 - DNA, 451 bp, Oryza sativa
  Clone ID: PAT_MRT4530_61060C.1
gaaaaaaaaaaaaagaatttgacccgtttgttgatcataagggaaagttgggggcgccaaaacattttattactacagctttttggggatttgctacaggagttttttcctcccttggaaaaagaaacccaaaccttttttacaacgcaacacacacaccggacacagagggtttgatcgatcgaagcaaacgagacgacgagggggaacttcttcttgggaggggacaacccctaggttttacagggatacagcgcgcggggggaacgggggggaaaacggcggaaaaaatcaggcgctggccttgggggcctttttggaaatggcggaccggatggatttgggcggttgaattggttttgggggggggggcttcctcgcctttttggcccggcttgggcgggcggggggaaccccttttttggcctccgccgaccacccgggttttttg

SEQ ID NO: 59438 - DNA, 561 bp, Oryza sativa
  Clone ID: PAT_MRT4530_61061C.1
atgtcagatcctggaagggatagcaacatgcagcagctcatcccgatagcacctccaccaaaggcttcttctggtaccactggcaaggagctcgtggtcgtggatggtacgggaaaggcttcaggaggagtcaagctacgggaagacgaggaggacctggaggtgaagctcaggcgcatcatggagaacgtccctgtccgtgtcagcaacacctccggatcctctgctggttctggctctggtgatttccaccagccacacttattaatgggggcttacaattttcatgagcttgtggggtcaaggagagaacaggaccgtcttgcaaggatggatgctgattaccagaagaggaaacagatggctgagtttgaattgaggagggaggaaaggctaaaagaagcagaggagcggacagcaaagaagcgcctgaaacgccaaaagaagaagcagcggaagaaagagaagaaacgatctaaaactaataatggtggcgagcaacctaacggaggggagtcgtctggtggtgatgaggattcagacgatgaagataagccatag

SEQ ID NO: 59439 - DNA, 183 bp, Oryza sativa
  Clone ID: PAT_MRT4530_61062C.1
gaaaggaaaggggggcccccaggggcgattgatcgccccttagcattgcctctattgaagaaccattgaccaacaacaactgactccaattacaacccggtcgatggaccctttaaaacaaaacatccgaacttacggatcattcaattcgacagccgactaattggacccaatgccctaaga

SEQ ID NO: 59440 - DNA, 486 bp, Oryza sativa
  Clone ID: PAT_MRT4530_61063C.1
atgaagttaagcatgaaacgacccccgtacaaccgcacttctcgtatggacttttctttcccaggagagccagaactctcactgctagaaacatggacgcctagagtgcatgaggatttaggttcatggagcgggtactgccaatgcaaggttatcgaaaagctttgccgtgacgagtctcatgtgttgggacgaggctcatgtgttgggcagtcgcggagtgcgggtaaagtgtacatccactgcagtgtgatggcatataagggattctctctctcaaaaaaagcaggctgttgtcgccacctttccagccgccaccgtcaccgtctccgcctcagcgcagggctccttcgcataggcggccgccacggtccacgccactggtcaggcccgagaggagcccgtgctcaccatccaccgccatcgccaacctgcaccatcgctgggatgacgctgcttcgaagcagctcctcctttgttctctgc

SEQ ID NO: 59441 - DNA, 595 bp, Oryza sativa
  Clone ID: PAT_MRT4530_61064C.1
tcgactctagacgacttaaggagatcccggagggctccgatgaggaaaagacgacggcgccgtacatcgagcaggcgcggaagaagctggaggagctgctggcgcacatcacctccaaggtcaccaaccagcacgagatctgggccacctacgccaaataccacgagggcttcggcaacaaggaaaaggcgctggacgcacgtctcaagcagatgcgctccgcgtctcccgtcgactggcaaaacgacgagaagaagtttaagacggtcgccgaggtgtctctgttgctggtcgatacctacctcatgcaggacgaggaggacctcaagaagagcctcttctccgccaagctgcacctccgtggagtgttgaagaagggcgagcccaacttcaagggaacggaacactacgccaagctcgaggagaagctcgccatcgtcctcgacaaggagcaggccttcaaataactgaaggcgacccaacgggcaacaaaccaacccgacccgggacccttctctggttggcgctggcgacgtcgttgggtgccacgtcggcattcgaaaaaatcgaaatatgaccattctgaggttggagc

SEQ ID NO: 59442 - DNA, 120 bp, Oryza sativa
  Clone ID: PAT_MRT4530_61065C.1
atggtcgagctttcgaccataaacaacgcactaccgggaggtagcccagattatcatttcccttcatcaaaaaagcagatatggactaacccctgcaggaaaatcttcaaaattgagcgg

SEQ ID NO: 59443 - DNA, 246 bp, Oryza sativa
  Clone ID: PAT_MRT4530_61066C.1
atggcaccccatacccagtcggatatacatgccgtatgggaaccaatagacacccatgccgtaaattctaagccacccttaccatttcattcaggaaaaatatgtggtggaaaccacaaatgtagtgtaaacttggaaactattgttggatcaaaaaatggacgtccgaaattcgtccacgtagatcgagcaaacagtggccagccggctgatataattgcatgcacgtatacgttaaatgatcag

SEQ ID NO: 59444 - DNA, 549 bp, Oryza sativa
  Clone ID: PAT_MRT4530_61067C.1
atggtggtggagcagccagtgattccaagagcaacgccgttggaggagcccttgatcttcaccgctgtcgtcgacccaagtggcggcggcagcgcagtgggccacctcttcttgcttttcagccacattgacttggcgaccttccccgacccgctcccgtcgctcccggcgaggtcgtctttcatccaccgccacttcgcatggcgccgccccgcctgccgcgtcggggaggccagcggcgagcgcgcacgaagagggaggagcccaacaaacatgggccggaccctcatctcaataccgttccgggcttccagcccaactccctgttccagccttccaggcctccagctcagccaacaagtgacaagcccaccacgagaccccacgaaaagaaccccggcgaggcgtcgacatacgtcgtcgcgcgtgtcgccgtcggagagtcagctccgtgggcggtgccacacgcagcaggtagcaccaatgccatggctgcaccaagacacggtggatggaggaagccatgaagcaagaaacatgccgccgtag

SEQ ID NO: 59445 - DNA, 141 bp, Oryza sativa
  Clone ID: PAT_MRT4530_61068C.1
tcgtctcatcccgaggccaaaggcgtcgagcgggagcaactcgccgtcatcgccgacgactccttttcgacagacaacatgtggcacccagccggccaggccaaagagcgcaggaagcaaagtagcggcagccttgattga

SEQ ID NO: 59446 - DNA, 453 bp, Oryza sativa
  Clone ID: PAT_MRT4530_61069C.1
gcacgaggggcgaacagggcagagcagcagccacaacgcccatggctattgcctctcctctctctcgtcgtcttctgcacgctgcagtccctgcaatctctctgcttttttggggttggggttggggagctcagctcgcaggtctctcacatgcccaaaaatccaagtgctctctctttgaatgccgcactcggttactgctgctgctactcatgaatctttgcaagcacccatcgagtgagtaatccaattttacattctaggtaggggggtgttgtttgagctcacaaaatttggacattgaaccatgtataggggggagagagaaacactgttgtttgagctcacaaaatttggacattgaaccatgtataggggggagagagaaacactgttgtttgagctcacaaaatttggctgtgttcgggaagtgagattaggaactcaactctc

SEQ ID NO: 59447 - DNA, 213 bp, Oryza sativa
  unsure (1)..(213): unsure at all n locations
  Clone ID: PAT_MRT4530_6106C.1
atggtcctttttggggcgttagagtggctggcgccgtncttcaacggggacgtgccaggcgccgacctcctgccactgtggcacactcgaaccgacgtggtaggaggagggcgcctgtatggctggcgccgccccagggaggagggcgcgtcatcccccaacccacccctcgcctntattcctgtttctctgtatgaagttgcaacggcgtaa

SEQ ID NO: 59448 - DNA, 401 bp, Oryza sativa
  Clone ID: PAT_MRT4530_61070C.1
gtgggaaaaaaaaaccgggcgaaacaccgggaaatccccccattaaaaaaccccgggcggggggatccgggaggttaaaaaaaaaaaaaaatggggcgggaggcccccggaaaaaaaatccagaaaaaaatccagcccggcctaatgggccccaaggtggggggttcccccccagttttcccccaaaaaccgcttttggggccgcccccctttttccccgggccctaagccctttggccccccttaatttggggggccctttgggcctttttaaacccctaacccacaagatttttcccttggccccccctcaccggaaccccctttttgggaaaaacgcccccctttgggggcttttggggaacccccttttggaaaacccggggaaaaaccttcccttt

SEQ ID NO: 59449 - DNA, 608 bp, Oryza sativa
  Clone ID: PAT_MRT4530_61071C.1
atgcgggcggaggcggctgggggcggcgggcacgggcgccgatgccgcggctggcgagcgcggaggcgaggccagctgcgggagggggtggaggcggctgcgggcggcgggcgggcacggcgagggaggggaggcctatgccgccaccgccacacggccgcatcgtctagtcattcaatccacgtcgccagggagctccagccgccggaactgtcgctcaacctcctcgagttcctctcgagccgctggcgcccgtcggccgccgttccccaagccagcggcgcggtgaacgacagcgagcgacgtctccaccgtccggccgcgtcggaggccgcgtggacggcgcgctctgcctccgcctccaccgtcggtcgctccgcctccaccgccggccactcgagctcactctgccttgccgcctgcacgaacgaggtccacctccatcgctggccacctgagagagagaactcggcgagcggcggcaactgctgcgacggcactcggcgagcggctcttcccccactcttggacgggcagtcgacggggccggaggctgcggcggggcggtggggctgccccgcctcctccgccgccgcctcgcctcgccg

SEQ ID NO: 59450 - DNA, 551 bp, Oryza sativa
  Clone ID: PAT_MRT4530_61072C.1
tctttgtagagagcattgtgattggtatgccacacagaggtaggctgaatgtcttgggaaatgtcgtgaggaagcccttgcgacagatcttcagtgagtttagtggtggtaccaagcctgccgaagaaggggagggcttgtatacagggactggagatgtcaaataccatctaggaacttcatacgataggcctaccagaggtggaaagcatatccatctgtctctggttgcaaacccaagtcatttggaagcagtcgatcctgttgttgctgggaagaccagagcaaaacagtactattctaatgatcttgacaggaccaagaatttaggagtcttgttgcatggtgatggaagcttcttagggcagggtgtagtgtatgaaaccctgcatctcagtgctcttccaaactacactactggtgggacaattcacattgtggtcaataatcaggttgctttcactactgatccaagggcagggaggtctttgcagcattgcacagatgttgctaaagcattggatgctccaatttttccatgtgaatggtga

SEQ ID NO: 59451 - DNA, 301 bp, Oryza sativa
  Clone ID: PAT_MRT4530_61073C.1
ggtgttttttttttttttgggttttattttttggtttattttttttattttatactcgggttgagaaacgaaaggaaccaagcaacacacagaggaagcgccaaaaaaagaaacaaacaggcagaggggcaaagcaagcaagcccccaaggcagccaggaacaacccaggggcggcccccgacaggctcagacagaaaggaaaaacgaaaaaagcctgcgcggacaccaagcaagcaggggggcgggaacacaaaacccacgagcggggggtgagagaaagcaccgcagaaggcccagggg

SEQ ID NO: 59452 - DNA, 798 bp, Oryza sativa
  Clone ID: PAT_MRT4530_61074C.1
tgcaagtccaccatccagataatccctcttttgaaacacctacacaagtcacaccactgtcaacattaatatataccaacagcctgccacccgcggaggaagacgcggtcgagctcgagccggagaaagtccgggtcggtgtaccacccgctcggcggcgtcacggcggaggccagcgggaccgccgggtcgaacgccgccacgaggcgccgcgcggcgggctccggcggcgccaccatcatttcatcctcctcctcctcctcctcgtcgttgtcctcagccattgccgccgccgccgccgcccgcgccaccgccgccgccgccgcacttcgtcttcgtcttcctccgacacgtctcggccgccaccgccgccgacgacgccttgctctccacctcctcctcaccatcatcctgttcatcctcggagtcggcgccaatggaggaccgctcctcctcctcctcctccgccttctcctcgaccgtctccagcacgaacagcccgtgcacgacgtcgccgccgccgccgccgccgccgccatcatcccccactaccccaccagccagatcctccagctgctgcaccacgtccttcctcttcctcgccccaccacccccaccaccaccgccgcacatcccgtacggcgacgacggcggcgccaccgccaccgccgccgccgcagccgccacaacggacatcgcgtcgcccggacgacgccgccgctctcatcaatggcccggccggcggctcacctctcaaacgagactcatggccaccaccaccaccaccaccgatcgatc

SEQ ID NO: 59453 - DNA, 1353 bp, Oryza sativa
  Clone ID: PAT_MRT4530_61075C.1
atgtccgttgtggcggctgcggcggcggcggtggcggtggcgccgccgtcgtcgccgtacgggatgtgcggcggtggtggtgggggtggtggggcgaggaagaggaaggacgtggtgcagcagctggaggatctggctggtggggtagtgggggatgatggcggcggcggcggcggcggcggcgacgtcgtgcacgggctgttcgtgctggagacggtcgaggagaaggcggaggaggaggaggaggagcggtcctccattggcgccgactccgaggatgaacaggatgatggtgaggaggaggtggagagcaaggcgtcgtcggcggcggtggcggccgagacgtgtcggaggaagacgaagacgaagtgcggcggcggcggcggtggcgcgctcgcctgcctcgacgccctcgacgacgcgctcccaatcaagcaagcattgtttcttcgatcgaattggagggggctgtccaacttcttctccggcaagtcgaggtcgttcgccacctgcaggactgcccgccgccggcgcaaccacgtcgagcctcgccaagccggagaacccattcaacaagcgccgccgcatcctccgctgctcctccatccgccgcgtctcctccacctccctcaccgcgctcccgcccttcctgccgccgcaccaccatccaccgccgcccgacgacggcggcggcggcggcggcaatggctgaggacaacgacgaggaggaggaggaggaggatgaaatgatgaaaagaatcaaattcagtgaggacaaattaattaagcagagatggataatatggatggatcccttttgtaatagtttgggatctcatctcatcaaatcaaccatcaaaaataccttatattagtgcttaggtttcttgatttcttcttctcttatattagctgcatgccaatcctacctatgaacaaactcactgttaattagttgcataattgcattgaccaagagatgagagcatcatatcatgcaccaaatacacttatggagaactcctattgaacaatgtttaattcttggtgcatatatatgccatgtatgtatcctactaattcctaactagctagtgcctttgatctcattgggctaaccttcaattttgttcaatagcaataaccttctgtcaatatagctgcaggaggcatgcagagatgaattaatcaagacccaattagtcatcccaatctgttctttgcacttatctcatctgcataatgcatatgcaattgtttcatgtatataagtactcctagttagggaccaacaaccacacttgtaaccaccttgtgtgcatccatccatgaatgaacaatactatcatcagc

SEQ ID NO: 59454 - DNA, 450 bp, Oryza sativa
  Clone ID: PAT_MRT4530_61076C.1
atggcaagcacctcgttagtctctcgctgcctctgcctcctcctcctcctcctcctcctcgccgtcgccgggaacaccgtggcggtgacgacgccggggccgcacggccacggcaacggcgcggcgcgagcggcggtgcagatgccgccgaagtactacgacgacgacgccgccgtcgttggccgtggtgccgccggcgtaacgaccgttcctccggcggatgacgacgacggctgctgggagtccgtcgtggggacgtcgccgccgtgcgcgcgcgacgtgctcctgtcgctcgccctccacgcgccgcgcctcagcggcgagtgctgcacggtgctcgcgcgggccggcgataagtgcgtcgccggcgtcttctccggcctcccctccggcgagaaataccttcccctcgttaagcgtatatgcagcctggtctccgtaatcttttaa

SEQ ID NO: 59455 - DNA, 771 bp, Oryza sativa
  Clone ID: PAT_MRT4530_61077C.1
atgacgatgcgccgcaccggcggcgtcgggtgcaggaacgccaagggagccgacgccgacgccacagcggccggcgaggagtgtggcgaagttgggggcgaggcccatgaggacggagcccgcgaggaagatgcagctgttagctttggaattggaagtttgggacctgtcgccatgtcagatcggggaacgagctcgagcgtctccggtgacacggacgcggactccgtgcccaccgccgacgccgccgccccgctctgggcgccgcacggccgcgcgctcacgggctgcctcgtcgtcgtcaacgtcgcgctcgtcctcctcgtctacctctacttctggagggtgttctcgcgcaagcgcgccgccgctgcagcctccgcgcgcagcgacgacgacgacgacgacgacgaggcgtcgtcctccgcctcggctccgcccccggccgcggcggccgtctctgtgaggacccgggacgacgtgctggcgtcgctgcccgtgttcgtcgtgcgctcgtccggcggggagaaggcggaggcggaggcggagtgcgcggtgtgcatcgcggagctgagggacggcgacgagtgccgcgcgctgccgcggtgcgggcaccggttccacgcgtcgtgcgtcgacgggtggctgcggctgcacaccacctgcccgctctgccgtgccagcgtcgtcgccctcgccgccgccccggagcgcaaaggtggcgtggcggacacgacggcggccgcggaggatgtggatgcgcgtgtctag

SEQ ID NO: 59456 - DNA, 270 bp, Oryza sativa
  Clone ID: PAT_MRT4530_61078C.1
atgacgagcgaattacccgattcctattatgctacgccccgggatagtaatagccttgtttcggattttctagcgatgactagccctttgacggctcctatccctagacaccggcccctggtaccaatactagagatttgccttggctgtagttcaaagaagttcttcggctttgggaagatgcgaaccttataccattgtccttggatagatatgaaccttacgcgggcagcggatgagcatatccctagaatacctgcctatcctacc

SEQ ID NO: 59457 - DNA, 300 bp, Oryza sativa
  Clone ID: PAT_MRT4530_61079C.1
atggcaaaagtgtcattgcaagatctgaaaatccagagcctttttggtctctccccttcaccggttggtttgactaaaccacgccgccggccaacgacaccaccgtcacaccggcgcgcgcatctggcacggctggtagctcgacctgggagcacagaaaattcagatgctgccatcgcgctacggccaattttgggcgtgaccgtgacacggacacagtgggcatgtacatgctcgatcgatcaagttgcttacgcacggaacctgctcgccgtagcaaaccgggaaactgtcactgtg

SEQ ID NO: 59458 - DNA, 441 bp, Oryza sativa
  Clone ID: PAT_MRT4530_6107C.1
atggggagcccgtttgacccggaggtatcgttggtactcaacataccacaagagcagaagcagaaacagagggtgcgcggtggcacaacatcgccggcgagtagtcgtgtagagcagaagcagctggcgttctgcggcacagtatcgtcggcaagcattgatggagcgaaacccgttggaggacggaggagaaacatcgtcggcagtttctgctgtggccggtggttcggcgagggacagcagaaggttctcgacgcagccgctagaggatccaatttgaatatcgtcggaatatcgtcgaaaaagaatgctctgaagtcgatggtgaagaaaccatgcaaggaggaagcagaaacatattcggtggtttctgctggtttctgctttggagcagaaccaggtgagggacggcagcaggttcttgacgcaggagagatatga

SEQ ID NO: 59459 - DNA, 717 bp, Oryza sativa
  unsure (1)..(717): unsure at all n locations
  Clone ID: PAT_MRT4530_61080C.1
atgcccatgattacggcaagctatttaggtgacnctaatagaatactcaagcttgcatgcctgcaggtcgactctagaggatccccgtactgcacaccattccgtgacacacggtcgtttagggacagccagagcctaaagagaagcccagagtactccgggagtgaccagttcagttatgtgccacgaagagttgatggctacatgaggaagccattggatctgagagctcagaagatgccgagcagcccgattgagaggttccagatagaaacattgccgccaaggtcagccaaacccttaccaatgtcccatcacagattgttatctccaatcaagaatccgggatttagttcagcaagaaatgcggctcaaatcatggaggcagcagccaagattcttgagccaaggccacaggtcagttctagggagaaaatctgctcatacagtcctgcgcggattcctttgaggatttctgagacacgggagaatatcccagcttctcagagggcagtgtctcggcagctgcagtcatctcggaccaatcttgagctgcctgatgtgagattttccagggggcagcaaatgaacaggagctggaatagcgaagatgacatagtgatctttaggacttcatctgattcttatgagattaataaccctggcttttcaaagaacaacaaggggaagtccatttcattggcactgcaggcaaag

SEQ ID NO: 59460 - DNA, 312 bp, Oryza sativa
  Clone ID: PAT_MRT4530_61081C.1
atggcgccggtcgccgtggagtggcgctcgcggctgctcgggcggcgcggctcctccggccatgcgccccaccgcatcggcgctgtcgtcgctcggccgagctcctccgcatcggcaccactgcccttccgcacccccgagggcgcgacccgcgctgtgcccgcgccggggccggcgccgccgcacggccacgctcgcgcggagcatccactcagtcgcgccccgccgcatcggcgccgctgtcactcggccgagctcctccgcataggcaccgttgtccggccacatcgccgctgcctctccgtcgcctga

SEQ ID NO: 59461 - DNA, 294 bp, Oryza sativa
  Clone ID: PAT_MRT4530_61082C.1
atgtccggcagcaacggcgaccatgtcaccgccggcggcggcaatgcgtcggcggcggcggcggcggaggaggagaagatgacaggagttggcagcggcgggaaggagagtggctcgtcgccgccgtcgccgtcgtcgacgtcgacgtcgacggtgatagccacggcgtcggagggggagaggcctgcggcggcggcggcggctacgacgtctccggctgtgtggcactggcacgtgctgagtctgctgctagggttttaccctgacatgttcaacacttgtggtatgatatga

SEQ ID NO: 59462 - DNA, 1746 bp, Oryza sativa
  Clone ID: PAT_MRT4530_61083C.1
atgcggaggctgctggagttgctccccggggagctgaggcggcgggtggaggggcacccggagctcccggcgctggtggaggtggtcatggacctcggccgcccgccgctcgcccgcttcccctccggcgacttcctcctctcgcagagccccatctccttcgacgacctccgccacgccacctcccaggttggggatttcggagcggacaatcgagctggaattagccggacgctgcaccggatcagcgcgattcgcaaccggaagggcgccatcataggcctcacttgccgggttgggcgtgccgtgcctggaagtgctaatttgctgcaggatttggtgaaggatggtgggtcattgctgctcatcggtccaccgggtgtggggaagacgactgtcataagagaaatcgctcgaatgctagctgatgattataggaagagggtgatgattgttgacacatccaatgagataggtggagatggagatattcctcacccaggaataggcaatgcccgcaggttacaagtgcctaaccaagatatgcagcataaggtattgatagaagctgtggaaaaccacatgccccaggcaatagtcatcgatgaaattggaacgaagctagaggctatggctgctagcaccattgcacaacgggggatacaacttgttgccactgcccatggaataacaatagagaatctgatcatgaatccatcactagatatgcttgtaggaggtgtgcagagcgtcacccttggtgatgaagaagctaatcgaagaggggtccagaaaactgtcctagagcgcaagggtccatcgacttttacatgtgctgcggagattgtctccaaaattgaattgcgcgtccatcgtagtttggaagatactgtagatgctctgcttgcaggcaaaatgcctaatgttgaaattcgtaaagttggttcaaaggggccagtacaggaagtttatgtgcaaaaggaacggttggatcttggtccttctgaaggtgcaactcaattggacactgattctttgagcaatgcaagaagaagcttagactcggcatttaatcttgatcctgctgaagggcatatagggagatcaactgaagctgaaccagacctcaatctatatgcttatgggatctcggagtcgactgccttgcaagccattaaacagctggagctggaggacattgtaaccttgacttataacatcagtgaagctgatgcagtgattgcattgcaatcgaagctcaagaagaatacccagattcaggctgttgtgaagtctcaagatatacctgtttttttcaccaagacaaactccctggtgcaaatcagaagggcacttcgtgcccttgttgatgatcacacggatgggttgatggattttgaagatactgaagtgagatcttcggaggaaactgatgctttggaggaagctagattggcaatcgagcaagtagtgatcccaaaaggtgaaagcgtgcagctactgcccagaccaccaagcatcatcgcttcccaggtggatctagtcgaaagtttcaagctcaagtgggaatctataggccaggagccaaacgcatgcctcagaattcttccgcaattcgtaggcgtggaagaaggcggcaagtctgtcaagcaagaagctgcaactgagctcacagattcagacaattcagatgacatggactataaacagaacggtgtcagcaggctgcctttcctcccagagtag

SEQ ID NO: 59463 - DNA, 299 bp, Oryza sativa
  Clone ID: PAT_MRT4530_61084C.1
cccccacatgggactcacgggggggggggggtttttgaatctaagcggggtgccactaaagtggtgagaagggacacagagagagagagagagagagagagatagagagagagagagagcgctgacctgtaagaaaggctcacccatcgaggacgccaaaacacgtcaagaacgaccgacccgtgatccaggctccatccatggagcgttgctctcctgtgagaggcgcatgcgattctgaagaggatgaataggacaggaaggacgaggaagagcaacatactcataggcctggcgac

SEQ ID NO: 59464 - DNA, 548 bp, Oryza sativa
  Clone ID: PAT_MRT4530_61085C.1
gtgattctgctgttgctgatcaaacacttggtgaaagcagtctggttgatgaaactgaagatatcaatatgagctctgatgcctcagagcacaccagcataaacaacaattctgtcgaggatgaaacagggactgaagatgtgatgcaatttttcctgactaatgagagaatcccagaccaacgcatgaagatagaaatggatctatccattacggtgaatgatccgcataagcgtctgcatgtggctgtgtgttgggaggacagtggactggaccaatacaactttagttctttgaattctcttccagaagtttacaaagcggtgctgttttctaggaggccacaggacacatgttctctatatgcatgtctggaagcttttattaaggaagaaccattaggcccagaagacatgtggtactgcccaggttgtaaagagcatcggcaagctagtaagaagttagacctctggagattacctgaaatccttattatacaccctgaaagattttcatacagtcggtataccataaacaagctggagaca

SEQ ID NO: 59465 - DNA, 342 bp, Oryza sativa
  Clone ID: PAT_MRT4530_61086C.1
gaacattgaaatcacaccatgacgggattcattcacaatgacgataactaaaatggcgatacacctttactgtggcattactcggttcagtttacatttattgggtaaaatagttcaggaaacaagtcccttgatagtcatcctatttctgctccatgtgcattcaaggatttagtttatttttctcacctcataatggtggcaaattcttaacggtgtgtccttagaaactgctctttgctccgaccacagttccatgttcaaatgatcagttccccaatgcaacttacatatactaacctgactgagatcgaagcaatttaccaggcttagattcgtacg

SEQ ID NO: 59466 - DNA, 332 bp, Oryza sativa
  Clone ID: PAT_MRT4530_61087C.1
gttgtttttttttttttttttttttttttttatcagaaccataccgatatacacatataacctaccaaataggcacatgaagcatttaatatagtaaactaccaaattccatccagtcatgtcttgtacataagtgtacatgaatacggtattggccctaggcccgcaacttttcaacaggggccagatgaaggacggcacggttcaagccgacgttttaccttgctgaatatgtcaatggtcgagcagactgacctaagtctggctctcttgcccaccgcacagttaccttctcttacccgggagaagggcggttagctgcccaatggaag

SEQ ID NO: 59467 - DNA, 537 bp, Oryza sativa
  Clone ID: PAT_MRT4530_61088C.1
atggagctacgcaggaggcagacgacagcgaggagggccgccattgccgctcctccctttcccctctccttctctttcgactccctcccctttcctgcagtgcagcggcggtggtggtccagtggagaaggctgcggcgacggtggtccgggcggagaaggcaacatcggcggcggtgttctagatggagaaggtcacggtggggaagggcgggcggcgggcgtggcgggggagcgcgagctctcagtcgcgcgtggcactagctccgccttcgccgtcggccactcgatctgcctccgcctccgccaccggccgtccaggcgatctctgcctccactgccacctcccgggcgagcttcgcctcagtcgcccaccacccgggcgtgctccgcctccgccaccggccacccgatccgtctcgtcttctgtactgaccacccgggcgagctccgcctcaagccgcccgccgcgcggaagatctccgcttccgcagctggctgcctagtccgcctctgtaggatcaaggaggccgactag

SEQ ID NO: 59468 - DNA, 554 bp, Oryza sativa
  Clone ID: PAT_MRT4530_61089C.1
gggatccccgggctgcaggcgccgtcgggcggcggcgaagccggagatggcggggacgccggggaggcgccctccggcagccggctccgcgccgcagcggaatccgaccggaggcagggttatggtatgtactagggtgtgttcgttcggagatggcgactagttcttcgagctttcgccggaggggaagatggcggtgcggccctcggggaaagaggggatgcatcaagcggtatttctgatttgggcctctggaagacggatttgagtgatgatgtgtaccaattgctttctgaagtgaagcatatgaatctgatgatggaaactgttgcaacggcacattcggaatatgccaatatggaatggctacccttgcctgcagtccgtaggataggatgagctgatgatgagcagctgcagctcgcaggattatttatttgtcgtggaagctggtgtgcaacgtctacgaattcgtgtaccagactacccttatatataagtattccgtatacatacaggtacgcgcacggtcggccacaccttgagctgcacga

SEQ ID NO: 59469 - DNA, 1737 bp, Oryza sativa
  Clone ID: PAT_MRT4530_6108C.1
cgggctgaggatcggcacgagggctgccccgctcacgcgtctggtgggaccctcaaaccgccacgcgcctcctcctcccctcccctccactccgcgagccgccacctcctccgccgccgacgacgacgacgacgccgcatccccaaccctagccgccgctcggcggtgctgcgacgtaggagcgggtctcctctctgcatgatccgttagggctaccgagccgatcgaccggcgggcctaaaaccctagccgagagaggctgcgggttgggtgggggtgggggcgtgctcgactctccggcggcgccatgaagctgacggtgaagaccctcaagggcacccagttcgagatccgggtgcagcccaacgacaccattatggctgtcaagaagatcattgaagagatacaaggaaaggatagctacccatggggccaacagttgctgattcacaatggcaaggttttgaaagatgaaagtacattggaagagaacaaagtcagtgaagttgggtttttagttgtcatgcttagtaagagtaaagcttctggttccagtggagctttaagttcactgacttcaagcacccctttgaccaggcaagaaactcctgcggatgcttcacgagcagctcctcaacccctagttgcacctacaagaacaccccagcccgaaaggccacctgcggaagccccttcaaacgcatatggtcaagcagcatcaaatctattgtcgggaagcaatcttgacactacgattaaccagctgatggaaatgggtggtggcagttgggacagagataaagtccaaagagctctacgtgcagcttataacaacccagagcgtgctgttgaatatctatattctggcattccaattacagcggaggttgctgttccagcaggtggtcaaggggcaaacacaaccgagccatcttctactagggaagccagtctgtctggaattccaaacgcatccccgttaaatcttttcccacagggcgatgcaaatgatggaggtggtgctggtggtggaacacttgagttccttagacataaccaacagtttcaggcgcttcgggaaatggttcatactaacccacaaatattgcagcctatgctccaggaactgagcaagaagaatcctcaacttctgaggttgattcaggagaaccatgatgagttccttcagttaataaatgagccctttgatggtgctgatggggacttcttagaccaacctgaccaggatgagatgccccattctatcaatgtcacacctgaagagcaagaggcgattggacggcttgaaggcatgggatttgacagagcacgtgtcatcgaagcattcttcgcctgtgacaggaacgagcaactcgcagcaaattaccttcttgaacatgctgctgatgaagattagatggaattatttaaacccgcttattctgtacacctgccctgcaatttatcagacttttgaagtttgcgggtgctttggatccaaattgaacaagctgagatggagctaacaccgcgttgcatcgatttatctcttgtacaatacttgctttatttaattgctggcttagcattcaaatacatggcttaacatttattcgagctgtctgagggacggatccttttgtccatccgtttttagccagaaatttcaatggatgtgaattgtgttgaccacattttctgtcctgtttgtgttattcaattcgtgatttctagagc

SEQ ID NO: 59470 - DNA, 362 bp, Oryza sativa
  Clone ID: PAT_MRT4530_61090C.1
tttttggtgttttatttttttcgctttatatcgttctattttgttttttacaggcggaacggcctacatgatggggggcccagccagtcaccacaataaccgcgaaagcccaacccaaactggctgaggaatgtggaacaaccgggctgcaaaagcacacgacgacgccgacaaggaggaaaacggggactaccggcccaagacatgcaaggagggcccaccgggaccaccgcgacaaccggcggggcgcaagcataaaaccctgatgcagacggggaggccggaatgcggcgccacagcgcggtggaagcgggcgctggccctggggagaccacaaggtgagggggcccccgaagcactgc

SEQ ID NO: 59471 - DNA, 288 bp, Oryza sativa
  Clone ID: PAT_MRT4530_61091C.1
atgcagcttctcttccccgtcctcttcctcccgcgcggcctccccctatcctccctcgttgtggcgtcgtcctgcggcagctcgcgagtgcatgcgcggcggagttcgaggcgtggaggatgtgcgccctgcccccgccagatccagctacgtgtcaccggcggcgtgctgtgtcgcccgccggcgggcatgactcatgaggcgatccttccttcttttgcctcgcagtcgcaggcagcgatttcttgcaaattactccaaattgctgcagatcagctgaccttctag

SEQ ID NO: 59472 - DNA, 681 bp, Oryza sativa
  Clone ID: PAT_MRT4530_61092C.1
atggtgccatcattctcctcctccgcggcggctatcctcctcctcttcctcatcctcgcgtcgtccgcatcggccactaacttcacctgcacctggccgacaacatgccagtcagccatcgtctacacgccccccgccgccaccacctacatcgagctcctctccagcttcgagaccaccactctccgcgacctcttcgacgccaacggcctcccgccgagcaccccgtcccacacagccatccccaccaacgccaccgttatcgtcccgttccgctgctcctgcgtcgccggtgccaaccggcctgagagccagcccttccacatcatacagataaacgacaatatgtcctatatcgccgctcaatttgacgacttcgtgacctaccaggagatcgccgccgcgagcaacatctccaatcctgacttcctggaagtcgggcaggagctctggatcccacttccctgcagctgcgaccaggtggaggggaacaatgtgacgcactttgcctacaaagtccgtgccgcggacaacgtatcgaagatcgccgcgaggtttggggtcaaggaatctacgctgctgaagatcaacgggatcaccgatcccaaaaacctcacccaggggcagattcttgatgtcccggtacctgattacattgtaactactaagccttatcactaa

SEQ ID NO: 59473 - DNA, 468 bp, Oryza sativa
  Clone ID: PAT_MRT4530_61093C.1
atgaacatatggcaacttgagatgaacgacgtgcggcagttggatggaggcggtggcggcgggggaagtggtggtagggggagcgggagagcgggtagagaagggagcggcggccgacggcggaacacggcaccgtgccatcagtgcagctcgaaggcacggaacggacaggaggggcggtgccgcgggaccgacgtggtcctgcagattggtcgcacggcaccacttgcggtgccggtgagctggttccgcgcaatggaaccgcaggactgcattggtgctgcgtttttgagccgcgggactgtcacagtttcacagtttcggcccggggctgtgaattttgcacgtggcccccttgccgcccagtggggcctccgtgcaaaattcgcaagggcagcaaacaaggtccctcggcagtatgaagggcggttttggccgacgtggcgcctacgtggctcgtttgactag

SEQ ID NO: 59474 - DNA, 407 bp, Oryza sativa
  Clone ID: PAT_MRT4530_61094C.1
tttttgtgataaaaaattgatggcggtctttattaataataaagccatttctaacccaagacactatacatagtttctataaacttcatatcatgtactagacactactcttccaatgcaaacaccactattccatacttaaatttaatactacttatctcacataatatcttggatgttgtgtagaaactatgtctcatgcaagacatggtttccttctcttttctcatttattcacttgccacatcattttttatcctaggtggcagcttatttaatactatagataccatcatagttattgggttgggaaatggcctaacatcgacgatccatataaacacaagacagttttttgaccagcacaatgatgcggatagagaactagtcgttgcccggctcagatc

SEQ ID NO: 59475 - DNA, 446 bp, Oryza sativa
  Clone ID: PAT_MRT4530_61095C.1
gggctgcaggaattcggcacgaggggtcggtgatgccaacagggaccacgcgtgctgggagcggccggaggacatggacgcgagcgaggaccgtgtacaaggtcgacccgagcaccccgggcaccgacgtcgcggccgagaccgccgcggcgctcgccgccgcctcgctcgtcttccgcaagtccgacccggcctacgccagccgcctcgtcgccagggccaagagggtgtttgagttcgcggacaagcacaggggcacgtacagcacccgtctctcgccatacgtctgcccatactactgctcctactccgggtaccaggatgagctgctgtggggggcggcatggctacacagggggaccaagaacccgacgtacctgagctacattcagatgaacgggcaggtgctgggcgcggactagcaggacaacacgttcgggtgggac

SEQ ID NO: 59476 - DNA, 221 bp, Oryza sativa
  Clone ID: PAT_MRT4530_61096C.1
tgcaatatctgtaccgaactgtcgtgtgtgagaggatagagagagagagagagagcagggtgcgtcgccgggcgttgtggatggctggtgttcttcttcttgtgtagtgttcgagtttgtgtcgggttctgtttcagtggttgtcgcgtttggtgcgttctgcctgtgggggggggggctccctcttctctatcgttctttctctgtccgggtgaggtttc

SEQ ID NO: 59477 - DNA, 371 bp, Oryza sativa
  Clone ID: PAT_MRT4530_61097C.1
cggacgcgtgggctaccctgtgcccccacgttctccctcacctcttgtcttccctccccaaccctgtggccccacctcacccctctctgacttctcttcacgtcagtgaccacggtggaccggtgacggcggcgacaacggtggactacgaggggcgtgggccgtggatcctcggccaggaggggcgcaggcgtggtggattcggccgccacagggccacgggtggtaaatcctatcgtcagagggccacgccccgttgccgtctgcctcgccgcgccggaagccccacggccgccacaggccatcgccacgccggaagctccacaaccgtcgcctgccattgccgtgcaagtgagatggaagcctgcgac

SEQ ID NO: 59478 - DNA, 243 bp, Oryza sativa
  Clone ID: PAT_MRT4530_61098C.1
atggtgggcgggctggggggatgggcggcgccagccacattagtgcgctccccctgccacctcggcaccgaccagctacggtggctggaggacgacaacggcgccagcgactctggcacccaaaaaggatcatttttagccaccgacagctcgcctcggggccgatcagagaatggaaacatggaggaaggggctaagggcagttttgatatttcgcacaacttctttctcctattctactaa

SEQ ID NO: 59479 - DNA, 1146 bp, Oryza sativa
  Clone ID: PAT_MRT4530_61099C.1
atgaaggagggcggcggcgatggagggttcgtgcgggcagaccagatcgacctcaagagcctggacgagcagctggagcgccacctgagccgcgcgtggaccatggagaagcgcaaggaggaggcggccgccgaccagcgtggcagcaagccggcccgcgctcgccgccgcgcactactcgcagaaccgcagcagcggagggaggagtgggagatcgaccccgccaagctcgtcgtcaggggggtcatcgcccgcggcaccttcggcaccgtccaccgcggcgtctacgacggccacgacgtcgcagtgaaattacttgactggggagaggatgggcataggtccgaacaagacatcgcagcactaagagcagctttttcacaagaggtctctgtctggcataagctggaccatccaaatgttacaaagtttataggggctataatgggcgccagggatctagatattcaaacagaaagcggacatcttgccatgccaagtaatatctgctgtgttgttgtggagtaccttgctgggggttcactaaaaggatttctgataaagaataggagaaagaagttagcttttaaagttgtggttcagatagctcttgaccttgccagggggttaagttatcttcactcaaagaagatcgtgcaccgtgatgtaaagactgaaaatatgcttcttgacaagacaagaactgtgaaaattgctgattttggtgttgctcggcttgaggcttcaaatcccagtgatatgacaggggaaacaggcacccttggttacatggctcctgaggttctcaacggcagtccatacaacaggaaatgcgatgtttatagctttgggatttgtttatgggagatatactgctgtgatatgccatatccagatttgagcttctcagaggtcacgtctgctgttgttcgtcagaatttaaggcctgagatgccacgctgctgtccaagttctctggcaaacgtgatgaaacgctgctgggatgcgaaccctgacaagcgacctgagatggccgaggtggtgtctatgttggaggcgatcgatacttcgaagggtggaggcatgatccctgtagatcagcgacaaggatgcctttcatgcttcaggcagtacaggggtccgtga

SEQ ID NO: 59480 - DNA, 429 bp, Oryza sativa
  Clone ID: PAT_MRT4530_6109C.1
atggagaaccgagagagtgtggttgggcgaaccctcgattcaggttgtgtaatagagacggtgcttggtttcgagtacgattgtcaggttgcactgttatcttggctgcttgcagctagttatcttggtcttcttgaggctagttatctattcgtgatcctacaccgtgaagatcgggacatcacccctaccggggtcgtatcacacgatgccaaggacagcggccgccacctgcaatcggccaccaacgcacgccaacacaatggaagtagatgtagtctgcgcaacaaaggcggtgtaagcatcagccatggtgagtcggagagttatctatccacccgtggtgaagaggaggcggtggaggcactcgagatgacagtgatgcgacgagagcggcgcttgagagagaagtgtagagtttctaggtga

SEQ ID NO: 59481 - DNA, 417 bp, Oryza sativa
  Clone ID: PAT_MRT4530_610C.1
acacccgccttttccatcctctcgcgaccgcccgccgctcgcagctatccccgctgccgtcctcggctccttgctcgccgccccgcacccgccttcgcccccaccgactgccgtcatcggtttctcacccgccgcctgcagctgcctccgcgcccgccagccgccggcctcggctcctcgcccgccaccagccatcaccgactaccttcgtcggttcctcacccgccgcctccacgcccgctagtcgccggcctcggctcctggcccgccgcctccgcgcctgcccgccgccggccttggagccgcggctgcctccgcacctgccagtcgcctcctatgttcaccaagagagagagaggccaaggagagagaagaaaagcgcaggtggaccccaccagcttttatttgtttttctga

SEQ ID NO: 59482 - DNA, 347 bp, Oryza sativa
  Clone ID: PAT_MRT4530_61100C.1
cggacgcgtgggctggttgattagttgccatcgccaccaccaatccggcgttgtctcggagatttgtctaggcgttcgcggcggttcgatcggcggatggcggcggcggcggtggcggcaccacccgtgagggggtactgccccgcggcggcgtcgacgtcgtcggtggcgagggtgcggatgccggcgtcgttcgtgagcgcgccgcggcgggtttcggtgcggctccgcgcggcggcggtggcggaggtgccccgagggctgcagctccggcgggaggaggagcgggggttggggttcttcggaggcgtgtttggtggggaggaggaggaggtggtggagaaggt

SEQ ID NO: 59483 - DNA, 279 bp, Oryza sativa
  Clone ID: PAT_MRT4530_61101C.1
atggccaacttgcataaaatagtgtgccgtcacaagacgataagacatctagaggaacttcatgccagctgtcagagggaagttttggcaaggggcctcttagacaatgtctccagggagaagggcgaagatgacaataccgccaccgtccgaaaagttctcagggagaaccaagacatggttttcatccagcaaccccaacaaagggaaatgggcggcttgataatgcccccgagagggaagaccaagctaggtttacacctgccgcccatcccctga

SEQ ID NO: 59484 - DNA, 1433 bp, Oryza sativa
  Clone ID: PAT_MRT4530_61102C.1
tttttttttttttttgggaaaaaccaatccattcatcaacactgatatatatatgggagagagagagagagagagagagagagagagagagagagagagagagagagagagagagagagagagatcaatatatgttttggtccaatgagacagtaggcaaatttacatcagcaaaatggaaatcaatccctaattgcaacccctgcaagatcatcgatcggcgccaccacgtacggaaggccgctgctaattacatccacatttggagctaagctttcaccgggtgtacgtgatgatcacttgcaaacagtcagcaaaatactttacttattcgcctttaatccccaatccctgcactcttggcatctgatctatgtatgtttacattagtgagattgtgagaagaacaagatgatcagggacgatgagccggcgactacacaaagaacaaatcaagattcacatcaagaaaggaggaggaagaaatgctgctcatgtccgtccatggcgcgtcattggtgcatcttggccggtggcgccgggtagccgacgggcacgacgtacggcgcgtggcccggcgggaacaccaccggcgtgccgacggcggcgggcaccatgtggccggcgacggggtggcccatgggcgcggcgctgtacatgggcatgggcggcggcgcgccgcccgggtggtggtggtggtggtgcttcatgcccggcgggcccagcgccgccgccgcggggttgcccgtggcctggtggccggtgatcggggcgccctgctgcgcggcgacctgatcgccggcggtgacgctggtgatgtcgtggatgctggagcggcggcggtcgcggttcatggagttgaggcggatgaagtacttctgcgcgtggctcgccacctgcgttggcgtccgcgagatgacgaagttgcgcgagatgctccgccagtcccccttgccgaacttgtccagccccagcaagaacagcctgtgctcttcctccgtccatgggatgcccttgcgcctctcctgctccgccttggagcagctcttgccgccgtcgtacccgccgccgccgcccttgcgctcgtcgcgccggtgtccgccgtccttggacgcggcggcggcggctccggctccgtcgggcggcgccgcggactcctccccggcgtagcgcgggagcgggacgcggcccgcgtcgatggccgcgacgtcctccaccagcgcctcgtagtgcctccgcacctcctccgccgacctcgccccgggcacgctcgcggcgagcgcggcgaaccagtcgtcgtcgggcgcgcctccgtccgcgggcggcggcgccgcgcacgccgcgagcgcgttctcgaacgccttgtcgtcctccctggtccacgccgccgccgccgccgccgtggtcgtcgtcgtcgccgcctgggaggtcat

SEQ ID NO: 59485 - DNA, 333 bp, Oryza sativa
  unsure (1)..(333): unsure at all n locations
  Clone ID: PAT_MRT4530_61103C.1
tgtgctgacgagcgaagagagggacgacggtcggcgccagcgcatggaggagcagcggcggcggctgctgccacgcggagagaggaaggggcagcaccggcgcgcagatgggcggcggcgccggtgcgcggaggagtagcgcgccagctgttgccgcaaggagggagggaggggcagctccagcgcgtggtggtaggaggagcggtnntttccctcccctgctgctgccacacggagggagggatgggcggctccacccacgagggctggtggcacttgctgctgccgagcggaggaagggtggaaagtccctcttttgcgctaggaaggtgg

SEQ ID NO: 59486 - DNA, 630 bp, Oryza sativa
  Clone ID: PAT_MRT4530_61104C.1
atgtgggccgcacgagcgcctcacttaggatccacccctctgcgcgcctccgaccgagccaggcaaggactgcacgcctccgtccacacggctgtgcgctccatccacacggcaagcgctggcctgcgcgtttccccatccgcgccgcaccatccgctgctcatccacgcaccgccaccaccgcccctacacgcgctggcgccgctgctcctcctccctccgcgcgtcggcgtcgccgctcctccttccgagcgccagagctggccctccctcccttcctccgcgcggcagcagccagtgccaccagccctccgtgcgtggagccgcccatccctccctccgtgtggcaacagcaggcgccggccccaccgctcctcctaccaccacgcgctggagctgcccctccctccctccttgcggcaacagctggcgcgctactcctccgcgcaccggcgccgccgcccatctgcgcgccggtgctgccccttcctctctccgcgtggcagcagccgccgccgctgctcctccatgcgctggcgccgaccgtcgtccctctcttcgctcgtcagcgccgctgctggcccgctcctggtccctccacgcgccggccagccaataagattcggatga

SEQ ID NO: 59487 - DNA, 706 bp, Oryza sativa
  Clone ID: PAT_MRT4530_61105C.1
gtgcctcgatcagctcactgtaacaagatgggcggcgccttctcgacgtcgaagccgaagcccgccgccggcgaggagggcggcgagtccgccgtggtggccgtccactccaaggccaagtgggacgagctgtgggacgcccacaagaacaccacaaagctggtggtgatagacttctcggcgtcgtggtgtgggccgtgcaagatgatggagccggtgttcaaggagatggccggccgcttcaccgacgtcgccttcctcaaggtcgacgtcgacgagctcgcggaggtggcgcggacctggcgggtggaggcgatgccgacgttcgtgctggcgaggggcggcgaggaggtcggccgcatcgtcggcgccgacaaggacgagctcgagaagaccatcaacacgctcaggtcatcgtcgtcgtcgacggcgacgacgacgtgattggttgggagatgcataaataaacatgttgtcatgttcatcagtcatcaccacctagctctgctgctggttaatttaagtactaccactaccttagttaattagctctcccggtttgcctaataaatattccgcattgtaatatatccaacttaattagttcgtatgttcgcgtgtgttgtgatcgtctgctagttatgtacagtcttgaagcctgagtgctggagctaataaagatttgcataacttggattggattttc

SEQ ID NO: 59488 - DNA, 664 bp, Oryza sativa
  Clone ID: PAT_MRT4530_61106C.1
gccatcctcgagcccgtcttcttggtgcgagatccaggttcccgagcaggccatgggtggtgtctacagtgtccttacccgccgccctggtaatggtcttcaacgaggagcagcgtcccggtactcctctgttcaccatcaaggcctaccttcccgtcatggagtctttcggtttcaacgccgatctgcgccagggtacctctggccaggccttcccccagtccgtcttcgaccactggcaggttctgcagggtggttctcccctcgacgccacctccaagaccggtaccgtcgtccagaacaccaggaagcgcaagggtctcaagcccgaggttcccggtgtcgagaactactacgacaagttgtaaacggcttttggccaagttggtatacccgatccttgatcctttctctagcatcactcagcagggcaggctccactggcaatgagcgccagtcaggttcccattttctcggcggtcggtggtacaaaaaagcggaatggacgtatctttggagggctgtttgaacagcatatgaggatggcggtggaagatgagcacgtcgctactggcgtccttagatacgatctgcttgtcttgtagaactttatttgcattatgaacgcgttgatgacactaaaaaaaaaaaaaaaaaaaaaaaa

SEQ ID NO: 59489 - DNA, 165 bp, Oryza sativa
  Clone ID: PAT_MRT4530_61107C.1
atggggatatggggttgcgccattgtgtgggagattgtgacgagacaagccaacgatgacgacgtcaggcgcgaggaagatgacgacggcgatgctgacatcctccccctccccgacaagcgtccctcaaccctgcttcatcggctggcgggattggactcataa

SEQ ID NO: 59490 - DNA, 135 bp, Oryza sativa
  Clone ID: PAT_MRT4530_61108C.1
atggtcgttgctaaggcgttccttgagactgctgtgacatgggctcaaattggttgtattgaggaacaaactggggttgagctgatcctgcctgttggtattgaccatgcgtatgctgcacaggctgaccactag

SEQ ID NO: 59491 - DNA, 531 bp, Oryza sativa
  unsure (1)..(531): unsure at all n locations
  Clone ID: PAT_MRT4530_61109C.1
gtntggntaccgtgttngtcctctacgtnttgcttcgtctnantgtaaggaaacacatgaggttncttggnagctggtgctgctggagctggacaccgcaaagtnactacnactccagtaactagtgtnccgtccaagtagcctctgtctaatnantgantccaggtgactcanctgactcctcgtctgccatgtaccatcatgtagagtacaagggggcgaaatgcatgcncatgtatatncattcttnatcatgcttacatatgccgtactgtgtctgnntatgtatgttttgtnctatgtatcacagacggacatacagacggttttagttttggggattgaaattngaagatgagtattatcttngttggccctgagtaaaaaaaaaanaannaaganannagaaaaaaanggggggncccccnccgngggtngggcnccnnnttttnntcccctttnggngggggttanttttnnncttngggnaaacngggnaaaaggtgtnttccngngganannttgnnttnt

SEQ ID NO: 59492 - DNA, 417 bp, Oryza sativa
  Clone ID: PAT_MRT4530_6110C.1
atgggagcactactcagcagccaccaggtgatccaatttaccacccttgatccatctctaatgtcaactttagtgattcccggtgaattgacacctcaagcagacaatgtgccaatcgattctatgattaggaagatgcaggatacaagggatgagctggccgcaaaaacaattttatcacttagtgagagaaacattgtgcttgagaagtcgctcgatgatgtgaacaaaagctggatgtctttgtacgcgaggaagctgtgcgaggatgacatctggagacgcaagttagccgatgcaaggatcaatcatgtcgatgacctagataagatcaagtcaattggtgatgacctagtcaagatcaagttaattggtcttgttgtgatggtgaccctttttcccagccttgatagatag

SEQ ID NO: 59493 - DNA, 175 bp, Oryza sativa
  Clone ID: PAT_MRT4530_61110C.1
tggtggggacacatgcatgggcgcgggcacgggcgggaagcgcggcgcgtggaggtatcacccgattgtttggcgcacggatcgggcgctcgggttcaagcatttttggatattttatcaaatatcggacgcccgcccatccttggcgtctggcacattcgtcaggatgagcatc

SEQ ID NO: 59494 - DNA, 231 bp, Oryza sativa
  Clone ID: PAT_MRT4530_61111C.1
atggctgccgcgttggcgccacgtggtggacgtgtgtccgggccgtcgtggaacgagtccaccgccctcaggatgagggtgatcggcggcaaggctaggtttccattctcctattccccgtcatttatagtaacagactacatgggcctaggcccgtacaacattaaagattcagcctctgagtaccgcggtgggctaccccagtacgataactcccacagtagccgctga

SEQ ID NO: 59495 - DNA, 339 bp, Oryza sativa
  Clone ID: PAT_MRT4530_61112C.1
atgggcggcgagttgaagttgaacgggtgcaagctggtggcttggcgcagcgcaggggatggccaggaggggcgcacgtacggtggtcgtcggcagagagcgagagggtggagaggaggaggagcccgcagcttttggcgcagcggggtgggccagcgcgctgctcccccggctctgttgagcgtggaaaattcagaagggggtggtgctgttcctgcgctgtcccgcccgccggcgccgggttccttcctggacgccgtccaccgcctccacctgatggaccgccacctagctacatataccattgatctgttcagaaaaaataatttttttggatga

SEQ ID NO: 59496 - DNA, 616 bp, Oryza sativa
  Clone ID: PAT_MRT4530_61113C.1
ttcccccaaatccaccccaccgagcggcggcgaggcgagcccacgccggcgacgagatgagcttcgagtacctgggggggccgatcagcaagaacccaaatcatggtggcgccaccgtcggagtcctcgacgacgcgcactccgggaggcgtgagagggcctggcctcgtcaggacaagcgcagaccctacccttccaagttcatcgttgattttgcctgtgattctgcctgatgtgtgtgtaacgtggggtgggtatccgcatacgtgtgttcatccccctgttccttccaagttcatcgttgattttgcctgcgattctgcctgaagtgtgtgtgtgtgttcatccccctgttcgtcgtcgcatctgattgtgggattttttgcctgatgtatatacgtgggcaggggctttgtagttagtgttcttagggatcatagacttgggacttccatttctggctggcggctcgtgcacactgtttgtaggtggttggttgatcaggtgtagtaactgatttatttgggcgctacctagatagagaaattaattaaggcttcagttctcagctgtcatgaaagcaactgtagttggctttgatcagtttgatgccata

SEQ ID NO: 59497 - DNA, 255 bp, Oryza sativa
  Clone ID: PAT_MRT4530_61114C.1
gcggtgactttatgatctcatctacttagaaatcccactgattttataattgtacatcttgcttgcctgcaaattatactacatgctggtcatgctgccttcgtgggtacttggtctgccatgggcagatagcatggacaggaaatgattcagttgtgggaacaatgtgcacatgtccaggacttgcacctgacaaaggagcctgcacagagagtggctgaagatatggcggccagtggcgcctgtgactggagg

SEQ ID NO: 59498 - DNA, 158 bp, Oryza sativa
  Clone ID: PAT_MRT4530_61115C.1
agcacttgacggcagtgcagctaaataccctcacgtatttggaatagcttgcggccgctctgtcgttttgagggggcagacgtacagactcagaccatgtccttgcgacgctagttcaccgcatcccgtaagtgagaggtaacaggtgtaatcagtac

SEQ ID NO: 59499 - DNA, 327 bp, Oryza sativa
  Clone ID: PAT_MRT4530_61116C.1
atgggtaggcagagaaagaataggatcccatctgctcttgaaaagggcaaaggaaaggccacaaggcaagttcaatgtccagactgccaacagtttggatataggaaaggtagtgtaagatgtgaactgactggaactaggaagaggaagagaaacaagaagacaaaaacaaatgtaggaaggaagagagcaaagggtgccattgatgcccaagctactgcagttgatgttcaagcgaatacacgaagaacaagagcagctgcagcaaaagaagcagctgcagaatcacaagaggctggcattagaggtaggtcaaagctccgttga

SEQ ID NO: 59500 - DNA, 620 bp, Oryza sativa
  unsure (1)..(620): unsure at all n locations
  Clone ID: PAT_MRT4530_61117C.1
gctgcaggattcggcanagtttttttttttttttttttttttttttttttttacaactcaataaggcgccatccatttcattgtttgaagttttacatggatacgatatggagaaattcagaaagttttcaatcaggactacaactcaataaggcgccatccatttcattttttgaagttttacatggatacgatcgtggaaattcagaaagttttcaatcaggatcagctatctttattggggcttttcaacttctgcggtatctgatgtggtagaatgtcaagatctgccagtgccattgacatggttaaaaacgtgtagaatcagggcactccatacttggcaccttcccctttgccgtcccaatgaaaatctcattcaactcaggattatatgacaatggcagnaacaataaccttggtattgatgtctggaatgcatttccacttccanggngctatagcaccgnccggnacctttggntggatccngnaaaanaacancccaccttggttgncaacttcanccnggaatggtcaccaganatnncccaaattccccaatccccggnggncccagnnggggggattcggganaaaaanggtnccccggggggggt

SEQ ID NO: 59501 - DNA, 6000 bp, Oryza sativa
  Clone ID: PAT_MRT4530_61118C.1
atggcgcccaaggcagggaaggccaagccgcacaaggccaagggagacaagaagaagaaggaagagaaagttctgcccaccgtgctggacgtcaccgttgagacgccggactacacgcagctgacgctcaagggcatatcaacggacaagatcctcgacgtccggaagctcctggccgtccacgtggacacatgccacctcaccaactactccctgtcccacgaggttcgtggggcccagctcaaggacacggtggaggtcgcctccctgaagccgtgccacgtcagcatcgtcgaggagggctacacggaggagctcgccgtggcgcacgtgcggcggctgctcgacatcgtcgcctgcaccgccgcgttcgggccgaggaagagtgcgcccgagcagaagcccgcatcgccgtcgtctcccgatgcgccaccgccaccgcccccgccggcgtcgcccgacgccgccaagacccccgggtcgcccgccggcggcggcggcggcgttggcgccggaggcggtggaggagaggagccgatgtacccgccgccgaagctgggacagttctacgagttcttctccttctcccacctctccccgcccctccattatattaggaggtcgacgcgcccattcgttgatgacaagacagaggacgacttcttccagatcgatgtaagggtttgtagtgggaagccggtgaccatcgtggcctccaaagctggattctatccagcagggaagcgagcgctcatcagccactcccttgttgggctgttgcagcagacgagccgggcgtttgatggagcttacaaggctcttatgaaggcttttgttgagcataataagtttggaaatcttccttatggattccggtcaaacacttgggtggtccctcctgctgttgctgatttgccatcggtgtttccaccccttccaactgaagatgaaacatggggtagcaatggtggtggtcagggaagagatggaaaacatgaccataggccatgggcaaaagaatttgccatactggctgcaatgccttgcaaaacagctgaggagaggcaaatccgagacaggaaggctttcctactccatagtttatttgtagatgttgcagttcttaaagctgttgcagctattcagcaaatggtccctgacaagagttcacttgaaacaccgaatgacaccacaaatccagatttgcacacgcaacaaattggagatatgaaaataacagtcacaaaggacaaagcggatgcaagttctaagttagatgtcaagttagatggaagtcaagctccaggaatgctgtctgatgaacttgctaagagaaatctgttgaagggcatcactgctgacgagagtgcaacagtacatgatactgctactcttggtgtggtggttgtgaagcattgtggatacacagctgttgttcaagttccagcagatgctcaactgacaactgtttctctagcacaacatgatattgacattgaagatcagcctgaaggaggtagcaacgcactgaatgtcaatagcttaaggatgctgcttcataaaccatgtattcaaccatctggaggagttcagcggttgcaaagttctcctcaagagagtgaatatagtacaaattttgtccgtaagataatgacagatagtctgcagaagcttgcatgtgaagctccaagagaaacaagaccaataagatgggagcttggagcttgctgggtgcagcacctacagaatcagacttctgagaaggccgacactaagaaaaatgaggagaccaaggatgttcctacagtgaaaggtctggggaaacagtttggtcagctgaaggagatcaagaagaagacagatgaaaagagtggaaagggtgcatccacaaaagaaaatacttcgacaaatacaaatgatgcgcaaacagtcaactcttccagcacaaaggaggataatgaggcaattctacagagatggcttccagaagctgctttccagagactaaaggaatctgaaactggactgcatgctaagtcacctgatgaattaattgagatggcgcacaaatattatgatgatacagctctgccaaaattggtagcagattttggttcacttgagctttcccctgttgatggaaggacattgacagattttatgcacaccaggggactccagatgcgctcactaggacaagtggttgagcttgctgataagctcccacatatacaatccttgtgtatacatgaaatggtagttcgagcatttaagcacgtacttcgggctgttatttcagctgttcatgatataaatgacatggctgaggcggttgcatcatgtttgaatatcttattgggaccatttccagaagaaaataacgatggcaagtgctatgaggataacaatctcaggcaaaggtggctggaggtctttctagtaaagagatttggctggacgtggaaagacgaatatcgtgctgatctaagaaaatatgccatccttcgtggtatctgccataaggtaggacttgagctagttaccaaagattatgacatggatatgccacatccattcagaaggtcagatataatcagcattgttcctatctacaagcatgttgcatgctcatcagcagacggtcgaaccctgttggagtcatccaagactttcctggacaagggaaagcttgaggatgctgttaactatggcacaaaggctcttgcaaaacttgttgctgtttgtggtccttatcacagaatgacagcaggagcatacagccttttggcagtagtgctttatcatactggtgacttcaaccaggcaacaatctatcaacagaaggctttagatataaatgagagagaacttggactagatcatccagatacaatgaaaagctatggagatcttgcagttttctattaccgcctgcagcatacagaattggcattaaagtatgtgaatcgtgccctatatcttttgcacctgacatgtggaccctctcatcctaatactgctgcaacttatattaatgtggcaatgatggaagaagggctgggtaatgttcatgttgcacttcgttaccttcatgaggctctaaaatgcaacaagaggttgcttggtgctgatcacatacagactgctgctagttaccatgctattgctattgctctgtctttaatggaagcatactctttaagtgtccaacatgaaaaaaccactttacgaatacttcaagcaaagcttgggtcggaagatcttcgtacacaggatgctgctgcttggcttgaatattttgagtccaaggcactagagcagcaggaagcagcacgtaatggtactccaaagcctgatgcttcaatagcaagcagaggccacctgagtgtatcagatcttctggattatatcaatccagatgatgaactcaaggctaaggaaatgcaaaagaaacaagcccgcgctaagatcaaaggtcgtgccgggcaaaatccatctgaagtagtcgatgatgaagatcaaaggagcccaccacctaaaagtgaccattcattaattgagaaggaaagttctgaagtcaaagagaatggaacgtttattcagaaagagaaactgaaagaagaaataccaggtaacaccttaagccgtatacctcaagatgattttactgaagagtacacgtcggatgaagggtggcaagaagctgttccaaagggacgatccactgggaaccgcaaaactggtgtaagtgcaaggaggccgaatctagcaaagatcaacacaaatgcactaaacaatactgagaatggaagatacaaaggaagagctccatcaaacttctcttcccctcgagttttacctagtgaggctgtaactgcaaagaaactggtgaagagttcaagcttcaattccaaaccaggcagccctgctatatcatcaaacagtgcggagaattcttccaatcccaactctctgtcagcaagccctgccaccaccccagcagctgccaaggcagtcctgtcttcagcaccaattgccagtcaaacagtaaggaaggcactatcatacaaggaagttgcaatagctgcaccagggactcttgtcaaagcattgaatgatgcacaaacggaggaaaaggatgcaaccgatgcaggtgcaaatattgaaactgctaaggccccaaaggaaagcaatggtcacctttctaaagagaaagatggagctgttcaagtgtcaccaaaagatagtacttcccaaggatccaaagaaactggtgaaggcaaatcttccaatcctgatgacgaacaaaccgttgttttggctggatcaaatcaatcagagacacaacctgagaagaaaagagatcttgtagcctcagatgtatcatcgtcatctcaatcattaacaacagtaactgaagctaatgccccaaacgaagtagcatctatggtgactgaggcaaatgattcttcctccaatgatgatgaaagagatgcaggagaggatgctcaagaacagatgtctagtggaggcgaaaatgagaaatcttcaccatctgaaagtgaaaagaatgattcaccaggtgccaaagagacggccagtaagctttctgctgctgctgctccattcaatccctccactgttccagcttttgggtcaatggccattccaggtttcagagaacatggaggattgctgccatcaccagccaatgtacccccgatgttgtcgatccctcttcgtaaacaccctcaccaatctgcaaccgcaagagtcccttatggtccacggttggctggaggctacaacagatcaggtcaccgtggccctcgtaacaagtctgccttgccaagcagtgaaggccttaccgaagcaaacacatttgccactagggtgatgaaccctaacgcagccgagtttgtgccaggtcaatctcggagtcctaatggcaacccagcatctccaaacggacctctagcatcaccaggtggcactgaagcttcacctcatggccttccttctccctcagacagtatagtagaatcacctgcaactgcatctccacaagtttctgaaattagccagaccagtcctgaaggaaatgatacaaccagtggggtcgatactgaaaatgggagtgaaaaacaggacactgatggcaagaaccatgtggaaagtaaagacggcgaaggggagcctgagcaaaccgaagcttccaaaggtgatggagatggtgcaattaccccggaagatggttcagccgtgactgaaaatccaaagtcctgggcagactacagtgatggagaagctgaggctgttgaggttgcaagctgagaaaagataaaccttctcagtacacacagaaaattttacctcttttacagatgagactttttcttctggacagcatacaaatgcaaaaccggcacactgctattttgtgtagagaattagttcctttcctgatccatctcatggtatgtagcatctacacgtgcttctgcagttccaatggccttgaaaggttatgcaatggcagaaaactttgaagatctcttcctgagagtgatcgatgagccctttttttcagcttgctttgcatttgctccaaagaaacttgggaagagcaagcacacgagagattggttagcgcatatataccatagttcatagtcttccctttttgcctatcattttgttcaacttgttattatgtactggaccatctgtcgacataacacatgtgaacttatttttactctgaattttgatatattagaattgttgaaccatgtaaattataaagaaagtggtgcctatttggcctcttgcttgatgtgaattttacccaagatgaaatccgggattcaaagtgcatggcagaaatggaaacctggaggatacatctaatctacctagtgagttaaccgtccgtgctgatcagattatgtaatcggtcttggctttaatgaagagtacttttttttttggttttttttc

SEQ ID NO: 59502 - DNA, 351 bp, Oryza sativa
  Clone ID: PAT_MRT4530_61119C.1
agcactgatcgcgagctggcagtacggagggtacacattttgttactgaggcttctaccgattgaaatgcactatgggctacaattgggccattgcaatcaacgtacaatgccaacatggcaagtatgaatgctcctattgccaaaccacttggaagtcttgaagatgaatgactgttacaccagataggatgattaaatgaatgctagatgaagtctggctctgctatattactttaatcgggacagactaatggtcgctgcataacatgtttatacagatagctgggttgttggtttacgctgcataagacatgtttataccgcagcatcaaatggcttacagtttaca

SEQ ID NO: 59503 - DNA, 409 bp, Oryza sativa
  unsure (1)..(409): unsure at all n locations
  Clone ID: PAT_MRT4530_6111C.1
tcttctggttccagtggagctttaagttcactgacttcaagcacccctttgaccaggcaagaaactcctgcggatgcttcacgagcagctcctcaacccctagttgcacctacaagaacaccccagcccgaaaggccacctcctccgccgccgacgacgacgacgacgccgcatccccaaccctagccgccgctcggcggtgctgcgacgtaggagcgggtctcctctctgcatgatccgttagggctaccgagccgatcgaccggcgggcctaaaaccctagccgagagaggctgcgggttggtggggtggngtggccgtgctcgactttccggcggcgccatgaagctgacggtgaagacccttaagggcacccagttcgagatcccggggcagtccaacgacacca

SEQ ID NO: 59504 - DNA, 828 bp, Oryza sativa
  Clone ID: PAT_MRT4530_61120C.1
gcacgagggcgagagccattctcgccggagcgacctcgccggcgacgccgtcgccgccaccccacctccgtgcgggtaggtagtggcggttgccgagatggccgggatggtcgccgccgcggcgccgccggcgtctctttgccgtccgattgctgtcccccgagctcctatgcgccgccgccggctcactccccgcgtgaagacgacgccctcccttcgctgcgaagattccccgaagatcgctctactccaggtacaagccatgcgatcttcagaagagagtagttctgatgaggacgatgagatcctttctgagctcaaagagaagtgggatgctattgagaacaagtcctctgttctcttttacggaggcggagcaatcatcgctgtctggctatcctcgattgttgtcaaagctgtcgattcagttccagtgcttccgaacatactggagcgagttgggcttggctactcgggatggtttgtgtaccgctacctgctcttcaaggaaaaccgggaagaactggccaatggctttgatgctctaaagaaaaggatcactggaaatgaggaatagctgtgtatcctgtttctctgcttgaacgttgtcattagagccttttgttttttctcatgaaaatgctggaagcgttattgatgtttatggcctcccacatcttctgtactgtctgcagctcagcggggtttgcagtatcatctgacttctgaacagatctccacatttatggctgcgctaaaatgcttgtgattcttctgatatggaggtcagctggtcctgtttcttggctgggttcctttccccaatga

SEQ ID NO: 59505 - DNA, 3069 bp, Oryza sativa
  Clone ID: PAT_MRT4530_61121C.1
tcacatcgtcgcttcgcctttcatcctgttcctcgtcagcatacttctgtactcgtgtactctgatgttgtagctccgttgggagcatggcttcagatccatatacgagaaagaagggtgtttccttgttggatgtcgttggtgtagttcgtacggcccatagaaccgacgagagttcttcaacccactttgcgtcgtagccaataagctatcatacacgtgagttttgatcccctggagtactattctgttagcccgttcgacttgtccattgctctgaggatgagatactgaggcaaagctgatcttgactctgagtttgatgcagtaatcttggagatcaccgctggtgaactgggaaccgttatctgtgaggatgcggtgaggcaatccatatctgcagaatattcccttgataaattttatggcgttgtcgactttgatttctcttgtcggctctgcttcaatccacttggtgaatttgtcgatcgccacaaacaggaatttgtagcccccttgtcctcgtgggaatggcccgagtatatcgagcccccagcatgagaacagacatgttaaggggatagtctggagcgctcgtgctgtcaacttggtgtgtttgttgaggagaattccgtttggttcctttttgtatagatcgttgccgatcatacaatatatcttggcctgacgagacagtttctctgcatctgtgtcgtccggtagctcgtctgactccaagaatctgattagcggagtgcgccagtcgtttgtcgtctctgcatttgtgatgacgtttgtgacctctgcagccccctgcgggacgccggtatcagttgtggtgctttcgttgtccgtgtccttgatggatggttttgttaggacgtccaaaaactttccaggctcaagcggttcttgcctggaagcgtgttgtgcgaggtcgtctggttcgacgttgtcttttcggtagacatgtcgaacttcgatcccatcgaatctgcgttccagttttctaacctcgatcttgtgttgagaccacttcatcttggttgtactcgtctgcgacgtgaagcagacttcgcgttccacttttttgtactccctctttgaggtgtacaacgtggaaccgccgaagatgtgggagacatgtaggtcatactctaggaaggcggagtcagagtcaccggtggcggcttcttccgccgtttcaacaacacgtactcgcttccccctttcgattgcatgttgtctcgcgagctcctttttgataacgtaacaatcctccatggtgtgattgctagtcttgtggattggacaccaagtcttgcgtgagtcgtcgttctgggggttagggcgcctaggtgattccttttgctcagtggcgaggacctctcctgaggacttgcacttcccactcttgcgatttctctttttgcttgactctggtgcatccttattggtcgatttcttctcctctcccgctttgctttttccctccttgcgcctcagagcattgtctgcatgagcgcacctatcaatgatctcgaacaactttagggcagacgtaattcggcgcgtcgtcagcttctttgtggtatatcgatctcggacgcctgatttgaatgctcgaatgacagaagcatcggtgatcttggggatcgtattctgttgccataagtcttcccacgaagagattgagcagggcgggaggtggacaagccatgaacgagcagagcctttcaacgcggctcgcaaataattagccaatgcgttgtcgtctgcgccagcggtgtagtgaattgtggagtagacttgcagaaattcttctgggtccgtacttctgtcatatttctccatcgctcccagtcggaacttctcaggccatcgcacgttttggagcatgggcgtgaatgccctgcatccacttcctgggacgggggggtggcccgtggttgcgacgccgttgaggaggccgatctgatgaagaagatgacaaagatgaggacgaggggctgcttggctcaggagctcggcttctcgagtgatgatcgcgtcctcaatcttgactcgggtgtggagattgggagtttcgatctcgctggttgtcaccgtcccgctcttggccttggcgatcattcccctgatctcggtggttgtcgttgttgcgtcggtcattgtggagtcgacagtctcggtcttcattgggggtgttccctcggccgtctttcctttcttgccacggaggagagcaatgacggtgttgtcgatgcgtggtgtcgccctcacgacgagaaggagagcgatgtcgatggcagtcgttgttgtcacgatccctccggtgagacgtcctctggcgatattttctccatccgcgtcctcggtaggttgttcttcgtacctgcgcggttctgggccacctgctgcttcggcaaacgcggcattgaggttggtcacggtctctcgcagtcgctctacccattggccggcgtctgggtttgtcgctggatcaaaaggactttccctcaatatcgcgtctagatttcgcaactggtgagcgggcgttctctctgccgcggacgcgcttgtctcagtgttgtcgaccacgtttacatctcgtgttgactccgaagaggattcgtagccttccaagaggtgtaaaacagatggctcgttatcaccgatgtatcccacgaaccgatacgggattggggctgcatctggttccttggcaacgcacggagtttgaactcgtggttgttggacacgatgatgcggtggtttgagggtcctgaggaagattctgcagcttgtgagatcatgagatctggatctatgtttcggacagtaggtggctcctgtcgatgaagtacgctgaatcccacgttcccaataggcgtagagttcagcttgcacatggagtatcaccgaacagtcctcaagagtatgcttggatgtcttatgcacaagacaccaagatctcggtcttagggtggtcatccttgtcggctctgatcttttgtatgggggacaaaattcagccgcctgaggattcctcccgagtgttggggccat

SEQ ID NO: 59506 - DNA, 2597 bp, Oryza sativa
  Clone ID: PAT_MRT4530_61122C.1
atctccgcgtgcggaagtcaacgaagcggagcgcctctgccgcctcttcttcccacccacctctgctctgctcctcctcgtcgtcgcgcggccagctcagccggccggagaatccaccgaatccggcgcgaatcccgcagccatgttcggcgactccgacggatccaaggacgccaaccccggggcgccgccctccaccaccgacccgcccttccccaaccgcgagctcaccctcagcagctacctctgcgagaagccgacgctcgcctccgccgccgccggtggcggtggcggtgccggcccgtcctcgccgccgaaccctgctgcagccgcggctggcgacgacggcaagcactgcgtcgagcgcgacttcctccacctctccgcgcccaagcgcggggatccacccggcgacgactcatccgtcgtcggcggtaagaagccccgcctcgactccctccagctctcgctgtcccttaactccgacggccccgctgctccgccgtcgtcccagccgccgctcgcctcgctcctccagcccgtccccgcgaccgatggagatctacggggagcggcggcggcggccgcggccgtgcccgcggcccccgccaggaggacctacagcgcgacgacggcgcgcacccgcagcatcaactccgacgacatgtcctactcctactccatcttctcgcacaaccctagctgttccctcacgcacaactccaccgacatctacgccgccggtgaaggtaccaacggctccgttcacagccgattcaatttccgccccatgggggacggcagcgtcgccttcgccacgccgccgctgaaggagggcacgtcgtcgttcttccccacggagctccctgcgaggatggcggcggcggccgcggcggctgctgccagcgcgggtggcagcttcgacggcggtcgcggtgggcttcacgcgtcgcgccctgacaagatcctgcgggatattgtgtccgactctgtgacggctatggcgcaggtgctgcaggatttcccaagcgaacgactggagttgctgcgagaggcagtgcggggcatgattgactctcatgagaagagggatgagctggccagcctgcagcggaagcttgagcgccggtcagacctgaccaccgagacattggggagggcgaacaggacgcagcttgagatcctggtggccatcaagactggaatcgcgacgtttgtcaccggtaaaggccgggtaccaagcagtgagcttgtagaaatgttcctcatgacacggtgccgcaacctgaactgtaagagcacgctgccagtggatgactgcgattgcaagatttgctccaccaagaaagggttctgcagcgcatgcacgtgttcagtatgccacaagtttgactgtgctgcaaatacctgcacctgggttgggtgtgatgtctgcggacactggtgtcatgttgcatgcgcgctggagaggaatttaatcaggccagggccgacgctgaaggggccaattgggacgactgagatgcagttccaatgccttgcttgcaatcattcttctgaaatgtttggatttgtcaaggaggtgttcaattgctgcgcagagaactggaatgctgagactctgatgaaagagctggattttgttaggaagatatttgctggttgtgaggattttgagggcaaggggcttcatgccaaggctgaagaggtcctcagcttgcttggaaagaaaattatttctcctttggatgcaacaaacagtatcttacaattcttcaaatatggagttacagattattctgttactggtagcacgtccaaaggtatattggcagctcaggcaagtcaatctacagatatgcggtctcttcaaactccaacgatcacaccaccgaaatcctcattcaacttcaagaccactacttccattcttgacaccgatgcacttaagcccagcccaaagccactctctattgaaccccatttcagcaccgcttctaaggaggatgactctagcctcgaaaccatcgtgaaatgcaaggaagctgaagcaaaactcttccaaaagttggccgatgatgccaggaaggaagtagatagctaccgccagattgtccgctccaggactcagaagctagaggaggagtatgctgcgaagctggcaaaagtatgcttccaagaaacagaggagaagaggaggaagaagctggaggagctcaagatgctggagaattcgcactacgactacctcaagatgaaaatgcggatgcagaccgatatccagggcttgctcgagcggatggaagccacaaagaagatgtgggtataggctggtaaaaattcatctgacgccgctgaatgtgtgaaaaatctgttgtacaccattaggatgttttccgagttgttgtattcatcctgtgatttgtgttaccagttaaaactgttataagcagagggccgcctaacctcgtgctggcagataacataactagacaccatctcatttaattgctttccgtttgcaaacataaaaaaagaacaataaaagtatgcatatcattatctctagtatgtgaactggagttgttgggtcatgc

SEQ ID NO: 59507 - DNA, 542 bp, Oryza sativa
  Clone ID: PAT_MRT4530_61123C.1
acgcccacgcggccggcgaatcaaagctcagcgaagtatagctatggcattggcatcagacaagggcggactctccgccatcgtgctcgccgtactcaccggcgcggcagcggcggtgggctacggagggtacggagacgtcggatagtactggcgtgcggggaaggcggggtcccggaacccggtcccatcgtgccggaactacatcgcgcggaggtgcgccgtctgcgggggccggctggactgcagcaagaagccgccgcgggagcttctggagccgtgctgacgagagctcgccgcagtgcctatgcagcgacgatgcgacgcgtacagcgtgctgttgcgagacgaggtcacggaagatggcgaccgcgtcgccgggatgatctcgcatcacgcggcgcccggtagcgacgccgctacgatcgtcgggatggcgagcgcgctgacggactacagccggagcaacctgcagcacactggtttatctggctgccccatggttggcggtggatggattaacttcttagaattaattaata

SEQ ID NO: 59508 - DNA, 395 bp, Oryza sativa
  unsure (1)..(395): unsure at all n locations
  Clone ID: PAT_MRT4530_61124C.1
ggaacagaaccaacacatggacaatattccttagtcccccccttgcaacagggggcataacgaaagggccttggtttggtttatgggggggggggggcgacaaaaggttcttctttccccctgaaagaaggggaaagcaatttaaaatccttgggcaaaatcatacctttaacaggggtggccaaatatgaactatggtcttcttctagggggggggggtggccccggggccccctcnaccaaatcagaaagctgactttccaaggccttggggggggattttttttttttccctgattttcttcccccctcccttgggcctccattttttcccgtatttggccggtttgccggagtaacattttcgggtcggggtcttttcagcccttttcggg

SEQ ID NO: 59509 - DNA, 214 bp, Oryza sativa
  unsure (1)..(214): unsure at all n locations
  Clone ID: PAT_MRT4530_61125C.1
tgattcttgggcaaatggtgtacttccaccagtatagcaccaaatgaagngaacaagaatcaaatgggttagtcgaggtagtggtnctngaacagattttctcttcaagtccaaaagcttngtataaaaatgatgacctccttttggagtcaatgtcaatgtacagattctcagctagggtaaatccttnttgtatgacaaaaannnaaaaaaa

SEQ ID NO: 59510 - DNA, 126 bp, Oryza sativa
  Clone ID: PAT_MRT4530_61126C.1
atgtcagggaccggaacttctggccagccttctctgtccgggggtctccaagcatctcttgatcacctaagatcaccttgggacactggtggagaaaccatctttacttccgagagggatctttag

SEQ ID NO: 59511 - DNA, 629 bp, Oryza sativa
  Clone ID: PAT_MRT4530_61127C.1
ggcctattcgagctcggtaccctgttgtgcatggttatggtttagccgcgtcacaactacaacgattgcgcgatcaccatattccattaacagtagctgtcgataaagtcgcggcaagcggtggttatatgatggcatgtgttgcaaataaaattgtcgccgcgccttttgctattctaggttctgttggtgtagttgctcaagtgcccaatatccatcgcttcctcaaaaaacacgagattgatgtagatgtgatgaccgcaggcgaatataaacggacagtaaccttagccggtgaaaatactgaaaaaggtaaacaaaaattccaacaagagttagaagaaacacatcaattatttaaacaatttgtggcaaataaccgtcctcagcttgaaattgaaaaagtagccacaggcgaacattggtttggccaacaagcattaacgttaaatctgatcgatgaaattgcaaccagtgatgatttaatattaaatgccgtcaaagacaaagaagtcattaaactagcctttaaacaaaaaaaaaagttagcacaacgtttaggctcacaaatggaacaatcactcgaaaacctcattgctaagctattacataaaaaccgatcaaatatg

SEQ ID NO: 59512 - DNA, 182 bp, Oryza sativa
  Clone ID: PAT_MRT4530_61128C.1
atcgttaccactcgacgcactgcgcagcggaagaagacgctgagaagtcgaaggaactctcgcgaaggcatatcactaacagcggcagcataatgcagaagaccgccggtagcagcttccatggcatgagcactgagagctacaatagagagcaattagccgacaacaaggtggacacgtag

SEQ ID NO: 59513 - DNA, 425 bp, Oryza sativa
  Clone ID: PAT_MRT4530_61129C.1
aaaagattaacaacgaaaaacagggacccaagttgggggaaaacaaagggggcaaaaaacgggccgaagttttaaggggggggggaaaaaacagggaaaggccccgaaaaggaccacccccaaaaaaaagggcaaaaaaaggggacccaaaaggggacaaaaagtgggggaaagatccaacccctgcccgcccccttggaaggagcccggaaacacccccgggttcaccccccggttttgcccaagggggggcggaaaaaaacaccgtggaaaacccttggccccgggaaggcccccaacacggttttggcggaaaaaatggcgcgcaaactggggccccctttgggggccaaaggggggggcccaaggccaccaagggggtcttgaaggactgtggccaaacaaaaggcctattccaagccccc

SEQ ID NO: 59514 - DNA, 746 bp, Oryza sativa
  Clone ID: PAT_MRT4530_6112C.1
catttatcttgtttgccatgttgacgggctgggggttatcttgtatagcctgctatggcttattttgtatcacctgcctaatctttgtgctggtatcatgttatagcctatgctccaggaactgagcaagaagaatcctcaacttctgaggttgattcaggagaaccatgatgagttccttcagttaataaatgagccctttgatggtgctgatggggacttcttagaccaacctgaccaggatgagatgccccattctatcaatgtcacacctgaagagcaagaggcgattggacgggtatgtacaacatagttaactcacttattacctcttgttacagaagtatatacagtgtacataacattacataacaacaatgttttgaattattttcatgcttcagcttgaaggcatgggatttgacagagcacgtgtcatcgaagcattcttcgcctgtgacaggaacgagcaactcgcagcaaattaccttcttgaacatgctgctgatgaagattagatggaattatttaaacccgcttattctgtacacctgccctgcaatttatcagacttttgaagtttgcgggtgctttggatccaaattgaacaagctgagatggagctaacaccgcgttgcatcgatttatctcttgtacaatacttgctttatttaattgctggcttagcattcaaatacatggcttaacatttattcgagctgtctgagggacggatccttttgtcc

SEQ ID NO: 59515 - DNA, 1893 bp, Oryza sativa
  Clone ID: PAT_MRT4530_61130C.1
atggacaggcagaggagcagtggctcgtcgtccacctcgcactacggcgtcgtgagccccaagggcctcatcctcctctccttcgcctcctcctccctcctcttctccttcctcttctccctcttcgccctccgcttcggccgcccgctccacctccccttcgtcgcctcctcctccctcgccgggaacgcctccgccattgcgcggggcccggttcttgctgcaggtggtgggggccgctccacgagcggcgcggcggtggatgttcttccgggcaggggcaggagcgggagcttgggggaagcagcccgccgctcggatgccggaggttttccgtccgcgggaggcgtgggttccgcaatggaggtgaaagaggcggcactgggaagcgaaaacggcggagctcctgccaatggtgattccggttcggccatgggggcggaaggagctcctgctggaggtggggatggcaactccgcagaaggcgagaataccaccaaagaagttgccgattcggcgatggagacgaacctacttgttagcaatgcatccgcttcgcaagaagcagccgctccagcagaggaaccgaagaaacccaagtctgtgcaagatgtcgattcctccatgggagattcagacctcgggtcgaacggtgaattcttgcagggagaaagtggaaattcctctgcaggagcacatacttctcaacgagtggatcaaggggaacattcagctcattcgacagtgaggaacagctctggagcagctccactcagttcaagcaagcaaaagactgacctggttcaggaaacggtggatagcaaggtggatgcggcgagaagcgatgcggcactatgcaatgtctatgatggaaggtgggtgttcgatgagagctatccactttacacgagtgattcttgcccgttcatagatgaaggattcagctgcgaagcaaatggaagaatggatggaagctacaggaagtggaggtggcagccaactcattgcagtataccgaggtttgatgctaggaaaatgcttgagatgttgcgaggaaaacggctagtgtttgtcggagactccattaacagaaatcagtgggaatccatgatgtgcttgctgagaggggcagtctcagatcctgcaaggattcatgaagctcgaggccgcaggattactaaggagagaggagattacaacttcaagtttttggattacaattgcagtgtggagtaccatgtgacgcatttcttggtgcatgaaggcaaagcaagaattggctcaaagcgcacgaggacactatggatcgatactgttgatcgcacctcgtcaaaatggagaggtgctgatgttcttgtgttcaacactgctcattggtggtcgcatcacaaaacaaaagctggagtgaactactatcaagaaggtgatcatgtatatccccatctcgatgcttccacagcttaccttaaagcactaaccacatgggcatcatgggtcgaccattacatcaatccaaggaaaactcgagtgttcttccgaagctcatccccgtcgcatttcagcggcggggagtggaattcagggggacactgcagagagagcacactgcctctcagtgacactcgtgtaaggccggtgcctgagataaacatgatcttggagcaagtagcacagcaaatgaagacttctgtgacaattctgaacattaccaatctatctgggctcaggatagatgggcatccatctgtgtatgggaggaaggcagtggtaggtttgacagcatcgagcgttcaggattgcagccactggtgccttcctggagtgccagatacatggaatgagctgctgttctaccatctggtatcctcacaacaaaagggtgtaacaagctag

SEQ ID NO: 59516 - DNA, 3061 bp, Oryza sativa
  Clone ID: PAT_MRT4530_61131C.1
tgtgttttttttttttttttttttttgctagttatatcatatatattagatgaagtttagtctcccttgtatcacatcttacagtttcccaatcccaatacattgcagcttacgcctgtacgcgtgtatccaactatccatattgtaccaaaccagcgttgataacaaaactgaaaccgtctccgcttgctcctgcccaccggccatggcggcccggccggtcagccgctcgcgtcgcgcagcaagcaatccgtccgctgtccggaaaggacggcggcgagctcagacgctgacgagcttcttgccgaggatcatgtcgtcggtggtgaagtcggccgccttcctgaacgtgccgcggccgaagtcgaggttgtacgagtcggtgaggccctccaccaggtcgtactccggcttccacccgagctccaaggtcgccttctcgattgacgcgaagaaatgctggtctctgaaggggaaggccttcttcttcccgaaatcgaagtccttggggttgtagtggacgatctccggctcggggaatcctccagccttggcgcacgcccgtgctagaccgtcgaaggtgacgtacttggcgccggagatgctgaacacctgcttgctcgccttcgggttgccgagcgtcagcacgaacgccgtcgccaagtccttgacatggccgagctgggtgatttggttgccggcaccggggacagggatggggcggccagccttgagccggtggaagaaccactcctccacggggttgtagttgagcgggccgtagatgtacaccggcctgatcgacgtccagttcacgtcccgggtctccagcaggctctccgtctccagcttccccttgtgccggctcttcgggtcgacggcgtcggtctcgaagtgcgggagcaggtctgatttcaggtacactcctgctgatgagcagtagatgtactgttcaaggtttggcaatgcgtctaggattggggctacctcaacagcttctctccctgtaaaaccatgagccgatatgcgtgaaaaatcgcgtgatagtacgtttatgtcgtaaacaacatcgaagccctttgccgcaaggcttgtcttaacgaaatcaaagtcttgcctgtcacctttcaagtgcaacacctttgaagagaactctgcatactctgcatctgactctcctggcaactgctgggtaatgggggcctttcctctagtgaacaatgtgacctggtgcccctccttgacaaggagcctggacaagaagacaccaatgaacctggttccccccatcacaagaatgttcttggagtctgcagctgctgctacctgcatccttgccccccttggctgccatgacctcctcctagcctgggttgagatggagagtgctgcactactgaagtcagagataggagatggtagcaggaggctgctcttcagggaggctgttgctgccatctctctctcttttttttcttgtttactctcctcaaccctcctctccctgtgcttgagctcactttttatcatcttcctgaaccaacgtgttgagtctttagggtaccgtgtgaaagtgctccggtctacatagacgattccgaattttgaagtgaacccgagccgccactcgaagttgtcaagcagggaccaagcaaaatacccagtgacccttgcaccatccttgatcgccctcttaagctcatggaggtactgatcaaaatattgtatcctgaagaagtcatacagtgcaccaggtagggtctcattgcctggctggtcaatgccattttctccgatgattataatggggtccttgtacttctccttgacatgcatgacagctttgtagatcccccaaggaacaacataaagccagttcgagtacgcctgtttcccaattggcacaccgttacgctcatatgaaattttcacatcccaatcattgagatagctgatggatgtcttgttgacgtggtgactgacataataagttgtgtaatggttgatcgcaatataatccgctgatccttttatcatctcagactgctcacgtgtgaaattgggcagcctttccttaacagcattctgcatagtttctagcaaaagtttcaagtggaagttcagttcaaccttcatgcggacaccgtgtaagagcaatgattgatgaacagtgtaagatgtatcaccagccaagggtaaactccctggctctatgtgcagctgcgtgatcctcttctttgtcggtgagtggctcataccatacaaaatcgagaaggatgccaatcttccccttctgaatagcttgtcacgatatgtcctgacagcagcggcatgtgaaaggagaaggttatgggctgcgatgtaaggctcggtggcggaattcccaccgggttggcagccggtgcatctgccaggggggaagaagccgtcaccgtagccatgatttgccatcatcctaggttcgttaatggtaaaccagttcttcaccttatgaccatatgtcttgaagcagaagtctgcaaatctcacaaaatctctcacaattctggggtgtagccatcccttgtattgatcatggagcacctgtggaaggtcgtagtggtagagcacaacatatggaataatgttgttagcaagcatgtaatcaatgagcctgtggtaataatccacgccgtctttgttaatcttcccaagtccactggggaaaatgcgagaccaggagatcgagaagcgatacgcgtcgaagcccactctcaccatgttgtccacatcatccatgtagcggtggtactcgtcgacggtcacattcgcggtcgaattatcaggagttacaccaggttgcatcaggaaggtgtcccagatgcagggccctcggccatactggagggcgttcccctccacctggtacgccgacgacgcggtgccgaagacgaagcccgcggggaacgtctcccgcgtgaggtcggtctgctccccgttgccatgggagagggagacgacgacgatggcgatgaggagtagcaatggcatcttcatgtggagcggaagagcggacgcgtgg

SEQ ID NO: 59517 - DNA, 256 bp, Oryza sativa
  Clone ID: PAT_MRT4530_61132C.1
tagtggatcccccgtgtggcgcccccacccgaagccgccgacgacgatgaggccgagcggcgcagagtcgtcgacgccgccgctccccatccaggtcgcgctcagggtcgccgcgctgaaagcggcacatccagcgcctgatgagctgccgcgcctcatgacgttgcagttcctcgccggtcagctctcccctgtcatggtcaaattgcaagggatcgattctcctcaactcgggtacatccaacctgtcgtttga

SEQ ID NO: 59518 - DNA, 1137 bp, Oryza sativa
  Clone ID: PAT_MRT4530_61133C.1
aaaaaaaactgtagttctttccaaagtttaaaatttgaagttaaaaaacattggaaaacacaaatatgggcaattcaagccaaaaattgaaatctgcctctcttatcaccagtatatatagatgtcctgaatctattaaactaaaatcatccttgcttgcaaaatctgaagtacaaaaagtagaatactagaagtacaaaatctgaagaagttctcaactagtacaagacatcttattattcatacaaccaaaactagcataacaaaaaagcactccagcagctgccaacagtgataataatccaactcaaacctcactttttatcatcttcctgaaccaacgtgttgagtctttagggtaccgtgtgaaagtgctccggtctacatagacgattccaaattttgaagtgaacccgagccgccactcgaagttgtcaagcagggaccaagcaaaatacccagtgacccttgcaccatccttgatcgccctcttaagctcatggaggtactgatcaaaatattgtatcctgaagaagtcatacagtgcaccaggtagggtctcattgcctggctggtcaatgccattttctccgatgattataatggggtccttgtacttctccttgacatgcatgacagctttgtagatcccccaaggaacaacataaagccagttcgagtacgcctgtttcccaattggcacaccgttacgctcatatgaaattttcacatcccaatcattgagatagctgatggatgtcttgttgacgtggtgactgacataataagttgtgtaatggttgatcgcaatataatccgctgatccttttatcatctcagactgctcacgtgtgaaattgggcagcctttccttaacagcattctgcatagtttctgggtaatgaccatatgtaatcgggtgcaggtaccagccaagggtaaactccctggctctatgtgcagctgcgtgatcctcttctttgtcggtgagtggctcataccatacaaaatcgagaaggatgccaatcttccccttctgaatagcctggtacttgtcacgatatgtcctgacagcagcggcatgtgaaaggagaaggttatgggctgcgatgtaaggctcggtggcggaatataaaa

SEQ ID NO: 59519 - DNA, 270 bp, Oryza sativa
  Clone ID: PAT_MRT4530_61134C.1
atgcggtcatgttccgagcaagaagcagcacagagcgcagggcagggcaggggtgacggtctcaatctgggtggcgagtggatgcgcagaccgggccgcttcctcgcctcctatagtgagatggagaagaggttgtcgccgtcgttcgaggagtctagtcgcgagtgcgctgccaaggagtcatggatgcagttcgtctccaaggccgacttcgtccgaaacagttcttttaccccactcagaaacagttttccgccggacgactcgtag

SEQ ID NO: 59520 - DNA, 833 bp, Oryza sativa
  Clone ID: PAT_MRT4530_61135C.1
gtggatcccccgggctgcaggcttgcctcaccaatgtcacaatcttcagagtatcccacgcgtccgaccctccaaattttaccctctcactagtagaattacaattttcagactataccaagtactgagtagagttcctttttccctgtggagtgatgagtgatagggacaaagattagagtttttaatctgtagcatctagtagctgacaaagccagtctggaccagaacaaaatgagcattccaggacatgtcacgttggttctagcatgaatctgcttcatgtattggctgtcactgcctcgtctgtccacagtttccgtgatccaggaacattattaatacagttggaaatgggccttatcatcatcatcatgatcaaatccctgtccctgacttctgtccatccataccctggatgtgaaaaggtgcactcctccataattccaacctggtccatgcatccactgaatccctgctccctaatgatctcaacttaattctctgaaaaaaaaaatcaattcagagcatgactctgttttcacttcagaagaatcttgctgaaaacctgccactttggaaatgaaaaataaaataaaaagaagaatctgctgcactgcaagtctgcaactggcatgctacatggactctgcatttgcttcagattgtgtgccatcttgagaagaatcaagttctaaccatgcaacttcggaaagaaaaagaaaaagaagaaaaaatctctacacttcaactacttcatctacatatgactcttgagaagaatcaagctcaacccctgcaacttcggaaatgaaaagaaaaaaaaaaaaaaa

SEQ ID NO: 59521 - DNA, 227 bp, Oryza sativa
  Clone ID: PAT_MRT4530_61136C.1
atgggcatgtttggtgcacctatttgggttgacgcccatagggtgttcgacgaaatgcctctgcgacaggagcctttgcgcgtccagattcagtagtggggactgcgcttattctgggagaagcagcagaacggccggtgcacagatactgatgtgatctgtgcctgcagcgatgttcagagaactagacagctccgattaacagcattgcttggacagaatcttag

SEQ ID NO: 59522 - DNA, 339 bp, Oryza sativa
  Clone ID: PAT_MRT4530_61137C.1
cgtttgtcctgaatccctgaccttcagacaaatcagaaggtgccaatgcagaagagacactaaatcttggtttgttttcatcacctccaagaaacagaaaattctcctataaaaccgaagtgatcactctcctcccgagctcgaaggagcaacaatggcggatcagatcgagcacctccacctccccatccgtggcctcaacctccacatcgctcaagtcggcaaagatgagctcgggacggtggtgttcttgcacgggttcccggagatatggtactcgtggcgccaccagatgctcgccgcggcggccgccgggtaccgcgccgtcgcgccggactg

SEQ ID NO: 59523 - DNA, 753 bp, Oryza sativa
  Clone ID: PAT_MRT4530_61138C.1
atgcggggtttccccgttccggtgacgagttggagctccgccgcgctcctgggccgctccatctcctcggccagggacgcggccgaggcctcctcccccatcaccgccgcggagatggtccgggtggcgaaggaggtggccaacgccgccgacgcctgcggagtctccggcaagaagctgctggaggctgcggaagcgctgtccaggtccgacaccgacgcggagccgaggcggcgcgccgccgagcggattttcgatgcggcgtccatggtggccaaggaggccgacgcgtcaggagcgtcgggtctctcagatgcggcccaaaatctgacctgcgcgacctacgcgttctcggtagccgcctcgggatgggggtccttgccggagtccagcacgagcgggagggacgccggcgacctcctaaccgagccccttcttgggtcatgtcaggacaagaacgagaagatgaccggcgagggcaaggacttcagcgagatgaggaatagtgcagcggactctgatccacttcagcaatcggagattaaggagtcgtccctttttggaaaatgcaaagaactcctcaattatggttttcttggaggtcctgccctcctaccctatctaggctctggactgaggaaaacagtgtcaccctgcagcccgtctgtcttccactacatcttctcgtcgtggtggatttgcattgttgtcgtcgatgaattgtttgttaggataattgactgcagtcaatga

SEQ ID NO: 59524 - DNA, 703 bp, Oryza sativa
  unsure (1)..(703): unsure at all n locations
  Clone ID: PAT_MRT4530_61139C.1
attcggctcgaggtttaagtgttcaccaaaaaacttttggatgtttatanagnaagactcggntnncgnccagcagaacatgagctagtcaactattacctcaaacacaagttgctcggcgatgatccccgtgtccacgtcatccctgtcattgatctttgcgatgaggaaccttggaatgtaccagtgatattagcatcgtcatcagctatacgatttggagacccagattggtttttcttcagccctggtgatttcaagtacttgaaaagcaaaaggtttaacaggacaaccaagtgtggattctggaaagccactgggaaagaccgtgacattaggacaggggacactgataacactgtcattgggactaagaagactcttgtttactatcaaggccgagtttcctgaggagtcaagtccaactgggttattcacgaatatcatgctgttacctttcatgaaaaccagaggacttttgttntatgttgcttgatgaagaaacctgngaaaacaactgaaggcggaactgatcccctgatctgtgatgaaggggagcccagcagaagcatgatttctgactatgaaaatcagccaacagcagaaggaattgcatctgaaggtacttttacaggaatagaggcaatctttcaagcaaccccttgggcagagaattgcttctccccaaaacaacagtctctga

SEQ ID NO: 59525 - DNA, 1644 bp, Oryza sativa
  Clone ID: PAT_MRT4530_6113C.1
atgcctgctgatcatatggaaaagaccgtgccaacagttgttcctgctcgacctcccaacagcgagggggagcggaagtcaaccaacttccatcctagcttgtggggcgatttcttcctcaactatgagccgccaactgcgccacagcaagcatgcatgaaaggaagggctgaagtgttgagagaagaagttagaacattattaaagggtttaaaggaagtacaaaaaatattggacattacaatggcaatacaacggttgggactagacatgtactatgtgaacgagattaatgagctgttgcactttgtttacagctctgattacaatgacaaagatttgaatttagtttcacttcgattttatcttctgcgaaagaatggctacaatatgtcatccggtatttttctcagttttaaagacaatgaagggaatttcattgttgatgacacaagaagtcttttaaacttatataatgcagcaaaccttagggtttatggagagaaggtgcttgatgaggctgcaactttcactataagtcgccttgagggtgtgttggaatcatcagactcaatattatcaacggaagtatcctttgcccttgaagcaccaatattccgaagggcacgaattgtagaaatgagaaactacattcctatttatgaaatagaggctacaagaaatgaaaccatattggagtttgcgaaactgaatttcaaccttctgcaacttctttactgtgaggaattaaataagatcacattgtggtggaaggagcttaaagtcaaatcaaacttgagtttttctagagataggatagtagaaatgtatttttggatgaatggagcactatatgaacctcattactctcactccagaattatacttacaagggtgacagcatttatgacaataatagatgatatatttgacacatatggtacaacagaagagagtatgctacttgctgaagcaattaataggtgggatgaaagtgcaataggactgctcccagagtatattagggggttctatgcatacttgttgaagacatttgactcattcgaggaagagcttggacctgagaagagataccgtctaaaacggttagttcaggcctacaccaaggagttaaaatggcgtgacgaggattatacgccaaaaacgttggaggaacattttgaggtttcaatgagaagtagtggtggttttacattagcagctgcttcatttgttggaatggatgacatagcaaccaaagacatatttgaatggattttgagttatccatcccttttcaagacttttgatatatttgtgcgactctccaatgatattgtatcaaataagcgtgagcaaactggggaccactatgcctctacaattcaatgctacatgaaggagcatgggacaacaattcatgagacctaccaaaggttaagagaactcatcgaagactcatggaaggatatggtagaacattgcacaaacccgattgatgaccaaccattgatcgtgccccagactgtagtgaacttcgcaaggacagtgacaaccatgtatacccacggtgatgcattcacttcttcacacacaatcaaggaaatgatatcatcgatctatgtggttccaatacaagtgtga

SEQ ID NO: 59526 - DNA, 443 bp, Oryza sativa
  Clone ID: PAT_MRT4530_61140C.1
aggagctacgacgcatgctccccgccgtcagctggtagcctcttgtgcggccgccctcgtcttttttttggtttttagcgcgggcttctttaagatgacagcttatgttcctgaaaagaaaaatgcttttcccgaaatgcggaattcaaataaaaatttcccgttgggggccacaagccaactttcctattggggcctcacttcttggcccgaaaaaatccttataaaccatactaatatttttccccttttccccatacaccattggaataattatgccaatggatttttttcgacgggttaatgagcaacccctcataattttccctaggggcaacggatttttcaaagaaaactggaaaaaaagaaatggggatatgaagaagggaaaatttgtggagccctgcatgcgccgcccggtgctaaaggcttcttggaatccg

SEQ ID NO: 59527 - DNA, 1730 bp, Oryza sativa
  Clone ID: PAT_MRT4530_61141C.1
atggtggttcaaagtgctataaagtggaccttttccgacactcgcagtggcgacgcatcgttttgggcagtcctgagggtgttcgtggcgggggagaagccggccgaccggccgcccggccgccgcaggagcgagctcggccccggcgagacgaccctccccctcggcgctcctcgagagctcgcccgcccgccgatctccatccccgcgggcagcgggcggtggcgtgcggcggctccatcctcgccgttcactgtggctgatgtggaagcaaagatggaaaatagaaagaacaccaacaagcctaccctctccttgctaggtctggccctcatttgcacatacccagtctcttctcttgatgactctggcatcaccgtcgagtcctctgctcatgtgagctgccagggacaagcacccaggctgattcttctgtcagtatggaaccctaaattggctcttggtcttggattcttccaagttccagctgattttgttttccctggattttcctgtcttggggaaccttgtgaggctgatgcaaaagatgaagaagagaccaaccttcagactataccccccaatttgaatgaagtcaacccattggcatctgaaggggagtctggtcctgtggataacaccaaggcttcggatgggatcatagatcttgaaggacaagatcaagtggatggggaacctactaccatggatagtaccaaggttcctgatgtaattatagatcttgaagaaggtcaagtggaagacatggatctttcagatgatgatgtagttgtaaaacatcagtatttggatgcttctatccagtccagcaccagtgtagcagatgtacagactctacatggtgtttcagttgaactagataaggatgtggttgacgacgaggacaaaccttctggtatcaccatatttggagatgaggacccaaaagaagaatacgaggagggagaacttccggatcaagcactccgcctcagtactcagagcgctatcattcctcagattcgagagaagaacgagatagaggccctcctggtgctgatcgttattcaagatatcactcctatgactacggaccagcaagccccagtcatggaaggtctcacccagatagaggatggagaagctcttcaggatatgaaaatttgccagccgatgatggtgcctggacaccgcatgcttactcaagccgacagtactcaagccagtacagcacgagctcagagacgtcatcgcgccattccagagacaggcatgataggcactaccaccacaggaggtgaacaaaacatgtggctgatttgtaccatatcaactgctgaagaatcttatatcagccagctgcggatcaaaaatcttgcctttaggttcgtgagcgtgccagttgatttgatcctgcaatcaacaaggaataaagacaaagaaacctggctgttcgggaagcgcggcaggaggaacagggcgcggcagccgctggcggcgcagctgggacccggcgacgacgacggcgaggaggtggaggacgaggaggacttcttcttcgtgtccacgccctacctgtccacgccgtcgtggtccgccgccgccgccgccgccggggcgtcgccgaggaagagaggggatcatcaggcggcgctggcgcggctgcgggcggctgtgctgtaccgtgctggcgcgcgcgcggtgaaggctgcccgaccctcggggggcag

SEQ ID NO: 59528 - DNA, 2661 bp, Oryza sativa
  Clone ID: PAT_MRT4530_61142C.1
atggcacagcggttgctgcacggggtgatggaggccaaggtcctggaggccaagctgtcgtcagtgtcctcagaggcatcagattatggccatgggcagcccaagctggctgcctatagcaaggaagtggactctcttaatgagatggaagacttaaggttgactttggaaagtcagaagctgccgaggacaaagctcttgtcactaatcatgaagctgccgttcatcttcacctgccagaggttcgacaagtccactgaccaagcgcaccacggcgacggcaagtgcctcgtctacgccaccattggcatggacgcggcgcgcgtcgcccggacgcgcgccaccgaccagccgcagtggactgaggagccgctccacgtctactgcgcgcacgacgccagcgacatcgtcttcaccatcgtgacgaccggcggccaccgcgacggcgatcctgaagacggcaccgccgaggaggtcgtcggccaagcctacctgcccgcggacgacgtcggcggcggcaaggagatcgaccggtggctcccgctctgcgacgagaagaggaagccactcgaaggccttgacaaggttcatgtccagctccggttcaccgacgtgatgtccgacgtcacgtcgcggtggggcaagggcgtcgatggtcccgtgccgccgccgccgtacaccgggctgccccgcgctttcttcgggcagcaccgcggatgcaaggtgaccctgtaccaggacgcgcacgtcgcgccgccgctcgccggcagcaggtgctgggaggacgtgttcgacgccgtcgccaacgcccggagtctggtgtacatcgccggctggtcggtgagcaccgacgtcgcgctggtgcgcgacccgaggcggcccgcgcagacgctggggcacctgctcaagtcgaaggccggggagcgcgtcgccgtgctgcttctggtgtgggacgatcgggcggccaccggcctcggcgcggcgcggcgggacgggaggatgggcgcggcgcgcggcgaggacacggcgagctacttccgcggcacgggcgtgcactgcgtcgtgtgcccccgggacgccgtgttcacgcaccaccagaaggcggtggtcgccgacggcccgcgcggcctcgtcgcgttcctcggcggcattgacctctgcggcggaaggtacgacacgcaggagcacccgctgttccggacgctcgccaccgcgcaccgcgacgacttccaccagcccagcttccccggcgcgtccgtcgccaagggcgggccgagggagccgtggcacgacgtgcactgccgcatcgagggcccggcggcgtgggacgtgctcgacaacttcgagcagaggtggcgggggcagggcggcgccggcggcgaggccctcctcgcccgcctcccaaggagctccgccgcgcgcgaggcggtggagcaggacaaccaggagtggcacgtgcaggtgttccggtccatcgacagccgcgcggtggaccggttcccggacaccgccggcgaggccgcgcggtgcggcctcgtcaccggcgccaccggcgacaccgtggagcgcagcatccaggacggctacatccacgccatccgccgcgccaagtacttcatctacatcgagagccagtgcttcctagggagctcctacgggtggaaccgtgacgtcgccggcggcgccgccaccgccaagaacgccgccgccgccgccgtggcgccgcacaccatccccaaggagctgtcgctgaagctcgcaagcaagatcaggtccggggactcgttcagggtgtacgtggtgctcccgatgtggccggagggcgtgccggagagcgccaccgtgcaggccgtcctggactggcagcggcggaccatggagatgatgtacaaggacgtggcggcggcgctcgccgcgaggggctcgacgcagaaccccagggagtacctcagcttcttctgcttgggcaaccgggagccgtacgtccccggcgagcacgcgccgccggagcggccggagctcgacagcgactacatgagggcgcagcaggccaggcgcttcaagatcaacgtcaacgccaacatcatgataggacgaagagagtacattatatggaccagggatattgacaagatatggacatttgacaagaacacgatgatcaaaacgaaaccgttgacaatcgatcgccatgatttttttgcagtggacgacgagtacatcatcgtggggtcggcgaacgtgaaccagcgatccatggacggcggcagggacacggagatggcgatgggcgcgtaccagccgcggcacctggacaccccgaactcgtggccgagggggcaagtgcaccagttccggctcgcgctgtggcgggagcacctcggccaggcggcgttccaggccgccgccgccgccggcgacgacatgatctacccgtcgcgccatgggtgcatgagccgggtgaaccaggccgcgcggcagcactgggacatgtacgcgagcgacaagttccaggggagcctccccggccacctcatggcgtaccccgtcggcgtcggcgaccgcggcgagctctgggaggccgtccctttcttcccggacaccaacgccaaggtgttcggctgcagctccgacgagcttccaccggtcctcaccacatga

SEQ ID NO: 59529 - DNA, 1150 bp, Oryza sativa
  Clone ID: PAT_MRT4530_61143C.1
aggcgtcgtccccgcggaattgcagcggatgatgcaccggaggacgtcgtcagagatcgagctggcgatggtaggctacttcaacttcagcgacgaggcgtctgagatctgcaggcaattcctgacgaacatcaagaacgcacagagcaactacatatccatgggctgcttcctcgccaccatctccgacagcgtcgccgccaccgatggcgccgtagcgacgacggcggcgccgccgccgtcgtgcggagcaacccgttcagcgacgcggagcagcttccggcgggtccacgacatgtactcgtccattcttcgcggcatcaagtcgagccacaggaaggtggcaaggaagctaaaggtggtgagggccatcaggaagatatctcaggagtgcctcgtcgtggcgtgcggcgccgcggcggccgcctccgtcgccctggccgcgcaccgcctgttctttggcctcctcgtcgggtgcccgacccgctcctcccagccccactccggccgccgccactcctccccgccactccggctagagagagggagagagaggatgagagagaagggtaatgaggatgacagggtggcggtgggggaaaggagagaggagagagggagcggcgttggtggggaagaggaggctggggcgccggcggctcgggccgagcggcgcggcaggaggcggcacggcggcgcggcgagggaggatggccggcgaggtggggagagaggagctcggcggcaggggaaagaaggctgccgtgggcggtgctcggagcggcccgcgtcggcgcggccgttcccggctgggcggcgatctgagggcggccagggggcgtcggcgccagtcagaggagggaagtgggggagttgcgccgggcatgaggtggtcgggcgccggttggggaggcagccggcggcggcggcggcgatggaaggggaggccgtcgcgcgggccggcgtggccgtggaggcggagctcgcgcggggaaagaggtggctggcggcggaggggagagagcggcacaaggaggaagagtcgctcctggcgttggttttgcttgtgatgccaatggcttcgaggagaaggatcgcggtggggcacagtggcggcgtggtggcgtgcagcgtggacgcccgtctatga

SEQ ID NO: 59530 - DNA, 1115 bp, Oryza sativa
  Clone ID: PAT_MRT4530_61144C.1
caactagggctggacaaatagctcgggctcgtgaactcggctcaagctcggctcgggaggcgccggcgatggtggcctggcacagggtggcggtgggggaaaggagagaggagagagggagcggcgttggtggggaagaggaggctggggcgccggcggctcgggccgagcggcgcggcaggaggcggcacggcggcgcggcgagggaggatggccggcgaggtggggagagaggagctcggcggcaggggaaagaaggctgccgtgggcggtgctcggagcggcccgcgtcggcgcggccgttcccggctgggcggcgatctgagggcggccagggggcgtcgggtggatgggggagaaggtcgggtggatggggaagaaggtggcgggggcagcgccaacgttgctatacaatgagttgcgggggcagcgccagtcagaggagggaagtgggggagttgcgccgggcatgaggtggtcgggcgccggttggggaggcagccggcggcggcggcggcgatggaaggggaggccgtcgcgcgggccggcgtggccgtggaggcggagctcgcgcggggaaagaggtggctggcggcggaggggagagagcggcacaaggaggaagagtcgctcctggcgttggttttgcttgtgatggcggctgcggggggctcggcgacggcggcggtagacggctcgggcgacagcggcggcggcgggctcgggcgacgtcggcggcggtgggctcggcgacgacgacggacgggatgacccaaccgagcgctggcagcgatggtgtcggccttcgcacagagcagccgcggctcggcgacgacgacggcggcgaggtccgcgcgggagagggagagggagaggccggtgaagagggcgacgacgacggcggcgaggtccgcgcgggagagggagagggagaggccggtggagaggagggcgagcacgaccaccatcgcggtcgggcgggcggagaagcgcgacgacgcacggtcggccttcgcgtagagcagccgcggctcagcgacgacgacggcggcgaggtccgcgcgggagagggagagggagaggccggtggagaggagggcgagcacggccaccat

SEQ ID NO: 59531 - DNA, 492 bp, Oryza sativa
  Clone ID: PAT_MRT4530_61145C.1
atgcaaaagctggccaagaacccgctttcaaaaccacgttacgcatatcaatcttgcgccttcaaagcagcaacgccgtcatgctgccatcgctaccggaggctaccccagtgtcatgtcgctggattgagaaggcgatatgagatgtgtgagggttgggagcaaggggggccgtaccgcggacgcagcgacggtgactaccaggaggccgccgccgtctcccggcccccgatttgcgtggcgcggggaggaggggacggggacggcaacggaggagcggaggagcgacggagagctcggggaggcgaacacgagaggctccgtggaggctctgcagtaacagaggctgacacggagtcggccgcgccggcggcggaggaggcaggcggaggcggaggcggcggccggcggcgcgggagcttgggtgtggcgaggaggaagagcagacggcattttccgttggagcgagagtttggctcgggtggaaactga

SEQ ID NO: 59532 - DNA, 575 bp, Oryza sativa
  Clone ID: PAT_MRT4530_61146C.1
ctgttcagcccggagagacgatctcgttcgatcgatcgatggagtgcctgcttggcttgctcaaggtgcgcgtcatgcggggcctcaacctggccatctgcgacccgctcacccacagcagcgacccctacgtcgtcctccgccacggctcccagaaagtcaagtcaagtataagatatcattccatcaacccagaatggaacgaggaactcacgttatcaatcacaaacatgatgctgcctgttaaaattgaagtgtttgacaaggacaccttcaccaaggacgacagcatgggcgacgcggagttcggcatcctggacttcgtcgagatcgccaagcaggaccacagccatctcggcgacggcgcggtgatgaagacgatccacccggacaaggaggagaactgcttcgcggcggagagccacatcacatggaaggacggcaaggtgtcccaggacatcgtcctcaagctcaggaacaccgataccggcgagatcatcctgcacctccaatgggttaacatcccagggatgtataagttctggaacacattttcagtatgccactcgaaataa

SEQ ID NO: 59533 - DNA, 180 bp, Oryza sativa
  Clone ID: PAT_MRT4530_61147C.1
atggtgacgatggcggagctacgagcaacgccggtgacgaggtcgttggcgacggggcgtgaagcagcagcgcaagctcgccagcagatccggcgatgcggcaagcgcgagcttggcagcgggcttctccggtgtagctccgtagcttttctcccatatcggcaccgcgccgctggctag

SEQ ID NO: 59534 - DNA, 132 bp, Oryza sativa
  Clone ID: PAT_MRT4530_61148C.1
atggcgcagttaatagaaggcgatgagtcgtggctgtggcatcgttatgggctgggccaacggaaaaacgtttcacgagaatgggatccggatcaaacccgccacgcccgcatggacgcaatagtcaactag

SEQ ID NO: 59535 - DNA, 598 bp, Oryza sativa
  Clone ID: PAT_MRT4530_61149C.1
tcgcgatctagacggacgagtgatcgaagccgcgcttcccctctccgcctccgcctccgatctgctgcggcggcgcgatccggcagccggcgacctccctccgcctccttcccgaccctttcgtagctttctcaatcccctccccccctcctcgcggcgcgcgcacggccggctgagaaggtttccgagggggccgacctccttctagccatgtacaacaattatggaaattctcctggaatgcagatgcctcctatagggcagatgcctcctgccgcagggcagatgccctcggcaaatcctcagcctggccaatttggcaatccattttatggtgcgagctcaggtctaattaaaactgggttaggagcatatggagagaagttccttggttccagttcggaattcatgcaaagcaatattaacagatacttctccaacccgcagtactatttccatgtgaatgatcagtatgtcaggaacaagctgaaagttatactgtttccgtccttcacagggggcattggactaggataagtgagcctgttggtggccgactgtcgtacaaacctccaatctatgaaaacatttttctggt

SEQ ID NO: 59536 - DNA, 403 bp, Oryza sativa
  Clone ID: PAT_MRT4530_6114C.1
acctcgcgttttttgtagtagtccatgaccgataaagaggacgatcccattgcggccggccatggcagatgctgatccgtagacggcggctgtgcggagcatgaagctgggctcacaaagactacaagtctcgacacaagggctgggctccataggcatgtccgccttctactggacaagcacaccagagggctgatatggtgcgctgatacaccacgccgcaaccagctgcatgacataccttaagacctcaggcatgactggatcgcactcaaacgaaataatactctgataggctgttgaagtaaggtgcacgcagacaacgcaggtggcaacgagtttctccagctcatgcgcctactggaaggaagcgatgcgctgatattcaccaaaggtgacctca

SEQ ID NO: 59537 - DNA, 1280 bp, Oryza sativa
  Clone ID: PAT_MRT4530_61150C.1
cgggctgcaggaattcggcacgaggcttcctcacccctcctctcatttcaagaagaacaagagaaagctaagaacattttctagctctcaagtagtactcctatataataccaagaagagaagcagtaatagtctggggaggcttgaagggggaggagaagcatcaaatcgaaacagaccaacagaatctgaaaaatttactagtggtagaacaagattagtcctttcctcttccaaatagtagtggattagctactagtttattagttcctttcttctaccaagtagtggattagagattagctactagtttgcaccttgaagagtgatctaggatggcaccgagctttgattttgcggcatcaatcctcctttgcgcggaggacaacaccgccattcttgatcttggcgaagagagcgaggagatttcttgggttgttggggttgatgcttctctaggggacttgtcgatggatttccccttgcaatccgatgattgcatcgaggccctcctggggagggaggagcagcagcacatccccatggagggctacctccagcggcttctgctgcagcctgatgggctcgatttggtagccgtcaggagcgacgccattgactggatttggaaggtacatgagctttataagtttgggcctttgactgcagtcctgtcggtgaactacctggaccggttcctctccgtgttcgatcttcctcaagaggaggcttgtatgacacaactcttagcagtagcttccttgtctttggctgcaaaaatggaggaaaccgttgttccacaccccttggacttgcaggtgtgtgatgcaaaatatgtgtttgagactaggaccataaaaaggatggagcttgcagtgcttaatgccctaaagtggaggatgcaagctgtgactgcttgctcatttatcgattattaccttcacaagttcaatgatgatgatactccgtccacatccgcactctcacgctcagttgacctcatcttgagtacatgtaaagttgctgaattcttggttttcagaccatcagagatcgcggccagtgtagctctagtagcattggaggaacatgaaacttccatgtttgagagggtggcaacttgttacaaaaatttaaagaagtttcttggaaacgacgacgatgatggcgacgaggcggcggcggcggtggtggccgccgtccgatggacgggggcggcggaggacaggttcacggtgtcgctgtcaggtgaggattttgtctggccctgtggatcttag

SEQ ID NO: 59538 - DNA, 672 bp, Oryza sativa
  Clone ID: PAT_MRT4530_61151C.1
acccatttttccgcgatcccgtgcgcatctcatcgcccccacctcgtccgccatggccgattccgccgcagccgcatcctcctccctcccccgctcgctggcgtccaggaggccgctgccctcctcccctctccgcggcgggaggccccggtctccccgccgctgccgcttcgggtcccgctcgctccaccggctgcgagctcgagctgggaaggacgatcccgaggatctgtatgggccctacccatgggatcagtccttggatctcaccactggcctcgatattcagtgggtgccagaagatagagtcacactgttcacttctgatgggcttgttcaaatagggggttccctggttcctcgtcgaattactccatcagagggtctagatatgggaagaagactatgcatctttggcttttgtcgctctattgaaatgctaagtgatgtagtggaagatacagtattggagcatggtggtgaggttgtcacggcagagaaggcaagcaaagatggcctccaggagaagttgaccatgtctgttgcagtgccattgttgtggggtgttcctccagcatcagagaccctccatgtcgcggtgcggagcggtggaggcattgtggagaagatctactggcaatgggacttattttaaaagtcccaagccgtcca

SEQ ID NO: 59539 - DNA, 2280 bp, Oryza sativa
  Clone ID: PAT_MRT4530_61152C.1
atggagatgctgcaaagcgtgatcaacatccgcgaagcggtctcaaccatgatcaactttggggaagcgagcaagctggagaaggatctatcctgcctcccggtctctttggacaaggctcgcgctgtcatctatcggggcgagtggggcaggttcaagaacaaggatctggcggcacttctctggcatctcaaggacgccacctatgacgcggaggatcttctccgcgagtccaatgatcaggtgctatggcagaagatggaggatgctgaccggagcttggcaggtcaatttttctcttcctctctaaatgttgtacaaactttgatcggtggtagcaagacaaggataaaggaggtccaagataagctcaacaaggctgtggctgatttagagggagagcttaattcagtgggtcttaattttgagatagttcaacacatgccagtgacaagttcagtcattggcgtgcctcaagtgtttggtcatgatgaagaacgagatctagtgattgagaagctaggtgtgatgattggacgtgacaatgaacgagatttagtgattgagaagatgggtgtgccactcaccaggtttgttgcagcacgagctaaaggaaagagagcagcagggggcactgtcgccaaatcagcatccacaccgaagcgactgaaaggagagagtagcagggctggacccagaatttctcaatccaaatgcatcggcaatgtttctatcttgcctatatttggtattggtggggtggggaagactaccttggctcagtacatctataatgacgagagggtgagatctcactttcgcatgaggacatgggtctgtgtttcagacctctttgacaagaaaaggataatagaagagatcttcaagtccatcaccaagaaagactcatcacaacatagttcaaatgatcttcaggaggaattgaagaagaagctaaagagtcaaaagttccttttggtgttggatgatatttggtccattactaatcgtgaatgggaagaacttaatgcactcttgaaggacggacttaaaggcagtatgatcttagtaactacaagattacaaaatgttgctaatcttgtttgcaccaacaactttgaaccttttgaactcaaaggattggatgaagataaattttggaatttcttcaaggactgtgcatttgggcagaagcgcccagctgattcggaatgtaataatttgcataaaattggtcagagcattgcttctcggttatgcggatctcctttggctgccaaaactctcggacgcttgttgaatatggagctaaccagccttgtgaaacttgtatccggagagaggacgcgtcctgaagatattgggattaggtatttggatgatttgaggagcaggtttcttttgcaaatcgatcccaagtacccggatgaaagtagatatgtcatgcatgacttgatccatgatatggcgcagtctgtttctgtgaacgaatgcctcttgctgcaagatttgagctctcggaacgagggcagaaagctacatgcagttcgccatatgtcggttcaggttgcagatgaatccttgaagagtgaactaagagacattcagtatttgaataaacttcattcacttaggttagggatcaacctcaaggtcgagattacctggtttaatcagctctccaacatcctatttatgagcctacagggttgcaaacttgtcaagctacctgagagcataggtgagttgcacagcctccgttatctcgatatatctcatagctgtgtaaaggaattgccggagaaattctggcgcctttacagcttacaagtggttgatgcaaggcgttcgagtttgagagcaattagtccggatgtcacaaagctaatcaacttgcgtcgtttagcactgccaacaaattgcgctctgaaattatcagtattgactaggcttggaaatctctctcgtctacgaaacttaaaatattttacagttgcaccaaggaatgggcggaaaattggtgagctgaaggacatggataagctcagtggaacgctaactatcaaatctatttgtaatgttaagagcaaggaagaggcttctgaggctagacttgttgacaagcaatatctcaagacactagatctatggtggcgagatagtgacggatacaatgtgatgagcagtgagaatggagtgctcgaaggcttgtgtcctccacgaagaattgaatgccttaaagtcgaaaactttaggggtgacagcttttgttctagttag

SEQ ID NO: 59540 - DNA, 465 bp, Oryza sativa
  Clone ID: PAT_MRT4530_61153C.1
acaccgcatgcagcacgcgcgcaagcgcggagtcccctagagcgcgcgcccccttttttttttttttttttttttttttttttttttttgggggttttataactttttttgggggtttttttttttttaagaaaactttccaaccggaaatgaaactttcggccaaaaatgaaggaagtcaccaccctgaaaagaagggcccaccctcacacaggggggggcccaatcgcgaacaggaaaaaaaccaacgcccggtttttaaaccccaccaaaaaaaattgggagtgatatggggacccggaaacttggtcccgccccccaaattcaagggccctcccgggaggccttcccaataagaaaatgggggccaaaacaaaaacttggggaaaccgtgggaaaaaccgttttctttgtgaaaagggaacccccccccaaagcggaacaacatacgaggcctccccaaaa

SEQ ID NO: 59541 - DNA, 1447 bp, Oryza sativa
  Clone ID: PAT_MRT4530_61154C.1
gcacgaggatctttgcgcgcccccccctccctctcgctcgcatcttccccggagatgccgccgccgccgagatgcgccgccaccaccgcccaccactccctcctcggctcgcccacctgcctcgcgcgcccgcggcggcggtgctgccccgtgcgcgccgccgtcgccgtccaggccgaggcgcaggccaaggacagtcctcttgcactggcacaagctcatgaaacccgagacaagctgaaggctgcacactcagagttagccgaggagggggccgttgagattgtcatcattaagaccacaggagacatgatcttggacaaacccctggcagatataggtggcaagggtttattcaccaaggagatcgatgatgcacttttgcagggaaggattgacattgccgtccactcgatgaaagatgttccaacatatttaccagaaggcacgatattgccttgtaatctcccacgggaagatgtgagagatgcattcatatgcttgactgcaagttcccttgcggagcttcctgctggcagtgttgttggaagtgcttctctgcgtagacaatctcaaattctctacaaatatccatcactcaaagttgttaacttcagaggaaatgttcaaacacgattgaggaaactcaaagaaggagatgtccatgctacattgttggctctagctggactaaaacgcttaaacatggcagaaactgcgacatctgtattgtcagtggacgaaatgcttccagcagttgctcaaggtgctattggaatagcttgcagaagcagtgatgacacaatgatgaattacttgtcctcattgaaccatgaagataccagattagctgttgcatgtgaaagagaattcttgtcagttcttgatggcaactgccgaactccaattgcggcatatgcttctcgtgacaaggatgggaattgttcattccgagggctattggcttcacctgatggatctacagtatatgagacttcgagaactggaccttatgatttcgatatcatggttgagatgggtaaagatgctggccacgagctgaaagcaaaggctggccctggcttctttgatagcttgcaatgaaaatagaaatccaccattggccaactagagtgttgagtggattattttgatttttttttgtaccctagttctactagaggattgtaccacaatgttgagctgtctcattcagatctgtatctttgcttcttttagcaaggtgagctagaatttagaacgtggttccacggttattgtaatcccttgtatttccaatgaattctggaagaggcttttgcggccaattatgttgtaactttgtaatttgatgtaattttgcagatgctttgttttcaaaataatttgattctgaaaaaaaaaaaaaaaaaaaaaaaaaactcgagactagttctctccctcgtgc

SEQ ID NO: 59542 - DNA, 538 bp, Oryza sativa
  Clone ID: PAT_MRT4530_61155C.1
gagaaaaatcccatctttggtctcctccccctccctctcgctcgcatcttccccggagatgccgccggcgccgagatgcgccgccaccaccgcccaccactccctcctcggctcgcccacctgcttcgcgcgcccgcggcggcggtgctgccccgtgcgcgccgccgtcgccgtccaggccgaggcgcaggccaaggtctcgctcatccggattggcacccgcgggagtcctcttgcactggcacaagctcatgaaacccgagacaagctgaaggctgcacactcagagttagccgaggagggggccgttgagattgtcatcattaagaccacaggagacatgatcttggacaaacccctggcagatataggtggcaagggtttattcaccaaggagatcgatgatgcacttttgcagggaaggattgacattgccgtccactcgatgaaagatggtccaccatatttaccagaaggcgcgatattgccttgtaatctcccacgggaagatgtgagagatgcattcatatgcttgact

SEQ ID NO: 59543 - DNA, 315 bp, Oryza sativa
  unsure (1)..(315): unsure at all n locations
  Clone ID: PAT_MRT4530_61156C.1
ccgtttcacaatgtaagtcattttagcactttcccacattcatattaatgttaatgaatctagatagataaatatgtctagattcattatcatcaatatgaatgtggaaaatgctaggatgacttacaatgtgaaatggagggagtagaatttagtagttgtgagggttttaccttgtttggtttttttgttagtttgcttctatntttggttttgttatttttgctacatactcactgtgtgagtttgcttttgtgtgaacccttataataaatggctgtggttcttganccccaaaaaaaaaaaaaaaaaaaa

SEQ ID NO: 59544 - DNA, 297 bp, Oryza sativa
  Clone ID: PAT_MRT4530_61157C.1
atggcgcgccatgttgtggaggtcatggccttgccgcgttgtggttccccctcccccctcccaggggcgtgtggcccctccccccatgaccgaattcattggaagctcgagcaggagatggtggtagcagtggagccatggaggcaagcaggaagcatactaggaagaccgacgaatgaaggcgacgacgacctcgacctcacccatcccgatctgcggccctggagtgctaaggttggggaaggagtggcgtcgcggtatagaggttgggaaaggagcagcggcgcggtgcggtag

SEQ ID NO: 59545 - DNA, 226 bp, Oryza sativa
  Clone ID: PAT_MRT4530_61158C.1
caacttcgcaggatggctaggtgatgacctatgtctcagagactccgccaccgtaatgtgcagcaacgacctaaatgatgctgctcccggagacgatgatgtcggcgacgcctacaagatcgtcttcctgttgttgttctggcggaattctccagaagtgagttgctggggcccggccccatcctcacatagttctcccaggaaggacacctatggagttttctag

SEQ ID NO: 59546 - DNA, 712 bp, Oryza sativa
  unsure (1)..(712): unsure at all n locations
  Clone ID: PAT_MRT4530_61159C.1
gacctctctctcctctcctcacattcacatcactcgagccttatcccctccccgggccctggcatctcgttctcttgcgagttcgcactcctccaaaatcccgcatccagttcccctcctcactccgtccatctctcccgctcctccccgcaccttcctccctgctccatgctgctcccgcttctcccgcctctcctgcttctccgtgtccacctagttgcggccacgcggatgcggcggcggagggttacgagcaaatagatctgatgcgggaggcggatctggtagaagggttcggctctccagcggcgttcatggcagtggcggagcggtatatggctttgattcaagagacgcgagccaaggggaggaagcatgttgtcttgcagttctgatccaggaggcggcggcgaccgcgacggcgggtggaagtgactcggatgcgacagcggcttcggaggtgtgtaaggcggtggatatgatgcacaaggcggaggcgatagatggatgcggtgctgttggcggatctgatgcagattattnttcttcgttgttcttggttcttctatgttcttgcttgtgaatccagagncatttcttctttttttttcttttcaaattggagaaatgtctcttctttatgtagtataaaaatccaacttaattttgtccctttnttatgagaagatgcctcctatatgtactggagact

SEQ ID NO: 59547 - DNA, 404 bp, Oryza sativa
  Clone ID: PAT_MRT4530_6115C.1
cccacgcgtgcgcgacgagtacgagcatgcgatggccaatgcgtatgacaaggacgagatggagcgtatatggttgttgcaatacacatgctagcatgattatacgtcatatgcggaagacaccacgcgtgtgaatatgcatggcagtacagcagccggctctcgacgtctcttccctgcatccggtggccgtgctgactgcgcagacgacgccaccgtcgacgcagatggagctcttctgctcgccataccaatgggaagagctgacagccgccgcagctgaggttgatctagcttatgagcatagcaaaactgacactggtgatatacctgtgggatcatatgacaaagatgaattttcacacaagctgacatgacatttgacagtgacacatgcaaatggg

SEQ ID NO: 59548 - DNA, 266 bp, Oryza sativa
  Clone ID: PAT_MRT4530_61160C.1
gccacgcgtccacgccttcgcaaagattgctcgtcacagggtagggcagaatctcacccagagaaggagacgccatcatggctagcctccgaatgtgatatcatagctatggcgagtggcgcgagccagaactgtgtcctggttcacacacgggtaaagaatgtctggaccagccaggatggtggcaaggagatctcgatagcatgcaatatcatcgagaacgagtgacaggcaaggatcatcaggtcctcggatacgctgttgat

SEQ ID NO: 59549 - DNA, 765 bp, Oryza sativa
  Clone ID: PAT_MRT4530_61161C.1
tccccgggcgctggtggcgcccccgggcccgaggctctcctcccctcccctcccctcccatggcggcgaaccagccggcgggcgaggccctcgcggccaacatctccgccatgtcccgcccggagatgtacgacctcatgtcccagatgaaggtcatgatcgaccacgaccaggagagggtgcgccggatgctcgtcgacaacccggacgtcacccgcgctctcttccgggcgcaagtagtacttggaatggtgaaagctcctaaaactgcacaatcttcagacaaggcccaacctgcagctgtgcaggcaacaccatcttcatcagttaaacctacagttcaagatcattctagttttccccaacctcagttaccttccagtcagcagaacatacaaccttctggcccattttcatctggtccgtctaatccggcatcgtctttggacctcccagctatgtcagcaaatccacaacaatcagcacaagcgaaaggttatcctatccatcaaatgcctcccacatcaacaactcagacatcccagcatcaaagtgctaccctacctcctcatgtttcatcacagtattcaaatattccatcacatatgccaatagttcatagtcagccacagcaacctttgcaaaatcctggtatgtttaaccaacagttacaaccaccattgccccagttgcctaggcctcccaacatgcagcccttcgtacaccaaatgcatccgcaagtacccagttcatttggcttgagtc

SEQ ID NO: 59550 - DNA, 454 bp, Oryza sativa
  Clone ID: PAT_MRT4530_61162C.1
gcccccgcgatctcctctcccaccgcccctcccctcgggctattttgtgaatagagtaaagtccatcactggtctctaaacttagactgctgtatcatcccggttcctaaactcgcaaatcgaccgttcaggttctcaaacttgttcgactgtgtcatcctacttcctaaacttgcagatcactcgtttargtcctccaacttgttcagttgtgtcacccctgtccctaaacaggatggtataaaaactttatatcaaaaatatttagagaccggggtgatacaactgaacaattggaggacctaaattaatgatctgcaagtttagggaccgggatgacacagtcgaacaagtttgagaatctgaacggtcgatttgcaagtttagggaccgggatgacacaacggtacaaatttagagactagtgatggactttactcttgtgaatacgttc

SEQ ID NO: 59551 - DNA, 523 bp, Oryza sativa
  Clone ID: PAT_MRT4530_61163C.1
ggtgccggtgtccaaccctgggtgtcgacacggcgcggatgttgtcggtcttgacgtgctggctgcgcgcagcactccacagtgccaccatgtgccagccacgcacgtcgaagccccgccacggcacagccatcgcacaagaagccagctccggcgcaggcagccaccgacacgccacccacgtcagtggcaccaagcaccaccggcggcggcagaggcacatgcacaactgccacctgtttagcttgctgcctaccagtcgccccagtacgtgcctccggatggaccagccgcgcccagcctcgggaagcgtcagcgcatgattgaggaagtagctaaagctacatgctacagtgacgagactagagtgaaacctagctaggatcgacgtcgtagatcgagagcagcctaatcaaccaagattttattcgttcgtgctcaagtagctttgtacagtagtacgtgtacataccgttttccttattatagtgatggtactactatatgaccgaaaaaaaaaaaa

SEQ ID NO: 59552 - DNA, 240 bp, Oryza sativa
  Clone ID: PAT_MRT4530_61164C.1
atgcccacctcgctcggtcaccagggagcacgtcatcggacgttgctgcagaatgggagttcatttgagaagggcctaaccgccttgtcgtgccaccaaagagaatggttctgtatcgctggggagcacatcgacctcgccggagaggagagaggcatcggtgaggagaatgtcgtcatcgcccgaaaagggatcaagggagagggaaaggatatcggcctagtattgattgggtattag

SEQ ID NO: 59553 - DNA, 594 bp, Oryza sativa
  Clone ID: PAT_MRT4530_61165C.1
atggagcggggtgggccctgcgacggcctctgtcgcttccggattcacctaggtatgagaggggactgcccgtcgcccgctggggacgggggcttcgtccgtgccgtcgaggatgcctgtggagtggtgttcccgctgcagttcaagtcaaggcttagctcctccgggagcaagggcggcggatcaggcggcgcctccctcgggaaggtcagattcgtcaccctagggagcggctgcagctacggcgacggcgggcgcgcaattgggacagtggatccagcgagtgggcggcaacgcgggcagcggcgccaccgccatccccttctcactgccaacgccgacaacgacgacgaggcaaccctccccccctcaccgccacggcggcaggggcggcaccgcctcatgcggattcgccgatcccgcgccggcgtggacggcgggctgtcaatccggcgccggcgacgacggtgggcggcgggggcaacagatccagggctggtgacgacggtgggcggcgggagtgatggatctggcgccggcaacgacgtgcgcctggctcgggcggcggggatacggcgctccggtggcagctag

SEQ ID NO: 59554 - DNA, 390 bp, Oryza sativa
  Clone ID: PAT_MRT4530_61166C.1
atggcgatgacagggcacgaggtggagtgggaggacgacgtgttcatgggtggcgacgtcggtggtatagatggccaaaaggcccgcccggcccaggcacggcccatcagccatcgggccggcacggctcgggccgtgccggcccatgggctgcgcctcccgcccaggcacggcccaccagccgtcgggccgtgccgggccggcccgaaggcgcaggctagtgtggcaagcttgcgtgacgctcaatgtggtggagaggtagcgggattgatgacactggggttgcgtgatgaccggcgacgtgacactgtcatgagtgacctacgggagggtggctgcccggatccagcgttcccctacgaggcggttctcgatgatgatgggcgctag

SEQ ID NO: 59555 - DNA, 624 bp, Oryza sativa
  Clone ID: PAT_MRT4530_61167C.1
ctagctgccaccggagcgccgtatccccgccgcccgagccaggcgcacgtcgttgccggcgccagatccatcactcccgccgcccaccgtcgtcaccagccctggatctgttgcccccgccgcccaccgtcgtcgccggcgccggattgacagcccgccgtccacgccggcgcgggatcggctgctccaccacctgttgtcggcgccaacgcgaatccgcatgaggcggtgccgcccctgccgccgtggcggtgagggggggagggttgcctcgtcgtcgttgtcggcgttggcagtgagaaggggatggcggtggcgccgctgcccgcgttgccgcccactcgctggatccactgtcccaattgcgcgcccgccgtcgccgtagctgcagccgctccctagggtgacgaatctgaccttcccgagggaggcgccgcctgatccgccgcccttgctcccggaggagctaagccttgacttgaactgcagcgggaacaccactccacaggcatcctcgacggcacggacgaagcccccgtccccagcgggcgacgggcagtcccctctcatacctaggtgaatccggaagcgacagaggccgtcgcagggcccaccccgctccat

SEQ ID NO: 59556 - DNA, 2569 bp, Oryza sativa
  Clone ID: PAT_MRT4530_61168C.1
ccacgcgtccggcgaccttgggatcctccggcggatagctcggcctccctcggggctttgccgggctaagccagcgcccgcggcgtcgtgtcgtcgtcgtcgtcgtcgtcgtcgtcgtcctcttgtgatcttgttttcccggcgtcgtgacgaggccggagaggaagagatcgaccggagccagcgcctctgctcgccgcggttgtttcgctaagcttcgtctggttcttgattccctcccccacattctcggccggaagagggcggcggcagcggcgggtggccgccgggctgccattgtccgggaggcgctcctcccccgtcgcatgggtgcgcggtgggggcctcgccgcgccaccgtcgggccccacctccgcgacgcgctgcgtcacctgctcttcgtcttcctcgtgctgctccaggcgcaggcggggcgcggcggcgccacgctcaacggcgaaggaatggcgttgctcgagctgagggagagggtggaggctgacccccatggcgccttgcgggattgggatccggcagacgccacgccctgcagatggtccggcgtgcattgctttgacggtaaagttgagattttgaacttaacaggccgagaattggtgggaactctcgcacctgagattggacgtcttcaacttttgaaatctctcattcttcgaaacaacaatttccgtgggaaaattcccaaagagttcggagggttaactgcccttgaagtactggatttgagcagcaacaacttggatggaacgattccagaagaattaatggcaatgccactgctcaagcagctgtcacttcatgacaatcagttccaagatgatatctcttctttgcacattcaagatatatctgatgagcaggcaggatgcttgagcagaaaattaggttgctgggatgtgggctattttggtctaggcgagccacacattatgcaaaatttgcagtcctttgcaagtgccgtgggccgcaggctgctcggtgaagttggcaatctgcctgccctttcagggaattatgctaaatcttctggccctgtaaattcagaagagatccaaagggctattgatgttctctctttagggagtggttcattctctgcattcccaaattcagaggccgaagttctggaatcagctgtaaatactgatgctgctgcaatgcagtctggagcagcaaatcaatcaaccgatgaagtgtctggttcaaagcacagcaagtgggcatattttatgataattccagctgcaatattgctgattagcctgattgtggctccaatcttggtctggcggaagcgagggcgtgcggcaataggaccttggaaaacgggtctaagtggcccacttcagaaagcatttgtaacaggtgttccaaagctaaacagacctgaactcgaagccgcttgtgaggatttcagtaacataatcaacactttccctagctgcaccgtgttcaaagggacattatctagcggagttgagatcagtgttgtttccactgccattttgtcgctcaaagagtggcctaagagttcagagacatgcttcagaaaacagatagacacactatcaagagtaaaccacaagaatttcatcaacctcctaggttattgcctggaaaatcaacccttcatgagaatgatggtgttcgagtatgctccaaatggcactctctctgagcatctccacctcaaagaatttgagcatctggactgggctgcaaggatgaggatcatcatgggtgtggcatactgtctccaatacatgcaccatgatctcaatccacctgttgcgataaccgacatgcgctccgacacaattttcatgacagatgattatgctgccaagattgctgatgttggtatctggaaagaagtcgccataaaagcaaagactgcaaaggaggatagcagcagccgttctgaatgtcctcctgatatcgcgagcaacgtctactgctttggcacgcttctgatagagatcatatccggaaagctccctgaagcagacgaccaaaaatccatgtgcaactgggccgctgagtatctgaagggcaagagctacagcaagctcgtcgacgcgtcgctgaaggaacacaacgccaacgagctggaggccgtctgcgaggtgattcaggagtgcattgatcccgactcagatcagaggccgacgatgagagacgccacccgcaagctgagacaagctctcaacatctcgccggaggcagcgacgccgcggctctcgcctctctggtgggctgagctcgagatactctctgcagaggcaacctagtagattgatcagtgatgtatactgttgctggtgaaccaatactcgcggcagcatccctcttcacaaggctaaaggaaaaagcctgtttatgtgcagaattcatgttcttgatcctatgaaaaaaaatgtcgtgtgacagatgtgcaactattgggtctaatgtgcattgatctttacacaagaatggaatgtgatttgtatgaatatttataagtttgatcagtgtaaaaatcaagcaagttcgctgctgttattcc

SEQ ID NO: 59557 - DNA, 2202 bp, Oryza sativa
  Clone ID: PAT_MRT4530_61169C.1
atggcatcacctccagcttctgcctcaaggccactggatcctgcatgggttcatgcaaaagtaattggcaattcaaagaatgccttagcatgtcttcattgtgggaagaagattggtggcggtggcatcacccgctttaagtaccatcttgctggaattaccggccaagttcaagcctgcaagaaggtgcccaatgatgtcaggcgtcagatgaagcaacttgtcaatgagcataggtcacggcatgacactcgagatggccactattcaggctttgaagaggattcttctgatgctgttttgtcgaatggaagctcaggggttcaacttaggccgtctaggaagcgaagaacagggtgtgtttctccgcaagctgctgcaggctttgaaagaacaggatacgtctctccacaagctgctgcaggttttgaaagaataggatacatctctccactagctgctgcaggttgcgaaagaacagcatacgtttctccacaagctgctgcaggttttgaaccaagcaatgatgcattgttggtatcacgagacttggttcaacatagcatggatggtgtggaagttccaaatgatctgttacacaatgctagagttgctatggcaagatggtggtatgatgcaaatataccctttagtgcagcaaaatctcctttctatcagccaatgttagacgccatagcatccgctggagcaggtctcaagggaccgttgtatcatgacctacgcgggccattgttgaaacatcttactgatgacattcgcgaatatcttcatgatatgaagaaagaatggaatgcatgcggttgctcacttattgctgataggaagaagaatcatggagagagttcaataataaatttttttgtatactgccgacgaggtactatgtttttgaaatctgtcgatacttcagcagagaaagcaaatttgcttgagatctttgatcaggttgttagagaagttgggccggaaaacattgttcagtttatcactgatttagatccgagatataagactactgttaaggttctggaagaaaggaaagaattcacaggtggtagagatctgtgccgtccagccatctcaagatttgccacacatttccttagtctccaatgtattcttaaatttgagaaagagctctgccaaatggttactagtaacaaatgggtaaaatcaacttatgctaagggtggtgtcggcaaagaggttgcagctatgattttgaatgcccacttttgggcccagtgtaagcatgtagtcaaggtcactgagccactgttgtgtgtgcttcgactggtggatagtaatgaaaaaccttcaatgggttacttgtacgaagcaatggaaaaggcaaaggaattgatcagggcacggatgatgcataaggtgtctctttatgggccgtatgttagagtaattgatgctaggatggagaaacaacttaacagtccattgcaggcagcagggttgtttttcaatcccggaatattctttagtcccactttcaagatgcaaagctatgcacatagaggacttgttaagacaatttcttgtctggtccctgatgatgatattcaagataagatatttctccaacttgaggagtataagaaaggaactggtgactttggcctaccaattgcaattcgtcaacgtgaaaaacttgatccagttgcatggtgggataactttggcaatggaactctcaagctccaaggtcttgcaaagcgagtccttggccaatgctgcagcgcaacaggctgcgaaaggaattgggacattttccatcatatccactcaagaaagattagcaggcttgaacgctcaaggctaagtgatgttgtcttccttcaatacaaccagaagcttcgggaacggaaccttcacaaacacagagatgccatcgacccaatcagcattgacaatattgatgttttagatgaatgggtcagtgaagagcctagccttctttgcagagatgacctgaactgggagagaatagacgcaccatttgccgagccgacttctgaagacgaagaatttgtcgctattgatgacgaggaggctccaacagcgtcactgtcctggccggcagcagcagcagaagactcatattgcccaccacctgatcaagatccctatcagtatgtcacccaggaggatggaattctacctttctga

SEQ ID NO: 59558 - DNA, 202 bp, Oryza sativa
  Clone ID: PAT_MRT4530_6116C.1
tcctgctggatacgtatatgactgaattattagataacggacgatggggtgtactcgagagaatcatttggttgcaagaaaaaaaggaacctgcacgctcatgttgcttctcatctgcagacgctgacccaatcaagtcttggagggagtaccgaggttatgttcatccgcaggtattgccgtacagacatttttcccggcg

SEQ ID NO: 59559 - DNA, 423 bp, Oryza sativa
  Clone ID: PAT_MRT4530_61170C.1
cactaagtcttcaaacagctggatggccgtaataaccaagccatcatatttcacaagacaagcattcagtgctcataaccgaggaataggtgaaaagaaaggacaaaatacaagaaaagactatacatccaaaccccagcttaacatctatttttactaaccttaatcatccccaacatttgtacatttttctcaattctaacattccacgaaacaaactccaagtcaaaacatttaaaaagcacttcttcagcagcagctcctctaagttccaacacccagcttgctaaaccgcttatgacatcgatatttgaggtatcttcacatctcaggactaatccataaaggtcccttgggaggacacacttggcccactggcaaccagtagagatgggctctggtggaggaacaatcattaacacc

SEQ ID NO: 59560 - DNA, 189 bp, Oryza sativa
  Clone ID: PAT_MRT4530_61171C.1
atggaaacaattatatgccttccagagttgattcgagaaggcataaatagggtagagagcctctcctccagctctgagttgctcctctccaggtccttcaccctcgcctccagctcactcatgtacgccttcttcctctcccgagcctgctgcgctgacacccggttcctcagcaatctagtggattaa

SEQ ID NO: 59561 - DNA, 675 bp, Oryza sativa
  Clone ID: PAT_MRT4530_61172C.1
atggaggaaaagaaaaaggagaaagataaacaatttagtacacaggtgatacacaatgtcatatcagtcagcggctcatgtgtttggggattagaggggaggaggaagttgtcgtgggatgtgggaggtcaagagaaagagtcctatcgccatggcgccgtgatgcgccaaggagaacgagaggtatttgggttttctgttttctatctgattaagtccagagcactcgaatcggccatggtcggaagcgccgcgtttttcctccacactaggtgcttagtgctcgaggaaggccaacatcttggcagctcaaccacgctcaagccaacagaagctctgtgctcgagctacaggccatcttgcctccacggctccatccctctctcccagagatcaaacaccactgctgctgccctccagattgttcttgcagctgccctcgagttcactccccagtcacaatcgagcacgtcagctgccaccacagttgctgccgagatcgttcaccatgtcaccctccagcccgcctgccactgtaccatggtgatttcttgtgcaaaaggaacggtaggaagagggtgtgtggaggaggaagaaaacataagggcaagaggaataagtggcagcagttctaaaggagtgggagtaacggagataaactttcgatgctattaa

SEQ ID NO: 59562 - DNA, 167 bp, Oryza sativa
  Clone ID: PAT_MRT4530_61173C.1
tttttgggtgggtttttttagaggagtgcaaacattctttattgattggattgaaactttgtttatacagcaggccacaagacccaactcaagcccgcaagacacggatacataggcccaaaagtgtagacacctgggaaaccgcaccagaggccctccatggatcc

SEQ ID NO: 59563 - DNA, 1447 bp, Oryza sativa
  Clone ID: PAT_MRT4530_61174C.1
atccccgggctgccgcgggccccgctctcgtcgcagcgcaccccgtcgcgtgcgacgactccatccccgtcacaacaatgtcgtcccgccgagacgtcctcgctgttgtcctcgtggccgcgctgctcccgccggcgttgtcccgtgggctttggctggggcaccacgggctggggcacgggcacgggcgatggcgcgcgccgcatgtcggcggacacggccagggacaggggccgcagcagcacgcgccgctcggcggcggcgggtggtcgtcggcgcacgccacgttctacggcgggggtgacgcgtcgggcaccatgggaggggcgtgcgggtacgggaacctctacagccaggggtacgggacgaacacggcggcgctgagcacggcgctgttcaacaacggcctcagctgcggcgcgtgcttcgaggtgcgctgcgacgccggcggcggcgggagccactcgtgcctgcccggctcggtcgtcgtcacggccaccaacttctgcccgccgaacaacgcgctcccgtccgacgacggcggctggtgcaaccctccgcgcgcgcacttcgacatgtcccagcccgtcttccagcgcatcgctctcttcaaggccggcattgtccccgtctcctaccgccgggtggcttgccagaagaagggcgggatccggttcaccatcaacgggcactcctacttcaacctggtgctggtgaccaacgtgggcggcgccggcgacgtgcacgcggtggccgtgaagtcggagcgctcggcggcgtggcaggccctgtcgcgcaactggggccagaactggcagagcgccgcgctcctcgacggtcaggcgctctccttccgcgtcaccaccggcgacggccgctccgtcgtctccaacaacgccgtcccccgtggctggtccttcggccagaccttcagcggggcccagttcaactgattccgctcaattttactcgagcatcgtcgtggtagttgcagtagtactcccaactggaccgtgctgggaagtgccattgttttatgattggtactcagtctcgccttggttcttgggaaagtatttagtgggtagtttggcctagtatcaacatgggctttgtgctggtgtcactgctagtggtagtttgttacaagtaccattagttgagcttttgtggtatcttttggctagggattggaagtggtggtaaggctgtggcttgattgacagaggccgccttgtatcacccgccaaaatagcaaaattgggcctaatgggaatggccttctgctagtaatggttttgcctggttgttgtctgtaccggaccccagtaccggacctcattttgggggtgccaaacagtttaggcatctggggtatgccctgtgtgctgcttatgaacaatttctttttactaatactaaaaaaaaaaaaaaaaaataaaaaaaa

SEQ ID NO: 59564 - DNA, 1171 bp, Oryza sativa
  Clone ID: PAT_MRT4530_61175C.1
atccccgggctgcgggtgcccggctcccgccaccaacagtactacttcctccggagcgcggtgctcgatctcgatcgcgaaatggacccgtacaagtacctcaacatccggttcaaccccgacggctcgctcacccgcaacggcgcggccaggctcctcccgccggcgccggcgggggagcccgtcgacggggtcaacgggccggcgcgccgcattgtgcactccaacgacgcgccactcaacgacgccaacggcaccaccgtccgcctcttcgtgccgtccggcccatgcgtcggggccgacggcggaggcaggctgccgctggtgctgtacttccacggcggcgggtacgtcctcttccgcgcggcgtccgagccgttccacaacacctgcacggccctcgcggccaccatccccgcggtcgttgcctccgtcgactaccgcctcgcgcccgagcaccgcctccccgccgcgttcgaggacgccgccgacgcggtccggtgggtgcgctcgtacgccgcgggctgcaggcccctgttcctgatgggcagccacgccggcgcgagcatcgcgttccgcgcggcgctggcggcggtggacgagggcgtggagctgcgtgggctgatcctcaaccagccgcaccacggcggcgtgaagcgtacggccgcggaggagtcgtcggtggacgaccgcgtgctgccgctcccggcgaacgacctgctctgggagctcgcgctgccgctgggcgccgaccgcgaccacgagtactgcaacccggagaccatgctcgccggcgtggacgccgcgcggctgcggaggctgccgccctgcctggtgctcggccggatgaaggacccgccgcgtgaccggcagaggacgctggtggaggcactccagaaagccggtgtcaccgtggaagcaaagctcgacggcgccgggtaccacgcgatggagctgttcaaggaggaccgcgccgcggagttcatcgcgcaggtcaccgacttcgtccgccgccacaccggcgccggcagcgacgtacacgccggaaggagcaggctgtgatcgatcgagaggagaccatgctattgactgcaactaccaccactatgacattggtactactgtactgtactactggtggtggttggttgctgccatggcactatctacc

SEQ ID NO: 59565 - DNA, 410 bp, Oryza sativa
  Clone ID: PAT_MRT4530_61176C.1
aactctaggcgctgctccacgcgaccacgccggcgttgttgttcacgccggcgccgggccgtccccgtcgtcgttcgcgccgtgcgcaccgtccaagccgccaagccgggggccgggacgctgctacagcgattgctccagtcctcctcgacggcttgccggttgtgggttgccagcttggtggcttggcgcgggttgctcgccacgtctttacaggtctcttggttggatgctgcaggtttccactggtccggggctccaccattcaacccaggattggtgaaacatgatgaggagctgttatattgcgttattatttgggaaccattgagcatgaactattgagtttcagactcttttagtcttttttgatgcattcattggtgattaatgcttcttacctttacttg

SEQ ID NO: 59566 - DNA, 424 bp, Oryza sativa
  Clone ID: PAT_MRT4530_61177C.1
gacaattgtagtcattgatgtttcggataatgcgttctatggtgccattccccagtctattggggacctagttctacttagtggggtaaacatgtcacataatgccctcactggactgatcccatctcagctcggcatgctacatcaactcgagtcgctcgacctctcttcaaatgatctttcaggagagattccacaagagttggcatcactggacttcctttcgacgttgaatatgtcctacaataagttggagggaagaatacccgagtctccccacttcttgacattctctaatctctcatttctaggaaacatgggtctctgtggacttcagctgtccaaagcatgcaacaacatatcatcagatacggttctacatcaatcagagaaggtgtcaatagacattgtgttgttccttttt

SEQ ID NO: 59567 - DNA, 231 bp, Oryza sativa
  Clone ID: PAT_MRT4530_61178C.1
cactatataagagctacgacgtacgatgcccgcctacagaagctaggatccagatgtatcggccgtccttttttttttttccaagatatggccgacgggaacgcgaatttaaattatgaagcaacaggactggatacaacttctacccagtttataccgatcaattacacacgaagatgagaaaaaaggacagaacattgtacatgcccatgaaagcacccatccattgcc

SEQ ID NO: 59568 - DNA, 867 bp, Oryza sativa
  Clone ID: PAT_MRT4530_61179C.1
atggtggaggcgagaatgccgccggggttcaggttccacccgagggacgacgagctggtgctggactacctcctgcacaagctcgccgccggcggccggggaggaggggtgtacggcggcggcggcggcgtcgccatcgtcgacgtcgacctcaacaagtgcgagccatgggaccttccagacgcggcgtgcgtgggaggcaaggagtggtacttcttcagcctccgcgaccgcaagtacgccaccggccaccgcaccaaccgcgccacccgctccggctactggaaggccaccggcaaggaccgctccatcacccgccgctcctccatctcctccggcgagccctcctcctccgccgccgccgccgccgtcggcatgcgcaagacgctcgtcttctaccgcggccgcgcccccaagggccgcaagaccgagtgggtcatgcacgagttccggctcgaaccgcagcctctccacctcaaggaggactgggtgctatgcagggtgttctacaagaccagacaaacaattccaagcccatcatctgaagaggccgtcacactgcccaatgagctagacctgcctgccacgccttcgctcccgcccctcatcgatgcctacatcgccttcgatagcgcaccgacgacgacgccatcgatggtcgggagctacgagcaagtgtcctgcttctccggcctgccggcattgccaatgaagggctccatcagctttggggacctgctggccatggacacctctgcagagaagaaggccatcagggtactgcacaacagcaacactgcaaagctggagctctccccagattggggacaggagagtggcctgtcacagatgtggaacccccaataa

SEQ ID NO: 59569 - DNA, 228 bp, Oryza sativa
  unsure (1)..(228): unsure at all n locations
  Clone ID: PAT_MRT4530_6117C.1
aaaatgatggctttataatattaatgtaatatcaaatctttgatagggcgcacagcatgcatcaaaagttctgaaattcgagaacgccctcattcgtggattgttttcctcttcatggctaggatttttccctaaccccagcctgccaaataagngccactacgagttatggaaccattcttctctttctaggggttgaagattggaatatttcttctttgccctaat

SEQ ID NO: 59570 - DNA, 217 bp, Oryza sativa
  unsure (1)..(217): unsure at all n locations
  Clone ID: PAT_MRT4530_61180C.1
cggacgcgtgggcgctttgatagtgtcagtattattagtgcaactgctgcggctacttttgcctgagcttgtatgctagtagtattaatacttgctacagtagtattgtgttttggagtattacctgcattgatctgcagcacattgtttacctatccatatgatgatgattagtagtaccactattgcttatcaatgatccacattctgctgcgna

SEQ ID NO: 59571 - DNA, 141 bp, Oryza sativa
  Clone ID: PAT_MRT4530_61181C.1
atgaccgtgggtcgatgccactttagcccccggctccggaggctacggaggggtcccggagaggagaaacagctcccgcggaggccaagagctccggagcctggcaaggctcggagaccgccaggagggttccaggggtga

SEQ ID NO: 59572 - DNA, 1079 bp, Oryza sativa
  Clone ID: PAT_MRT4530_61182C.1
ctcgccgcgacgactttctctctccttttctccgttcatctcgagcagaggagaggaatggattcctcctccacctccgggaggaagggaggaggactcctcctctcgccgccgccggcggcggtagttgtggcggtggcggtgctcctgtcggcggcagaggcggcgacggaggagccgtgctacccgcggctgttcagctttggggactcgctgacggacacgggcaacttcgccttcatctacggcaacgactcccgcgagccggcgctccgcccgccctacggcgagaccttcttccaccgcgccaccggaagattctccgacggccgcctcgtcgtcgatttcatcgcggacgcgctggggctgccgttcgtgcggccgtacttgagcgggcggaccgcgggggacttcgcatgcggggccaacttcgcggtgggcggcgccacggcgctcagcccggccttcttccgggcgagaggggtgcccatggctgacatcgtgcccctcgacatggagatgaagtggtttcgggatctgctgaaactgctctgccccggcgacctgcccgtgtgcacgggcttgatgaatcaatgtgctgttggctgagcggaaaaattgagggccatgatgacaacctacctgttgtggagtggggtgagcattgcaaaacattggtagcttgactggcggcgccattctgcaaatatgtgtcccaatcacctgatgcagtggatttgaaaccaaactctaggtttatgataggacctaactgtgggtgtgtgtcgaattgctattagtttctgtgcacgtggcacggttattttgtgtgtgtaccagtcgtatcgtgtatgccagacttatcgttcctgtcttgtgcgtcagcgtcttgatattgcatgtccatatttcacgatactgttctttgttctgtttgactatatttactcatacgcgctaaataagatatacgtctgtttattccggctcacctcactatactaagactacgtcctcttgtgttacggtacatttcttgtatttacgtgtgtcttacgtcagacgcttcttactctccg

SEQ ID NO: 59573 - DNA, 124 bp, Oryza sativa
  unsure (1)..(124): unsure at all n locations
  Clone ID: PAT_MRT4530_61183C.1
cgcnangttttgcangctagcagtntaggtttnntagagacactagagagngatctaancagcttcgagacagagaanattgangcacnnattncatgtagtggtgcaaggatgcatcttacga

SEQ ID NO: 59574 - DNA, 175 bp, Oryza sativa
  Clone ID: PAT_MRT4530_61184C.1
acctacatgtaatcgcaccatgtttggcacagctttggattaagatttcttagagctggatatttctagctccacaaatccattaaccaatatatgtttatgttgatataatattatttttttttgactgaaaaaggtagagagactctaccttataaccattgtattaatggta

SEQ ID NO: 59575 - DNA, 330 bp, Oryza sativa
  Clone ID: PAT_MRT4530_61185C.1
ttttctctcacagctcactgcatcaatggccgcggccaccatggcgctctcctccccggtgatggcccgcgcggcgccgtcgacctcctccgcgctcttcggcgaggcgcggatcaccatgcgcaagaccgacgcgaagcccaagccggcggcgacgccagtgaggccgggatactgcgactggcaggttctttacctagaacctctctgcaataagcacgacaggttctcacaccagggattgatgccctaacatacaaagagctaaaagagttgctctaatttaacagggagcctaaagatttcaacggatggttgggttgtgctttc

SEQ ID NO: 59576 - DNA, 477 bp, Oryza sativa
  Clone ID: PAT_MRT4530_61186C.1
aacaacaaaattcggcttctatatttttcttttttttttttctcgaagggaacgaggggaggaagaatacttgggtttctgactccaaacatatgaacaaacagccccccctttttcccctacaaactcactcccacctttgcctaataccacatggatccagattttttcagttacccccatggaaaagaaaaaaaaaccggcctttagctgcatcacggggggacccaaaactggcgggcggggcccatttgaattcaaactagcccatgcagggtcccaccttcatgagcttgttttgccaggccatcaaggattcattcattggccaatggctaaactttgagcgagacccgagtcttgaggggcttaagtttcactcccatgctctccggggacagaagttcaggcgatatacaaaaggggttcagggggctccgggggctgctatccagctggaaaggtctgtaaacccca

SEQ ID NO: 59577 - DNA, 684 bp, Oryza sativa
  Clone ID: PAT_MRT4530_61187C.1
gagcgggcggcgggcggcgggggctgcgacgaggaggaggcggtgggagcgagcggtggcggcagatgggagcgggcggcgggcgacgcggccgagcagcgggcggcgtgggccgcgacgaggaggaggcggtgggagcgagcggcggctgcggatgggagccgccggcgccgggagagagcggcggcgggcgacggccgggcggcgcagatccggtgcatagggccctccctcgcgcggatctggcggcggtggcggatgggagcgagcagcggcagcgggagtgagcaaccggcgccgggagtgagcggcggcagcggatggcagcgagcgatggctgggcggcgcggatccgacgcagggggccctccctcgcgtggatctggcggcgtctccgactccggcgacgacgacgagtgggcgacgacgacgacgatgcgggtggtggcggcaggcctcgtcccacccagatccagaggcgggagcggccatcgtgatcgagggcggcaggagcgggagctggcggcggcggcgggagcgggggcaagtcgcggatttttgcatgcgggtgccctggccgcatggaaagatggtgatctttgcagaccatttcacgcatgcggctggcccaaccacatgcaaaaatcgtgtgttcctaaccggcaccagcgacgatttatgtag

SEQ ID NO: 59578 - DNA, 1343 bp, Oryza sativa
  Clone ID: PAT_MRT4530_61188C.1
atggggaacatcctccggtgcttcaagggagacgacgatggcggtgatcactatccctactacaagccaacctccaggccacactaccagcctcctcactaccatggtcaacctgcagcccccccagctccactccagcagcagcatctcggcccccatggcgtcacgccgtccaccgtcggcgtcgccgccctggcgcacgatctcctcaacttcgaatccacatccatggttcctgatggcctcagtcagcacgttgtatcatccaggaaagcacaagttaaatggtaccagaaactgttggaggcgtataagaatacaacacctccaccaaaaacaccagcaaatgctgctcagctaattgcaagagcccttaatatgatccagagagctgatttggagggtattcttgaattttacaaccttccgatcccatcactccccacagcatcgtcaaactaccaaccatccttgctaccagagggcgtgcagtttgtgctaaacactttgccggtttatgacaagtgcattggagatggtgatggatttactgcatatgttcccacaacggatccgagggaatctgcaaatgtgccattggaagtgcatgagttggtgatagcaagaactcaagcacgcaaatgtagggattaccagagtgctgatgctcttctaagcagccttgatgaagctggatacaagataatatcttgttcagatgacgaggtcctcgcaaggaaatacagaataagaatgaggggaattgatgcaccggagcttaagatgccctacgggaaggaatcacggactgcgttggtgaaactaattggtgggaagagcgtcaaaatttatgtatatgatctggaccagtttgggcgctacgttggtgatatctattgcaataatttgttcattcaggagcaaatgttgaagaatggccacgcatggcacttcaagacttatgataaacgcccagagtttgcaagatgggagagagaggcaagagctgcaaaccgagggctttgggcgtcagggaatcctgagaaaccatgggattggagaagagaccaacgcaacgcaagacaggacgccatccaggtgtactgaaagttgagtctccagcactcatttggccacaaatgtgcatatatgtgtaattgggtaacgttgttgttgagtagctttgcttgcaatgaatgtgtcagaaaccaaagccaaatgtatgtgtggtttatgttgtacgaaagagattatatatccaggagtcagctgtgccgtgtgatgtggaggtgaaatgtggtcaatgcaagtgagctttgttcagaaaaaaaaaaaaaaaaaaa

SEQ ID NO: 59579 - DNA, 177 bp, Oryza sativa
  Clone ID: PAT_MRT4530_61189C.1
aaaaaaaaaccataaatcccattttattgggggcctttactttttactcctaacaaaatattgacgaccttatcctacaccatgcagtataacatttgcaaccaaaacaagtcccacgtgttattttacttttgaaaccccagggagcctaccttcatttttgggtaaacccgtggg

SEQ ID NO: 59580 - DNA, 1485 bp, Oryza sativa
  Clone ID: PAT_MRT4530_6118C.1
atgggctcgatggaggcgtccaccgcgccggagaacggcaccgccgccgccgcggcggccgcggcctcgacggcgtgcaacggcgcgggcggcggcggcggcgccgccgccgcctcgaacggcggcggggtagagaggaggctgaggtcctccgccgcgtccgcgtcgtgggcgtcgcatctgccgctggaggtgggcacgcgcgtgatgtgccggtggcgcgaccagaagctccatcccgtcaaggtcatcgagcgccggaagtcctccacctcctcctcccccgccgattacgagtactacgtccactacaccgagttcaataggaggctcgatgagtgggttaaacttgaacaacttgatcttgagactgttgagaccgatgttgatgagaaggtagaagataaggcaacaagcttgaagatgacacggcaccagaagcgtaaaattgatgaaacccatgtggagcaaggtcatgaggagcttgatgctgctagtttgcgggaacatgaagagttcacaaaggtgaaaaatatagcgaagatagaacttgggagatatgagatagatacatggtatttctctcctttcccaccggagtataatgactctccaaagctgttcttctgtgagttttgcctcaacttcatgaagcgcaaggaacagcttcagaggcacatgaaaaaatgtgatcttaaacatccccctggtgatgaaatatacagaagtggaaccctgtctatgtttgagacactttattacgatgttgatttgtttttgttctacgtcctgtgtgaatgtgatgatcgggggtgtcatatggtggggtatttctccaaggagaaacactctgaggaatcttacaatttggcttgcatcctcactctccctccatatcaaagaaaaggatatgggaagttcctgattgccttctcctatgagctttctaagaaggaaggtaaagtagggacaccggagcgccctctttctgatcttggtctgctcagttatagaggttattggactagagtgcttctagagattttaaagaaacataagagcaacatatccattaaggagcttagcgatatgacggcaataaaagcggacgacatcttgagcacgcttcagagtctggacctgatccagtaccggaaaggtcagcacgtcatctgcgctgaccccaaggttctcgaccgccacctcaaggccgccggccggggtggcctcgaggtcgacgttagcaagctgatctggacaccctacaaggaacaaggctaagctaagctctcgtgcaaaacgaattagataaaaagaaaatctgaccagctcaatcctgtacatttcccacttaggatctccccctctctttctctctcacttgtgtaccgtaactgtagtgttgtaaacatcgacattgttatttgtgttgcagtaatccatgaaagaaacaatagctctcgcttccctaaaaaaaaaaaaaaa

SEQ ID NO: 59581 - DNA, 142 bp, Oryza sativa
  Clone ID: PAT_MRT4530_61190C.1
ataggacataccctgattcccattaaatagccacgtcgatcatagtataacgttacatacactgctacaaatgtgtaccccgcatccggctgaaaaccatcttgtgcatgctgcaaaacagcatgtaaaaatcacccttttg

SEQ ID NO: 59582 - DNA, 2175 bp, Oryza sativa
  Clone ID: PAT_MRT4530_61191C.1
tcactgccgcttctgtgcatccgccagcgccttgatgccgtcgatgtcgaagtcgacggcgggcgacaccacggcggaggagggcctcctgctcagcgggaagagcttcccgccgccgccgccgccgccgctccgcgccggagcatcgttgctgctcttgctcagcctgtcgttcttgctcagctgcgccgcggctgccaccgccgacgagctgtcgccgccggcgccgccgccgccgcgagctgacgacagctcctggctcctgctgtgacagggagcgcgacgccggcggcccgcgtacacgtcctggagcatcgcgcggtcctccctggtgaggccaccgccggtgccgccgctcggcctcgccaccgccggcggtggcggcgaggacgacgacgtcgtcgtcggcacctggtgcggcggcgtgaggggaggggagcgcaccggcgacctgctcggcgacctggacctgccaccgttgcttgggcggctgtagctgatgaggtggtgaagccacaggacgaggtccaggatgcacgcctccgtcttggccttgtccgcatggtagaatgtctcgatcttgatcacgtctggctgcccagccgccctccgcatcgcatcgttcctggctgtattgttggcaatagggataatccattgcaaggttctctccattgaagatctgatttcagtgatcggaacctcttgtggttgtgggcaattatgtagtttttttcgaagagcagacttaatagttgggggcagtccttgatagagcgcatctcttgtgctttgtggtggaacggtgcttcgggaaacaatgttgtcaatctgtgaaatgatattggcatagtgcagcgagaggccagctgatcctaacgtctgacggctctctgaaggttgattcaattgtaaagctccatcataggtcccaaaagattcttgaatctctacatgtaaaaagtggacaatatccacaagtttatccatgacgtcttcgagcatcttattccaaagggactttttcttcaagcttttcacatgcctcctttggctcttcaattcttgccttataatctgaacagtgtcccctctttcaaaagcaactgattttttctcttcctccaatttacggcgataatcttgctcaaatctatctaatgcatgcaactcatggtacagatcagccgtgtgccgaaccagtgtcaacaattgctgcatctctgcttctgctatttctttcaagtttggttgaggcgtaatttctgattctagcttggaaaaatagcgatcgaggttgtgccactgagtatccttgcaacgattgccaaatctgatcacctctcgcgaaaatagcgccagctcttgcctcttgtcggctgcagcaattctcatcaactcactcatatcgctagaaaccaaacgctttacgccctccgatcggaggacggtccccttcaagtatctgacgctttctttggacagagactgcatcaggctcatgcccttcactattgtgttggcaacctcaaacgcaagaatcttttgtgggctccccttcatcttcgcgcccgccacaaacccacctacagggctcaaattcgtcatgctgctgctcagtgtgtccaaaacctccactgctttcccaatcccagatgtgctggctctaccaaacaccgagcctttgtctgaagcgtcaacaaaataagacggagtccacatcttgcagtctctcaactttgaagcaaaaatgttcatgatcgatgttaaccatctattaatccaaatggcaatgctaatcctgttgcttgaagaaatagaggggggaaaaagaatcgggagacttgccttgccggaggtgcttgtcctggacttgccggccttgagcttctccgacgaggagcgcaccagctgcggctccttggagaccgaccggcgagccttgccgccgccgccgccggtggacagccggggggccttctcgggggagaggcggcgcggcggatcaggctccggcgccacctccaccggtgccgtcttgtgcttcccctgcaccttgccggcgacggccgggaacgccttgagctcctgctccaccacgagccccatcgcccggaacgacagctccgccggcgacctgtcccccgggatccccgccgagcacacgccgcccat

SEQ ID NO: 59583 - DNA, 303 bp, Oryza sativa
  Clone ID: PAT_MRT4530_61192C.1
atgggcgtcataatctccatcctcttctctcccttcctcctctctctctctcactttctctggcgcggcaacgagccaggcgcaggcgggcaccgcagtggtgggcgtggaggcaaaggcgggccaggcgccatggcggtggacacaaaggtggaggcagcgcacgatatgatcctatgttaccgtgtgtcagaacgaacacccggtatcatttgggacgttaccgagtgtgatcacatacgcacggaaatgaaatctgcttccaatgagatttttggttcgtcctgcatctttcgctactga

SEQ ID NO: 59584 - DNA, 226 bp, Oryza sativa
  Clone ID: PAT_MRT4530_61193C.1
cataggcgtgctccaagataacattggccggccgtgaggacacccatatccggaactgtaacctgcgggagatcaagctgtacgcctttcagtgaatctttaagattaaaggtaaagagaggtatggatttatctaccccaactaccaacttaaccctgccgtcattaatatccatgagcacgtacccagttcgtgagcatatcggacccctcacaaaactgacta

SEQ ID NO: 59585 - DNA, 332 bp, Oryza sativa
  Clone ID: PAT_MRT4530_61194C.1
gccgagagcgggacccactaacattgattcactcgttcactggatccacggagaggagacgagttctatccatgcgatcaaacacacaccatgggcggacacactgggaacactacacagatgggttcccacaaataggcctgatgataccgtgccggctgacacaggaacgaccctgccgtggtttgatacataaccctgtccatgatggcacaccaccgcatgagttacctacagtttaccgatgtgcgttagaacggagccgacggatcacgtgaaccggcgccttcatatccattcaccacagtcgaggcgatagtcaccgtcacccc

SEQ ID NO: 59586 - DNA, 329 bp, Oryza sativa
  unsure (1)..(329): unsure at all n locations
  Clone ID: PAT_MRT4530_61195C.1
ctcttccaccctctccaatnccctctccctttctctccctctccctcttgccttcgccatgggctgcttccttggctgcttcgggggggccaaggagcgccgccgccgccggaaacgctcccctgcgcactccccctccggccgcgcccgggccacgccgcggctttccccgaagaaggctgccgctgccgccgcgttggatggagacgttgtttccgccgccgcgccgctgctggcgacgctcctggagttganggattcactgatganttgtgcttgaacgtaatcaagaagaggtgaacgtttaatccaacgtaacaattaagaag

SEQ ID NO: 59587 - DNA, 726 bp, Oryza sativa
  Clone ID: PAT_MRT4530_61196C.1
atgtacacaccgtactgctattgccgtgggttcacctggaactcaactcagcatgtgctatggcttatgcttcagtacgcccgattcacctatccacctgagtatcatatcctcaagaaacccattggaacatcccaaaccgcagtcatggttcgtgtaagcattcggggtagaactccactagagaaagaccttcaatatactggttatgggtgggatattaagtccgctttgcaaaactgtgcttatgttgctatcatccgccttcgctatgagctacctgagatagaagaattttactgctacgttccatccttaactgagggagctcaacacactacctacccagggttagctgaaataggtgtaggactacataccccatacctccaacttgcaaactttgtgcgctcactagatatgctttatcgctcaacctttgctgagctgcaacgcgtccgcaccagggtagccagtttagaaagaatcattatgccaaggtatcgccagggacattatacaccggagttcatgtttggtgaggatgccatgcttgcaccagcagaagatataccaccacctgttggaatgtatattgaaagaagcccaccttcgcgcgtcgatgttaggactgcttatcctccacttggaaccactggaccgtatggaccgccagagtatgttcaatggtatggtcgagtcttcaagctgaggatgagagattaa

SEQ ID NO: 59588 - DNA, 912 bp, Oryza sativa
  Clone ID: PAT_MRT4530_61197C.1
atggttcaatgcttcacattttatcacagccgcaacaccaccgtcactgtgtatgagcgccgccgcgtcgtgcctgccaagtgcggctggcgcatccgtgaccctgccgctctgctcgaccgcgtcatcgtcctcaagaagcccgaccccgacctctggaaaaggggtgatgtcgtcacccaagcaagggaaggaccggaagatgaccatctatgttggcgtctgcagggcgggaggtcaaagcagcgggaggcacggacgcgggaggcgcgcgccgccgccgccgcctgcacgcccgcaccgttcccgcctcactaccgccttcccgggcccatattcggccaccgaggagcttcgctgggccgctgccggggtctccgtcctcgacctcgcccgcgcggcgacgccctccccttctcccatgtcgccgccgacgccgacgccaacgccctcccttctcccctcccccgtcgcggcccccgccgctgccagccgtcgtcgtggacgcgctacccccgcctcgccgcggcgctgtggaggcgctaccgccgcagctgccgacgcgccgacgcgctaccgcctggtgggccctacttcctctaccttagcccctctattctctatctcacccccttgtccttccaccctctccacgacttcaccgacaactccgcaaagacattgaccgagctgccggccatctcgatgagcctgacgtcgtgcgctgacagccgctcgccgggcaccggagaaaaatcccgcacagctgcgatcttcgaggaagaggagcagcttcatcttcccgccatggccagggtgcgggaggccgtgcaacgtgctattccaccctcgccggcctccccgcctcgtccccctctacgtgcactcgccagcagatactcgcgggcttag

SEQ ID NO: 59589 - DNA, 612 bp, Oryza sativa
  unsure (1)..(612): unsure at all n locations
  Clone ID: PAT_MRT4530_61198C.1
attcttggaggattttgtacgagctctgtaagttcgggcgaaagctttgcaanctaaatcaagtacgtcaggagactccagtaacgtgctcagcgcatatcgggatatgatgtcaagttgggatcgtagtccactgtntctccacaatgaaatctttctccngttgtgccactgggtggagcttgataataacgcagttcctaggttaggggccttctcaaatctgatttagtaggtcctagccaaattaggttagaaaccnagtcggtaatgatgtgactatgaatattgggtatgcctggactttgccccagatgtgttatcaagtagattggtagtaagtgtcttcgattaagctggttataattagtgaggaattagcttgatgttatcccgaatccacaaaagtgtcctcttntccatgaccactcctcgtgaaatgccatacggcgggccatttctgtcaggtaggtctgccanattacgacttagcaaataggagtatattttctggaacacccatccattgctcttttatctgaaatgatgctgttctaatctntgaanactccttcctttntngttgatangtcaaaaaaaaaaaaaaaaaaa

SEQ ID NO: 59590 - DNA, 334 bp, Oryza sativa
  Clone ID: PAT_MRT4530_61199C.1
ggaaggcggaggaacggtgcacaccgtcatcactaagtttgcattgaccaacatacgtatcaggaaaagcgtcgcctgctaacgcatcctgtgaggagaacgcgtacatggcatagcttgcctacccggctgagcgttacataggaaatgcgtcaattcatggatatggcggcaaacaccactgatgtgctcgagctcaccgttcaggagcggaacctgctttctcgggcttacaagaacatgacttgtgctcggatggcattgtggaggatcatatcttctattgagcaaaaggaggacagccctaggcatgcagcatctgttgcatcaatta

SEQ ID NO: 59591 - DNA, 2582 bp, Oryza sativa
  Clone ID: PAT_MRT4530_6119C.1
atgagcttgcttgaaaattcagtagattctaacctacaaatccatcgaacgactaataataggaaggcggcgctggcccgcgaggtccgcacgcaggtcgacgccctccaccggtgcttctcctggcgccacgccgaccgcgccgccgccaagcgcgccacccacgtcctcgccgagctcgccaaaaacgaggaggttgtgaacgtgatcgtagagggcggcgccgtgcccgccctggtgtgccacctgaaggagccgcccgcggtggcggtgttgcaggaggagcagcagcctcggccgttcgagcacgaggtcgagaagggggctgccttcgctctcggcctcctagcagtaaagcctgaacatcaacaacttatagttgacgccggtgccttaccactgctggtgaatcttctaaaaaggcacaaaaatgctacaaacttgcgggcagttaacagtgttatcaggagagcagctgatgcaatcaccaatctagctcatgaaaatagcaacatcaaaacttgtgtcagaattgaaggcggaattccacctcttgttgaattgctagaatcacaggatctcaaggtgcagagagcagctgcaggggccttgcggacgctggctttcaaaaacgatgaaaacaaaagtcagattgttgattgcaatgcgttgccaactttgatattaatgcttcgatcagaggatgctgcgattcactacgaagcagttggtgtcattggaaacttggttcattcatccccaaatatcaagaaagaggttctcaatgcaggggccctgcaacctgtaattgggttattaagttcctgttgtacggagagtcaaagagaggctgctttgttgctagggcagtttgcttcggctgattctgattgcaaggtccatattgtgcaaagaggtgcagtccgtccgctgattgaaatgctacagtcagctgatgtccaacttagagaaatgtctgcttttgcccttgggaggcttgcccagagaagttcatttgtttcccaggacacacataaccaagcaggcattgcatataatggtggtttggtgcctctactaaagcttctagactcaaaaaatggatctctgcaacataatgctgcatttgccctttacggagttgctgacaacgaggactatgtgtccgacttcattaaagttggaggtgtacaaaagttgcaagatggagaatttatcgtgcaggccacaaaggattgtgtagctaagacccttaagaggttagaggagaagataaatggacgagtgttaaaacacttgctttatatgatgagagtaggagaaaaatctgtgcagaggcgggttgctctggccctggcacacctctgtgcgcctgaagatcaaagaacaatttttattgataataatggccttgagttgcttcttgatcttctggtttcggtgagcctgaagcatcagctagatggttcagtagcactatacaaattggccaacaaagctgcagcactttctcccatggatgctgcacctccatctccaacaccacaggtttatcttggtgagcaatatgtgaacagttcgacactttcagatgttaccttcttggtggaaggaaagcgcttttatgcacatagaattgcattacttgcttcttcggatgcatttcgtgcaatgtttgatggcggatatagggaaaaggacgcgagagacatagaaattccaaatatcagatggaatgtgtttgaactcatgatgagatttatctatacaggttcagtggaagtaactagcgatatctctcaggatcttcttagagctgctgatcagtatctattagaaggcctcaaacgtctgtgtgaatatacaattgcgcaggatgtgaatgtagacaacgtttctgacatgtatgacctatctgaagcttttcatgcaatgtcactcagacatacatgtgtcctatttatcttggagcagtttgaaaagatttgcgtcaaatctgggtcaagccagctgatccagcgtgtcatcccagagctccgcaacttcttcgctaaggcgctaaggccaagccacaggaatgcgcagccatgagtccgtgccccttccacaatccttgacaccacccacacatctgacagtcgcttcgggagatcttgtacagctaaaagtttctttttctggcgttggacattggcattcgatggcaccaacaacattgtaacatccttttattcgactaaaacagagcccaaatcatggtaagagcatatggcttagccagccatgtctcggaccagcctaggctgggataggtttacttcgtttcgccttggcatagtcaccgagtttagggccactttcccagtccagagctccgtgtatgtccgtctctttgatgatgcagaggataagatcgatctgtgtattagtgctgtagttgcaatcagtttcgtctccttcgtgttgtttaacaatgcagaaatgctaatcagattggcgttttctcccaaaaaaaaaaaaaaaaaaaaaaaaaaaaaaaaaaaaaaaaaaaaaaaaaaaaaaaaaaaaaaaaaaaaaaaaaa

SEQ ID NO: 59592 - DNA, 2469 bp, Oryza sativa
  Clone ID: PAT_MRT4530_611C.1
atggcagtggttgcagtggtacttgcaactgcagcaccgtccgtctccgggcagctccctgactatcccacggccaacctctcgacgcgtatcacctacaccgacgggtcagccgtgcgcgcaatcatcctccggtcaacacaaactttatatggcccctcctttgccgcagggttcttctgcgctccaccctgccaagcattcctcttcgctgtcttcatcgccaacttcaatagcggttatggcttacccttagaggaaaacaatatggcacgggttatctggtcggccaaccgggcaagtcctttgggagagaatgctacccttgagttaactggagatggcgatcttgtcctccgtgaaatcgacgggagactcgtctggtcgagcaacacttcaggccaatccgtggcaggcatgcagatcactgagcatggcaatctggtgctgtttgatcagaggaatgcgacagtgtggcagtcatttgatcatccaaccgatgtattggtccctgggcagtcattgctgcagggcatgaagctcagagcaaatacatctaccacaaattggactgagagtaagttgtatatgactgttctcccagatggtttatatgcctatgttggatccaaaccaccacagctatactataaatatttggtggacacaaacaagagcagaaaagacccaacgagggttacctttacgaatggaagcctcagcatctttctgcagtcgacacaggcaggaaagccagataaaagaattgcactgccagaagctaagtccacccagtacataaggttagagtatgatggccatttgaggttgtatgagtggtctggatttgagtggaccatggtatctgatgtaatccacatggatgatgtaatcgacgtggataactgtgctttccccacagtatgcggggagtacgcgatatgcacaggtgggcaatgcatctgtcctcttcagactaattctagttcaagctacttccagccagttgacgagcggaaggctaatcttggttgtgcaccagtgactccaatatcttgtcaagaaatgaaaaaccatcaattcttaactcttactgatgtttattactttgatggcagcattataaccaatgcaaaaagtagagatgactgcaagcaagcctgcttaaagaattgctcctgcagggctgtactcttcaggtattaccataatgattccgatggagaatgtaagtctgtgacagaggtcttctccttgcaatcaatacaacctgaaaagctccattacaactcttctgtttacctcaaagtgcaacttcctccctccgcttctgcccctacacaaaaacgtatcaaggtaagtttaggggctacacttgcagcaattagtagccttgttttagttattattgttggcatttatgtacgaaggaggaggaagtatcaaaaactagatgaagaattagatttcgatatattgcctggaatgccaatgcggttttcatttgaaaagttaagagaacgcactgaagatttcagtaaaaagctcggcgaaggtggatttggatcagtctttgaaggaaaaataggtgaaaagagagttgcagtgaaacgtctggaaggtgccagacagggaaagaaggaattcttggcagaggttgagactattggcagcattgagcacatcaatcttgtcaaagtgattggattttgtgccgagaagtcaaataggcttctggtatacgaatatatgccaagagggtcactcgatatgtggatctattaccgccataacaatgctcctcttgattggtgcacaaggtgcagaatcattctggatattaccaagggtttatgttatcttcatgaggaatgcaggcgaaaaattgctcatttggatatcaaaccacaaaatattctcttagacgagaaattcaatgccaaactggctgattttggactttccaaactaatagacagggatcaaagtaaagtagtgaccgtgatgagaggcacacctggatatctggcacctgaatggctaacatcacagatcactgaaaaagttgacgtctacagctttggagttgttctcttggaaataatatgtggaaggaaaaatatcgatatttcgcagccagaggaaagcgttcagctcatcaatttattgcgagagaaggctaaagacaatgtattgatcgatataattgataagaaaagtactgatatggtctcacaccaccaggaggaagtgattaaaatgttgaagctcgcaatgtggtgcttgcaaaatgagagcagcagaaggccttcgatgtcgatggttgtcaaggtattggaaggcgcagtgagcgtggaaaattgcctggattacagctttgccaacgcaaattcagtgatatctgctcaagacaacccatccacatattcagctccaccctctgcatcgattctatctggtccaagatga

SEQ ID NO: 59593 - DNA, 821 bp, Oryza sativa
  Clone ID: PAT_MRT4530_61200C.1
agccaacaattaatcttatgtatactgtatagttctcatagatatatatgtacacaagttccctatagtaatgtatcgtactaccgttcatagcttcacgtaatgcacataacacagaatgtataattttttcagtacaattggaacatcaaaatcacagctgacagcatgacatactttacagatggagcttttctttttccatcagaacttgtaacgaagaacaaacacccattgctcattcccatgtctactatttgattgttggaattgctcaaactgcatagaggcggataatctggttaatcttggctcgacaaatggggcatacccatttctttgattctatatccttcaagcaggacatgcaaccaggcatgtgaccacacggaatgcaggcaccttccacaggagcatccaaacaaataacacaggttcccggtggagtgttaccgctgttgcttgcattagcatcactttctgcaggttttgcatcatttcgttctctgcaggttttgcagagcttaccgctgtaccaccgtcagcagaaggcatggttacgtcgactggcgtggaatctattgacggatactgaataggaccatcgtagaaggttcccacggcaagtggaggcgcagttgggactggaagagatggaagcgcctcctgcggaaccacgaaagtgctgttctggcttttgttgtgtttggacgaactttggccagagcttgttccaggcacgtcccacccattgtatgtgctactgcttgatgtaacaactggtacttggccacttgtctttgaaggcgcagaagtatctg

SEQ ID NO: 59594 - DNA, 429 bp, Oryza sativa
  Clone ID: PAT_MRT4530_61201C.1
atggccggtctgaccggtggtgtgtggctggtcagactggaagagtgcgagcctgagtctgttttcatcaggtctcgggtttccttgcttgggaagctcctcccctccccaccaagcacacagggcacgggaggcacccggctcgcagagcaggaggcgcgcgcgggcgaccggccggatccgtgtcgcaccgacgacgacgaggagaaggaggcgcccaagagcggcgacggcagacggtcgcggcggaggtgggctcaggagcggcagcagccaagagcgacgggctcaggagcggcggtggcgaccacggcgacgacgatgggagcggcggcggcacgacgactggagcggcagcagcacgacgtcggcgacgacgaggatgacagcgaccatgagcggtggcagccgggagtggtgatggcatga

SEQ ID NO: 59595 - DNA, 748 bp, Oryza sativa
  Clone ID: PAT_MRT4530_61202C.1
cgatcgcacaactcgccgaataaacaacggcgacgccgccgccaaattcaccgaaaccaatctacaccaccaccaaacgatggatgcatatgcatcgccgtcaattcccccctcgccgccactgccgccgtcgccgacactgccactgccgccgactccaccgccaattaatgccgctgtcgccgactccgccgccgccgccattgtcgtcgccgctgccaccgccccaactgtcatcttcggcgcggccgccgccttcatacgagtcaatcaagatgctgacatgattataacctgaccctcgaagaaagcaaaaaaatcggaatccgaggagcatggaggatccaaagtcagcatgccaaatattgatgtaccatcgaaattgatactatctatgtttggccagaccccagcgagtatctccctcaagactacgagtgttcttgatataatggctcaattatcgattgaatattctactgaaaactgtacaatggtggacatgggagaatttcttgtctggaaaaatcacctaatgagccttctctctgaagatgaatttgtgaacgatgatatcatcagtgcatacatacattgtatgagggagcaagcaaataacgataggaaagtgtattatgaaaacccttttctttctgacttgctgaaaggggctgaggtcaatggagtagacgaagatagtgataactttattacaaaaatagtgaataattaccttttcaatgaactg

SEQ ID NO: 59596 - DNA, 159 bp, Oryza sativa
  Clone ID: PAT_MRT4530_61203C.1
atggatgtggcggagcagagggtggcctcggcctccttagccttatcggtctttggtggttctgccatcctcggagctcaagatgcttcatgctacggccggaagaagcagggaggttatacaatcgtctcgaggcctcatatgttttatgagacataa

SEQ ID NO: 59597 - DNA, 363 bp, Oryza sativa
  Clone ID: PAT_MRT4530_61204C.1
atggctctggcccggacagagaaggctgaccggaagttctggtccctagacccggaacttccggacctttaccaactccagcttgcactgcaaccagcgcggatctacgatgttagcgtcgatcaaggcggcggcgagttgggggcggcggcggcgacgagaaagaggaggcgggaggaggtgaaggtgacgcacatcgtgacggcgagggtgagcgcggacgaggcgagcttcagggacgtggtgcagcggctcaccgggggcgccgccggcaatggcctcctcctcgtcggtggcgatgcggcgggggtgctcccgtcgtcggaggaggagatgaagcggtggtgggccgccggcccatga

SEQ ID NO: 59598 - DNA, 161 bp, Oryza sativa
  Clone ID: PAT_MRT4530_61205C.1
ctgaaacggtagtgcggatacacgccctaccgctgcccattgcagtcgggtcggagccaaagaacagcggcgcagaccgacctaggagtagaggcggaagcatacctgctctccacggaagcccggcggcgaggggcgccatcgatctaagccggtgctga

SEQ ID NO: 59599 - DNA, 290 bp, Oryza sativa
  unsure (1)..(290): unsure at all n locations
  Clone ID: PAT_MRT4530_61206C.1
ggccatttttgagtggcaaattctgaataaaggcttgtcatccaganttggnaacattgttctnaaggcaaaaaaaccggctgganctgaanggatctgccagccagattgccacttaatntgtncatatatatatgcttgagtaattagagatgcnggaattctgcncatgggtttattttgagtttttttgnctgataaggctgaggatagcnggcactgcttggcaaaatggtgctttccagcctctgaaaaaacagcnccacttttatgtatgcatgtctaattag

SEQ ID NO: 59600 - DNA, 169 bp, Oryza sativa
  unsure (1)..(169): unsure at all n locations
  Clone ID: PAT_MRT4530_61207C.1
gtattgtaaagctttgatgcatagggggggtttcgacaatgacagggggtactaagcggatgtatacatataaaagtggccttttattctgcacagattcagaattgggggggggggggggggtccancgaaattagaacctatgaaccccaggcacgcgggaggaggc

SEQ ID NO: 59601 - DNA, 1030 bp, Oryza sativa
  Clone ID: PAT_MRT4530_61208C.1
aaagggctcagatcacctgcccaaaacatatcagtattgcaacttccagacaaaaagacgcaattgtcaagtgtaagggcatgaacgaaaaacactaacatctagcggcggagaactaattcttcataaagatgagttagtccgatgacagtgcctcatgatccaaacaaaagaggcttgttgctggaacccatgtctgatttttctaaagtagccagatgcatgtcagtgtacatcactaactccaatattaagacgagcatatgaagaaattacttctccaagtctccaaccgtctaccctacacagcatcatgcagcttgactaagggataagttttacaaaagtttataggaaccctagtacctccagaccctccatagcggacttacagcctgtactggccctaagtaaagggccagaacaaaggccttcttgatttgatacaggcaaaaggggcttctgaaacatgctttcagtccgatgattctccaagctttttaatggcatcctctattgctggcacagaatcacgaaatgcttcccactgctcaactgtcaaacttatccctttggcgggcagctccttgccgtccttgaagtagtactctcggatggacagaagcgtcttgcccttgaactcctgaagagtcaccctcctcctggccgaaaggcggcagaggatgaggtctccctcgtcatcgtactccctcttcgttccacctccccgctcctcctcctcctcctcctcctcttcctcttcctcctcggcctgttcgtccttcccctcctcgccggcgccgccggcctgctcctgctgctgctcctgctcatcctcctgggagagggattcgaggtacccctcgacgacgcggcggacgaagcgcttgcggtcggggatggagaggtcgatgccgaggcggtcggcggcggcggtgcggaccttgaactccgtgagggactccatgtcggagccccggaggatctccagaaccgtggactccaccttcttctgcgtctcctcgtccat

SEQ ID NO: 59602 - DNA, 3159 bp, Oryza sativa
  Clone ID: PAT_MRT4530_61209C.1
atgcactgtgaaggcgtatttcgtcgtcgtcagaaacagaccgcacaacccgacggcgcagacgccacgccggggggcgccgccgccgccgccgccgccgccaacgcgacgaaccgcgggtacaagaaggcagggaagccgagacgaggggctccaatggcgctccgccgcgtgctcctcttcgtcaagcccttcgacgtctaccctccccgcccgctcgccgccgccgcctcctcgcctccgcccccgccgccgccgctgcgtgtatccaatcccaaggtcttgaattatctggatgataggtgcagagttcacaaggaaacaatcaatctctgcaaaagcgtactgcagcgtaaatccattgactggatttcagtgcagcgaaatgatatgtctaatccaatacatgatgtggatcttgtgatttctgttggtggtgatggcactcttctacgggctagccattttttgaatagctcaattcccgttttaggtgttaattcagaccctacttgtcctgatgaggttgatgaattaactgatgaatttgatgcaaggagaagcacaggacatctttgtgcagctacggctgcaaactttgagcagatacttgatgcaacccttgatggtagtaggcaaccttcagagttgtcaaggatctcagtgaaactaaatggacttcagctaccaacttatgctctgaatgatatattggtctcacacccctgtccagcaagtgtatcacgattctcatttaggtcaagtggtctcagggttgcaacgcctgctggatcaactgctgctatgctatcggcaggaggattcgtgatgccaatatcaagccatgagcttcagtatatgataagggagcccatttctccaagggatgctgacaagccactgctgcatgggctgaggtctgacaaaaatggttgcagtggtgtatgcccctcaagcaggctcactactttggacatctttggtctcggtgctggtgctgcattggttcagaagagggcaacattcatcatgaggtgcacaagtctggatctaccagctctaggagatttccttactcatgtacaacacaagcctgcaacacatctgggagagaacatcatactgctactaaggaagcacatttactactgcctcaatcctgaaagtaatgttcataatcttatgatcgctgctgatgatctgagggacaccattgatactatcgaggagagaattctggtgggtgaatgtgagggaaagaaaccaaaggcacaggcaacaagctggatacgtagtgctcaatcagttagagatgaatcagacaagataaaaaatggctatgaggcaaggagaatacatgcgttgggttgttcctggaactttttcttcaactacagtgtaagcaattctgccaccaaaatgcatgctaatgctgatgagatcaagaagagagctcctgagaatgatggtatgttcagctccctgcctctggttggcagagagatgcctctgccaccctacattgtggggcaagatgagtacaaggataagattgttggttccattaagcagggcaccacaggcaccattgggatatgtggcatggcagggtctggcaaaactactctcctcaaacaattgaacaacatcttcagctgcgctgcagaaacacacgaattcgatcatgtcatctatgtggaggtcagtcagcagcaaaatctggagacagttctgcagaacatcgcatcccaacttggcattatgctgacacagaacaaggacgctacatttaggtctgcatccctttataacttcttgaaggaaaggagcttcctacttctgatagatgatctttggcaaacactagacctggtgaaggtcggcataccgcaaggtggtcggcaattgggccctcaaaacaggcagatgatagtaataacatcacgtttgcaacaagtttgttatggtatggacgggcattgccagatgattgtgttgcaaaggttgaagtttaatgaagcatggagtctctttgaatcaaatgcgggtattagaataaccaataacgtgcaagtcaagtgtcatgccgagagcatagtggagaagtgtggaggccttccgcttgctcttaagattgttggtcaggctatggcatcaaaaggaactgaacatgaatgggaactagctgtgaatttgcttgaacaatcacaattccacaaggtcccggatgtagaaaatgatctatattctgtactgtacattagttatgacaacctgccagatgagaggacaaagcaatgctttcttttctttgccttcgccagctatggaactcaccttgatctttcatacacaccaatccaatcactcccagtgaggttcagattattgaagaaactgaggtacctatatttaaggtatacacgcaaactccaaacagtcccagatggcaccatatcggcactaagtatgctgagggtgctggatatacacggcagtgtttttttcacaaaggtgaaagcacggtcatatcttgaggaactggagagcttgaccagtttgcagcttctcagggtcacagtggttgatttccagtcgctcaggaggatcttcaatttgtccagagtctccctgcgagacaggattgggacgcctccaagtttcgtcccaacttatcagcaaagcaagggcacaacatctagaagttctggctctgagctatatgaagagtttggagaagttgatgatagattgcatcacctcacaaaactgggaagcatcatgtggaaaggggtgatgccacatgcttgctttcctaaggttcgtacggtagatatcatcggctgccacagcatcaagacactcacttggatcaaccagcttccttgcctagaagaggtgtatttatacaactgcaactcactgttggaggtagtgagtgatgatgatgaggaagataccaccatgccatcggcaacagcttcatcatcatttcctcgcctcaggcacctcgggctaagtcatctcaaggatctttacaaaatatgtggtgatgggagacttggatttccatgcttgcagcggctgcttgtgtacgagtgccctatgctggcaagactgccattcgtgctatggaatggatctgctgtgtgcctctga

SEQ ID NO: 59603 - DNA, 818 bp, Oryza sativa
  unsure (1)..(818): unsure at all n locations
  Clone ID: PAT_MRT4530_6120C.1
gcacgagggagagactagtcttgagttttttttttttttttttttttttttttttttttttttttttttttttttttttttttttttttttaatttttgttttatatcacaagattattacaaaaaaaagggcatacaaaaaaggaagaaaagcaaaaggggggggagacaggcaccacagcgaccaccaaacccaaataacaaccacgggcaaagccccaaaaccaggagctccaacaaaggggggcggagcagaaaaaccgaccgttgccccgggcaccggagaccataccgagtagccatcactcgtcgntgtgctgctgcgcgtgccagctgccgcccgaagtcccccccggagacggaaggaagagaaaccccctgaacccccgcatagcggcccaaaaactggccaggcctcccgcgctagcccccggcgccggccgggacaaccgccggccaccccacccaacggacggcgcacaaggaaggccaccccccacacgaggcataataaggcgccggatgcaaccttggagggcgcaaactggacagggggcgggcgtaaaaacccacccgaccgcgccccgtgggggggaaccagccccgaacaccaatactacgcccacccccccaggcagcgcggacttcgaggaaaaggacacggaaagatttccctcacaacagcagcaccacacacatctcataagcccctccgagccgccctagacgaggccacgacccgaggaccggatatagatgtgcacatcgaagctatgttgatagtagagcgccaagcgctaataacggaaagacatcac

SEQ ID NO: 59604 - DNA, 642 bp, Oryza sativa
  Clone ID: PAT_MRT4530_61210C.1
accgcactcttgcttagcccccgccgcctcgccgcccaccgccggtcctccgccacccacggccatccctctaagcccccctcttccccctcccccaacccctcctcctaccctcaccccaaccctaaaccctaacccgggtcttgccggccgccaccgcctccttcttcctcctcaggacctcgcccccctcgcatgggatcgcattggccctccacgccgggaggatcttctccttcttcgtcttcttcccggacgcagcggccggctccgagtccgacgacgcgctcacctccttcctcttcttcccggccgccccgacctccgcacgctcgccgtccctcatcgccgcccgcaaccccgcggctcccatcaccaccttgacgacctcgcctgctccaccgccctcgacgcctcctactccctcgcctccgtcgcactggctgcctcagccgccctcgacgagctcgcctcccccgcgtcggcccaccttccgacgagttcgcctcccggatctccgcctccgacccagcaccgtgccactggccgccgccgagacctcgtccacctcgctatccccttcctcgtcgtcggcctcctcccccacgctcggctccagccctgtccatctccacccgccgt

SEQ ID NO: 59605 - DNA, 860 bp, Oryza sativa
  Clone ID: PAT_MRT4530_61211C.1
acagtgcggagttctattgatagagcaggaaaaaaaatccaagattacaaccctgggaggtcgtaaccaggaaaacgaaaaaagtataccaccacccacacaccgacagcgccaacatatagacctaggagaagactagcatcggactggccgccactaagcgtgaccgaccgccgctaggccaacaatggaacacagccgagatcgcccaaaacccgacccttacaaccaacacaaaacgccctccaacgtggccaacttgcagaagctaggccgccaccacaagaggatatgaatctagagtgagcttgtattaatttcttgggaggtttcggcaaggggatgcctagacgacgtctccaaggagagaagcgacgaaacatcgccgccgccatccatcaaggtcttcaagagaaccgagaccaagctttcacccgacagccacacttgaggggcctttccctcctttttctttgtttgaccgttggcccatctctctcccgcacccctccctcttgctgggccggcccaagccgcctcctctcccgccggccaaatagggggccaccccggccatttctgtcctttcctcgcccataaaaacccttccccgagccccttcttgcatttcccccattcgccgcgccctcccgtgcttcctaccgcagccgcgccgtcgcaccgacctccgccgcctgccaccgtactccggccgcgcgccaccgctgctagagccgccgcagtgcctcccgccccctcttttcccctttcctctccttcctcccgctgccgtcgcgccgccgcccttcggcaatgcgcagccgcttccgcgccggtcgccgccgtctcccgcgccgccg

SEQ ID NO: 59606 - DNA, 339 bp, Oryza sativa
  Clone ID: PAT_MRT4530_61212C.1
atgcggagagaaccccgcggctcccatcaccaccttgacgacctcgcctgctccaccgccctcgacgcctcctactccctcgcctccgtcgcactggctgcctcagccgccctcgacgagctcgcatctccgtctgggatcgccagagctgcgccctctctgccgctcccccgcgtcggcccaccttccgacgagttcgcctcccggatctccgcctccgacccagcaccgtgccaccggccgccgccgagacctcgtccacctcgctatccccttcctcgtcgtcggcctcctcccccacgctcggctccagccctgtccatctccgcccgccgttga

SEQ ID NO: 59607 - DNA, 678 bp, Oryza sativa
  Clone ID: PAT_MRT4530_61213C.1
ctaggttagggtagctggatctcaatcgtcatcgtcatcggtgacctcctcctcgtcctccgcatagccctgcttgacgtactggtcgatgagggtctgctcgtacttcatcttcttttcatcgatgaacttcctgaggatgtagccctggcgatgtgacacagtaagttcggccagctcctcctgagagcgatcgtgatcaacgcacttgtagggccgcgcgatcatcacttcgacgaggctattcggcaccctgcacttgaacaccttcctcttcttcttcttcgcagccgcggcctccgcattcgccttttgcctctccagccacagctccagcatctctgccgggacttcgatcggatcccagagatggctccccatcgcccccgggacatccggcgtgctccacagcttgccggccgccaccgcctccttcttcctcctcaggacctcgcccccctcgcacgggatcgcattggccctccacgccgggaggatcttctccttcttcgtcttcttcccggacgcagcggccggctccgagtccgacgacgcgctcacctccttcctcttcttcccggccgccccgacctccgcacgctcgccgtccctcatcgccgcccgcgatcgacacggtctctgtggattcccaagattttcggcggctgaaaccgccat

SEQ ID NO: 59608 - DNA, 678 bp, Oryza sativa
  Clone ID: PAT_MRT4530_61214C.1
tcttatagcgcgacaccgatgtggcgtccgcggcgcggagcccctgagtgttcgccgccctttttttttttttagtcggttttttaaaaggcttgcaagaatatcgaagaacgaaattacagactcaaacatgcatatgtcagcatccaacaacataaatatagaaagacaagaatgacaccaccacctctgctgtcacccaccccagccggatttgatggccgccaagcttgtggctgccaaattaaggccatgagctccgagggaaggaggcgaggcgactggccgaatttgaccgccggttgcacattttcgcacgctggcacgagcctcgttagcctaagccgccgctaaatcactagctagaggtggtgatggatctggaagggcacgacgaggatccagtggagaagcacatcagcgatgtaggtgcggatccgatgaagaagctcctcggaggcatcggcgggatccgataaagaggggatagacggcggagttggctgaagaggaacaagctttcttgaggagagctcgtccctcttcggccggtgctgccatcatcttcaatctgcatcctcatcaactaagtcggggagatcgaagcgaagagaaggaggtggaagcggcgagataggcaaacaagggggagagaagtgagagactgggagggagcga

SEQ ID NO: 59609 - DNA, 625 bp, Oryza sativa
  unsure (1)..(625): unsure at all n locations
  Clone ID: PAT_MRT4530_61215C.1
gcacgagtgcagcagggtgacacgccagcgcctcggttattgcattcatgagtttgccaaggagcaagcattaactgactcgcttccacctttaattctgctggcaggcacctacaaccaatgcaagggtcagggtgttatcccacgcttgctggacaactccgtaagcttgaggaaataatcctcctcccctcctacctattgctatattcagatgcagttacaggacacaaggcccctgcagataacacagggggaaatagactgcaccaagcattaaaggaccgtacattaaacctaagacatttaaacccactacctagccggctctttgttgacaacatatgcgtgactgcgtttcgataatgcagcactcatagtggcgacgacttacgctacaattattcagggctgtgattgtctcctgctagagtgtctaagaattatataggatccaaactccattggatctttgttgctatcttgccctctggcttataggactatgttgctatgcttcactttcctgggaaccngccttnaggaccaaagatgccattcatactgctgggcttggggccgggatcgaatacccctatagagaatgcanatgaactcacttgac

SEQ ID NO: 59610 - DNA, 511 bp, Oryza sativa
  Clone ID: PAT_MRT4530_61216C.1
cggcagccgggggacggtgacgcgggggcggcggctgagggcggcggcctgggcgcggagctgcggcgccgccgtgctggtcacccacgacccggcgctccggccccacgccaagatggagctcggctgcctcgtgcacgccaacatcgctgccaacgacgacgcccacgcctgcacgctgcagcgggaggacgacgacggcagcgaggtgtgcgttggcgaggtggacgaggcccgcgcggccgcggacggcgtgcccgcgcgccacgagcgcacggttgtagcatcggagctgcctggcgcgcgtgcggagctcgtcggcgtcggcctccctctccggcggttgcagcggcggagccgcccggcgcgcgcggagctcgtcggcgtcggcctccctctctggtggggcagggcggcgcagaggcaggggggcacgaagcgtcggcggcgtccaagatgggccaagctgccgtcgccgagggagcacggcaacctgcagctgaaggaatag

SEQ ID NO: 59611 - DNA, 114 bp, Oryza sativa
  Clone ID: PAT_MRT4530_61217C.1
gacatatttagatttatcgcccctcaacgcaagcgaccgggcaaggggccatttgtaagctgcttgccggtctcgctactaaatctgccgaataggcaagcctgcaacaccccc

SEQ ID NO: 59612 - DNA, 412 bp, Oryza sativa
  unsure (1)..(412): unsure at all n locations
  Clone ID: PAT_MRT4530_61218C.1
ttgttacttctgccaaagctggcactgggnttgatgatatcttcagtgacatagccaagagtaagtcttattgtgttagctattgctttcaattcatctccacatttttgccactttaacaaatactgctttgccaaaacttataagttgtaacattcagctattccattagaatgcggggtcatcaacgntagcatatagtttagttaacaatttcatgnttcactctattgagcagatttccgtcatcaaactcaattgttattcctcagattaatccattgtataacacctcaatatttgcgnttccccctcttcatcctcaaataacaagggtgggggatgggccccccatgtcaaattgggattaggaattgctgnaatttcggaggtgggctaatgattggattgg

SEQ ID NO: 59613 - DNA, 667 bp, Oryza sativa
  Clone ID: PAT_MRT4530_61219C.1
ggccgcggcggcggggggcccgagcctggcggacaggttccggagcaggttcaggccggcgaggttcgggcggcggcgaggcgggggcgcgggcgcggccgactgccgcgtctgcctcgcgcggttcgagccggagtcggtggtgaaccgcctcccctgcggccacctcttccaccgcgcctgcctcgagaagtggctcgactacgaccacgccacctgcccgctctgccgccaccgcctcctccccgccaccaccgagtccccctcgccgtcgccggcgacggcgaccccccatttcgcccggatttagagagatctccccccttcaatccgccactgggccgtgtgcgcgtaggaaaattgagaggatcatttagctctagtgctagctccatttagtgctcctttttccccccactttcttaatttttttttcacctctttgcagtgtttttttttaccatcttcgagtggccttttcttttcttttctttctttttttacttctttgtgttgctgctgtaccattgtaaatatttgcagagtgctccgatcgatggagaggtgtagcacttgtgtacagggcttttggaaagcgaagagatgagaaggagagaaaaaaaaatcattgcccaaaaaaaaaaaaaaaaaaaaaaaaaaaaaaaaa

SEQ ID NO: 59614 - DNA, 4794 bp, Oryza sativa
  Clone ID: PAT_MRT4530_6121C.1
atggcgaatttcttccccatggccctgaagggacaggcgcggggttggctaatgaacttgccgcccgcgtcggtccactcttgggaggatttgtgccagcagttcaccatgaacttccaaggcacatatccgcgcccaggtgaagaagcggacttgcatgcggtacagcgaagggacgatgagtctcttcgctcgtacattcagcggttttgtcaagtccgcaacaccataccatgcatccccgcacacgcggtaatctacgcgttcagggggggcgtgcggcacaaccgcatgctcaaaaagatcgcctccaaggagccccagaccaccgcagagctttttcagctcgcggaccgtgtggctcgcaaggaggaggcctggacctggaactccaccggttctggtgtggcagcttcggccgcccccggatccgccgctcggtcagggcggcgggataggaggaggaaaaagaggtcggcccattccgacgacgagggtcacgtcctcgccgtcgagggcgcttcgcgggccacccgaaaggggaggcctgcgagcgacaaaaagaaggaggccggcgctcccagcagggggcgcccgaccggcaagtggtgcgccgtgcacaacacctccctccacgacctcgcggactgccgcgcggtcaaaagtttggctgagcggacaaggaagtgggaggaggagaggaggcaggaacgccgtgagggcaaggccccggcggctccctccggcaaccggcgaagtgaggccaagcagaaggcccccgccgaggacatcgacgatggcgacgatgacctagggttccaggagcctggggccaccatcgccaccgtcgatgggggagcgtgcgctcacgcttctcgtcggagcctcaaggccatgaagcgagagcttctggccgcggcccctacccatgaggcgacgcggcgggcgcggtggtcggaggttgccctcaccttcgaccagaccgaccacccgccgtgcgttgcccggggaggacagatcgcgatggtggtttcccccaccgtttgcaacgtgaagttggggcgtgtcctcatagacgggggtgcagccctcaacatcctttcccccgcagcctttgacgccatcaaggccccggggatggtgcttcggccgtcccagctgattatcggtgtgacgccggggcacacttggccgctaggtcatatcgacctcccggtcaccttcggtggatccgccaacttccgcacggagcgggtgaacttcgatgtggcggacctcagtctgccctacaacgcggtcctggggaggcccgcgttggtgaagttcatggcggcggtccactacgcctacctccagatgaagatgccgggccccggtggccccatctctgtccatggcaacctcaaagtcgcgcttgcatgtatggagcagtgcgcgaaccacctcgccgccgcgtccaagcccgagggtggcaacgagaggctcagcacctccgtcccagccgccccgaggcagcggatgatcacgtgcgacgaggtcccggaagacgcgcttgtctccttcctgcgggcaaacgccgatgtcttcgcctggagaccggcggacatgcccggggtccctagggaggtgattgagcaccgtctcgccgtgcggccgggcgcaaggccggtccggcagaaagtgcggcggcaggccccggaacgtcaagccttcatccgcgaggaggtggcgcgacttctggaggccggattcatccgagaggttatccatccggagtggctggcgaacccggtcgtcgttcccaaggcgaacggcaagcttcggatgtgcatcgactacaccgaccttaacaaggcatgtcctaaggacccttaccccctgccacgcatagatcagattgtcgactccaccgcggggtgcgaccttttgtgttttctagatgcatactctggtagccagataggacgcaatgttgaggcctatgttgatgacttggttgtgaagacgcgcaaccaagagaccttactctcggatctagcggaaactttcgaaagtctccgctccgcccgcataaagctaaaccccgataagtgcgtgttcggcgtgcctgcgggcaagcttcgcgggttcttggtctctgcccgaggcatcgaggccaaccccgagaagatacgagctatagagcggatgcgcccccccagcaagcttagggatgtgcagtgcgtcaccggctgcatggccgccctaagtcggttcatatcgaggctgggagagaaggcactgcccctatttaagctcctcaaacgctccgggccgtttacctggacggaggaggctgagcgggccctcactcagttgaaggcgtaccttagttctcccccagtcctggtcgccccggagccagatgagccgttgctactttacatggcggcaaccccgcaggtggtcagcgcggcgttggtcgtggagcgcgacgaggacaaccctcactccgcgcatccccaccctgcgtcgactcgacccgggagagagcaggcaggagaggcccccgagccgaacggcggcccgaggcccccgacggccggagctggccctccgcctgcttgtccgacggtgcccggcgcccccgacccccaggatggccccggggccactgcgggaaggccgcgcctgtcgccctctgaccccgaggtcgtcggcacagaagccgagtgcgccccgcatggcctctcggacgaagagcgccctggagatgcggcccctggcgaaaaggatcggccccgccgaaaggtgcagcggcccgtctacttcgttagtgaggccctccgggacgccaagacccgataccctcaggcccagaagatgctttacgctattctgatggcttcgaggaagttgcgccattatttccaggcgcatcgggtcacggtggtcacgtcttaccccctcggtcaaatcttgcataaccgagagggtactggacgggtggtgaaatgggcaatcgaactctctgaattcgatttgcgctttgaaccacgccacgcaatcaagagccaggccctcgccgactttgtggcggagtggaccccagcccctgagcccatctccatccccgaggctagctcgggcccctcgcagctgcctcacactgcctactgggtgatgcagttcgacggctccctatctcttcagggcgccggtgcgggggtcacgttgacctcgccaagcggagacgtcctcagatacctggtccgcctcgactttcgggcgaccaacaatatggcggagtacgagggactccttgcgggactcagagtggcagctggactggggatccgccgcctcctggtgttaggcgactcccaattggtcgttaaccaggtctgtaaggagtaccggtgctctgacccgcagatgaacgcttacgtgcgccaggtgcggcgtatggagcgccatttcgacgggatagagcttcggcacgtgcccagacgggataacgcggtcgccgacgaactctcaatgctcgcttcctcgcgagcccagaccccaccgggcgcctttgaagaaaggcttgcccagccgtcggcgcgacccgaccccctaggggagacggacgcgcctgaacggcccccgaggcccgtcggagtccaggcctcgggacccgaggggagcgctcccagttcccctagattgattgcttggatcactgaaatccaggcatacctcgcagataagactctacccgaggaccgcgaatggagtgaacgcgtccagcgcatctccaagcgctacgtgctggtggaagggaccctctatcggcgcgcggctaacggagtccttctgaagtgcattcctcgggaacaaggtgtcgagcttcttgccgatatccatgaaggcgagtgcggagcccactccgcctcccactccttggttggcaaggcctttcgccagggtttctattggccgacggctctcaacgatgcggttgacctggtccggcggtgcagggcgtgccagttccacgccaagcaaacccatcagccggcccaggccctgcagaccatacctctttcgtggccgtttgctgtctgggggctcgatatcctgggtccattcaggcgggccccgggcgggttcgagtatctgtatgtcgctgtcgacaagttcactaagtggcccgaggcttatccggtcatcaagatcgataagcactccgcgcttaaattcatcaggggcatcactgctcggtttggggtgcctaaccgtatcattacggataacggcacccagttcactagtgagctcttcggtgactactgcgaagacatgggcatcaagctctgcttcgcctcccccgcccaccccagaagcaatggccaagtggagcgcgccaacgcgaaaatcctcaagggcctcaaaaccaaaaccttcaacatcctcaagaagcacggcgactcgtggatcgaggagttgccagcggtgctttgggcgaaccgaaccacgccaagccgagcaaccggggaaacgcctttcttcctcgtctacggcgcggaggcggttctcccatccgagctcaccctgaggtcccctcgggccaccatgtactgcgaggctgatcaagatcagcttcgcagagatgacctcgactacttggaagaacgaaggcggcgcgcggcccttcgagccgcgcgctaccagcagagcctgcggcgctaccatcagcgtcacgtccgggcccgtcactctgcgtcgacgacctcgtcctacgccgcgtctaaacgcgtgctggactga

SEQ ID NO: 59615 - DNA, 753 bp, Oryza sativa
  Clone ID: PAT_MRT4530_61220C.1
atgaggctgctctgcagccacggcggccgcctcgtgccgtgcggccccggcggcggcctccggtacgtcggcggcgagacgcgcgccctcgccgtgccgcgcggggcccccttccgcgagctgacggcgcggctggcggagaaggccggcgccggcggcgacgccgtcacggcggtcaggtaccgcctcgccgacgggggcctcgacgaggacctgctggtgtcggtcacctccgacgaggagctcgcccacatgcgcgacgagtacgaccgcctcagggcgacgcggccgtccgcgagcttccgggtgttcgtctccaccgccgctggtgtccagcagcagcggcgccagcccgtcgcgcccccgatgatgatgcggcgcgcgcggagcgcgcaggagctcgccgggcgcctggcgcgccggccttgcccgccggccgggcggagcgccgctgcgccgtccgtgcggcgagtgcacagcgcgcaggagctcgccgccgggggcggccactcgcgccagtgcttcgacgaccgccgccgcctccagagctgctgctggtgctgccaccgccgccgcgaccagtgcgcggctgtgccacagccggcgaggccggtgcgccagctgccggccgccatgtccaagaacgtcaatggcgcgcgacaggcggctcctgcggtgtcagcggcggcgaaggcgacaggtccggtggtcttcgagttggaaaaccgaagagcttgctgggagttcgagtga

SEQ ID NO: 59616 - DNA, 843 bp, Oryza sativa
  Clone ID: PAT_MRT4530_61221C.1
caacctttttcaatttagcacgcttacaactcacaaggagcaacacgtagcagtatagcacttttttagaggaaccacttcttctgtttgatgcgtgcacactgtacggctatgataaatcttaaacgggtgacaggtaattggatgcacactgtactcttgatttgtgcagctatcctttctttccaacgagtgtgaatcaatcccttcaaaatttcttctacctatgtacgtattgatgtagttgcgatccaatttgtacttttttaattgttgcatgctctatgtatgtacatgctttttatttcattcaatttggtatatactatgtgagcacaaaatgcattcaagtaatatgtataagtgaggtctcaactcttctctaacgaccgtaatgaattggatttgtatacttgctctgttgtggatgggcttgttcttgcaggacatactttgctctgttttcattaaaactctgaaacatccacaatgaaggtgccatatagtgtcgataattcaggaagggaaagctatgtggacaaaaaatgatgtcctttttagtgttccatggtagtttatttatttttactttttcaatgatcgttgtgacaaacatgtaaagttatctaatatactccatagtgtgtagggctatgtctcttggtatgagagctgcttttgcttagcacacgattttacacatagtcatccgatcaaacgaatcaaaatatatttggatcttacctatatatacatgtatatcattttccacttaatgctgagaattgtagctatttcgtaaaaaaaaaaaaaaaaaagaaaggccgaacaatctaaagcata

SEQ ID NO: 59617 - DNA, 360 bp, Oryza sativa
  Clone ID: PAT_MRT4530_61222C.1
cccacgcgtccggttcgaggaggaggaggaggaggagaagctagcggcggcggcggcaatggcgacgagcgggctgaggagctgcagcgcggtgggcgtgccgagcctgctggcgccgtcgtcgaacaggatccgcctgtttgtctgcgcctacaccaccatctacgggcgcgtcaccatgtccgccgagtggatgccgggctagccacgctccgcccacctcgacggctcctgtcccgttgacttcgtgttcgacccggtgggccttgccaccgttccggagaacttcgagctgtttatggtttctgaagtgtaccacttccttttttccatgctttttgtgcctggtgtgttgttgcc

SEQ ID NO: 59618 - DNA, 518 bp, Oryza sativa
  Clone ID: PAT_MRT4530_61223C.1
tttgattgttttactcctctggataaaggagtgaatagtaaacatccaggtggatttatttgggccagtgagaagacaggatttagacacctgtctcttcatgacaagaatggtgtgtgcttggggcccctcacacaaggtgattggatgatcgaccaaattgctggtgtcaatgagagttctggagttatatattttacaggcacattggatgggccattggagacaaatctttactccaccaacctatttccggattggagccttcccttgcaagtccccaagaggttgactcatggcacaggacgtcattcagtaattcttgaccatcagttgctgaggtttattgatgtgtatgactcaataaaatctccacctgtgatcctgctatgctctttgcttgatggaagtgtgataatgcctctatatgagcagcctctgactgttcacccgcttataaagttcagcagctgtctacagagatagtacagattgaaggaaaggatgggactgcttta

SEQ ID NO: 59619 - DNA, 156 bp, Oryza sativa
  Clone ID: PAT_MRT4530_61224C.1
ttagcccggccccgatgaggggcctgggcatgcctgcaccctgccagcgtgccttgatcttgttagcttgtggttcttggtgttgttgcaccctgcacattcaggtgcaggagaggcaccttcttcgtcctggaagtaaattgcagactgttgcat

SEQ ID NO: 59620 - DNA, 306 bp, Oryza sativa
  Clone ID: PAT_MRT4530_61225C.1
atggcgcagtggagaggggatggagcgagggggcgaccgccgtcaagggtggagctcggggagccgccatcggatgtcacaatatggctgacgctgtccttactcgcaaccgctgccgagggcgatggtggcagtgaacctgtggttgccgaagcaagagctgacgatcacatcatggcagtaggaggagcacaatcagtggactccatggtttcaccatgggcaggcgcctccctcatggccatcgtcgctgagatccatcaaggtatgagaatgggtcaccgcgccttccccatggcttggtga

SEQ ID NO: 59621 - DNA, 287 bp, Oryza sativa
  unsure (1)..(287): unsure at all n locations
  Clone ID: PAT_MRT4530_61226C.1
gcttagcccatataatgagttcgtaacgcagctgattgcaagaaggggcttgccgctatgccatactgctgcccaccgctgcactttaaggatgcacanaaaaaaaaaaaaaaaaaaaaaaaaaaaaaaaaaaaaaaaaaagaaaagaaaaaaaaaacaaaaataaaaaaaaacgagatagcggctgcacggtttataggatacaggctacgaaactctgccttgcgacctgatatttataatatagtgacccaaaaaaacaatcaagtgtcctacattaaacaacg

SEQ ID NO: 59622 - DNA, 383 bp, Oryza sativa
  Clone ID: PAT_MRT4530_61227C.1
ttttgtttttttaatcttttgtgttttttttttttttttttttttttttcccttttttttttttttttcgggctaagaaaccttgaaaatgatttcaaaaaattttacaaattcgtaattccccttcaacctaaaaaaaaaaaacggaaaaaaaaacattttttaaaacccccctactttttttgcccctaaggaaggagtaacccccaccccggtgggaccaaaaaaactcaaggcaaaccccggcggggaccctacgggatgagcccccccccaaggagtactatgttctttttaaaaaaaagaaaagcaaccccgggtatcccacgagctttctgtcccaagccaaacccaaaggctacagggggccgaggccctggttt

SEQ ID NO: 59623 - DNA, 344 bp, Oryza sativa
  Clone ID: PAT_MRT4530_61228C.1
accatattctatatgaacgtgacaactatgccagagcactacccctcatgagcttgatgaacgcttggaagaatacctggataggcttgtaagacatcttgtaggatatattcttcatgctatatgaccatatgcctagtagaagcttatcaacacagttctgctatcctggagagcactatatttacacaagacaacattaaaacgtgtattgtctgctgtaagagacacgatcaagtgtcacactattgaatatactgacgcaaagcagtcattacatgcgtttgcttaccgagggatacttctggctggataccatgtctactattcagatacgttctata

SEQ ID NO: 59624 - DNA, 205 bp, Oryza sativa
  Clone ID: PAT_MRT4530_61229C.1
gccggacatccaggcgtcgccgccggaaaggggatatgaggtggcggagattcttgctaggaggaggagagggggccattggaggagggctagaggtcgctgcgcatggcccgtgggcggtggagagatgaagccaggaggacggatgcgctggaacaagggcacaggaccagggccgctggacatcatcgatgctagcagataa

SEQ ID NO: 59625 - DNA, 1106 bp, Oryza sativa
  unsure (1)..(1106): unsure at all n locations
  Clone ID: PAT_MRT4530_6122C.1
ccgggtcgcctcgtccttctagctagtgttgcccaccttgatttgctcgtactttgattctttctgcctctgcgtacgtgcgtgagagagctaagcatagagctagtggagtggaccggcctcactcgatctcagttctcgatcgatctcttcttcgtcttctgcgtcgtcgtcgtcgtccagcggtgagctatcagggtagcagccatggccggagtcgggaggaacatgctggcgccgctcttggtgctcaacctcatcatgtacctcatcgtcatcggcttcgcgagctggaacctcaaccacttcatcaatggccagaccaactacccaggcgtggcgggcaacggcgcgacgttctacttcctggtgttcgccatcctggccggggtggtgggcgcggcgtccaagctggcgggcgtccaccacgtgcgcgcgtggcgccacgacagcctcgccaccaacgcggcctcctccctcatcgcgtgggccatcaccgcgctcgccttcggcctcgcctgcaaggagatccacatcggcggccaccgcgggtggcgcctccgcgtgctcgaggctttcgtcatcatcctcgccttcacgcagctgctctacgtgctcatgctccacacgggcctcttcggtggcggcgacggcgcctaccgggaccacgactacggcgttggcgccggtgctgccgccggcgagcccaaggggacagcgagggtctgatcgatgatctccccgacacggggtcacgcaagaataaacgataatacatacttgatggtcattttgtgtgtgtgacagtgtgactgtgaggctctgcctctgtgtgcagcagtgcagtgtaagctctgtgctctcgcctttaattacactactagttgtttagcgttgtgtgttgggtttgtgtagcttgtacatgtgtgtatgtgaccgtacctagtacgtactttgatcgtagtagctaggtgtgcacgtcatggcctgtattttgctcgcatggaagtgccgtcctcaattaattactccttgtcaccgaaaaaaaaaaaaaaaaaaaaaaaaaaattatataaaaaaaaattaaaaaaatnttattttttttt

SEQ ID NO: 59626 - DNA, 249 bp, Oryza sativa
  Clone ID: PAT_MRT4530_61230C.1
caaagacatgtattggagaaggaatgctacaaaagacagcccaccccagcttggaacccccagtaaaagtccagtgattgctggggtgtgcccattatctgattaccgctaccccatgcaggacattggggatcctggtatttccatgggttttattggcccctctgttggtatcaataagggattgggaacggtgggaaaccatgatacggaacggaagattatcatggggtcaaaaaaaaaaaaaaa

SEQ ID NO: 59627 - DNA, 492 bp, Oryza sativa
  Clone ID: PAT_MRT4530_61231C.1
gaaaagaatgctttggtacttatcttatgaagtagcaacttaatcaggaaaaatagcatttgaatggtccttctctatatgcacaaattgcacttttatatacatggtccgttcttgtcattactgaaaggtttataaaacaccccagtgatagtgctggcagccttgatatgtccacatggacggaaaaagaaaaaaaaattgcagtggtttagaacccaaagctaaaatatcgattaggtgtagagtcagtttcagacttgtgaacttgaaatgttaaccaatcttgtaaaaagtagatgatcatttagaggttttacatatgtcttttttaacctagaaagagatactttggcatatcttttcaaattttgtgaatactaatttacagttcatcattgaaatatttattgttacaaagaactaaggtctcaattcaaagtatcaagtcattcattgcattgcaatgatacggtactttgcatatgtcat

SEQ ID NO: 59628 - DNA, 136 bp, Oryza sativa
  Clone ID: PAT_MRT4530_61232C.1
ggctatggctatggcgaacctgcacgtcctggactccctcgacggatcgagccacgcctcgccggatcacctgactttcacgcatcacttattcaaccaccatcgcagaccggggagaatcgatcggaggttgaag

SEQ ID NO: 59629 - DNA, 180 bp, Oryza sativa
  Clone ID: PAT_MRT4530_61233C.1
atggccgacaagctcaatggcgagctatccctctccaacgataataacaactataatgacgagtggttaatacaaacagagagagtctatggtcttcagtttggtttacctgatatatttgttggctgcctactctttcacaagggtttggatggtgaaataatgatgacccctgactaa

SEQ ID NO: 59630 - DNA, 330 bp, Oryza sativa
  Clone ID: PAT_MRT4530_61234C.1
gcgcagcgaaagaaagcgctaagaaggcgaaggaaccttcgtgatgtagcgcgtcgatgtagaggaagtagttgatcgcaccggctcgatcttctcctcctcgtgcgttctcctcgccgtactcccacgccgatcagcaccgcaaagcagcgcgcctctgccggatacatgattcgggccttcaacgcccgtaggactcctattcggatccctatccgagttaagctcatattgggttgtaacccgaaaattccttttcggtccacgtgtcaacagtggcccctagcggaacgtattgaccgaccgagcatacacaaagatcatatcggt

SEQ ID NO: 59631 - DNA, 108 bp, Oryza sativa
  Clone ID: PAT_MRT4530_61235C.1
atggattgccccttcgcgaaacaggtcttcttccttcaatggaaacatgatggattggtgggaagcttgccggagagaaatgatcaaagagcagagaaagaattttga

SEQ ID NO: 59632 - DNA, 434 bp, Oryza sativa
  Clone ID: PAT_MRT4530_61236C.1
caaggtaaccctggaaacaggtcccggaaaagaattccccctcaaaaccagttttgggggaaaacaaaacaaaaaatatcaccggcccccaaaaaaaaaaagggccgggggatttaataaaaaggggtcccaccaaaaataaaggggccccgagtcaaaaaaacaggaacaaaaaaccggggggcggctggaggagaaacaacccaacacaggggctaagctcaaaaagggcggccaacaatagccccataggcttaaaagcacagggaataaccattttgggttcccaacccgggggggtttaccagcccaacttcaatcctcatgggcatcatgggcatccttttgggggcgggggggcccaccctttttgctaaggggcggcttcttgttcccgaacggggggtggccctggaactggccccttggggggg

SEQ ID NO: 59633 - DNA, 211 bp, Oryza sativa
  Clone ID: PAT_MRT4530_61237C.1
gccaaccccacaaaggtacaggtgtcaatcacagataggcagaacaaagtggaaggaagaattgagacagtggtggagattgagatgaggtccagcaaacacacatggatgtgctggaagtcaccggagcacgactggcgtgttgacatgatgaccacaccgtggtgcgcaaccctgtgacaaatgtggatgctgcccaaccgtgcaaact

SEQ ID NO: 59634 - DNA, 406 bp, Oryza sativa
  Clone ID: PAT_MRT4530_61238C.1
atatctaagcaccactggggaggggggcaaataactaattattcctcattaacacaaagggtcatcacaaagtacattggctatttggcaaatatattttgttagcaatactgtggtacaagcaaacatctttgtgccgtgcttaacacggttcaagaatgaaaaaaaaaaggcgtacagtgtcaagcttgctcactttgggctgggtgaacaacacacagatacttaacgcaaacctgtagaaatgtaaactgcctaagaagaaacaaagtaagaactaaaagcatgacataagtcggtggcacatggtctacacgacctaattttacaggtacatgctatttgatcaaaaaaccctttaccctgaaaaaaacatatcgccccaaagctccagtttttttttttt

SEQ ID NO: 59635 - DNA, 1002 bp, Oryza sativa
  Clone ID: PAT_MRT4530_61239C.1
gtggatccccgggctgcagggtgatagtaacatcttaggttgagatcaacatatccaatccaacaattgtaacctacttggtacatatgctccataacagtaactgcaatgagttaagaaaaaaaggtcactagaacgtgttggttctctaccctaccaattcaatggtagtgccaaaatctaggtaaattttgacactaccaattatttggtagggtagaattcatataatgtgtttggtttgctaccatttgctaccaatatgcttgttatagtgaagaaagttctagaatgctaccaaattagctatgggtattgccaatactttggctctaatccaaaccaatcaaactactagtggatcccccgggctgctggtagggcacattttggcattgatccaaaatggcccattttggattgaagccaaaacatgaccttaccaatctattggtatcttgaagatattgtatggttggattaaagccaaatcattggtaatgcccattaacaatttggcactaatctagaactttcttctctatatcatcaatatttggctttatattggtagcaattcaaatatgtaccatgcatctctaccctaccaaagaattggtagtgccaaaacatgccaaaaatttggcactagcaaagatttggtagggtaaagaaccaaacagcttttgtttcagtcagaaagttaagtggggcaaaaagattgcccaaaatattatgaaatacctctcgatatacctttgatttcacaatatgttgtattaatttatgttttacaggcatacaaccgatccaactttcaatgacatgtttattgtttagtttagctacaataattgttgggtagttgtagagcagcacatggtacttatgccacaagcccacaaatagaataattcgcatttgctcatcctaattcatgctagcatctctatcgcagaacaattttgatactattttttttttaaaattagccttgaaaat

SEQ ID NO: 59636 - DNA, 5790 bp, Oryza sativa
  Clone ID: PAT_MRT4530_6123C.1
atggccgaacgggcagtggcgcacaacctctctccgagcgctagcggtgacgacggggagcagaacccgcgccgtcgagctcgtactccaccgcccccctctcgccgaagtcttaggcgggaggaggcgctcgagggggtcgaaagatccgcgacttcgccgcccacgagcgatgaagaaggacggcgagacggggagcgtcgcctcctcgtctacggcgatggcagcacgccccagggcacgctccaagctgcgggcgcgctcttgcgtcacccgcccgtcgtccccgatccagagactccagcccgacgttggctggatgacgtggccgacttggtcatgacggcgcagcagcgcctaggcgccggtgggcggtcctccgccgccaaggcctctggcgctgctaccgccggctccgtgtcgtcgaggggcgccattccctcgtcaacgcctccgacccaagaagatgtgcgtagggggccggatgcccgcctcagtatcgagcgccggcgcaatggtcgtcgtgctgcccacgcaacggaaggcgcttcctcgtccggagcgccacttcggttcgggcgcgggggccagccccccgtgcccccgcttggtggtgtcggctgtcgagcctttgtggcgagcattcggaacgtccgttggcccccaaggttccggcccaccatcaccgaaaaatatgacggaagcgtcaaccccgccgagtttctccaggtctacacgaccgggatcgaggccaccgggggtgacgacagggtcgtggcgaatttcttccccatggccctgaagggacaggcgcggggttggctaatgaacttgccgcccgcgtcggtccactcttgggaggatttgtgccagcagttcaccatgaacttccaaggcacatatgcgcgcccaggtgaagaagcggacttgcatgcggtacagcgaagggacgatgagtctcttcgctcgtacattcagcggttctgtcaagtccgcaacaccataccatgcatccccgcacacgcggtaatctacgcgttcagggggggcgtgcggcacaaccgcatgctcgaaaagatcgcctccaaggagccccagaccaccgcagagctttttcagctcgcggaccgtgtggctcgcaaggaggaggcctggacctggaactccaccggttccggtgtggcagcttcggccgcccccggatccgccgctcggttagggcggcgggacaggaggaggaaaaagaggtcggcccattccgacgacgagggtcacgtcctcgccgtcgagggcgcttcgcgggccacccgaaaggggaggcctgcgagcgacaaaaagaaggaggccggcgctcccagcagggagcgcccgaccggcaagtggtgcgccgtgcacaacacctccctccacgacctcgcggactgccgcgcggtcaaaagtttggctaagcggacgaggaagtgggaggaggagaggaggcaggaacgccgtgagggcaaggccccggcggctccctccggcaaccggcgaagtgaggccaagcagaaggcccccgccgaggacatcgacgatggcgacgatgatctagggttccaggagcctgggggccaccatcgccaccgtcgatgggggagcgccatgaagcgagagcttctggccgcggcccctacccatgaggcgacgcggcagacgcggtggtcggaggttgccctcaccttcgaccagaccgaccacccgccgtgcgttgcccggggaggacagatcgcgatggtggtttcccccaccgtttgcaacgtgaagttggggcgtgtcctcatagacgggggtgcagctctcaacatcctttcccccgcagcctttgacgccatcaaggccccggggatggtgcttcggccgtcccagccgattatcggtgtgacgccggggcacacttggccgctaggtcatatcgacctcccggtcaccttcggtggatccgccaacttccgcacggagcgggtgaacttcgatgtggcggacctcagtctgccctacaacgcggtcctggggaggcccgcgttggtgaagttcatggcggcggtccactacgcctacctccagatgaagatgccgggccccggtggccccatctctgtccatggcaacctcaaagtcgcgcttgcttgtatggagcagcgcgcggaccacctcgccgccgcgtccaagcccgagggtggcaacgagaggctcagcacctccgtcccagccgccccgaggcagcggatgatcacgtgcgacgaggtcccggaagacgcgcttgtctccttcctgcgggcaaacgccgacgtcttcgcctggagaccggcggacatgcccggggtccccagggaggtgattgagcaccgtctcgccgtgcggccgagcgcaaggccggtccggcagaaagtgcggcggcaggccccggaacgtcaagacttcatccgcgaggaggtggcgcgacttctggaggccggattcatccgagaggttatccatcccgagtggctggcgaacccggtcgtcgttcccaaagcgaacggcaagcttcggatgtgcatcgactacaccgaccttaacaaggcatgtcctaaggacccttaccccctgccacgcatagatcagattgtcgactccaccgcggggtgcgaccttttgtgttttctagatgcatactctggttatcatcagattcgcatggctagggaggatgaggaaaaaactgctttcattacccccataggaacttattgttatacgacaatgcctttcgggttaaagaatgcgggtcctacttttcaacgtactactcgaatttctttgggtagccagataggacgcaatgttgaggcctatgttgatgacttggttgtgaagacgcgcaaccaagagaccttactctcggatctagcggaaactttcgaaagtctccgctccgcccgcataaagctgaaccccgataagtgcgtgttcggcgtgcctgcgggcaagcttctcgggttcttggtctctgcccgaggcatcgaggccaaccccgagaagatacgagctatagagcggatgcgcccccccagcaagcttagggatgtgcaatgcgtcaccggctgcatggccgccctaagtcggttcatatcgaggctgggagagaaggcactgcccctatttaagctcctcaaacgctccgggccgtttacctggacggaggaggctgagcgggccctcactcagttgaaggcgtacctcagttctcccccagtcctggtcgccccggagccagatgagccgttgctactctacctggcggcaaccccgcatggggtcagcgcggcgttggtcgtggagcgcaacgaggacaaccctcactccgtgcatccccaccctgcgtcgactcgacccgggagagagcaggcaggagaggcccccgagccgaatggcggcccgaggcccccgacggccggagctggccctccgcctgcttgtccgacggtgccaggcgcccccgacccccaggatggccccggggccactgcgggaaggccgcgcctgtcgccctctgaccccgaggtcgtcggcacagaagccgagtgcgccccgcgtggcctctcggacgaagaacgccctggagatgcggcccctggcgaagaggatcggccccgccgaaaggtgcagcggcccgtctacttcgttagtgaggccctccgggacaccaagacccgataccctcaggcccagaagatgctttacgctattctgatggcttcgaggaagttgcgccattatttccaggcgcatcgggtcacggtggtcacgtcttaccccctcggccaaatcttgcataaccgagagggtactggacgggtggtgaaatgggcaatcgaactctctgaattcgatttgcgctttgaaccacgccacgcgatcaagagccaggccctcgccgactttgtggcggagtggaccccagcccctgagcccatctccgtccccgaggccagctcgggcccctcgcagctgcctcacaccgcctactggggcgccggtgcgggggtcacgttgacctcgccaagcggagacgtcctcagatacctggtccgcctcgactttcgggcgaccaacaatatggcggagtacgagggactccttgcgggactcagagtggcagctggactggggatccgccgcctcctggtgttaggcgactcccagttggtcgttaaccaggtctgtaaggagtaccggtgctctgacccgcagatggacgcttacgtgcgccaggtgcggcgtatggagcgccatttcgacgggatagagcttcggcacgtgcccagacgggataacgcggacgccgacgaactctcaaggctcgcttcctcgcgagcccagaccccaccgggcgcctttgaagaaaggcttgcccagtcgtcggcgcgacccgaccccctaggggagacggacgcgcctgaacggcccccgaggcccgtcggagtccaggcctcgggacccgaggggagcgctcccagttcccctagattgattgcttggatcactgaaatccaggcgtacctcgcagataagactctacccgagcaccgcgaagggagtgaacgcgtccagcgcatctctaagcgctacgtgctggtggaagggaccttctatcggcgcgcggctaacggagtcctcctgaagtgcattcctcgggaacaaggtgtcgagcttcttgccgatatccatgaaggcgagtgcggagcccactccgcctcacgcaccttggttggcaaggcctttcgccagggtttctattggccgacggctctcaacgatgcggttgacctggtccggcggtgcagggcgtgccagttccacgccaagcaaacccatcagccggcccaggccctgcagaccatacctctttcgtggccgtttgctgtctgggggctcgatatcctgggtccgttcaggcgggccccgggcgggttcgagtatctgtatgtcgctgtcgacaagttcactaagtggcccgaggcttatccggtcatcaagatcgataagcactccgcgcttaaattcatcaggggcatcactgctcggtttggggtgcctaaccgtatcattacggataacggcacccagttcactagtgagctcttcggtgactactgcgaagacatgggcatcaagctctgcttcacctcccccgcccaccccagaagcaatggccaagtggagcgcgccaacgcggaaatcctcaagggcctcaaaaccaaaaccttcaacatcctcaagaagcacggcgactcgtggatcgaggagttgccagcggtgctttgggcgaaccgaaccacgccaagccgagcaaccggggaaacgcctttcttcctcgtctacggcgcggaggcggttctcccatccgagctcaccctgaggtcccctcgggccaccatgtactgcgaggctgatcaagatcagcttcgcagagatgacctcgactacttggaagaacgaaggcggcgcgcggcccttcgagccgcgcgctaccagcagagcctgcggcgctaccatcagcgtcacgtccgggcccgatcactctgcgtcgacgacctcgtcctacgccgcgtccaaacgcgtgctggactgagcaagctctcaccaatgtgggagggtccgtatcgagtgatcggcgtcccccggccgggctccgttcggctggccacgggcgacggcacagagctgcctaatccgtggaacatcgaacaccttcgtcgcttctacccctag

SEQ ID NO: 59637 - DNA, 582 bp, Oryza sativa
  Clone ID: PAT_MRT4530_61240C.1
gcacgaggtacagatcaacaatttcatttcgaagtctttcccaagaataagattcttacataagtaggaggaatggccaccgctacgggaacttcaaagcctgtggctaccctgggtggaggtggctcctcctctggagcgtcgaccacgggcactaatcagggaggggacgatagagctacaggcacttctcacccagtcccagcaatgagcttcacaggagggctagcacagagcatgtctcattacatttacacaacatcaattggtcaggcaggtggctgccacaagggaaaagtgaaagggtagtcgaactccaagccgaatcagcagggaacaacaaactacggcaactcctacaaagaaaacaacgcccaatcagctgcttcatcgtattacaatggatctgcatccaagggtagttcgactggcaggatgccggagcagcaaaactcagatcatcagtactacattagcagcatgagcagcaatcacggccaacagggaggtggtggagcggagaacagcacctacacaagcaagagcattaggacgaagaagttcccgtcactcaacggctga

SEQ ID NO: 59638 - DNA, 2166 bp, Oryza sativa
  Clone ID: PAT_MRT4530_61241C.1
tgtacgcacgcacctaccctcctccgccatcgatcgtgctccgatctgcgccgccgagccggacctccgcgcggcgacggcggcggctttccggccggcgagagggccctcgtgggcggcacgtcgtggaccacggcccccgcccagcgttagccccttcccccctgcgctcgctgggtcctttgctcgatcgcttctcgattccccgggtcgcctgcgtcgatctccggtcccgcggggacgagcagctgcgccggcatccgctgcttccgacgcatcctcgcttcgctgttttgatcccaggaaaatttggtgggccctgaagaaagtagtgaattctgattgtattggttgatttctggttcatccatcctaaatgtggtttgcattttcagggagatatgtgtttgtcatgctcaaaatgaggtggtaaggggataatctacatgcaatgctgggtggtaaaaaggttcactctaggagagattggtttaaaccattgcttcaatgaacatcatactagaactcaaccatctcaagcaggtcagcttgccgacgcggcctgtcgtttgcaaaggcctttttatagtgattgcgcttattgtgctgagggcaatcgtatccccgtttctcgccgttaacccgtccgagaaggagggtttttacgatccgacagccgatttgctgcctgggattaggcgaggcaagttcattgaggttccacagattatatggggattgaacaatcagaagattgcgtttgccagggcgtgcttgactgcgagattcctgaaccggtctctgctcatgcctagtttgagtgcttcgcttttctacaaagaggttgacttgctgcgaccaatcactttcgacaaggtgtttgactttaccaagttcaacgcccgttgccaggggttcgtaaggttagctcgctattcagaagtttctaatcaaaccaagcctttcaaactccaaaagggaagtggtaggaggtggaccgtggagaaagacttggatcagctactacagtacagaaggggtgaggcagatgactctgaagtcattgaaatcatcgggaaacatccatttttgtggcctgatcactggccagtgaaagactatgccagaattttcgattgccttgcgttagttccggagatagaaactgaagtggttaaggccatatccaagattagagaggcaggcataaaagcaagacatgaggctggtatttctcataataagcacgtgaaagatggtacaatgaatccaccagtgccatacattgccgtccacatgagaatagaaaaggattggatgatccattgcaagaaatgggagcagcgttccaattcaaaggaaatttgcagcagtaaagaagagatcattcataaggtctcacagatcactgatctacgtaggccagttgtggtttatcttgcagtagctgacagccttctagaagatgattcaataactagcggttggagggtgggtatggttgcttttgagaagaagagacttggagttactgacatctacaataggcaaccttatcttataaagtccgctattgactttgaggtatgtgcgagagcggatgtgtttgtaggcaatagcttctcaacattttccaaccttgtggtgctgtcaagaacacaaaggctatataacatgggagaggcaagctcatgtggagagaatgtcgggctttcatcctatgcctacaatgttattggagacgatggcgggccacagagatggatgacagatatgtcagacacaagcctccaaaacttgagttacggaacgaacaatatctcatgccactgacttatgacataaaacacttgactgaacacgatcacacacacaaggataattcttgggagaattttagctacaaacagaggaacatgttagaaggttgatattggctgccacacttgagagagactttggccaagaattgtctgcagacctttgtgagtgtatacaaaaactgttctctgaagaacattgacttgtattgaacagtctttagtttgtaaagttaaatgttgtgtgttactttgtcttcctccgtaacttttaatgttatggtttcaaaagagcagcttcatactggaaaaaaaaaaaaaaaaaaaaaaaaaaatctagatctag

SEQ ID NO: 59639 - DNA, 735 bp, Oryza sativa
  unsure (1)..(735): unsure at all n locations
  Clone ID: PAT_MRT4530_61242C.1
ttttttttttttttttttaaatacgagctgcacacntcnnaatttagtctgaagcacgtgtaaatctacatttatcgaaattcttcctaacaattttgagatttcatatggtctaaactatttttcngggtttttgccccttccaatctttttctttcttttacatttgattccgtgatgcagtcgctgtgtgcttgtcgcttgtggcaatctcgaacaaccggtcgacttttttttttttgtaaaaaaaaaataggaagacgaattacattgggccatgcccctgcagagtttatgtattgctgaattggtcatttgggcaactaccacgatctacatttgtacggattcggctgtgtcatgtaacctttgctgagctgcctcaacatactgccgggcgagctttttcaccttgtcgccctccttgatcagaaagtttgcatttttagcgtcagaagggtatttcatgaccttgtctgtgttttcgcaacggcccacctatactgctcgacggtaattacaccactcttgcaaagtggtctgatgttctttttcacgaacatttcaaccttcttatgtttagcaccagaggaatctggctggtcctgctcgcgttcccgcgctcccttctgtgagtcgtccccgcgctgggcgggatcgggggcctagctgtttccggtcggaaagtcttttccgctcccctgtccacacaacataagagccggaagccattaa

SEQ ID NO: 59640 - DNA, 283 bp, Oryza sativa
  unsure (1)..(283): unsure at all n locations
  Clone ID: PAT_MRT4530_61244C.1
gctgncgcnctgtgntttctggcccgtgctctgnctgtcnntgtgntgttnttctcccccgcgcgggttttcggcgggtgtctctctgcctctcttacggtcgccncttgcctcgccctctttttcgtgccgcgcctgtttggtttctcgcgtttcccactgtccctgtctcctntcctgcgccccctccgccctgggaacgggcttggcgcgctctgcgtggtttgctgtccctgttgngcttgcctctcgtccgtctttgtggtttgtcttttgcggtttt

SEQ ID NO: 59641 - DNA, 328 bp, Oryza sativa
  Clone ID: PAT_MRT4530_61246C.1
atcagtaataacatgattttttctggttggttctttgcgataagagcatttacaataatcatctaggcaaaacagataggtacaaataactgacaaattattaatacatatacgcatgtcacagtggacatatttttgacaaaccacgcattatgacaattgccatcttcaaacaagaggcaacgaaattgtcttcaaacatggttacaacagtatgacatcttttgcttggtttccagctgaagactaacccacgcgtccgcccacgcgtccgcccacgcgtccggtctctgagaaacaactccacttcagtgaacaatgacttgga

SEQ ID NO: 59642 - DNA, 368 bp, Oryza sativa
  Clone ID: PAT_MRT4530_61247C.1
aaactaaaagttaagttttagaaacagcagggccagatttaagcatccacaaacaaaaccaacagtcagttgatcattgcagggcttttagttccaggaaaactaaaaaggggcccccacatgttgggcccattgggggaaaaaactactttttttttccccaaagggttttttaaaaacccagggatgaattgcccccagcggggagggggccaaagggagggggctgagctaaacccatttaaccccttttaacctaacctaataagggaacccccctggggaagggggttcggaaccagtttccaatctcccccattttggccttaaaacctaatgggggaaaggaacccacttgggggaaaggg

SEQ ID NO: 59643 - DNA, 411 bp, Oryza sativa
  Clone ID: PAT_MRT4530_61248C.1
atggctgaaacaaagattgctaattactttagaaataaattcagcaagcagaccatcagtggattaatgctggaaaatttcctcgcggtcgtaggagacgtcaagccaggcacagccgagagaccagccaagcgtggggcggtgaagcccgcggtctcaggtctcaggaacaatatcgtcaagcccgacggaggacgggacatccgagccaggggtcgcggaatcgggagcgtcgaggtggaacgacgggctcgagagaacagaatcgggcgtatcaccagactgtcgcggagcgagcacggcaagaacgaccggggcgcatcggccaccacggaggcggaccagtcggcagctaccggcggccgccgccgcttcggaggggtggggggtgtcgtcaagcatgaaggttga

SEQ ID NO: 59644 - DNA, 1245 bp, Oryza sativa
  Clone ID: PAT_MRT4530_61249C.1
atggtgaattctatcactagagaaatagatctgtactggtctgcggttgagtctgatgaaggaaataagctatgctcaatccacaaagtgccgcaacatattcttgaggttgataggaatgcttatgagccaataattctatcaatcggcccatatcaccatggagctcctaagctgacagccatggagagagaaaaatggaagtgtttagactttattctcaagttgaattgtgaattaagtttgcaggattacataagagcaattcataaactggagaagcaagcaagatgttattactctgaggagataccaatggaaaaaatgatgtttgtgaggttgcttttgcttgattcatgcttcatcttagtaaaagttgatagaactgttgtagcagcaatgcaattaaaagaggtgccaacagatgttactccgggaagtattgctgttaaagatggtctaaactctggtcaagaagttgaaagcaactgtcctatgcaaagacgtgaaactgagattgcggtgcatgaaattgaactaactaaatctcattttgatcatattgagtccaaaatttatttaggacagaggtatgttggttctaaccaaaaggaaaatgaggaatcccgactgctaactcgccagaaggattgcttccaagatgagcaattaccaattcgatggcgtcaagcagtacaataccatgaagcaggagttcaactgaagaaaagggtatacagcatctatgagaaacattctctcttggacataaagttcagtaatggagttctagaagtcccatgtcttactatcgatgagaataccgagtctctgttcaagaatttaattgcatttgagcaaatggattctcaatatgaaaactatatcacagcttatatcgcttttatgtctcagcttgtaagcacttctgaggatgccactctacttactgagagagggataattgttcatatgctggataatgacgatgaagtgtcagctatgttcaccaggctcagcacacatttgatatttggttctgatacctaccactaccttcaaactttatcctatgttttggaggaccattaccaaagcaggctgaacagatggatggcttggctctggcgtaatcacttcagcaatccatggttagcattaggtgtgttggctgcagtggtcgtcctactctgtaccattgttcagaccatattaacagtcctagcctacaggcaaccccattga

SEQ ID NO: 59645 - DNA, 6620 bp, Oryza sativa
  Clone ID: PAT_MRT4530_6124C.1
atggccgaacgggcagtggcgcacaacctctctccgagcgctagcggtgacgacggggagcagaacccgcgccgtcgagctcgtactccaccgcccccctctcgccgaagtcttaggcgggaggaggcgctcgagggggttgaaagatccgcgacttcgccgcccacgagcgatggagaaggacggcgagacggggagcatcgcctcctcgtctacggcgatggtagcacgccccagggcgcgctccaagctgcgggcgcgctcttgcgtcacccgcccgtcgtccccgatccagagactccagcccgacgttggctggatgacgtggccgacttggtcatgacggcgcagcagcgcctaggcgccggtgggcggtcctccgccaccaaggcctccggcgctgctaccgccggctccgtgtcgtcgaggcggagggcgcggcgagcggcggccgttacccgccgttcgtcagccattccctcgtcaacgcctccgacccaagaagatgtgcgtagggggccggatgcccgcctcagtatcgagcgccggcgcaatggtcgtcgtgctgcccacgcaacggaaggcgcttcctcgtccggagcgccacttcggttcgggcgcgggggccagccccacgtgcccccggttggtggtgtcgactgtcgagcctttgtggcgagccttcggaacgtccgttggccctcaaggttccggcccaccatcaccgaaaaatatgacggaagcgtcaaccccgccgagtttctccaggtctacacgaccgggatcgaggccgccgggggtgacgacagggtcatggcgaacttcttccccatggccctgaagggacaggcgcggggttggctaatgaacttgccgcccgcgtcggtccactcttgggaggatttgtgccagcagttcaccatgaacttccaaggcacatatccgcgcccaggtgaagaagcggacttgcatgcgcggttctgtcaagtccgcaacaccataccatgcatccccgcacacgcggtaatctacgcgttcagggggggcgtgcggcacaaccgcatgcttgaaaagatcgcctccaaggagccccagaccaccgcggagctttttcagctcgcggaccgtgtggctcgtaaggaggaggcctggacctggaactccaccggttccggtgtggcagcttcggccgcccccggatccaccgctcggtcagggcggcgggacaggaggaggaagaagaggtcggcccattccgacgacgagggacacgtcctcgccgtcgagggcgcttcgcgggccacccgaaaggggaggcttgcgagcgacaaaaagaaggaggccggtgctcccagcagggagcgcccgaccagcaagtggtgcaccgtgcacaacacctccctccatgacctcgcggactgccgcgtggtcaaaagtttgactgagcggacgaggaggtgggaggaggagaggaggcaggagcgccgtgagggcaaggccccggcggctccctttggcaaccggcgaaatgaggccaagcagaaggcccccgccgaggacatcgacgatggcgacgatgacctagggttccaggagcctggggccaccatcgccaccgtcgatgggggagcgtgcgctcacgcttctcgtcggagcctcaaggccatgaagcgagagcttctggccgcggcccctacccatgaggcgactcggcgggcgcggtggtcggaggttgccctcaccttcgaccagaccgaccacccgccgtgcgttgcccggggaggacagatcacaatggtggtttcccccaccgtttgcaacgtgaagttggggcgtgtcctcatagacgggggtgcagccctcaacatcctttcccccgcagcctttgacgccatcaaggccccggggatggtgcttcggccgtcccaaccgattatcggtgtgacgccggggtacacttggccgctaggtcatatcgacctcccggtcaccttcggtggatccgccaacttccgcacggagcgggtgaactttgatgtggcggacctcagtctgccctacaacgcggtcctggggaggcccgcgttggtgaagttcatggcggcggtccactacgcctacctccagatgaagatgccgggccccggtggccccatctctgtccatggcgacctcaaagtcgcgcttgcttgtatggagcagcgcgcggaccacctcgccgccgcgtccaagcccgagggtggcaacgagaggctcagcacctccgttccagccgccccgaggcagcggatgatcacgtgcgacgaggtcccggaagacgcgctcgtctccttcctgcgggcaaacgccgacgtcttcgcctggagaccggcggacatgcccggggtccccagagaggtgattgagcaccatctcaccgtgcggccgggcgcaaggccggtccggcagaaagtgcggcggcaggccccggaacgtcaagccttcatccgcgaggaggtggcgcgacttctggaggccggattcatccgagaggttatccatccggagtggctggcgaacccggtcgtcgttcccaaggcgaacggtcctacttttcagcgtactactcgaatttctttgggtagtcaaataggacgtaatgttgaggcctatgttgatgacttggttgtgaagacgcgcaaccaagagaccttactctcggatctagcggaaactttcgaaagtctccactccgcccgcataaaactgaaccctgacaagtgcgtgttcggtgtgcctgcgggcaagcttctcgggttcttggtctctgcccgaggcatcgaggccaaccccgagaagatacgagctatagagcggatgcgcccccccagcaagcttagggatgtgcaatgcgtcaccggctgcatggctgccctaagtcggttcatatcgaggttgggagagaaggcgctacccctatttaagctcctcaaacgctccgggccgtttatctggacggaggaggctgagcgggccttcactcatttgaaggcgtacctcagttctcccccagtcctggtcgccccggagccagatgagccgctgctactttacctggcggcaaccccgcaggtggtcagcgcggcgttggttgtggagcgcgatgaggacaaccctcacctcgcgcatccccaccctgtgtcgactcgacccgggagagagcagggaggagaggcccccgagccgaacggcggcccgaggcccccgacggccggagctggccctccgcctgcttgtccaacggtgccaagtgcccccgacccccaggatggccccggggccactgcgggaaggccgcgccagtcgccctccgaccccgaggtcgtcggcacagaagccgagtgcgccccgtgcggcctctcggacgaagagcgccctggagatgcggcccctagcgaagaggatcggccccgccgaaagtggaccccagctcccgagcccgtctccgcccccgaggccagctcgggcccctcgcagctgcctcacaccgcctactgggtgatgcagttcgacggctccttgtctcttcaaggcgccggtgcgggggtcacgttgacctcgtcgagctgtgacgtcctcagatacctggtccgcctcgattttcgggcaaccaacaatatggcagagtacgagggactccttgcgggactcagagtggcagctggactggggatccgccacctcctggtgttaggcgactcccagttggtcgtcaaccaggtctccaaggagtaccagtgctctgacccgcagatggatgcttatgtgcgccaggtgcggcgtatggagcgccatttcgacgggatagagcttcggcacgtgcccagacgggataacgcggtcgccgacgaactctcaaggctcgcttcctcgcgagcccagaccccaccgggcgcctttgaagaaaggcttgctcagccgtcggcgcgacccgaccccctaggggagacggacgcgcctgaacggcccccgaggcccgtcggagtccaggcctcgggacccgaggggagcgttcccggctctcctagattgattgcttggatcgctgagatccaggcatacctcgtagataagactctacccgaggaccgcgaagggagtgaacgcgtccagcgcatctccaagcgctacgtgctgatggaagagaccctctatcggcgcgcggctaacggagtcctcctgaagtgcattcctcgggaacaaggcgtcgagcttcttgccgatatccatgaaggcgagtgcggagcccactccgcctcacgcaccttggttggcaaggcctttcgccagggtttctattggccaacggctctcaacgatgcggttgacctggtccggcggtgcagggcgtgccagttccacgccaagcaaacccatcagccggcccaggccatgcagaccatacctctttcatggccgtttgctgtttgggggctcgatatcctgggtccgtttaggtgggccccgggcggtttcgagtatctgtatgtcgctgtcgacaagttcactaagtggcccgaggcttacccggtcatcaagatcgataagcactccacgcttaaattcatcaagggcatcactgctcggtttggggtgcctaaccgtatcattacggataacggcacccagttcactagagttgccagcggtgctctgggcgaaccgaaccacgccaagccgagcaaccggggaaacgcctttcttcctcgtctacggcacggaggcggttctcccatccgagctcaccctgaggtcccctcaggccgtcgcagagatgacctcgactacttggaagagcgaaggcggcgcgcggccctccgagccgcgcgcttccagcagagcctgcggcgctaccatcagcgccacgtccgggcccgatcactctgcgtcgacgacctcgtcctacgccgcgtccaaacgcgtgctggactgagcaagctctcaccaatgtgggagggtccgtatcgagtgatcggcgtcccccggccaggctccgttcggctggccacgggcgacggcacagagctgccctcggtcaccatgttcccggcctggccagtctcgacacgtggatctccccaggcactagccccgacccgcgccatttgaggctgggacaagaagggggcccggaggcttcggaagaagaaggaaaagttattaagattggcgggggcctggggctcactccgacgcgcccgggtagccggcctcgccgtcgctgtcgtccgcaccgtcgtcaccgcactcgccgtcggaggtgaaggcaaacgcgagcctaggggccgctcattattgtcggttggttttcccttgccgatgcgcgtgatttgcgaccgctgggattctgcccgaagagagagcagggaggagaggcccccgagccgaacggcggcccaaggcccccgacggccggagctggccctccgcctgcttgtccgacggtgacaggcgcccccgacccccaggatggccccgaggccactgcgggaaggccgcacctgtcgccctctgaccccgaggtcgtcggcacagaagccgagggcgccccgcgtggcctctcggacgaagagcgccctggagatgcggcccctggcgaagaagatcggctccgccgaaaggtgcagcggccggtctacttcgttagcgaggccctccgggacgccaagacccgataccttcagggccagaagatgctttacgctattctgatggcttcgaggaagttgcgccattatttccaagcgcattgggtcacggtggttacgtcttaccccctcggccaaatcttgcataaccgagagggtactggacgggtggtgaaatgggcaatcgaactctctgagttcgatttgcactttgaaccacgccacgcgatcaagagccaggccctcgccgactttgtggcggagtggaccccagctcccgagcccgtctccgcccccgaggccagctcgggcccatcgcagctgcctcacaccgcccactgggtgatgtagttcaacggcgcacgccttgccccgtcccgtcggaatgatgagagcctccaggcgctcgtcactagccggagccggcgtgctaactcccggagttggcacgtcagtcccggctagatacatgccaggcttcatcgcaaccattacaagcaagacattgtatgaagaagggcgaacatgcagattgctaatctgacgcgtggtggacaagaatgactggtttgcgaccggtctgacactggttatgtcgtcggcagacgaccgtgtccccacgttgcacctgcttccggcggagtggaggtaggtatgggccgtcccatcagaaggatcactcggacagcagccattgcaagtctccgcccaattaaaaagagatgacagggtgatccccgaggtcagacgaatgaggacgcgtggccgcacggagctggtagaggagagaaggaggaagagggtctctagagtttgaactctcttgctctccagctctttgtagctcctgtatacatcgcccgtgtcttgcgcgtttccacggcaaaggggggcctgcgcggtctcccggtgaggagccccacgctccgtcat

SEQ ID NO: 59646 - DNA, 156 bp, Oryza sativa
  Clone ID: PAT_MRT4530_61250C.1
ggagtgttggaccttgaaccttgtctaaaacgtccattaatatggaaccggagggagtagctaagtagctccattcagagctcatgcagtcgagacatgattatctgtttgtgaatcttgatttgcttgctcgtttaaaaaaaaaaaaaaaaaaaa

SEQ ID NO: 59647 - DNA, 318 bp, Oryza sativa
  Clone ID: PAT_MRT4530_61251C.1
atgaaaatacgaattataaaaaaacttcatataagacggacagttaaagttggacacagaaactcaggagaccttcgaggtttatgcaggctcagacctctcgagatttcacagttttttcaagtgcacgtgtggcagaaggatggaagccttggagaatgctgcttgggagggcactacgcaagtatctgcaaggaaccaaactatgaacgtaccaccgaggcatctcatatactctccactagtaggactagtaaaactgaagataagagtagtacactatcggcagaactaccaatgtacagcaatgataaatga

SEQ ID NO: 59648 - DNA, 616 bp, Oryza sativa
  Clone ID: PAT_MRT4530_61252C.1
gcacgagggttcaatcaagttaaagaaaaatatagcaactcttataacacgaaattaattctattaaatctaacatcgaatatattttgattatatgtttgcttgatgttaccatgtttctatgcttttctataaatttgatcaaatttaaagaagtttgatttagaaaaaaaaatcaagtgtcctcctcgcgcacatcgccgggcgctgcaccccttcggccatggcggcgtcgtccgtgctgcagcctgcggcggccgccgccgcgtggccgcgcttcctcccctctcctcgccggagcgccgcccagatgtgtcatttattcttggaacagacatatcaagttctttccatgcacaagtttgagtggaagcgccctttcagcggttcacaccggtccggtattcttcttgtttgcagaagttcaggttcctctgtaaaagcagctacttcaagcagacccgaagctgtttcctcttctcataacgatcaatccagcaaacatttatttggttctgtttcagatgcttataccattatctctggctattggattggccctgatatggatgatggctgtggtaatgttgtggccattctccaaagaattgtatga

SEQ ID NO: 59649 - DNA, 1524 bp, Oryza sativa
  Clone ID: PAT_MRT4530_61253C.1
atggccgggtcgccgccctccctcctctccggctcctccgccggcagcgccggcggcggcggctactccctcaagtcgtcgcccttctcgtcagtgggcgaggagagggttccggacccgaagccgcggtggaacccgcggccggagcagatccggatcctggaggcgatcttcaactccggcatggtcaacccgccgcgcgacgagatcccgcgcatccgcatgcagctgcaggagtacggccaggtcggcgacgccaacgtcttctactggttccagaaccgcaagtcccgctccaagaacaagctgcgctccggcgggacaggccgcgcggggctcggcctcggcggcaaccgggcctccgcgccggcggcggcgcaccgggaggccgtggcgccgtcgttcacgccgccgccaccaatcctcccggcgccccagccggtgcagccgcagcagcagcttgtctcgcctgtggcggcgcctacctcgtcgtcgtcttcctcctccgaccgttcgtccgggtccagcaagcctgcgagggctacgtcgacgcaggcgatgtccgtgacgacggccatggacctgctctcgccgctcgccgcggcgtgccaccagcagatgctctatcaaggccagccactggagtcgccgccggcgcctgctcccaaagtgcacggcatcgtgccacacgacgagccggtcttcctgcagtggccgcagagcccctgcctgtcggccgtcgacctcggcgccgccattcttggcggccagtacatgcacctgccggtgcccgctccgcagccaccgtcgtcgccgggcgcggcgggcatgttctgggggctctgcaacgacgtgcaagcgccaaacaacaccggccacaagagctgcgcctggagcgccgggctcggccagcactggtgcggctccgccgatcagctcggcctcggcaagagcagcgcggcgtcgatcgccaccgtgtctaggccggaggaggcgcacgacgtcgacgccacgaagcacggtctgctacagtacggctttggcatcaccacgccgcaagtgcacgtggacgttacctcctcggctgctggcgttctgcctcctgttccgtcctcgccgtcgccgccgaacgccgccgtcaccgtcgcgagcgtggccgccaccgctagcctgactgattttgctgcaagtgctatatctgctggcgccgtcgctaacaatcagtttcaaggtctcgcggatttcgggctcgtcgccggcgcctgctccggcgccggagccgccgccgccgccgccgcgcccgaggcgggcagttccgtggccgcggttgtgtgcgtcagcgtcgcgggcgccgcgccgccgctcttctacccggccgcgcacttcaacgtgaggcactacggcgacgaggccgagctgctccgctacagaggaggcagccgcacggagcctgtgcccgtcgacgagtcgggcgtcaccgtcgagccgctccagcagggcgccgtctacattgttgtcatgtaa

SEQ ID NO: 59650 - DNA, 228 bp, Oryza sativa
  Clone ID: PAT_MRT4530_61254C.1
atggagcagcacaagtggcgcttcctccgccgtttcctccagcgagcacccaccgtcccgctctccgacttcgtggacggggttcgggctgtcgagcagcgtgctcgctgctgctacagcgagagcatggccatcttcgacgacgatggcgacggcttcacggagatgctgctcctacttggcgaagctgagccgcgcggattagtgcaccagcaaaaagctaattag

SEQ ID NO: 59651 - DNA, 921 bp, Oryza sativa
  Clone ID: PAT_MRT4530_61255C.1
atgatggccttaggcgtgccaccgcctccctcgcgcgcctacgtgtccggcccgctacgcgacgatgacacttttggcggtgatcgtgttcggcggcggcggcggtggctcaaggagcagtgccctgccatcattgtccacgggggtggcaggcgtggaggggtcggccacagggccctggctgccggagtctctaaaatgcgtctcccagccctaaacgccgccacccaccggatcccctccacctcgcccttaagtatccctcagaccctcaccatcacccgcgatcctccctacccaatgctgcctcgaagtcacggccaccggaccggcggcggcggcttctccctcaagtcctcgcccttctcgtcagtgggcgaggagagggttccggacccgaagccgcggcggaacccgcggccggagcagatccggatcctggaggccatcttcaactccggcatggtcaacccgccgcgcgacgagatcccgcgcatccgcatgcagctgcaggagtacggccaggtcggcgacgccaacgtcttctactggttccagaaccgcaagtcccgctccaagaacaagctgcgctccggcgggacaggccgcgcggggctcgggctcggcggcaaccgggcctcagagccgccggcggcggcgacggcgcaccgggaggccgtggcaccgtcgttcacgccgccaccgatcctcccgccccagccggtgcagccgcagcagcagcttgtctcgccggtggcggcgcccacctcgttgtcgtcatcgtcctccgaccgctcgtccgggtccagcaagcccgcgagggctacgttgacgcaggcgatgtccgtgacggcggccatggacctgctctcgccgctccgccgatcagctcggccacggcaagagcagcgccatgtctag

SEQ ID NO: 59652 - DNA, 200 bp, Oryza sativa
  Clone ID: PAT_MRT4530_61256C.1
ggccgctttttccttttttttttttcggggggcaaagagaggcttcatcatcattagtgggaggactggacagttcctagccgcataccatttgcttgccctttatttatccagttattctttatccccacgccaacctaagaggatcctcccccgttctaaacgccctggttgctctgggggggggggggtttgtatgc

SEQ ID NO: 59653 - DNA, 1029 bp, Oryza sativa
  Clone ID: PAT_MRT4530_61257C.1
atgacggtgttccacttcctcaactgcgccgccctcaccttcggcccccacgtcgtctactactcggccaccccgctgtcagagtatgacacaattggcacttgtgtaaaagcggctgttgtttatcttggaacagcactagtaaagcttgtttgcttagcgacattgctcaaagtacctgagaatgatagctttgatccttatcaggaattgatgaaaatctttattgggtttatagatgttgctggtctttattttgctttgacacagttgactcatagaaacatctcccagaatcacaagtttcaggcagttggtcttggttgggcttttgctgactcagttctgcaccgtctggcgcctctctggattggtgcaagaggacttgaatttacgtgggagtacatttttcaaggacttgaagcaaatgccaatcttgttatgacgctgtcccttgctgctttaggatccttgatgtggctgaggaaaaacaaacctaggactttggtgccaataatttatgcatgtgctttgcttctggtaacaatgccatctatcaccagttacttgaggagatcattagagtggcagactccaaaggtggttggcttcgagctgttctcctcactggtcatggctttcatcagctggcagctgttctcagcttgtcagagaccaatgtaaggaatgagtttgcaaattgccggagattcacgctcctgagatggctcctgttgtacttccacagaattaggatgcgccttttcagccttgacactatcttttctgggggttcgatcatagaacttattatttagaatcctttttctgtaagttttagtggagaaacacatgctccagtgagttgccattgttaacagctcttataggcattgaactaaaagtatattttgcccctgctgtgcttcttctgtcaaccgcatggcatcatctaaaatgaaagcctataacattcagttttgtcatcagtttatgggaaagtgagtacactaaacatgattcagtgct

SEQ ID NO: 59654 - DNA, 276 bp, Oryza sativa
  Clone ID: PAT_MRT4530_61258C.1
atgatgttcccgggcgacgcgcatccggggagggtggtgtcaagcaaagggggagaaggagatggctggaacgacaacacaaagagctcagctccggccggctatggtggcggcggtggtggcctgactaagaggtggagggagaggggaaaggggaaaaatgaactctcctcggtggcggccggtcatggcaaggagagagaattttggccgatggccgcgccgcccacttcaccgcagccccatccgaagcggagcctcagggaggactcctag

SEQ ID NO: 59655 - DNA, 292 bp, Oryza sativa
  Clone ID: PAT_MRT4530_61259C.1
tgaaacagtaacggggtgggggtgggaattacttggttattacttttctcctgaagaactgtaagaacaagaacgctgcgtttgaaccttggacggggctaaaaaacctcttggcaaaaagaggcggagttggtgacgttaatgggcacggcgtctggtacgctttagctacgtgggcaaagaatttggcaagaaagacgctccaccggagattcacattcccagcagttgcgataagcgcctggattgttctactgcagttgtcgatagaaacccatctctcggagctaga

SEQ ID NO: 59656 - DNA, 5394 bp, Oryza sativa
  Clone ID: PAT_MRT4530_6125C.1
atggccgaacgggcagtggcgcacagcctctctccgaacgctagcggtgacgacgaggagcagaacccgtgccgtcgggctcgcaccccaccgtccccctctcgccgaaatcttgggcggggggaagcgctcggggaggtcgaaggatccgcgacttcgcctcccgcgggcgacgggggaggacggcgagacggggcgcgtcgccgcctcgtctacgacgatggcggcacgccccagggcgcgctccaggctgcgggcgcgctcctgcgtcacccgcccatcgtccccgatccagagactccagcccgacgttggctggatgacgtggccgacttggtcatgacggcgcagcagcgcctaagcgcctgcgggcggtcctccgccaccgaggcctctggcgcagccgccgccggctccatgtcgtcgaggcagagggcgcggcgagcggcggccgttacccgccgttcgtccgccattccctcgccaacgcctccgacccaagaagatgtgtgtggggggccggatgcccgcctcgatatcgagcgccggcgcgacgctcgtcgcgccgcccacgcaacggagggcgcttcctcgtccggagcgccacttcggtccgggcacgggggccggccccccgtgtccccggttggtggtgccggctgtcgagcctttgtggcgagccttcggaacgtccgttggcccccaaggttccggcccaccatcaccgaaaaatacgacggaagcgtcaaccccgccgagtttctccagatctacacgaccgggatcgaggccgccgggggtgacgacagggtcatggcgaatttcttccccatggccctgaagggtcaggcgcggggttggctaatgaacttgccacccgcgtcggtctactcttgggaggatttgtgccagcagttcaccacgaacttccagggcatatatccgcacccaggcgaagaagcggacttgcatgcggtacagcgaagggacgatgagtctcttcgctcgtacattcagcggttctgtcaagtccgcaacaccataccctgcattcccgcacacgcggtgatctacgctttcagggggggcgtgcggcacaaccgcatgctcgagaagatcgcctccaaggagccccagaccaccgcgcagctttttgagctcgcggaccgtgtggctcgcaaggaggaggcctggacctggaactcctccggttctggtgtggcagctccggccgcccctgggtccgccgctcggtcagggcggcgggacaggaggaggaagaaggggtcggcccgttccgacgacgagggtcatgtcctcgccgtcgagggcgcttcgcgggccccccgaaaggggaggcctgcgagcgacaaaaagaaggaggccggcgctcccagcagggagcgcccgaccggcaagtggtgtaccgtgcacaacacctccctccacgacctcgcggactgccgcgcggtcaaaagtttggctgagcggacgaggaagtgggaggaggagaagaggcaggagtgccgtgagggcaagaccccggcggctcccgccggcaaccggcgagcctttgacgccatcaaggccccggggatggtgctccggccgtcccagccgatcatcggtgtgacgccggggcacacctggccgctgggtcatatcgacctcccggtcaccttcggtggttccgccaacttccgcacggagcgggtggacttcgatgtggcggacctcagtctgccctacaacgcggtcctggggaggcccacgttggtgaagttcatggcggcggtccactacgcctatctccagatgaagatgccgggccctggtggccccatcaccgtccatggcgacctcaaagtcgcgcttgcttgtatggagcagcgcgcggaccacctcgccgcggcgtccaagcccgcgggtggcgacgagaggctcgccacctccgtcccggccgccccaaggcagcggatggtcacgtgcgacgaggtcccggaagacgcgctcgtctccttcctgcgggcaaacgccgacgtcttcgcttggagaccggcggacatgcccggagtccccagggaggtgattgagcaccgtctcgccgtgcggtcgggcgcaaggccggtctggcagaaagtgcggcggcaggccccggaacgtcaagccttcatccgcgaggaggtagcgcgacttctggaggtcggtttcatccgtgaggtcatccatccggagtggctggcgaacccggtcgtcgttcccaaggcgaacggcaagcttcggatgtgcatcgactacaccgaccttaacaaggcatgtcctaaggacccttaccccctgccacgcatagatcagattgtcgactccaccgcggggtgcgaccttttgtgttttctagatgcatactctggttatcatcagattcgcatggctagggaggatgaggaaaaaactgcattcattacccccataggaacttattgttatacgacaatgcctttcgggttaaagaatgcaggtcctacttttcaacgtactactcgaatttctttgggtagccagataggacgcaatgttgaggcctatgttgatgacttggttgtgaagacgcgcaaccaagagaccttactctcggatctagcggaaactttcgaaagtctccgctccgcccgcataaagctgaaccccgataagtgcgtgttcggcgtgcctgcaggcaagcttctcgggttcttggtctctgcccgaggcatcgaggccaaccccgagaagatacgagctatagagcggatgcgcccccccagcaagcttagggatgtgcagtgcgtcaccggctgcatggccgccctaagtcggttcatatcgaggctgggagagaaggcactacccctatttaagctcctcaaacgctccgggccgtttacctggatggaggaggctgagcgggccttcactcagttgaaggcgtacctcagttctcccccagtcctggtcgccccggagccagatgagccgttgctactctacctggcggcaaccccgcaggtggtcagcgcggcgttggtcgtggagcgcgacgaggaaaaccctcactccgcgcatccccaccctgcgtcgactcgacccgggagagagcagggaggagaggcccccgagccgaacggcggcccaaggcccccgacggccggagctggccctccgcctgcttgtccgatggtgccaggcgcccccgacccccaggatggccccggggccactgcgggaaggccgcgcctgtcgccctctgacctcgaggtcgtcggcacagaagccgagtgcgccccgcgtggcctctcggacgaagagcgccctggagatgcggcccctggcgaagaggatcggccccgccgaaaggtgcagcggcccgtctacttcgttagcgaggccctccgggacgccaagacccgataccctcaggcccagaagatgctttacgctattctgatggcttcgaggaagttgcgccattatttccaggcgcatcgggtcacggtggttacgtcttaccccctcggccaaatcttgcataaccgagagggtattggacgggtggtgagatgggcaatcgaactctctgaattcgatttgcgctttgaaccacgccacgcgatcaagagccaggccctcgccgactttgtggcggagtggagcccagctcccgagcccgtctccgcccccgaggccagctcgggcccctcgcagctgcctcacaccgcctactgggtgatgcagttcgacggctccctgtctcttcagggcgccggtgcgggggtcacgttgacctcgccgagcggagacgtcctcagatacctggtccgcctcgactttcgggcgaccaacaatatggcggagtacgagggactccttgcgggactcagagtggcagctggactggggatccgccgcctcctggtgttaggcgactcccagttggtcgttaaccaggtctgtaaggagtaccagtgctctgacccgcagatggacgcttacgtgcgccaggtgcggcgtatggagcgccatttcgacgggatagagcttcggcacgtgcccagacgggataacgcggtcgccgacgaactcttaaggctcgcttcctcgcgagcccagaccccaccgggcgcctttgaagaaaggcttgcccagccatcggcgcgacccgaccccctaggggagacggacgcgcctgaacggcccccgaggcccgtcggagtccaggcctcgggacccgaggggagcgctcccagctcccctagattgattgcttggatcactgagatccaggcgtacctcgcagataagactctacccgaggaccgcgaagggagtgaacgcgtccggcgcatctccaagcgctacgtgctggtggaagggaccctctatcggcgcgtggctaacggagtcctcctgaagtgcattcctcgggaacaaggcgttgagcttctcgccgatgtccatgaaggcgagtgcggagcccactccgcctcacgcaccttggttggcaaggcctttcgccagggtttctattggccgatggctctcaacgatgcggtcgacctggtccgacggtgcagggcgtgccagttccacgccaggcaaacccatcagccggcccaggccctgcagaccatacctctttcgtggccgtttgctgtcagggggctcgatatcctgggtccgttcaggcgggccccgggcgggttcgagtatctgtatgtcgctgtcgacaagttcactaagtggcccgaggcttatccggtcatcaagatcgataagcactccgcgcttaaattcatcaggggcatcactgctcggtttggggtgcctaaccgtatcattacggataacggcacccagttcactagtgagctcttcgcctcccccgcccaccccagaagcaatggccaagtgaagcgcgccaacgcggaaatcctcaagggcctcaaaaccaagaccttcaacgtcctcaagaagcacggcgactcgtggatcgaggagctgccagcggtgctctgggcgaaccgaaccacgccaagcagagcaaccggggaaacgcatttcttcctcgtctacggcgcggaagcggtcctcccatctgagctcaccctgaggtcccctcggcagagcctgcggcgctaccatcagcgccacgtccgggcccgatcactctgcgtcgacgacctcatcctacgccgcgtccaaacgcgtgctggactgagcaagctctcaccaatgtgggagggtccgtatcgagtgatcggcgtcccccggctgggctccgttcggctggccacgggcgacggcacagagctgcctaacccgtggaacatcgaacaccttcgtcgcttctacccctag

SEQ ID NO: 59657 - DNA, 774 bp, Oryza sativa
  Clone ID: PAT_MRT4530_61260C.1
atgaggaggaggagagcagcaggtgcggtgtggcttgccgttcccggccacggtgtggcgagtggcgacgggaagataacgcggctgctggcctcctcgatcgagggcgcgcgcggggaggaggcggcaggcgggagtggagggggcagggaggtggaaggcggcggcgggtgtgtcgacgaaggaggccacgacgaggaagcgtcgggcgagcagtggcgaggccaggtggttgtggtggcgaagcggcacggggcagcgtcggtcgtggggaggaggagggagacgaaggacatcgcgtcgcttcgcgaggcgttcgccgcgccggtggatggggaggtggaggacttggatgttgcggcagcgaggtgtgacttctacggggtgttcgacgggcatggctgctcgcacgtggcggacgcgtgcagggagcggatgcacgagctcgtcgcggaggagatgggcgcgggggcggcgccgcgcgagccggcgtcttggacaggcgccatggagcggagttttgccaggatggatgccgaggtgattgccggctgccgagccgagagcggcagctgccggtgcaaggggtggaagtgcgaccacatggggtccaccacggtggtggccatcgtggaggagagccacgtcatcgtcgccaactgcggggactccagcgtcatgctccgccgcgacggcgcgcccgtgccggaggtgacggtgaccgataggtcggacggcaatgagtgcctcatcctcgccagcgacggcctctag

SEQ ID NO: 59658 - DNA, 789 bp, Oryza sativa
  Clone ID: PAT_MRT4530_61261C.1
atggggaggcagccgtgctgtgacaagaagaaggtgaagagggggccatggacggcagaggaggacaagaagctcatcagtttcatcctgacacatggccgctgctgctggcgagcagtgcctaagttggcagggctgctgcgctgtggcaagagctgccggttgcggtggaccaactatctccgccctgacctcaagcgtggcctcctcaccgcagacgaggagcagcttgttgtggacctccatgccaagcttggtaacagatggtccaagatcgccgccaaattaccagggagaacagacaacgagatcaagaaccattggaacacgcacatcaagaagaagctcatcaagatgggcatcgacccagccacacatcagcctctgcccaacaccaaggtggttagccaaacaagaacctccacgctgtccactgccacaaccgaatcagccaagtcaaatggtatggcatatccgttcgatcccgagggaggctgcagcagggacatgtcagtgcccacagactcgatggagcagtcaagcaggaacaccagcagtcatggcctggacccattggtgaactggctgttggaggcagagcttccagctgacgagccatggctaaattttactagcagcaatgaagatgacttcagtggcatcgttaagcagtcagcatgggatggaagcacaacagactggctgcttgactaccaagacttcagcatggacgattcgagcttgattgatggtgcaagggttcagaattcagatggattgaacttttag

SEQ ID NO: 59659 - DNA, 329 bp, Oryza sativa
  Clone ID: PAT_MRT4530_61262C.1
ttttggtttttaaattttttgggtttttttttttttttttttttttttttttttttttttttggggaattaaatcaaacgaagaaaaagggaaaggttttaaccttgccaaccccacatgggacaaaaacccccccaaaaggagaaaccccggccccaaaaaaaaaggaaaccaggcccaaattttccgggggcccccatttacacgggtaaaaaaaggggggccccatggaccccggaattgggaccaagggggaaaaatcgggtgggggacaaaaagagggagccctagggaactttttttggttgcaaaagcacaccctaatgggc

SEQ ID NO: 59660 - DNA, 1586 bp, Oryza sativa
  Clone ID: PAT_MRT4530_61263C.1
gcggcaaccactctcccctcgccaacaccaacgccaccgccaacgccaacgccgccccgcatcatctatcaaccgccggccgaggtggagcgggagcttggactgagatgaggacgaggagtggatctctctaccgcagcggcggcggcggcggggagacggccatggttgggcagaagaggaagaggtcgtcgttgccgccgcagtacgccaccgccggtgactgctgcggcggaggaggccgccggaagaggctggccggtggtggcccggattacctcgacgagctccccgacgacctcgtcctcgccgtgctctccaagctcggcgcctccgcctcctccccttccgacctcctctccgttcacctcacgtgcaagaggctgaatgggctggggcgccatgacatggtcttcgcaaaggcctcgccggcgtcgctcgccgtcaaggcggcgtcgtggtcggagcccgtgcagcgattcctcaagctctgcgccgacgccggcaacctcgaggcctgctacattctcggcatgattcggttctactgtcttggcaaccggagcggcggcgcggcgctgctggcgagggcggcggtcggcgggcacgcggcggcgctctactcgctggcggttatccagttcaacgggagcggcggcgccaatcggaccgcgcgccggggcggcgctgtgcgcgcgcgccgccgcgctggggcacgtcgacgcgctccgcgagctcgggcactgcctccaggacggctacggcgtgcgccgcgaccccgccgagggccgccgcttcctcgtcgccgccaacgcgcgggagctcacgctcgcgctcgccgccgcggcgtcgcaccgccccttcgccgccctccccctcgccggcggcgccgccgccggcgccatcggctgcccgctcctctccgacttcgggtggagcctcccggaggcggagccccacccggccaacctcttcatggccgactggtgggcgtcccgcggcgtgcaggcgacggccaagaaacccggcctcgaggctcccgctgccgccaccggcgacagcgacggcggcggcgagctccgcctctgctcccacgtgcggtgcggccggagggagacccgccgccacgagttccggcggtgctccgtctgcggcgcggccaactactgctcccgcgcgtgccaggcgctggactggaagcgcgcgcacaaggcgcagtgcgtgcccatggaccggtggctcctcgccgccggcgaggcccagtgattagcccccgccgccaaatactcccttagaccaatcggtccaccggtttaacgctggaccgggtgtagccaaggcaagtggcagagaaaaaaaattgaggaagcctttttttctttttttttctttatgaccgaatccatcgatgtcttcttgtcaaaggtacgtattcccctagggaaaaaaagggtaaaaatggtacggatgctttttactcgcataattccttttttttttctcattccgagtaaactaaactttaaattaaattaaattataattataattataattccaacccctttaaaagacccagggggttt

SEQ ID NO: 59661 - DNA, 321 bp, Oryza sativa
  Clone ID: PAT_MRT4530_61264C.1
atgatgtggaggaggaagagcagcagcagtggcggcgtgtcacccgccggcgcctcgccgcgccacggcggcgacgacaacgacgaatgcaatgtctttccgagagggtacgtaccgatagtcgccggcagcggcgacggggagcgcgtgctggtgccggttagtctactcggggacccgtgcatcgcggagcttctggacatggcggtgcagcagtacgggtacggccagccgggcgtgctgcgggtgccctgcgacggcgagcgtctacggcgagtcgtggagggcgcgctgcggaagggcggtggccagtcagcatga

SEQ ID NO: 59662 - DNA, 413 bp, Oryza sativa
  Clone ID: PAT_MRT4530_61265C.1
ggaaaaaaaaggggggggtgttttttattaattgggaaaatttggtggaaaagggttttaaaaagagggcaaaaagggtgggatgggggggcccactaaaaaaaaagggagggaaaaaatttttgttgggggtaaaaaggtttttaggaaaaaattgggggtaattttttggggagaggtgaaaaataaatggggtggggttaaataaaaaaggggggggggatttttaaagggggggtttaggggtcaaacgatgaaaaaaccttttaatttggggggggaaaacctttacctttccctggaaagtttgtaaaataaaatctcttggaaaaaaaaactgggggttttccattttaagaaaaaggctttttatcttttttttgggaaaaaaaaaccacgggttttttcctttt

SEQ ID NO: 59663 - DNA, 243 bp, Oryza sativa
  Clone ID: PAT_MRT4530_61266C.1
atggcgagccagcggcgctgcccgcttcggaggagaggatgcgtcggccagatacccctagtagccggagagcggcggcgggatgcggtggccggcgacttcgccggcggcggatgccggcgccgctgcccgtgggaaggggaagccgcgacaggggtggtggggaagagcaccgccgtccccgccgtcggccctgccacgacgctcgggatcgggatggggcaccgccgccgtcacgcgtag

SEQ ID NO: 59664 - DNA, 584 bp, Oryza sativa
  unsure (1)..(584): unsure at all n locations
  Clone ID: PAT_MRT4530_61267C.1
ctcatgtcccatgacagctccnagtttggataacttgccatttgcccagctttgattgttttatttcgctacatatcacttgactatgatttccgtagaaagagcacaactaccacagataacgatgccagtcgcgcacttaccaaaacaaaaagtattgaaccaaataaaatcccctctattcaaaaggatggaaagtcagattggaagagcaaggtgaattcccctccagttgaagctgcaattgaacagttcacaaggcaccttgtcacagagtgggtaacagatctatggtactcccgtgtaacacctgacaaggaaggtccagaggaactcatcaatatagttaataatgtcctgggagagatatcagtccgggcaagaaacgttaaccttatcgctctgctaaccagggatctgattgatcttatatgcaaaaatttggagctttatcatttatgccaagccaagattggaaaagagaagtttgttaatctctcgacggagcgtcgtgatgctgaactaaaactgacccttataaccgaaaacaagttgcatccagctttattttcagccagtgctga

SEQ ID NO: 59665 - DNA, 2202 bp, Oryza sativa
  Clone ID: PAT_MRT4530_61268C.1
atggaacatacatatcaatatgcatgggtaatccctcttctcccacttccagttattatgtcaatggggtttggactttttcttgttccaacagcaacaaaaaatcttcgtcgcatatgggcttttcctagtgttttacttttaagtatagctatggtattctcagttcacctgtctattcaacaaataaatggaagttctatctatcaatatctatggtcttggaccgtcaataatgatttttccttagaatttggatacttaatcgacccgcttacttctattatgttaatactaattactactgtaggaatcctggttcttatttatagtgatgattatatgtctcacgatgagggatatttgagattttttgtttatataagttttttcaatacttccatgttgggattggttactagttccaatttgatacaaatttattttttttgggagcttgtgggaatgtgttcctatttattgataggcttttggtttacacggccaattgcagcgagtgcttgtcaaaaagcttttgtaactaatcgtgtaggggattttggtctgttattaggaattctaggttttttttggataacaggtagtttagagtttcgggatttgtttaaaatagctaataactggattcctaataatgagattaactccttgcttactattttgtgtgcttttttattattccttggtgcagttgcgaaatcggcacaattccctcttcacgtatggttacccgatgctatggaaggacccacccccatttcagctcttatacacgcagcaactatggttgctgcggggatttttcttatagctcgacttcttcctcttttcatatccctacctttgataatgagtttcatttctttaataggtacactaacacttttcttaggagccactttagctcttgctcagagagatattaaaagaagcttagcctattctacaatgtctcaattgggttatatgatgttagctctaggtataggttcttatcaagctgctttattccatttgatcactcatgcttattcgaaagctttattattcttgggatccggatctgttattcattcaatggaacctcttgttggatattcaccagataaaagtcagaatatggttcttatgggtggtttaagaaaatacattccaattacaagaacttgttttttatggggtaccctttctctttgtggtattccacctcttgcttgcttctggtccaaagatgaaatccttagtaatagttggttatattcacccttttttggaataatagcttcttttactgcaggattaactgcgttttatatgtttcggatatatttacttacttttgatgggtatttgcgtgttcattttcaaaattacagtagtactaaagaggattcgttgtattcaatatcgttatggggaaaaaggatatctaaaggagtcaatagagatttcgttttatcaacagcgaagagtggagtttcttttttttcacaaaatctatccaaaattcatgttaatacaggaaataggatagggtcctttagtacttcattggggactaaaaacacttttgtctatcctcatgaaccgggaaatactatgctatttcctcttcttatattactgctttgtactttgtttattggatctataggaatccattttgataatgaaataggggaattaaccatattatcaaagtggctaactccctcaatcaactttttccaagaaagttctaattcttccataaattcatatgaatttatcactaatgcaatttcttctgtaagtctagctatttttggtctattcatagcatatatgttttatggatctgcttactctttttttcagaatttggatttaataaattcctttgtaaaagggggtccgaaaaagtattttttccatcaactaaaaaaaaagatatatagttggtcatataatcgcggttatatagatattttctatactaggacctttaccttgggtataagaggattaaccgaactaacgcagtttttcgacaagggtgtcattgatggaattaccaatggagtaggtcttgctagtttttgtataggagaagaaattaaatatgtagggggaggtcgaatttcgtcttatttattcttttttttatgttatgtatctgtgttcttattcttttttctttct

SEQ ID NO: 59666 - DNA, 243 bp, Oryza sativa
  Clone ID: PAT_MRT4530_61269C.1
atggcttcctcctcccgaagctctagtgttctcgccatccccctcctgctgtgcctcctcgctgccaccaccgctcgcttcgccccagctgacaaccacctcctcactttcggcacgacggcaccagtcgtgctctccgacagccaacgcttcatccctgactccggctgcacctccacgcacctgcgctcccggcaaccttctcatctttggcggcggtcgcaaccttggagttgtggttag

SEQ ID NO: 59667 - DNA, 5130 bp, Oryza sativa
  Clone ID: PAT_MRT4530_6126C.1
atgacggcgcagcagcgcctaggcgccggtgggcggtcctccgccaccaaggcctctggcgctgctaccgccggctccgtgtcgtcgaggcggagggcgcggcgagcggcagccgttacccactgttcgtctgccattccctcgtcaacgcctccgacccaagaagatgtgcgtagggggccggatgcccgcctcagtatcgagcgccggcgcaatggtcgtcgtgctgcccacacaatggaaggcgcttcctcatccggagcaccacttcggttcgggcacgggggccagccccccgtgcccccggttggtggtgtcggctgtcgagcctttgtggcgagccttcggaacgtccgttggcccccaaggttccggcccaccatcaccgaaaaatatgacggaagcgtcaaccccgccgattttctccaggtctacacgaccgggatcaaggccgccgggggtgacgacagggtcatggcgaatttcttccccatggccctgaagggacaggcgcggggttggttaatgaacttgccgctcgcgtcggtccactcttgggaggatttgtgccagcagttcaccatgaacttccaaggcacatatccgcgcccaggtgaggaagcggacttgcatgcggtacagcgaaggaacgatgagtctcttcgctcgtacattcagcggttctgtcaagtccgcaacaccataccatgcatccccgcacacgcggtaatctacgcgttcagggggggcgtgcggcacaaccgcatgctcgaaaagatcgcctccaaggagccccagaccaccgcggagctttttcagctcgcggaccgtgtggctcgcaaggaagaggcctggacctggaactccaccggttccggtgtggcagcttcggccgcccccggatccgccgctcggtcagggcggcgggacaggaggaggaagaagaggtcggcccattccgacgacgagggtcacgtcctcgccgtcgagggcgcttcgcgggccacccgaaaggggaggcctgcgagcgacaaaaagaaggaggccggcgctcccagcagggagcgcccgaccggcaagtggtgcaccgtgcacaacacctccctccacgacctcgcggactgccgcacggtcaaaagtttggctgagcggacgaggaagtgggaggaggagaggaggcaggagcgccgtgagggcaaggccccggcggctccctccggcaaccggcgaagtgaggccaagcagaaggcccccgccgaggacatcgacgatggcgacgatgacctagggttccaggagcctggggccaccatcgccaccgtcgatgggggagcgtgcgctcacgcttctcgccggagcctcaaggccatgaagcgagagcttctggccgcggcccctacccatgaggcgacgcggcgggcgcggtggtcggaggttgccctcaccttcgaccagaccgaccacccgccgtgcgttgcccggggaggacagatcgcgatggtggtttcccccaccgtttgcaacgtgaagttggggcatgtcctcatagacgggggtgcagccctcaacatcctttcccccgcagcctttgacgtcatcaaggccccggagatggtgcttcggccgtcccagccgattatcggtgtgacgccggggcacacttggccgctaggtcatatcgacctctcggtcaccttcggtggatccgccaacttccgcacggagcgggtgaacttcgatgtggcggacctcagtctgccctacaacgcggtcctggggaggcccgcgttggtgaagttcatggcggcggtccactatgcctacctccagatgaagatgccgggccccggtggccccatctctgtccatggcgacctcaaagtcgcgcttgcttgtatggagcagcgcgcggaccacctcgccgccgcgtccaagcccgagggtggcaacgagaggctcagcacctccgtcccagccgccccgaggcagcggatgatcacgtgcgacgaggtcccggaagacgcgcttgtctccttcctgcgggcaaacgccgacgtcttcgcctggagaccggcggacatgcccggggtccccagggaggtgattgagcaccgtctcgccgtgcggccgggcgcaaggccggtccggcagaaagtgcggcggcaggccccggaacgtcaagccttcatccgcgaggaggtggcgcgacttctggaggccggattcatccgtgaggtcctccatccggagtggctggcgaacccggtcgtcgttcccaaggcgaacggcaagcttcggatgtgcatcgactacaccgaccttaacaaggcatgtcctaaggacccttaccccctgccacgcatagatcagattgtcgactccaccgcggggtgcgaccttttgtgttttctagatgcatactctggttatcatcagattcgcatggctagggaggatgaggaaaaaactgcattcattacccccataggaacttattgttatacgacaatgcctttcgggttaaagaatgcaggtcctacttttcaacgcactactcgaatttctttgggtagccagataggacgcaatgttgaggcctatgttgatgacttggttgtgaagacgcgcaaccaagagaccttactctcggatctagcggaaactttcgaaagtctccgctccgcccgcataaaactgaaccccgacaagtgcgtgttcggtgtgcctgcgggcaagcttctcgggttcttggtctctgcccgaggcatcgaggccaaccccgagaagatacgagctatagagcggatgcgcccccccagcaagcttagggatgtgcaatgcgtcaccggctgcatggctgccctaagtcggttcatatcgaggctgggagagaaggcgctacccctatttaagctcctcaaacgctccgggccgtttatctggacggaggaggctgagcgggccttcactcagttgaaggcgtacctcagttctcccccagtcctggtcgacccggagccagatgagccgctgctactttacctggcggcaaccccgcaggtggtcagcgcggcgttggtcttggagcgcgacgaggacaaccctcactccgcgcatccccaccctgtgtcgactcgacccgggagagagcagggaggagaggcccccgagtcgaacggcggcccgaggcccccgacggccggagttggccctccgccagcttgtccgacggtgtcaggcacccccgacccccaggatggccccggggccactgcgggaaggccgcgcctgtcgccctccgaccccgaggtcgtcggcacagaagccgagtgcgccccgcacggcctctcggacgaagagcgctctggagatgcggcccctagcgaagaggatcggccccgccgaaaggtgcagcggcccgtctacttcgttagcgaggccctccgggacgctaagacccgataccctcaggcccagaagatgctttacgctattctgatggcttcgaggaagttgcgccattattttcaggcgcatcgagtcacggtggttacgtcttaccccctcggccaaatcttgcataaccgagagggtactggacgggtggtgaaatgggcaatcgaactctctgagttcgatttacactttgaaccacgccacgcgatcaagagccaggccctcgccgactttgtggcagagtggaccccggcccctgagcccatctccgcccccgaggccagctcgggcccctcgcagctgcctcacaccgcctactgggtgatgcagttcgacggctccttgtctcttcaaggcgccggtgcgggggtcacgttgacctcgccgagcggagacgtcctcagatacctggtccgcctcgattttcgggcgaccaacaatatggcggagtacgagggactccttgcgggactcagagtggcagctggactggagatccgccgcctcctgataagactctccaagcgctacgtgctggtggaagggaccctctatcggcgcgcggctaacggagtcctcctgaagtgcattcctcgggaacaaggcgtcgagcttcttgccgatatccatgaaggcgagtgcggagcccactccgcctcacgcaccttggttggcaaggcctttcgccagggtttctattggccgacggctctcaacgatgcggttgacctggtccggcggtgcagggcgtgccagttccacgccaagcaaacccatcagccggcccaggccctgcagaccatacctctttcatggccgtttgctgtctgggggctcgatatcctgggtccgtttaggcgggccccgggcgggttcgagtatctgtatgtcgctgtcgacaagttcactaagtggcccgaggcttacccggtcatcaagatcgataagcactccgcgcttaaattcatcaggggcatcactgctcggtttggggtgcctaaccgtatcattacggataacggcacccagttcactagtgagctcttcggcgactactgcgaagatatgggcatcaagctctgcttcgcctcccccgcccaccccagaagcaatggccaagtggagcgcgccaacacagaaatcctcaagggcctcaaaaccaaaaccttcaacatcctcaagaagcacagcgactcgtggatcgaggagttgccagcggtgctctgggcgaaccgaaccacgccaagccgagcaaccggggaaacgcctttcttcctcgtctacggcgcggaggcggttctcccatccgagctcaccctgaggtcccctcgggccaccatgtactgcgaggctgatcaagatcagtttcgcagagatgacctcgactacttggaagagcgaaggtggcgcgcggccctccgagccgcgcgctaccagcagagcctgcggcgctaccatcagcgccacgtccgggcccgatcactctgcatcgacgacctcgtcctacgccgcgtccaaacgcgtgctggactgagcaagctctcaccaatatgggagggtccgtatcgagtgatcggcgtcccccggccgggctccgttcggctggccacgggtgacggcacagagctgcctaatccgtggaacatcgaacaccttcgtcgcttctacccctag

SEQ ID NO: 59668 - DNA, 409 bp, Oryza sativa
  Clone ID: PAT_MRT4530_61270C.1
tgaacactctgaaaggtgcgctcagattgtttataatgttgtgttactatcaagtggaaaggatttggtaactttccttgagagatgcacatctttctggatattatattgcttcagccttgctgcatttagtggctgagaaagctaatttcctaaagtttgccatctgtctagttttaaagttaaaatactgcctttcactatttgtttatgtaatatgttgttgtcgttgcaattcaacagtctacctttttatctaacaaatcctcgttgatgctgaatgcattggagttttttaaaactattactttttacataagggttgggtgggggtaagctttccttaattggttgacaattgcgcaatggcgtgtgcacttcgttttatttttgcacgtcacgatttttt

SEQ ID NO: 59669 - DNA, 357 bp, Oryza sativa
  Clone ID: PAT_MRT4530_61271C.1
atggtcgtcaccctcgccgctgtcacggcgctgctggtggcaccggcggtggtggcggcgacggcgacgccgccggcggggtacacgacggcggaggacgtgagcagcgacttcatcaagcaggtggggaagttcgcggtgacggtgtataagctcgccaggggggtgtccctgtactacgtcagcacgtcgcagtgctggtccaagcccgccggcggcggcgccgacgactactggatggtgctcacggcgaccaacggcgccggcgccgccggcagctacgtcgccaccatctggggcatccccgggtccgagtccaagacgtggaagctcctcagcttcaacgccacctcctga

SEQ ID NO: 59670 - DNA, 1332 bp, Oryza sativa
  Clone ID: PAT_MRT4530_61272C.1
atgtggcacatagaaaattggatggaagcatgtaattccagtaattattcacagcccacaccgttctatcaccagtactccataatatttgttcaagtaatacagaggacaaagacgaccacatgaaactactactaggactgttcaattaccctggccagtgaccgggcgagattattcccaattatgtacaaaccaagcacgtcaattgtgccaaactatgctagcaagcaagaattttcacgagccatcttcctttggcttttgactcagttctgcgtactggcctcccatcagcttcaatatctcagtccataggcaagaaggatctgttgcaagggagtcgcttatcaggcctgagctacaggaagtgacatgccagtatccttgatcaatctcgctcaacaactggtcgtaatcccaggcagagtacccaacatagaagtttaagtcctcaggcttaaccgcgccactcttcaaaagagcactggccttctctaggtcagtcctgaaaccgaagcagacgcctggcgacacctcttcgaaccccttaattggtctgtcatcggtagtcctcatcaagaatatgctcatgtcgacaggtcccccaaagaagagggagcaatcactaaaaggggttgcctggttgcggaacgatgggttcacgtgtttcatttttgtatacagtggacggtttaggatgacgccaaatgggccgtcataggcatctcttgaacctaatcttaggaggagaattacagttctctcaaacgtaccattgccatcaagctcttcagcagcaaccagcacacaaccagattctggcattggaatagaatgtgcccacttccgaggaagacagtgcactggtgcatccgtagctgcttgtggtagagtatgtgcatctactgtttgcacctttggaaccacaaagcttgctctaacgtctctccaatatgacaagttaccaggtacatacattgtgtcattggattgcagttcattatttgaaacatctccactgggagcagacgcatcaccttttccggaggaggaggaggacgccgccttgttcttcttgggctcgtcgccgccgccctcgtcgcggccgcccttgctcttcctccctgacgcgctgaccgccagcttgggccaccgctccgccggctgacgacgcctccacgagcaccacctcccgggccccgcggccagcgagccggcctcgccggcggcggcgagcggcggcggggtgcgcctcgccgggaggcaggaggacccaccgctgtttggggtgagggcccacatgtcggtggccgcgagcggacgcgtggg

SEQ ID NO: 59671 - DNA, 264 bp, Oryza sativa
  Clone ID: PAT_MRT4530_61273C.1
agacagttaaatgttccgagaacggatggggcagcacgtcgctctggaattcgcgccaagacgagtcggggctaagctaacacatctgcgcgagcacagcagagcacagcagggtatcctggacctgggcccactggttgagataaaggtacagacccatagagctaggtgcacacagtgatggagccacgcatcagacacaagctccgtgttggccgaaagctatgaagcggctcatacggggagagctaccttggtaccaat

SEQ ID NO: 59672 - DNA, 556 bp, Oryza sativa
  Clone ID: PAT_MRT4530_61274C.1
agccggccgggccttccttagaccggaagccaagggaggcctcggccggaggagctgaagccgcctccccccaaaaatcccttcttttctcggcttcgccaccgccagattcccatgggctgcgcaggatccacccccatgggcgcccccgaatccgatgctactaaaaaaatcaggaagcctaagccctggaagcacccccaaccgataacgatggtccagctcacgaagatgcgcgaggagttttgggacacagctcctcactatggtggtcggaaagaaatctgggatgccctgcgtgttgcggcagagtctgaagtgtcccttgcacaggcaattgtggaaagtgcagccataattgtttctaatactgatctgactctctgctatgatgaaagaggtgcgaagtatgaactgcccaagtatgtcttgagtgaaccaaccaacctgattcaagacagctgaagagcagacctactgatgtaaacaactgtaaatgagaacaaccccttgagtgtcctggtagctgaagcatgcttgataaaagatctaagca

SEQ ID NO: 59673 - DNA, 1185 bp, Oryza sativa
  Clone ID: PAT_MRT4530_61275C.1
atgcctccgaagaaagccaagctgtccgccggcgccggcgccggcgaccgcctcagcgccctcccggacgcgctgctgcaccacgagttcgccaagttcgcctaccgcttcttgctcgagcgggacgtgtccgcgccggtggacactctccgggtgctgtccagccccgtgtgcgaccccgaggtggaggattactccacttgcgatgtcgatgcgtggatccgtgctgccatcgagcggagagcccaggtgatccatatttctcaccatccgaaggacgaggcatttagtaacttcgaccatgtccccatcatctcctgccacctcaaacacctgaagctgtctggctacttgtttcgacaaaggacactaatgcagctctcttctcagtgcccttcattggaagttctagagctcaaaggctgctatctggatggccatcagatatcatctgcctctctcaagatcttgaccattgtcgagtgcaggatcatggagggcttcaccatcgctgctccgaacctcgtatcgctgtgctgcgtcacgccataccaccgtgctcccttgtttgagaatgtggggtcactcacactggatgcagccactatcgtgcttgatgattcgtttctatatgctggttatgaatacgagtatgaagacatcgatgaggatgcgatcgaaggaaacggtagcgaagacggtgaaggttccttgaatgattctgactacgacagtgatgctgtcagtgatgcaagtacctgtgaatacagtgagattgcaaacaactatgatgatgaaaaacagcttgtagagcatgatgaggtacataatcgaagcaaaggcaactatcatggctatgatcacaggtataaagccagaccatataggggctatcgcaagaagaaattcaatggtggtaaagttctaggtggtgataatgttcttcacagcctatcgaatgctagaagtttggagctattagctgatgctggagaggtgattctgaatagggagctgaaaacatgcccaacttttagtaacctgaagacattgtcccttggtgaatggtgtatgggtgctgacttcggtccattaatttccttcctgcagcattcaccaaatctggagaagcttttccttgaacttaaattggtacatatatttatatctgtcgaatttgcttga

SEQ ID NO: 59674 - DNA, 1143 bp, Oryza sativa
  Clone ID: PAT_MRT4530_61276C.1
gtaaatcatagccctgaggataagattagcatcatggagctcaagcttgtattctccattgccttcatcttctgtctctcccatatgagctctacctcgcattttttcatctcgatgttttctcttggagactcgtacatcgacaccggtaatttcgtcatcatggcaactccggtagcgcccgtatggaatgacaagcctccttacggcatgtcattctttggtcatcccactggccgcgtaagtgatggaagagtcattatcgatttcattgccgaggaatttggtctccctttccttccagcctccctagcgaatagctcaagtgtctcccatggcgtaaacttcgccgtcggtggcgcgccggcgactggcatcgactacttccagaggaacaacattgtggcatttaagcttctgaacagttcacttgatgtgcagcttggctggttcgaggagctcaagccatcgatttgcaacacaaccaaagggttcaagaactatttcagcaaatccctcttcatcgttggagagttcggggtgaatgactacaacttcatgtggacggccaagaagaccgaaaaagaggtcaaatcgttggtgcctcaagtcgtggaaaaaatcaccacggccgtggagaggctgatcaaccaaggcgcggtttactaggtcgtgccgggaaacccgccaatgggggtgctcgccaattgtcctcacgctcttcatgagcccgaacacgacagactacgatggcctcggttgcctgcgtgctgtcaaccgcatgtccaagcgccacaacgcaatgctccgtgcggctctcgacgggctcaggggcaagtaccctcatgccaagatcatcttcgccgacttctaccgacccatcatccaagttctctaagaccccgtccgttttggattcgccgccggtggcatcctcaaggcttgctgcggcggcggcgggccgtacaactggaacggcaacgccatctgcggcatggcgggcgcggtcgcgtgcgaggacccgtcggcgtccgtgcactgggacggtggtcactacacggaggccatctaccgctacatcgccaaggggtggctctctacggcccttacgctgatccgccaattttgacagctattcgatcg

SEQ ID NO: 59675 - DNA, 5457 bp, Oryza sativa
  Clone ID: PAT_MRT4530_61277C.1
atggccgaacaagcaaaggcgcacaacctctctccgagcgttagcggtgacgatggggagccaaacccacgccgtcgagctcgtactccaccgccccctccacgccaaagtcctaggcgggaggaggcgctcgagagggtcgaaggatccgcgacttcgacatccacgggtgatggggaagggcggcgagatggggagcgtcgactcctcctctacggcgacggcagcacgccccagggcgcgctccaagctgcgggcgcgctcctacgtcacccgcccattgtccctgactcggagtctccagcccaacgttggctggacgacgtggccaacttggtcatgacggcacggcagcgcctaggtgctggtgggcggtcctccgccaccaagacctctggcgctgctaccactggctccgtgtcgtcaaggcggagggcgcggcgagcggcggctgttgctcgccattcggccgccactccttcgtcagcgcctccgacccaggaagatcagcgtggggggccagatgcccgcatcgatatcgagcgccggcgtaatgcggttctgtcaagtccgcaacaccataccatgcatccctgcacacgcggtgatctacgcgttcaggggggtgtgcggcacaaccgcatgctcgaaaagatcacctccaaagagccccagactaccgcggagctttttcagctcgcggaccgagtggctcgtaaggaggaggcatggacctggaacccctccggttccggtgtggcagcttcggccgcccctggatccgctgctcagacagggcggcgtgataggaggaggaagaagaggtcagcccataccgacgacgagggtcatgtcctcgccgtcgagggcgcttcgcgggccacccgaaaggggaggcctgcgggcgacaaaaagaaggaggccggcgctcccagcagggagcgcccaaccggcaagtggtgcatcgttcacaacacttcccttcacgatctcgcggactgccgcgcagtcaaaagtttggctgagcggacgaggaagtgggaggaggagaggaggcaggagcgccgagagggcaagtccccggcggttccttccggcaatcggcgaagtgaggccaagcagaaggcccccgccgaggacatcgatgacggcgatgatgacctaggtttccaagagcctagggccaccattgccactgtcgatgggggagcgtgtgctcacgtttctcgccggagcctcaaggccatgaagcgagagcttctggccgcggcccctactcatgaggcgacgcgccgggcgcggtggtcggaggttgccctcaccttcgaccagaccgaccacccaccgtgcgttgcccggggaggacagatcgcaatggtggtttcccccactgtttgcaacgtaaagctggggcgtgtcctcattgatggaggagcagccctcaacatcctttcccccgcagcctttgacgccatcaaggccccggggatggtgctccggccgtcccagccgattatcggtgtgacgccggggcacacttggccgctaggtcatatcgacctcccggtcaccttcggtggatccgccaacttccgcacggagcgggtgaactttgatgtggcggacctcagtctgccctacaacgcggtcttggggaggcccgcgttggtgaagttcatggcggcggtccactacgcctacctccagatgaagatgccgggccccggtggccccatctctgtccatggcgacctcaaagtcgcgcttgcttgtatggagcagcgcgcggaccacctcgccgccgcgtccaagcccgagggtggcgacgagaggcttggcacatccgcccccgccgccccgaggcagcggatagtcacatgcgacgaggtcccggaagacgcgctcgtctctttcctgcgggcaaacgctgacgtcttcgcatggagaccggcggatatgcccggggtccccaggaaggtgattgagcaccgtctcgccgtgcggccgggcgcaaggccggtccggcagaaagtgcggcgccaggccccggaacgtcaagccttcatccgcgaggaggtggcgcgacttctggaggccggattcatccgcgaggtcatccatccggagtggctggcgaacccggtggtcgttcccaaggcgaacggcaagcttcggatgtgcattgacaacaccgaccttaacaaggcatgtcctaaggacccttaccccctgtctcgcatagatcagattgtcgactccacagcggggtgcgaccttttgtgttttctagatgcatactctggttaccatcagattcgcatggctagggaggatgaggaaaaaactgcattcattacccccataggaacttattgttatacgacaatgcccttcgggttaaagaatgcaggtcctacttttcaacgtactactcgaatttctttgggtagccaaataggacgtaatgttgaggcttatgtcgatgacttggttgtaaagacgcgcaaccaagagaccttactctcggatctagcggaaacttttgagagtctccgctccgcccgcataaaactgaaccccgataagtgcgtgttcggtgtacctgcgggcaagcttctcggatttttggtctccgcccgaggcatcgaggccaaccccgagaagatacgagctatagagcggatgcgccccccagcaagcttagggatgtgcaatgcgtcaccggttgaagctgaacgtgccctcactcagttgaaggcgtatctcagctctcccccagttctggtcgccccggagccaaatgaacccttgttactctacttagcggcgaccccgcaagtggttagtgcggcgttggttgtggagcgcgatgaggacaatcctcattccgcgcacccccaccccgtgctggcttggcccgggagagagcagggaggagaggcccccgagccgaacggtggcccaaggcccccgacgaccggagcaggccctctgcccgcttgtcagacggtgccaggtgcccccgacccccaggatggcccgagggccactgcgggaaggccgcacctatcgccctctgaccccgaggctaaccctgtgccgactcgacccgggagagagcagggagaagaggcccccgagccgaacggtggcctaaggcccctgacgaccggagttggccctttgcccgcttgtccgacgacgccaggagctcccgacccccaggacggccctgaggccactgtgggaaggccgctcctgtcgtcctccgaccccgaggtcgtcggcacagaagacgagtgcaccccgcgaggccgcttggacaaagagcgccccagggatgtggcccctagcgaagaggatcggccccaccgaaaggtgcagcggcccgtctactttgttagtgaggccctccgggacgccaagacccgataccctcaggcccagaagatgatttacgctattctgatggcttcgaggaaactgcgccattatttccaggcgcatcgggtcacggtggttacgtcttaccccctcggccaaatcttgcataatcgagagggtactggacgggtggtgaaatgggcaatcgaactttctgagtttgatttgcactttgaaccacgccacgctatcaagagccaggccctcgccgattttgtggcagagtggaccccagctcccgagcccgtctcagtccccgaggccagctcgggcccctcgcagctgcctcacaccgcccactgggtgatgcagttcgacggctccttgtctcttcagggcgccggtgcgggggtcacgttgacctcgccgagcggagacgtcctcagatatttggttcgccttgactttcgggcgaccaataatatggcggagtacgagggactccttgcgggactcagggtggcagctggactggggatccgccgcctcctgatggacgcttacgtgcgccaagtacggcgtatggagcgccattttgacgggatagagcttcggcacgtgcccagacgggataacacggttgccgacgaactctcacggctcgcttcctcgcgagcccagaccccaccgggcgcctttgaagaaaggcttgcccagccgtcggcgcgacccgaccccataggggagacggacgcgcctgacaggcccccgatgcccgtcggagtccaggcctcgggacccgaggggagcactcccagctcccttagattgattgcttggatcgctgagatccaagcatacctcacagataagactctacccgaggaccacgaagggagtgaacgcgtccagcgcatctccaaacgctacgtgctggtagaagggaccctctatcggcgcgcggctaacggaatcctcctaaagtgcattcctcgggaacaaggcgtcgagcttcttgccgatatccataaaggtgaatgcggagcccactccgcctcgcgcaccttggttggcaaagcctttcgacaaggtttctattggccgacagctctcaatgatgcggtcgacctggtccggcgatgcagagcgtgtcaattccacgccaagcaaatccatcagccggcccaggccctgcagatcataccactttcatggccatttgctgtctgggggctcgatatcctgggaccgtttaggcgggcctcgggcgggtttgagtatctgtatatcgcgatcgacaagtttactaagtggcccgaggcttatccggtcatcaagatcgataagcactccgcacttaaattcattaagggcatcacagcccagtttggagtgcctaaccgtattattacggataacggcacccaattcactagtgaacttttcggcgattactgcgaagacatgggcatcaagctctgcttcgcctcacctgcccaccccagaagcaacgggcaagtggagcgcgccaatgcggaaatcctcagatgccttaaaaccaagaccttcaacatcctcaagaagcacggcgattcgtggatcgaggagttgccagcggtgctctgggcgaaccgaatcacgccaagccgagcaaccggggaaacgcctttcttcctcgtctacggcgcggaagcggttctcccatccgagctcaccctgaggtcccctcgggccatcatgtactgcgaggctgatcaagatcagcttcgcagagatgacctcgactacctggaggagcgaaggcggcgcgaggccctccgagccgcgcgctaccagcagagcctgcggcgctaccatcagcgccacgtccgggcccgatcactctgcgtcgacgacctcgtcctacgccgcgtccaaacgtgtgctggattgagcaagctctcaccaatgtgggagggtccgtatcgagtgatcggtgtcccccggccgggctccgttcggctagccacgagcgacggcacagagctgcctaacccgtggaacatcgaacaccttcgtcgcttctacccctaa

SEQ ID NO: 59676 - DNA, 6098 bp, Oryza sativa
  Clone ID: PAT_MRT4530_61278C.1
atggccgaacaagcaaaggcgcacaacctctctccgagcgttagcggtgacgatggggagccaaacccacgccgtcgagctcgtactccaccgccccctccacgccaaagtcctaggcgggaggaggcgctcgagagggtcgaaggatccgcgacttcgacatccacgggtgatggggaagggcggcgagatggggagcgtcgactcctcctctacggcgacggcagcacgccccagggcgcgctccaagctgcgggcgcgctcctacgtcacccgcccattgtccctgactcggagtctccagcccaacgttggctggacgacgtggccaacttggtcatgacggcacggcagcgcctaggtgctggtgggcggtcctccgccaccaagacctctggcgctgctaccactggctccgtgtcgtcaaggcggagggcgcggcgagcggcggctgttgctcgccattcggccgccactccttcgtcagcgcctccgacccaggaagatcagcgtggggggccagatgcccgcatcgatatcgagcgccggcgtaatggtcggcgtactccccacgcaacggagggcgcctcctcgtccggagtctcacctcaacacggacgcggggatcagccctccgtgccccccggttggtggtgtcggctgtagagcctttgtggcgagccttcggaacgtccgttggcccccaaggttccggcccaccatcgccgaaaaatatgatgggagcgtcaaccccgccgagtttctccaggtctacacgaccgggatcgaggccgccgggggtgacgacagagtcatggcgaatttttttcccatggccctgaagggacaggcacggggttggctaatgaacttgccacccgcgtcggtccactcctgggaggatttgtgccaacagttcaccatgaactttcaaggcacatatccgcgcccaggtgaagaagcggatctgcatgcagtccagcgaagggatgatgagtcacttcgctcatacattcagcggttctgtcaagtccgcaacaccataccatgcatccctgcacacgcggtgatctacgcgttcaggggggtgtgcggcacaaccgcatgctcgaaaagatcacctccaaagagccccagactaccgcggagctttttcagctcgcggaccgagtggctcgtaaggaggaggcatggacctggaacccctccggttccggtgtggcagcttcggccgcccctggatccgctgctcagacagggcggcgtgataggaggaggaagaagaggtcagcccataccgacgacgagggtcatgtcctcgccgtcgagggcgcttcgcgggccacccgaaaggggaggcctgcgggcgacaaaaagaaggaggccggcgctcccagcagggagcgcccaaccggcaagtggtgcatcgttcacaacacttcccttcacgatctcgcggactgccgcgcagtcaaaagtttggctgagcggacgaggaagtgggaggaggagaggaggcaggagcgccgagagggcaagtccccggcggttccttccggcaatcggcgaagtgaggccaagcagaaggcccccgccgaggacatcgatgacggcgatgatgacctaggtttccaagagcctagggccaccattgccactgtcgatgggggagcgtgtgctcacgtttctcgccggagcctcaaggccatgaagcgagagcttctggccgcggcccctactcatgaggcgacgcgccgggcgcggtggtcggaggttgccctcaccttcgaccagaccgaccacccaccgtgcgttgcccggggaggacagatcgcaatggtggtttcccccactgtttgcaacgtaaagctggggcgtgtcctcattgatggaggagcagccctcaacatcctttcccccgcagcctttgacgccatcaaggccccggggatggtgctccggccgtcccagccgattatcggtgtgacgccggggcacacttggccgctaggtcatatcgacctcccggtcaccttcggtggatccgccaacttccgcacggagcgggtgaactttgatgtggcggacctcagtctgccctacaacgcggtcttggggaggcccgcgttggtgaagttcatggcggcggtccactacgcctacctccagatgaagatgccgggccccggtggccccatctctgtccatggcgacctcaaagtcgcgcttgcttgtatggagcagcgcgcggaccacctcgccgccgcgtccaagcccgagggtggcgacgagaggcttggcacatccgcccccgccgccccgaggcagcggatagtcacatgcgacgaggtcccggtcaaggaggttgccctgggcgacggccccgtctctttcctgcgggcaaacgctgacgtcttcgcatggagaccggcggatatgcccggggtccccaggaaggtgattgagcaccgtctcgccgtgcggccgggcgcaaggccggtccggcagaaagtgcggcgccaggccccggaacgtcaagccttcatccgcgaggaggtggcgcgacttctggaggccggattcatccgcgaggtcatccatccggagtggctggcgaacccggtggtcgttcccaaggcgaacggcaagcttcggatgtgcattgacaacaccgaccttaacaaggcatgtcctaaggacccttaccccctgtctcgcatagatcagattgtcgactccacagcggggtgcgaccttttgtgttttctagatgcatactctggttaccatcagattcgcatggctagggaggatgaggaaaaaactgcattcattacccccataggaacttattgttatacgacaatgcccttcgggttaaagaatgcaggtcctacttttcaacgtactactcgaatttctttgggtagccaaataggacgtaatgttgaggcttatgtcgatgacttggttgtaaagacgcgcaaccaagagaccttactctcggatctagcggaaacttttgagagtctccgctccgcccgcataaaactgaaccccgataagtgcgtgttcggtgtacctgcgggcaagcttctcggatttttggtctccgcccgaggcatcgaggccaaccccgagaagatacgagctatagagcggatgcgccccccagcaagcttagggatgtgcaatgcgtcaccggttgtatggccgccctaagtcggttcatatcgaggctgggagagaaggcgctacccttatttaagctcctcaaacgctccgggccgtttacttggacggaggaagctgaacgtgccctcactcagttgaaggcgtatctcagctctcccccagttctggtcgccccggagccaaatgaacccttgttactctacttagcggcgaccccgcaagtggttagtgcggcgttggttgtggagcgcgatgaggacaatcctcattccgcgcacccccaccccgtgctggcttggcccgggagagagcagggaggagaggcccccgagccgaacggtggcccaaggcccccgacgaccggagcaggccctctgcccgcttgtcagacggtgccaggtgcccccgacccccaggatggcccgagggccactgcgggaaggccgcacctatcgccctctgaccccgaggctaaccctgtgccgactcgacccgggagagagcagggagaagaggcccccgagccgaacggtggcctaaggcccctgacgaccggagttggccctttgcccgcttgtccgacgacgccaggagctcccgacccccaggacggccctgaggccactgtgggaaggccgctcctgtcgtcctccgaccccgaggtcgtcggcacagaagacgagtgcaccccgcgaggccgcttggacaaagagcgccccagggatgtggcccctagcgaagaggatcggccccaccgaaaggtgcagcggcccgtctactttgttagtgaggccctccgggacgccaagacccgataccctcaggcccagaagatgatttacgctattctgatggcttcgaggaaactgcgccattatttccaggcgcatcgggtcacggtggttacgtcttaccccctcggccaaatcttgcataatcgagagggtactggacgggtggtgaaatgggcaatcgaactttctgagtttgatttgcactttgaaccacgccacgctatcaagagccaggccctcgccgattttgtggcagagtggaccccagctcccgagcccgtctcagtccccgaggccagctcgggcccctcgcagctgcctcacaccgcccactgggtgatgcagttcgacggctccttgtctcttcagggcgccggtgcgggggtcacgttgacctcgccgagcggagacgtcctcagatatttggttcgccttgactttcgggcgaccaataatatggcggagtacgagggactccttgcgggactcagggtggcagctggactggggatccgccgcctcctggtgttaggcgactcccagctggtcgttaactaggtctgtaaggagtaccggtgctctgacccgcagatggacgcttacgtgcgccaagtacggcgtatggagcgccattttgacgggatagagcttcggcacgtgcccagacgggataacacggttgccgacgaactctcacggctcgcttcctcgcgagcccagaccccaccgggcgcctttgaagaaaggcttgcccagccgtcggcgcgacccgaccccataggggagacggacgcgcctgacaggcccccgatgcccgtcggagtccaggcctcgggacccgaggggagcactcccagctcccttagattgattgcttggatcgctgagatccaagcatacctcacagataagactctacccgaggaccacgaagggagtgaacgcgtccagcgcatctccaaacgctacgtgctggtagaagggaccctctatcggcgcgcggctaacggaatcctcctaaagtgcattcctcgggaacaaggcgtcgagcttcttgccgatatccataaaggtgaatgcggagcccactccgcctcgcgcaccttggttggcaaagcctttcgacaaggtttctattggccgacagctctcaatgatgcggtcgacctggtccggcgatgcagagcgtgtcaattccacgccaagcaaatccatcagccggcccaggccctgcagatcataccactttcatggccatttgctgtctgggggctcgatatcctgggaccgtttaggcgggcctcgggcgggtttgagtatctgtatatcgcgatcgacaagtttactaagtggcccgaggcttatccggtcatcaagatcgataagcactccgcacttaaattcattaagggcatcacagcccagtttggagtgcctaaccgtattattacggataacggcacccaattcactagtgaacttttcggcgattactgcgaagacatgggcatcaagctctgcttcgcctcacctgcccaccccagaagcaacgggcaagtggagcgcgccaatgcggaaatcctcagatgccttaaaaccaagaccttcaacatcctcaagaagcacggcgattcgtggatcgaggagttgccagcggtgctctgggcgaaccgaatcacgccaagccgagcaaccggggaaacgcctttcttcctcgtctacggcgcggaagcggttctcccatccgagctcaccctgaggtcccctcgggccatcatgtactgcgaggctgatcaagatcagcttcgcagagatgacctcgactacctggaggagcgaaggcggcgcgaggccctccgagccgcgcgctaccagcagagcctgcggcgctaccatcagcgccacgtccgggcccgatcactctgcgtcgacgacctcgtcctacgccgcgtccaaacgtgtgctggattgagcaagctctcaccaatgtgggagggtccgtatcgagtgatcggtgtcccccggccgggctccgttcggctagccacgagcgacggcacagagctgcctaacccgtggaacatcgaacaccttcgtcgcttctacccc

SEQ ID NO: 59677 - DNA, 321 bp, Oryza sativa
  Clone ID: PAT_MRT4530_61279C.1
atgaccttaccgcccaaatctgcgtcaaggtcggcgaggcgtttgggaagtcggcgaggatggacgctgttgcttaggcctacaagtgtgtcgaataatgcctatctcaaggctgcatactataaataccctactgtaagcatggatcgccagatgttgcatagcaatggtacataatccacctggtgaatcaccatcattttctgcctcagacatagataatctaaattacaatgtattatttaagggccctttatgcaaggatgtctattcgttcctagttaccgggaacagttttttactatgctgttcgcaattatc

SEQ ID NO: 59678 - DNA, 5295 bp, Oryza sativa
  Clone ID: PAT_MRT4530_6127C.1
tcatctggcgcgccaggtagggggcgcgtgtgtttttcttagcccttgtcctctttcgtgtgcgccaagcttctcccgctcagcccaatggccgaacgggcagtggcgcacaacctctctccgagcgctagcggtgacgacggggagcagaacccgcaccgtcgagctcgtactccaccgtccccctctcgccgaagtcttgggcgggaggaggcgctcgaggaggtcgaaagatccgcgacttcgccgctcgcgggcaatggagaaggatggcgagacggggaacgtcgcctcctcgtctacggcgatggcagcacgccccagggcgcgctccaggctgcgggcgcgctcctgcgtcacccgcccgtcgtccccgatccagagactccagcccgacgttggctggatgacgtggccgacttagtcataacggcccagcagcgcctaggtgccggcgggcggtcctccgccaccgggacctctggcgctgccgccgctggctccacgtcgtcgaggcggagggcgcggcgagcggcggccgttgcccgccgttcgtccgccattccctcgtcgacgcctccgacccaaggagatgtgcgtggggggccggatgcccgcctcgatatcgagcgccggcgcgacgctcgtcacgccgcccacgcaacggagggcgcttcctcgtccggagcgccacttcggttccggcccaccatcaccgaaaaatacgacggaagcgtcaaccccgccgagtttctccagatctacacgaccgggatcgaggccgctgggggcgacgacagggtcatggcgaatttcttccccatggccctgaagggtcaggcgcggggttggctaatgaacatgccacccgcgtcggtccactcttgggaggatttgtgccagcagttcaccatgaacttccagggcacgtatccgcgcccagcttcggccgcccccggatccgccgctcggtcagggcggcgggacaggaggaggaagaagaggtcggcccattccggcgacgagggtcacgtcctcgccgtcgagggtgcttcgcgggccacccgaaaggggaggcctgcgagcgacaaaaagaaggaggccggcgctcccagcagggagcgcccgaccggcaagtggtgcaccatgcacaacacctccctccatgacctcgcggactgccgcgcggtcaaaagtttggctgagcggacgaggaagtgggaggaggagaggaggcaggagcgccgtgagggcaaggccccggcggctccctccggcaaccggcgaagtgaggccaagcagaaggcccccgccgaggacatcgacgatggcgacgatgacctagggttccaggagcctggggccaccatcgccaccgtcgatgggggagcgtgcgctcacgcttctcgtcggagcctcaaggccatgaagcgagagcttctggccgcggcccctacccatgaggcgacgcggcgggcgcggtggtcggaggttgccctcaccttcgaccagaccgaccacccgccatgcgttgcctggggaggacagatcgcgatggtggtttcccccaccgtttgcaacgtgaagttggggcgtgtcctcatagacgggggtgcagccctcaacatcctttcccccgcagcctttgacgccatcaaggccccggggatggtgcttcggccgtcccagccgattatcggtgtgacgccggggcacacttggccgctaggtcatatcgacctcccggtcaccttcggtggatccgccaacttccgcacggagcgggtgaacttcgatgtggcggacctcagtctgccctacaacgcggtcctggggaggcccgcgttggtgaagttcatggcggcggtccactacgcctacctccagatgaagatgccgggccccggtggccccatctctgtccatggcgacctcaaagtcgcgcttgcttgtatggagcagcgcgcggaccacctcgccgccgcgtccaagcccgagggtggcaacgagaggctcagcacctccgtcccagccgccccgaggcagcggatgatcacgtgcgatgaggtcccggaagacgcgctcgtctccttcctgcgggcaaacgccgacgtcttcgcctggagaccggcggacatgcccggggtccccagggaggtgattgagcaccgtctcgccgtgcggccgggcgcaacgccggtccggcagaaagtgcggcggcaggccccggaacgtcaagccttcatccgcgaggaggtggcgcgacttctggaggccggattcatccgagaggttatccatccggagtggctggcgaacccggtcgtcgttcccaaggcgaacggcaagcttcggatgtgcatcgactacaccgaccttaacaaggcatgtcctaaggacccttaccccctgccacgcatagatcagattgtcgactccaccgcggggtgcgaccttttgtgttttctagatgcatactctggttatcatcagattcgcatggctagggaggatgaggaaaaaactgctttcattacccccataggaacttattgttatacgacaatgcctttcgggttaaagaatgcagacgcgcaaccaagagaccttactctcggatctagcggaaactttcaaaagtctccgctccgcccgcataaaactgaaccccgacaagtgcgtgttcagtgtgcctgcgggcaagcttctcgggttcttggtctctgcccgaggcatcgaggccaaccccgagaagatacgagctatagagcggatgcgccccccagcaagcttagggatgtgcaatgcgtcaccggctgcatggccgccctaagtcggttcatatcgaggctgggagagaaggcgctacccctatttaagctcctcaaacgctccgggccgtttatctggacggaggaggctgagcgggccttcactcagttgaaggcgtacctcagttctcccccagtcctggtcgccccggagccagatgagccgctgctactttacctggcggcaaccccgcaggtggatggccccggggccactgcgggaaggccgcgcctgccgccctccgaccccgaggtcgtcggcacagaagccgagtgcgccccgcgcggcctctcggacgaagagcgccctggagatgtggcccctagcgaagaggatcggccccgccgaaaggtgcagcggcccgtctacttcgttagcgagaccctccgggacgctaagacccgataccctcaggcccagaagatgctttacgctattctgatggcttcgaggaagttgcgccattattttcaggcgcatcgggtcacggtggttacgtcttaccccctcggccaaatcttgcataaccgagggggtactggacgggtggtgaaatgggcaatcgaactctctgagttcgatttgcactttgaaccacgccacgcgatcaagagccaggccctcgccgactttgtggcagagtggaccccggcccctgagtccatctccgtccccgaggccagctcgggcccctcgcagctgcctcacaccgcctactggggtgccggtgcgggggtcacgttgacctcgccaaacggagacgtcctcagatacctggttcgcctcgactttcgggcgaccaataatatggcggagtacgagggactccttgcgggacctagggtggcagctggactggggatccgccgcctcctggtgttaggcgactcccagctggtcgttaaccaggtctgtaaggagtaccggtgctctgacccgcagatggacgcttacgtgcgccaagtgcggcgtatggagcgccattttgacgggatagagcttcggcacgtgcccagacgggataacgcggtcgccgacgaactctcgaggctcgcttcctcgcgagcccagaccccaccgggcgcctttgaagaaaggcttgcccagccgtcggcgcggcccgaccccctaggggagacggacgcgcctgaacggcccccgaggcccgtcggagtccaggcctcgggacccgaggggagcgctcccagctcccttagattggttgcttggatcgctgagatccaggcatacctcacagataagactctacccgaggaccgcgaagggagtgaacgcgtccagcgtatctccaagcgctacgtgctggtggaagggaccctctatcggcgcgcggctaacggagtcctcctgaagtgcattcctcgggaacaaggcatcgagcttcttgccgatatccatgaaggcgagtgcggagcccactccgccccacgcaccttggttggcaaggcctttcgccagggtttctattggccgacggctctcaacgatgcggttgacctggtccggcggtgcagggcgtgccagtttcacgccaggcaaacccatcagccggcccaggccctacagaccatacctctttcatggccgtttgctgtctgggggctcgatatcctggttccgtttaggcgggcccttggcgggttcgagtatctgtatgtcgctgtcgacaagttcactaagtggcccgaggcttacccggtcatcaagatcgataagcactccgcgcttaaattcatcaggggcatcactgcttggtttggggtgcctaaccgtatcattacggataacggcacccagttcactagtgagctcttcggtgactactgcgaagatatgggcatcaagctctgcttcgcctcccccgcccaccccagaagcaatggccaagtggagcgcgccaacgcggaaatcctcaagggcctcaaaaccaaaaccttcaacatcctcaagaagcacggcgactcctggatcgaggagctgccagcggtgctctgggcgaaccgaaccacgccaagccgagcaaccggggaaacgcctttcttcctcgtctacggcgcggaggcggttctcccatccgagctcaccctgaggtcccctcgggccaccatgtactgcgaggctgatcaagatcagcttcgcagagatgacctcgactacttggaagagcgaaggcggcgcgcggtcctccgagccgcgcgctaccagcagagcctgcggcgctaccatcagcgccatgtccgggcccgatcactctgcgtcgacgacctcgtcctacgccgcgtccaaacgcgtgctggactgagcaagctctcaccagtgtgggagggtccgtatcgagtgatcggcgtcccccggccgggctccgttcggctggccacgggcgacggcacagagctgcctaacccgtggaacattgaacaccttcgtcgcttctacccctag

SEQ ID NO: 59679 - DNA, 6099 bp, Oryza sativa
  Clone ID: PAT_MRT4530_61280C.1
atcggtagacaaccgcgttcccacgttgaacctgcttccggcggagtggaggtaggtatgggccgtcccatcagaaggtctcgtactccaccgccccctccacgccaaagtcctaagcggggggaggcgctcgagagggtcgaaagatccgcgacttcaccgaccgcgggcgatggagaagaacggcgagacggggagcgtcgcctcctcgtctacggcgatggcagcacgccccagggcgcgctccaggctgcaggcgcgctcctacgtcacccgcccgtcgtccccgatccggagtctccagcccagcgttggctggacgacgtggccaacttggtcatgacggcacggcagcgcctaggtgctggtgggcggtcctccgccactaagacctctggcgctgctaccaccggctccatgtcgtcaaggcggagggcgcggcgagcggcggccgttgctcgccattcggccgccactccctcgtcagcacctccgacccgggaagatcagcgtggggggccggatgcccaccgcggctccgaacgccggcgtaatggtcgacatgctccccatgtaacggagggcgcctcctcgtccggagtgtcacctcagcacggacgcggggatcagccctccgtgcccccggttggtggtgtcggctgtagagcctttgtggcgagccttcggaatgtccgttggcccccaaggttccggcccaccatcaccgaaaaatatgacgggagcgtcaaccccgccgagtttctccaggtctacacgaccgggatcgaggccgctgggggtgacgacagggtcatggcgaatttctttcccatggccctgaagggacaggcgcggggttggctaatgaatttgtcacccgcatcggtccactcttgggaagatttgtgccagcagttcaccatgaacttccaaggcacgtatccactcccaggtgaagaagcggacttgcacgcggtacagcgaagggatgatgagtcgcttcgctcgtacattcagcggttctgtcaagtccgcaacaccataccatgcatccctgcacacgcggtgatctacgcgttcagggggggcgtgcggcacaaccgcatgctcgaaaagatcgcctccaaggagccccagactaccgcggagctttttcagctcgtggaccgagtggctcgcaaggaggaggcctggacttggaacccctccggttccggagtggcagcttcggccgcccccggatccgctgctcggacagggcggcgtgacaggaggaagaagaagaggtcagtccattccgacgacgagggtcatgtcctcgccgtcgagggcgcttcgcgggcgacccgaaaggggaggcctgcgagcgacaaaaagaaggaggccggcgctcccagcagggagcgcccaaccggcaagtggtgcaccgtccacaacacctccctccacgacctcgtggactgccgcgcagccaaaagtttggctgagcggacgaggaagtgggaggaggagaggaggcaggagcgccgagaaggcaagtccccggcggttccctctggcaatcagcgaagtgaggccaagcagaaggcccccgccgaggacatcgatgacggcgatgatgacttaggtttccaggagcctggggccaccattgccactgtcgatgggggagcgtgtgctcacgtttctcgccagagcctcaaggccatgaagcgagagcttctggccacggcccctactcatgaggcgacgcgtcgggcgcggtggtcggagattgccctcacctttgaccagaccgaccacccaccgtgtgttgcccgggaaggacagatcgcgatggtggtttcccccaccgtttgcaacgtgaagttggggcgtgtcctcatagatggtggggcagccctcaacatcctttcccccgcagcctttgacgccatcaaggccccggggatggtgctccagccgtcccagccgattatcggtgtaacgccggggcacacttggccgttaggtcatatcgacttcccggtcaccttcggtggatccgccaacttccgcacggagcgggtgaacttcgatgtggcggacctcagtctgccctacaacgcggtcctagggaggcccgcgttggtgaagttcatggtggcggtccactacgcctacctccagatgaagatgccgggccccggtggccctatctctgtccatgacgacctcaaagtcgcgcttgcttgtatggagcagcgcgcggaccacctcgccgccgcgtccaagcccgagggtggtgacgagaggcttggcacctccgtccccgccgccccgaggcagcggatgatcacgtgcgacgaggtcccggtcaaggaggttgccctgggcgacggccccgtctccttcctgcgggcaaacgctgacgtcttcgcatggagaccggcggatatgcccggggtccccagggaggtgattgagcaccgtctcgccgtgcgaccgggcgcaaggccagtccggcagaaagtgcggcggcaggccccggaacgtcaagccttcatccgtgaggaggtggcgagactactggaagccggatttatccgtgaggtcatccatccggagtggctggcgaacccggttgtcgttcccaaggcaaacggcaagcttcggatgtgcatcgactacaccgaccttaacaaggcatgtcctaaggacccttaccccctgcctcgcatagatcagattgtcgactccactgcggggtgcgaccttttgtgttttctagatgcatactctggttaccatcagattcgcatggctagggaggatgagaaaaaaactgcattcattacccccataggaacttattgttatacgacaatgcccttcgggttaaagaatgcaggtcctacttttcaacgtactactcgaatttctttgggtagccaaataggacgtaatgttgaggcttatgtcgatgacttggttgtgaagacacgcaaccaagaaactttactttcggatctggcggaaacttttgagagtctccgctccgcccgcataaaactgaaccccgataagtgcgtgttcggtgtacctgcgggcaagcttctcgggttcttggtctctgcccgaggcatcgaggccaaccccgagaagatacgagctatagagcggatgcgcccccccagcaagcttagggatgtgcaatgcgtcaccggttgcatggccgccctaagtcggttcatatcaaggctgggagagaaggcgctaccattatttaagctcctcaaacgctccgggccgtttacctggacggaggaagctgaacgtgccctcactcagttgaaggcgtatctcagctctcccccagttctggtcgccccggagccagatgaacccttgctactctacttagcggcgaccccgcaggtagttagtgcggcgttggttgtggagcgcgatgaggacaaccctcattccgcatatccccaccctgtgccaactcaacccgggagagagcagggaggagaggcccccgagccgaacggtggcccaaggcccccgacgaccggagttggccctctgcccgcttgtcaaacggtgccgggtgcccccaacccccaggatggcccgagggccactgtgggaaggccgcacctatcgccctctgaccccgaggttaaccctgtgccgacccgacccaggagagagcagggaggagaggcccccgagccaaacggtggcccaaggcccccgacgaccggagctggccctctgcccgcttgtccgacgacgccaggcctccccgacacccaggacggccccgaagccactgtgggaaggccgcgcctgtcgtcctccgaccccgaggtcatcggcacagaagacgagtgcaccccgcatggcctcttggacgaagagtgccccagggatgcggcccctggcgaagaggatcggccccgccgaaaggtgcagcggcccgtctactttgttagtgaggccctccgggacgccaagacccgataccctcaggcccagaaaatgctttacgctattctgatggcttcgaggaaactgcgtcattatttccaggcgcatcgggtcacggtggttacgtcttaccccctcggccaaatcctgcataatcgagagggtacaggacgggtggtgaaatgggcaatcgaactttctgagttcgatttgcactttgaaccacgccacgctatcaagagccaggccctcgccgactttgtggcagagtggaccccggctctcgaacccgtctcagaccccgaggccagctcgagcccctcgcagccgcctcacaccacccactgggtgatgcagttcgacggctccctgtctcttcagggcgctggtgcgggggtcacgttgacctcgccgagcggagacatcctcagatacctggtccgtctcgactttcgggcgaccaatattatggcagagtacgagggactccttgcgggactcagggtggcagctggactggggatccgccgcctcctggtgttaggcgactcccagctggtcgttaaccaggtctgtaaggagtaccggtgctctgacccgcagatggatgcttatgtacgccaagtgcggcgtatggagcgccatttcgacgggatagagcttcggcacgtgcccaaacgggataacacgattgccgacgaactctcacggctcgcttcctcacgagcccagaccccaccgggcgcctttgaagaaaggcttgcccagccgtcggcgcgacccgaccccctaggggagacggacgcgcctgaccggcccccgaggcccgtcggagtccaggcctcgggacccgaggggagcgttcccagctcccttagattgattgcttggatcgctgagatccaagcatacctcacagataagactctacccgaggaccgcgaagggagtgaacgcgtccaacgcatctccaaacgctacgtgctggtagaagggaccctctatcggcgcgcggctaatggaatcctcctgaagtgcattcctcgggaacaaggcgtcgagcttcttgccgatatccatgaaggcgaatgcggagcccacttcgcctcacgcaccttggttggcaaagcctttcgccagggtttctattggccgacagctctcaatgatgtggtcgacctggtccggcgatgcagagcgtgtcaattccacgccaagcaaatccatcagccggcccaggccctgcagatcataccactttcatggccatttgctgtctgggggctcgatatcctgggaccgtttaggcgggccccgggcgggtttgagtatctgtatgtcgcgatcgacaagttcactaagtggcccgaggcttatccggttatcaagatcgataaacactccgcacttaaattcatcaagggcatcacagcccggtttggggtgccgaaccgtattattacggataatggcacccaattcactagtgagcttttcggtgactactgcgaagacatgggcatcaagctctgcttcgcctcccccgcccaccccagaagcaatggccaagtggagcgcgccaatgcggaaatcctcagaggccttaaaaccaagaccttcaacatcctcaagaagcacggcgattcgtagatcgaggagttgccagctgtgctctgggcgaaccgaaccacaccaagccgagctaccggggaaacgcctttcttcctcgtctacggcgcggaggcggttctcccatccgagctcaccctgaggtcacctcgggccaccatgtactgcgaggctgatcaagatcagcttcgcagagatgacctcaactacttgcaagagcgaaggcggcgcgcggccctccgagccgcgcgctaccagcaaagcctgcggcgcttccatcagcgccacgtccgggcccgatcactctgcgtcgacgacctcgtcctatgccgcgtccaaacgcgtgctggattgagcaagctctcacccatgtgggagggtccgtatcgagtgatcggcgtcccccagccgggctccgttcggctggccactggcgacggcacagagctgcctaacccgtggaacatcgaacaccttcgtcgcttctacccc

SEQ ID NO: 59680 - DNA, 1710 bp, Oryza sativa
  Clone ID: PAT_MRT4530_61281C.1
atggggagggaaggagaaggggaggccgggggtttaaggaggcggcaatgtcggtttggggaaccgacttgcgcggtcaagagcgcgagctggcgctcggctagcggccaaattggcgacagggaggatgacgccggcggagaggtaagaatctcccaacaaaatctgcaggtacgcaaagagaatattatttcccaggaaaaggtgctccaagcatttgataatgcccttcagaagcatcttaatccaattcatcgatcccttgaatcccttaccgaacgaattgatactctgactcatgaagtgggacagatcaaacaatcaaaccctaaccatcatgccaatgagcattacagatcagaagcaaatcaagatgctgctggatttgctcattatggggaagctgttgagttgagattcctcaataagttgaagcctcgtctttattatacacaggaaaaaattacagcagaggatggcacggttatccaaattgccttatttaaggataaccagatagttaaatccggtccactttcttctgcaagaattgaatttgtggctcttgaaggtgactttaatgatgttgcccctgaaaattggaccgagtatatgttcaatcagaacatagcaagatccccaaaagggcctgtgttaggaggagtttgtcaaatcaagctgaagaatggggaggcctctccttctggcatctctttcgttgtaccatcttcaaagagtagaagcggaatgttcattctggcagcaagagttcatagcagtgacaaagccgggttccggattatggaagccttgatgaatcctgttgaggtgcaggtttaccgaaacaaagcaaatataaatagtgacactccaaaattgaaagatgatgtataccgtttaaagggaatttcaaaaaagggaactcgcttcgattggcttaaacataatgggatcaacactgtggaggatatgttaaaggctttaaataagaacgaaaagaagattcgcactgagtgcttcaagctagagaagaacagcaaggattggaaagaaacagttaaacatgctagaaagtgtgatctcgaaggcaattgcaacctgaaatcatatagagttgaagagaaacatgttgtactcttctttaactgcgtacatgatctcgttggagcacaatttcatgatggctatgttacaaaggacaatttcaattcagatcagcaggatgccgtgaattgtttgaaaaaacaagcgtatgatgctctggatgacattgccttcgatgacaaaatgaaagacaactatccagtatctttgtcttcagctatgaacacaagcattactgatggtgatgcttccattcccttaacagacagagcaggaacaaattatccagatctccatgttacatctcaagcagttgggaattctcatcatgctgagatttatcaagaacctgaactgcttcaagcattactgaactataatagtgcctatgaaggttatcgagcaggtgctgtggctcagatctacggtggattttctgaagttgacatccctattgggtgctatattggtcagacatctgaaggtacttcttctggaggcaatgccttgatcggactgatgaatatgtcacagaatggcagcgatggcagcaatattgcagaactgattgacaacgacattgatccttatcagtacatcatttaa

SEQ ID NO: 59681 - DNA, 6563 bp, Oryza sativa
  Clone ID: PAT_MRT4530_61282C.1
aaaaggttttataaaaagaaaaatccctaaaaagtctttttcccccccctttttcctttcttgggccggctcggcccagtccctctctctctcttcccccgcggcccatcagctcctcccccgcgcgcgcgccgctgacaggcgggcccgcccgccaccctcgctgacgggtggggcccacctgtcatccccgacctcgcgccgcgcccgccgcccgcccgtgccctagcgccgccgccgccgcgaatctcgccgcctcccgccgtccccgcgcgcattaaagtggggcgaattattccccgcgattccctctcccgtttcccccgttttcccctctctctctccctcggattcgtccggattcatcccgcaatcgtcgccggcgtcttcaatggcggccgagatctccgcgccggtttccttcctctccggccgcgctctccccctctcggcgctataaaaacgttgcccgtgctccgctcttccgtttccgccgctcaccgctcgctctcgccgtcggattcgtgctcgcgccgtgctcctctctctccgccgtcgccgccgaactccgttccgccgccgccgccgctccggacctcctcccgactcggcgccacctccatcggcttcgccgagtggttgccgactccgtccgccgctccgcttcgcccgtcgactgccggagcaccgtcgccctcggcatcccgagccgcgccgccatctccctccgctccggccgccgttctcgtcgtcgtcgttgtcccgggacgctgcagcttcggaagatccgctcttcgtggaagttgaagccgacgtttgggaaagcgagcaaggcagaaccgcttctgcgccgtagacgaggaagaaaggcgtttccccggttgctcggcttggtgtggttcggttcgcccagagcaccgctggcaactcctcgatccatgaatcgccgtgcttcttgaggatattgaaggtcttggttttaaggcctcttaggatttccgcattggcgcgctccacttggccattgcttctggggtgggcgggtgaggcgaagcagagcttgatgcccatgtcttcgcagtagtcaccgaaaagctcactagtgaattgggtgccgttatccgtaataatacggttaggcactccaaaccgggctgtgatgcccttaatgaatttaagtgcggagtgcttatcgatcttgacgaccggataagcctcgggccacttagtgaacttgtcgatcgtgacatacagatactcaaacccgcccggggcccgcctaaacggtcccaggatatcgagcccccagacagcaaatggccatgaaagtggtatgatctgcagggcctgggccggctgatgaatttgcttggcgtggaattgacacgctctgcatcgccggaccaggtcgaccgcatcattgagagctgtcggccaatagaaaccttgacgaaaggctttgccaaccaaggtgcgcgaggcggagtgggctccgcattcgccttcatggatatcggcaagaagctcgacgccttgttcccgaggaatgcacttcaggaggattccattagccgcgcgccgatagagggtcccttctaccagcacgtagcgtttggagatgcgctggacgcgttcactcccttcgcggtcctcgggtagagtcttatctgtgaggtatgcttggatctcagcgatccaagcaatcaatctaagggagctgggagcgctcccctcgggtcccgaggcctggactccgacgggcctcgggggccgatcaggcgcgtccgtctcccctaaggggtcgggtcgcgccgacggctgggcaagcctttcttcaaaggcgcccggtggggtctgggctcgcgaggaagcgagccgtgaaagttcgtcggcaaccgtgttatcccgtctgggcacgtgccgaagctctatcccatcaaaatggcgctccatacgccttacctggcgcacgtaagcgtccatctgcgggtcagagcaccggtactccttacagacctggttaacgactagctgggagtcgcctaacaccaggaggcggcggatccccagtccagctgccaccctgagtcccgcaaggagtccctcgtactctgccatattattggtcgcccgaaagtcaaggcgaaccaggtatctgaggacgtctccgctcggcgaggtcaacgtgacccccgcaccggcgccctgaagagacagggagccgtcgaactgcatcacccagtgggcggtgtgaggcagctgcgaggggcccgagctggcctcggggactgagacgggctcgggagccggggtccactctgccacaaaatcggcgagggcctggctcttgatagcgtggcgtggctcaaagtgcaaatcgaactcagaaagttcgattgcccatttcaccacccgtccagtaccctctcgattatgcaagatttggccgagggggtaagacgtaaccaccgtgacccgatgcgcctggaaataatggtgcagtttcctcgaagtcatcagaatagcgtaaagcatcttctgggcctgagggtatcgggtcttgacgtcccggagggcctcgctaacaaagtagacgggccgctgcacctttcggtggggccgatcctcttcgctaggggccgcatccctagggcgctcttcgtccaagcggcctcgcggggcgcactcatcttctgtgccgacgacctcggggtcggagaacgacaggggcggccttcccacagtggcctcggggccgtcctgggggttgggggctcctggcgtcgtcggacaagcaggcaaagggccaactccggtcgtcaggggccttaggccaccgttcggctcgggggcctcttctccctgctctctcccgggtcgagtcggcacagggttagcctcggggtcagagggcgataggtgcggccttcccgcagtggccctcgggccatcctgggggtcgggggcacctggcaccgtctgacaagcgggcagagggccagctccggtcgtcgggggccttgggccaccgttcggctcgggggcctctcctccctgctctctcccgggccaagccagcgcagggtggggatgcgcggaatgaggattgtcctcatcgcgctccacaaccaacgccgcactaaccacttgcggggtcgccgctaagtagagtagcaagggttcatttggctccggggcgaccagaactgggggagagctgagatacgccttcaactgagcgagggcatgttcagcttcctccgtccaggtaaacggtccggagcgtttgaggagcttaaataagggtagcgccttctctcccagcctcgatatgaaccgacttagggcggccatgcaaccggtgacgcattgcacatccctaagcttgctgggggggcgcatccgctctatagctcgtatcttctcggggttggcctcgatgcctcgggcagagaccaagaacccgagaagcttgcccgcaggtacgccgaacacgcacttatcggggttcagctttatgcgggcggagcggagactctcaaaagtttctgctagatccgagagtaaggtctcttggttgcacgtctttacaaccaagtcatcgacataagcctcaacattacgtcctatttggctacccaaagaaattcgagtagtacgttgaaaagtaggacctgcattctttaacccgaagggcattgtcgtataacaataagttcctatgggggtaatgaatgcagttttttcctcatcctccctagccatgcgaatctgatggtaaccagagcatgcatctagaaaacacaaaaggtcgcaccccgctgtggagtcgacaatctgatctatgcgaggcagggggtaagggtccttaggacatgccttgttaaggtcggtgtagtcgatgcacatccgaagcttgccgttcgccttgggaacgaccaccgggttcgccagccactccggatggatgacctcgcggatgaatccggcctccagaagtcgcgccacctcctcgcggatgaaggcttgacgttccggggcctgccgccgcactttctgccggaccggccttgcgcccggccgcacggtgagacggtgctcaatcacctccctggggaccccgggcatatccgccggtctccatgcgaagacgtcagcgtttgcccgcaggaaggagacggggccgtcgcccagggcaacctccttgaccgggacctcgtcgcatgtgactatccgctgcctcggggcggcggggacggaggtgccaagcctctcgtcgccaccctcgggcttggacgcggcggcgaggtggtccgcgcgctgctccatacaagcgagcgcgactttgaggtcaccatggacagagatggggccactggggcccggcatcttcatctggaggtaggcgtagtggaccgccgccatgaacttcaccaacgcgggcctccctaggaccgcgttgtagggcagactgaggtccgccacatcaaagttcacccgctccgtgcggaaattggcggatccaccgaaggtgaccgggaggtcgatatgaccttgcggccaagtgtgccccggcgtcacaccgataatcggctgggacggccgaagcaccatccccggggccttgatggcgtcaaaggctgcgggggaaaggatgttgagggctgctcctccatcaatgaggacacgccccagcttcacgttgcaaacagtgggggaaaccaccattgcgatctgtcctccccgggcaacgtacggtgggtggtcggtctggtcaaaggtgagggcaacctccgaccaccgcgcccggcgtgtcgcctcatgagtaggggccgcggccagaagctctcgcttcatggtcttgaggctccggcgagaaacgtgagcacacgctcccccatcgacagtggcaatggtggccccatgctcttggaaacctaggtcatcatcgccgtcatcgatgtccttggcgggggccttctgcttggcctcacttcgccgattgccggaaggaaccgccggggacttgccctctcggcgctcctgcctcatctcctcctcccacttcctcgtccgctcagccaaacttttgactgcgcggcagtccgcgaggtcgtgaagggaggtgttatggacggtacaccacttgccagttgggcgctccctgctgggagcgccggcctccttctttttgtcgctcgcaggcctcccctttcgggtggcccgcgaagcgccctcgacggcgaggacatgaccctcgtcgtcggaatgggctgacctcttcttcctcctcctgtcacgccgccctgtccgagcagcggatccgggggcggccgaagctgccacaccggaaccggaggggttccaggtccatgcctcctccttacgagccactcggtccgcgagctgaaaaagctccgcggtagtctggggctccttggaggcgatcttttcgagcatgcggttgtgccgcacacccccctgaacgcgtagatcaccgcgtgtgcagggatgcatggtatggtgttgcggacttgacagaaccgctgaatgtacgagcgaagtgactcatcatcccttcgctgtactgcgtgtaagtccgcttcttcacctgggcgcggatatgtgccttgaaagttcatggtgaactgttggcacaaatcctcccaggagtggaccgacgcgggtggcaagttcattagccaaccccgcgcctgtcccttcagggccatgggaaagaaattcgccatgaccctgtcatcacccccggcggcctcgatcccggtcgtgtagaccaggagaaactcggcggggttgacgctcccgtcatatttttcggcgatggtgggccggaaccttgagggccaacggacgttccaaacgctcgccacaaaggctctacagccgacaccaccaaccgggggcacggagggctgatccccgcgtccgagttgaggtgacactccggacgaggaggcgccctccgttgcgtgggcagcacgtcgaccattacgccggtgctcgataccgatgcgggcatctggccccccacactgatcttcccgggtcggaggtgctgacgagggagtggcagccgaatggcgagcaacagccgccgctcgccgcgccctccgccttgacgacacggagccggtggtagcagcgccagaggtcttggtggcggaggagcgcccaccagcacctaggcgttgccgtgccgtcatgaccaagttggccatgtcgtccagccaacgttgggctggagactccgggtcagggacgacgggcgggtgacgtaggagcgcgcccgcagcttggagcgcgccctggggcgtgctgccatcgccgtagacgaggaggcgacgctccccatctcggcgcccttctccatcacccgtggatgtcgcagtcgcggatccttcgaccctctcgagcgcctcctcccgtctaggactttggcgtggagggggcggtggagtacgagctcgacggcgtgggttcggctccccgtcgtcaccgctaacactcggagagaggttgtgcgcctttgcttgttcggccat

SEQ ID NO: 59682 - DNA, 6772 bp, Oryza sativa
  Clone ID: PAT_MRT4530_61283C.1
agaagtcaagaacccatttttgtgctttgttcctgcttgttatatagagtttattagagtaaaagccttttcttttccgttggtcttgtagacgctgcagcttcagaagatccgctcttcgtggaggttgaagccgacgtttaggaaagcgagcaaggcaagtcacatcatctccccctctattcaaaaccctcaaaatggttttaggctgggctcggggtgcatggttttgatagtagcacctcggccatataaggaccggtctttgggcctctgttgcaaagcactaccgtacttccatatgtctagtgggtaaggcttagtttgtggctcagtctggttataaataaaagtacacggatggagatggacgaagtcgggggtcgatggacatctctagggcaaatgaaggctacacgagctgcggcccggtagtcgagatgtcatggcacagggccggtgtcctgctgctaggggctcagtcctgcctacctgtcccgggggttccggccgtaggtggggttgggtcggtactcttgtttatggctaggatgggttggaaactatgtcatgtcttccgtccgtataccgtggcggtatgtggcacgtggttacacgtgaggaagatgtgtcttgtggcacttgtgggtgtgtcttgttgagtacggtggttgtactcagtcttgctcaatttttcccaaacccagaagaggagcccctggatgatgaaggctttggtgtctagctcgtgcctgccgtcaagcgcctgtggtcgtcgccctagtcttccgctgtttttcgtttgtcttcttgtgtgctgggtcttgcctcctgggacaatgagtaatgcacgcacgtaaggaatgcccgttgggttatttccggtcgtgacagccaccaagacctctggcgctgctaccaccggctccgtgtcgtcaaggcggagggcgcggcgagcggcggctgttgctcgccgttcggctgccactccctcgtcagcacctctgacccgggaagatcagcgtggagggccagatgcccgcatcggtatcgagcgccggcgtaatggtcgacgtgctacccacgcaacggagggtgcctcctcgtccggagtgtcacctcaacacggacgcggggatcagccctccgtgcccccggttggtggtgtcggctgtagagcctttgtagcgagccttcggaacgtccgttggcccccaaggttccggcccaccatcgccgaaaaatatgacgggagcgtcaaccccgccgagtttctccaggtctacacgaccgggatcgaggccgccgggggtgatgacagggtcatggcgaatttctttcccatggccctgaagagacaggcgcggggttggctaatgaacttgccacccgcgtcggtccactcttgggaggatttgtgccaacagtttaccatgaactttcaaggcacatatccgcgcccaggtgaagaagcggacttacacgcagtacagcgaagggatgatgagtcacttcgctcatacattcagcggttctgtcaagtccgcaacaccataccatgcatccctgcacacgcggtgatctacgcgttcaggggggtgtgcggcacaaccgcatgctcgaaaagatcgcctccaaggagccccagactaccgcggagctttttcagctcgcggaccgagtggctcgtaaggaggaggcctggacctggaacccctccggttccggtgtggcaacttcggccgcccccgggtccgctgctcagacagggcgacgtgacaggaggaggaagaagaggtcagcccattccgacgacgagggtcatgtcctcactgtcgagggcgcttcgcgggccacccgaaaggggaggcctgcgagcgacaaaaagaaggaggccggcgctcccagcagggagcgcccaaccggcaagtggtgcatcgtccacaacacctccctccacgacctcgcggactgccgcgcagtcaaaagtttggctgagcggacgagaaagtgggaggaggagaggaggcaggagcgccgagagggtaagtccccggcggtaccctccggcaatcggcgaagtgaggccaagcagaaggcccccgtcgaggacatcgatggcggcgatgatgacctaggctttcaggagcctggggccaccattgccactgtcgatgggggagcgtgtgctcacgtttctcgccggagccttaaggccatgaagcgagagcttctggccgcggcccccactcatgaggcgacgcgtcgggcgcggtggtcggaggttgccctcaccttcgaccagaccgaccacccaccgtgtgttgcccggggaggacagatcgcgatggtggtttcccccaccgtttgcaacgtgaagttggggcgtgtcctcatagacggggggggggggggggggcagccctcaacatcctttcccccgcggcctttgacgccatcaaggccccggggatggtgctctggccgtcccagccgattatcggtgtgacgccggggcacacatggccgttaggtcatatcgacctaccggtcaccttcggtggatccgtcaacttccgcacggagcgggtaaacttcgatgtggcggacctaagtctgccctacaacgcggtcctagggaggcccgcgttggtgaagttcatggcggcggtccattacgcttaccttcagatgaagatgccgggccccggtggccccatctctgtccatggcgacctcaaagtcgcgcttgcttgtatggagcagcgcgcggatcacctcgccgctgcgtccaagcccgagggtggcgacgagaggcttggcacctccgttcccgccgccccgaggcagcggatgatcacatgcgacgaggtcccggtcaaggaggttgccctgggtgacggccccgtctccttcctgcgggcaaacgctgacgtcttcgcatggagaccggcggatatgcccggggtccccagggaggtgattgagcaccgtctcgccgtacggccgggcgcaaggccgatccggcagaaagtgcggcggcaggccccggaacgtcaagccttcatccgcgaggaggtggcgcgacttctggaggccggattcatccgcgaggtcatccatccggagtggctggcgaacccggtggtcgttcccaaggcgaatggcaaacttcggatgtgcatcgactacaccgaccttaacaaggcatgtcctaaggacccttaccccctgcctcgcatagatcagattgtcgactccacagcggggtgcgaccttttgtgttttctagatgcatactctggttaccatcagattcgcatggctagggaggatgaggaaaaaactacattcattacccccataggaacttattgttatacgacaatgcccttcgggttaaagaatgcaggtcctacttttcaacgtactactcgaatttctttgggtagccaaataggacgtaatgttgaggcttatgtcgatgacttggttgtgaagacgcgcgaccaagaaactttactttcagatctggcggaaactttcgagagtctccgctccgcccgcataaagctgaaccccgataagtgcgtgtacggtgtacctgcgggcaagcttctcgggttcttggtctctgcccgaggcatcgaggccaaccccgagaagatacgagctatagagcggatgcgcccccagcaagcttagggatgtgcaatgcgtcaccggttgcatggccgccctaagtcggttcatatcgaggctgggagagaaggcgctacccttatttaagctcctcaaacgctccgggccgttcacttggacggaggaagctgaacgtgccctcactcagttgaaggcgtatctcagctctcccccagttttgatcgccccggagccagatgaacccttgctactctacttagcggcgaccccgcaagtagttagtgcggcgttggttgtggagcgcgatgaggacaatcctcattccgcgcatccccaccctgtgctggcttggcccgggagagagcagggaggagaggcccccgagccgaacggtggcccaaggcccccgacgaccggagctggccctctgcccgcttgtcagacggtgccaggtgcccccgacccccaggatggcccgggggccactgcgggaaggccgcacctatcgccctctgacctcgaggttaaccctgtgccgactcgacccgggagagagcagggagaagaggcccccgagccgaacggtggcctaaggcccccgacgaccagagttggccctttgcccgcttgtccgacgatgccaggagcccccgacccccaggacggccccgaggccactgtgggaaggccgcgcctgtcgtcctccgaccccgaggtcgtcggcacagaagacgagtgcgccccgcgaggccgcttggacgaagagcgccccagggatgcggcccctggcgaagaggatcggccccaccgaaaggtgcagcggcccgtctactttgttagtgaggccctccgggacgccaagacccgataccctcaggcccagaagatgctttatgctattctgatggcttcgaggaaactgcgccattatttccaggcgcatcgggtcacggtggttacgtcttaccccctcggccaaatcttgcataatcgagagggtataggacgggtggtgaaatgggcaattgaactttctgagttcgatttgcactttgaaccacgtcacgctatcaagagccaagctctcgccgattttgtggcagagtggaccccggctcccgaacccgtctcactccccgaggccagctcgggcccctcgcagctgcctcacaccgcccgctgggtgatgcagttcgacggctccctgtctcttcagggcgccggtgcgggggtcacgttgacctcgccgagcggagaaatcctcagatacctggttcgcctcgattttcgggcgaccaataatatggcagagtacgagggactccttgcgggacttagggtggcagctggactggggatccgccgcctcctggtgttaaccaggtctgtatggagtaccggtgctctgacccgcagatggatgcttacgtacgccaagtacggcgtatggagcgccatttcgacgggatagagcttcggcacgtgcccagacgggataacacgattgccgacgaactctcacggctcgcttcctcgcgagcccagaccccaccgggcgcctttgaagaaaggcttgcccagccgtcggcgcgacccgaccccttaggggagacggacgcgcctgaccggcccccgaggcccgtcggagtccaggcctcgggacccgaggggagtgctcccagctcccttagattgattgcttggatcgctgagatccaagcatacctcacagataagactctacccgaggaccgcgaagggagtgaacgcgtccagcgcatctccaaacgctacgtgctggtagaagggaccctctatcggcgcgcggctaacggaatcctcctgaagtgcattcctcgggaacaaggcgtcgagcttcttgccgatatccatgaaggcgaatgcggagcccactccgcctcgcgcaccttggttggcaaagcctttcgtcaaggtttctattggccgacagctctcaatgatgcggtcgacctggtccggcgatgcagagcgtgtcaattccacgccaagcaaatccatcagccggcccaggccctgcagatcataccactttcatggccatttgctgtctgggggctcgatatcctgggaccgtttaggcaggccccgggcgggtttgagtatctgtatgtcgcgatcgacaagttcactaagtggcccgaggcttatccggtcgtcaagatcgataagcactccgcacttaagttcattaagggcattacagcccggtttggggtgcctaaccgtattattacggataatggcacccaattcactagtgaacttttcggcgatcactgcgaagacatgggcatcaagctctgcttcgcctcccccgcccaccccagaagcaatggccaagtggagcgcgccaatgcggaaatcctcagaggccttaaaaccaagaccttcaacatcctcaagaagcacggcgattcgtggatcgaggagttgccagcggtgctctgggcgaaccgaaccacaccaagccgagcaaccggggaaacgcctttcttcctcgtctacggcgcggaagcggttctcccatccgagctcaccctgaggtcccctcgggccaccatgtactgcgaggctgatcaagatcagcttcgcagagatgacctcgactacttggaggagcgaaggcggcgcgcggccctccgagccgcgcgctaccagcagagcctacggcgctaccatcagcgccgcatccgggcccgatcactctgcgtcaacgacctcgtcctacgccgcgtccaaacgcgtgctggattgagcaagctctcaccaatgtgggagggtccgtatcgagtgatcagcgtcccccggccgggctccgttcggctagccgcgggcgacggcacagagctgcctaacccgtggaacatcgaacaccttcgtcgcttctacccctaataggggctcgagtcggctaaaatcgccaaaaggggcccagaaccgagccgtgccccggggcgtggtgaactccgggggggaatcggcaaaaacccacaaccgggtcacccataaccctcggtcaccacgctcccggcctggccagtctaaacacgtggatctccccaggcac

SEQ ID NO: 59683 - DNA, 297 bp, Oryza sativa
  Clone ID: PAT_MRT4530_61284C.1
atgctgagttgctgcctctgcagtggtgttcgccggctgctcctcctcctcctcctcctcctcgtgtggagcgcctacgacttcgaggactatcaaatcggcatgctctttggtgcgtttctcggatatgtcgggtgctaccagctgtggaaggcggctccttccgtcttcgttgatgctgcccttgcctttgtgttttacaagctcagcgttgtgtcctcagagctgcaccggcagcgcaagacaaacagcttgatcacgcggcttaaattcggtattcattttcttcgtatttga

SEQ ID NO: 59684 - DNA, 6098 bp, Oryza sativa
  Clone ID: PAT_MRT4530_61285C.1
atggccgaacaagcaaaggctcacaacctctctccgagtgttagcggtgacgacggggagccaaacccacgccgtcgagctcgtactccaccgccccctccacgccaaagtcctaggcgggaggaggcgctcgagagggtcgaaggatccgcgacttcgacatccacgggtgatggagaagggcgccgagatggggagcgtcgcctcctcgtctacggcgacggcagcacgccccagggcgtgctccaagctgcgggcgcgctcctacgtcacccgcccgttgtccctgacccggagtctccagcccaacgttggctggacgacgtggccaacttggtcatgacggcacggcagcgcctaggtgctggtgggcggtcctccgccaccaagacctctggcgctgctaccaccggctccgtgtcgtcaaggcggagggcgcggcgagcggcggctgttgctcgccattcggtcgccactccttcgtcagcgcctccgaccagggaagatctgcgtggggggccggatgcccgtatcagtatcgagcgccggcgtaatggccgacgtgctgcccacgcaacggagggcgcctcctcgtccggagtgtcacctcaacacggacgcggggatcagccctccgtgcccccggttggtggtgtcggctgtagagcctttgttgcgagccttcggaatgtccgttggcccccaaggttccggcccaccatcgccgaaaaatatgacgggagcgtcaaccctgccgagtttctccaggtctacacgaccgggatcgaggccgccgggggtgacgacagggttatggcgaatttctttcccatggccctgaagggacaggcgcggggttggctaatgaacttgccacccgcgtcggtccactcttgggaggatctgtgccaacagttcaccatgaactttcaaggcacatatccgcgcccaggtgaagaagcggacttacatgcagtccagcgaagcgatgatgagtcacttcgctcatacattcagcggttctgtcaagtccacaacaccataccatgcatccctgcacacgcggtgatctacgcgttcaggggggtgtgcggcacaaccgcatgctcgaaaagatcgcctccaaagagccccagactaccgcggagctttttcagctcgcggaccgagtggctcgtaaggaggaggcatggacctggaacccctccggttccggtgtggcagcttcggccgcccccggatccgctgctcggacagggcggcgtgacaggaggaggaagaagaggtcagcccattccgacgacgagggtcatgtcctcgccgtcgagggcgcttcgcgggccacccgaaaggggaggcctgcgagcgacaaaaagaaggaggccggcgctcccagcagggagcgcccaaccggcaagtggtgcatcgtccacaacacctcccttcacgacctcgcggactgccgcgcagtcaaaagtttggctgagcggacgaggaagtgggaggaggagaggaggcaggagcgccgagagggcaagtccccggcggttccttccggcaatcggcgaagtgaggccaagcagaaggcccccgccgaggacatcgatgacggcgatgatgacctaggtttccaagagcctggggccaccattgccactgtcgatgggggagcgtgtgctcacgtttctcgccggagcctcaaggccatgaagcgagtgcttctggccgcggcccctactcatgaggcgacgcgccaggcgcggtggtcggaggttgccctcaccttcgaccagaccgaccacccaccgtgcgttgcccggggaggacagatcgcaatggtggtttcccccactgtttgcaacgtgaagctggggcgtgtcctcattgatgggggagcagccctcaacatcctttcccccgcagcctttgacgccatcaaggccccggggatggtgctccggccgtcccagccgattatcggtgtgatgccggggcacacttggccgctaggtcatatcgacctcccggacaccttcggtggatccgccaacttccgcacggagcgggtgaactttgatgtggcggacctcagtctgccctacaacgcggtcctagggaggcccgcattggtgaagttcatggcggcggtccactacgcctacctccagatgaagatgtcgggccccgatggccccatctctgtccatggcgacctcaaagttgcgcttgcttgtatggagcagcgcgcggaccacctcgccgccgcgtccaagcccgagggaggcgacgagaggcttggcacctccgcccccgccgccccgaggcagcggatagtcacatgcgacgaggtcccggtcaaggaggttgccctgggcgacggccccgtctccttcctgcgggcaaacgctgacgtcttcgcatggagaccggcagatatgcccggggtccccagggaggtgattgagcaccgtctcgccgtgcggccgggcgcaaggccggtccggcagaaagtacggcggcaggccccggaacgtcaagccttcatccgcgaggaggtggcgcgacttctggaggccggattcatccgcgaggtcatccatccggagtggctggcgaacccggtggtcgttcccaaggcgaacggcaagcttcggatgtgcatcgactacaccgaccttaacaaggcatgtcctaaggacccttaccccctgcttcgcatagattagattgtcgactccacagcggggtgcgaccttttgtgttttctagatgcatactctggttaccatcagattcgcatggctagggaggatgaggaaaaaactgcatttattacccccataggaacttattgttatacgacaatgcccttcgggttaaagaatgcaggtcctacttttcaacgtactactcgaatttctttgggtagccaaataggacgtaatgttgaggcttatgtcgatgacttggttgtaaagacgcgcaaccaagagaccttactctcggatctagcggaaacttttgagagtctccgctccgcccgcataaagctgaaccccgataagtgcgtgttcggtgtacctgcgggcaagcttctcgggttttttgtctctgcccgaggcatcgaggccaaccccgagaagatacgagctatagagcggatgcgccccccccagcaagcttagggatgtgcaatgcgtcaccggttgcatggccgccctaagtcggttcatatcgaggctgggagagaaggcgctacccttatttaagctcctcaaacgctccgggccgtttacttggacggagaaagctgaacgtgccctcactcagttgaaggcgtatctcagctttcccccagttctggtcgccccggagccaaatgaacccttgctactctacttagcggcgacccctcaagtggttagtgcggcgttggttgtggagcgcaatgaggacaatcctcattccgcgcacccccaccctgtgctggcttggcccgggaaagagcagggaggagaggcccccgagccgaacggtggcccaaggcccccgacgaccggagcaggccctctgcccgcttgtcagacggtgccaggtgcccccgacccccaggatggcccgggggccactgcgggaaggccgcacctatcgccctctgaccccgaggctaaccctgtgccgactcgacccgggagagagcagggagaagaggcccccgagccgaacggtggcctaaggcccctgacgaccggagttggccctttgcccgcttgtccgatgacgccaggagcccccgacccccaggacggccccgaggccactgtgggaaggccgcccctatcgtcctccgaccccgaggtcgtcggcacagaagacgagtgcgccccgcgaggccgcttggacgaagagcgccccagggatgcggcccctagcgaagaggatcggccccaccgaaaggtgcagcggcccgtctactttgttagtgaggccctccgggacgtcaagacccgataccctcaggcccagaagatgctttacgctattctgatggcttctaggaaactgcgccattatttccaggcgcatcgggtcacggtggttacgtcttaccccctcggccaaatcttgcataatcgagagggtactggacgggtggtgaaatgggcaatcgaactttctgagtttgatttgcactttgaaccacgccatgctatcaagagccaggccctcgccgattttgtggcagagtggaccccagctcccgggcccgtctcagtccccgaggctagctcgggcccctcgcagctgcctcacacgcccactgggtgatgcagttcgacggctccctgtctcttcagggcgccggtgcgggggtcacgttgacctcgccgagcggagacgtcctcagatatttggttcgccttgactttcggacgaccaataatatggcagagtacgagggactccttgcgggactcagggtggcagctggactggggatccgccgcctcctggtgttaggcgactcccagctggtcgttaaccaggtctgtaaggagtaccggtgctctgacccgcagatggacgcttacgtgcgccaagtacggcgtatggagcgccattttgacgggatagagcttcggcacgtgcccagacgggataacacgattgccgacgaactctcacggctcgcttcctcgcgagcccagaccccaccgggcgcctttgaggaaaggcttgcccagccgtcggcgcgacccgaccccttaggggagacggacgcgcctgacaggcccccgaggcccgtcggagtccaggcctcgggacccgaggggagcgctcccagctcccttagattgattgcttggatcgctgagatccaagcatacctcacagataagactctacccgaggaccgcgaagggagtgaacgcgtccagcgcatctccaaacgctacgtgctggtagaagggaccctctatcggcacgcggctaacggaatcctcctgaagtgcattcctcgggaacaaggcgtcgagcttcttgccgatatccatgaaggcgaatgcggagcccactccgcctcgcgcaccttggttggtaaagcctttcgacaaggtttctattggccgacagctctcaatgatgcggtcgacctggtccggcgatgcagagcgtgtcaattccacgccaagcaaatccatcagccggcccaggccctgcagatcataccactttcatggccatttgctgtctgggggctcgatatcctgggaccgtttaggagggccccgggcaggtttgagtatctgtatgtcgcgatcgacaagttcactaagtggcccgaggcttatccggtcgtcaagatcgataagcactccgcacttaaattcattaagggcatcacagcccggtttggagtgcctaaccgtattattacggataacggcacccaattcactagtgaacttttcggcgattactgcgaagacatgggcatcaaactctgcttcgcctcacctgcccaccccagaagcaacgaccaagtggagcgcgccaatgcggaaatcctcagaggccttaaaaccaagaccttcaacatcctcaagaagcacggcgattcgtggatcgaggagttgccagcggtgctctgggcgaaccgaaccacgccaagccgagcaaccggggaaacgcctttcttcctcgtctacggcgcggaagcggttctcccatccgagctcaccctgaggtcccctcgggtcaccatgtactgcgaggctgatcaagatcagcttcgcagagatgacctcgactacttggaggagcgaaggcggcgcgcggccctccgagccgcacgctaccagcagagcctgcggcgctaccatcagcgccacgtccgggcccgatcactctgcgtcgacgacctcgtcctacgccgcgtccaaacgcgtgctggattgagcaagctctcaccaatgtgggagggtccgtatcgagtgatcggcgtcccccggccgggctccgttcggctggccacgggcgacggcacagagctgcctaacccgtggaacatcgaacaccttcgtcgcttctacccc

SEQ ID NO: 59685 - DNA, 1354 bp, Oryza sativa
  Clone ID: PAT_MRT4530_61286C.1
cgggctgcaggaattcggcacgaggccggactcaagcaaactcccccacctcgccgcccgatccgacgcgccggcggccggacgcagctctccggtgagccgtcgaaccatccgcgcgggcggccacgtcgctcgccgtagccgcccacaaacgaaggattcggcgcatcccgccggctcgcggtgatctgacaggaggaaggccgtaggcgttagctgctagtctctgcgtggggcgatgtcgagggttcgcgacagggccgaggacttcaaggagtccgtccgcgtcgccgcgctcggccatgggtacacggagtctcagttagccgcgctcatgtcttctttcatcatccggaagccgccccccaaattaccctttacaaaggctgcaatcaagacgcttgagagtatcagggaactggagaagtttattgtgaagcataggaaggactatgttgacttgcatcgcaccacggagcaagaaagggacaacattgagcatgaggtcagtgtttttgtaaaagcatgcaaggaacaaatagatatcctaaagaacaggatccatgaagaaaaaggtggaagtacaaagacatggcttggtacaagcgatgagagctcccggttggatttgatagctcaccagcatggcgtggttttgattttgagtgagcgtcttcactcagtaactgtgcaatttgatcgtcttcggaccatgcgttttcaagatgctattaacagagcgatgccaagaaaacggattcagaagaaacgagaaaccaaagctgctgaaccatctaagccaaaccttgtattaaaatctgatgtttcaaaggttgaagatcaggaggtctctactgcaccactaagagttcaagaacaactcttggatgatgaaacaagagctcttcaggtggagttgacaaatcttcttgatgctgtccaagaaacagagacaaagatgatagagatgtcagcacttaatcatctcatgtcaacacatgttctacaacaagctcagcagatccagtatttatatgaccaggcagttgaagctacaaacaatgtggagcgtgggaacaaggagctatcccaggcgatccagcgcaacagcagcagtagaaccttcctcctacttttcttctttgttcttaccttttccgttctctttctggattggtacagcaaatgaagcttatgtaaacgccgtgattttttttcccattctgaaagtggatcaagttatcagtcaatccatgtctcgctaggtttactggccttttacgtgcaatgtattactgcattcatcatttgcaaaaaaaagagtctgccgcaaacgtgacaaagcacgttttgt

SEQ ID NO: 59686 - DNA, 325 bp, Oryza sativa
  Clone ID: PAT_MRT4530_61287C.1
aaaatccgcaaaagaacatggttgcaggatccaaaaaaatccgcaacgtggctttaatgttgaattgcctgatgcacttgggagaccccacattgggaaaatccaaatggctatgccgcactttgatgtgtgcccaatgctgtgtgctactcacaatggaaagggtttattcaagatgggagactttatgggttcatttcagctggccctagatgacaagcttgttgggataaataagattcttagggagagaagatttctcaagatggattagttttactgcaaatgtgtttgcaatcacttaagggagaactgagagagaacc

SEQ ID NO: 59687 - DNA, 807 bp, Oryza sativa
  Clone ID: PAT_MRT4530_61288C.1
atgcagtacggtgtattgccgctcttcgtcctcgtcgccggcgtactcattgtcgccgccggcgccgggacagctacggacgacgctgctggccgccgccactgccgcgtggtcggcgtcgacgacgacgtcgacgtggctgcggcgctgatggatcacgatcatcatccccagcggcggcggcggctggaggatgaggtggtggtggaaacggagctcccggtggtcgacggcggcggcggcggcctcgccgtccgagcaaggcgacactacggcggcggcggcggcttctcctacggctgcctcagccgggcgaggccggcgtgcccgcgcgccggcgggacgacgacgataatgctcgggagcgaccggcgaccggccggcctcgtggcgcagctgctcctcatcaccctcgccgcccttctcatcctcctcctcaccaccgtggccgcggcggcgccggcggccggcggcgggtacagcgccagggtggtcatcgtcgccgggaagaagagcagcggcagcggcgccaccgccaccgctcaccgccgcgtcgtcgtcgacgatctcgccggcatgatggcggcggcgctggggcggcaacgcctggaggacgtggtggcgccggaggaggagctcctcatcccgggcggtctcgtggttggtgcgggcggcggcgggggcggctacggcgccttggaggcgaaccagccggcgtgcccccgcggcggctgcgccggcaagcagccaggaggggcgtacacccggccgtgcacgtacggcaacacctgcttccggccaagctaa

SEQ ID NO: 59688 - DNA, 5679 bp, Oryza sativa
  Clone ID: PAT_MRT4530_61289C.1
atggcgctcgccgcccttgagaggtgcttccaggctgtcccgacggacgccgtcgcgggcatcgtcgactgcgtcctcgcttcttcgtcctggtcctcgccctcgcagctcttccacgccctcctccactccgaccatgccgccgcctcatctctccctcacgccgccgcgctctgccaccagcctactccaatttatttaagacggcccacagagcaaagccgaatctcgctgtcaacactggtctctctgaagttccttgtttacgacgtccagatccgtcagacgatcccctatctgagcggccacagcttcatgtaccttagcgtacttgaccttaaggtggtcctcctatagctccctgttattgggtctgttaccatcacgatgcattattagttggcctagacgcaccaggcagccaatcatgctatggtgctccttttgtctccttggaatagggtaagtcgccttctcccagtccttatagcgggcgcttgtactgcgtcgatgctgcaacacatattggagattatcaggaagagcacaagcctcaatgcgctgctgcacaatttgacctgggacctctcctcgctggcgctcaacatgtttggccacagccaagagtatcgatcctgtgccacccgggtcctcctacaccccctgctcctttcgctcgcggatgtttcctgtgtcaccgtgcacctggagttggctgcagctcctcagcttaagctctcaaggtctggcttcttggagtctatatgggcctcctgcctttctctctttgcactggggcctgctgagcgcctggatgcttataatatactctctctctacttgtcaacactgaaacatgttatcttgggacctgatgagtatgatcttaggaattccaatgatttttgggatgaaattcgcaggggactggttgacaaggattctttagtgaggaagcaggctttgtacatcttgagaatatcactagacatcttttcctcatctgaggataatggtgctcagcaatgctccaggaggaggtccgccgctctgcctgctcaagacaaatcaaatactgcaatgacaaaaagagaaaggtgggctcagaaagaggccaaatcccttggcattggagaaatgagccaatcagatgaaaactgctcaagtggtaaagaccggtggaaagttttcctgttactctacgagatgctccaggagtatggaacacatttagttgaggcggcctggacacaccaggtaatgctgctgtttgagtccacaccacggagtgattactcaaatcacatgtcctatacagttttccatgctcagatggaatctttcgaaggatttttccactggatggtagttctttgggagcgtgggtttactcatgataatccccaagtgcgctacctggttatgcattcctttttggatattacatgggaacactacttggtttgccctcagatagttcccagaggctttgttcttggaccactgttacgtggtttgaacgatgtagttcatcacaaggattttgaatttgaagttgaaattctaaagaatactgcactgctacatcaaaactatttagcaatttttcgtgctgattctgtgcccaaaccaaaagttgattgtgtgaagggtgtttatgattcaaaaatcataaaaggtgcagagaggttctttggtctttacgcacagagattgacaacacgtgaccgtttacatctagtttggagtttgtcttcttctgctaagcaagattcatttggccgagcaggattaatggctcttgcattttgtgttgcttcatgcgcatgtcatttaaatacaaatgatttaccatgtgattctgctgggcaagaaatggcaaaatgcaatggtgatgcacatacaaaagttaatattgaagatttattagatgctttaatgattctttgtgagaagagtaaacaacacttcaatccaaagtatcgtctcaaagtttgtgaacaggtcatgaaggccacaacatcattgataagtgcagctgaaatcccacttaatcagcttttgtacttcatttctgcaatacctcgagagtttactgattattatggagaactgagaccaatggttcaaaaatggtttgttgagaagaaagaatgttcttctggaaacactttgttggagaagctcattgatttccctaccaccttcgtgaagcacacagaggtgaatggaccatacttgtttgatgatgaggatgtgggtgcatgggaagctgaagcacggaggtgggcaaggacccttcttcttgtaacctcagaggagcagcacttcacgcaaatatttgtgtttttggagaaatatggtaacaatctttctgaagaatatccaactggagaatgcatacaagtgaagttttttatcattgtattatgtttgatcgaggaacttgaagtgaaacacaaaaggcttattcaccagaacaataccatctccaaagaaggttcagatagctcaaatggattagagcaccatgctcttaacaagaagcttgcaaagtttttgcttatcattttggaaaatatggtgatcttcagcaggacatcttgttcaattttctggttaagaaattcagaggacatggatttaccatcttctgttaaaggaaagcttggaggcccaagccaacgtcgtctacctacctctacaacctcgttggtgttgcaggctatttggtccatgagaagcattagttctattgtcacatggtgtaacaattactgttctgatatttctctttgttcaacattgacattcttctgggagttctgttgggaagttatccaacatcacagttatgccacagagtggctttgtctagattcgctgctatccttttcttgctgccgtggtgagaatgaatcgctgttgaagatgctctatcctttattttcagaatcaactctccgatctatttttgttgatattattgaaagtcttgaaaatgctggtgaaaattctgtcttggccatccttagatgcgtgagatctgttttggggcttttacacttcagcatgagaaccagaaatttgtcctcgctgggcatcagttatgagatgatgatgcaatttgtaaagtcttcctggatcttgcaccttagttgcaataagcgcagagttgcaccaattgctgcattgttatctgccgtattgcacccagcaatctttcctaatttggaaatgcaccaggagaatgaaaaagggccaggtcctttgaaatggtttattgagaatcttcttggcgaaggttcaaaaagtcctcgaactatacgcctagcagctttgcatttgagtggtatatggttaatgtacccaaaaactcttagcttttatatggaggaactgaagctattatcattatatggatcagtggcatttgacgaagattttgaagctgaactatctgaaaaccatgaagcaaggcttgaagtttctatgttagcacaaagcccagatcgtgaattcacagaggtaagattatttgcaatcaccatgagcattaatgataaaaccaattgggtgttcgatttattcaccaatgatgaacaatttgataatttcattgtatatccattggcaatgttgttgcaggtgttcattaatacagaattatatgctcgcgtttcagttgccgtcctctttgatcatctatggaagcaaatcgaagtaaagagcacattggaaactgaagaagcccttcgatctggcaaattatttctactgaaacttcttgattcagcggtgaacgacaaggatatttcaagagaactttacaaaaaatatagcagtgtacataggcgaaaagttcgtatttggcagatgatttgtgttctgtcacagtatgtggaggatgatattgttaaagaagtgacatctagtattcacatctgtctttatagaaacaatttacctgctgtccggcagtacttggagacatttgctatacttatttatttaaaatttccagcattggctgaagaacagctgattccaatttttcatgacaatgaaatgcgacaacaggcactatcttcatatgtttttatagcagcaaatctgatccttcattcacgggagttggctgtccagataaaccatctgaatgaactttttcctccaataatgccatttttaacatctcatcaccacagtttacgtggttttactcagctacttgtccactgtgttctatcaaagatggggtctgttttggcactcggaagttcagaaaatccagtctttgagaggagatgctttcaagatttgaaaagatatctggcagaaaatactgactgcgtaaggcttagagcttcagttgaacgcttccttgatgttttcaatcctgatacttccgggactccttctggaatatttagttctcgccctgaggtctcttttgactttgaatgtgttcctgtgtcagtgatggagcgagtaattaacttcctcaatgatgtgagggaggatctgagacaatctatagcgaaggactcaataacaatcaagaatgaggatctcacagcagaaatgcatcacaaagaggacagaactgatgagaacatagttgagttgttagagcctagtcaagatgtgctcaattttcagaagaaaatcacaccctataggaactttgatcaaccattaaacgttggtggtcattcagttgttggcgatgactatatttcaagattacttttagatctagagggagatgaccagcagttggatttagcgctagaatcaagaaatcacgctgtggaaactatcaagcaaagccagcagcaattaatagtagtagcatcattggtagatcgcatccctaatcttgctggactgacaagaacatgcgagatattcaaagcagttggattggccgttgctgacaaaagtattatcgaggacaagcagtttcggttgatcagtgtgacggcggagaagtggttgcccatgatggaggttccagtgaatagcgtcaaagtgttcttggagaagaagaggctggaaggctattccgtgatagggttggagcagacggccaacagcaagccactggaccacttctcttttccgagcaaaacggtgcttgtgctgggacgggagaaggaaggcatcccggtggatatcatccatgtgttggacgcatgcgtggagatcccgcagctgggcatcgtcaggtcactcaatgttcatgtcagcggtgccattgccgtgtgggaatacacccgccagcaacgcatcgcaacttaatttctgtttgagcagaaatcaacttaattttctcaaagctgttccttgttactagtactcctactccatagtggagtctgtattatatgtattcatcaatcggttagaactagaaacaaatgagagatgatagtactccacttgtcttgcccgtacatacagcacaactctactgtcctgacctgcaccccagctattgttattaccaaaaaacccatatttgttcttgctagtaatgccacgcactacggcactagatagaggtgagtttataatacgaataaaacgtttgtgttggagtatcacttaaactttcctcgtcatttggaacagagctcgaaacgggggaaaaaaattcgaggattggttccgtgt

SEQ ID NO: 59689 - DNA, 4542 bp, Oryza sativa
  Clone ID: PAT_MRT4530_6128C.1
atggccgaacgggcagtggcgcacaacctctctccgagcgctagcggtgacgacggggagcagaacccgcgccgtcgagctcgtactccaccacccccctctcgccgaagtcttaggcgggaggaggcgctcgagggggttgaaagatccgcgacttcgccacccacgagcgatgaagaaggacggcgagacggggagcgtcgcctcctcgtctacggcgatggcagcacgccccagggcgcgctccaagctgcgggcgcgctcttgcgtcacccgcccgtcgtccccgatccagagactccagcccgacgttggctggatgacgtggccgacttggtcatgacggcgcagcagcgcctaggcgccggtgggcggtcctccgccaccaaggcctctggcgctgctaccgccggctccgtgtcgtcgaggcggagggcgcggcgagcggcggccgttacccgccgttcgtttgccattccctcgtcaacgcctccgacccaagaagatgtgcgtagggggccggatgcccgcctcagtatcgagcgccggcgcaatggtcgtcgtgctgcccacgcaacggaaggcgcttcctcgtccggagcgccacttcggttcgggcgcgggggccagccccccgtgcccccggttggtggtgtcggctgtcgagcctttgtggcgagccttcggaacgtccgttggcccccaaggttctggcccaccatcactgaaaaatatgacggaagcgtcaaccccgccgagtttctccaggtctacacgaccgggatcgaggccgccggtggtgacgacagggtcatggcgaatttcttccccatggccctgaagggacaggcgcggggttggctaatgaacttgccgtccgtgtcggtccactcttgggaggatttgtaccagcagttcaccatgaacttccaaggcacatatccatgcccaggtgaagaagcggacttgcatgcggtacagcgaagggacgatgagtctcttcgctcgtacattcagcggttctgtcaagtccgcaacaccataccatgcatccccgcacacgcggtaatctacgcgttcagggggggcgtgcggcacaaccgcatgctcgaaaagatcgcctccaaggagccccagaccaccggagctttttcagctcgcggaccgtgtggctcgcaaggaggaggcctggacctggaactccaccggttccggtgtgacagcttcggctgcccccggatccgccgctcggtcagggcggcgggacaggaggagaaaaaagagggcgcttcgcgggccacccgaaaggggaggcctgcgagcgacaaaaagaaggaggccggcgctcccagcagggagcgcccgaccggcaagtggtgcaccgtgcacaacacctccctccacgacctcgcggactgccgcgcggtcaaaagtttggctgagcggacgaggaagtgggaggaggagaggaggcaggagcgccgtgagggcaaggccccggcggctcccttcggcaaccggcgaagtgaggccaagcagaaggcccccgccgaggacatcgacgatggcgacgatgacctagggttccaggagcctggggccaccatcgccaccgtcgatgggggagcgtgcgctcatgcttctcgtcggagcctcaaggccatgaagcgagagcttctggccgcggcccctacccatgaggcgacgcggcgggcgcggtggtcggaggttgccctcaccttcgaccagaccgaccacccgccgtgcgttgcccggggaggacagatcgcgatggtggtttcccccaccgtttgcaacgtgaagttggggcgtgtcctcatagacgggggtgcagccctcaacatcctttcctccgcagcctttgacgccatcaaggccccggggatggtgcttcggccgtcccagccgattatcggtgtgacgccggggcacacttggccgctaggtcatatcgacctcccggtcaccttcggtggatccgccaacttccgcacggagcgggtgaacttcgatgtggcggacctcagtctgccctacaacgcggtcctggggaggcccgcgttggtgaagttcatggcggcggtccactacgcctacctccagatgaagatgccgggccccggtggccccatctctgtccatggcaacctcaaagtcgcgcttgcttgtatggagcagcgcgcggaccacctcgccgccgcgtccaagcccgagggtggcaacgagaggctcagcacctccgtcccagccgccccgaggcagcggatgatcacgtgcgacgaggtcccggaagacgcgcttgtctccttcctgcgggcaaacgccgacgtcttcgcctggagaccggcggacatgcccggggtccctagggaggtgattgagcaccgtctcgccgtgcggccgggcgcaaggccggtccggcagaaagtgcggcggcaggccccggaacgtcaagccttcatccgcgaggaggtggcgcgacttctggaggccggattcatccgagaggttatccatccggagtggctggcgaacccggtcgtcgttcccaaggcgaacggcaagcttcggatgtgcatcgcctacaccgaccttaacaaggcatgtcctaaggacccttaccccctgccacgcatagatcagattgtcgactccaccgcggggtgtgaccttttgtgttttctagatgcatactctggttatcatcagattcgcatggctagggaggatgaggaaaaaactgctttcattacccccataggaacttattgttatacgacaatgcctttcgggttaaagaatgcgggtcctacttttcaacgtactactcgaatttctttgggtagccagataggacgcaatgttgaggcctatgttgatgacttggttgtgaagacgcgcaaccaagagaccttactctcggatctagcggaaactttcgaaagtctccgcttcgcccgcataaagctgcaccccgataagtgcgtgttcggcgtgcctgcgggcaagcttctcgggttcttggtctctgcccgaggcatcgaggccaaccccgagaagatacgagctatagagcggatgcgcccccccagcaagcttagggatgtgcagtgcgtcaccggctgcatggccgccctaagtcggttcatatcgaggctgggagagaaggcattgcccctatttaagctcctcaaacgctccgggccgtttacctggacggaggaggctgagcgggccctcactcagttgaaggcgtacatcagttctcccccagtcctggtcgccccggagccaaatgagccgttgctactctacctggcagcaaccccgcaggtggtcagcgcggcgttggtcgtggagcgcgacgaggacaaccctcactccgcgcatccccaccctgcgtcgactcgacccgggagagagcaggcaggagaggccgccgagccgaacggcggcccgaggcccccgacggccggagctggccctccgcctgcttgtccgacggtgccaggcgcccccgacccccaggatggccccggggccactgcgggaaggccgcgcctgtcgccctctaaccccgaggtcgtcggcacagaagccgagtgcgccccgcgtggcctctcggacgaagagcgccctggagatgcggcccctggcgaagaggatcggccccgccgaaaggtgcagcggcccgtctacttcgttagtgaggccctccgggacgccaacacccgataccctcaggcccagaagatgctttacgctattctgatggcttcgaggaagttgcgccattatttccaggcgcatcgggtcacggtgagtcaggccctcgccgactttgtggcggagtggaccccagcccctgagcccatctccgtccccgaggccagctcgggcccctcgcagctgcctcacaccgcctactgggtgatgcagttcgacggttccctatctcttcagggcgccggtgcgggggtcacgttgacctcgccaaacggagacgtcctcagatacctggttcgcctcgactttcgggcgaccaataatatggcggagtatgagggactccttgcgggactcagggtggcagctagactggggatccgccgcctcctggtgttaggtgactcccagctggtcgttaaccagataagactctacccgaggaccgcgaagggagtgaacgcgtccggcgcatctccaagcgctacgtgctggcgggccccgggcgggttcgagtatctgtatgtcgctgtcgacaagttcactaagtggcccgaggcttatccggtcatcaagatcgataagcactccgcgcttaaattcatcagaggcatcactggtcggttcggggtgcctaaccgtatcattacggataacggcacccagttcactagtgagctcttcggtgactactgcgaagacatgggcatcaagctctgcttcgcctcccccgcccaccccagaagcaatggccaagtggagcgcgccaacgcggaaatcctcaagggcctctaa

SEQ ID NO: 59690 - DNA, 1444 bp, Oryza sativa
  Clone ID: PAT_MRT4530_61290C.1
tagacatatgttttttttttgactgaaaaagatagacatatgttgacactaccctttactgttgaagaggtcaagaaagtggtttttgaactaaaacaaaataaggccccagggcctgatggtttccctggggagttttacaaacgcttttggcatattgtgaaaaatgatctaatggatttggttaatgactttcacaatgggtatcttgatgtggagagactgaattttggcattatcactttgataccaaaaacaaaagatgctacacaaattcagaaattcaggcccatctgtttatttaatgtgagtttcaagattattactaaggtcttgatgaatagaattgacaaggtgatgtcttacatcatttcaaaaaatcagacagcctttcttaagaacagatatatcatggagggggttgtcatcttacatgagatcatgagctcccttcatgtgaaaaaacagagtgggatcctctttaaggtggatttgaaaaagcatatgacaaggtggattgggtctttatacacagaatgcttagtgcaaaaggtttctctgatctttggtgtgactggaccattaaagtgatcaggggaggcaaagtggctgtcaaagtgaatgaccagatagggccctaccttcaaacccataaaggcctcagaaagggagatcctttgtctcccctgctatttaacttagctgttgaagctttgaccttaatggtgaatagggcagataacaattccctgctcgaagagttggggaccaatgaaaacaataagatagctattctgcaatatgcagatgacactattttcctgctgctagataacttagagtatgacaggaaccttaagttcatcctttgtctgtttgagcaattgtctggactaaagatcaattttaacaagagtgaggtcttttgttttgggggagctatagaaaaacagaatttatatagccaaatctttacctgtgacattggggtagggggtctggggatgattgatttagatgttatgaataaagctttgctggggaaatagcattggaaaatagagtctgaagagggctggtggcaggatatcctcagagaaaaatatttaagtcaaaaaactatgtcctgggtagcttataaacctggcaattctcatttctggcatggtctgatggaaattagggaggatttcctaaagtttgtctcaaaaaaggttgggaatggcaaaaaaaaaacttattttgggaggatagctggtgtggtggcaggcccctgaatttgcagtttcctgctttatataacatcacccataccagacacattactcttgcaaaactaaaggagaaaggctgggatactatcaaattcagaaggagtttacatggggataaacttagagattggatttggatcaaacaaaagtgcgttcgatgcaccctctct

SEQ ID NO: 59691 - DNA, 1452 bp, Oryza sativa
  Clone ID: PAT_MRT4530_61291C.1
ctcgcgcaatcgcgctcgcacgcacgcgccgcctcacctcctccctcgcgcgcaccgcctcgcccttctcctctcctcgcatgtgccgtgatcgccaccgccgttccacgctcttctagccatcttcgccgcgccggaagatccagccacccggacaagagtggtgctggccgtcgcttccctcttctcccctttcatctccacgcgcccaccgcttccctctccttcacgctctccactccgctcgggtgcccgatctggttcgagggtggccggagccgatggtctaggcctccccaccggtggatctggctgccctcgctccgggctctggcgccggggatggtgctcgtgctccctcgacttgtccgtacaccctttacccctatcctctgcacgatacggtggcggcgggagggcggagagaagcagctgtgccgcattagctcttcgctggtatgcggtggcggcgggagggcgggtatagttccaggtgctccgtgctcgtcaggactgaaagagattatagatcttatttggtgattcgcagattcagtcaagatttgaagagatcttatgtgataattaacagaagttctgcagtgcaggacattcctgccgctagtcgtgccttggacagccagagctctcgaattctcagccttaagtacattggatcacatacaaggtctggcttcttggagtccatatgggcctcgtgccattctctctttgcactgaggcctgctgagtgcctggatgcttatagcatactctctctctctctctacttgtcaacactgaaatatgttttctcgggacctgacgagccccaagactatgatcttacgaattccaatgaattttgggatgaaattcgcaggggactggttgacaaggattctttagtgaggaagcaggctttgtacatcttgagaatatcactagacatctttccctcatctaagaatgatgccgctcagcaatgctccaggaagaggtccgccgctctgcctgttcaagacaaaccaaatactgcaatgacaaaaagagagaggtgggctcagaaagaggccagatcccttggcatcggagaaacgagccaatcagatgaaaactgctcaagtcgtaaagaccggtcgaaagttttcctgttactctatgagatgcttcaggagtatggaacacatttagttgaggcggcctagacgcaccaggcagccattcatgctattgtgcttcttttgtggattggaataggataagaagcttgcacatggacttatagtgggtctgtactgtctgaatgggttcttattacaattatttttccccctctttgtgccttatgtatattggtgctctatgaaataatgtaccatgtaaccgataaatcatcattgacatatcaaagtgcacctatgtatgcgctatatttctctaatatttcac

SEQ ID NO: 59692 - DNA, 335 bp, Oryza sativa
  unsure (1)..(335): unsure at all n locations
  Clone ID: PAT_MRT4530_61292C.1
ggaacaagtgccaaccgccgnaaccaacaagcanggggagaagcaagtgggagagccgcaccacacgggcccaagcaagacacgncgnaagggngacaagggaccccacaccngaccacagaacagacagcaccgacncaaagacccgacggccgcaccgacaaagaaagggaccagagccacccggccagaacccagcggaaaaggagaaagagaaggagaaaccgagcacggaaaccacaggaaagaggccgacgaagagcaccccgcggcaccagaccccngcaaggaaaagcacgacgcaacagcaaccggcggccacagcaaagggggag

SEQ ID NO: 59693 - DNA, 336 bp, Oryza sativa
  unsure (1)..(336): unsure at all n locations
  Clone ID: PAT_MRT4530_61293C.1
gcgtccgcgaccgtataggagtagtcgtgtagcagctagctagctagcaatggcggcttcttcttcttcttcttcctctctggcggtggtggtggtggcggcggcggtggcgctggtcgccggcggcggcgcggcggtggcgcagctgtgcgaggagtactacgactgcacttgccccgaggggggggacatcntgcggcgggtgcggggggatgcncaccggancaacncccggatcttcncgagcctaatccggctccatttccacaactggttcgngcaggggtgcgacncgtnnctgctgctggacagcgtccccggggtgccctnggagaa

SEQ ID NO: 59694 - DNA, 3707 bp, Oryza sativa
  Clone ID: PAT_MRT4530_61294C.1
atggcgaagactatggagcaaagacggcgaagggcggagaatcgtgcgggtgcctcgtagagccaaagacctcttaggcgaaggatgtaaggcgaagagtgtatgtcgaagggagacgacttcgccatagcaagttcggcctcacgaaggcccagtggcctttgggccaacgatcgcctgacggaccattaggagcccatgtacctcaattacactgtatacccacataaatgtccctttcataagggcagccatttgtcgtttcgaaaacagctggcgccgaccgtggagacctccaagcgaaaccactgagagcgaatgccaccgaagagagtcgtgaaggagaaggttacaaggcgaaaggaaagcgaagccggaggggggatggccgccgaaaagggagcagagccttcggcgcccatcgccgaagatggcggagcgccaccggcttcggcaccagcgccgctactaccgtcttcggctcctgccgcctcgttggggcaggtgccgaacacggctgaagcagcgaaggcggcagcggcggcaagggcactccaaaccagggcggagatcctttcgacaagcaaactgctggtgccccaagccgctccgtcgcagctggcagcggcctcgactgcgctcaccgctgtacaagtcaaccctgatcccgaaacacaagccgaagccgacatggaagccatgcgacagaacatgacatgactccaagacatgcttcggcagatgcaagaacagcagcaggcgtacgaggcagcgaggcgggccaaggccgcttcggccccaatcctccagtattcggcaggctacatcccaccccaagtctatccacaagcaccgatccaaccccttccaccacaagccacgcaagcgctagtatacttcgctgggcagccttcgaccgcagcagtacatccgggccctcacgtgcaactgcaagctcagccggtcactacccaagcacactctcaaccgcctggccaagtgtcacaagcgatggcagaaggggcttcggctctgcaagcgcagcttcaagctttcattcaacaatttagccaaccccacagcatttcaggtatagccccttcggcccagccggaggggagtacaggtcatggtgcgcctagttggttgtcgtcgaatcagccgggtctgggggctttgccttggagtcaaggaccgtagttcgacttcaacaatattgctcaggcaccaaccgttccgccgcaagcaccaacactaggcttcgtggcaaaccaagcaccaaaccagtccgccatggcatggccccagccaacattcgacccatccatggcagctcaccaagcatcaccaatcggagctgggcagccgaacaccgtggcccaacctcacgcgcaggccgtgacttcgcctttcgccacaccgtatccgtagcaaggtgccgtgaacagggcagggggcgaaaaggggctactgctgagtgggggaatcaagacccgtccaatcccaccccagttcaagttcccacccgtcccacgctattcaggcgaaattgacccaaaggaattcctctctatctatgagtctgcgatcgaagcggctcatggcgacgaaaataccaaggcaaaggtaatacatcttgctctaaacagcatcgcccgttcttggtacctcaatttagcagctaatagcatctactcatgggagcaattgcgcgatgtctttgtccttaactttcgagtcacctacgaggagccgaagacgcagcaacatctactcggcattcgccagaggtcgggagaatcgataagggagtacatgcgtcgcttcttgcaagcccggtgtcaagtacaagacataaccgaggcgtctgtcatcaatgccgcttcggccgggatactcgagggcgaactcacaaaaaaaatcgccaacaaagagccgcagacgcttgaacacctgcttcgcatcattgacgtgtacgcatggggcgaagaggattccaagcgatggcaagcaattcaagctgagtatgataaagcctccatcgccgctgccaaagcccaagtacaagctcaggtcgccgaaccacctcctctcgctgttcgccagcctcagccggcgaaccaaggataaccgccaaggcaaggccaagctcccataacttggaggaagttcagaaccgaccgtgcgggcaaggctgtgatggctgtcgaagaagttcaagccctccgcaaggagttcgattcccagcaagcaagcaaccatcagcagcccgttcgcaagaagtatctgaaccagcaaatctctttcgggccggaagatgccgaaggagtaatgttcccgcatcaagaccctctggtgatctcggccgagatagctggcttcgaggtccaacgaatcttagtcgacggagggagttcggccgatgtcatcttcgctggagcatatgccaagatgggattaccgaccctagcccttacccaagcatcggcatcgctccgtggtttcggcggtgagtcagtccaagttctaggccaagcgcaattgctggtagctttcggcacaggcaaaaacagacgcgaagagaaaataatgtttgacgttgtcgacatcccgtacaactacaatgccatcttcggctgtgcgaccttcaataagttcgaagccatttcccaccacaattatctcaagctcaagatgcctggcccggtaggagtgatcgtggtcaaggggctccagccttcggccgcttcaaagggcgatttggccataatcaacagagctgtgcataatgttgaggccgaaccacatgatccggcgaagcacgcgccaaagcccgcccctcacggcaaggtaatcaagatacagattgatgataccgatcccacaaagcttgtatcgctggggggcgacatgggcgaagaagaggttgagaacatcctagaggtgctcaagaaaaacattgataacttcgcctggggccctgatgaggtgggaagtgtttcgacagatctcatcatgcatcacctggcagtcatgccggatgccaagccaaggaaacagaagctacgcaagatgtccgttgatctccaagaagcagcaaaagccgaagtccaaaaattgctcaaggctagggtcattcaagagatcgaccaccccgagtggctggcgaatccggtgctggtgcggaaatcaaacgacaaatatcgcatgtgcgtcgatttcacaaacctaaacaaggcatggccgaaggatgatttccccttgccacggatcgaccaactcgtggattcgacagctggctacgaactcatgagcttcttggatgcgtactccggttaccaccagatccacatgaacccggccgacatccccaagacatccttcatcacaccattcggcaccttttgccacctcaggatgcctttcggcctgaggaatgccggggcaaccttcgccaggcaggtgtacaaggtcctttacaagcagttggggtgaaatgtagagggttatgtcgacgatatcgttgtaaaaagccgcaaggctttcgaccatgtgtccgacctgtaggagaccttcgacaacttacgcgcggcgggtatgacactaaatcctgataagtgtgtttttggtgttcgcgcggcaagttgttgggtttccttgtttctgaaaggggcattccagccgtgcttcgccgtcgttccactcgt

SEQ ID NO: 59695 - DNA, 285 bp, Oryza sativa
  Clone ID: PAT_MRT4530_61295C.1
atggcggcgctaggctacacggcgctagggctctaccggcgacgagaggcgaaggcgagggtggcgacggatagtggagacaccggcgatccttttacaggggctaggaggcggcggcgaaggcccacggcgaccggcgacgcgatggaaggtttagggttcgggagagagagacgaatccgattcgagatcgaatccggcgatttccaaaggaaattagacgacacttccaaaagagaaaagatagaagggatcccgaggatcatttcccctctattgatttga

SEQ ID NO: 59696 - DNA, 4345 bp, Oryza sativa
  unsure (1)..(4345): unsure at all n locations
  Clone ID: PAT_MRT4530_61296C.1
cacatagaaacgcttgagagaggcagtgttccaggaatggtcgaactcttcaccttccagtgtcgccaggcgaaaggagcccgtcctggacttgtgcttgatgaggtacggtccttcccacttcgattcaagcttgccaaccgccactgggttcgctttctttcttaggatgagatggccaggtaacagctccgtcggtcgaacttttttgttgtaagttgccgaagtgcctgtggtgtatttgcgcatgtgttcaagtgcttcgactctcaccccctccaagagttcaagtgacaactcgcgcccctcttcgcccctagagaacatcacccttggtgagttagcccctagctctgttggggtcattgcttcgtcgccatagagaagcatgaatgggctgaacttggttggccttgtgggggtcgtccgaaggacccagagaacagatagcatttcatccggccatttacccttcgctgccccctcaagccttttctttagtgcttataggatcttaccatttgtgcgttcggccgccccatttgactgtgggtgcgcgaccgacgcgaacctgatttccaggtttagcccctcgcacatctctctgaacttgtcagagtcgaattgcttgccgttgtcagtgatgaactattttggcactccgaaacgacaaataatgtttttccatacaaacttttgtactgctgccgaagtgatcgcgccaagtggttcggcctcaatccatcaggagaagtattcgatggccacaattgcaaacttgtacccatttcgcgccaccgggaatagcccaatgatgtccaacccccatctggcgaaaggccaaattggtgcgataggcttcagctcgtattggggcgcagtttggcttcggccatggcgctgacagctttgacatttcttgacttgctcaacacagactttcagcacggtgggccagtacacaccttgtcgaaatactttggaggctactgttcttgcggcctggtgtgcgccacagagcccctagtgtatttccttcgccatttcctcacctttggcaaaagagatgcagcgaagcaaaggttggagcaccccagagcgatatagttggcccgagaccatcttgtactttgcggctctgagctgtaggcgctttgcttctgcttcgtcctccggaagccaaccgcttctgagctaccttacgaatggggttcgccagtcttttggatcttcgcccagttctgcctggtcgattgccataatatccaggctctctacgggcacacttggtgcgtataggacttcaaaaaagatgccaggcgaatgtgggccacacaagcagcagatttcgccaaggcgtctgcttcctcgttctggcctctaggtaagtgttcgaccgttatgccggcgaagcacttttccatagaccaaacagcctccaaatacctcttaattccttcttcttttgcctcaaaggacttatcaacatgacttgctaccaacttgaagtcggttcggatgagcaagcgccgaacccccaatgcttttgccttttttaggcctagaagaatggcttcgtattctgccgcgttgttggttgtgttgaactgcagccttgcggcataccgaatcggcacaccccccggcgaagtgagtactgccgcaacacccgcccccttgtgcgaccacgaaccgtcggaatacatcacccagggttattcaacgggctcgggctcaggggtgaatgccggtgtccattcggccacgaagtcagctagcacttgggacttgatagcagtgcgggcgacaaaatgcaagccgaagggagatagctccgccgcagagctgatctaagcgggcgggctttgcagatattgcttcagctcgttgaacgctgcttggcattcgggtgtccaggtaaacttttccgcgccccggagggttttgaagaagggcaaacctctttcggctgcctttgagaggaatcgactgagtgccgcaattcggcctgcgagcttttgtacttcgcgtacgctcgacgggggcttcatttgctgaatggcatcgattttctcggggttctcctcgatacccctttcaaaaacaaggaaacccaacaacttgcccgcgcgaacaccaaaaacacacttctcaggatttagtttcatacccaccgcgcgtaagttgtcgatggtctcctgcaggtaggacgcatggtcgaaagccttgcggctttttacaacgatttcgtcgacataagcttccacatttcgccccaactgcttgtaaaggaccttgtacaccaacctggtgaaggttgccccggcattcctcaggccgaaaggcatcctgaggtggcaaaaggtgccgaatggtgtgatgaaggctgtcttggggatgtcggccgggttcatgtggatctggtggtagccggagtacgcatccaaaaagctcatgagttcgcagccagctgtcgagtccacgagttggtcgatctgtggcaaggggaaatcatccttcggacatgccttgtttaggtctgtgaaatcaacacacatgcgccatttgccgtttgatttccgcaccattaccggattcgccagccattcagggtggtcgatctcttgaatgaccctagccttgagcaacttttggacttcggcttttgctgcttcttggtgatcaactgacatcttgcgtagcttctgttccttggcttggtatccggcttgactgtcgggtgatgcatgatgagatctgtcgaaacacctcccatctcatcagggccccaggcgaagatatcaatgtttttcttgatcacctctaggatgttctcaacctcttcttcgcctatgtcgccccccagcgatacaagctttgtgggatcggcatcatcaatctgtatcttgattaccttgttgtgaggggcgggctttggcgcgtgcttcgcccggtcatgtggtttggcctcaacattatgcactgctctgttgattatggccagatcgccctttgaagcagccaaaggctgaagccccttgaccacgatcactcctgtcgggccaggcatcttgagtttgagatagttgtggtgggaaatggcttcgaacttgttcaaggtcgcacggccgaagatggcattgtagttgtacgggatgtcgacaatgtcgaacaatatttgctcttcgcgtctgttttcgcctgtgccaaaagctaccagcaattgcgcttggcctagaacttggactgcttctccgccgaaaccacggaagcgagatntcttggcagtaagttcggcggagaagatgacatcggccgaactccctccggcgaagatgacatcggccgaactccctccgtcgactaagattcgccggacctcgaagccagctaactcggccgagatcaccagagggtcttgatgcgggaacattactccttcggcatcttccggcccgaaagagatttgctggcttagatattgcggggccccttcgcccgccaaagtgatgttatgcaccattcggagctgcatcttcttttgccatttcgacagctgattcgtcaggtcggcccttataatcacttggattactctgcgctgcacatcttggcactgttcggctgggggtgcttgttcttgaacggcttcgcgaggtgcttcgacagctgccccctgtggtgtgcaaatagcgtctgtggaaggtgcagtaaaggtcttttcggaccttcttgcgaacgggctgctgatggttgcttgcttgctgggcatcgaactccttgcggagggcttgaacttcttcgacagccatcacaaccttgcccgcacggtcggttctgaatttcctctaagtcatgggagcttggccttgccttggcggttgtccttggttcgccggctgaggctggcgaacagcgagaggaggtggttcggcgacctgagcttgtacttgggcatgggcagcggcgacggaggctttatcatactcagcctaaattgcttgccgtcgcttggaatcctcttcaccccttgcatacccgtcaatgatgcgaagcaggtgttcaagcgtctgcggctctttgttggcgatttttcttgtgagttcgccctcgagtagctcaggcgaagcggcgttgatgacagacgcctcgattatgtcttgtacttgacaccgggtttgcgagaagcgacgcatgtacccccttatcgatttccccggcctctggcgaatgcctagtagatgctgctgtgtcttcggctcctcgtaggtgcctcgttgacacccttcaatggcttcgatttgtcttattagttgtagtactgaacttcgaattttttccacat

SEQ ID NO: 59697 - DNA, 3114 bp, Oryza sativa
  Clone ID: PAT_MRT4530_61297C.1
atggcgaagactatggagcaaggacggcgaagggcggagaatcgcgtggctggcgccgaccgtgggaacctccgagcgaaaccactgagagcgaatgccaccgaagagggtcgtgaaggagaaggttacaaggcgaaaggagagcaaagctggagggggatggccgccgaagagggagtagagccttcggcgcccatcgccggagatggcgaagcgccaccggcttcggcatccgcgccactgttaccgtctttggctcctgccgcttccttggggcagccggcagcggcctcgactgcgctcgccgctgtacaagtcaaccctgaccccgaaacacaggccgaagccgacatggaagccatgcggcaaaacatgacacgactccaagacatgcttcggcagatgcaagaacagcagcaggcgtacgaggcagcgagagtaattcaagtgattacaagggccgacccgccgaatcagctgtcgaaacggcaaaagaagatgcaccttcgaatggtcaacaacatcacttcggcgggtgaaggggccccacattttctgaaccagcaaatctcttttgggccggaagatgctgaaggagtaatgttcccgcatcaagaccctctggtgatcttggctgagatagctggcttcgaggtccggcaaatcttagtggacgaagggagttcggccgatgtcatcttcgccggagcatatgccaagataggattgcccaccctagcccttacccaagcaccggcctcgctccgtggtttcgacggagaagcagtccaagttctaggccaagcgcaattgctggtagctttcggcacaggcgaaaacagacgcgaagagcaaatattgttcgacgttgtcgacatcccgtacaactacaatgccatcttcggccgtgcgaccttgaacaagttcgaagccatttcccaccacaattatcttaagctcaagatgactgacccggcaggagtgatcgtggtcaaggggtttcagccttcggttgcttcaaagggcggtctggccataatcaacagggcagtgcataatgttgaggccaaaccacatgaccgggcgaagcacgcgccaaagcccgcccctcacggcaaggtaatcaagatacagattgatgatgccaaccccacaaagctcgtatcgctagggggcgacatgggcgaagaagaggttgagaacatcctagaggtgctcaagaaaaacattgatatattcgtctggggccctgatgaggtgggaggtgtttcgacagatctcatcatgcatcacctggcagtcaacccggatgccaagccaaggaaacagaagctacgcaagatgtccgctgatctccaagaagcaacaaaagccgaagtccaaaaattgctcaaggctggggtcattcaagagatcgaccacccggagtggctggcgaatccagtgctggtgcggaaatcaaacggcaaatggcgcatgtgtgtcgatttcacagacctaaacaaggcatgttcgaagaacgatttcaccttgccacggatcgaccaactcgtggattcgacagctggctgcgaacttatgagcttcttggatgcgtactccggctaccaccagatctacatgaacccggccgacatccctaagatagccttcatcacaccattcggcaccttttgccacctcaggatacctttcggcctgaggaatgccggggcaaccttcgccaggctggtgtacaaggcttatgtcaacgatattgtcgtaaaaagccgcaaggctttcgaccatgcttccgacctgcaggagaccttcgataacttacgcgcggcgggcaagttgttgggtttccttgtttctgaaaggggtatcgaggcgaaccccgagaaaatcgatgccattcagcaaatgaatcccccatcgagtgtacgtgaagtacaaaagctcgtaggccgaattgcggcactcagtcgattcctctcaaaggcagccaaaagagggggcgggcgttgcggcagtactcacttcgccaggggcgtgccgattcggtatgccgcaaggctgcagttcgacacaaccaacaatgcggcagaatacgaagccattcttctgggcttgaaaaaggcgaaagcattgggggttcggcgcttgctcatccgaaccgactccaagttggtggtaagtcatgttgataagtcctttgaggcaaaagaagaaggaatgaagaagtatctggagactgttcggtttatggaaaagtgcttcgccggcataacggtcgaacatttacctggaggccagaatgaggaagcagacgccttggcgaaatctgctgcttgtcctatacacaccaagtgtgcccatagagagcctggatattatggcaatcgaccaggcagaactgggcgaagatctggaagactagcgaaccccgttcgtaaggtgaggaaatggcgaaggaaatacaccaagggctctgtggcgcacaccaggccgcaagaacagttgcctctaaagtatttcgacaagcctatcgcaccaatttggcctttcgccagatgggggctggacatcattgggccgttcccggtggcgcgaagcgggtacaagttcgcaattgtggccattgaatacttctcccgatggatcgaggccgaaccacttggcgcgatcacctcgacagcagtacagaagttcgtttggagaaacattgtttgccttttcggagtgccaaaagagttcatcactgacaacggcaagcaattcaactctgacaagttcagagagatgtgcgaggggctaaacctggaaatcaggttcgcgtcggtcacgcactcgcagtcaaacggggcgaccgaacgcacaaatggcaagatcctagaagcactaaagaaaaggcttgagggggcagcgaagggtaaatggctagatgaaatgctatctgttctctgggcccttcggacgacccccacaaggccaaccaagctcagcccgttcatgcttctctatggcgacgaagcaatgaccccaacagagctaggggctaattcaccaagggtgatgttctctggggtgaagaggggcgcgaggtgtcgctcgaactcctggagagggtga

SEQ ID NO: 59698 - DNA, 1341 bp, Oryza sativa
  Clone ID: PAT_MRT4530_61298C.1
atggattcgatcatggagccctacgtcgccgaccttctcgctgacgacataacggcctcgatggtcgagctcttgcccggcgacggcggcgcggcgcagatggatgtcggggttcttgacgcgtacctccgcgccatcggcgcgctcccggcgcatccagcggcgcccggcgccgacctggccgccgccgccgaggtggagtccatggcatcgaatgatgacaccaacggcgtactctacgactgggacacgaaggtggatgtcaaggtgccctgtgcccttcttccgccgccgccgggcttccctccgcttcccgttccagggctggccgacgagcccgtgtacgctgcgcccgctcgccatcttcctccgccgccgggcttccctccgcttcccgttccagggctggccgacgagcccgtgtacgctgcgcccgctcgccgtcttcctccgccgccggggttccctcccctccccgttccagcgaaagccgagcccgtgtacgccgctcccgtcgacgaaggcgacgccatcagggcgttcatgcagcagctggagtggagcgagcagtacaacggcgacaacgacgctccggcccccgacaactccacggcgtcgcgcccgcagctgtgcgcgccctacgacgacgacatcgacgccaacctccgtgacatggagaaggacgccgcccagcgcccgtcgccggactacctcgacacggtgcaaggcggtcagatcagcgcggcggcgcgcgcctccctcgtcgcctggatggggaggctcacccaccgctacgaactcgccgccggcacgctccaccgcgccgtgtcctacttcgaccggttcctgtccgtgagagccctgccgagctacaccgcgcaccagctcagcctcgtcgccgccacggccgtgtacacggcggccaagtacgaggaccaggggacggtcttcaagctggacgccagggagatcgccagctacggcgagttcgcgtcggcgcaggaggtgctcgcgatggagagggagatgatggcggcactgggctatcggctgggcggcccgaacgcggagacgttcgtggagcacttcacccggtacagcaaggggaaggaagagctgcgcgtgcagcggctggcgtgtcacgtcgccgaccggtcgctggagagctacggctgcctgggctacctaccgtccatggtggcggcggcggcgatctccatcgcgaggtggacgctgaacccgccgggtgcgctgccgtggagctcggagctgcaggagctgacggggtacagctctcaggacatctccagctgcatcctcaccgtgctcaacacgcagtga

SEQ ID NO: 59699 - DNA, 1001 bp, Oryza sativa
  Clone ID: PAT_MRT4530_61299C.1
ggaagggcgatcggtgcgggcctcttcgctattacgccagctggcgaaagggggatggcgaattcgagctcggtacccggggatcctctagagtcgacctgcaggcatgcaagctttcattcaacaatttagccaaccccacagcatttcaggcaccaaccgttccgccgcaagcaccaacactaggcttcgtggcaaaccaagcaccaaaccagtccgccatggcatggccccagccaacattcgacccatccatggcagctcaccaagcatcaccaatcggagctgggcagccgaacacccaaggtgccgtgaacagggcagggggcgaaaaggggctactgctgagtgggggaatcaagacccgtccaatcccaccccagttcaagttcccacccgtcccacgctattcaggcgaaattgacccaaaggaattcctctctatctatgagtctgcgatcgaagcggctcatggcgacgaaaataccaaggcaaaggtaatacatcttgctctaaacagcatcgcccgttcttggtacctcaatttagcagctaatagcatctactcatgggagcaattgcgcgatgtctttgtccttaactttcgagtcacctacgaggagccgaagacgcagcaacatctactcggcattcgccagaggtcgggagaatcgataagggagtacatgcgtcgcttcttgcaagcccggtgtcaagtacaagacataaccgaggcgtctgtcatcaatgccgcttcggccgggatactcgagggcgaactcacaaaaaaaatcgccaacaaagagccgcagacgcttgaacacctgcttcgcatcattgacgtgtacgcatggggcgaagaggattccaagcgatggcaagcaattcaagctgagtatgataaagcctccatcgccgctgccaaagcccaagtacaagctcaggtcgccgaaccacctcctctcgctgttcgccagcctcagccggcgaaccaaggataa

SEQ ID NO: 59700 - DNA, 4929 bp, Oryza sativa
  Clone ID: PAT_MRT4530_6129C.1
atggagaaggacggcgagacggggagcgtcgcctcctcgtctacggcgatggtagcacgccccagggcgcgctccaagctgcgggcgtgctcttgtgtcacccgcccgtcgtccccgatccagagactccagcccaacgttggctggatgacgtggccgacttgggggccggatgcccgcctcagtatcgagcgccggcgcaatggtcgtcgtgctgcccacgcaacggaaggcgcttcctcgtccggagcgccacttcggttcgggcgcgggggccagcctcctgtgcccccggttggtggtgtcggctgtcgagcctttgtggcgagccttcggaacgtccgttggcccccaaggttccggcccaccatcaccgagaaatatgacggaagcgtcaaccccgccgagtttctccaggtctacacgaccgggatcgaggccgctgggggtgacgacagggtcatggcgaacttcttccccatggccctgaagggacaggcgcggggttggctaatgaacttgccgcccgcgtcgcggttctgtcaagtccgcaacaccataccatgcatccccgcacacgcggtaatctacgcgttcagggggggcgtgcggcacaaccgcatgctcgaaaagatcgcctccaaggagccccagaccaccgcggagctttttcagctcgcggaccgtgtggctcgcaaggaggaggcctggacctggaactccaccggttccggtgtggcagcttcggccgcccccggatccgccgctcggtcagggcggcgggacaggaggaggaagaagaggtcggcccattccgacgacaagggtcacgtcctcgccgtcgagggcgcttcgcgggccacccgaaaggggaggcctgcgagcgacaaaaagaaggaggccggcgcttccagcagggagcgcccgaccggcaagtggtgcaccgtgcacaacacctccctccacgacctcgcggactgccgcgcggtcaaaagtttggctgagcggatgaggaagtgggaggaggagaggaggcaggagcgccgtgagggcaaggccccggcggctccctccggcaaccggcgaagtgaggccaagcagaaggcccccgccgaggacatcgacgatggcgacgatgacctagggttccaggagcctggggccaccatcgccaccgtcgatgggggagcatgcgctcacgcttctcgtcggagcctcaaggccatgaagcgagagcttctggccgcggcccctacccatgaggcgacgcggcgggcgcggtggtcggaggttgccctcaccttcgaccagaccgaccacccgccgtgcattgcccggggaggacagatcgcgatggtggtttcccccaccgtttgcaacgtgaagttggggcgtgtcctcatagacgggggtgcagccctcaacatcctttcccccgcagcctttgacgccatcaaggccctggggatggtgcttcggtcgtcccagccgattataggtgtgacgccggggcacacttggccgctaggtcatatcgacctcccggtcaccttcggtggatccgccaacttccgcacggagcgggtgaacttcgatgtggcggacctcagtctgccctacaacgcggtcctggggaggcccgcgttggtgaagttcatggcggcggtccactacgcctacctccagatgaagatgccaggccccggtggccccatctctgtccatggcgacctcaaagtcgcgcttgcttgtatggagcagcgcgcggaccacctcgccgccgcgtccaagcccgagggtggcaacgagaggctcagcacctccgtcccagccgccccgaggcagcggatgatcacgtgcgacgaggtcccggaagacgcgctcgtctccttcctgcgggcaaacgccaacgttttcgcctggagaccggcggacatgcccggggtccccagggaggccccggaacatcaagccttcatccgcgaggaggtggcgcgacttctggaggccggattcatccgtgaggtcatccatccggagtggctggcgaacccggtcatcgttcccaaggcgaacggcaagcttcggatgtgcatcgactacaccgaccttaacaaggcatgtcctaaggacccttaccccctgccacgcatagatcagattgtcgactccaccgcggggtgcgaccttttgtgttttctagatgcatactctggtcctacttttcaacgtactactcgaatttctttgggtagccaaataggacgtaatgttgaggcctatgttgatgacttggttgtgaagacgcgcaaccaagagaccttactctcggatctagcggaaactttcgaaagtctccgctccgcccgcataaagctgaaccccgataagtgcgtgttcggcgtgcctgcgggcaagcttctcggggatgtgcaatgcgtcaccggctgcatggccgccctaagtcggttcatatcgaggctgggagagaaggcgctacccctatttaagctcctcaaacgctccgggccgtttatctggacggaggaggctgagcgggccttcactcagttgaaggcgtacctcagttctcccccagtcctggtcgccccggagccagatgagccgctgctactttacctggcggcaaccccgcaggtggtcagcgcggcgttggttgtggagcacgacgaggacaaccctcaccccgcgcatccccaccctgtgtcgactcgacccgggagagagcagggaggagaggcccccgagccgaacggcggcccgaggcccccgacggccggagctggccctccgcctgcttgtcagacggtgccaggcgcccccgacccccaggatggccccggggccactgcgggaaggccgcgcctgtcgccctccgaccccgaggtcgtcggcacagaagccgagtgcgccccgcacgacctctcggacgaagagcgccctggagatgcggcccctagcgaagaggatcggccccgccgaaaggtgcagcggcccgtctacttcgttagcgaggccctccgggacgctaagacccgataccctcaggcccagaagatgctttacgctattctgatggcttcgaggaagttgcgccattattttcaggcgcatcgggtcacggtggttacgtcttatcccctcggccaaatcttgcataaccgagagggtactggacgggtggtgaaatgggcaatcgaactctctgagtttgatttgcactttgaaccacgccacgcgatcaagagccaggccctcgccaactttgtggcagagtggaccccggcccctgagcccatctccgtccccgagaccagctcgggcccctcgcagctgcctcccaccgcctactgggtgatgcagttcgacggctccctatctcttcagggcgccggtgcgggggtcacgttaacctcgccaaacggagacgtcctcagatacctggttcgcctcgacttccgggcgaccaataatatggcggagtacgagggactccttgcgggactcagggtggcagctggactggggatccgccgcctcctggtgttaggcgactcccagctggtcgttaaccaggcgtacctcacagataagactctacccgaggaccgcgaagggagtgaacgcgtccagcgcatctccaagcgctacgtgctggtggaagggaccctctatcggcgcgcggctaacggagtcctcctgaagtgcattcctcaggaacaaggcgtcgagcttcttgccgatatccatgaaggcgagtgcggagcccactccgcctcacgcaccttggctggcaaggcctttcgccagggtttctattggccgacggctctcaacgatgcggttgacctggtccggcggtgcagggcgtgccagttccacgccaagcaaacccatcagccggcccaggccctgcagaccatacctctttcatggccgtttgctgtctgggggctcgatatcctgggtccgtttaggcgggccccgggcggtttcgagtatctgtatgtcgctgtcgacaagttcactaagtggcccgaggcttacccggtcatcaagatcgataagcacaccgcgcttaaattcatcaggggcattactgctcggtttggggtgcctaatcgtatcattacggataacggcacccagttcactagtgaactcttcggtgactactgcgaagatatgggcatcaagctctgcttcgcctctcccgcccaccccagaagcaatggccaagtggagcgcgccaacgcagaaatcctcaagggcctcaaaaccaaaaccttcaatatcctcaagaagcacggcgactcgtggatcgaggagttaccagcggtgctctgggcgaaccgaaccacgccaagccgagcaaccggggaaacgcctttcttcctcgtctacggcgcggaggcagttctcccattcgagctcaccctgaggtcccctcgggccaccatgtactgcgaggccgatcaagatcagctttgcagagatgacctcgactacttggaagagcgaaggcggcgcgcggccctccgagccgcgcgctaccagcagagcctgcggcgctaccatcagcgccacgtccgggcccgatcactctgcgtcgacgacctcgtactacgccgcgtccaaacgcgtgctggactgagcaaactctcaccaatgtgggagggtccgtatcgagtgatcggcgtcccccggccgggctccgttcggctggccacggccgacggcacagagctgcctaatccgtggaacatcgaacaccttcgtcgcttctacccctacacgctcgtgctcgatcctgccctcggtggcccgggccggctaaaatcgccaaacggggcccagaaccgagccgtgccccggggcgtggcactagccccgacccgcgccatttga

SEQ ID NO: 59701 - DNA, 403 bp, Oryza sativa
  Clone ID: PAT_MRT4530_612C.1
tcatcatttctaattccctctcgatgtgctttgcagtgtatggtagatctgggaggcgtgcgggttctttctctaggtaagtccttagtgatgatactccaaaagaggtaacaagcttgccgagagctaggactactgctgcctctgccattgtctgtcttcacttactgactgatgtgttacttcttgtggatatgcaagagtaaccggtaagagctccttttcttttagcctgttgaacaaaatatgatatcccagctttattgtctgtcttagtgaggcactgaaaatttgaaatgaacatggtggtgtatgttaatgctggttggtactacttgctaatttccgttttagtacgccaagctatgtatttcattaactaggaatttgatgactttcggta

SEQ ID NO: 59702 - DNA, 1173 bp, Oryza sativa
  Clone ID: PAT_MRT4530_61300C.1
atggattcgatcatggagccctacgtcgccgaccttctcactgacgacataacggcctcgatggtcgagctcttgtccggcgacggcggcgcggcgcagatggatgtcggggttcttgaagcgtacctccgcgccatcggcgcgctcccggcgcatccagcggcgcccggcgccgacctggccgccgccgccgaggtggagtccatggcatcgaatgatgacaccaacggcaactgggacacgaaggtggatgccaaggtgccctctgcttttcttccgccgccgccgggctttcctccgcttcccgttccagcgctggccgacgagcccgtgtacgccgctcccgtcgacgaaggcgacgctatcagggcgttcatgcagcagctggagtggagcgagcagtacaacggcgacgacgacgctccggcccccgacgactccatggcgtcgcgcccgcagctgtgcgcgccctacgacgacgacatcgacgccaacctccgtgccatggagaaggacgccgccgagcgcccgtcgccggactacctcgacacggtgcacaacggtcagatcagcgcggcgtcacgcgcctccctcgtcgcctggatggggaggctcacccaccgctacgagctcgccgccggcacgctccaccgcgccgtgtcctacttcgaccggttcctgtccgcgagagccctgccgagctacaccgagcaccagctcagcctcgtcggcgccacggccgtgtacacggcggccaagtacgaggaccaggggacggtcttcaagctggacaccagggagatcgccagctacggcgagttcgcgtcggcgcaggaggtgctcgcgatggagagggagatgatggcggcactgggctatcggctgggcggcccgaacgcggagacgttcgtggagcacttcacccggtacagcaaggggaaggaggagctgcgcgtgcagcggctggcgcgccacatcgccgaccggtcgctggagagctacggctgcctgggctacctgccgtccgtggtggcagcggcggtgatctccatcgcgaggtggacgcttaacccgccgggcgcgctgccgtggagctcggagctgcacgagctgacggggtatagctctcaggatatctccagctgcgtcctcaccgtgctcaacacgcagtga

SEQ ID NO: 59703 - DNA, 2817 bp, Oryza sativa
  Clone ID: PAT_MRT4530_61301C.1
atggccgccaaagagggagcagaaccctcggcgcccatcgccgaagatgggggagcgccatcggcttcagcacccgcgccaccactaccgccttcggctcctgccacctcgatggggcaggtgccgaacacggctgacgcggcggcaagggcactccaaaccagggcggagatcctttcgacaagccaactgctgttgccccaagccacttcgtcacagccggcaacggtttcgactgtgctcgccgccgcacaagtcaaccctgacctcggaacacaagccgaagctgacatgaaggccatgcgacagaacatgacacgactccaagacatgcttcgccagatgcaagaacaacagcaggcgtacgaggcggctatgtcccaccccaagtctgtccacaagcaccgatccagccccttcagccacaagccacgcaagcgccagtatacttcatcgggcagccttcgaccgcagctatgcatctggcccctcacgtgcagctgcaagctcagccggtcgctacccaagtacaccctcaaccgcctggccaagtgtcacaaacaatggcaaaaggggcttcgactctacaggcgctgctccaagctttccttcaacaactcagccaaccccacatcatttcagttcgacttcatcaatgctgctcaggcaccaagttcggccgcaagccccaacgccaggcttcggagcaaaccaagcaccaaaccaggcgaaactgacccaaaggagttccactccatctacgagtccgcgatcgaagctgctcatggagacgaaaataccaaggcgaagaggctgggggaatcgacagatctcatcatgcatcacctagcggtcaagccggatgccaagctaaggaaacagaagctacgcaagatgtctgctgatcgccaagaagcagcaaaaggcgaagtccaaacattgctcaaggctggggtcattcaagagatcgaccaccccgagtggctggcaaatccagtactgatccacatgaacctgtccgacatccccaagacagccttcatcacaccattcgacaccttctaccacctcaggatgcctttcggcctgaggaatgccggggcaaccttcgccaggctggtgtacaaggtcctttacaagcagttggggcgaaatgtggaggcttatgtcgacgatatcatcgtaaaaagccgcaaggctttcgaccatgcgtcccacctacaggagaccttcgacaacttacgcgcggcggcaaatgaagcccccgtcgagcgtacgcgaagtacaaaagctcgcaggccgaattacggcactcagtcgattcgcttcaaaggcagcttaaagaggcttgcccttcttcaagacccttcggcgagcgggaaagtttacctggacacccgaatgccaagcagcgttcgacgagctgaagcaatatctgcaaagcccgcccgctttgatcagcccaacaccaagaagcaaactgctactctacctggcagcttcgccagtggcgggcagtgcagcccttgtccaggaaacagagtcgggccagaaaccagtttatttcatctccaaagccttgcaaggagcgaagataagatacatcgaaatggagaagcttgcttacgccctatcctccggggtaaggaagttaccggcaggctcagcaagtgggcggcggagctatctcccttcgacttgcattttgttgcccgcattgctatgaagtcccaagtcctggctgacttcatagccgaatggacaccggcattcgcccctgaacccgagcctgtcgaacaaccctgggtgatgtactccgacggctcatggtcgcacaagggggcaggcgctgcggcagtgcttacttcgccagggggcgtgccgattcggtacaccgcaaggctgcagttcgacacaaccaacaacgcggcagaatacgaagctattctgctaggcctaaaaatggcgaaagcattgggggaatgcagaggtatctggaggctgttcgatctatggaaaaagtgcttcgccggcataacggtcgaacacttacctagaggccagaatgaggaagcggacgccttggtgaaatctgctgcttgtgggggcccgcagtcgcctggcatcttttttgaggtcttgtacacaccaagtgtgcccatagagagcctggacatcatggcaatcgaccaggcgaagctgggcgaagacccagaggattggcggaccccgtttgtaaagtacctcaagaacggctggctcccagaggatgatgcagaagcaaaacgcctacagctcagagcggcaaagtacaagctggtctcaggacagctatatcgctccggggaaatgcgaaagctgtcagcgccatggcagaagccaaaccgcgccccaatacgagttgcagcctatcgcaccaatctggccattcgccagaagttcgtatggaagaacatcgtttgtcgtttcggaataccaaaagaattcatcactgacaacggcaaccagttcgactctgacagattcagagaaatgcgcgaagggctaaacctggaaattaggttcgcttcagtcatgaacgacaagattcttgaggcgctcaaaaaaaggcttgagggggcggcgaaggccgggcagaggcagcgcgcatggcgtggctgggcgcagccgagacggcgcgagaccggcacggtagcggccgggaaaggtgcgcgaggctccggcgaccctccaatttcggcggcggcgcaaggcggagcaggggcgagcgttgcggcatggcaacgccatggccaagctcaggctgcaagtggctag

SEQ ID NO: 59704 - DNA, 4965 bp, Oryza sativa
  Clone ID: PAT_MRT4530_61302C.1
cacatagaaacgcttgagagaggcagcgttccaggaacgattgaactcttcgccttctagtgtcgctaggcgaaaggaccccgtcctggacttgtgcttgatgaggtacggtccttcccacttcgattcaagcttgccgaccgccaccgagttcgctttcttccttaggacgaggtggccgggcaatagctccgtcggtcgaacttttttgttgtaagttgccgaagtgcctgcgacgtatttgcgcatctgttccagtgcttcgactctcaccccctccaggagttcgagcgacacctcgcgcccctcttcgccccaagagaacatcacccttggtgaattagcccctagctatgttggggtcattgcttcatcgccatagagaagcatgaacaggctgaacttggttggccttgtgggggtcgtccgaagggcccagagaacagatagcatttcatctcgccatttacccttcgctgccccctcaagccttttctttagtgcttctaagatcttaccatttgtgcgttcggccgccccgtttgactacgggtgtgcgatcgacgtgaacatgatttccatgtttagcccctcacgcatctctctgaacttgtcaatgtcgaattgcttgccgttgtcagtgatgaactcttttggcactccgaaacggcaaacaatgtttttccatacgaacttctaaactgctgccgaagtgatcgcgccaagtggttcggcctcgatccatcaggagaagtattcaatagccacaattgcgaacttgtacccgtttcgcgccaccgggaacggcccaatgatgtccagcccccatctggcgaaaggccaaattggtgcgataggctgcagctcttattggggcgcagtttagcttcggccatggcgctgacagctttcgcatttcttgacttgctcaacacagactttcagcacggtgggccagtacacaccttgtcgaaacactttggaggcaactgttcttgcggcctgctgtgagccacaaagcccctggtgtatttcctttgccatttcctcaacttcggcgaatgagatgcagcgaagcaaaggttggagcaccccagatcgatatagttggcccgagaccatcttgtactttgcggctctgagctgtaagctctttgcttctgcttcgtcctccggaagccagccgctcttgaggtaccttatgaacgggggtcgccagtcttctggatcttcgcccagttctacctggtcgattgccataatatccaggctctctatgggcacgcttggtgcgtgtaggacttaaaaaagatgccaggcgaatgcgggcccctacaagcaacagatttcgccaaggcgtctacttcctcgttctggtctctaggtaagtgttcgaccgttatgccggtaaagcatttttccatagaccgaacagcctccaaatacttcttcaatccttcttcttttgcctcaaaggacttatcaacatgacttgccaccaacttggagtcggttcggatgagcaagtgccgaacccccaatgctttcgcatttttcaggcccagaagaatggcttcgtattctgccgcgttgttggttgtgtcgaacggtgtccattcggccacgaagtcagctagaacttgtgacttgatagcagtgcgagcgacaaaatgcaagtcgaagggagatagctccgccacctatttgctgagccggccagtaacttccttgccccggagtaccacgcccaaagggtactgtgatggcactgtgactttgtgggcctggaagtagtgtttaagcttgcgcgaagccatcaccagtgcgtaagcaagcttttctatttcaatgtatcttatcttcactccttgcaaggcttaggagatgaaataaactggtttctggcctgactctgtctcttggacatgggcagcagtgactgccactagcgaagctgccaggtacagtagcagttcgcttcctggtgctgggcagatcaaatcgggtgggctttgcagatattgctttagctcgtcgaacgctgcttggtattcgggtgtccaggtgaattttcccacgccccggagggtcttgaagaagggcaaatttttttcggctgcctttgagaggaatcgactgagtgccgcaattcggcctgcgagcttctgtacttcacgtacgctcgacgggggcttcattccattttctcgtggttcgcctcgataccccatttagaaacaaggaaacccaacaacttgcccacgcaaacaccaaaaacacacttctcaggatttagtttcatacccgccgcgcgtaagttgtcgaaggtctcctacaggtcggacgcatggtcgaaagccttgcggctttttacgacgatatctggtggtagccggagtacgcatcaaagaagctcatgagttcgcagccagctgtcgaatccacgagttggtcgatccgtggcaagggaaatcgtccttcggacatgccttatttaggtctatgaaattgacacacatgcgccatttgccgtttgatttccacaccagcaccggattcgccagccagtcagggtggtccatctcttgaatgaccccagccttgagcaattgttggacttcggcttttgctgcttcttggcgatcagcggacatcttgcgtagcttctgtttccttggcttggcatccggcttaactgccaggtgatgcatgatgagatctatcgaaacacctcccacctcatcagggccccaggcgaagagatcaatgttttaattgagcacctctaggatgttctcaactttttcttcacccatgtcgccccccagcgatacaagctttgtgggatcggcatcatcaatctgtatcttgattaccttgccatgaggggcgggctttggcgcgtgcttcgcccgatcatgcggttcggcctcaacattatgcactgctctgttgattatggccagatcaccctttgaagcggccgaaggctaaagccccttgaccacgatcactcctgccgggccaggcatcttgagcttgagataattgtggtgggaaatggcttcaaacttgttcaaggtcgcacggccgaagatggcattgtagttgtacgggatgtcgacaatgtcgaacaatatttgctcttcgcgtctgtttttgcctatgccgaaagctactagcaattgcgcttggcctagaacttggactgcttctccgccgaaaccacaaagcgaggccggtgcttgggtaagggctagggaaggtaatcccatcttggcatatgctctggcgaagatgacatcggtcgaactccctccgtcgactaagattcaccggacctcgaagccagctatctcggccgagatcaccagagggtcttgatgcgggaacattactcctttggcgtcttccgacccgaacgagattttctggtttagatattgcggggccccttcgcccgccgaagtgatgttgtggaccattcagagctgcatcttcttttgtcgtttcgacagttgattcggcggatcggcccttgtaatcacttggattactctgcactgcacatcttggcgctgttcggccgggggtgcttgttcttgaatggcttcgcgaggtgcttcgacagctgctccctgttgcggccttggatcttgcgcgttgccacgctgccgaatatttcggcattgctcggtggtgtgcaaagagcgtccgtggaaggcgcagtaaatgtcttttcggaccttcttgcgagtaggctgctgatggttgcttgcttgctgggcatcgaactccttgcggagggcttgaacttcttcgacagccatcacagccttgcccgcacagtcggttctgaatttcctccaagtcatgggagcttggccttgccttggcggttgtccttggttcgccggctgaggctggcgaacagcgagaagaggtggttcggtgacctgagcttgtacttgggcttgggcagtggcgacggaggctttatcatactcagcctgaattgcttgccgtcgcttggaatcttcttcgccccttgcgtacccgttgatgatgcgaagcaggtgttcaagcatctgcggctctttgttggcaatttttcttgtgagtacgccctcgagcagccctgccaaaatggcgttgatgactgacgcctccgttatgtcttgtacttgacaccgggcttgcgagaagcgacgcatgtactcccttatcgattcccccggcctcaggcaaatgccaagtagatgctgctatgtcttcagctcctcgtaggtgcctcgaaggcaccttgctgcggatatggtgtggcgaagggcgaggtcacggcctgcacgtgaggttgaaccacggtgttcagttgcctggctctgattggtgctgtttggtgagccgccatggatgggtcgaacgttggctggggccacaccatggcggcctggtttggtgcttggtttgccccgaagcctggtgttgtttcttgcggccgaaggtttggtgcctgagcagtgttgatgaagtcgaacttgacttgtgttccccttcggctaggctgaaggggttgtacctgaaatgttgtggggttggctgaattgttgaaggaaagcttgaacctacaccgaagccccttctgccatcgcttgtgacacttggccaagcggttgagagtgtgtttgggcagcgaccggctgagcttgcagctgcacgtgaggggccggatgtattgctgcggtcgaaggctgcctggtgaagtatactggcgcttgcgtggcttatgacggaaggggctggatcggtgcttgtggatagacttgggtgggatgtagccttccgaatactggaggattggggcttgggttgagcttggtgctaaggtgctttcgatctttgagctctttctccctttctcaaatccctcctcattctttctgtggtggatcttggtggttgtgg

SEQ ID NO: 59705 - DNA, 965 bp, Oryza sativa
  Clone ID: PAT_MRT4530_61303C.1
atgcgggaacattactccttcggcatcttccggcccgaaagagatttgctggttcagatattgtggggccccttcgcccgccgaagtgatgttgtggaccatttgatgctgcatcttcttttgtcatttcgacagctgattcggcgggtcggcccttgtaatcacttggattactcgacgctgcacatcttggcgctgttcggccgggggtgcttgttcttgaacgtcttcgcgaggtgcttcgacagctgctccctgctgcggccttggatcttgcacgttgccacgctgccgaatgtttcagcattgctccgtggtgtgcaaagagcgtccgtggaaggcgtagtaaaggtctttttggaccttcttgcgaacgggctgctgatggttgcttgcttgctgggaatcgaactccttgcggagggcttgaacttcttcgacagccatcacagccttgcccgcacggtcggttctgaacttcctccaagttatgggagcttggccttgccttggcggttatccttggttcgccggctgaggctggcgaacagcgagaggaggtggttcggcgacctgagcttgtacttgggctttggcagcggcgatggaggctttatcatactcagcttgaattgcttgccatcgcttggaatcctcttcgccccatgcgtacacgtcaatgatgcgaagcaggtgttcaagcgtctgcggctctttgttggcgattttttttgtgagttcgccctcgagtatcccggccgaagcggcattgatgacagacgcctcggttatgtcttgtacttgacaccgggcttgcaagaagcgacgcatgtactcccttatcgattctcccgacctctggcgaatgccgagtagatgttgctgcgtcttcggctcctcgtaggtgactcgaaagttaaggacaaagacatcgcgcaattgctcccatgagtagatgctattag

SEQ ID NO: 59706 - DNA, 1429 bp, Oryza sativa
  Clone ID: PAT_MRT4530_61304C.1
caagaagacagatagagaaggagaaaacccaccgcgcgcggcggcggcggcggcgagggtcgacgaggcgacgcattttggtgatctcgtggtgtcacggtgcgtgtgcgatgacgaggcggtgctcgcactgcagcaacaacggccacaacgcgcggacctgccccgcccgcggcggcggtggaggcggaggcggggtgaggctgttcggcgtgcggctcacgtcgccgccggaggtggcgatgaagaagagcgcgagcatgagctgcatcgcgtcgtcgctcgggagtggcggtgggtcagggggttcgtcgccggcgggaacgggaaggggaggaggaggagggggagagggcgcggccgggtacgcgtccgacgaccccacgcacgcctcctgctcgacgaatggccgcggcgagcggaagaaaggtacaccttggactgaagaagagcatagaatgtttctaatgggtctgcagaagcttggtaaaggagactggcgtgggatctctcgtaattttgttgtttccaggacaccaactcaggtggctagccatgctcaaaagtacttcattagacagacaaactcatcaagaaggaagaggaggtcaagcttgtttgacatggtcccagaaatgcccatggacgaatccccagtggtcgtagaacagcttatgctccatagtactcaagacgaagccacaagctcaaatcaattgccaatatcacatcttgtgaaacagaaggaacctgagtttgctagacacctgtcggatttgcagctaaggaagcatgaggaatctgagttcacagaaccttcactagcagcactagacttggagatgaaccatgctgcacctttcaagactaaatttgttctgacaatgccaacattctacccggcattaatacctgttccactaactctttggcctccaaatgttgctaatgtgggtgaatcaggcacaaatcatgaaatcctaaagcccactccagtgaatggaaaggaggtgatcaataaggctgatgaggttgttggcatgtccaagcttaccataggtgacggcagctctaactccatagaaccctctgctctttcccttcagcttactggaccgacaaatacaagacaatcagcttttcatgtgaacccaccaatggctggacctgacctaaataagagaaacaacagcccaattcatgcagtttgagaaagcatggaaaaggcctgctgggtcaaatcttatagattatatattacttccccaataccatagaatgttgcataaggtcctgagcatgtacttttgtagcagcttctgagttgtatcaccatattatgttctttgatatcgataatgaaaaatgttgtatgcatatacctttgataatacatcctccatcctttggagaaaatggttttcagttt

SEQ ID NO: 59707 - DNA, 3243 bp, Oryza sativa
  Clone ID: PAT_MRT4530_61305C.1
atggccgccaaagagggagcagaaccctcggcgcccatcgccgaagatgggggagcgccatcggcttcagcacccgcgccaccactaccgccttcggctcctgccacctcgatggggcaggtgccgaacacggctgacgcggcggcaagggcactccaaaccagggcggagatcctttcgacaagccaactgctgttgccccaagccacttcgtcacagccggcaacggtttcgactgtgctcgccgccgcacaagtcaaccctgacctcggaacacaagccgaagctgacatgaaggccatgcgacagaacatgacacgactccaagacatgcttcgccagatgcaagaacaacagcaggcgtacgaggcggctatgtcccaccccaagtctgtccacaagcaccgatccagccccttcagccacaagccacgcaagcgccagtatacttcatcgggcagccttcgaccgcagctatgcatctggcccctcacgtgcagctgcaagctcagccggtcgctacccaagtacaccctcaaccgcctggccaagtgtcacaaacaatggcaaaaggggcttcgactctacaggcgctgctccaagctttccttcaacaactcagccaaccccacatcatttcaggaccgcagttcgacttcatcaatgctgctcaggcaccaagttcggccgcaagccccaacgccaggcttcggagcaaaccaagcaccaaaccaggtcgccatggcatggccccagccgatgttcgacccatccattgtggctcaccatgcatcaccaatcggagccgggcagccgaacaccgtggcccagcctcacgcgcaagccatgacttcacctttcgccatgccgtatccgcatcaaggtgccgtgaacagggcagggggcgaaaagggggtaccactgagcgggggaatcaagatccgtccaatcccaccccagttcaagttcgcacccatcccatgctattcaggcgaaactgacccaaaggagttccactccatctacgagtccgcgatcgaagctgctcatggagacgaaaataccaaggcgaaggtaatacatctcgctctagacggcatcgcccgttcttggtacttcaatttactagctaacaacaattactcatgggagcaattgcgtgatgtctttgtccttaactttcgaggcacctacgaggagccgaagacgcagcagcatttactcggcattctccagaggctgggggaatcgacagatctcatcatgcatcacctagcggtcaagccggatgccaagctaaggaaacagaagctacgcaagatgtctgctgatcgccaagaagcagcaaaaggcgaagtccaaacattgctcaaggctggggtcattcaagagatcgaccaccccgagtggctggcaaatccagtactgatccacatgaacctgtccgacatccccaagacagccttcatcacaccattcgacaccttctaccacctcaggatgcctttcggcctgaggaatgccggggcaaccttcgccaggctggtgtacaaggtcctttacaagcagttggggcgaaatgtggaggcttatgtcgacgatatcatcgtaaaaagccgcaaggctttcgaccatgcgtcccacctacaggagaccttcgacaacttacgcgcggcggcaaatgaagcccccgtcgagcgtacgcgaagtacaaaagctcgcaggccgaattacggcactcagtcgattcgcttcaaaggcagcttaaagaggcttgcccttcttcaagacccttcggcgagcgggaaagtttacctggacacccgaatgccaagcagcgttcgacgagctgaagcaatatctgcaaagcccgcccgctttgatcagcccaacaccaagaagcaaactgctactctacctggcagcttcgccagtggcgggcagtgcagcccttgtccaggaaacagagtcgggccagaaaccagtttatttcatctccaaagccttgcaaggagcgaagataagatacatcgaaatggagaagcttgcttacgccctatcctccggggtaaggaagttaccggcaggctcagcaagtgggcggcggagctatctcccttcgacttgcattttgttgcccgcattgctatgaagtcccaagtcctggctgacttcatagccgaatggacaccggcattcgcccctgaacccgagcctgtcgaacaaccctgggtgatgtactccgacggctcatggtcgcacaagggggcaggcgctgcggcagtgcttacttcgccagggggcgtgccgattcggtacaccgcaaggctgcagttcgacacaaccaacaacgcggcagaatacgaagctattctgctaggcctaaaaatggcgaaagcattgggggaatgcagaggtatctggaggctgttcgatctatggaaaaagtgcttcgccggcataacggtcgaacacttacctagaggccagaatgaggaagcggacgccttggtgaaatctgctgcttgtgggggcccgcagtcgcctggcatcttttttgaggtcttgtacacaccaagtgtgcccatagagagcctggacatcatggcaatcgaccaggcgaagctgggcgaagacccagaggattggcggaccccgtttgtaaagtacctcaagaacggctggctcccagaggatgatgcagaagcaaaacgcctacagctcagagcggcaaagtacaagctggtctcaggacagctatatcgctccggggaaatgcgaaagctgtcagcgccatggcagaagccaaaccgcgccccaatacgagttgcagcctatcgcaccaatctggccattcgccagaagttcgtatggaagaacatcgtttgtcgtttcggaataccaaaagaattcatcactgacaacggcaaccagttcgactctgacagattcagagaaatgcgcgaagggctaaacctggaaattaggttcgcttcagtcatgaacgacaagattcttgaggcgctcaaaaaaaggcttgagggggcggcgaaggccgggcagaggcagcgcgcatggcgtggctgggcgcagccgagacggcgcgagaccggcacggtagcggccgggaaaggtgcgcgaggctccggcgaccctccaatttcggcggcggcgcaaggcggagcaggggcgagcgttgcggcatggcaacgccatggccaagctcaggctgcaagtggctag

SEQ ID NO: 59708 - DNA, 314 bp, Oryza sativa
  Clone ID: PAT_MRT4530_61306C.1
acgttaacggtgccttaatcttttttaaataatcttttttttgttcacataattgagattctttttttttttttccgagaaacgaggccaaatggttccaaaaactgagcacacttaaaccctcaacccccggaacgatgcagcatttttcccaaaaaagcaaaggaagggcacccttgcgcgggcttgaaaaagctggcccagttcccaaccccaactgattgacctggacccagatgaaacaaggcggcaggctgatctggaactgatcgtggccaccccacacgaaaggcgacccatgggcaacaaccttg

SEQ ID NO: 59709 - DNA, 365 bp, Oryza sativa
  Clone ID: PAT_MRT4530_61307C.1
ccgcgacagcggcatcgtcactcgagttaggatctggctccgcgacagggagcaccacggtgttcgccgtcgccgactcgatgggcatctcggccaccatctacatctcggccgcctcgtccccaccgccaccgccaccgccgccgtcactccccgccgccatcgtccccatgtcagtcgcggataagagagagataagggagagagagggggaggaagaaggggaggagagggaggatgacatgtgggtcccacattactttttttttattctagcgccacgtaagtgccacgttggacaaagactcggtcaagaccgccacgtaggcgtcacgtcagccaaaaccacctctaaaaccacctag

SEQ ID NO: 59710 - DNA, 658 bp, Oryza sativa
  Clone ID: PAT_MRT4530_61308C.1
ctagggttgttcgacgggctcgggctcagcggcaaacactggtatccattcggccacgaagtcagttagaacttgggacttgatagcagtgcgagtgacaaaatgcaagtcgaagggagatagctccgccgcccatttgctgagccgcccagtgacttccttgcctcggagtacttcgcccaaagggtattgtgatggcaccgtgactttgtgggcctggaagtagtgtttaagcttgcatgaagccatcaccagggcgtaagcaagcttctccatttcaatgtatcttatcttcactccttgcaaggcttcggagacgaaataaactggtttctggcctgactctgtctcttggacaagggcagcactgactaccactggcgaagctgccaggtatagtagcagttcgcttcctggcgccgggatgtgtgtgaaccctcgtccaggaatcagccgaggcacacaataacaaattgataattgagtacaattattactcctgttgtataggcccaaccattctgaacaaccatcccggctgtacagttctatctccaaaccaggaatataccattccaaaccaggagctaaacaaattattaccagttatagcatcttttattatggtgagaagtgtgaaactaatcacgaaagacat

SEQ ID NO: 59711 - DNA, 454 bp, Oryza sativa
  Clone ID: PAT_MRT4530_61309C.1
atggagatggatggtatggtggtggccggagcaatcatgggatgcggcggcaacgaatcggagagcgacagggagcagccaccagggctgcaggacgagacgagacgagacgccggcttaggcttgtggacagcgtgtgccctgcgcccctgcctaccggtagatcgtctcctgcggcgtgtgcgtacgtgctctagtttcaaattttgcgactccgcgcattcatcgatgggatggatcgatctgcacggccaactccactattgcgcgcccaagcgtcaggttcgccgcacttccacatgttcagtgtacaggcgcctacctatagaacctgagactgattggaccaacgactccatcggcgccgtgaccactatcgtgaatgacgtcgcgggtggtctcccgcggcaataccgcgagcccgcgcggtttcgcggactgaaagagcgagacc

SEQ ID NO: 59712 - DNA, 1656 bp, Oryza sativa
  Clone ID: PAT_MRT4530_6130C.1
actcctatagggcgacggggcgccatggcaagcagcagcaagctctcctcggcgtctcgcgctggtagtcgtcgacccgaaacccccttcctctgttccggcgcctgggcgctcttcccccctcttccccgccgcaatgaggcgcttggtgacgcacctccaccgcctctcccaccgcgccatcccttccccgcctccatctcgacccccaaccaccactagcctccccttcctcctctcccgccgcctcctctccgacgacgccgcgcctccgcccgccgccgacgtcccaaacaaagagctgaagcggcggttggaaacttactatggggtggatgatgaggcagaactaccatctgtcacagaggctgttcttgagcggaagcttgcggatgtgcacagcgagacggacgatgaacttatcgaggagctgcgcagcaaaccactccctgaggttcgtgacagggattttgagtccgactttgaggagatgcacgatactgatgaggagctggacaacttgtacaacgccagacagtatgtggagaaaaagatcaagagtgacgagttctttaatatggatgacgacaagtggaataagatgatcaagaaggctgtggataatggccacctcggtaatatgaacgaatgtgagaatattttggaggacatgctccactgggacaaactattacctgatgaaattaaaaagaaggtggaggccaaatttaatgagttgggggacatgtgtgagaagggagagcttgaacctgagcaggcttatgaattattcaaagagtttgaggataagatggtttcagagtgcacagaactaatggaagctgagaacccaactgacgtggatgaattttctaaaatggaaaataagagtgttaagttggacgatccacctggtgagggacctgttctaaggtgggagtcacgtattgtctttgctcctggaggtgatgcatggcatcccaaaaacaggaaagttaaactcagtgtgactgtcaaagagctgggactttcacgacatgccttccgacgtttacgtgaggttgttgggaataggtacaattctggaaaagatgaactcacaataactagtgaaaggtttgagcatcgggaagagaacaggaaagattgcttgaggacattgtatgctgtagtagaagatgcaaacaaggccaataagttggctgatgatgctagaaatgcatatgttaaaaacagacttaaggccaatgctcaattcatggaaaggttgaaggtgaagacacagaaattgagggtagctgcataaggggctcctggagctacacgctctggaacaattcctctttcatgatatcagtacggtcattttgcaacaaaggatgcggcagtgagacgtagaacgggagcaaaaatgttttgttgtaatttacatgtgttgccttgtttggacggcctgttaggtttatctttagctgaagctacactttttgaatttaccgtgaccgagcaggcctgtttacatgatcgcatagtgaactggctgtatcctgatcttctctacaaataacaaattgcttctgaaaactcaaaaaaaaaaacttggcgaaattcattttagcagctatgttcttaaatgcgagacctataatttcatcc

SEQ ID NO: 59713 - DNA, 1001 bp, Oryza sativa
  Clone ID: PAT_MRT4530_61310C.1
ctcaggggagacctacccgcggagacgcgaactcgccgcggattccttgccctccacgccgcaaaccgcagccgcgcctccgcctccgcggcgggatcccttgctcctcctcctccacccccgcgcggcgtgcggaactcgccgatggcgcttctggcccccgccatctccggcgaggtgggtttacggctcttactggcaccactaagctctactgttgtcatccgtacagccagttgtgcaattggggttggtctgcctgtgtactccactttcagagctattgaaaagaaggatcaaaaagaaaaagagcggtggctcttgtattgggcagcatatggatcttttagcattgcggaaatctttgctgatcagattctttcaagtgttcctttctattatcacgtgaagtttgctattcttgtctggctccagtttccttcaaacagtggagcaaagcatgtatatagaaggtatatgcggccgtttttcctgaaacatcaagcaaaaatcgatagaatcctaaatattctatcgaaggaactaaacaagttcgtgagcagccatgaagatgagatccatttcatagagcacatggccgccaggggtgcttcaacagcaaattatataataaacggtcctgaacaatcagaagcggtcagagcagcgatcgaagggccaaattcaaccacaacggaagaggctggcacccccagaaatgaaacatgagcttgacttcatcagtttcttaagtgtgtttggcaagggcacagcaaatacatttgtgtcgatgtgctacagtaatgtttatttagattatctttccagcttatttatttaggggtttccagctttgtatttttcatgggatttccagcttgttagtggaatgtgaatatgagcatgacaggttctgtgtcgcttaagctagatcgacactatcaaaccacttattctgttggcatgagatgtggtaatttcccgttccagattttgcatct

SEQ ID NO: 59714 - DNA, 336 bp, Oryza sativa
  Clone ID: PAT_MRT4530_61311C.1
atggctgacatccgggacactctggaagttgaggcagattcacgttgtgttgtgtcggcggtcgccggtcggccggtgtccaaggcgaacagtcgacagacaaaggcacaaagctgtgaagggctgaatgctgaagggatcgccggcggctcggcgtggggcgaacttgcgcaggcgccgtggagggcgctggaggcggattggcggagactgccgccggtagaggagaggagacgagaagacaaaagtttggaacttggacggtcgtctcacatgggggatatgggagaggatgatagcgcagctcaacctctaccggcgccgtcccggccgtag

SEQ ID NO: 59715 - DNA, 1391 bp, Oryza sativa
  Clone ID: PAT_MRT4530_61312C.1
tcatggcacagccccagtgccccaggccccaagctcgaacccccaacccgctgtgcgcggcgacgccgtggccccgagctgggcggcgtgcaaactggagaggaatcttctgtagcagatggtccccaagttgccgtgatgccttccgtacgatccagccggcgcgtctcgcggcgtcccggactcatcctccctgcacagatcacacaagttgtaataagcaacagctcttatatatctccagcgaagttcgagtgctggaccgtgtgacgagagctcatgatcatggtcttggcgaagtgcacgcgctgcctggctcttgtggtggtggtgctcgttggcgtggctgcaccggtggtcttctctgtcaccgatggccttctaccaaacggcaacttcgagcacgggccggacaagtcccagctgaaccgaactgggagatctctgggttcgtggagtacatcgggtccgggcacaaggagcaggacatgatcctggcggtgccggagggcgcgtacgccgtgcgcctgggcaacgacgcaaccatccggcagcggatcagcgtcacccgtcacatgtactactctgtcacattcagcgccgcgcgcacctgcgcccaggccgagaagctgaacgtgtccgtcacgcttgagttcggcgtgctcccgatccagaccgtgtacaccagcaccggctgggactcctactcctgggccttcaaggccgaacacagcgccgtgtggctctccatccacaaccccggcgtcgaggaggacccggcctgcggcccactcatcgacctcgtcgccatcaagactcttcctcctccccatcacaccaggggtggtacaatgctgaggaacggggacttcgaggagggcccgtacatcttcgccgacacgccgtggggtgtcctggtgccgccgatggacgaggacgtgcactcgccgctgcccgggtggatggtcatgtcgaccacgaaggtcgtcaagtacgtggactcggcgcgccacgcggtgccgagcggcgcgcacgccgtggagatggtggccgggagggagtgcgcgctggtgcaggaggtggcgaccgtgcccgggcggcggtacacgctgtcgttctccgtcggggacgccggcaacgggtgcatcgggtcccttgccgtggacgcgtacgcggcgcgggcgacgctgaaggtgtcgtacgagtcgcggggcactggcgggcacgagcgcgccgagctcgtgttcgcggcggtcgccaaccggacgcgcgtggtgttccacagctccaaccaccatatgaagtcggacggcacgctgtgcggtcctgtggtcgatgacgtctccctcgtcagtgtggacaagcacacggttcgccggttgttgatgtag

SEQ ID NO: 59716 - DNA, 159 bp, Oryza sativa
  Clone ID: PAT_MRT4530_61313C.1
atggccatgaccgttctctccggcatcccgttctcacgtcacgcaaaggtgttgaaatatttacccacacttcgacaagtccggtcgtacctaagaaatccatgtttgatcattgcttcattaattaagaagatgatcatacttgaaaaggaaaagtaa

SEQ ID NO: 59717 - DNA, 396 bp, Oryza sativa
  Clone ID: PAT_MRT4530_61314C.1
cgacgaggcgtatcgaagtcgagggggagcgtctccatgtcccgtccccgtcgccgcgggcatgtccgcggcccgtggagacatcatgcggccggcgagggttcggccggcgaggggtgggtgagacggcgtgcgtgcgcgtctgtgctgcgttcggttattcggtggggtcggtcaccgcgcggtagggatagacgatcgcgcgcgcccacgtggcctgtcgtgcgcctatcggacagcgtggagtacgcgagaagttaactagactttcacgatcgggtttaccgccagggagatatttaaccatttgccatatttagacgtggcaattaactttttgttactgggtacatgtggacccacatgtcattgagataggggtggtaaatagttatt

SEQ ID NO: 59718 - DNA, 1449 bp, Oryza sativa
  Clone ID: PAT_MRT4530_61315C.1
atgtcctcaccaacaagtgttgttagccttagccatggcacaggcaagtggatgctgcaacaacaacgttcggaggcggtcgaggaggagaagaagaagcagccatgggcggtgggcaagaacgccgcgctgttcgcgttcttcgtcgtcgtgctaccgacgatgatgatcctggccggcgtcagccacacgccgccgccggcggcggcgacgacgaggctcggttggacgatgctgggtgcggtgcaaaaacgagccgaggaaaacaacaacagctgcgacacgtcggtggggagatgggttcgggatccgagtggcccggcgtacacggccgcgacgtgcccgacgctgccggcctccaagaactgccacaagtacggcaaggatcccggccacctctactggcggtggcgccccgacggcggctgcgacgacctgccgcgctcctcgccggcgcgcttcctcgccgccgtccgcggcaagcgcctcgccttcatcggcgactcgctggcgcgcaaccacatggagtccctcctctgcctcctctcccaggcggaggcgccgacgaaggtgtccgccgacgacgacggtgtccgggagtggcgcttccccgcgcacgggttcacgctcatggcgatcacgacgcggttcctggcgcgcgccgaggaggtgctcggcggcgacgggaggccgacggcgtcgttcgacgtgcacctcgacgcgccggaccccgtctgggcgagccgccgcctgcgggagctcgactacgccgtcttctccaccggcaactggttcttccgcgtcaactacttctccgagggcggtcgccgcgtcgcttgcagcggctgcagcggcgacgccgacgccggcgagctcgccgacttcggcgtcgcgcacgccgtccgccgcgtcgtcagggcggcgctcgaggccaccgcccggtgcggcgacggcgactgcaagcgcggcctcgtcgcgttcgtgcggacctacacgccgagccacttcgagcacggctcgtggttcgacggcggctactgcaatcggacgcggccactggaggaagacgaggcgccgagctgggaccagtccatcgggtgggatgtgaggagagcccatatcgaggaggtgacgtcggcgaggaagacgacgccggcgacgacgacgaggttcgaggtgctcgacgtgacgaaggcgatgatgctgcgcgccgacggccacccggggcggcactacgacaagaggtcggccggcggcggcgccaacgactgcctgcactggtgcatcccggggcccatcgacatgtggaacgacgtgctcctccacaagatcgccgagaccgcctcgccgccggcgacgaatctccgggctgaggacgagacgatcagattgaaggcggcggatgatgaattgagggtgagcggaggaggaattgaggatggcgcctag

SEQ ID NO: 59719 - DNA, 993 bp, Oryza sativa
  Clone ID: PAT_MRT4530_61316C.1
atgcctgcaaccgcaaaaccggatgagaccgataacaaccgcaagccacccgaactcgacatcactctgttgctcttgctcctaccctccctacctcccgtcgaagcggcgcgccgcgagaggggatgggaatccccggcggcgcgggacttggaacgaccgcggagggagtacgtgtttgtacatcagcgcatctggttggatagccgcatggccgcgtgtccacggctgaaccgaagcgagcgagtcggcagggcacgtatacgcattgcacgcaccgacgcacgagataagcatggtgttaagtactccacaaaggttgcagattgggccgctcccctcaaacatctgattgtgttgaaacactattgctccattgtgaactgtgaagtgattggcgtcctagaatgttggtcatggattgtcaaaatctcatctgttttggtggaaagccggccgcgccgccctctgagccgccgccggtctcgtcgccgcctcgccggcgcactgtccccctcccccctggccgccggcggctgcgattatggcttagatttgcacctcgccgccgcttccaatagtgacctcagcaagaagaaccgaagagcagccgccgtgcaagaagacgacctgaagctccgtctagtccgagtacacgctgggatggggcaatgcaacctcgtaccatccttttcatcatttttctcactgaacttctgcgttgtgttcttgattgaaactcatagggcgatattagaaagaatatgcaagatcatcgcgtatctcactacaagaaaaggtgaagaggcgaaagatagatgccccaaatccacttacaaaactggtaaagtctgcactttttaccgtcgtcggtgtgaagctgcaatctgcagtcaaactcgcgtgctctttgacagatttaaagtgattaagcactccaatcttatgttagtcgcagaagcttcgcaagtgaaaaatggaatagctaatctc

SEQ ID NO: 59720 - DNA, 2544 bp, Oryza sativa
  Clone ID: PAT_MRT4530_61317C.1
gaaatactagtcatgattctccccaaataaactaatttttggtagaaacaattaatgcttggtgaaagatagcagttaagtgtcaaggtctaacaaagccaccaaccccccccattaggcatccgaattgatagtatacatcatggtgccacagcctgaccagaagaaagaatagagtgtaacgcaaaacaccattatgtctttaacatgcttaaaactgaatgactgcctcatcataatagttatcatgagcctaataaggcatacaatagacaataaaagaacaattcagcaaccttcttcgcataagacaatactaagtaatttgagcaagaagcttctttccaagtattaaagatataaaaaggtccaccctcctaatgaaaaccgatgataagtgatcttctatctcacataatgcacgcatttcatacaagttgaaacaagtatccgatggttcatgcagtgataacaaaagcaaggatcaacttgtacgaaaaaaggataccatatggggatcaagcaaactatgaagacgctatggctgttgatggtggccacatgattatagcaggtgatttcgtgtataaaaatcgctgtatgaagaaattatatttaaggaagaagctttcattcagaacttctgaaagagcgtagggtatctgatgtagaccacagggatcttctaagttgtgtcaagagtgatgatattatccgtagcataagggaagggagatcaacatgagggcctcaagcaatgggacccaataatgctaagcctatgtattatctagcgcatatccctaccacctctcgcggttagagtcagaaggcatcgcaatcattttttgctctgcctgcaccgcttcctgttatgcattcacagcagttggctttacaaggaccaccatcatcttcaacagctaaaaagggagcttcatcaggagctaaaggcaaaaagaccaaaccaggtcagaaggtgccagggggcccttcagtcaaggccatgacatcttcagctggtcctagcggaaggggaccacatatgaatagaaactttcctgttggccttgtttcttttgaaccttccgaagcactgcatattaatccattaattaatcgtaaagtcatgagccggtggcctgaagataacagtttttacgaagcaactattactgattataatccagaaacggatctgtatgcattggcttatgacataaatacagctaatgaatcatgggagtgggttgatcttaaacagatgggacctgaagatataagatggcaaggtgatgaccctgggatatatcagggagtccgaggtgctccaggtagtggaggcaagaagtcatctagccgaggtggtccaacaccaggtacaggaagggggaggggattaccaaagcatgtatcccggaaggattttccaccctcacaaaatggagttggcaagagaagttctgatgacattgatatacttcataccgagagcctcataaaagaggtggagagggttttagtgttaataatccagatcccctggaggtagagaaggcaaagaaagtgctgaaggagcaagagcaatcgttgattgatgccatcgcaaggcttgctgaggcatctgatggtgaaagtgatgagcacaatcgtgtgcgaaggaatgcaccatatgctgggagccagcatcaagcaaactatgcagacgctatggctgttgatggtggccacatgcttggaggcgctgatgccgtgtaaaagaattgctggaacatgaagacagaattccttctccaccagaagcctgcatgttgtaaaatcttaccactgaaatttattctgaaattagctctaggtctagtatctttattttggagaatggaagtgctgttttgtagaaaaacttagcatcctgaccatgtaaaatatccagctatcccgtttgagttgagcaagaagctgtttcgttcttaagggtgactgtcttgttcagatgcctgacatttggtgtgaacaatcttggagtcgatgaacatgcctttcctcatctcagccaatgatttgcactatcatgagccaatccaccatgtagttctcatctctggttttgtcccccttttttctctacaagaattcttttttccggacggaaatcaacccaagttgctgataagtaaaaagaatcaaatcaaatctgaataactaaccaaccagtagaactttgggaagcttgaatgaaggggaaatgcaattcacaagatcaactaataaatccaagaaaaatcaaaccaagaatttagaacaatctctaccatagtcatcctccagaaaaggctaaaagagattgcaagatttgcgaaaacaaagatctatgaagaagaaatggtgtagccccaaatccaaccctagatagccacaagatgcccatgatttgcgttgttgagtgaccaaacaatcaatcagaacagcatctgccagaggattgcctcttgacaaaaggagattaggagttccccgtcagaaggatccatcactgtccaaatt

SEQ ID NO: 59721 - DNA, 429 bp, Oryza sativa
  Clone ID: PAT_MRT4530_61318C.1
caggctcgaggatccgctccatcaaactttgactgagactatgcttatgctcttgcccgtatcttcttgcatatgatagcacctgtcttgactggttacatggcagctgacgctaatctgaaggaccctgtaaacaaccggcggtgcgctgctgctcctctaactgcaatgatgactgtgaagaggcatgtgcgtggtcctggggcaatccctataggaaagcctgccatacatccttctacaattgacctgacagggaacgcttatgagttgctgcaagagaaagcatcaaataatctacttgatgatctctacaggactccatgaagcattcaatatgaaagcccgtgttgcagtgcaaaacccatcacattgaccatcgaaaaccacgactacatgggcgacattgagatcctgaaagactgtctc

SEQ ID NO: 59722 - DNA, 472 bp, Oryza sativa
  Clone ID: PAT_MRT4530_61319C.1
aatttggacagtgatggatccttctgacggggaactcctaatctccttttgtcaagaggcaatcctctggcagatgctgttctgattgattgtttggtcactcaacaacgcaaatcatgggcatcttgtggctatctagggttggatttggggctacaccatttcttcttcatagatctttgttttcgcaaatcttgcaatctcttttagccttttctggaggatgactatggtagagattgttctaaattcttggtttgatttttcttggatttattagttgatcttgtgaattgcatttccccttcattcaagcttcccaaagttctactggttggttagttattcagatttgatttgattctttttacttatcagcaacttgggttgatttcagatgagaactacatggtggattggctcatgatagtgcaaatcattggctgagatgaggaaaggcatgttcatcgac

SEQ ID NO: 59723 - DNA, 5754 bp, Oryza sativa
  Clone ID: PAT_MRT4530_6131C.1
atggccgaacgggcagtggcgcacaacctctctccgagcgctagcggtgacgacggggagcagaacccgcgccgtcgagctcgtactccactgcccccctctcgccgaagtcttaggcgggaggaggcgctcgagggggtcgaaagatccgcgacttcgccgcccacgagcgatggagaaggacggcgagacggggagcgtcgcctcctcgtctacggcgatggcagcacgccccagggcgcgctccaagctgcgggcgcgctcttgcgtcacccgcccgtcgtccccgatccagagactccagcccgacgttggctggatgacgtggccgacttggtcatgaaggcgcagcagcgcctaggcgccggtgggcggtcctccgccgccaaggcctctggcgctgctaccgccggctccgtgtcgtcgaggcggagggcgcggcgagcggcggccgttacccgccgttcgtctgtcattccctcgtcaacgcctccgacccaagaagatgtgcgtagggggccggatgcccgcctcagtatcgagcaccggcgcaatggtcgtcgtgctgcccacgcaacggaaggcgcttcctcgtccggagcgccacttcggttcgggcgcgggggccagccccccgtgcccccgcttggtggtgtcggctgtcgagcctttgtggcgagccttcggaacgtccgttggcccccaaggttccggcccaccatcaccgaaaaatatgacggaagcgtcaatcccgccgagtttctccaggtttacacgaccgggatcgaggccgccgggggtgatgacagggtcatggcgaatttcttccccatggccctgaagggacaggcgcggggttggctaatgaacttgccgcccgcgtcggtgggaggatttgtgccagcagttcaccatgaacttccaaggcacatatccgcgcccagggggggcgtgcggcacaaccgcatgctcgaaaagatcgcctccaaggagccccagaccaccgcagagctttttcagctcgcggaccgtgtggctcgcaaggaggaggcctggacctggaactccaccggttccggtgtggcagcttcggccgcccccggatccgccgctcggtcagggcggcgggacaggaggaggaaaaagaggtcggcccattccaacgacgagggtcacgtcctcgccgtcgagggcgcttcgcgggccacccgaaaggggaggcctgcgagcgacaaaaagaaggaggccggcgctcccagcagggagcgcccgaccggcaagtggtgcgccgtgcacaacacctccctccacgacctcgcggactgctgctcggtcaaaagtttggctgagcggacgaggaagtgggaggaggagaggaggcaggaacgccgtgagggcaaggcctcggcagctccctccggcaaccggcgaagtgaggccaagcagaaggcccccgccgaggacatcgacgatggcgacgatgacctagggttccaggagcctggggccaccatcgccaccgtcgatgggggagcgtgcgcccacgcttctcgtcggagcctcaaggccatgaagcgagagcttctggccgcggcccctacccatgaggcgatgcggcgggcgcagtggtcggaggttgccctcaccttcgaccagaccgaccacccgccgtgcgttgcccggggaggacagatcgcgatggtggtttcccccaccgtttgcaacgtgaagttggggcgtgtcctcatagacgggggtgcagccctcaacatcctttcccccgcagcctttgacgccatcaaagccccggggatggtgcttcggccgtcccagccgattatcggtgtgatgccggggcacacttggccgctaggtcatatcgacctcccggtcaccttcggtggatccgccaacttccgcacggagcgggtgaacttcgatgtggcggacctcagtctgccctacaacgcggtcctggggaggcccgcgttggtgaagttcatggcggcggtccactacgcctacctccagatgaagatgccgggccccggtggccccatctctgtccatggcaacctcaaagtcgtgcttgcttgtatggagcagcgcgcggaccacctcgccgccgcgtccaagcccgagggtggcaacgagaggctcagcacctccgtcccagccgccccgaggcagcggatgatcacgtgcgacgaggtcccggaagacgcgcttgtctcctttctgcgggcaaacgccgatgtcttcgcctggagaccggcggacatgccaggggtccccagggaggtgattgagcaccgtctcaccgtgcggccgggcgcaaggccggtccggcagaaagtgcggcggcaggccccggaatgtcaagccttcatccgcgaggaggtggcgcgacttctggaggccggattcatccgagaggttatccatccggagtggctggcgaacccggtcgtcgttcccaaggcgaacggcaagcttcggatgtgcatcgactacaccgaccttaacaaggcatgtcctaaggacccttaccccctgccacgcatagatcagattgtcgactccaccgcgtggtgcgaccttttgtgttttctagatgcatactctggttatcatcagattcgcatggctagggaggatgaggaaaaaactgctttcattacccccataggaacttattgttatacgacaatgcctttcgggttaaagaatgcgggtcctacttttcaacgtactactcgaatttctttgggtagccagataggacgcaatgttgaggcctatgttgatgacttggttgtgaagacgcgcaaccaagagaccttactctcggatctagcggaaactttcgaaagtctccgctccgcccgcataaagctgaaccccgataagtgcgtgttcggcgtgcctgcgggcaagcttctcgggttcttggtctctgcccgaggcatcgaggccaaccccgagaagatacgagctatagagcggatgcgcccccccagcaagcttagggatgtgcagtgcgtcaccggctgcatggccgccctaagtcggttcatatcgaggctgggagagaaggcactgcccctatttaagctcctcaaacgctccgggccgtttacctggacggaggaggctgagcgggccctcactcagttgaaggcgtacctcggttctcccccagtgctggtcgccccggagccagatgagccattgctactctacctggcggcaaccccgcaggtggtcagcgcggcgttggtcgtggagcgcgacgaggacaaccctcactccgcgcatccccaccctgcgtcgactcgacccgggagagagcaggcaggagaggcccccgagccgaacggcggcccgaggcccccgacggccggagctggccctccgcctgcttgtccgacggtgccaggcgcccccgacccccaggatggccccggggccactgcgggaaggccgcgcctgtcgccctctgaccccgaggtcgtcggcacagaagccgagtgcgccccgcgtggcctctcggacgaagagcgccctggagatgcggcccctggcaaagaggatcgaccccgccgaaaggtgcagcggcccgtctacttcgttagtgaggccctccgggacgccaagacccgataccctcaggcccagaagatgctttacgctattctgatggcttcgaggaagttgcgccattatttccaggcgcatcgggtcacggtggtcacgtcttaccccctcggccaaatcttgcataaccgagagggtactggacgggtggtgaaatgggcaatcgaactctctgaattcgatttgcgctttgaaccacgccacgcaattaagagccaggccctcgccgactttgtggcggagtggaccccagcccctgagcccatctccgtccccgaggccagctcgggcccctcgcagctgtctcacaccgcctactgggtgatgcagttcgacagctccctatctcttcagggcgccggtgcgggggtcacgttgacctcgccaagcggagacgtcctcagatacctggtccgcctcgactttcgggtgaccaacaatatggcggagtacgagggactccttgcgggactcagagtggcagctggactggggatccgccgcctcctggtgttaggcgactcccaattggtcgtaaaccaggtctgtaaggagtaccggtgctctgacccgcagatggacgcttacgtgcgccaggtgcggcgtatggagcgccatttcgacgggatagagattcggcacgtgccaagacgggataacgcggtcgccgacgaactctcaaggctcgcttcctcgcgagcccagaccccaccgggcgcctttgaagaaaggcttgcccagccgtcggcgcgacccgaccccctaggggagacggacgcgcctgaacggcccccgaggcccgtcggagtccaggcctcgggacccgaggggagcgctcccagttcccctagattgattgcttggatcactgaaatccaggcgtacctcgcagataagactctacccgaggaccgcgaagggagtgaacgcgtccagcgcatctccaagcgctacgtgctggtggaagggaccctctatcggcgcgcggctaacggagtgctcctgaagtgcattcctcgggaacaaggtgtcgagcttcttgccgatatccatgaaggcgagtgcggagcccactccgcctcacgcaccttggttggcaaggcctttcgccagggtttctattggccgacggctctcaacgatgcggttgacctggtccggcggtgcagggcgtgccagttccacgccaagcaaacccatcagccggcccaggccctgcagaccatacctctttcgtggtcgtttgctgtctgggggctcgatatcctgagtccgttcaggcgggccccgggcgggttcgagtatctgtatgtcgctgtcgacaagttcactaagtggcccgaggcttatccggtcatcaagatcgataagcactccgcgcttaaattcatcaggggcatcactgctcggtttggggtgcctaaccgtatcattacggataacggcacccagttcactagtgagctcttcggtgactactgcgaagacatgggcatcaagctctgcttcgcctcccccgcccaccccagaagcaatggccaagtggagcgcgccaacgcggaaatcctcaagggcctcaaaaccaaaaccttcaacatcctcaagaagcacggtgactcgtggatcgaggagttgccagcggtgctttgggcgaaccaaaccacgccaagccgagcaaccggggaaacgcctttcttcctcgtctacggcgcggaggcggttctcccatccgagctcaccctgaggtcccctcgggccaccatgtactgcgaggctgatcaagatcagcttcgcagagatgacctcgactacttggaagaacgaaggcggcgcgcagcccttcgagccgcgcgctaccagcagagcctgcggcgctaccatcagcgtcacgtccgggcccgatcactctgcgtcgacgacctcgtcctacgccgcgtccaaacgcgtgctggactgagcaagctctcaccaatgtgggagggttcgtatcgagtgatcggcgtcccccggccgggctccgttcggctggccacgggcgacggcacagagctgcctaatccgtggaatatcgaacaccttcatcgcttctacccctag

SEQ ID NO: 59724 - DNA, 871 bp, Oryza sativa
  Clone ID: PAT_MRT4530_61320C.1
ctcgcttccccctaaatctcgccggattccgccgccgctgccgcgcccgcttcctcccgaggtgcagctctggccggggcacgcgcgcgcctccccggcggggggccgccgcagtcggtggactacggcggcggccaggcatccgacagcagcggaactgctgatgatcttcctccaccatatccaagcaataggggtattagaggcagtggacgtgtcagtggtaatggaagagctattgttcctgctggttcatacactagagcccatactgatatggcaacacaaatccatcatcttgaacaagaagcatattgctcggttcttcgtgcatttaaagcccagtctgacgccattacatgggagaaagaaggtctcataacagaacttcggaaagagctaagggtatctgatgtagaccacagggaactactaaatcgggtcaacagtgatgatattatccgtagcataagggaatggagatcagcaggagggcctcaagcaatgttacccaataatgctcagcctatgcatgatctagcgcctagccctaccacctcgggccgtaagaggcaaaagacatcgcaatcatttcctgccctgcctgcaccgcctcctgttatgcattcacagcagttggctttacaaggaccaccatcatcttcaacagctaaaaagggagcttcatcaggagctaaaggcaaaaagaccaaaccaggtcagaaggtgccagggggcccttcagtcaaggccatgacatcttcagctggtcctagcggaaggggaccacatatgaatagaaactctcctgttggccttggttcttttgaaccttccgaagcactgcatattaatccattaattaatcgaa

SEQ ID NO: 59725 - DNA, 375 bp, Oryza sativa
  Clone ID: PAT_MRT4530_61321C.1
atgacgccgcctgtggatccgccgctggctcaccccgggcatgcagatccgccgctggccggtctcggggaggggaggggaggcaacgtcgacgaggaggagaggcggcggctcggctccttcctctcctggcgacgtgtgtcgacgacgacaacgacgacgctgcctgtgggaggggtggacggaggaggagatacgatggctcggctctcccctctcccggcgacgcgcggcgacgacgacactgccgcggcctatggggaagtcgaaggacgaaggacgagaggcggcgatgtggggatgacgattgcctcgacgatgacggcgccgagatgtgacgacgacgacgatgccggctatgggggaggcgggtga

SEQ ID NO: 59726 - DNA, 288 bp, Oryza sativa
  Clone ID: PAT_MRT4530_61322C.1
gttgtggaggttcacaacgaacagaatacaagaaattttggtaacctcacctgtgatggaccgtcgcaaacgtcggaccgtcacgggcccgaaagtaaaggcccgtcacagaggtggatgtcaccactgacggccggccacccgtcaaaagtgactggactcaccagcggtagggaggaggttcgaccggcagcgtgcgagcggtccgaccagcgacggcgacaggactacgtcgagatttccatcgatttgagggtgcagagggccggctcttacagatacaagtga

SEQ ID NO: 59727 - DNA, 2217 bp, Oryza sativa
  Clone ID: PAT_MRT4530_61323C.1
gcacgaggctggtgatgtttgtgttgcacgcacgctaattgaaaaatcacactcaaaacggttgggaggttagcagccatggcaatggaggcggaggctctcctgccggagccggagccggagtcgccgccgctgctcgccgtcgaccacctcggcggcccggcctcccgcggcagctccggccggtggcccgccgcgttcttcctcatcggagcggaggtaggcgagaggttcgcatactcgggcatcatggggaacctggtgatctacctgaccgggccgctccggcagccgacggcggcggcggcggcggcggtgaacgtgtggatgggcacctcgatgctgctgccgctgctcggctcggccgtcgccgactcatggctcggccgctaccgcaccatcgtctgcgcctccctcctctacatcttggggctgggcatgatcactgtctcgtcggttcttgcaccggaagagtcatccgagagctcaaatctagctgctcatgtggctttcttctacttctcactctacgtggtggcgtttgctcagggcggacacaagccttgcgcgcaggcgttgggtgcagaccagttcgacgagaacgaccccggcgagctcgcctccaggagctccttcttcaactggtggttcttcgcctcctacggcggcaacactgtcactgttcccatcttgaattatgtccaggaaagcgtaagctggcagcttggcttcgcaatcccatgcatcgccatggccgtttctcttgccatcttcttgatcgggacaaggagttatcgcttctaccctccgaagagtaagggaaacccattcggagaggtcgccgagtggattcgacgttggatcgcatcgtcctgttcgaaattgcctgacagttctgatgagttgctaccgtcatcatcgtctgagggggatgtcagcaattcaagcagtgaattcgtccctaaagaagctgcagagctggtcaagttgtttccaatatgggcttccagcctgatatatgctgctgtgatggcacagtgcatcactttctttacaaagcaagcaagcacactggacagaagggtaggcagcttagtgctgccagctgcttcaaacggggcattgttcaatgctacaatcatggtcttcctcccaatctatgacagaatctttatcccagtggccagaagatacaccaagaaccctagcggtatcacgacgctgcagaggatcggcgtcgggttggttctctcgatcatcacgatgatcgttgctgcaatggttgagatgaggaggctcaggatagcaagagatttcggccttgtggacaaacctgaagctgttgttcctatgagcttcttgtggattgttccgcagaacattctggctgcaatttctgatatgtttgctgtgattggattgcaagagttcttctacggtgaggcaccggagagtctgcgaagcttttccatggctctgttcttgagcataattggagttgggaacttcatcagtagtttcattgtatatgccattgacagggtgaccagtagctttggagacagctggttctctaacaatccaaacagagggcatgtcgattacttctacttgcttattaccgtgctcaatgctttgtccctggcctgtttcttatactttgctaaaatgtatgaacataggaaaaagtgggattctggttgtgaacaacatctaccaatggcgtacaagatgaaaggggttttcaagggcctcaaggtcatctctcagatcttcgtggtgaaggaacaccaaatggagattggttatccaaccgacgtcaagcatgtcacgcacataggttgggatagcccgacagggagtgcggcttctcctagctgggtgcctgacatgatggggccgcctgactattcgtctttgaacaattttggaccatctacaggaacgtcctggacttctcaagtttgttcgacagatttcgatcaccctcaagatatatcacccttcggtttatatgtcgaaaatgctggtaaggaagcaaatccaccacatcccgacataccaaagccgcccaggaagagcagaaggaagaaatccaagaacaattcaccgacggcttcgtcgagatcatcaagatcaagatccaagcgctcgttctcctccactgctgacactgtcgttgacaacagcatccaaaatgaagtccggattgtatag

SEQ ID NO: 59728 - DNA, 2550 bp, Oryza sativa
  Clone ID: PAT_MRT4530_61324C.1
atgtggaggttgaagcagttcatgcccagggagcagccgtccgggctcgagggccggaccgtagatgtcggcaatgtccgggtgcacgtccgggaacccgtcgccgagggcgggttctcctgcgtctacctcgccagggacgccgcaaacccggcgaagcagtacgcgctcaagcatgtggtgatccaggatgaggagtcgctcgacctcgtcaggaaggagatcatggtgatgaggtcactcaagggacaccccaatgtggtggcgctcgtcgcgcacgccgtgctcgatacgggtggccgtgcaagggaggcgctgctggtgatggagttctgcgagaaatcgctggtcgcggccttggagagtagaggcgccgcccattttgatgaacagcaggtggctctcatcttccgggatgctcttggatgtctcctgtatagaatctgctacttaaaatcagcatttgatggagaatcaaagctccagatactcaatggaaactatcgtatcccagagttaccaaagtacagttcccccattacaagtctgatcaaagacatgcttcaatcttctccagatgtgtggttccgtgtcaatgaattacttccgttggaacttcaaaaggacttacctgatggatctccatctggatcagcttttgagtcgcatattactgaggatgaagcaccaagcagagcaactatttcaccatcaacggacaacacgaggagcacttcttctgaggatccttccaatttgaggtcgcaaggtctttcaaaggctgctgagaacttcgataatctcaaagtgaattttcaaaacaatgtaagtagtttaaatgcaactcgtagactgaaagagcagcagctggaagctgagccaagagagaagattgaaggtactcctccagaactccgtcaaggtctatttacatcaagcccagggacaccgagccctgatccgaagccatggtcagcttttcctgaagagccaaaagctcaagcagctgtgactgtgaaagttgcataccacctctaccgtaactacacaaccaaaactacaattgcacaaggtgcagctctggccggggcacgcgcgcgcctccccggcggggggccgccgcagtcggtggactacggcggcggccaggcatccgacagcagcggggggttttgggttaaagggtctcgtgaaattagcttcgtggaaagatttgaggcgttgtggggggagtgggtttccggcgaattccagctgaatttgtttccctgggatgtgtttgttcgtgcaggaactgctgatgatcttcctccaccatatccaagcaataggggtattagaggcagtggacgtgtcagtggtaatggaagagctattgttcctgctggttcatacactagagcccatactgatatggcaacacaaatccatcatcttgaacaagaagcatattgctcggttcttcgtgcatttaaagcccagtctgacgccattacatgggagaaagaaggtctcataacagaacttcggaaagagctaagggtatctgatgtagaccacagggaactactaaatcgggatctgtatgcattggcttatgacataaatacagctaatgaatcatgggagtgggttgatcttaaacagcctgatctgctccatttttgggtgcagctgaaactatttggttgggcttcagcttcaggagagctggagctgatgggacctgaagatataagatggcaaggtgatgaccctgggatatatcagggagtccgaggtgctccaggtagtggaggcaagaagtcatctagccgaggtggtccaacaccaggtacaggaagggggagggggatttccaaaagcatgtatcccggaaggattttccacccctcccaaaatggagttggcaagagaagttttgatgacattgatatacttcatcccgagagcctcataaaaaaggtggagagggtttttagtattaataatccagttcccctggaggtagagaaggcaaagaaagtgctgaaggagcaagagcaatcgttgattgatgccatcgcaaggcttgctgaggcatctgatggtgaaagtgatgagcccaatcgtgtgcgaaggaatgcaccatatgctgggagccagcatcaagcaaactatgcagacgctatggctgttgatggtggccacatgcttggaggcgctgatgccgtgtaaaacaattgctggaacatgaagacagaattccatcagaagcctgcatgttgtaaaatcttaccactgaaatttattctgaaattagctctaggtctagtatctttattttggagaatggaagtgctgttttgtagaaaaacttagcatcctgaccatgtaaaatatccagaagtggagctaactttcgtgatgctgcttttttatgttgctaagttaatggataatctcatgttttgcataaaaaaaaaaaaaaaaaaaaaaaaaaaaaaaaaggatttgtgcattgtactaacattgcgagtatttggtaatacgaggtaccctctcatggtc

SEQ ID NO: 59729 - DNA, 719 bp, Oryza sativa
  Clone ID: PAT_MRT4530_61325C.1
gcagtccgcattttacatctatggccaaatggttacaaattatggtatcccgtacatgtgcaataagcattagtagggcaaaaaatgtcttgataactgagatatcaacattacaaatgaacattctgccatgtatatgtgacaagccttttcctgttttgttgaaatcagatgagcacaatcgtgtgcgaaggaatgcaccatatgctgggagccagcatcaagcaaactatgcagacgctatggctgttgatggtggccacatgcttggaggcgctgatgccgtgtaaaacaattgctggaacatgaagacagaattccatcagaagcctgcatgttgtaaaatcttaccactgaaatttattctgaaattagctctaggtctagtatctttattttggagaatggaagtgctgttttgtagaaaaacttagcatcctgaccatgtaaaatatccagaagtggagctaactttcgtgatgctgcttttttatgttgctaagttaatggataatctcatgttttgcatgcgtgttggtcaacaaaaaatacatttgctccaggattttgcattgtactaacatttacaatatttggtaatccaaagtaccctctcatgttcatgcgaacctaagcacttacttgaaaatttgaccaatgatgtgactccttttttccctcaaccttatctttgctcctcgtgccgattcctgcagccc

SEQ ID NO: 59730 - DNA, 546 bp, Oryza sativa
  Clone ID: PAT_MRT4530_61326C.1
ggaaaacacatcaactttattaagcgggaacagatctagggaaaaaaccccattacatatccaagcaaaaaagccatccttaaaaaggggggggtaactgaactacaaaagcaaccttcctgaaaaaacccaacatcaaaaaaaggggcagggcgacagggatctggggggaacccggaaaaactgctaccctgggcctaaaaaaaagggcagcccgtttgacaaaccggtaatccccatggggtgcccccacggaaacggcacaaaaccgaggtttgaggctgaccccaaaattttggggggggcgccaccggcctcaaaaaaggacccccacggggctcataaggggggccgggctcaacccgaaggacaaaccctacagggttttttttgttggggaacaacaggatagatgaatccgaaaaacacccacccttcaaggaaaaagcactggaagggcggaaaataaacttctgccctgctgaaatgatggaaagggctgaaaaaaaaatggcctgccccatgaaacacgccccacctgaaagc

SEQ ID NO: 59731 - DNA, 203 bp, Oryza sativa
  Clone ID: PAT_MRT4530_61327C.1
ccacgcgtccgactagttctatattgcgagcgggccccctttctcttgtttatttgctttgggtgctgtaatgtctctctccactgggcttgctaatgtgagcttaaaacataatagtgtaggtttttatcaaatgggctaagattgctgtaactccaacaattgttgtggctgaatttatgattttccagaaaaggggttgc

SEQ ID NO: 59732 - DNA, 405 bp, Oryza sativa
  Clone ID: PAT_MRT4530_61328C.1
atggtcggaccggcacagtgggtcccatatataagtgaatcaaaggattactgtgcggggtcggcatcctggcggcggcgctcgccccggcgcgccagcggcggagagcgggggaggagcggcggcctgggaagggtgtcgccgcggggccggcgatggacggcgcggtgcaggacggcaaccagcgtcgcaacggcggagggcgacggagcagagggggcgcgggaaggagtcgacgcggagtcggcagtccgcgtccgcgaggaggagcgcgtggaggccgccgtcgcgtcgcccggcccggcgccgccgcgtcgctacgccaccccgccgcccgtccccggcctccctttcctgcctcgccccaccggccggcccgcacgaggggggcggggaggccagtga

SEQ ID NO: 59733 - DNA, 474 bp, Oryza sativa
  Clone ID: PAT_MRT4530_61329C.1
tataattgttggcttaagatgttgaactctagctctggagaagtcatctatgatgagcaaagccatcggcactagatgatttttctgtgtaaattctgtgtagtatgcatttaatgtctcctctttcccaccaaggcagttttccccatttgttatctattatgaaattgtattacattttgctgctactttgattgtttgttaagggttgccatgcaacatatagattaatgagttgagtccatgatcctggagatgcccaattctctattattgtaaactgtgatgttcttgttctttctggaatttctttggggcaaggaactttacagtgaaatagaggtttgcatcaaaagaaccaaaaagagtaaaagagggtaatttttaccagttctattgatgactttgtggcttagctttggttcgttttctgttttatatgaaaacagtatattcttcactatggtcctctct

SEQ ID NO: 59734 - DNA, 918 bp, Oryza sativa
  Clone ID: PAT_MRT4530_6132C.1
atggacggcgtttacatcaggagagacacagatcttccgcagatatacttgagcactatagtattgttagctgcgcagctgtcgtcgctgtgtgaggaggaggtggggattgggaggatgcagcagcggttgtgcgtgtggaaggagacagtgcgccctgtcacgtgtacgaaaaattataagacaaaaaatagttttggagttcaacatatcaaatttgaccgtccgttaattatattatgggatgaacagcagccaagttctgaccaaaagaagatggataagctgataaagatcgtcttcgggacagtggtcgcggtgggcatcgccgctgtgttctcaccccagtcaaacacgtcgtcgtcgttggtcagccgcgcgttggccatatccacgtacacctccgtgatcatttccatggcggccaccatgacctcgtgcggatcgctgtggtcggtcaccacgctctacctcgtctcgcttaattggaggcaggttgtggcggtgcctgtagccctggtcatcttcttcgccgccggtagatggcccttcgtttcttctgtcgtcgttgttcatcatcctgatcacgacgagaatgccatcaaggcggtgatctttaggagatgcgatctgttcatcggcaccggcctcgtcggcgtcttcttcggcaccagtttcaacgactacatgaccaaggcatcgagggttcctggtgccgtcgtttacatctggatttctatctacctcgtcttcactattggcctctttctgatggcgagcatcggaacgggactggaggctctcaccgatgactatgcaagaaaattatactacgtcgccgcagctcttcttacggttgcatttcttctcgttgtggttgtaaattgtctacgagtatccgaattacccaccagctga

SEQ ID NO: 59735 - DNA, 586 bp, Oryza sativa
  Clone ID: PAT_MRT4530_61330C.1
gctccgctcgttcctctgtcgctcctgtgtggaccccgagcctgcgtgctacgaaacgggatgctttcaaggaaggcttcacccaagaattcaataatccaaagaaacagcgaacaattcaagtgctagatccgcaagacctgccgaagcaaaggaaccgtaaacctacaacccagttgcaagccaaggaacagctccagcaacagcttgcggaatcggctaggcatccgtcgctgattcccatcaagttaccaccaatgttggaaatttctcaccttcagtttcatgccaaaagaaccttactccctctcaccgactggctgctgcttatataccctggatatttatcggtcaaatttttagcccaccaaccgtacattgtcaacaccaaggcttctctcaaacaaaaatgtgttgagatgcatcgttgttgcactctaacaatccttgggtcataagtggcttgtcccactgcttgtcaaccttgtgctgctctcagccgttctgggttgtgttgcatcctccctgcactctgcccaaccttgggtcataagtggcttgttcccaaaaaaaaaaaaaaaaaaaa

SEQ ID NO: 59736 - DNA, 960 bp, Oryza sativa
  Clone ID: PAT_MRT4530_61331C.1
cgacctcggcagggtgcacctcctccctgcggcatcaagcagaacggcgccgccgccgtctccgactacttcaagcccaaggacacaggtgtggaggtggaggggattagggtggaggaggccttcttccgcgggaggaagctgcagggcgccaccatctcgctcccggatggctaccgaggttatgtattggagaagaggagtggaggaaaggatatgaagaagctggaaggggaggttagcaatttcaaatcccgtgcggagtttcaaaacataacatagtggaatcatgatcccacaccatcggcagaggatcccctaccgcggtgctttcatttgctaaccgttgctaatgctatgcacaagccagtgaccgctgaagagatggcttacatgtccgcaatgcagaatcagagcagttaacagagattcatgacatgatgaagctgcaatttcacatgatatgactgcagcatttgtaacaaaaaagctactagctattcagtagtttccatcagctgaaccatcctgactatcaaccaatctagcaagcaatctactatttcagtgtcaagtcccaactgaatcagagattagtagctgtgagaatttgaatgccggatactctgcttccggtgaccaggcttatgttacatgcaagaaaattcgcatcaaatgttctagtactgtttttgagtaattttagcttaggactctgaacctgcatcggttactctgtactagtatgtcagtaacctgtaatgtttgaacagtgatccagactgtacgctctacttgacgtgttgtaatgttttgggggaaaacactatcatcccttaatatgttgttcaaatattctaaacatatgctatatttcatctgagtgctatgtatcaggaagcattgcgttcaaaaaaactcgagactagttctcctcgagactagttctctccctcgtgc

SEQ ID NO: 59737 - DNA, 2248 bp, Oryza sativa
  unsure (1)..(2248): unsure at all n locations
  Clone ID: PAT_MRT4530_61332C.1
ttttttttttttttttttttagggtgcngaccaggctagatggatgtcttctcgcatggcactacaacctaacgaatttttttttttttttctccaagaggcaataagagattaacagatcggtacaattcgcacctcgtgcagttgtcaatagtcgacacagcaaaactatcatctttacataagcagcttcatcaaattattccaagaaaaagaaagcaatcttgcaataaaaaaaaggataagtaggggtaacgattcatcgtagaaacaacgggtggcaactcaagtaagccacgtcagttgaatttgcctatcattattgacagctttgttggttttggacaaagaaaacaaggaaaatggtgctcaaaaaaatttcctccacgtcgcacacacaatgtgcatggacgaggccataatatactgatgccaaaagaggcaattatcttgcctttgcagaatgtaaacatagtacatcggttggagagtctagtaacggagcatgtaggtccggcgcctgaaccagttgtagtccggaagaccctgaatgggtcccattgcagcaatagcgatatcctggtcaaaaatgaaacggttggccactcgcttgactgtgcttgcgtcaactgcatctattcttgcaaaaagctcaggaataggaattcttcgaccatagatgagtaactgacggccaatatcctcaacaacagcagtggaaccatcgaggtgcagttggatggaagatttcagctgattacgtgcacggataacatcttcctcagtaacccggtatgacagtttgctaatctcttgcatgattgcaaaagccaaatcatccaagcagtcaggcttagcaacagcgtagacaccaaagaggccagtgtccttgtaatttgtattaaatgccattatactctcagcaatgtcattgatcgctaccctttgtacaagctctgaacccatgtgtttccctcctccagcactcttgttccatgagccaagcatggattgcatgaccatcaaggcaatagaatcaggatctatccatgatgctccattaaaggcaacagcaaattgagcaaggggcatgtcatcatcaatgatgcggacctcagaaccagtaaagcaggctggttgggtagaaaccaacatgcttgttgttgtagggtcagttggtaggtcattaaacagttttgttgccatctctacaatatcatcatgcttaacagcaccagcagcagtgataaccattctaggagccgtataatgtgtttcaatatacttctggaggtcctcttgggtaattgacttgacattttctgcagaacccaagattggtctgccaagagaagtgtactggaatgcagttgcatggagatgatcgaatataacttcctcatattgtccctcaacctcttccatctctcgcagaataacatcgcgctcacgttcaatgcgggactcttccaactttgagtgctgcagaatgtccgcaagaatattaagtgcacgcggcacatccttgtcgagtactttggcatagtaggtcgtctgctcccgcgacgtgtatgcgttgaggtggccgccgatgttctcgatctcctcctcgagctgcgcggcgttgcggtcacccgtgcccttgaacagcatgtgctcgacgaaatgcgcgaccccggccgagtcctccgtctcgtacctgctcccggcgtcgatccacacgccgacggtggcggtgcgcgaggcgagcgaggactccgtggcgacgcggagcccgttggggagcgtcgtgacgcgggtctccggcgcggcgaggatggcggtgtggtcggcgtgggcggggactgggctcgcgtagcggaggaagcgggggtccgggtgctcgagccgacggagcctggcgttgacggcctcggcgatgcggtcgtacaccatcatcggggggcggaccggggccgcgtcgggggcgatgacgccgggccccgcggcggcgaccgcggtggatgcctcgcgcgcattcccgggccccgccgccgccgccgcggcggcggagcgacggcgcactgcggcggagaggaggcggcggaacgccatcgcggggggatctgtggcggtggggcctcgccggaggcggcggcggcggcggcggaggtggagatctagctcggctagggtttggagagagacgggtggatcggggagatggggagaaatagagagagagagagagagagagagagagagggcg

SEQ ID NO: 59738 - DNA, 532 bp, Oryza sativa
  Clone ID: PAT_MRT4530_61333C.1
aatccatacgctttgcttgcaagctcaaagctgaaaattgcagcattaatttcattatgttgaaagtaagttcaggtacaacacgattattttgccgatcacatgtagtactgttttcacactgtgctggacatatgaatggatgatcctaatcatctggactgggagaggcttcccatccggagtcaaaacaaagagaaatcgttgcgacaacattagcaagtggaaaagatgccaagtcactcctttttcttgccggtgacgcctgcaacaacatcattcagcgcaggtggaggaacttgttttgctgtctcccaagaatccaacattggtctgacaactgctggaagaaaaagaccgaatccggcgatgaggcaggaggcggtgacgacgggctccttcaccgcgaagatcttgagcttctccatcactcccatggtggctgcgcttgcctcctcctcctcgatccccttctccttcctctcacctcgccgccgccgccgccgtcgctgtagagagagagagagagtct

SEQ ID NO: 59739 - DNA, 899 bp, Oryza sativa
  Clone ID: PAT_MRT4530_61334C.1
tcagtcgtcgtcttccttcggccgccgccgcccgaaaccctaaccgagcgccgccgccgtttccttccaaaattcggtcgatcctttccttctccggccgaattgatagaggggaaatgatcttctcgatctcctctaccttttcccctttggaatcatcggttaaattggtttggaaagtgttggattcgaagtcgaatcggatcggcttttctctctccgagcccgacctttccttctcgtcgccggccgccgtgggcctttgccgtcgcctcctagcccctttaaaaggctccccggtgtctcctctacccgccgccactctcgccttcgcctctcgtcgccggaagagctctagcgccgtgtagcctagcgccgctgttgccgccgccgcttcagccgtgcgccgccgccgttccagtcgtcgtcgtcgctcgggaaggtcgccatcgtggtcgccaagtcgccgcgtcctcgtccgccccttcgccgtcattgctgtccgccggagcaccgtcgccgtcgtcaagccgaagagcgccgccgcttcttcctcgtcgccgtcgtcgtccgttgatcttccgccgccgttttggtcaccggtgagttcgccgcgtcgccctctacgtcctggtgccctccgttcgtgccgaagcgccgtcgttcgccggcgggcttgcgccgcccgagccgccgccggtggtgacgtcgtcgctgacgtcatcgtcgtcgtccctcgtggtccggccgtggaccggtcgatctcggccgtccgttttggataagatcgatcttggccgtccgttcccgtggaccgcttttgtatagcatggtttattgcgggacaccagactgagaagtgacggagataagcccacgggggtcgctggggagtccat

SEQ ID NO: 59740 - DNA, 282 bp, Oryza sativa
  Clone ID: PAT_MRT4530_61335C.1
tcactcctttttcttgccggtgacgcctgcaacaacatcattcagcgcaggtggaggaacttgttttgctgtctcccaagaatccaacattggtctgacaactgctggaagaaaaagacttgagatcttgagccacgcagcatggggaacaggcagagctactggcttgcaaagaagaacacctctgaagcgatttgagaacccgaatccggcgatgaggcaggaggcggtgacgacgggctccttcaccgcgaagatcttgagcttctccatcactcccat

SEQ ID NO: 59741 - DNA, 981 bp, Oryza sativa
  Clone ID: PAT_MRT4530_61336C.1
gtgcttaaaatactttggataataaagtaagtcaaaaaaataataataattccaaaattttttgaataagacgagtggtcaaacagtgtaagcaaaaactcaaaaccccttgcctctcccttctccttgcatcgccggcctctccttcctcctcatgacgccggccaccttttcctctttgtgccacatacctcctcgctcctcttgttcctctcccaactaagtcttcttcttccaatggcagtgagggaatgtacctgttcttgtgcagatgaagcatcctgtgggtcaccaagatggatagggaagagcctctcttgcgtatgcatcaagagaaaaggagcctatgagagaatatgcatgaaccttacaccagtgcaggaagagaggcttcagaggctgaggcaccgtatgaaggtttattttgatccttctagacgagatcatcaggaagcattgaaagctctttggcatgcaacatatcctgaccaagaactacaaggtttgatttctgaacagtggaaggacatgggatggcaaggaagagacccatcaactgacttcagaggcgcaggattcatatctctggagaatcttctattcttcgcgaagacattctctgcctcatttcagaggctgctaaagaaacaatgtggcaatcgagctacttgggagtacccatttgcagttgctggtgtaaatatcacattcatgatcatgcagatgctggatctccaatctactaagccaagaacgtttgttcgagctgtttttatccaaatgctgtcagaggatgagtgggcatttgatctcctctactgcgtcgcgttcgttgttatggacaagcagtggctcgacaagaacgcctcctacatggacttcaatgagatactgaagtcgacacggacacagctggagagggagcttctgctggatgatgtgatgcggatcgaagacatgccgtcatacagcctgctctgc

SEQ ID NO: 59742 - DNA, 660 bp, Oryza sativa
  Clone ID: PAT_MRT4530_61337C.1
atggcgatagcgcgcgacggcatcggtggcgcagcgacggccaacccccgcacggatccggcggcggcggccggacgccctctccctcgcgggatcccgctcccctcccttcccaacccagatccggcggaggggaggggcgtcgacggcggtgcggccggaggggagcgcggatccggcggccggccgccctccctcgcgggatccagctcccctcctctccccgtccttccctcccctgatccggcggaggggaggggcgtcagcggcgcgtcctcggtcgccgccgccgacgacgacgagaaggacgatgacgaggaggaggtggcggccaggagcaatggcggctgcggcggcggcgacagagggctgcggcggtggcggcggcggagggctgcggcggcggcggcggcttcccccacgctagcggcagcagcacctttccctacactagcggcggtggcggcggcggctctccttcccgtctcgccggcacggcgcaacgacggcggggtgcggcagagacggccgtccctccccctctccctctccctctccctctccctctccccgtcggcgtcgacggcgacggcggcgacggcgtcggcttcgtccgagggtggatcctccggcggcgcagcggccagtgggatcacctag

SEQ ID NO: 59743 - DNA, 2336 bp, Oryza sativa
  Clone ID: PAT_MRT4530_61338C.1
atggggaggggcccggcggcggggaggtcgtcggcgggggcggcgcggcaccagcagttcagggcgcgcgccaagacccgcgtcgacgacctccaggagatgttctccgggctccagtccgcgcgcaaggaggcccgctccaccgacgccgccgttctcgaggcgcagctccaccagatgctccgcgagtggcgcgccgagctcagcgggaacaaccgggagctgtcggatccgccgtcggagacgctgcggctgctgcagctggcggcggccgaggaggaggaggacgacgccaccagcaagctcgtcgagcagcagcagcagcacccgccatcggctaaccaggcccacggccacccgcaggcgcagggcggccaggacatgaagccggagccaccggaggaagcggtggcctccccggctgatctgacggtgccgcagcagccgcagtcgccaggtcagggagttctggcgagtggtggagggatgctggcacctgccgctgccgcggtgttccatgatcagtctgtcaaacggaagctccaatctttatgcgaactatggtacaatggcaccctattagtagggtggatgtggatccttggaaacgagttacatgggtggagagagctcctggaggtctgcgaggttgagaaagaacatgagcatgggacttgtcatggttgtggttgggacgggaccaaacagatgtattatgttaaccaggaacttactgttgaggatttcctttatgatgataattacaagatgtatcttcctggatacaattcagatattctcaataatctggaaagtactggtcagctggaatatccacagttcaatttgccacaagagttaccccctaatgcatatcttgatacgagtaactgtggacaaaatgctggagatgttttcctccacatgtcagacttgctcaatacaatgtctccagtacctgctgcattcctgaggcccaaatgcgctctctgggactgccctcggcctgctcaaggatcagaaaggtggcaagattattgcagcatgtatcatgctgatttggccgtgaaggaagagggtccaccaggcacaatgcctgtgatccgtccaagaggtatcgatttaaaagatggccctctgtttgctgccctcagtgcaaaaatccaaggaaagcatgttggtattcctgtctgtgaaggggctgcaactgcgaagtccccatggaatgcacctgaactttttgatctgtacatttttgagggtgaatctattagagagtggctgttctttgacaagccaagacgagcatttgagagtggaaatcgaaagcaaaggtcattgccagattacaatggccgtggttggcatgaatcaaggaagcaagtgatgaaagactttgggggtctgaagaggtcctattacatggatccacaaccatctaacagctatgaatggcacctctatgagtatgagatcaatgattgtgatgcttttgccctatacaggcttgaattcaagtcctctgatgcaaagaaaactgctaaatcaaaattagcttgtaacccactgaatgaaatccagcagcaaatggttaggctgagtgcagatagccctgtcgaaaacaaacggtctgcccgcagcaggacaaaggctaacccaaatgatatcaatagcaacatctacttagttcagaacactacagttcaaggcagtattccaaatgcttatcaggcagtgtcacaaccggaccagatgacgtatttgaatggcaatgttgtttatgggcctcatctcccatacggttactcaactgaaagaagtgacttctattggagctcaaatgatggagcttgaagaagggtaaccatattttatcaacggcatatttggccttcaagttctaacagctccagctatacttatggggtctaatcttattggcatggcccccatcattctaattgtcatgggttgcatcaacatggaacctcttcgaaaatgcctgcgctgcagtcgtatttgtgcacaataacttcgacaatgtaatatagcctagtgtcttgacatagcatctcccttggtgcagagcatatgtaacataaattgccaggtttgctagacttgtaaccttttatgtgggtctatcagctatttgatggacccgtttatttgtgacgctgtatatgcatgaggctgttctgaatctgggagcaatgttggtggcctttgaaggcactaacctgttgataaaattgtgttctctatgattgaaccccaattacatgcttgagatgaaagcatcttgtagcaatattcagctggttcgttatctgttc

SEQ ID NO: 59744 - DNA, 450 bp, Oryza sativa
  Clone ID: PAT_MRT4530_61339C.1
tacccccaaagttcgtcgcaaacaattccgctctgaccaccgattcaccatctgtcaatctagccccgagccgaagccgacaaatcacatgccatcttcccagccactgaatgacccgagcgctacgtctagccatctctctgttaaacgcagctcatcgaaaggcccgagccaccctgcccgaagtgttcgattccaccacggagaacaccgatcacctccagcttcaatcaaccccgagcatgaggcctcacgtttccctgttgaaaatagctcaccggaaaggttgggccacccactcaaagggtcgaacccaccgattggatcgccaatcgcttttgtcgccatcaacccgagcatcacgtccggttgtctccctattgattgtagccaatatcgaactgttcagaccggcgtttgaagtgttcgattccaccgatcaaattccat

SEQ ID NO: 59745 - DNA, 369 bp, Oryza sativa
  Clone ID: PAT_MRT4530_6133C.1
atatagggggggggtttttttatttaatttttatttaccttactttatattaagggacccagaagattaaaatttcaattatgggcaacttaggtgaaataatatctagggacatgcaacttttgatatgcacaataataccaaattggtaaaaaaagaatatacaagacgtgttttttccttttatcagggggaggggtccaataaggcattcttcttttttttcaaaaaaaaaggcaaaccactaattttctcgcccaactttgactggccggcaaataaaaaaattttctatacttgcctttttcaatggggggcgacgataaaacccaatgaattatgtatccctggcctggccttttaaatttt

SEQ ID NO: 59746 - DNA, 400 bp, Oryza sativa
  Clone ID: PAT_MRT4530_61340C.1
ggggggggttttttttttttttttttttttttttttttttttttttttttttttttttttttttttttttggaaaaccaccttacggggggtcaaatttatggaaattggggggcttgggtaacaataccattggaggaaaggggttaaaaaaaaggggggggggggggtacataaaacccgggggtctagggggaattttggagacctaagggcccaaaaaaccggggccccgggctaaaatcgaaggaagaacgggccccttccccggggcccaaccctaaaaaaagggggggcggaaatttagtggccaaggccccacccaagtaggtttgggttgggcccgcggggaaccttgagaatttggaccaatttgacgggtggggtgggggttttaacgg

SEQ ID NO: 59747 - DNA, 1167 bp, Oryza sativa
  Clone ID: PAT_MRT4530_61341C.1
atggaggagatgctgatggcagcgaacgcggccgccggcgcgaatccgaatccggcggcgacggcgccgtcgtcggtgactgggggcgcactgaggggcggcggcggcggcggcgcgccgccggtggcaggtggcgcgggggcgggtagcacggagcggcgggcgcggccgcagaaggagaaggcgctcaactgcccgcggtgcaactcgacgaacaccaagttctgctactacaacaactacagcctccagcagccgcgctacttctgcaagacgtgccggcgctactggacggagggcggctcgctccgcaacgtccccgtcggcggcggctcgcgcaagaacaagcgctcgtcgtcgtcggcggcatcggcgtcgcccgcgtccgcctccacggcgaattccgtcgtcacgagcgcgtccatgtccatgtccatggccagcacgggcggcggggcgtccaagaacccgaagctggtccacgagggcgcgcaggacttgaacctggcgttcccgcaccacggcgggctgcaggcgccgggggagttcccggcgttcccgagcctggagagcagcagcgtgtgcaaccccggtggcccaatggggaccaacggccggggcggcggcgcgctctccgcgatggagctgctccgaagcaccggctgctacatgccgctgcaggtgccgatgcagatgccagcggagtacgccacgccggggttcgcgctcggtgagttccgcgcgccgccgccgccgccacagtcgtcccagagcttgctcgggttctcgttggacgcgcacggctcggtgggcgggccatccgccgcggggttcggctccagcgcggggttgcaaggcgtgccggagagcacgggcaggttgctgttcccgttcgaggacttgaagccgacggtcagctctggcactggcggtggaggcgcaagcggcggcggcgccggcgtagacggcggccatcagtttgatcacggcaaggagcagcaggccggtggcggaggcggcggcccaggcgggcacgacacgccggggttctggaacggcatgatcggcggcggcagtggcacttcttggggcattgtgaagcgaaggatgaagggaaggactcggttggggaggaagaaagaaaaatggacccccatcaccatgcat

SEQ ID NO: 59748 - DNA, 1455 bp, Oryza sativa
  Clone ID: PAT_MRT4530_61342C.1
atggagcaatggctgccgctgttccgctacctcctcgcctctccggcccccaacgccgccgccttctcctcctcctcctcctcctccggcgacgacgacgtgcactgccccaccgcgcctcctcctgccgcggccctcctctgcctcctcctctccccggcgcccacgctcccggcctccgatccccccgccatcctcttccagaccctgccgccgctcgcccagtcgcaggcgctctccttcctcgcctcctccgccggcctcctcgacccggcgctcgtgcgctcgctcgctacgcgcgtcctctccgagccgtctggcaggtacggcctctgggcccgtcgcggcgcccgccacctgctcgacggattgccgcagggaggtggcattgatgcacctggggaatttcttgatgggttccacgagccgccgcagtggcttaaagaagcggcggcgaggacacgtcctgcacttccatggctacctcttgatcggcacagcgtcaaggttggtgtttgtagcggtcggtatggtttcgatagagttggtttggattccttggtgttggagaaagacgaggattcggagatgcaggaggctaagtgtgttccatctccatcacaaccggctgctcttgggactctgtccgtgcagagggcgctggctctacagaaggagattttgatggcagaatcaattttggtagcccagcgtgtggcgaaagatttgcagcagctttgtgtcgagtctgggaatgctgaggctgttcttagcatagttcaaccatggaaagctgatgatgatactgtgagggttctgctttccagtttagtgctcgacggagatggaatgcatagaaaaggcccagcgcttatgctgtgttctcttttcttgccgaagttactcgaaattcaaagaccagtttcatcagttcttctttctgctgcattggatctctgcaagcgccacccagctgctgcactggaggctatccttttaccgctggttcttagaaaggaagggctaaatgttcctcagtgcgatgtgctcacacgaattgtcaaggattgcatgcatccgttgcatgtcactgccttctgccatagattgctttcaggggatgagagagagtggaggccagtttgtatgcctgagcaccggagcaacatcagtagtaatttggtttggacagaatccctctttgcactgttgtacagcatactgaatcaagacatttgcttgacatcaagcagcaccgaaaatctagtgtctgtgattgatgagatggcatcaaagctcccaagatcactgaaatttggtaattttctgctctgcttcatctcgaaatgttggcgcgtatctaagattcacagcgttttgctagagagagctgctgagaaaactgacactttcctgactaaagctatattagcaaaactgcgaacggcaaattga

SEQ ID NO: 59749 - DNA, 249 bp, Oryza sativa
  Clone ID: PAT_MRT4530_61343C.1
atgatgagattaattaagtagcaggtctatagaggagcagagtggtggcggttcataggacatctaaaaactattaataaaacgccaaacaaaatcctaatgatgattaaaacgaaggacgacgggcaggtcgtgaatcaatcggtcaaggcggttgtgacaataaagaagggcggcagcgggcgagccgtagaggagtacagtgacaaagttgctgtagtttcggcggaacttctataaaataaaaaa

SEQ ID NO: 59750 - DNA, 2505 bp, Oryza sativa
  Clone ID: PAT_MRT4530_61344C.1
ctacccatgatgtaattctgactgcgctctctttccacaagtttttttctgaccctgcccctgttgctgctcccaccgttcatttccaaggacaatgtccaacggatcccactccgattgaaatctctgagtctcatatgggcccatatatcccatctcccggttactgttcaagtttaacacgacgatggcagtgctaccgccgtcgctgtgggcctctccctgccccaaccacaggacattctcttctctctctcccttctgctcaagaaatccaccagctgctgcatcaggaggtggagctcgctcgtcgtcttcgtcttcgttgcgcttcgtctcctcaggtgcccggaggagcaagaattgttgggggggcagcgaggtagacgcagttggagagccctcttgcatggatgcagcccactggcaccaggggctagggctggtgaagcccatggaggagatgctgatggcagcgaacgcggccgccggcgcgaatccgaatccggcggcgacggcgccgtcgtcggtgactgggggcgcactgaggggcggcggcggcggcggcgcgccgccggtggcaggtggcgcgggggcgggtagcacggagcggcgggcgcggccgcagaaggagaaggcgctcaactgcccgcggtgcaactcgacgaacaccaagttctgctactacaacaactacagcctccagcagccgcgctacttctgcaagacgtgccggcgctactggacggagggcggctcgctccgcaacgtccccgtcggcggcggctcgcgcaagaacaagcgctcgtcgtcgtcggcggcatcggcgtcgcccgcgtccgcctccacggcgaattccgtcgtcacgagcgcgtccatgtccatgtccatggccagcacgggcggcggggcgtccaagaacccgaagctggtccacgagggcgcgcaggacttgaacctggcgttcccgcaccacggcgggctgcaggcgccgggggagttcccggcgttcccgagcctggagagcagcagcgtgtgcaaccccggtggcccaatggggaccaacggccggggcggcggcgcgctctccgcgatggagctgctccgaagcaccggctgctacatgccgctgcaggtgccgatgcagatgccagcggagtacgccacgccggggttcgcgctcggtgagttccgcgcgccgccgccgccgccacagtcgtcccagagcttgctcgggttctcgttggacgcgcacggctcggtgggcgggccatccgccgcggggttcggctccagcgcggggttgcaaggcgtgccggagagcacgggcaggttgctgttcccgttcgaggacttgaagccgacggtcagctctggcactggcggtggaggcgcaagcggcggcggcgccggcgtagacggcggccatcagtttgatcacggcaaggagcagcaggccggtggcggaggcggcggcccaggcgggcacgacacgccggggttctggaacggcatgatcggcggcggcagtggcacttcttggtaatgcggcggcggcggccatgcatgcatgcatggctcatgcaaaagcctccgcgctgtggtggcgtgggttcaaattggagataggcagtagagacgacgagggttttaataagaggttggcattggcgataatccatcactgattcactgttactccgtataaggtgttttgatctctcttcttcttctttcccggtgttgcatcatcatcttggtgttctttcttctcccttttgctgtctttcatgtgattgttgatcggctttggtgctcaacacaacaaccgagctcacatgattcctcaaaaggatcatgatgcatgatcgatctctttctgaattctgatcttccagttctctccattgatcactgttactactagtcatcgcttgatcgatgtgtggttagagagctgcatgcgtcagtgcagtactagactagtagagcatgggaagcttctttttaggctggcttcgagtccgatggcgtgtacgtacgtggtacacaggcatgcatgtggtgtgtagctcattggttttgcaggggcattgtgaagcgaaggatgaagggaaggactcggttggggaggaagaaagaaaaatggacccccatcaccatgcatgtatgtcaaacttagctacagtatgtttggtaacggcaatgcatcaagcttttggttgtagatgtagatcttgggaagggtttgcagctgatctatgactttgtgttgatccaaacagtagtgattccatccttttctagcttaacttgttattgttgttaacttctatgggatgtgtagaggtcatataaagttatagtagtagtagttgcaaaaggggtttttgagcgcatgtaatttaatttgtatagtactcctactatcttattgttatatttacagccaaactataatgcacatctttttgctccttgtttctgaaaaaaaaaaaaaaaaaa

SEQ ID NO: 59751 - DNA, 840 bp, Oryza sativa
  Clone ID: PAT_MRT4530_61345C.1
atggagcggcgcatccaccatcgacaagatgagttctccctcacgagcacggattccgcaagtggcgacctatgtcctcccttgccgccctctgccctcccatcagcaggcctcaggatggcgatgcagggatttgcggtgacgacaagatctagtggagacgaggctctcgcggagccccgacggcgcccgctcgtggaggtggagggcggcgtcggcggcactctgaggctgcggcgaggggggcggcggctgcgaggggacgacgactgcgtgggggcgacggcggctgcgttggccgcacgtcgagggagcagtagaggcggccacacgaggagggaaggagcggtggtggcatcggcgttggccgcgcgtcagaggaccagtggcggccacacgaggagggagcgttggcgtccgcgcgcggaaggagggagcggcggcgtcggcggctgccgtgctcgaagcgaagtgagggagcggcgtcggtggttgtcgggctcggagcagagggagggagcggcggtgaggctgctaccgtgcagaggggcggccaggccgcggcgctggttgctgccgcgcaggggtagggagggaggagtaggggcagcagcgtcggctactaccgcgcggaagggaggcggaggtgacgtccgcatgcgcagcgggaagggaggcggaggccggcgcgtggcgaagggagggaggggagccgggcctggcggcggtggccagtgtcggaggttggggagccgggcacgcggaggaaggaaggaggcgtcgcagaagaagagaggaggtgaggagagaagagaactgacgggtgggtcccacatgtaa

SEQ ID NO: 59752 - DNA, 1358 bp, Oryza sativa
  Clone ID: PAT_MRT4530_61346C.1
agtaagatgctccatcatgatgatctattctgtaacaggggtaaattggtaaagacctggttgtaaactagtaatccagacggatggtgcatgtaagagataacaactgcactttttttttgatattatggaaaattacagattttttttcgtgaagttcagttgggccatacaatggattcaccgaagaaatgcattgtgaaaattggaaaagaatatgaaataatgaaagaacaattcttttggtgctttttttcagtcaagaaatgagtgcttggagccctgttacagaccaccatggcaccatgtgggctgacattgagtcatttcggaagaattttcagttcaccaagtcagttcgaggtgtttagatctgaatttgattctacagtctttgatgcttccttgctgtctgtggttggagttgcagctgcactcgcggagactggcggagctgattgagcaccggttgtttcatctggttgccttgagagtgcatgagggggcaactggagtctgaaatccggtgggagagaaggtcctggagggaaagagcccccgtcgaactgcagcgcaggctgctgaatgaaaggtggccgtggagcttgttgctgcatcggagagaagccagcccttggacccagggcacccggcatgtaccccataaactggtacgacggtgttgaaggggatgttggaccatacagctgagggtagtaatgctgtagcgcttgtgaattgtacacggcatgctgcaaaagtttgcataatttctttagtgcgttgtaaaagattgagagggattgagccgaacatgagtcccaccattctccgaactgaggatggtagtacatctgttgaggtggggccgtcatatgctgcggcggcaaccggccgcccatgtaaggctgcgggcccatgtgtggctgatccgggaagagggacccacgtggggcccgccctcgcgacggcgacggacgcggcggccccatggacgcaatgttgcagttggctcgccggccgccgatcgtcgggttcgggttccgcaccgcctcccgcgcggactccggctccctgaacgtcacgaatccgtagcccttagagcggctggtctcgcgatcggtgatgacgacggcctcgaggatttcgccgtattgctgaaagtggtcctgcaggcccttggacggcgtctcccacgccaggccgccgacgaacaccttggtcagcgtggtgtcgccgaaccgcgtccggtggttcggtaccccgctgctgccgccgccgccggcacctcccgccgccggcgcgtgagccggcgctgccgacccagcggacgacgtcgatgacgaggccgcagccat

SEQ ID NO: 59753 - DNA, 313 bp, Oryza sativa
  Clone ID: PAT_MRT4530_61347C.1
attcgccgacgaaggggttcataaagatggtctgaaccacccgagtactcagacgccaagaccttcttgataggtcatccccagaacatacaatgcagggaagacgaacgataacactgacaacaccggtagaatcaccatgagcaaggagctaaggtacgaatcgaatagggctaccttcgaggagacattctgggctgaaacgcaaacgaatctgatggacaagtgacttggcaagtacatttaggacacgacgggtctctgcgaatacctggaggtgattgtgaggaacatggcgttggaagagatccac

SEQ ID NO: 59754 - DNA, 507 bp, Oryza sativa
  Clone ID: PAT_MRT4530_61348C.1
gactgctgatttgatcggctgtcacttcgcctcaggacaattattgatccattcctactaacatctatcgtctgtcattgagagaaagctagagcagtgataggagtgcccagtattactcggcatattcccaggagccagaccgctaagcgccttcgtcaagccacctatgcagggaaacaacctcaagtattccgtgccctcgccagtttcgattgtacgctggctaattgccgtatcgcatctacaagggagcaagcctcgaagcctcaagtatacatacaggggagtaagagacaccggtgccttcactcctcagcatgttcaacaacaatactacgccaggattatcgaatgagttccgaaagcgagacttcagtagtaatgtaattgagaacctagtatcggcggagagtaaaatacaaccccacaagtaggacacttggtggtgattctattcgataccgtactaaataaaggttacaatttctaaaaaaaaaaaaaaaa

SEQ ID NO: 59755 - DNA, 5811 bp, Oryza sativa
  Clone ID: PAT_MRT4530_61349C.1
atgctggtgtggactcaagtcggcgaaatcgtcttcctagtctacaccacggtgccgatctcaactggtccgtcaatgaccggaagtcagaacgtcgtggttacgaccccagacggctctatgtcgaaggatcctcccgtagaagtggagagcggaacatcgacgacgtccgagcccgagaaagatcctaatacggccaaatcttgtccttccgacgagaatcacgagccgacaaggacaacttccgaggcaacaaggtcctggtgtcctatccacaaaaccaggaaacacaccttgcaagcttgctgggtttttctcgacgtacaagctgagatccgtgcctgcaaagagcgtggaattcaacgtacttctccaacccgtgatgtccattgtcctattcataagacaaagaatcacgacctctcaagctgcaaggttcttctcagcaccatgaggacgtcacctcctaaggttcaacagtcacaaatctctcttagagatgcggacaaggaacgaggagtgacggttatctcagatcgattcgttggggtaatcgacatcgatcctcacgagctgtctgttctacacttgttcgaagaccagacctcatcatcaacgagtacaccacgtgatgtattcgccatcgatgggaccaacacatctgcgcacgctaacgcagaacggaggatcaagtgcggatgccgggcgatactgatcgaggacgacatcgtgatgacgatgacggcggagatcgacgccgggacagcaacggtgggcgacgacaagattctcgagaacccggacgtcattctcgctgcgctctcggattggtgtctctcccacatcgcgtcttgctttggggggagggaggggggcatctttgcctccctcagctacttctcgctaaggttgcgggctccaattggcgtctctcccacacatcgcatcttcttttggggggagggaggggggcatctttgccttcgtcagctacttctcgctaaggtatgtacgctcaatagtctgagagttagcgaggtcattaggataattgttgtttttttgtttcctgattcgcaattctgccttccgatagatgagccgtcatcatcccgcggtgccactgggttctcaatgctcacgggtagttcatcatgcactatagaacatgtgccacgttcactgtcgatgagattcacatattccataccaaaggagcacatgcaaattcttaaagctacgtacccagatcgttcctattatggtggccttgactatgaatgcaatcattgtggtgcattattttggtaccaagaaagggttgttagccagagctcgcacagagccaagaggattgcatacaatctgtgttgtcgtggtggaaagatctccttacccccacccaagccttttcctcctatcttacaagacttgattcgttttgatggcggtgcccgttccaactctttcatgcgactcatcaggcaatataattcattatttgcattcacatcgcttggggctaacattgataggagcataaacactggtcaggggcattatgtttttcgtatcaatggtgttgtccatcacagaattggttctctggttactgctcctggacaacgtccggaattcgcccagctgtacatatatgacaccgccaatgagctccagaataggcttaatattttttatcacactgatgatcctggggatgtccctgatcctgttattgtgcaagagcttatctcgatgcttgaccagttcaatcctcttgtgcaacagttccgtcttgctcgagacaagctgctttctccaagtgctcctgagattgctatcaagctcattgggtcagaccattctcagagtgaccattacagccttcccaccatctctgagttggcaacactaattatacctggtgcatcttgtgaggtatcaaagtttgatgtcattgtgcagaagcattcaggtgagttatgtcagttgtcacctattcatccagcccttatgtcattgcagtacccgcttctattcccatatggtgatgtgggttttcatactggtatcaagcttagagaggtagatgatcagccacccggtagttgcgacgaagcatcgatgcttgaattttatcggtacgagtcccactatcgaaaggatgagcccaatccattcacctgttgtggtaggctttctgatcagctcgctgcgaatgctttctcatgtatagagacatctcgactcacataccatgccctcaaccagaaaaaacttcgctctgagacacatcaaggtatatctgatgctgttgttaggggagacagtgatggaaaggatgttggcaccaaggtaattctgccatcaagtttcataggaggaaggcgatacatggttcaaaactaccatgattcaatggcaatctgccgttcttacggtcctcctcaaatattctcaactttcacctgcaattctaaatggccagagattattgaagctattcgttttgaggcagggcaaaaaccaagtgatagaagtgatatggtcacacatgtttaccatatgaagctagatgagtacatcacatctattaagaatggagaagccttcggtcccataaaagctgctcaatctgaagaaccttcacctgcattcattgacaacctgatctgtgctgagataccagatataacagctgataggtttgggtttggtcttgttgatgaattcatgatacatggcccatgtgatgatgatggatatcctatttatcgacgacgcaatgatggtcgctatgtggtgaagaatggtgtttcactagataaccggtgggttgttccttataatccagctcttctgaagaaattccaagctcatatcaatgtggaatggtgcaataaaacataccttatcaagtacctttttaagtatataaataagggaagtgattcgactatgttcgttttcagccacaggacttcagaaaagacagaggctcatactgctagcgatggaggcataggtgaggttatgcaatacatcaaatccagatacctatcaacttgtgaattattctggagattatatggttttgagatccatggaaggagtccttctgttgaacgcctcattgtgcacttgccgaacatgcagtttgtgacataccatgatggagctgaccttgaagaggtcatagaagaccctgattcctctagaacaatgcttactgaatggtttgctaccaaccaacgtcacatctttgccagggatctcacctattgtgaatttcctaccaagtttagctgggatcctgagaagaaagtttggacaaagcgtaaaagaggaaccaagatagggagattaaagcacatccatccaagtactggggagccgttctaccttagaatgttgctcatgatagttcgaggatgtatgagttttgaagatattaggacatatgaaggtgtgttgtatggtacctatcgtgaagcctgtcaggcacgtggtctcattggtgatgacgctgaatgggatcacctctttgaggaggcagttatctgggctacttcataccagctcaggaaccttttcatgactgtactagcacactgtgatgtaggtgatgttagggttttgtttgataagtactggagatacatggtagatgattttgcttacaagttaaccaaagctcttggagtacaacgcacagctattccagaagttatgttgcaggataccttgctcaaagagttggatgccatcttgaacaatgaccagaagatgatatatgacaagatttttgacaggatagaccatcacgaaaagtgtattttttttatatctggacatggtggaacggggaagacattcttgtggaatgctattatggcaaacatgagatcaagaggtgaaattgttcttgcagttgcctcttctggggttgcagctctgctcatgcctggtggaaggactgctcattcacggtttcggatacctatagatatacatgaccggtcgatgtgtgctattcgtagagggacaatcctaggagatcttattaggaaagcatcactgattatatgggatgaggcgcctatgacacacaagctgtgctttgaggcattggatagaactctacgagatattcaatccgctgatgaaccagctaatgaatataagccttttggaggtaaacccattttacttggtggtgattttaggcaagtcttaccggtgattgagaaaggtacaagagctgatgtggtagatgcttcgctggttcttgacattggtgagggtcgtgctcccatgaacaaaagacaaggtgaggttgagaggacatggatagagatacctaaggagttgctgcttactccctgcggtgacaagattacagctataattgatgccgtgtacccggattttgaattgaactatgactacattccttacctttctcagcatgcaattgtctgtcctgtcaatacagttgttgatgagattaatgataagatgcttgctaaagtgcttggggatgcaaaggactatcttagcagcgacactatttcaaatacacttgaaaagcctgcagattttgatctattgtaccccatagaatttctaaactcaatatccataaacaatttcccgaaacatcgcatatccctcaaaattggttcagctgtagtcctgcttcgcaacattaaccaatcactcggcctttgcaatgggataagattgatggtcacccgactcggtgattatgttttcgagtccaaaatcatgactggcacaaatattggccagctgatggattacactatgctaagggatgtgacacaggaatcacaccgttggcaggtccgagtgcgggtcactcgcttctcgcagttcactacagcaaatgaacctgacaagattctgcgacttgatttagtcctgcttgatgagcaggtgactctgtttggtccagatcaatctatctcattccttattagctttgtctattccctgcttactgccctcacttactcatgtgcaaattttatcccttatactactcctgtagatgctataggtataatgacacccattggaccagtgcaaactgtttcttgtggaggtgttatgaaagctgtgcttaatgtccacataaccaatggaagtgccatcctttacttcctctgtttctcgcatgtgaaccagggcaacagctatattgtcaagatagccatcaaggatttagtccctgctgaagcctggtggtacagagtggctatcataggtgtcgacccatcagatttagcgaaccatgacgccaaaacagctgagtttactttctttggagaaattggctaccagttgattggcatccctgttcttaacctggttgcatctgtccaaggagcacgagatatagttccatcaaaaatcaaagcagtttttgggaaacaatatgtcattagaactagtgtgtcacgtggctcattgcaaagaaatcggatatcttaccaagtggattcccttatgctagcctcactagatgcagcccacacaagtactctacccagccatgatgcttctatggcatcttctcagcatggctcatcaccagctgatgcaattgaaccgcacacgataattggctcttctctccaatctatgacaccttctacaccattggtgcttccagatccaaagctcctggctatggcacaactagacaaaaaacgtaaatcttctgcaattgatgaggatcttgctcaggaaggaaaaactgactctacattacattttgccctttag

SEQ ID NO: 59756 - DNA, 286 bp, Oryza sativa
  Clone ID: PAT_MRT4530_6134C.1
gattttttgatctttttccttggagaggacttttgggactcgaggccttttccagatccgatcccagagcgattggggggcggttgacactttgtcacttgttcatacacagatccaccaaaacacaggagtagggtattacgcttcccagcggcccgaacctgtatacatcgcccgtgtctcgcgtttcttcctggctcgcgatccttccacataccgagagagcttgagatttcaccctaagcccccggccgaactggcaaaggggggcctgtgcggtctcccg

SEQ ID NO: 59757 - DNA, 1895 bp, Oryza sativa
  Clone ID: PAT_MRT4530_61350C.1
ttcgaggatgtatgagttttgaagatattaggacatatgaaggtgtgttgtatggtacctatcgtgaagcctgtcaggcacgtggtctcattggtgatgacgctgaatgggatcacctctttgaggaggcagttatctgggctacttcataccagctcaggaaccttttcatgactgtactagcacactgtgatgtaggtgatgttagggttttgtttgataagtactggagatacatgaagatgatatatgacaagatttttgacaggatagaccatcacgaaaagtgtattttttttatatctggacatggtggaacggggaagacattcttgtggaatgctattatggcaaacatgagatcaagaggtgaaattgttcttgcagttgcctcttctggggttgcagctctgctcatgcctggtggaaggactgctcattcacggtttcggatacctatagatatacatgaccggtcgatgtgtgctattcgtagagggacaatcctaggagatcttattaggaaagcatcactgattatatgggatgaggcgcctatgacacacaagctgtgctttgaggcattggatagaactctacgagatattcaatccgctgatgaaccagctaatgaatataagccttttggaggtaaacccattttacttggtggtgattttaggcaagtcttaccggtgattgagaaaggtacaagagctgatgtggtagatgcttcgctggttcttgacattggtgagggtcgtgctcccatgaacaaaagacaaggtgaggttgagaggacatggatagagatacctaaggagttgctgcttactccctgcggtgacaagattacagctataattgatgccgtgtacccggattttgaattgaactatgactacattccttacctttctcagcatgcaattgtctgtcctgtcaatacagttgttgatgagattaatgataagatgcttgctaaagtgcttggggatgcaaaggactatcttagcagcgacactatttcaaatacacttgaaaagcctgcagattttgatctattgtaccccatagaatttctaaactcaatatccataaacaatttcccgaaacatcgcatatccctcaaaattggttcagctgtagtcctgcttcgcaacattaaccaatcactcggcctttgcaatgggataagattgatggtcacccgactcggtgattatgttttcgagtccaaaatcatgactggcacaaatattggccagctgatggattacactatgctaagggatgtgacacaggaatcacaccgttggcaggtccgagtgcgggtcactcgcttctcgcagttcactacagcaaatgaacctgacaagattctgcgacttgatttagtcctgcttgatgagcaggtgactctgtttggtccagatcaatctatctcattccttattagctttgtctattccctgcttactgccctcacttactcatgtgcaaattttatcccttatactactcctgtagatgctataggtataatgacacccattggaccagtgcaaactgtttcttgtggaggtgttatgaaagctgtgcttaatgtccacataaccaatggaagcgaaactgctgtcattgcattgtggggtgcccatgatacacagttccacgctgaaaacttacagcagcaagcaaaccatggacctgagctagccctacaaggtagcactgtttgtaggtggtatcccaatgcaccaatccagaaaacaatttctctcataagcagtgccatcctttacttcctctgtttctcgcatgtgaaccagggcaacagctatattgtcaagatagccatcaaggatttagtccctgctgaagcctggtggtaa

SEQ ID NO: 59758 - DNA, 300 bp, Oryza sativa
  Clone ID: PAT_MRT4530_61351C.1
ctcacccgtgccgtcggcgacttctgttgagagtactcttcgtacgccgacgagtacgccgacgaggaggaggagtacgtggaggagtacgtggaggatgaagaggaagatgaggcggaggaggtggcggcgcctgtggcgtactctccctcatgctgcccgccgagactccggcctgagctcgggcatctgttcggccgcctcttcttctacaccctgacctacaccatgacctcccacaccttctcccagaccttctccgtcgacaacatgctcatcatctatcacatggtctctgac

SEQ ID NO: 59759 - DNA, 944 bp, Oryza sativa
  Clone ID: PAT_MRT4530_61352C.1
gcacgaggggagatcttattaggaaagcatcactgattatatgggatgaggcgcctatgacacacaagctgtgctttgaggcattggatagaactctacgagatattcaatccgctgatgaaccagctaatgaatataagccttttggaggtaaacccattttacttggtggtgattttaggcaagtcttaccggtgattgagaaaggtacaagagctgatgtggtagatgcttcgctggttaggtctgcactatggaagcatgttgaagtcttacaccttaccactaacatgaggctacataatccatccctgtcgcagcaagccaagggtgaattggcagagtttgctaaataggttcttgacattggtgagggtcgtgctcccatgaacaaaagacaaggtgaggttgagaggacatggatagagatacctaaggagttgctgcttactccctgcggtgacaagattacagctataattgatgccgtgtacccggattttgaatttaattacgactgcatcccttacctttctcagcgtgcaattgtctgtccagtcaattcagttgttgatgagatcaatgataggatgcttgctaaggtgcctggggaagcaaaggactatctcagcagcgacactatttcaaatacacttgagaagcctgcagattttgatctattgtatcctatagaatttttgaactcaatatccataaacaatttcccggaacatcgcatatccttgaaagttggttcagttgtagtcctcctccgcaacattaaccaatcactcggcctttgcaatggcaccagattgattgtcacccgacttggtgactatgtttttgagtctagaattatgactaggacaaatattggctagttggtatgtattccgcggattgtgctaagtgggaatagcccaaagtggcctttcatgcta

SEQ ID NO: 59760 - DNA, 330 bp, Oryza sativa
  Clone ID: PAT_MRT4530_61353C.1
atgtccccgaggcgggtgcggtggcggtggacgactccaaaggcgggtgcgacagcggaggaccccgagacaggcggcgacaaccccgaggggggctcagcggcggacgcccctgatgagggctcggcggcggaggaagcgaggcggggtcgggggacggctgcgtggattgccgacatggctaagaatatcctgtttttggtgttgaggctgaataccatattgacgtattgtgaacgccctaaggagactatagcaaggaaaggtactacagataacagatggatgcttggcaatgccgatgggcgcaacgtcataagtggggcataa

SEQ ID NO: 59761 - DNA, 330 bp, Oryza sativa
  unsure (1)..(330): unsure at all n locations
  Clone ID: PAT_MRT4530_61354C.1
aggtgagcttctgctaatcctgacataaaaaggagttgcagcgatgttggggatttggtccttgagctcatgcatattgcaagaggtacctaatttgagtttcaaaagtggatgtgtgcagctgttccacnttgattggttactatcaggtgtttgtgggtcaagtctgtagtttgcaaggagtgaacctcagtgtctgtttgttgcggagccctcctccaccgtcgtccagtctgctgcccccattgctggtcgcgccatccagtccgccaccccctacgcaccctctgacgccatctccaaaaggtacagatcccctcctcctacccc

SEQ ID NO: 59762 - DNA, 581 bp, Oryza sativa
  Clone ID: PAT_MRT4530_61355C.1
gtaatgccttctttatgtgttgcagatggattacactatgctaaggaatgtgacacaggaatcacaccattggcaagtccgagtgcgggtcacgcgcttctcgcagttcactacagcaaatgaacctgacaagattctgcgacttgatttagtcctgcttgatgagcagatcccaggacgtcatgtttctcaattcaagcctttgctgaaggaggatgctgtgtattacatcaagtacttcgaagttgctgaggcgcgcccccagtacaggcctattgatcggatggtcatggcaaaattcactgcccacacaaccgttagagaagacactgaggcaccatccacattcccatctcatgcttacaaggttctttcttttgatgaactcagaggtcgtgcttacaggaaagatattctttcagatgctataggtataatgacagccattggaccagtgcaaactgtttcttgtggaggtgttatgaaagcggtgcttaatgtccacataaccaatggaagcgaaactgctgtcgttgcattgtggggtgcccatgctacacagttccacgctgaaaacttac

SEQ ID NO: 59763 - DNA, 725 bp, Oryza sativa
  Clone ID: PAT_MRT4530_61356C.1
gcacgagggcagcacgaaggaagatagattttccccatcgaaatctcgtcgcttcccccgggttcgattcgagtcttctctctcgcagcagcacaaagatggacgcaaacagacgccaaagtggaatccagcaattgttggctgcagagcaagaggctcagcaaatagtaaatgctgctagggctgcaaaatcggcaaggcttaggcaagcaaaagaggaggctgagagggaaatagctgaataccgtgcccagatggaggctgaatttcagaggaaggttgcagagagtagcggtgactctggtgcaaatgtcaagcgtcttgagcaggagacagcggaaaaaatcgcacaactcaagcagcaggctgcaagtatctcccctgaagtgattcagatgcttctgaggcatgtcaccactgtgaagaactaagggttgatggcttgctgctaggcgatttgccatacatctgatggcaaacttgtactgtttattttttgagagggtggtaagaataacttcgtctcttctagctgtaattccgtgttccgaataacggaataaactgcttctgttcatcagcagccatgtttcgtactttgaaaacctcggttcctgtctggtaaatattatcctttcatgtatcatttgaataaaataatgggagattctttttgtttattctcaaaatctcccttgtctttaaattttgcctttactatcggc

SEQ ID NO: 59764 - DNA, 713 bp, Oryza sativa
  Clone ID: PAT_MRT4530_61357C.1
gtgtattacatcaagtacttcgaagttgctgaggcgcgcccctagtacaggcctgttgatcggatggtcatggcaaaattcactgcccacacaaccgttaaagaagacactgaggcaccatccacagtcccatctcatgcttacaaggttctttcttttgatgatattctttcagatgctataggtataatgacacccattggaccagtgcaaactgtttcttgtggaggtgttatgaaagctgtgcttaatgtccacataaccaatggaaggtatgtatgcgttaatccactaattgttccagctgcttttgtattagatacaaaatgacttaattgtccgcacatgcattgtcagtttctttttacacatgtacaatccttcttttttgtttataatatcaacattgtttcacaactctcttatttgcaaatgtgaatactagcttaattcatgcacattattttccacctcttcattcttctatgtgcctacagcgaaactgctgtcattgcattgtggggtgcccatgatacacagttccacgctgaaaacttacagcagcaagcagaccatggacctgttgttatatcgtttgttggattaactgttaaattccgagaccaccagctagccctacaaggtagcactgtttgtaggtggtatcccaatgcaccaatccaggaaacaattctctcataagcaggtatctc

SEQ ID NO: 59765 - DNA, 1249 bp, Oryza sativa
  Clone ID: PAT_MRT4530_61358C.1
gcgcgttggccgattcattaatgcagctggcacaatactcaagcttgctgggtttttctcgacgtacaagctgagatccgtgcctgcaaagagcgtggaattcaacgtacttctccaacccgtgatgtccattgtcctattcataagacaaagaatcacgacctctcaagctgcaaggttcttctcagcaccatgaggacgtcacctcctaaggttcaacagtcacaaatctctcttagagatgcggacaaggaacgaggagtgacggttatctcagatcgattcgttggggtaatcgacatcgatcctcacgagctgtctgttctacacttgttcgaagaccagacctcatcatcaacgagtacaccacgtgatgtattcgccatcgatgggaccaacacatctgcgcacgctaacgcagaacggaggatcaagtggttacaccggcccagcacatcagggccatcaacgcattgctgagggaaactccttatgaccccattctgaacgatgatctcgaacagtggacagaacggctacgggaatccgtagctaacctcagtaacgcattcgaggaggccgctgctagggcacaaccagaacaaccgccgaacggcggtgctgacggagaaccacctgaacagcggacgtcacctcgtcaagccactcctccgcttcggggcaccagcgatctcctcgaccatctaaacggtcgccgagaagcgcgacgcactcgagacaacgacgaccgttcttgacatcgcgtctcctcgcgacgccgcgggaacgaagaacaaggaggacatccaagcgagaaccgagaccgtgataatcgccacaaccgccacgaacacaccaatcgcgagcagcggatgccgggcgatactgatcgaggacgacatcgtgatgacgatgacggcggagatcgacgccgggacagcaacggtgggcgacgacaagattctcgagaacccggacgtcattctcgtaatcgcacaccggaaccgagcgactcttcatcgtcatcgtcatcatcctcatcatcttcgccatcggacagacatccacggagaacgtacgatcaccgacaacccactgcccccggcggtgggtgtagagctttcagccgtgctctgcgggacgtccgatggcctgagaggtttcgaccgggagcgatagagaaatacgacggaagcaccgacccggaagagttcctttaggtctacactgatgatcctggggatgtccc

SEQ ID NO: 59766 - DNA, 1017 bp, Oryza sativa
  Clone ID: PAT_MRT4530_61359C.1
ccgggctgcaggaattcggcacgaggtacagagtggctatcataggtgtcgacccatcagatttagcgaaccatgacgccagaacagctgagtttactttctttggagaaattggctaccagttgattggcatccctgttcttaacctggttgcatctgtccaaggagcacgagatatagttccatcaaaaatcaaagcagtttttgggaaacaatatgtcattagaactagtgtgtcacgtggctcattgcaaagaaatcggatatcttaccaagtggattcccttatgctagcctcactagatgcagcccacacaagtactctacccagccatgatgcttctatggcatcttctcagcatggctcatcaccagctgatgcaattgaaccgcacacgataattggctcttctctccaatctatgacaccttctacaccattggtgcttccagatccaaaggccacaactgatagccgtgatgatcatcatgggacaacaccgcctacttcagagctcctggctatggcacaactagacaaaaaacgtaaatcttctgcaattgatgaggatcttgctcaggaaggttcatctcctcgtgaacatgattgtcagaaagcatcagttgtgcgtgcgctgttcgtagacaaactgcccccgcagcccccaaaatgacttgagggctccatataatatcaccccaccaaagcggtcttttgcacctggcatgccaaggcgtatactcctgtccctgatcaagcaagactaatgctcacatattttgcccaatgtattttgcagtgggaatataaataggggatgtgttcttttgtgcaagccattagaccaaatgacattacttctacgtcttacaggcttgcgagccctagtggctagcagaacgataaatgaattcgtataaatagtatgtggtgtctgtacgatatgcacgttctaatcaaatatcgccagaacttatactcttatcaattggtgctaaaaaaaaaaaaaaaaaaaa

SEQ ID NO: 59767 - DNA, 171 bp, Oryza sativa
  Clone ID: PAT_MRT4530_6135C.1
atgccggtggcagcctacggcactatgagtaggcagatggagatagacgggttttcaccgtcgatacgtcatctaacggggctgtggataggctcctatgtaccggggggactcaagaccacaatcaacgtcgtgatgcgtgagctgatggcttttgatgggctcggctga

SEQ ID NO: 59768 - DNA, 619 bp, Oryza sativa
  Clone ID: PAT_MRT4530_61360C.1
cattccattctcgccaccggcttctctctctctctctctctctctctcttccccattcctcgtcggcttctctcgcggaggaggaggaaacgcacgaggccggcctggtccttccccttcgtcctagggttcgcggtagccctaagcccgtagaaaccccagaagccggaggaggaggaagcgggaggtggggggaggggaggggatggggaggacgaaggcgcgcgggagggcggaggcctgtgctgtatgtcagatcgtgtgagccggcgaggcggaggcggaggcggagaatacggacacggtcagctcgcgaatccgctccaatggccgcaactcaggaaaaggcgccggtcgtcgtctgctgcggcggtggcggcgctgcggctgctcggcgcgtcgacggcggccccgggtcgtcgtcacgcggggcgatcgtcgcggcgcccgcggctgctgctgctgctgggaaggtctccatggtctcgggcgatgatccccgcgtcgccgcggcggccgggggtggcggcggcgccgtgatggaggagatcatcgccgcgcgccagcccaccaccgcgaaggtctcctcgaaagcgatacctataatgacccctcgtgc

SEQ ID NO: 59769 - DNA, 371 bp, Oryza sativa
  Clone ID: PAT_MRT4530_61361C.1
tttttgttttgttttatttcctcctcatttttttttttttttttttttttttttttttttttttttaggcttgcaaaccgggccatggaatttatttttaccaagcataccccaaaatagccccgccttaataaccaaagccctactttttgggttaaaaacccaacagggtcagaaaacacccaagctcagaactccgcattacccaaattgggggcaaggttgggggcccacaattcccctataccggggggggtttatttcccgattctacgagctttttaactagaggtcgcccgggaaggcaattcccgatagaaaagggcctcccggttttacaaaacccaagcccacaacagaggggatgaacc

SEQ ID NO: 59770 - DNA, 366 bp, Oryza sativa
  Clone ID: PAT_MRT4530_61362C.1
atggcgggcgaaggaggcggcgaccctgagctcctagaggacgacggcgggcaaaggaggcggcgacgctgctatgggaaggagaccgcggcagctggtgcacaattggggggagaggcgatggtggaggaagagaaaagagagaagagagaagagagaaaagagatggggcagtgggcagtgggggagggttggggtttccttatttataagtcaaaattgatggaatatctgaggagtatagctcaaactagggatgacaattttgcccatgggcccgggtatccgcagatacctgacccaataggtatgggcgtgggtgtgaatttttacccgtgggcactagggatgtcacagttgctatga

SEQ ID NO: 59771 - DNA, 1699 bp, Oryza sativa
  Clone ID: PAT_MRT4530_61363C.1
ttttttttttttttttttttttgataaagtataagagttggaagtcaatataaattgggcataactgcatttcatatacacatggtcccgaactagagctagctaggattcctcattcaatttccagacatcaagtcataaaacattatacatcacccaaggcccaagcagcccaagtgttaccaggaactaacagctgcacattaggctaaaaaaatatccattttacattgaagctatatgcccgaaaactgtgtaaaaatcatagatctctgcgatctgcatagagccaggagaaattcgttttgcaaagagtcttcattgaaacccatacacttcggaccaaatatacacactaatctccactatctgggatgaaactttgtaggatcaactagttggccacaaaatggtacctggtgtccacaaagctctcaacatcccaaaggaaggatccaaaagtaacagcctctaagatcagccttctcaaccctgcgaaacttatcctgacatgttcatccttggaagaatcgactgtgccttcaggtgtgattacaatctctggtttaccaaatagtgcctcagtgtgcttctcgatgatgccaaatgcctccttggacctgattgttgcgtaactttgtagggtctctgaatcaaatgacatgacatacgatctaagacggcatggcttaacagattggctaggtccgcctgcactgaagttaggggaagtccatgatgccatctctggatgtgaagtagaagtctggggtgagggccttgagtccgttgtcataacttggttgagcttgtcttcctcttctgatccccaagggagggtcttcattgacttctcgagctgaaatctctgatcgactctcttaaggaagtaaccatacatcacagaagcagcatacacctgaccaactcggagtttacttatggccgcaacagtggcatcagcttgccgctgccccaggatgagagcgaggtggttctcgatcatttcatatgcctcctgtgaatgcatcttctcaagtttcccttccacagattctgcccactgatcaactcttccagaagaactgatagagtgggaaagagctggaaccaaagaaacaccagcttcaacaaacttctggacaacaagtgcatagagtatctcctccaaagccctcttgcgctccttttccttgacctcagcaatccgcctgtacagcacgatgtcgccgtccgacggcgcgggcttgtcgccgccgttgtccttggcggcgtcgcggtcggtctggagctgctcgagctgctgctcggcggcggcgggaagcaggtgcgggtgcgtggccaggatctgcgagaggaactgccccaccggcgactccatctggagcggcgcgatcgacgacgacggcggcggcggcagcgactccggccccgacggcgaccacgacgccgccctcacgacgacgcctcgccttctgcaggtgagctgctgccgtccaagacccttgacggcggcgacaccgcgcctccgggcgaaggggagcgaggtagcaccgggagtcccaggccgccgcgagggcgcggcggcggcgggcggcgacaagagcgccgcggcggctgctgctgctgcctccatcggggaacaaccgacgcgccgggatgccgggtcgaattcgagggtttttcgcggaaattgggg

SEQ ID NO: 59772 - DNA, 197 bp, Oryza sativa
  Clone ID: PAT_MRT4530_61364C.1
tcgggtaggggagataattcgtcgttcgttttgtgcatccatccagaattcgttccatatccagccagccagccatctcaagctactctattatattgatattaagagcaaacaaacaggtagtctaacgaagcaagactgcgagagcagagcattgttcttcttgtctaactattagaggtggggaataatggctc

SEQ ID NO: 59773 - DNA, 652 bp, Oryza sativa
  unsure (1)..(652): unsure at all n locations
  Clone ID: PAT_MRT4530_61365C.1
atgggcttccagggcaccgacggcttctccgtctacgaccacgccggcaccctcgccttccgtgttgacaactactcccgccgccgcaagctcttctccggcgacctgctgctcatggatggacatggctcgcctctcctcgccctcaccccacagattatcagcatgcatgaccaatggaattgttacagagcgtcagaagaaggccaaggcaagaggacaagatcacaacaactcttctcaatgagaaaatgctcagttatgcaaagcagtcatgaagcagaagtgcacatgtcaggatgtacccatgcgtcgtcagatcgtactggccatgttcccgccttctcaatcgagggcagtttcaagagaagaagctgcaagatccgcaacagcggcggtgaggaggtcgcaaggataacgaggaagaaagctggagcagcatcattgtcactgactcttgctgaagatgttttcagtcttgaggtccaaccgaatgtagattgtgcgatgatcatggctttcgtcattgttctggatcggatctgctggaagccatacacacctatgatactgaagaagaggcanaactagtgtccttcacgaagagagagccggagaaggagatggtgggtatccatgcttacgtgttact

SEQ ID NO: 59774 - DNA, 207 bp, Oryza sativa
  Clone ID: PAT_MRT4530_61366C.1
atgaacaaacccaaaatgtacctaagcgatcaggccaaccaggccaggggccagtgcctctccgatccgcgcgtcgtcagaatcctcttacgaaaatgttggtgggtgttccaggaaatatcaacaggaacattctttgcagatggagatggaattggtaaaaccttctttactattcagaatgttttcctgttagcactggcttga

SEQ ID NO: 59775 - DNA, 537 bp, Oryza sativa
  unsure (1)..(537): unsure at all n locations
  Clone ID: PAT_MRT4530_61367C.1
gtcttctcctccccctctttaccttttcctcctcggttcggttccgtggatcgtctagggtttagtgggttgagatggcacatcccgatgtcaagtacctctgcttttcggtcgcgaacaaggcagaccacggccgatgatagctattgacggatgctccgacgtccaagacacggtacctatgtttgtggcacctaccaagtagctggcctccttgcacgcacctagaagctccagcccgacgagaccgaacggcacgggctctaccatagctagatgtccacaaagcatgatggccgcactagcatgatgcctgctgactgccttccaggcagcactgaactgcttgagggaatcagaccccaatnagaaagctttcagatcacctctgagtggctcatcaatcttactgcagcaacattgaggtttttcttttttcgcgggataattttttcttctctacttttcttctcctcctacctttttttgggacataactgtgtggaatctggataccagctacaatgaacttttgta

SEQ ID NO: 59776 - DNA, 711 bp, Oryza sativa
  Clone ID: PAT_MRT4530_61368C.1
atggcggtgcagtgggacaagctcgagtccatcgcctacccgctgctgctcacccaccgcaccaggacactcgagaggttctggatgtccgtcaacgtcgcccgcgggatggacatgggatgccctccgccacgtcgtccggtgggtgcactgcggtgtccagtgcttctccgcgccggtggaggtggaggtggtggcctagctcactgctttgtcggcgcccggcggctcgtcgacctagacctccccgctgcctccaccggtgactgctactactaccgcctccggaggctgcacctcaccggcgtctcgctcggaggccgcttcgtcgagcaagtccggttgcgacttccggatagaaagactggaaaggcatgtgaaccgtttgaaccggtcagaccgccggttgagggccggtcagaccggcggcatgtggccggtctgaccagcagggttgtgcggtctaacccggttcttggtccgacctccttctgctgcgcttcttcgcccgatctggtttcgcctgttgttgatgcaaggaatattgatttgatcaagcgtggtactttcttagcgctcgatattcatgatctagggatggcaattgtgcccgtttacccgtttgtagaaaccccattaagattgggtatgttcttgggtattttgttgggtcaaatgctatacccgatgggtaaacaggcatgtgcatag

SEQ ID NO: 59777 - DNA, 1365 bp, Oryza sativa
  Clone ID: PAT_MRT4530_61369C.1
tcataaatttacaatttttaccttatgggccaaacatggcaggtcatcaccacatttctcatctccaccaccaaccaaatgaaaggcctccaaagcctctgcctcccaatcggtttgaaatgtagcaaagcccccagaaataaggcaaactacctgggccgagagaagcccaagacaaaggcccagaaagcccatatcaagcccaaaagcaagcactagggctacaggtgctccgacgaggtagaaggagtataggttgatggccgccccgacagccggcctcgcactgccgcgtagcactccacaaccggttgtctgcggacaattggcaagctcacataatccgataaccggtagcacgcttgttgtgagtgactgtattgtggggtcagtggtgaacacttggacccatagtcctcgcccaaatgtagtccatgtcagccctacgcacgagcccatcatcgcaattcccattgctactacgaatgagacttgggccgatctcggtcggcccgcccctagctcattcgcgactcgggttgaaacggctgaacttagggtgaccggaattgtgtataacaacgacgtggtctggatgacgatggccgccgtcgccaatgcggtgtgcgggtcccggagatagccggcggcgatcgtcatgagctcataccaccaccactccaagcacacgctcaagcagctcggaagtgacaaccggagcaggtcggcccattcagcccattgccccactccggcccactcctccaaatcggcaggctcatctggctcgttctgggccggggcccacgtcagcgagatccacaggaacgccagcgtggcgaagctggtcatgcacgcggccatggcgacgccgggcacgcgcagccgcgcaccgaggtacgcggtggccggcgcgtggacgagcgccacggcgagcgccgcgcacgacgcgagcctccgcgtctcgcccttgctgcggaggtagacgcgcgcggggaggaggacgctggcggcggcgaggtccgggatggcgtacggcagtaggccccagagcgcggcgacggggaacgacgcggcgaggaggagcagcacggctcggcgcagcgcgcgccgcggccggctcctcgtcctcccggtcccggagccgaacgcctggccggcgaggggctccagcccgagcgcgaggccggagagcaccgagtagccggtgacgttggtgaggccgacggcgagcgcgccgccggcgagctcggcgcggccgaggcggcccaagcagagcacggtgaccatgctcttgacgtagtggagcaggttgagcgccgagattggcaggcacaggcgccgcatcagcttcagctcctccat

SEQ ID NO: 59778 - DNA, 431 bp, Oryza sativa
  Clone ID: PAT_MRT4530_6136C.1
gctacaatggattataatgaggggaagtacaaacataaggcaccagctgataaatattatgcagccagcgcgcacactacatgcaatatcaggtacaactctgatggcatactacagacaaagcgtacataacaacatgaacgagttaacagagttcgatacaacaaattacaccctaggaggataagctcagatcacaatcagttcatagtccctgcctaaaatacgcctagcagttaacttcacaaataggtaccattggtacatgctgttgcttcacaaaagggggggaatcacggcgatcctatggtgcatccaccttgaccagcgcggtactcggcgcctccggggtagctggtgaatactgaagccagtctttggcgcagaagagcgcctccacaatttctggacgcaatgagcttctgtagtca

SEQ ID NO: 59779 - DNA, 970 bp, Oryza sativa
  unsure (1)..(970): unsure at all n locations
  Clone ID: PAT_MRT4530_61370C.1
atggaggcagcgacgacggtccagctcaggattgggggtgggccaagtgatgagtggggtaggggcatgagaaggggggagcgcctcggcgatggtgacaacgattgtagacgaaagcgcgagcgaggagaggagggaggaaggnaaggagggagggagggagggctacgtgaggtgctaggggacggcgacgcctcggtcggctggaggctgcctcggcatggtgggcaagaggagcgccggcacaaggcagcacaccgagcgctgcttggcagcgaaatcttcagtggctgggccacttacatgacccatctgtcatccaaagaaaccgcaccacgcacggagaaaaaaaaagagacggtgcgaaaaaaaataacgcgcacgctcggcggacctaacccatcgccgcgccgcgccatccccacgctgcgccgcccgctggaactaacccacggcgccgccatcccccacgcacagcaagaaatcgctaatctccgcccccacgccactgctccgcctgccgcgccgcccgccccacgccccacgctgcaccgcccgccggacctgatcccgcctcacctcaccggcgccgccctcccccacgccaccatcgccgccctgccccttcccatgccgcgccgcccgccggacctgagcccgcctcacctcaccggcgccgccctcccccacgccaccatctccacggccctccccacgccaccgccatcctccctcgccgccgccgccaccgggggcggttcccaactccgcctcccccaccacgcctcccacatcgcgtcacccctaccgccccgcatctaccggccgacggttcctccgcgtcgccgccggctcctcccgcggcaccccacccccatcccggcgcttctgtccgtggagatcggcggggtagccggctcgcaaggtggagcatcgatgtgacgtgatgcagcatttggggagtctttgg

SEQ ID NO: 59780 - DNA, 305 bp, Oryza sativa
  Clone ID: PAT_MRT4530_61371C.1
ccaatcctggaccaaaccttgacacccccgcctgcggctacggtggcgaatgggaagcacgtgttcctgccgatgcccaagatggcatacggtaagtcagacgcgttcaccgacaccatcccgcgcgcttcgaacccgtcgccatactcaacggaggctgcgacggccgccgacgaggcggatatcgcggaggcctttatggtgacggcggcagcgtaccagatgcaaaccgaatgcgagagcgacacatactgcgagttcgtcacgatcacagctgaccccgctgaccgagtaccttatgcaca

SEQ ID NO: 59781 - DNA, 855 bp, Oryza sativa
  Clone ID: PAT_MRT4530_61372C.1
atggctaacatgcttacaactaagccacatgttttcgatggattggattttccttattggtgtgaaaagacgatggaatcttacattatggctcaagattacgatatttggaaaaatcttgctaatgctgatgagattcctgatcaaattaatattgttgctttaaagattgagtttgaatataattgtaaagcatgtaatatttttctcagtggaatttctcgttttgactttggttgtgtttctcatcctcaaactactcgtgagatttggattgttttacctaactttcatcaaggtacttcaaatatcaaggaacttcataaagatcttttcaaaaatgattacataaaatttgcgatgaaacctggtgagactttggatgattatcttgctagatttaacaaagttttgagtaatcttaaatctattgatacatcttatgatactaattactcacaatatgagatgaaagttatatctattcaggagtctattgatatgtctactttgattttagattcactttacactaaacttaaaacccatgagaggaatattcttttttgtaaagttgactttaaatctagtgttttggtttctccttcgacttccttggatattggtgcttcttcgtcaaattctaccgctcttgcttctataaatgtcatatccgatgatcaacacgagcaactcgaggaggacttggctttggctattgttggtatttattacgagcacaaaataatctacaggcgcacatataccgttgtagctttcacccaacagtattccagggtattgtatccacaggaaacgtgtgtgaacaatctaataacagaattcatccaatga

SEQ ID NO: 59782 - DNA, 878 bp, Oryza sativa
  Clone ID: PAT_MRT4530_61373C.1
ttagccatggctaacatgcttacaactaagccacatgttttcgatggattggattttccttattggtgtgaaaagacgatggaatcttacattatggctcaagattacgatatttggaaaaatcttgctaatgctgatgagattcctgatcaaattaatattgttgctttaaagattgagtttgaatataattgtaaagcatgtaatatttttctcagtggaatttctcgttttgactttggttgtgtttctcatcctcaaactactcgtgagatttggattgttttacctaactttcatcaaggtacttcaaatatcaaggaacttcataaagatcttttcaaaaatgattacataaaatttgcgatgaaacctggtgagactttggatgattatcttgctagatttaacaaagttttgagtaatcttaaatctattgatacatcttatgatactaattactcacaatatgaggtttctcgttactttttaaatggccttgatatttctatttggtagatgaaagttatatctattcaggagtctattgatatgtctactttgattttagattcactttacactaaacttaaaacccatgagaggaatattcttttttgtaaagttgactttaaatctagtgttttggtttctccttcgacttccttggatattggtgcttcttcgtcaaattctaccgctcttgcttctataaatgtcatatccgatgatcaacacgagcaactcgaggaggacttggctttggctattgttggtatttattacgagcacaaaataatctacaggcgcacatgtcgactggagaggaacgcggattttacctttatcgcctaacagagttaaaacaaatcacccct

SEQ ID NO: 59783 - DNA, 414 bp, Oryza sativa
  Clone ID: PAT_MRT4530_61374C.1
atgcccctcacatacaacctgcaaattgagatatttgatgtttggggtatcgactttatgggacctttccctaagtcccgtaactgcgagtatattctggtggcagtcgactatatctccaagtgggttgaggctatgccatgcagcgccgcggatgcgaagcatgccaagaagatgttcacagagatcatcttcccaagggttaagcttttctaccatgggaaattgcgcagtaaatgggaaggaccgttcgacgtcatcgacacctcttcgcactgggcaatcacactccgcgacgattcaggaggttgctcgatcggaggggcggtgaggatcggtatcaagccgccagcgaccaagaagcccaacatttttagaccgaaggcacttggcccagcttatattgaaagctag

SEQ ID NO: 59784 - DNA, 217 bp, Oryza sativa
  unsure (1)..(217): unsure at all n locations
  Clone ID: PAT_MRT4530_61375C.1
cccgnanaagatgaccnggttncccaganttnttaattaacaaantaaaacacgtttagnntcgncgtnnagnnngggcatgtcggntcggcgngnacanacacgggntgntaacatgttagccagccggcaggtagatcgnaaatataggaaggagcttaattagccatggatggcgcncaggnagctgcttcattcaattgcgcacccagagcat

SEQ ID NO: 59785 - DNA, 1269 bp, Oryza sativa
  Clone ID: PAT_MRT4530_61376C.1
atgtgcatcgtggtgaccaagtcgccgccggagatcgtccggccatcggagccggtgacgacgacggcggcgaccggcaagatcattttctcgcctttcgacaagcctcttgccaccgtaccggtggtagtgttgcaggtgttcgagcatccgatccatgagcccgtggagaccatcaggaggggcctctcccatgcactggtccactactaccctctcgccggccgcctcgccggtgacgattacgacgacgtgcacatcgactgcaccggcgaaggcgtgaccatcgtcgccgcgtctgccaactgcaccgtcaagcagctcatgcgcgacatcgacggccgattacctgacccctcaacggcggttcaacgggagctcatcgtggacgacaacccggcctacggcttcggccgcgctgaccctctcattctgatgcaggtcaccaccttcacctgcggtggcttcgtcatcggggtgacatggaaccatggcgcggctgacggtttcgggatcgcgcagttcctgcaagccgtcggtgagctcgcccgcgggctgccgaccacgtccgtcataccagtcaggtcggacaagtcgttacaggccatgtcttcttccaccgtcatggccgccaagcaattcatgttcggcgtcaagccgacgacgctcgccctgcacagcatcaccatccctgcgagggtgatcaacggcgtccgaggtccgactccgacgtgcaccgtgttcgaggcggtggcggccgtgatgtggcgctgccgcacccgcgtggtgatgtccgaccccgacgcccccaccgtgctcgccatcacggtgaactctcgcaagtacgtgggcgtcaaggacgggtactacggcaactgcgccaccatgcagatggccgtggcgaggagcggcgtggtggcggacggcgatatgatggaggtggtgaggacgataaggcgcgctaaggaggagataccggagcggttgaagaagggagacgccatcgccgagctcagcaaggggcagctgagtgggtacgagagcgtgctgctggtgacgtgctggcgaaacatcggcttcgaggcggtggatttcggcggcgggaggacggcgagggtgatgacgacgtacgagcagagtggggtgcggccgctgtgcgtggtttgtctgccatggcaaggggaggaagatgaaggagccagggtgctgtccggctgtgtaacgcctcaccatgccgatgcttttctccgtgaaatagctacgctctga

SEQ ID NO: 59786 - DNA, 942 bp, Oryza sativa
  Clone ID: PAT_MRT4530_61377C.1
atggccatgaaccaccctctcttctcccaggagcaaccccagtcctggccatggggtgtggccatgtacgccaacttccactaccaccaccactacgagaaggagcacatgtttgagaagcccctgacgcccagtgacgtggggaagctgaaccggctggtgatccccaagcagcacgccgagaggtacttccccctcggcgccggcgacgccgccgacaagggcctgatcctgtcgttcgaggacgaggccggcgcgccgtggcggttcaggtactcctactggacgagcagccagagctacgtgctcaccaagggctggagccgctacgtcaaggagaagcgcctcgacgccggcgacgtcgtgcacttcgagagggtgcgcggctccttcggcgtcggcgaccgtctcttcatcggctgcaggcgccgcggcgacgccgccgccgcgcaaacacccgcaccgccgcccgccgtgcgcgtcgccccggctgcacagaacgccggcgagcagcagccgtggagcccaatgtgttacagcacgtcgggcggcggctcataccctaccagcccagccaactcctacgcctaccgccgcgcagcagatcatgatcacggggacatgcaccatgcagacgagtctccgcgcgacacggacagcccaagcttcagtgcaggctcggcgccatcgaggcggctcaggctgttcggcgtcaacctcgactgcgggccagagccggaggcagacaccacggcagcggcaacaatgtacggctacatgcaccagcagagctcctatgctgccatgtctgcagtacccagttactgcagacatggatggggaggtttcaggaaacatcaagttgaaaaggagaggggaattgaagagacaggcagagagctatgcaattatgcaatgcttccatttgttgcaatccaatag

SEQ ID NO: 59787 - DNA, 303 bp, Oryza sativa
  Clone ID: PAT_MRT4530_61378C.1
gaaaactttgaagtaatcatacaaagtagaatttgcacataattctggtaaattttggtgtgtgttgatacaattctgaactgatcaaacctcacatctctttccttctcatctgcgtgcagtccggatgctgcaagccacccagcagctgcaacttcctctacgtcagcggcacgaactggacgaaggtgcccaccaactcgtcggacccggactgcaacacgtgggtcgacgacggcacgcagctgtgctacaactgccagtcgtgcaaggcccggccggtggcgacccttgagcgggact

SEQ ID NO: 59788 - DNA, 326 bp, Oryza sativa
  Clone ID: PAT_MRT4530_61379C.1
tttttgttgtttttttttcttttttttttttttttttttttttttttttttttttttttttttttaaatttagggcgctcaattcttttttatatttgcccaccgcttgaggccggaggtttcacacccgaacaaaaaaagggcggggcgcgtcaacaacaccataaacgggggcatcccaaaataagcggggaccccccagcggcgccgctaaaagagacctccccccaaaaaaaaaagcccgaacaaaaatgggacggaaagtggtcaaggggccacaattggttcgggcaacgggaaaattttccacttaaacgggcctcact

SEQ ID NO: 59789 - DNA, 366 bp, Oryza sativa
  Clone ID: PAT_MRT4530_6137C.1
atgccagccgccgtcgtcggggccgagcgctgggacgccctgctcggcttctcgtcaacgttatcatcttcgttattgaccccggtgcgtctcgaatgtgaacaccagctggtggatcagcttttagatgaccccaacggcaccgacgtcgcgcactcgcgcaccgacaacctcggcaacaagggcgcattcaactctgactccatggggaatagccgaataggaaatggccggccgaggctgtcgatttgtgtttggaagggaagacaaactcttatggttgcgattatgtggaatgatctgctcaatgtggtggtttacttgggggcaaatgtggcccgtgttgctcgttgcctcgctgcatga

SEQ ID NO: 59790 - DNA, 432 bp, Oryza sativa
  unsure (1)..(432): unsure at all n locations
  Clone ID: PAT_MRT4530_61380C.1
gtcaccgatatgaatttcttgtgctttttcccggtcacaaagaagccggattcgagcaagggggcggaggcatcgccatcgatggaagagggggaggcctgcgacgactgcgagtgcgagatcgcgcggttgccggaggagctcctctccgccgcgatctccctcaccgcgccgcgggacgccttccgcgccgccgccgtctcccgggccttccgcgccgccgccgactccgacgccgtctgggctagcttcctgccgcgtgatctccccgatctcgccgacggcgagctctcccccgcgccgccttccaagaaggacctcttnctccgcctctccgncggccactaccacctnctgccagacaggctcaagggcatgtgattggacagggagaccggngcccagtgctatgtgctctcggctagagcgctg

SEQ ID NO: 59791 - DNA, 1012 bp, Oryza sativa
  Clone ID: PAT_MRT4530_61381C.1
gcacgaggtcaaacgtgcgtcgcctgaccgcttccatccatccaccagtctcgcttcttcgtgtggagggtctacctcggcgagtcggcggcggcgatggcggcggcgacggacggcggggggctgccgctgctggcggacaaggcggcgagccacagccaccaccaccacccggagcggcacttcacgtcgggggaggtggtccgcgacgtcatcatgggcgtctccgacggcctcaccgtgcccttcgccctcgccgcggggctctccggcgccagcgcgccatcctcgctcgtgctcaccgccggcctcgccgaggtcgccgccggcgccatctccatgggcctcggagggtatctcgcggccaagagcgaggcagaccattaccagcgggagatgaaaagggagcaggaggagatcatcgccgtcccggacactgaggctgctgagattggcgagatcatgtcgcagtacgggctcgaaccgcatgagtatggccctgtcgtggacgggctccgtaggaatcctcaagcttggctcgacttcatgatgaggtttgagctgggattggagaaaccagaccctaaaagagctatacagagcgctttaacaattgcgctatcttatgtcattggtggactggtccctctccttccctacatgtttatctccacagcacagaacgccatgctcacatctgtcggtgtcacgctagttgcactacttttctttggatacatcaagggtcgctttactggaaaccgtccattcctcagcgctgtccaaactgctattatcggtgcgcttgcttctgctgcggcatatggaatggccaaggccgtgcaaactagatgatttgaaccctcatgtgttcctgtctgaagtttcagtaggcagaactgaatccaacgaagctgcaatgaatcacaatctcatattaagaatatgtattttacctttcatgtaacaaggaataaattttgggaaacatgtaataaaagcatgctatttt

SEQ ID NO: 59792 - DNA, 200 bp, Oryza sativa
  Clone ID: PAT_MRT4530_61382C.1
ttacacttcaggcattcagtcctccggagctcatcacccagcaagaagcaggtgtacagacgacagcagcgccgtggctccggcgagaacgcagttcactgtcgtccacagttcctcagcggcactcacatgcccggggcagagctctggagagtggtggaccagcagacatcatggacaggcgacgcgacgcacgacac

SEQ ID NO: 59793 - DNA, 647 bp, Oryza sativa
  Clone ID: PAT_MRT4530_61383C.1
cccacgcgtgcgcccacgcgtccggaaaagggagcaggaggagatcatcgccgtcccggacactggtgagccgataagcagatacaacaagataccatatgctgagacatgtcgctaagattcctcccatctgcgaccagcaggaaagctgcctcactttgtttaaaaaacttttggtttcctggttgatcgatcagaggctgctgagattggcgagatcatgtcgcagtacgggctcgaaccgcatgagtatggccctgtcgtggacgggctccgtaggaatcctcaagcttggctcgacttcatgatgaggatatgaccaactgctactccctttgtcaatctcttcatcaatactagaaagcaaatgttgatgtcctgatttgagatactaatcagaaattcgattatcctggcgtttatagctcatataaggctttcaacaatgaaaaccacacatatattagtacagcgatttcaatcataaaaaaattgattaattatcaaacttaactaacctttgagctgggattggagaaaccagaccctaaaagagctatacagagcgctttaacaattgcgctatcttatgtcattggtggactggtccctctccttccctacatgtttatctccacagcacagaa

SEQ ID NO: 59794 - DNA, 1038 bp, Oryza sativa
  Clone ID: PAT_MRT4530_61384C.1
gagaaagtattcacattacaccgtctgttacgtgtaatactgaatatagcagatatagttttttagacgcaagattcggtcttccactgaatgaaaagcagaacttgtgataaacagcctgtcactaacccaagttcccatcttatttgcatgaaaacatgaacatgaaaagaacatgttctcatgatgagtattcatggctgagggttccaacagccattttttttttttttttaaggacaaaacagaaagataataatttcatagttagaaagctcaccaaccacatagtatcatcagagtttttctgcataggtaatctgaacaagaacaacaggcaacaaagtgggacatggagtaggttttctcataactttgcacaagactctactagtccatactttcttgagttcatgttcatggctaaaaggttttaagctccagcaccacatgaacatctcaatatctcatcttgccaagaaaaacacgaactacatacctccttgttttccttttagattacacccacccatcatcactacctagttagtccttcatgcatgagttcatgttcatggcctcatactcccatcattcataattttacaagacttactcaatttccccccgttttcggttcagtttcttgcagatctgaccaatcaagacatggccatgcagcatgcccatgcatgtttctttagttcagatctaccttttcttttttatgtgtgaccccagggagccaagaacatgactctccttatggggtcctccgcggccgagccccggcagtcgtcgccgccgtggctcgggccgcggctgacggcggaggcggccggcctcgccgcgccggcggtgccataggcccgccggagcttgtcacggagggcctgtttgacctcgtgagcccaagaacctgaaccttccccggtaaagtgaggaggcttcatggcgagacagaagaaaaaaaatcctaatggcaactcacagagagctagaggtagacgaaggcaggtgaggtggtggtagtagttg

SEQ ID NO: 59795 - DNA, 552 bp, Oryza sativa
  Clone ID: PAT_MRT4530_61385C.1
tagcagccaagaacacttattcactgagtaacactagctcattcgatcccaggcagcaatggcttccaaggtcatcgctcccttccttgcccttagcctcctcctcttcgccgtcattgtgcagggttgcacacccaactgctccggcgagcaggtcgtcccgactccacccattgcagtcccgacgccatcacaccatggtgggcacggtgagcacggccgttgcccgatcaacaccttgaagctgagagtgtgcgccaacgtgctaaacgggctggtcgatgcgaagatcggacatggcaccgacgattgctgctcgctgctatctgggatcgccgatctcgacgctgccgtctgcctctgcacggccgttaaagcgaatgtgcttggcattagggtgaacctccccgtcgatctcagcatcatgctcaacaagtgcggcaagacctgcccgtccgatttcacttgctgagctgagctgcatgattataatgttcttgagtttaatttcgtgtgatttttggttgtcgattgagcctttttttcatgatt

SEQ ID NO: 59796 - DNA, 405 bp, Oryza sativa
  Clone ID: PAT_MRT4530_61386C.1
atggctagctaccacttcggcttgagagacgatgacgacgttttctctgcaacattaccaggaaaattggtgtggcgctgcggtggcggcatcgaggcgccgtgggccggcccggcagcgtgcgggcgcggcggcggcgttgaggtccggcggcgtgcgggcgccgcggtggcgcgcggcggccgcgccgtggcgtcgcggcagcagtggcgatggcgtggcgtcgtggcggcgtggcgtagcggccccgcggcgtggcgcggcggcttggcgagctcgaggcaggggtggcggagtggcagtggcgacggcgtcgtctgcggcggcggccgcgtcgaagccggcggcgaggaccaccaagcaacggcgagagacgacggtggtgtcgacgccgggttgccctag

SEQ ID NO: 59797 - DNA, 320 bp, Oryza sativa
  Clone ID: PAT_MRT4530_61387C.1
ggccaccaaaatagagaaggcgttctggaacatttattacccccgtggaaaaaaggggaaaaagtccagggggttagacaacctttccccagttgtggccttcaccccattcagaacatgtcaagccatgcgggaacaaaatacccaatccagggaccctcgccaacttattaagatcttgcccttttggcgacgcggggccccaccccgtaaacccggcccgggccctgagagataaccaggttgccctaaaggggggctcattaaaagttggcgaaaaaaaggaaacagctgtttcctgcgtgaaattgctatccgat

SEQ ID NO: 59798 - DNA, 676 bp, Oryza sativa
  Clone ID: PAT_MRT4530_61388C.1
ttgatcgcgttccggtgcgtgtccgcctgaagctcttggtcgctgatgcgttggccaacaaccgctggatccgcgatctccatggctccttgggagtccaggcaatcttgcaatacttgcagagttcggggtcgtactccatccggtcggcttaccttgccctcttctcgggcaggatctcatttcagcacctgccaatctggcgatcttttgccccgcctcggtgtcgctacttcctgtggttggttgctcaccgacgctgctggacggttgaccgtttggagaagcgtgggctcccgcacccagccttttgtgtcttctgcgaccaagtggaagagacaattgaccacattctgattgggtgccctgagtccctcgagctatgctggactatcctttcgagccttggcctccctcagtgtttcccctctggcgttgtttccttccatgagtggcactgctcttgccagctcaaagttccgagcgagcatcgtcgtgggttcgatacgattgtgactcttggcgcttggtccatttggaaggaaaggaacaaccgtgtgttcaataaccgtccccggttctggtatgaggttgtcacagccatggcacaagaagccgccctacggtgtcttgcccattccctgtcgccagcgctccctagttagcgtgttcggtt

SEQ ID NO: 59799 - DNA, 249 bp, Oryza sativa
  unsure (1)..(249): unsure at all n locations
  Clone ID: PAT_MRT4530_61389C.1
gctctttcaggnnagaggtaatggnaggaaacccaggaggaaaaggaatgctgtcggggtttatgtgtatgnccatgcgnaacaaggtctnattgacaagtacaacgattttngtcataactgngnacaaggaagggtnttatttcccaagcttcaagnngggtnaggaattngctttncggagatngttaagatgcgacaaaaggggttttatttttnaangncttggnagnaccttaaaaaangttt

SEQ ID NO: 59800 - DNA, 482 bp, Oryza sativa
  Clone ID: PAT_MRT4530_6138C.1
tttgttttttaattttttgggttttttttttttttttttttttttttttttttttttttattttttttttataaaattggtttaatgtataaaataagggttaaaaaaataattctatattagaaaaaagggaagaaaaaaattattacccacttaaacaaaaaaacaaatagagaaaggcagcaggacaaaaaaaaaagagtatgcttatcgaaaattcaggtttgaaaaacaaaacgtcggaaaaaaaaaaaaggttgacgtcagccaagaacgtttaacatggtatggcaaagagaatcctggaaccaaccggcttaccaacggggaacggggaaatacccttgtacttggtcacaaactctcctgacgggcttgtccttggagcaaactcataatctactgtcacgctcaatgagcccttatattgcatcctaaaaagagaccgaagcagtagaacgtactctggtgttccatgttac

SEQ ID NO: 59801 - DNA, 465 bp, Oryza sativa
  Clone ID: PAT_MRT4530_61390C.1
atggcaggcactaagcttgcagctcttgggtttattgtcctcttgagcattggattagctagtgctgtaagggtagaaagatactcaaatgcccaaggttcgggcacaggaagtggagagggcacaggaagcgtgaatggtgcgggagctgggttgggaagtgggactgggtctggtagaagtggttacaatggtgcccatgcaagtggtggaggaggaggcggaggcggtggctacagccaatatggtgggtcagggtctggtagtggatctggttcgggctcaggctctagccagaccagtcaaaatgggtattatggctctagtgaggctactaatacctggtatggacagtatgcaaatgcaaatgctggtggcaacggtggtggtaacggtcagggtcaatatggtggcagcggtgctggtgtaggttccggatctgggtttggtgatgcgaacccttaa

SEQ ID NO: 59802 - DNA, 828 bp, Oryza sativa
  Clone ID: PAT_MRT4530_61391C.1
atgggcaagacgccacagggcggcttcttgcgccatggctgtgacaacctcaggccaggaccgggaacggttgttgaatacacgaatgtggtcgattgtctcttccacttggtcacagaagacacaaaaggctgggtgtggcagtccacgcttctccaaacggtcagccgtccagcagcgtcggtgagcgaccaaccacaggaagtagcgacaccaaggcggggcaaaagaccgccagattggcaggtgctagaacgagatcctgcccgcgaagagggcaagcaacgaccaaatatgcaagtattgcaagattgcctggactcccaaggagccatggagatcgcagatccaaaggttgttggccaacgcatcagcgaccaagtgcttccggcggacacgcaccgggacgcgatcatagagctcggactcgggaccaagccagccggcagtggccaccctaagcattcgcacgaccacaccagaggaagccgcgtcgcgctcggctggctggagccaatccgatcgccacagtggcagccgctgcgcaatcctatcgaccagaggttggaggtcctcgcgacgcagctttctgatggagagaggcaaacccaaatatttgcatgggaactcctcaactgggcaggggagggagttaccgagtactgcgacctcttcctccgagcagctgatcgggatcgcggagaatttggtaaagttggtatgaagaccagaggcctctccaaagagagcaaggatcccttgtgctgcagcaagttccccagcgaccacatcatcggcatacaaggagatccggtgaggaacacctaa

SEQ ID NO: 59803 - DNA, 475 bp, Oryza sativa
  Clone ID: PAT_MRT4530_61392C.1
gttagaagcgttggccttggttggtctggccaatctaggcaaaccatctgtgcctgacggcgttgttctgggtatgataggtgggcccatatgtggcataagttcgaagtttagtgatcctaagtatcagatgtgtgaggattactgggatgaattcgccagctacagaatatctaaggaggcaagaaaaatgagtgaacaaaacaaggccagctctgcaatgaacaaggtacttttgtgcctgaaagagatagatgagctcacattggcattgaggaacccccaacaccctggacgcatgaaagatcaaagatccacgaagaagtctttggcctccgagcaggaaccagtgaaacttgctctaccaagacaacctccgagcagccagctcggaatgtcctccaagtctgaaggcgaactctactctcatacacctacccaggtcaaagtacagcttgagcaagctcgagggtga

SEQ ID NO: 59804 - DNA, 1339 bp, Oryza sativa
  Clone ID: PAT_MRT4530_61393C.1
cacgctaactagaaagtgttggcgatgggggatgggcaagaagccaaagcgctgtctcttgcgacatggctgcgacaacctcaggctaggatcgagaacggttgtttctttccttccaaatggaccaggcaccaagagtcacaatagtgtcgaacccacgacgacgctccctcagaattttgagccggaaagagcagtgccactcatggaaggaatcagcgtcagaggggaagcactgagggaggccgaggctcgaaaggacagtccaccacagctggagggactcggcgcacccaatcagaatgtggtcgattgtctcttccacttggtcacagaagacacaataaggctgggtgcggcagtccacgcttctctaaccggtcagccgtccagcagcgtcggtgagcgaccaaccacaggaagtagcgacaccgaggcggggcaaaagatcgccagattggcaggtgctgaaatgagatcctgcccgcgaagagggcaaggtaagccgaccgggtggagtacgaccccgaactctcccacctctagatgaaagaatcaggatggccctctgagagagttgttgtccgcaacaacgaccaaatctgcaagtattgcaggattgcctggactcccaaggagccatggagatcgcggatccaacggttgttggccaacgcatcagcgaccaagagcttccggcggacacgcaccgggacgcgatcatagagctcgggtgcctaagagcgaaggctcgaaccctgtagccatctgtcctcccagaagaggatcgacttgccatcgccaaggacacaggtcaagcggccacaaactcgcgctcttgtctggagcacgagatttgcaacccctgccaggatagggattgggaggcgcgttgagcccagagccacctagaacggagtgcaattcccatgaactccaggttgtggatgccaagtcccccatattccaatggcgcgcagactcaggaccaagccagccggtagtggccaccctgagcattcgcacgaccataccagaggaagccgcgtcgtatcttgtcgatggctttcagcacccattttgggggggcaatggcgatgagcaggtaaaccgggatcgcactgatcgggatcgcggagcatttggtgaagttggtatgaagaccagaggcctctccaaagagagcaaggatcccttgtgctgcagcaagttccccagcgaccggccggaggaatgcctctcaattgcagctgaatgctcaattcagctgcaattgagagtttgattccctgagtttaatcatgaggtgacatactaatgtgcaagtgcatcgatcaag

SEQ ID NO: 59805 - DNA, 595 bp, Oryza sativa
  Clone ID: PAT_MRT4530_61394C.1
tcaaactctcaattgcagctgaattgagcattcagctgcaattgagaggcattcctccggccggtcgctggggaacttgctgcagcacaagggatccttgctctctttggagaggcctctggtcttcataccaacttcaccaaatgctccgcgatcccgatcagctgctcggaggaagaggtcgcagtactcggggttgcaaatcctgtgctccagacaggagtgcgagtttgtggctgcttccatgacctgtgttcttggcgacagcaagttgatcctcttttgggaggacaaatggctacaaggttcgagtcttcgctctttggcacccgagctctatgatcgcgtcccggtgcgtgtccgccggaagcacttggtcgctgatgcgttggccaacaacctttggatctgcgatctccatggctccttgggagtccaggcaatcttgcaatacttgcatatttggtcgttgctgcggacaacaactctctccgagggccatcctgattctttcatttggaggtgggagagttcggagtcgtattccgcccagtcggcttaccttgccctcttcgcgggcaggatctcgttctag

SEQ ID NO: 59806 - DNA, 429 bp, Oryza sativa
  Clone ID: PAT_MRT4530_61395C.1
atggcggaggctagggccggcaatgacgacgccatcaatcatcgttttcccccattgggaagttgtcgagctatcacccttcctctccatgatgagactattcagggtctcagcagacagcagtgcagccgacaggtcgggagtccggtggcggcggtgacgggcgatgaggtgacgacgcagcaacgaagcgggagcaggagggcttccctccacgccgccgccaccgccaccgccgacggcgcgagaccggcacacggagtcctcgatctgtctcgccgccatggatcaccgtctgcagcggcggcggtggcggtggcgtggggggaggccctcctgctcccgcgtcgtcgccgctgccgcctcgtcgcccgtcgtcgcatcgccgccgctgccacctcgtgtgggctcacgggtgggctggtgtag

SEQ ID NO: 59807 - DNA, 460 bp, Oryza sativa
  unsure (1)..(460): unsure at all n locations
  Clone ID: PAT_MRT4530_61396C.1
gtctaggcttatcgaacatatggagcaaagccaagcagaaagctcgtcccagctccttaaattcgaggaggattttaaggaactctctgttcgagaagagcaggctgctcttgataagattgctggaattttagcgggcttgacagccaagaaatctacaatggtattggactgtgtaggacagctgaacgggaaatgcagagaagagcagaaacatcttaaattgcaaatttccaacctacaaaaggtttcagacagcggaggaaaggaggccgcagcctatgctgcaaaggtagagagccagttcagtgaggataagttatcacattgtaaaattaaagatcaaatgggaagacatcttgcagcaaagctttgangaaacttgtacattctgtttcttacttgtcacataccgnaccatctttggaccatctgnataagttctcagttggtgggagct

SEQ ID NO: 59808 - DNA, 139 bp, Oryza sativa
  Clone ID: PAT_MRT4530_61397C.1
cggcgaatggccagaacaaaaacatgtccaagatggcagacaacgacgcttgctcgccacgcacgtgccagtgctgcgttgcacagctcgacacattcgcagaaagctacccctttttaatattcatcttcagatacaa

SEQ ID NO: 59809 - DNA, 408 bp, Oryza sativa
  Clone ID: PAT_MRT4530_61398C.1
atgagggggaggaggcacggcggcctcggacagctagccgagggcgtggcagatgactgcatctggccggcgcagcagcgtttggaggaagggtcggagaccggcttggcgcagagaggcgcagccaatggcagcggaggccggctcggcgcgagaagcgcggccggcggtggaggaggcgaccttggtgagtggaggagctgccagtgggtgtggcgcggtcttcggcgcacgaaggctagccggcggagggcgccggtgcaggggtcccacatgtcgacagaggttgattggcagtggagcatcggtgtgtcagccgtggtttcgcaggtggtgagcggcagcggcggtcggtcacgcttagcggcggccggtatggtgctagccttctcccggacttgtgtttag

SEQ ID NO: 59810 - DNA, 451 bp, Oryza sativa
  Clone ID: PAT_MRT4530_61399C.1
cggccttggctggaccgacaacgatggttaattccccctcctgagggcgttgtcgtgctgtctcgccccttaagggtggttgccgggcaaaagcctagtcctggctcctttgagccttgacggatggctgcggcggttttccgtcgcttctcttcttgaagacgtcgttttggcaccctcttgctgtgtggcgatctcgtctgtgttcctttgttggtctagcggcggtcggtccggtgctagccttctcccggacttgtgtttaggcgctgtcggtgtgtgggtggtggtattttttttctttttcctggttacgaccctccagggttgtaatcttgtaattttttcctgctatgtcaatagaacttcgcaccgtcttgtgcgagttgttaaaaaaaaagccattaaagcaagtactataaaaactcatgtgttaaaaaaaaaaaaaaaa

SEQ ID NO: 59811 - DNA, 2219 bp, Oryza sativa
  Clone ID: PAT_MRT4530_6139C.1
ctagtggatccccgggctgcaggcgggacacgtcggcatcatttcaaggcccccccgtagcttccatcactttgaccatctcgcctcgaaggaggagtaggaggaagagagaagccggcacaagcgcgcccggcattcgccccgcgccacggatcattgggatcaaaacacgagagcttaattgagaagcagagaaggagatcaagaaaggcagagcaaagccgccggcgaagagggaggaggtggccggtgggatggacgtgaagcgggcccggagcccgcgggctccgggcgtcgacgccgacgacgacaagaagcgggccgccgagtggcgcggcgccgtccggccgcacatggtgctggtcggcttcctcatcaccctgcccgtcctggtcttcgtcttcggcggccgctggggctccttccaaaccacctccgcccccaacgtcggcggccgccacgtcgtccccggcggcgtaacaacgacacaaaaaaatgaagccccgaaaaacgtctctgtaccagccactgcaaccaaatctctgccccaaccccaggacaagcttctcggaggactactctctgccgcattcgaagaatcctcatgtcagagcagatacaaatcatctctctaccggaagaagtctccgttccctctgtccccttacctggttcagaagctgcggaagtacgaggcctaccacaagaagtgcggccctggcacgaagcgctaccggaaggcgatcgagcagctcaaggcggggcgcaacgccgacaacgccgagtgcaagtacgtggtgtggttcccctgcaacggcctcggcaaccgcatgctcaccatcgcctccaccttcctgtacgcgctcatctccaaccgcgtcctcctcatgcacgtcgcggcggagcaggagggcctcttctgcgagccgttcccggggagctcgtgggtgctcccgggcgacttcccccacaacaacccgcagggcctgcacatcggcgcgccggagagctacgtcaacatgctcaagaacaacgtcgtccgcaacgacgaccccggcagcgtgtcggcgtcgtcgctgccgccgtacgtgtacctccacgtcgagcagttccggctgaagctgtccgacaacatcttctgcgacgaggaccagttgattctcaacaagttcaactggatgatactcaaatctgacagctacttcgcgccggcgctgttcatgacgccgatgtacgagaaggagctggaaaagatgttcccgcagaaggagtcagtgttccatcatcttgggaggtacctgttccatccgacgaacaaagtatggggaatcgtgagcaggtactacgaagcgtaccttgccagagtcgacgagaaaatcgggttccagatacggatcttcccggagaagccgataaaattcgagaacatgtatgatcagctgacgaggtgcatcagggagcagcggttgttgccggagctcggcacggcggagccggcgaacacgactgccgaagcagggaaggtgaaggccgtactgatcgcttctctgtactcgggatattacgagaagatccgtgggatgtactacgagaatccaaccaagactggcgagatcgtcgcggtgtaccagccgagccacgaggagcagcagcagtacacgtccaacgagcacaaccagaaggcgctggccgagatctatctgctcagctactgcgacaagatcgccatgagcgcctggtcgacgttcgggtacgtggcctacagcttcgccggcgtcaagccgtggatcctgctccggccggactgggacaaggagaggtcggaggtggcgtgcgtcaggtcgacgtcggtggagccgtgcctccactcgccgccgatcctctcgtgcagggccaagaaggaggtcgacgcggccaccgtcaagccgtacgttcggcactgcgaggatgtcgggttcggtctcaagttgttcgatagctaattttttggagaagtgacttcttcggtttcacgttccgaattgcgttcgttacgtcacgtcctgtggattaactaggccttttggagattcgttatattcgtttggactcgtatacacctgaaaatgcacaaaatgtattatgtaaaatgtattatgtatctgtattcaaattcgttcttcataaaacaattcggatatatatatacacacacgcaaaaagattccctctccccccag

SEQ ID NO: 59812 - DNA, 292 bp, Oryza sativa
  Clone ID: PAT_MRT4530_613C.1
gtaccggagccggaatttccggtgcgcgcgacgcgtacgctctagtatcgctagagcgcgctctagagaactaaagcggacgcgcgcgtgcatgcgacaatataggaccggtaccgggagacgtaccagctattcatataccgagtcgtatcaaagcttggcctaatcatgctcatagctgactcatgtgagtaatcttgcagcacatacaatttcacacagcatacgtactagcagactggcgcgtacagatcgctctgcctaacaagtgagcaaactgactttcatttgg

SEQ ID NO: 59813 - DNA, 579 bp, Oryza sativa
  Clone ID: PAT_MRT4530_61400C.1
cggcacgaggctctttctctccctctccctctcttagagcggcgggcggcagatggcaaggcgtcggcgcggttggcggatccggcggcaccaccctcgggagggccggatccgccaccatattgagcggcggcggcgggcggcgcggctacggcggcggcgggcggcggcttggcggcctcagctcggcggcccgccatctcttcctcaccgacgacgatgaggcgaccctccctcttcctcaatgccaccgctgcaggggcggcttggccgcctcgggtggcaccgccgcactgcgcggatccggtgccaccgatgacggcgggtggcgggggtgacggatccgccgccggcgacgacgccgggtggctggggcgacgcatccggtgccgccgccgacagatccagcgggggcgacgacggcgggcagcgggggagacggatccggcggggcgacgatggcgggcggtgggggagacggcagcggcggtggcgacgtcggtgggtcggctggggcgatggatccggggctgccgcgacggatccgcggggcgacaccgctggcgggcgggggggggg

SEQ ID NO: 59814 - DNA, 150 bp, Oryza sativa
  Clone ID: PAT_MRT4530_61401C.1
atggaacgaagtaaagggcaaccccttgaccgagtgaaggcgagcccggattcaaatgctcttgcttcctttgcaccccggctccgaaggatcagtagggaggactccggatgccagtatcggaatggaaacattcctcgaatgatggct

SEQ ID NO: 59815 - DNA, 1464 bp, Oryza sativa
  Clone ID: PAT_MRT4530_61402C.1
gtcgttctgcctcgggggcgatgcgggcggcgaaacaagccgcgtcgcccccgtccctctcctcccctcccacgcctcgccgccgccggcaaagctgggcggctgcaaggacggcggcggcagggctctctctctccaccgctcgcagtggagttggacggggcgccggcaaggcgccgacgacgaggaagaaccgacgacggcgaccagatccggcgccgggatgcacggatccggtacccccatggccggatctgctgctccgggcggcggcgagccgggtcggcaagtcgcagcatcggcggcgtggaggtggtgccttcggcggccggagggccgcgtcgacggccggagggcggcctcggtggcgtggagttggcagcggggcggaggacgcggcggcatgaccgtggctgcggcgacaaacggcgagcgtggccagatctggccggacggctggcggcggcgctcgcggccgtggtgcagctgcggcggaggtggatggcgacggtggcagcagctggtgagggcggcaacggctgaggcagccgctgcagtggctggcgatggcggcgacggctgaggcagccgcgacagcgaggtggcggcggcggttgaggcagccgcagctgtggtggcggctacacgcggtgtcgaccgtggatgagggggaggaggcacggcggcctcggacagctagccgagggcgtggcagatgactgcatctggccggcgcagcagcgtttggaggaagggtcggagaccggcttggcgcagagaggcgcagccaatggcagcggaggccggctcggcgcgagaagcgcggccggcggtggaggaggcgaccttggtgagtggaggagctgccagtgggtgtggcgcggtcttcggcgcacgaaggctagccggcggagggcgccggtgcaggggtcccacatgtcgacagaggttgattggcagtggagcatcggtgtgtcagccgtggtttcgcaggtggtgagcggcaggtgaaaacccagcccggccttggccggaccgacaacaatggttaattccccctcctgagggcgttgtcgtgctgtctcgcccctcaagggtggttgccgggcgaaagcccagtcctggctcctttgatccttgacggacggcggcggcggttttccgtcgcttctcttcttgaaaacgtcgttttggcaccctcttgcttgacgatctcgtctgtgttcctttgttggtctagcggcggtcggtcacgcttagcggcggccggtatggtgctagccttctcccggacttgtgtttaggcgttgtcggtgtgtgggtggtggtttattttttctttttcctggttacgaccctccagggttgcaatcttataattttttcctgctctatcaatagaacttcgcaccgtctgtgcgagtcattcaaaaaaaaaaaaaaaaaaaaaaaaaaaaaaccaaa

SEQ ID NO: 59816 - DNA, 318 bp, Oryza sativa
  unsure (1)..(318): unsure at all n locations
  Clone ID: PAT_MRT4530_61403C.1
aacgctctntcctcgngccccgncacaacccatccttttccccnccgctcccgggcggangangatgagatccccccnggtcaancgcgcctcgctcggcaaggcanccggcgcggccgcactggccgtngccnccancgccatgctcgcgggcngngccatggcacaagaggtgcntctcggcgccaatggnggcgtgctggtgttcgaccgaacgacttcaccgncnagtccggcgagaccatcgcgttcaagaagnacgccngcttccctcncaacgtggtgttcgacnaggacncngntcccatccggcggctt

SEQ ID NO: 59817 - DNA, 468 bp, Oryza sativa
  Clone ID: PAT_MRT4530_61404C.1
atacgagccggccgggataatcttgttgttaccatcattacaggctgtttcatcctacaaaataatgctgtgcctcaagaccaacgaggggctgctaatggcttggcaatgacaggaatgtccttttttaaggcagtggctccagcaggggcgggcattgtgttctcgtgggcacaaaaacgccagcatgcttccttccttccagcacgatacaaattagactgttcaggtatactacagatctagattcttcagaacttcagatgttggcaatttcatgagccctgcagcccgctgtgtgaagcaaaggtataacatatgctcatctggatcccccaggagcaatagatagaagcgagagtactactctgtcccaaagaatcaaagctagggtttgattatttttgggacggaggggtaagtgccagatatgcaattgcagcatttcagcgaaaaggaatactatat

SEQ ID NO: 59818 - DNA, 2461 bp, Oryza sativa
  Clone ID: PAT_MRT4530_61405C.1
atggcgcaccaggagctggagggaacggcgatgctccaggagacaacactaacggaggcaatacaaatgactcaacctccttgcaccgttttctgggtagaggcgccgctgctggagaagaagggcagcaccggcatcggcgatgggtactgcactgagaggtgcccgggtgcggcgtcgatcggcgcggaccacataaggttccacctgcgaaaatcaatttttccaagcggaccacttaagagccattcagacagaagcaaggtctatcgagtcagagagatcgacatctcggcgagcgagatcggtgaattgatgggcgaccatggacgccggcggcaggcggaggcggcggctccgctgctggagaagaagggcagcaccggcaccggcgagggcgatgggtcctgcattgaggggtgccccgggtgcgtcgtcgaccggcggaaggccgcgagctccggcatcccatacgggagcttcctcttcgtctggatcgtcacactctgcacagatttgtggacctcaaccaaccgttgatggaagaggaggcgggggcggaggtgccgttgctcaagatcaagggggactaccaccaaggttgccctggctgtgcctatgaccgcaagaaggaggtctacaggggattgccttacaaggagttcctctatctctggatgatctgcctcaccgccgctttaccaatatcatcattgttccccttcttgtacttcatgataagagacttgcatgttgcaaaaaggacagaagatattgggttctatgccggctttgtgggtgcttcgtttatgttcggtcgatgtttgacttcaactatttggggaatagcagcagatcgtattgggaggaaaccagttgttgtgtttggcattttcgcggtggtcatatttaatacgctatttgggcttagtttcacctattggatggcaatagctacaagattccttcttggtgctttaaatggtttacttgggccaataaaggcctatgctattgaagtttgccgacctgaacatgaagctcttgcattgtcacttgttagtacggcatggggaataggtcttataattggtccagctattggaggctacctttcacagcctgcagagaaatttcccaatgtcttttcccctgactcactgtttgcaaggttcccatatttcttaccctgcttgtgcatatcagtctttgctgctgttgttctcataggctgcatatggatgccggagacattacacaagcataaagctgatgcaaatagatctcaaactgttgaagctttggagagccatttgattgatccagaagaaaaggctgaccaaaatggtagtttggactgcaagaagagcttattgagcaattggcccttgatgtcctccataattctttattgtgtcttctcctttcatgatatggcttatacagagatattctctctatgggcagaaagtgacaggaagtacggtgggctgagtttgtcatctgaggatgtgggtcaagtgcttgcaatcacaggtgccagtcttcttgtgtatcaactcttcatttatcctcgtatcaacaaggttataggccatattaaggcttctcgaattgcagctattctgtgcatacctattctctttgcatatccatatatgacatacctatcgggacctggattaacgatcatactgaacattgcgtcagttataaaaaataatcttggtgttaccatcattacaggctgtttcatcctacaaaataatgctgtgcctcaagaccaacgaggggctgctaatggcttggcaatgacaggaatgtccttttttaaggcagtggctccagcaggggcgggcattgtgttctcgtgggcacaaaaacgccagcatgcttccttccttccaggtgatcagatggtgttctttcttttgaatctcttcgagttgcttggacttatcctcactttcaaaccctttctggccgtaccagagcagcacgatacaaattagactgttcaggtatactacagatctagattcttcagaacttcagatgttggcaatttcatgagccctgcagcccgctgtgtgaagcaaaggtataacatatgctcatctggatcccccaggagcaatagatagaagcgagagtactactctgtcccaaagaatcaaagctagggtttgattatttttgggacggaggggtaggtgccagatatgcaattgcagcatttcagcgaaaggaatatatatagttggggtaaatggtggccactgatggctaggtttttcatggccagccagcatgtataccgagtagcattctaccagtataatgaatatagtactatgtacattgtaactagtaaaactctgtaagtgacatcagcttgagaatgaaattattgctggaatcgagatcagtacattgctaaaaaaaaaaaaaaaaaaaacaa

SEQ ID NO: 59819 - DNA, 174 bp, Oryza sativa
  Clone ID: PAT_MRT4530_61406C.1
atgacaatgtttatactatgtatagagagggcaggtgctatcatctggtgttattctagcattactttggtagcatccggtgtgccgatcttaagcgatccatgctcacctacgcatgcaggccatacacattctacatgatagggtcgcgtcagaccacactgacgagcgcat

SEQ ID NO: 59820 - DNA, 342 bp, Oryza sativa
  Clone ID: PAT_MRT4530_61407C.1
atgaggcttgacgggctgccaatttataggcaggcgctgctgcacatcgcggagctgaccgcgtacgtgctagattcagaatttcagaggatcaatcacaacacggcggttggtggcggtggagatgtgggaatatactatctgtggaggaatcaggcggtagaggcatcacctctaggcggcggtggcttctcatggcgccggcttgatgtcttctcggctagtagttcaggcctctgtcctagaagttctggtggtggcgctacttatggtggccagcgacttactaatggagagtacaatggtgacggtggatgggaacttccactggctaggttctag

SEQ ID NO: 59821 - DNA, 1776 bp, Oryza sativa
  Clone ID: PAT_MRT4530_61408C.1
atgacggcaactactccccccgccgtcgccgtcgccggcgagagcccgccgccgctcgtgcacctcgcatttaacctctactccaccggcttcatcgccgcgacggccaccggcttgcgcgtcttctcctgcttcagctcgccgctcaacaaggtgttcgccagggacgtcgaggtgtgcccggaggacgacggcggctgcggtggcggcggatggaaggtggcgatcgccgagatgttcaacgaggcgttcgccgccgtcgtgttccggcgggagaagggcggtggcggcggcaccgtcgacaagatctgcttctggagcatcccgaacgggcggatgtactgcatgcacaagacgctgccgttcgacggcgccgtgcgcggggtccggctggtgggggagttcctgctcgtcgccggcgacgagagggcggcgctgtacgagctgccgcacgccagcgcgccgccgaagaaggtgaaggtggtggagacggcggcgaacccgctggggctgggcgcggtggtgcagcccgacgggaacgcgcggttcgtggccgccgcgccgcagaggatgaaggggatggtgcaggtgcaccgcctcgccgaggaccacgtctacgtgcgcgcgcactactcctccctcgccgccatcgcgctctccgccgacggccgcctgctcgccaccgccggctccaagggcacgctcgtccgcatcttcagcaccagcgacggcaagctcctccaagcgaccttcaagctgcgcgggctctacgaggagagcggggccaccgccgccgccggtgacatgcgcgaccggaatcagtcgacgtgcgccgtcgtccgccgcgccggcgcggggtttgaggtcaggcgtttcaggccgggctccctcaactacagctcgcgctacgacagcgtgcggatcggcggcggcgacgacgacgacgacgtgcggtcggtgcacgtccacggcgaccggaccgtcgtcgtgcacgccggccgcgtggacgtgttcggcctcgacgacgggaggaggaaggcggcggtgctgcagcggcgggtggagaccggggacaaccgggccggcgcctgcgccgtgtcgagggggccgcccggctcgccgttcgcgttcgcgtgccccggcgtgaacgacggcaacctgcgcgtcgagcggtgggtcggggggttcacgccgctggtcatcggcgcgcaccgctggcgtgtcgcgagcgtcgccatgtcgtggggtgctaagctcgtcgccacggccagtgtcaagggcaccattgtgcgtgtgtttcgcgtcgccgacggcgaattgctccaggagatgaaaagaggcttcgatagagctgatatctacagtattgtcttctcccccgattcagagtggcttgctgtctcgagtgataaaggaaccgtacatgtttttcatatcaatgtttgttcgccatcttcctccaaaactggttgccaagatacaactcaatcatatgaatcatatggtgcaaaagcaatgaaaaaatatgtttcttctataaaagctttacttatcgtaaaagatttacttacattaggatatttcgatccagaaaggtcggtagctcaattccatctatgtgataatgtaaaataccttgtcgcatttggtacaagaccaaataaaaatattgttcttataatcggtatggatggaagtttttaccggtgtcagtttgatccagtaaacggtggagaaatgaaacagcttgagtacacgaattttttaaatatgtag

SEQ ID NO: 59822 - DNA, 2775 bp, Oryza sativa
  unsure (1)..(2775): unsure at all n locations
  Clone ID: PAT_MRT4530_61409C.1
tcatcgggcctgcggatccatcatatcagagaatatggtcctttgtccagtgatgctcattgtcgagtaggtggattgtttgtcagtatccatgatggtcatcatgtctggtgttgtcttcgacgatgttgtttcttcactgaattttctatagttccctgcatctgcctgcatcttcagagcaacctctaggttccgaagaacatcacccatctctggcctgtcgatgcttcgatcagcaacacattgttctgcacaatcagcaaacttcttgaggcaatcaggagcgatttctccctgaagatagggatctataatttcaccaagagtgcctatcttcttgcaagacaatgcccattcacgcaagctcacttgctcttctggaagctcagtgtttactggagggcgagcgcacaggatctcaaacaacacaaccccaaaagagaacacatctgacctttgggtaagttgcttcaaccgaaaatactcagggtcgaaatatccgaatgtacccttcacaacagtgctaacatgggtggcgtcaatgtccggattaaccttggacaacccaaagtctgaaacctttgccacccacttgtcatctagtagaatgttggcagtcttcacgtcacgatggatgattgtttctttcgggcccgtgtgcaggtaatacagccctcgggctgcaccaatgcagatcttgaggcgctccttccatggtaatggtggcctcttggtgctgtacaggtgctcccgaagtgttccacgggccatgtattcatacaccaaaatcatctcatttttttcctggcagtatccgattagagacacaagatggccatgtctgaccttggacagcgtctcaatctcggtctggaactcatgaacaccctgcagggacaatgggttgctccgtttgatcgccaccgttgtaccattatctatctctccacggtacacatcaccaaatccacctctaccaagcagaagggtttcatcaaagctactagttgctatttgcatttcatggaaggtgaagttccgacaaagatttgatggtgatttgtataattcagtttgataagtcaagcactttttgtcagtcttgccagaatgctttgccactttctttcgtctacagatgatgcacacacaaaaacaagctgtaatcagcacaaccacggcacatatggctgctgggacagcagcctttaatttccctccaccagacacccctttagggttcacatcagtctttggttgttgcggagagatgggctgtcccccaacattgagccggtacatcgtttggagacccatcacaggatctatgccatattgcacattgtccccgccattggcagatgtaggtgtcggtgttgtgaagatgtcaggcgtgggcacaatctcaatcccattcacaaatgcatcataatactgtggtctacttgaaagatcaggatgaagtgcaacccacaaatccatctgaccggaaccaactgtgacgataagatagtcagcatatgttgccatgccaattcctccactccaacgaataacatccatttgatcctgcaccgtctgattattgatgtaaatgaagaatgacctctgattcatcttggttataggatactggatctcacagaaatggaaccttaagaggtagtaaaaccctggatatgtgatggtgacattactatctttgccgaaggtcaccccaaaggcagcaccatatatgtatggagagtcatcctcccatgaacgatagaacctagaatcaccttgtggaatgatcgcctggcccccaacattgagacggtacatcgtttggaaactggtcatagaatctatatcggatggatcaaggttcccttcggtgttatgtgtaggtgttcgtgttgtgaagatgtcaggcgtgggcacaatctcaatcccattcacaaatgcataagaaccattctgtgtggatgggaaaaaggtgaggtctagactacctaaagtgacgttcagcgagaattctcgaaggatgtaggcatagtttgctgcccccacgaagttgaccttttctccccagctccactcctcctcttgcttcaccagcttcttcacggcatcggctaaggatctcttcctccgatggctaggtcgcagcatcgggtcagtgctcggcgaccgccgagccgccgtgccagcgaggggaggggggagggccgacgggcggcggctgcgggaggcaagcgtcggcggaccgcggaccgcggacagcgtgtcagcggtgtcggccgtcggcgtcgagtggtgggctagaacagggttgttgctccttgttgggcctatgtttcggacccagctggtgtggccgtgtgggagcgccgctggagagaacggtgtctgctcacccatgttatcctcctcagcgccgccaacctcaccatccacatgggcttccctgttccagaatgcggtcttcgaggatgagctccttgccgtcctccacctcctcagttgcccttggaagctcaccgtctccttgttgccagtctcccagcggcaatggcgaatgggtgccttggagaagggatcagtgccgttcttgtccaagatagggatcccgtgggcatagggcggcaactgcggcgcgtagggcagtaggcttccgccgccgcatatattgcttctcctccacgagctccggcactntgcctcctcctcaaccataactcccaccatgtccacccgagtacgacccatcctggctgtgtccacgaccat

SEQ ID NO: 59823 - DNA, 1992 bp, Oryza sativa
  Clone ID: PAT_MRT4530_6140C.1
atggacgtgaagcgggcccggagcccgcgggctccgggcgtcgacgccgacgacgacaagaagcgggccgccgagtggcgcggcgccgtccggccgcacatggtgctggtcggcttcctcatcaccctgcccgtcctggtcttcgtcttcggcggccgctggggctccttccaaaccacctccgcccccaacgtcggcggccgccacgtcgtccccggcggcgtaacaacgacacaaatcagttctagttcggtgatgtggcgagcccgtgatgacggtgtcgtcttgatgccatcaccacttgtgcatccttttgcggatcttgtcctaccttatcattgtttcttccaaaggaggtcctcttggctttttactcgagtggtccctggatttactggagtagcagacaaacttaagcatcttgggaggcctcatgccctcgtgaaagtaggtggtccgagatggataatttctgccgtgcatgttgccagcaataatgctgaaaatgaagccccgaaaaacgtctctgtaccagccactgcaaccaaatctctgccccaaccccaggacaagcttctcggaggactactctctgccgcattcgaagaatcctcatgtcagagcagatacaaatcatctctctaccggaagaagtctccgttccctctgtccccttacctggttcagaagctgcggaagtacgaggcctaccacaagaagtgcggccctggcacgaagcgctaccggaaggcgatcgagcagctcaaggcggggcgcaacgccgacaacgccgagtgcaagtacgtggtgtggttcccctgcaacggcctcggcaaccgcatgctcaccatcgcctccaccttcctgtacgcgctcatctccaaccgcgtcctcctcatgcacgtcgcggcggagcaggagggcctcttctgcgagccgttcccggggagctcgtgggtgctcccgggcgacttcccccacaacaacccgcagggcctgcacatcggcgcgccggagagctacgtcaacatgctcaagaacaacgtcgtccgcaacgacgaccccggcagcgtgtcggcgtcgtcgctgccgccgtacgtgtacctccacgtcgagcagttccggctgaagctgtccgacaacatcttctgcgacgaggaccagttgattctcaacaagttcaactggatgatactcaaatctgacagctacttcgcgccggcgctgttcatgacgccgatgtacgagaaggagctggaaaagatgttcccgcagaaggagtcagtgttccatcatcttgggaggtacctgttccatccgacgaacaaagtatggggaatcgtgagcaggtactacgaagcgtaccttgccagagtcgacgagaaaatcgggttccagatacggatcttcccggagaagccgataaaattcgagaacatgtatgatcagctgacgaggtgcatcagggagcagcggttgttgccggagctcggcacggcggagccggcgaacacgactgccgaagcagggaaggtgaaggccgtactgatcgcttctctgtactcgggatattacgagaagatccgtgggatgtactacgagaatccaaccaagactggcgagatcgtcgcggtgtaccagccgagccacgaggagcagcagcagtacacgtccaacgagcacaaccagaaggcgctggccgagatctatctgctcagctactgcgacaagatcgccatgagcgcctggtcgacgttcgggtacgtggcctacagcttcgccggcgtcaagccgtggatcctgctccggccggactgggacaaggagaggtcggaggtggcgtgcgtcaggtcgacgtcggtggagccgtgcctccactcgccgccgatcctctcgtgcagggccaagaaggaggtcgacgcggccaccgtcaagccgtacgttcggcactgcgaggatgtcgggttcggtctcaagttgttcgatagctaa

SEQ ID NO: 59824 - DNA, 246 bp, Oryza sativa
  Clone ID: PAT_MRT4530_61410C.1
ccacgtcattgcttgttactcttggaggttgccgcctcctagatggcttgtggaggagttgcccggtgaccactcggagaagattgtggtggaggcccggcaccggttgtgagtgggttggagttcaccacctttggagtgaaggaagaacttccccgagtgatcgaggcttgggtagtcctctccgtgggccggctcccgccttgcccaccccttgacgaagggggcgtgtggtggcttcgtggt

SEQ ID NO: 59825 - DNA, 2103 bp, Oryza sativa
  Clone ID: PAT_MRT4530_61411C.1
atgcaacttgatatcaataatcggagttgggagggggacactagatccaagtttgcatcagcaatgaatggaattgcagctagtgctacataccaagacccttcactcccatctcttgtgccttacatgacatcccgtatattcatttcaaattacacctattccttcccaattagcccagggcggatattcgtgcgcctttacttctatccagtggcctatggctactatgcttctgaagatgcttactttggtgtcaaaacaaacaatttgattcttttagacaacttcaatgcttcacaaactgctcaggcagcaaactatgcctacatccttcgagaattctcgctgaacgtcactttaggtagtctagacctcacctttttcccatccacacagaatggttcttatgcatttgtgaatgggattgagattgtgcccacgcctgacatcttcacaacacgaacacctacacataacaccgaagggaaccttgatccatccgatatagattctatgaccagtttccaaacgatgtaccgtctcaatgttgggggccaggcgatcattccacaaggtgattctaggttctatcgttcatgggaggatgactctccatacatatatggtgctgcctttggggtgaccttcggcaaagatagtaatgtcaccatcacatatccagttggttccggtcagatggatttgtgggttgcacttcatcctgatctttcaagtagaccacagtattatgatgcaatactaaatggccttgaggtcttcaagctatgggacattgggaaaaaaaaccttgctgggcttaaccctccacttccaccacaaccaaagactgatgtgaaccctaaaggggtgtctggtggagggaaattaaaggctgctgtcccagcagccatatgtgccgtggttgtgctgattacagcttgtttttgtgtgtgcatcatctgtagacgaaagaaagtggcaaagcattctggcaagactgacaaaaagtgcttgacttatcaaactgaattatacaaatcaccatcaaatctttgtcggaacttcaccttccatgaaatgcaaatagcaactagtagctttgatgaaacccttctgcttggtagaggtggatttggtgatgtgtaccgtggagagatagataatggtacaacggtggcgatcaaacggagcaacccattgtccctgcagggtgttcatgagttccagaccgagattgagacgctgtccaaggtcagacatggccatcttgtgtctctaatcggatactgccaggaaaaaaatgagatgattttggtgtatgaatacatggcccgtggaacacttcgggagcacctgtacagcaccaagaggccaccattaccatggaaggagcgcctcaagatctgcattggtgcagcccgagggctgtattacctgcacacgggcccgaaagaaacaatcatccatcgtgacgtgaagactgccaacattctactagatgacaagtgggtggcaaaggtttcagactttgggttgtccaaggttaatccggacattgacgccacccatgttagcactgttgtgaagggtacattcggatatttcgaccctgagtattttcggttgaagcaacttacccaaaggtcagatgtgttctcttttggggttgtgttgtttgagatcctgtgcgctcgccctccagtaaacactgagcttccagaagagcaagtgagcttgcgtgaatgggcattgtcttgcaagaagataggcactcttggtgaaattatagatccctatcttcagggagaaatcgctcctgattgcctcaagaagtttgctgattgtgcagaacaatgtgttgctgatcgaagcatcgacaggccagagatgggtgatgttcttcggaacctagaggttgctctgaagatgcaggagtgtgcagagaacaatagcaaattcagtgaagaaacaacatcgtcgaagacaacaccagacatgatgaccatcatggatactgacaaacaatccacctactcgacaatgagcatcactggacaaaggaccatattctctgatatgatggatccgcaggcccgatga

SEQ ID NO: 59826 - DNA, 2164 bp, Oryza sativa
  Clone ID: PAT_MRT4530_61412C.1
atggttcggaagcgtcgcgacaccgcgagggttaacccaaccgcggttagcggagggggcctctctggtttatatagccgcgcctcctcttcccctcctcttcaccacagcggatcacggcggcgacttcggacgaaacaccgcaccactctctcttactcgtccatacgccgagtccacgagatctcgccgtagtccatacaccggttgatcggaggtcgtgttgccgccggcggtggccatgatgatgatgggggaaggagtcagcagcgtcccgccgtggtctcacctccccgtgagcggagtcgatgtactcggcggcggtggtggcggtggggatgagatgacgccgtacgtgatcgccgcgctgcgggattacctgccggcgaatgatgtcggggtgggggctgacgaggaggaggaggccgcggcgatggccgcggcggtggacgcgtacgcgtgcgacgagttccggatgtacgagttcaaggtgcggcggtgcgcgcgcgggcggagccatgactggaccgagtgccccttcgcgcacccgggggagaaggcgcgccgccgcgatccgcgcaagtaccactactccggcaccgcgtgcccggacttccgcaagggcgggtgcaagcgcggcgacgcctgcgagttcgcccacggcgtgtttgagtgttggctccacccggcgcgctaccgcacccagccgtgcaaggacggcaccgcctgccgccgccgcgtctgcttcttcgcccacaccccggaccagctccgcgtcctcccgccgcagcagtccagccccaggggcgcggcgtcctcgccgctcgccgagtcctacgacggctcgccgctccggcgccaggcgttcgagagctacctcaccaagagcatcatgtcgtcgtcgcccaccagcacgctcgtctccccgccgaggtcgccgccgtccgagtccccgccattgtcgcccgacgccgccggcgcgctccgtcgcggcgcgtgggcaggagtcggctccccggtcaacgacgtgcacgtctcgctccgccagctccgcctcggctccccgaggtcggcgccgtcgtgcgcctccttcctccccgccggctaccagtacggctcccccaaatcccccgccgccgccgccgccgcggcgctctacagcctcccgtccaccccgacaaggctatcgccggtgacggtcaccaccgcctccggcgccatgcccaccctggagccactggacctcgggctcatcggcgacgaggagccggtccagagggtggagtccggaagagccctccgggagaaggtgttcgagcgactgagccgggatggtgccatctccggcgacgccaccgccttcgccaccgccggtgttggcctcgacgttgattgggtgtccgacctcatcaactgaggcttccaagtcgctattggaagccccttttgtgagcatcaaggatgatggcatggaggaggagaaggtggcggtaagaagaaaatgatggcacgacaaaaaaatccttcattttcttttgtgatttcaagtcaagtttctactaattcctgtacatatctatctcccatgtgaatattcatggttggtggagaggaggcaagtatggaaagatgggtggatttgttttggggttttgaggtagtagcaaaattacccacaaaaaaattaggtgaaaaaaaaaagaggagtagaaatggaggtgattcagtgtctcctgtgtgcatagggtgtgtggaggtgaaggaagcacggaaggaagaagatcatggcggaagaagatggccggatttcggccgccgtcgcggcggcggccctgcctatttcagtgatttctgggggtttatcctctgttcatcgtttgttgcatcatcgactagctgatgaagatcatcgatcgatttcaatcaagccccccctcttgttgatttcctattttgttgatgtaatctttgttttgttaagaacccccaacagcatattttgtaccttagctttaaatctgaaaatcttttgctgactcatctacctatatgtggtgatgaagcccccctcaatgtattgtaatcacctgcttcatgtaaatgatccaataatattatgttgctatatgtttcattaaaaaaaaaaaaaaaatccctcgtgccg

SEQ ID NO: 59827 - DNA, 1515 bp, Oryza sativa
  unsure (1)..(1515): unsure at all n locations
  Clone ID: PAT_MRT4530_61413C.1
tgatgatgatgggggaaggagtcagcagcgtcccgccgtggtctcacctccccgtgagcggagtcgatgtactcggcggcggtggtggcggtggggatgagatgacgccgtacgtgatcgccgcgctgcgggattacctgccggcgaatgatgtcggggtgggggctgacgaggaggaggaggccgcggcgatggccgcggcggtggacgcgtacgcgtgcgacgagttccggatgtacgagttcaaggtgcggcggtgcgcgcgcgggcggagccatgactggaccgagtgccccttcgcgcacccgggggagaaggcgcgccgccgcgatccgcgcaagtaccactactccggcaccgcgtgcccggacttccgcaagggcgggtgcaagcgcggcgacgcctgcgagtacgcccacggcgtgtttgagtgttggctccacccggcgcgctaccgcacccagccgtgcaaggacggcaccgcctgccgccgccgcgtctgcttcttcgcccacaccccggaccagctccgcgtcctcccggcgcagcagtccagccccaggagcgtggcgtcctcgccgctggccgagtcctacgacggctcgccgctgcgccgccaggcgttcgagagctacctcaccaagaccatcatgtcctcgtccccgaccagcaccctcatgtctccgcccaagtcgcccccgtcggagtccccgccattgtcgcccgacggtgccgcggccatccgtcgcggatcttggcccggcgtcggctcgccggtgaacgacgtcctggcctcgttccgccagctccgcctcaacaaggtgaagtcgtcgccgtccggcgggtggagctacccttcgtcgtccgccgtctacgggtctcccaaggccgccaccggcctctacagcctccccaccactccactggcttccacggcaacggtgaccaccgcctccagcttcatgcccaacctggagccactggacctcgggctcatcggcgacgaggagccggtccagagggtggagtccggaagagccctccgggagaaggtgttcgagcgactgagccgggatggtgccatctccggcgacgccacagccttcgccaccgctggtgttgacctcgacgttgattgggtgtccgacctcatcaactgaggcttccaagtcgctattggaagccccttttgtgagcatcaaggatgatggcatggaggaggagaaggtggcggtaagaagaaaatgatggcacgacaaaaaaatccttcattttcttttgtgatttcaagtcaagtttctatctcccatgtgaatattcatggttggtggagaggaggcaagtatggaaagatgggtggatttgttttggggttttgaggtagtagcaaaattacccacaaaaaaattaggtgaaaaaaaaaagaggagtagaaatggaggtgattcagtgtctcctgtgtgcatangntgtgtggaggtgaaggaagcacggaaggaagaagatcatggcgga

SEQ ID NO: 59828 - DNA, 1257 bp, Oryza sativa
  Clone ID: PAT_MRT4530_61414C.1
atgccgcagtggccgtcactccagctgcccgccgccgccgccgcccgccgcgccactcccttcgccttgtgcaggagctcgtcgtcctccgtttctgcgtcagcgtccaaccaggacctggtagcgtgttcttggcaaaaggaggatgaggccgaggcgcagtcgttggtggtggtgggcggaggcgccgccggggtgtacgcctccataagggccaagtccctggctccccacctcaacgtcctagtcttcgacaaaggaaggttcttgtccaaggggatggcaagaaattatcctaggggacacaaagaactcagaggatcgttcttcaaaaatcatggccctcaggatactatgcgttggttctcagatcatggtgtcgagcttaaggctggtaaagctgtgactggtgcatctgtcactgaaaatgggaagtttgttgtgaaggttgagaagcgtaccgttgattttgtggatcatgtaaacgctaaatatgtcttagttgctacagggagcagccagcagggttattcaattgctgcacaatttggtcactctattattgctccagtgcccagccttttcacatttaaaattacagacaagcgattggctgacctctctggggtcacattcccaatagtcaaagcaaaactgaagctagacggcattaagagaagtgctcctgaattaactcagattggacctatgttagttacacactgggggcttagtgggcctgttgttcttcgtttgtccgcatggggagcacgtgaactgcatcagtacaactaccaagcaaagctcaccgttgacttcatacccgacattcatattgaggacgtgaagcgcatccttttcctgcacaaagatcaccatgcgagtttagatggtgatatgcactgggcgtccataccaaataataatctaaacacagtagcccttaggttaaagcaatggatgtttgaggttgtcgctaagggtcaattcaaagatgaatttgtcaccgccggaggtgttccactttcagaggagaggtatacatttgttcctgaacttgcaacactctggatcagcaagagaacaattgaccttagcatgaccgtggtgcaggtacttaatgttgatggggtcactggcggattcaattttcagaatgcatggaccggtgggtatatagctgggacaagcataggaacattggcatcaagcaacatgaggcagcaacagccatatttgcaactggacggatcatga

SEQ ID NO: 59829 - DNA, 710 bp, Oryza sativa
  unsure (1)..(710): unsure at all n locations
  Clone ID: PAT_MRT4530_61415C.1
ttngnggntcgccttctgaaaattcttntgcccctacaaaatattttntgttttgtgtnctgantttnttttantcctnnagttcacaaaacttcactgtatgtttcaattcggaatgctgagtttgtcacctaaaattgcanantgaaccttcgaccattttgatctacaatnaccattnccctatattntgacnaataaaaaaaataaaaactcnagggggggcncggtncccaatccgccctatagtgagtcctattacaatncnctggccgccntttnattttttnttnacngggaaaaccctggcnttacccnanttaatcgtcctagcagcncatccccccttcnccanctggcgtnannancnaanaggcccncnccgatttncccctcccaacngttgcgcagnctgaatggtnaatggcaaattntnngcnttcaaattttgtcnnaantcgcgtctaaatttcngttnnaatcnnccccactnntttnncctattaggcccaaancgggcanaatcccttntcctttccttnngaaatngantttataatatgggtttcaatgttcntcccccttngggnactanaattccccnatntttnnaanntnggancccaacttctaancggggcaaaaaacccncccactnngggcgaaangngctcncttctttatacccccaccccnacncttnttntntg

SEQ ID NO: 59830 - DNA, 198 bp, Oryza sativa
  Clone ID: PAT_MRT4530_61416C.1
atggacagcaacatgaagaagaaatcaatcaatattgctgatgaggacatccttcactattacctgctggcaaagacacaaaagtcaggcggcaaccgtgtgagcctggagattgggcctttccccgggtgggtgtgcataagaactgttggggttcgagcaaccttaagttattgggcctcggccgaccccacctag

SEQ ID NO: 59831 - DNA, 481 bp, Oryza sativa
  Clone ID: PAT_MRT4530_61417C.1
cttatttgagaaatgcaatcagcggcaatgatgaacggacacgaattggaagctgcagagcacgagaagcatatgaaaaaacatgagcaaaatcggcaacagcatcttgcaaaggaggaatttaagaaggatgctgattcttcatcagcggccaatcaccgagacgaacatgctcaaggtcgaggcagaccggctctgggacaacctaaaaaaggaggtgatggcggtaaatacacttggggaagcgacaaggaagcgatccgaattggcaaggaagaatttgaatttggatctgaatctatcgctttggacaagaatgatcctttggctcctgatagactgactgccgacacgcgcccgctcggggctaaaaatggatgcttatttttttttaatgctggatggttgtttggtttgtgtgcttggagaagcactggactgtttgtttgagaataaatcatttgaaaaaaaaaaaaaaaaa

SEQ ID NO: 59832 - DNA, 186 bp, Oryza sativa
  Clone ID: PAT_MRT4530_61418C.1
atggcccacgttaacaaagtcacagaaaaccatgaaacccgcttgggcttcatcgtgccggagtactttggagttctggtgctcgagatcgtcaccgacgaacgagctctctgcatgttccaggagatgtttaagctgccgtcgattgaattgatatatcagagcaatactccctccgtcccataa

SEQ ID NO: 59833 - DNA, 1338 bp, Oryza sativa
  Clone ID: PAT_MRT4530_61419C.1
ctagcacctaaatatttcggtctctgagaattgattccatgacataggtatcggtggcataggtgaagaatatgtataatatggtggcgaaagaacctgatgattagatgcaaaccgttgatttggcgcacacctcttaactcccttctcattttttgcccccactccaactttaacatctgtttcattctgtacctgaacacttgctttaagaacccatgccatacctctctccctcagcttttctgcacttagcttgtggagctgcttctttcgccaatttgacaagccatgtgagtgtctcagttggctgccattgccccccgagctcttcggcggattctgacttgttactaactctgccgaagatgcctctcgcttcatattcatatggtgtacatttcctaactgttgtatacgcgcatgccccccaggttcaatagcctttttctgaactgaagcattttgtacactcacatgtgcaccagcagctaagctcttttcttgacctctagacttcggcacccagatttgcttccttgttgaactaccttccgcctgtgccgaagacttcctactagaccacctagaccgatttcttttatcaaaacggtcatccttggcatatgactgatctgatttgttggagaagcattctaattttttcacctgagcgatgtctaggttcgttctttgatggctctccaatattttcaccttgtcgtcatgatttcgtgctccatcgtcaagatgttcatcatcttccttagcacgaaattcagctggcaaaacaaaaggtcctatgtttccagagaaatcaagcatagctacctccttttcattagccgataaatctaaatttatcagcttccattgttgattaaaaattggttttgatcccttgcttaagatatatgcattcattttctcctccacatctctatatatttcttcaataaggttatctatcttggaactaaaatcatccacaaattgccccccaaccgaacttgctaatttggtatcatttgttctatgcgtgtcttcggctttatgcgttgtcgactgcacaaatgacccattttgttgaaaattattaacacttggtttcggcaatggaatatgctcgatgccgaaactctgtggctgtgcaggggacaaactatatgttgtggaattatatggaggtaaatgcttgcttgctgaattttcactaattcggccataatcattaacatcacatgaagccgaattataactactagacactgtataaggtgaaccataagcatgaacatgagcatgagaagtaatctctgatttagcagtatttgacat

SEQ ID NO: 59834 - DNA, 351 bp, Oryza sativa
  Clone ID: PAT_MRT4530_6141C.1
atgacctggagccatcgttacactatacaagacctgcagtttagttaccaagagattgcatggccacacttcgcctacggagagaatgtcttgacaatcttagacagcgaccatctgcgcaatcagctgtatacgcattggctatggccacacaagaacaggacaagtgtagcaacgggcgacgtggtaaaaggcactttggtggaggagttcgtcatcgacccggaaaatgtgaaaattttatcgctcatcgaccctgaaatacatgtgaacatgttctcgtatgtagagaccaatgagccactgaacatctacaaggaggtgggtgatctctttggaagacgtctgtaa

SEQ ID NO: 59835 - DNA, 903 bp, Oryza sativa
  Clone ID: PAT_MRT4530_61420C.1
atggccgcctggaacggcggcgagatggggcgccacaagcgttcgcactccctctcagtgacctcctcggcgacgccctcgtcagacgccaccaagctcgacttcgccgccgctgacgtcgcctgccagttcggccgcgtcgatgcgctgggccccgtcgagctccgcaagaccgcctacgagatcttcatgtcgtgccgctcctcctccggcggaaacaccgccggcgcccgtggcgcggccatggaggcggcggaggtgtcgttgccggtggccaggccgaggggcggcggcggcggcagccgcatcaagaatgcgctggggctcaaggcgaggcggttgtcatcgtcagcggtggcggcgacgcagccgatgatggtgcgcacgctgagccagacattggggccggcgttacccgggcgtggacggcagctgatgacatcggcggagatcatgcggcagcagatccgcgtcactgagcagaacaacgcgcggctgcggcggacgctgatgcgcgctatcgtcgggcaggagtaccaccagtggcagttccggcaggtgaagctcctcgaggccggcctcatcctccacccttccctccctctcgaccgcctcaactccgccgtgctccgcttccgcgaggtgatgcgcgccaccgagatccgcgccatcgacaccgctaagaactccaacgccatgcgcaccctcaccagcgccgtccatgccctcgcctggcgctccggcgtcggcagcggcggtggggacgcctgccactgggccgacggctactccctcaacgtcctcctctacatctcccttctccacacgccctcccatctcgaacccttcctctcatgcccaagaggcaaccaagtcattttgctgctccgttaccaccgttag

SEQ ID NO: 59836 - DNA, 5747 bp, Oryza sativa
  Clone ID: PAT_MRT4530_61421C.1
atggcgagggcggcggcgaactgggagcgcctggtgcgggcggcgctgcggggagagcggttggcaggcgccttcggggtgcccgtcaccggcatcgccgggaatgtgccgtcgtctctcggaaacaacgtccacatcgacgaggtgcttcgcgccgccgacgagatccaggatgaggaccctaccgtcgccaggattctatgtgagcatgcatacacactagcccaaaatctggatccaaatagcgaagggagaggtgtactgcagttcaaaacaggtttaatgtcagttatcaggcaaaagctagcaaaaagggaaggtggtgctatagatcgaagtcaggatgttgctaaactgcaggaattttataagctatacagagaaaagcataaagttgatgaattgtgtgaagatgaaatgaagttgagagaatctgctgtgttcagcggtaaccttggagagttggaacgcaaaactctgaagcgcaagaaagtccttgctactttgaaggtcttatggtcagttatagaggaaataacaagggaaatttcacctgaggatgcagaaaagttgatatctgaagagatttttgtcgctctccctgccgtctaatactctgctgcgtcgcctacatctatgtcatcgtgtcaaacatctgagcacgcctgtacggcgctcgcgaccggaactgctagtttctctccccttgaagctgccgccgccgctaaattcaatctcgcttgaagccgtcgaacttgtatttggctcctacttaagcagacgcttgctcatcttcatcaggaatccaggtaagacgacgagagagggttgtcggagcttgctgctcacctgttggcaaaggaacagccctcactgcggaaaccaccacggactgagtcgctagctagtgaactgggggagattatacggacatagaccgcagagtctggtgaaaactgcattgcacatgttggcgtatcattcttagtgcaagtcattgctcctatgaatgaagtcatcgcagttgaggtagcgaactagcacaatgtgcgagcgccacattccgggttgataaactatgatgatttcaaggagatcttcaggttgggattaatgatcattgcttttaaggatcgtaaatttgacaaaaaaacagtattgacactcctcagcctgggtccaacctatgtcatcatgaaatttattgagaataaccataatgctctaactattctttctttatgggctccagtggtatcaatttaccttttggatatccatgtattttacaccgtgatgtctgctatatgtgggtttctccttggtgcacgcgatcgcctgggagagattaggtctgttgaagcagttcacagattctttgagaagttccctgaagcattcatggataaactccatgttgctgtaccgaaaaggaagcagctgctatcatcgagtcagcatccagaattaaacaagtttgatgcatctaaatttgctcccttttggaacgaaattgtgaggaatatgagggaagaggattatattaataacactgaactggatttactcttgatgcctaagaataatggatctcttccaattgtgcagtggcctctctttttgcttgctagcaaggttttcttagccaaagatattgcaattgattgtaaagactcacaagaggaactatggctaaggatatcaaaggatgaatacatgcaatatgctgttgtagagtgctatcacagcatttattatattctgacatctatactagataaagaaggacgtctctgggtggagaggatttatgttggtatccgagaaagcatttccaagaggaacattcagagtgatcttcatttcagcagattgcccaatgtcattgccaagttagttgctgtagcaggaattttgaaagaaaccgagtctgctgatctgaggaaaggggcaattaatgctattcaagatctatatgaagttgttcatcatgaagtgctgtctgttgatatgagtggcaatattgatgaatgggaacagattaagcaagcaagagctgaaggccgtctcttcaataatctcaagtggccaactgactctggattgaaggacttgatcaaacgattgtactctcttctgaccatcaaggagtcagctgcaaatgttcctaaaaacctggaagctagacggagattggagttctttacaaactctctgttcatgcaaatgcctgttgcaagacctgtttcagaaatgctttctttcagcgtatttactccatactactccgagactgttctttatagtaaagatgaactccagaagagaaatgaagatggtataagtacactattttatctacagaagatttatccagatgaatggaagaacttccttgctcgcattaacagggatgaaaacacaactgactccgaactttttagtagccctaatgacatgatggaactacgtctgtgggcttcttaccgtggacagaccttagcacgaactgttcgtgggatgatgtactataggaaagcccttatgctgcaaagttatttggagaagttgcaatctgaagatattgaatctgcagttgctacaactggtcttggtctggctgatatacattttgagctgtctcctgaggcacgtgctcaggctgatttgaaatttacatatgtggttacttgccaaatatatggggtacagaaggcagagaggaaaccagaagctgcagacatagctctactaatgcaaagaaatgaagcactcagagttgcttacgttgatattgttgagagcgttaagaatggaaagcctagcaccgagtattactcaaagcttgttaaagctgacattcatggaaaggacaaggaaatttattccattaaattgcctggcaattttaagctgggtgaggggaagccagaaaaccaaaatcatgccataatattcacccgtggaaatgcagtgcaaaccattgatatgaatcaggataactattttgaggaggcactcaaaatgagaaacctgcttgaggaattctatcagaatcatggcaagcacaagccttcaattcttggtgttagagaacacgtgttcacgggaagtgtttcttcgctggcctcgtttatgtccaatcaggaaactagttttgtcacattgggacagcgtgttctggccaatccactgaaagtaagaatgcattatggccatccagatgtttttgatagaatttttcatataacgaggggtggaataagtaaggcctcccgtgtcatcaatatcagtgaggatatttatgcagggttcaactcaactctgcgcttagggaacataactcatcatgaatatattcaggttggaaagggaagagacgttggtcttaatcagattgcactgttcgaaggaaaagttgctggaggaaatggtgagcaagtgctcagccgggatatatacagacttggacagctttttgactttttcaggatgttgtccttctatgtgacaactattgggttctacttctgcaccatgctaactgtttggaccgtgtacatatttctctatgggaaaacctatctggctttgtctggagttggagaatcaattcagaatagggtggatatattgcagaacacagccttgaatgcagctctgaacacacagtttcttttccagattggtgtatttactgctattcctatgattctgggtttcatcctggaatttggtgtcttgacggcttttgtcagcttcatcacgatgcagttccaactttgctctgtattttttactttctccctgggtacaaggacccactattttggccgcacaatactacatggtggtgcaaagtatagagcaaccggtaggggttttgtggtacgacatatcaaatttgctgaaaactaccgtctttattccaggagccattttgtgaaagggttggaggttgctcttttgttagtgatctttttagcgtatggttttaacaatggtggagcagttggctacattttgctttccataagtagctggtttatggcagtttcttggctttttgctccatacatattcaatccatctggatttgaatggcagaaggtcgttgaggatttcagagactggacgaattggctgttttaccgaggtggtattggggttaagggagaagaaagttgggaagcctggtgggatgaagaactggcacatattcacaatgttggtgggaggatactggaaactgtactgagtttaagatttttcatcttccagtatggagttgtttaccatatggatgcaagcgaatcaagtaaagcactattgatatattggatatcatgggctgtgcttggtggcctttttgtcctcttactggtattcggtttgaatcccaaggcgatggtgcatttccagttgttcctccgacttatcaaaagcattgcgctactgatggttttggcgggcttggttgtggcagttgtgtttacaagccttagtgtcaaagatgtgtttgctgccatcttagcatttgtgccaactggctggggagttctttcgatcgctgtggcgtggaaacctattgtgaagaaactaggtctatggaaaacagtgcgctctctagctcgcctgtacgatgctggcacaggaatgatcatttttgtcccgatagccatcttttcctggtttcctttcatatccaccttccagacccgacttctatttaaccaggctttcagcagaggtttggagatctctctcattcttgctggcaacaatccaaatgcgggatgcaaaactggggacttccatggcgcccgcgaggtgttcgacgaaatgaggaggtcgggcttcggcccgaattctaactcctggaactacctcctcgggtgcctgctgaagaacggcagggttgcagaagcttgtgagcttgttgaggccatggagaggtctgaacacaacgacatcccgaactcgctgacctacgagattctagcataccatgcgtgcaaagcggggaggatggattcagccatgcggattcttgatcagatgttcttggagaaattgacaccgaggattacgattcacacagccttcatcaaggggtacttatacgctggaagaatagatgatgcttgcagatatgtcagtgctatgagcaccagggacaggcgctcagtgaacaggaactacagcctgctagccaagctactgtgtaaggcagggatgatcgttgatgcaggaagaattctgtatgaattgatggagaaggaggcactcttgcctgaccattctgcttacattagagtgatcaaagatttgcacaagattggcaagggagatctggctgctgaattgaacttgattttgcagaagctcagtgtacatgcagaatcagcgggatgactgtagctgctcccatccatctaagcatctccattcagatcgtggagctttacaatcactgttgttctctcttagcagtaggatgtatatatttcatggacggggagtcgtggatgtatcctgttggccacattgttgtattgatcttagtgcttctaattgtgattgctactgttgttttgtagctttagttgtggagttccctttacaatgttgccaaacacaccggttaaatttccctttaaatttgggtaagggatttcttttgacggttaaattttttgaacggggaaatgaccacctttttttttacttaaacccctgtttttttc

SEQ ID NO: 59837 - DNA, 359 bp, Oryza sativa
  Clone ID: PAT_MRT4530_61422C.1
cctggccttcgttctccagcgcatacttattctgtccttgtgctcctgcaattactgtatagcacttgcactgttccaacctactatatcccttgaggaccgtgcacatgaacatattcggttcttggtagactagcccaagtggccatgcgcatatttgacaccagccacccagggcacaatggatgaaacccactgagatcttacaaatcacacgactttgcccgattccaaccaagaggctggcacatcattttcccaattggacatcaagcgcaagccttttccatgaacgaaaggaaccattcttaggcagctaaatattctagtccatcctcctttcactagattactttctc

SEQ ID NO: 59838 - DNA, 613 bp, Oryza sativa
  unsure (1)..(613): unsure at all n locations
  Clone ID: PAT_MRT4530_61423C.1
cttagcatttgtgccaactggctgagaatttctttcgatcnctgtggcgtgnaaacctattgtgaagaaactaggtctatggaaaacagtgcgctctctagctcgcctgtacgatgctggcacaggaatgatcatttttgtcccgatagccatcttttcctggtttcctttcatatccaccttccagacccgacttctatttaaccaggctttcagcagaggtttggagatctctctcattcttgctggcaacaatccaaatgcgggagtatgactgtagctgctcccatccatctaagcatctccattcagatcgtggagctttacaatcactgttgttctctcttagcagtaggatgtatatatttcatggacggggagtcgtggatgtatcctgttggccacattgttgtattgatcttagtgcttctaattgtgattgctactgttgttttgtagctttagttgtggagttagcttttcatgtttgctaatacaactgattatattatcctattagattttgttgatgtatttcttttgatcgttaatattttgatacgtagaatgaacaaccattttattaacttagagaatgattttttcgaagttc

SEQ ID NO: 59839 - DNA, 6108 bp, Oryza sativa
  Clone ID: PAT_MRT4530_61424C.1
atggcgagggcggcggcgaactgggagcgcctggtgcgggcggcgctgcggggagagcggttggcaggcgccttcggggtgcccgtcaccggcatcgccgggaatgtgccgtcgtctctcggaaacaacgtccacatcgacgaggtgcttcgcgccgccgacgagatccaggatgaggaccctaccgtcgccaggattctatgtgagcatgcatacacactagcccaaaatctggatccaaatagcgaagggagaggtgtactgcagttcaaaacaggtttaatgtcagttatcaggcaaaagctagcaaaaagggaaggtggtgctatagatcgaagtcaggatgttgctaaactgcaggaattttataagctatacagagaaaagcataaagttgatgaattgtgtgaagatgaaatgaagttgagagaatctgctgtgttcagcggtaaccttggagagttggaacgcaaaactctgaagcgcaagaaagtccttgctactttgaaggtcttatggtcagttatagaggaaataacaagggaaatttcacctgaggatgcagaaaagttgatatctgaagagagatataaccgtggtctgtggttgtactacttccatgtcgtttcatctcaggtaagggcagctatatcagctttgcagtaccatagggaacttccaaggctccctgccaccttctctgtccctgatgctaggaattccgatatgctggatctcttgcactgtgtatttggttttcagtttgttttaattgtaaatatgctgttcaatatgattgaggaagtgcagaaagacaatgtgactaatcaacgggagcatgttgttcacctgttggcaaatgaacagtcccgactggggaaactaccagggaatgaaccgctagcaagagaactggaggagattatacggagacagactgcagagcctgctgaaagctgcatttcaaatggtggcgtatcatttcttgaccaagtcatttctcctatgtatgaaatcatcgcagctgaagcagccaacaatgacaatgggcgagcgccacattctgcgtggagaaactatgatgatttcaatgagttcttctggttgggattaatgatcattgcttttaaggatcgtaaatttgacaaaaaaacagtattgacactcctcagcctgggtccaacctatgtcatcatgaaatttattgagaataaccataatgctctaactattctttctttatgggctccagtggtatcaatttaccttttggatatccatgtattttacaccgtgatgtctgctatatgtgggtttctccttggtgcacgcgatcgcctgggagagattaggtctgttgaagcagttcacagattctttgagaagttccctgaagcattcatggataaactccatgttgctgtaccgaaaaggaagcagctgctatcatcgagtcagcatccagaattaaacaagtttgatgcatctaaatttgctcccttttggaacgaaattgtgaggaatatgagggaagaggattatattaataacactgaactggatttactcttgatgcctaagaataatggatctcttccaattgtgcagtggcctctctttttgcttgctagcaaggttttcttagccaaagatattgcaattgattgtaaagactcacaagaggaactatggctaaggatatcaaaggatgaatacatgcaatatgctgttgtagagtgctatcacagcatttattatattctgacatctatactagataaagaaggacgtctctgggtggagaggatttatgttggtatccgagaaagcatttccaagaggaacattcagagtgatcttcatttcagcagattgcccaatgtcattgccaagttagttgctgtagcaggaattttgaaagaaaccgagtctgctgatctgaggaaaggggcaattaatgctattcaagatctatatgaagttgttcatcatgaagtgctgtctgttgatatgagtggcaatattgatgaatgggaacagattaagcaagcaagagctgaaggccgtctcttcaataatctcaagtggccaactgactctggattgaaggacttgatcaaacgattgtactctcttctgaccatcaaggagtcagctgcaaatgttcctaaaaacctggaagctagacggagattggagttctttacaaactctctgttcatgcaaatgcctgttgcaagacctgtttcagaaatgctttctttcagcgtatttactccatactactccgagactgttctttatagtaaagatgaactccagaagagaaatgaagatggtataagtacactattttatctacagaagatttatccagatgaatggaagaacttccttgctcgcattaacagggatgaaaacacaactgactccgaactttttagtagccctaatgacatgatggaactacgtctgtgggcttcttaccgtggacagaccttagcacgaactgttcgtgggatgatgtactataggaaagcccttatgctgcaaagttatttggagaagttgcaatctgaagatattgaatctgcagttgctacaactggtcttggtctggctgatatacattttgagctgtctcctgaggcacgtgctcaggctgatttgaaatttacatatgtggttacttgccaaatatatggggtacagaaggcagagaggaaaccagaagctgcagacatagctctactaatgcaaagaaatgaagcactcagagttgcttacgttgatattgttgagagcgttaagaatggaaagcctagcaccgagtattactcaaagcttgttaaagctgacattcatggaaaggacaaggaaatttattccattaaattgcctggcaattttaagctgggtgaggggaagccagaaaaccaaaatcatgccataatattcacccgtggaaatgcagtgcaaaccattgatatgaatcaggataactattttgaggaggcactcaaaatgagaaacctgcttgaggaattctatcagaatcatggcaagcacaagccttcaattcttggtgttagagaacacgtgttcacgggaagtgtttcttcgctggcctcgtttatgtccaatcaggaaactagttttgtcacattgggacagcgtgttctggccaatccactgaaagtaagaatgcattatggccatccagatgtttttgatagaatttttcatataacgaggggtggaataagtaaggcctcccgtgtcatcaatatcagtgaggatatttatgcagggttcaactcaactctgcgcttagggaacataactcatcatgaatatattcaggttggaaagggaagagacgttggtcttaatcagattgcactgttcgaaggaaaagttgctggaggaaatggtgagcaagtgctcagccgggatatatacagacttggacagctttttgactttttcaggatgttgtccttctatgtgacaactattgggttctacttctgcaccatgctaactgtttggaccgtgtacatatttctctatgggaaaacctatctggctttgtctggagttggagaatcaattcagaatagggtggatatattgcagaacacagccttgaatgcagctctgaacacacagtttcttttccagattggtgtatttactgctattcctatgattctgggtttcatcctggaatttggtgtcttgacggcttttgtcagcttcatcacgatgcagttccaactttgctctgtattttttactttctccctgggtacaaggacccactattttggccgcacaatactacatggtggtgcaaagtatagagcaaccggtaggggttttgtggtacgacatatcaaatttgctgaaaactaccgtctttattccaggagccattttgtgaaagggttggaggttgctcttttgttagtgatctttttagcgtatggttttaacaatggtggagcagttggctacattttgctttccataagtagctggtttatggcagtttcttggctttttgctccatacatattcaatccatctggatttgaatggcagaaggtcgttgaggatttcagagactggacgaattggctgttttaccgaggtggtattggggttaagggagaagaaagttgggaagcctggtgggatgaagaactggcacatattcacaatgttggtgggaggatactggaaactgtactgagtttaagatttttcatcttccagtatggagttgtttaccatatggatgcaagcgaatcaagtaaagcactattgatatattggatatcatgggctgtgcttggtggcctttttgtcctcttactggtattcggtttgaatcccaaggcgatggtgcatttccagttgttcctccgacttatcaaaagcattgcgctactgatggttttggcgggcttggttgtggcagttgtgtttacaagccttagtgtcaaagatgtgtttgctgccatcttagcatttgtgccaactggctggggagttctttcgatcgctgtggcgtggaaacctattgtgaagaaactaggtctatggaaaacagtgcgctctctagctcgcctgtacgatgctggcacaggaatgatcatttttgtcccgatagccatcttttcctggtttcctttcatatccaccttccagacccgacttctatttaaccaggctttcagcagaggtttggagatctctctcattcttgctggcaacaatccaaatgcgggaagctgcgttcgtgtccactctccactctccttctctatgttccgcctcccgccgctccaccgcgccgccgccgtcttcctccgcctccgcctcgcctctccccgcgcaaccttctcctccaaacccgccaatccccgcaccagcagcgttgcctccgccgccgcccccgccgccgccgcggtctcagatgcgatcgttcgcctcgtcgcggccggcggcaggagcctcgaggccgaccttgaccgcctcgaccccgccctctcccaccccatcgtgtcggccaccctccgcgcgctcaccgaccgcggcctccccgcggcccgcttcttcgactggctcgcgctccgcaggggcttctccccgagcgcccacgcccacaacctgctcgtcgagaatgccggcagcctcgcggactatcgggccatgtcccgcgccatggagagcatgtctacgcggcgggttcccctgaccgaacgggcgttcgccttcttgaacacgtcccagggcagcgccagggatacggcgatagcgattctagcgacgctggatgaagtcgggggcccttgccgtgcgtccggcgtgttctcgctcgtcaaggcgctagcttcgatcggtgagttcgacgcggcgatgtctgtgatccaggagacggcgaggggggcacgttactacaacgccctcatcgccgtgaagtgcaaaactggggacttccatggcgcccgcgaggtgttcgacgaaatgaggaggtcgggcttcggcccgaattctaactcctggaactacctcctcgggtgcctgctgaagaacggcagggttgcagaagcttgtgagcttgttgaggccatggagaggtctgaacacaacgacatcccgaactcgctgacctacgagattctagcataccatgcgtgcaaagcggggaggatggattcagccatgcggattcttgatcagatgttcttggagaaattgacaccgaggattacgattcacacagccttcatcaaggggtacttatacgctggaagaatagatgatgcttgcagatatgtcagtgctatgagcaccagggacaggcgctcagtgaacaggaactacagcctgctagccaagctactgtgtaaggcagggatgatcgttgatgcaggaagaattctgtatgaattgatggagaaggaggcactcttgcctgaccattctgcttacattagagtgatcaaagatttgcacaagattggcaagggagatctggctgctgaattgaacttgattttgcagaagctcagtgtacatgcagaatcagcgggatga

SEQ ID NO: 59840 - DNA, 333 bp, Oryza sativa
  Clone ID: PAT_MRT4530_61425C.1
atggtgcccaccccactgcggtcgtcgatgccctccacctgctcgttgcgcactgtcgaggtcctctatgacatggccatccccgtcaagctctccgaccgcgacgtcgaagctagcggccatgaaggacgatgccgacggagctcgcgcccgtcgctgctccgctcctcctccggccaccttcgtccttgttgtcccctcctcgctcgccgcctgcttcgcccgccgcccgctccgctctgccgtcgctgctccgctcctcctccggctacctttgccgatgctgccccctccgttgccagccgcccgctctgctttgagaagaggagataa

SEQ ID NO: 59841 - DNA, 225 bp, Oryza sativa
  Clone ID: PAT_MRT4530_61426C.1
atgccgaggctgtaccaggaggaggaggacggcgacgacctggaggcgaagccggagaaggcgccggccgcccggccgtcggcgaaggagcggtccgttcacctcataccgctgctcaccgccctctgcttcgtcatcctcttcctcttctctcatgacccttctgcttccgaaatgtccagttttggaggcaaggttgggaatcggaagcacaagttgttctaa

SEQ ID NO: 59842 - DNA, 153 bp, Oryza sativa
  Clone ID: PAT_MRT4530_61427C.1
atggactacccagcgacccccacggacttctcgccgcttctcagtctggcaccccgtaatgaaccatgctatacaaaaggacggcagctcgggcttctgtccaagcttgaagatgaacagtacacggggaggcaaactagactttcgtcttga

SEQ ID NO: 59843 - DNA, 1123 bp, Oryza sativa
  Clone ID: PAT_MRT4530_61428C.1
atgagggacgacgtcctagcggcggctgcggcgtcccggcggcgagctgctccagcgacatgtggcggcgggggggtggccggatatggagggggcggtcaaccggtttcggatctggccgcctccaccttggatccagaaggggaaggccggcgggagtggagttggaggaggcgcggtggtggagttggccggctgttgggagaagctggcagccggcaggtggaggaggcggtcaatccggcctatgccgaatctggtcgcctccatgcccggagggaggaggccggccataaggagttgggggaggccagtggagttgggggaggccggcagaaggtgctagtagaggtggccggcggagaggctgaaaaagaagatggccggagaggcgcagcaggtgccgttaggtggagtcgccgcttggagaggccgatcgtttgctgcagttctgcttgttggaaagccgtgggacacgatgatcagcagtgtggtcagtgtcctggtcgacggcgagggttcctcccaactggctgttgttccctcctcccgtccattggagccccttcccctcttagactggcctactccagtcgtggggtgccccatgttaaggagagagacacaggtttggttggaaggttctgcttggtgaagatcgggagaccgtccactctgtcagcgccttcaaagtccttgcagcagtgaggtgtgtggtgctcgaagctcttgtggcgcaaccgtgtggttgagttgggggtggagtcggagcttcttgcagtggcaagctcggcaacaataacccccttctctcgtccttggaagcgtctaagggttgtgaagcattgtggcggccttggtttcgtggttgtcagggagcaagagcacgggtgaaagccctgcttggtctctgactatagctgataacgtcgacgcctgtgggcgctgttcccttcttgaaggcgttgtcgctttgctctccttttcttcgggtgaaaactttgttccgattctcggacggacgttgctttcgtctcggacgcttttccttgatagcttcgtctagaagaccctgctctacgttatcgttttggtcccctagtcgtgctgttgcttgtgtcat

SEQ ID NO: 59844 - DNA, 630 bp, Oryza sativa
  Clone ID: PAT_MRT4530_61429C.1
ccttggcttgctgtttagacgatggagaagatttgtcttcctactctgtggggaactaatggttctacaaagttatggatctaaaggatggactacatacacggatatattgggtggtgcccagatttcagatcccgttgggcatttaatactgggagatgctgatttggagcttgggaggggtgggtctggaacctggattgatgtgaggaccactgtggcagcctgctgtggtaatgtgctgcccaataaaggaccacaaagatggttggctgctttgcgcttgggctggagggctgactttggagctgactgtgcgtgctgcttgaatgtgtggctgcccctagatgggacgcaaatggatgctatgctgcattgcagttacaatgatatgaaatactcctatatcagatgacctggtgttgtattgccgacggtaccaagctgatggttatgcagcctgggtttaccgtgctgttgttaaaatggtcgacaaaccctgtgggtgggtgtgatctggtatgcatgggtacttgtcctttaagactataggaaaaccgtgtatcactgtcagtttagcttgggcacatgattaccaaggggcattttctgaaaaaaaaaaaaaaaaaa

SEQ ID NO: 59845 - DNA, 775 bp, Oryza sativa
  unsure (1)..(775): unsure at all n locations
  Clone ID: PAT_MRT4530_6142C.1
agcctctcctcttatctaacagcgacggcgactcaaggggtgcgggcggtggacctggccatcggagtgctacgggtagctaacccaaccgcgggaggggcgtgggcggtagacctggccaccggagtgtcacggatggtggattcagccgtgggaggggcacgggcaacggatccgtggccgggaggtgggcagcagcggtgacggtggaggggacgaatccagtggtgagcgatgcttgagattgctagatacgcctcctcgacagtgaagaagtggggcggttgcggtggatctggcgaaggttgccacgacgatgatgacgacagctggtccttgagaaggtttcggcggctcctccacccactcctctctcctagatccagtaggcggcagctcagggccatggcggtggatccggaggcctggggtggtgaggtcaccataggcggttaagctcggtcgtgggaggtgggcggcggatcctgtgatggctcagtgcacgggcggtgcatctggtggcgaagctcaggcgtgggcggcggatttagggagctccagatcctttgggtggcggcggtgctcggtcttcgtctcggtgatggcgacgattaccgggagcgacaacgatccaccggttagttcgtttggagatggggactgatccaattgaaaacccgtgaatagaaaattgtgattgtaaattgtgatgatttatggnatttgttaactttgggaataatatatgtgggaatttttttaactttgagggata

SEQ ID NO: 59846 - DNA, 552 bp, Oryza sativa
  Clone ID: PAT_MRT4530_61430C.1
tcaaacagagaaagagaaggcataggacaattcgtctttccccgctcgcgtcgctcccatcgcgggcgaccgggcgggcggaaaaaaccctagccgccgccactttcccccctccatcctccacctcgccaccgctagagcaagcggggccgagccacggctcggcgagcaaggacggcggcgacggggtaggcagccgtgaagcgacgagtcctcttctgcgcgggggatgagggacgacgtcctagcggcggctgcggcgtcccggcggcgagctgctccagcgacagcggcggggaggaggcggtgagaagagttggcagtggcgagttgtaatcggcgtgtggcggtgtgggtgtggccagatatggagggggcggtcaaccggtttcggatctggccgcctccaccttggatccagaaggggaaggccagcgggagtggagttggaggaggcgtggtggtggagttggccggctgttgggagaagctggcagccggcaggtggaggaggcggtcaatccggcctatgccgaatctggtcgcctccat

SEQ ID NO: 59847 - DNA, 282 bp, Oryza sativa
  Clone ID: PAT_MRT4530_61431C.1
cctggcccagcccccgctcctcgcaccgcgcaaggcgcggacacaattggggggcctcggggtggcgcgtcaggcccctcggggtgctatgtcagcctctcggggtgccacgtcaggcccctcaggcccttgccctgcctggacccaaggcccttgcccagctgccatgtggcgaggggggaccaggctaggcgggcggacgtgtggagccacgccactggcccgcctcaaatcgggcgtaaccggtctgtgaccggcctgtcaccggtcacatccgattga

SEQ ID NO: 59848 - DNA, 321 bp, Oryza sativa
  Clone ID: PAT_MRT4530_61432C.1
atggccactcgccgctgcgccgccctctccccggccgctctcttgcacgcgccgggaggagcggcaccaggccgacgctcgctcccctccttcgccgccgcagccgcccgctcgccgccgcctaccgcgccgctcgccctcacccactcgccgctgccgcttaggcaccggccgctcgctgccgcgccgcctctccccggccgctctcctcctccgccgccgcctaggctaggtctacggggtaaaatggcgacggaagtcgttcctgcccttgttgtgattccaccctatccaaagccagtagagggtgacgacttctaa

SEQ ID NO: 59849 - DNA, 800 bp, Oryza sativa
  unsure (1)..(800): unsure at all n locations
  Clone ID: PAT_MRT4530_61433C.1
tagtcaccgcagcaatgcacagcatcattttccgttctattagctctaccatatgactnatcagcctagccaaagcaagaccgccatcatagccacccaagattatngaataggtatctttcanggggtncaacaanagtttaattacagagccacataaataccaagcctcgccaagatccgcccctaggtcccctagcatcacaaagcnaaccgagatagcaaataagcacacaataatacatagacgattccagtaacagagccacgccacgataatagcgcaantaaagcagagcaaaaagcccccccctatcctantagaccacaattccaagccttagcccgatatatccacaaccctggaacgaaaaacccacaccccaacaagatcatggggccaaacacaacacaaacaacaagagtaaacaacaacaaaactaatcaacatatcaccgggaaccaattaacccatttngtntacacagagcccaaataaagccagccacagacaaagcaataaaccaaaaaccatcccccacagacccacagattttattggaggtttagcancttccattttttaaaccctttttctgagaacatccccgangacaaaattcattaaggggccctccaaaaaagcccanaccaaacagcccatccataagataatagaggcccatatactataacaaccagataagcccacaaaataacataaaagaacataaattaggaagataacaatacaataaaccccccacccataacaaaaggaataaacccaaacaaaataa

SEQ ID NO: 59850 - DNA, 423 bp, Oryza sativa
  Clone ID: PAT_MRT4530_61434C.1
ggtcgtccttttttttttttttttttttttttttttttttttttttttgttaaaatattgttttttttttcattggtaaaatacagaaaccaggagggataaacttaccccaggacacaaattaaaagtggtaggaaaccatcctaaaacacgaaaatgaccccacatgcatttttttaaaaccccctaaaaatgttggcataaatgggggaatattacttatttattccagggctccagggcaagggtacctttgaccttatgttctgagaagcgacctagggggtttaaaacaacttcctctacctggggtggggaccctttatatttttcctagaatgtttgctacgcgttcgggggttattttggggggtcctgagggcgacctaagatttgacgggtttttcggggacagctgggggg

SEQ ID NO: 59851 - DNA, 1454 bp, Oryza sativa
  Clone ID: PAT_MRT4530_61435C.1
caaacaccaactgcaactggagtcgatagcgctacctctctccgggctgaaagctactggccattatcattgttcttccagccatggatcagctgctggccctggcggtggcagtcccgctgtttgctcttgccagtgcacttgctgctgcctctgctacgccggtcaacaagtcctgcctcaatggtagcaccggcgccgccgtcagcatagggtacggtggtgccagcgctagcgctggcgccggcgccggcgtgtctcttggcaccgacgcgtactggttggcctgcccacttgccgaggagatcgtccgcgacgtcgtggagagggctgtcgccgccgacccccgcatggcggcgtccctcctccgtctccacttccacgactgctttgtcaatgtgattatctttctgtttgccgcgctacatggctgtgatggctccgtgctcttggacgacaagccgttattcatcggcgagaagacggccgggccgaacgcaaactcgctccggggattcgaggttatcgacgccatcaaagccgagctcgagaacgcgtgcccggagaccgtctcctgcgctgacgtcctcgccatcgccgcgcgcgactctgtcgtggcatcaggcgggccgagctggcaggtggaagtcggccggaaggacagccgcacggcgagcctgcagggcgccaacaccaacctcccggcgcccacgtccggcgtcgccaccctcgtgcagaagttccggaacgttggcctctcggccaaagacatggtcgctctctccggcgcgcacaccattggtaaggcgcggtgcacgacgttcagcgcacgcctcgctggcgtcggcgcctcggccggcggcggtgccactccaggtgacctttcgttcctcgagtcactgcaccagctgtgcgcagtgtccgccggctcggcgctggcgcacctggaccttgtcacgccggccactttcgacaaccagtactacgtcaacctgctctccggcgagggcttgctgccgtccgaccaggcgctggcctcggccggagcagctgctgccggggcggaggacgtggccggcctcatcgcagcctacgctttcgatgcgttgctcttcttcgacgacttcgcatcatctatgctacggatggggaggctggcgccgggagcgggcaccgcctccggcgaggtccgccgcaactgccgggtggtgaactagctagctaggttgctgcatgaaacaagaaggaagctgattatgctcccaaaattaattaggagtatctgtgcatcagataattgcgccagctatatatgtatgtgtctgctagtttctcaatctagtcatgtatcgttaattagctaaaaagatgatagcttggattatccattatcttaaaaaaaattaactaatggtgtctgatatttgatttgtttagttaatcagcttaaaaaa

SEQ ID NO: 59852 - DNA, 340 bp, Oryza sativa
  Clone ID: PAT_MRT4530_61436C.1
gaaaattgcactaggtgcagcaaaaggacttgcttttcttcatgaagctgagaagccagtcattgatcgggatttcaagacatcaaatatattacttgatgaggaatacaatgcgaagctctctgactttgggctcgcaaaagatggaccagtcggcgacaaatcacatgtttcaacacgaatcatgggaacctacggttatgcagccccggagtacatcatgacagggcatctgacagcgatgagcgacgtatacagctacggggtcgtgctccttgagctcttgacagggcgcaaatcattggacaagtccaggccagtcagggagcagacattggca

SEQ ID NO: 59853 - DNA, 225 bp, Oryza sativa
  unsure (1)..(225): unsure at all n locations
  Clone ID: PAT_MRT4530_61437C.1
cacttattatcgctgcggcgccgacggcgatccgtcatctgctcgtcaggacactgagcatccagccgttgcgagaggttgcggctcttcatcggcagctgaccctncaattgccgccatcaagtgtcctgccatcgctgccatcaacaataatccttcttctgcggctgcaccatgccatgacagtgatcgtgctccacggggtattccacacacgcctactat

SEQ ID NO: 59854 - DNA, 1300 bp, Oryza sativa
  Clone ID: PAT_MRT4530_61438C.1
gcacgcctgagacgagcccactctacttctccttgcaacatcgtcgttagtcctctaacccaaggcattgacctgagcttgttgtgcgcttctgccttatctgcatcccctcccggccgagacgcgaccatctttctttcccgcttcgttagctgtctctgccgatcgatcggactggacggggagacatgaaggtgcagtgcgacgtgtgcgcggccgaggccgcctcggtcttctgctgcgccgacgaggccgcgctgtgcgacgcgtgcgaccgccgcgtccacagcgcgaacaagctcgccgggaagcaccgccgattctccctcctccaaccgttggcgtcgtcgtcgtccgcccagaagccaccgctctgcgacatctgtcaggagaagagggggttcttgttctgcaaggaggacagggcgatcctgtgccgggagtgcgacgtcacggtgcacaccacgagcgagctgacgaggcggcacggccggttcctcctcaccggcgtgcgcctctcgtcggcgccgatggactcccccgcgccgtcggaggaagaggaggaggaagcaggggaggactacagctgcagccccagcagcgtcgccggcaccgccgcggggagcgcgagcgacgggagcagcatctccgagtacctcaccaagacgctgcccggttggcacgtcgaggacttcctcgtcgacgaggccaccgccgcctcctcctcctcagacgggctatttcagggtgggctgctggctcagatcggtggggtgccggacggttacgcggcgtgggccggccgggagcagctgcacagtggcgtcgctgtcgccgccgacgagcgggccagccgcgagcggtgggtgccgcagatgaacgcggagtggggcgccggcagcaagcgacccagggcgtcgcctccctgcttgtactggtgaaaaaaaaacgtgcgcttatcagccacagccagtacgaaatgtacgatgcttgtgtaccagtgtactgaggtagtagcgttagaagattaggaatttagtagtggatgttgattttgagcttaacgcgtgtcttggatgaatccctgactcctgaatgtttggggaattaatgtgagtggtagtgtcctctttgggcggcaagaattatacgccccttgcgaacatgtcgaactgtacggtctgccatttaatctgcacgttcacccctctgcatcttctgtactgcaaatcagattttgtgactcttccattaggttatgaagttttcaggatgttgcagcgcaaaaaaaaaaaaaaaa

SEQ ID NO: 59855 - DNA, 589 bp, Oryza sativa
  Clone ID: PAT_MRT4530_61439C.1
gcttgcgctggagcactcggtgctgcagggggggtgccaacaaaagaaatactcccatatgctgtcaaacgggagtagtggcgtttgcactgacccttcaagactgccacctgcatgtatgagctggtgggcttggagaacagtcacattttttgcaaaacctgactcagatccactctagggcgggggggggctgcgcattggatcatatgatggagccatctgcttacatactaactaactctggcatggccacggactaccacgatcattagccatctcaacgaggataacctccatgggggagtctcacaactgacggagatcaagaaatgccgcgacatacataccctctcccaagtcaacatcttggacgccagctcagatctcgactctgcaatcgctgacgatgacttgcgcatgaagatctagagactgctcctggcgcccgaccgcaccagacggaaactgcggcctctggtgacagatatgctgttcggcacacgtagatataccaacatatagactgggcttactgctggacatgcacaatgctatttcttcagagccagaactgttatgctagcta

SEQ ID NO: 59856 - DNA, 363 bp, Oryza sativa
  unsure (1)..(363): unsure at all n locations
  Clone ID: PAT_MRT4530_6143C.1
gtccgaaacgggtagagagaaaagaggaggaggagccncaatcngggacgcgattgacgccctcccaggaaggtnagagtagngggaggngaggaagacatgacctccntnctctcntctccttcgtggaagagtagtagtggtagttggtgttgcgtagaagagagcacggaagcgatacgcggcggggaagagagnagagnagccgggtggcccgttcttgccgccgnggcgccgtcgtcgctgcatttctcgctcgggagatcgcggattagangaggagttgggggaagaggagngtttgggggcaatggatacnaccacgaggggccaagatccccgtcccttcacccaccagacgga

SEQ ID NO: 59857 - DNA, 1938 bp, Oryza sativa
  Clone ID: PAT_MRT4530_61440C.1
atgaggcattgttggggcggtgcttcctccgtcctccggctcctcctcgcgttgcagtgcggggtggtggtggtggtgttgcagtgctcggcgaatgcgttgggcagtgacgtctcggcgctcatcgcgttcaagcgcgcaatcatcgaggacccccggtcggcgctcgcggactggagcgatgcggacgggaacgcctgcgactggcacggggtgatctgctcctcgccgcagggctccgtgatctccctgaagctgtcaaactcgtcgctgaagggatttatcgcgcctgaacttggacagctgagcttcttgcaagagctgtatttggatcgcaacatgctttttgggacaattccgaaacagctaggttcactgaggaaccttagggtcttggatttgggtgttaataggcttactggtcctatacctcctgagctggctggattgagcagcgtaagcgtaataaactttcattccaatgggttgactgggaatataccttcagagctgggcaagttacagaatcttgttcagctgagatccacggctcacaatgggctatgcccttctcctcgattaaatgttggagatttctcatacaactttcttgttggaaaaatcccaccgtgcttgaagtatcttccaaggtcaagtttccaagggaactgcttacaggatgagtactctgtccggcagcgggctttccaaatttgtataagtggttctccggctggccagcgaggtggcgtaaagggattcaagcatcccacctctgaccataaacatgaaagatcaccacaaccaacatggcttctcgttttagaaatttcaactggtattcttctgcttgtatttgtgatcactggtgcaattactgcttccagaagttgcaagctaaagccatcgataagaatatcctcgtggaacagatcaaaaagttggagtgatgagataacagtgctgatcgattccgatatgctgaaaagcctgccaaagttaagtcgccaagagcttgaagtagcttgtgaggattttagcaacattattggttcatctcctgagacagtagtgtacaaaggaaccatgaaggatggacctgaggtttctgtcatatcattatgtgcctttgaaggtcattggactagccaacatgaactattttaccaaaacaaggttattgacctggcaaggttgaatcatgagaacatagcaaaatttctgggctattgcagagaaagtgacccattctccaggatgctagtgtttgaatacgcatcaaacgggaccctgtttgagcacctacactcagatggagaaggagctcagttatcttggctcagacgaatgaaaatagccattggcatcgcgcagggtctaagatacctgcataccgagttgcagcctccatttgctatctctgagctgaattccaactctgtatatgttactgaagattttactccaaagctggttgattttgagtgctggaaaatgatgttcaccaaacaaaaacatgagaaggctcctggccgcatcaataacaaatcctctttccctggccacttggattcttcagaggacaaacaagcagacatccaaggcaatacatttgcttttggagtgattttgctggagatcatcagtggacggcttccttattgcaaggacaaaggctatttgattgactgggccatcaagtatctgcagcagacagaggagatcggtaagcttgtcgatcctgagctgaccaatgtcagaacagaggatctcgaggtgatctgcagcgtagtgagccgctgcatcgaccctgatccatccaagagaccatcgatgcagatcatcacaggagttctggagaacgagatcgacttgtcggcagccgccatcctgaaggaatcctctctagcatgggctgagctcgccctggcgttgtag

SEQ ID NO: 59858 - DNA, 2713 bp, Oryza sativa
  unsure (1)..(2713): unsure at all n locations
  Clone ID: PAT_MRT4530_61441C.1
cacgccgccgcctccccccgcgcgctctctctctctctctctctctctgcatcttcttcttcttcttccagtgctcggctcgtcgcttttaccccgccgctccctcgccccaaacaaccaacccacctccatctccatctccatgtggtgctgaggccggagcagcagcgaggaatcggagcggtagccatggcgccgtgaattcgcgcgaggacgtgcgatctctgagagaggggggagtgtagtgctcgagtgagtgattcggaggcggtgctgcagctgcggcggcgttcggagatgaggcattgttggggcggtgcttcctccgtcctccggctcctcctcgcgttgcagtgcggggtggtggtggtggtgttgcagtgctcggcgaatgcgttgggcagtgacgtctcggcgctcatcgcgttcaagcgcgcaatcatcgaggacccccggtcggcgctcgcggactggagcgatgcggacgggaacgcctgcgactggcacggggtgatctgctcctcgccgcagggctccgtgatctccctgaagctgtcaaactcgtcgctgaagggatttatcgcgcctgaacttggacagctgagcttcttgcaagagctgtatttggatcgcaacatgctttttgggacaattccgaaacagctaggttcactgaggaaccttagggtcttggatttgggtgttaataggcttactggtcctatacctcctgagctggctggattgagcagcggttttcctgtctctggtgcttctttgctattgaaactaaggctgctttcattcatctgctgtagaaactttcattccaatgggttgactgggaatataccttcagagctgggcaagctacagaatcttgttcagctgagatccacggctcacaatgggctatgcccttctcctcgattaaatgttggagatttctcatacaactttcttgttggaaaaatcccaccgtgcttgaagtatcttccaaggtcaagtttccaagggaactgcttacaggatgagtactctgtccggcagcgggctttccaaatttgtataagtggttctccggctggccagcgaggtggcgtaaagggattcaagcatcccacctctgaccataaacatgaaagatcaccacaaccaacatggcttctcattttagaaatttcaactggtattcttctgcttgtatttgtgatcactggtgcaattactgcttccagaagttgcaagctaaagccatcgataagaatatcctcgtggaacagatcaaaaagttggagtgatgagataacagtgctgatcgattctgatatgctgaaaagcctgccaaagttaagtcgccaagagcttgaagtagcttgtgaggattttagcaacattattggttcatctcctgagacagtagtgtacaaaggaaccatgaaggatggacctgaggtttctgtcatatcattatgtgcctttgaaggtcattggactagccaacatgaactattttaccaaaacaaggttattgacctggcaaggttgaatcatgagaacatagcaaaatttctgggctattgcagagaaagtgacccattctccaggatgctagtgtttgaatacgcatcaaacgggaccctgtttgagcacctacactatggagaaggagctcagttatcttggctcagacgaatgaaaatagccattggcatcgcgcagggtctaagatacctgcataccgagttgcagcctccatttgctatctctgagctgaattccaactctgtatatgttactgaagattttactccaaagctggttgattttgagtgctggaaaatgatgttcaccaaacaaaaacatgagaaggctcctggccgcatcaataacaaatcctctttccctggccacttggattcttcagaggacaaacaagcagacatccaaggcaatacatttgcttttggagtgattttgctggagatcatcagtggacggcttccttattgcaaggacaaaggctatttgattgactgggccatcaagtatctgcagcagacagaggagatcggtaagcttgtcgatcctgagctgaccaatgtcagaacagaggatctcatggtgatctgcagcgtagtgagccgctgcatcgaccctgatccatccaagagaccatcgatgcagatcatcacaggagttctggagaacgggatcgacttgtcggcagccgccatcctgaaggaatcctctctagcatgggctgagctcgccctggcgttgtagcataccattcttaccgctgtaaattcgtccgtcacatcacacactaatatttatctgatcatggccattgcatgctcggaatatagaggagctgagacgcacgagcaggcaggcactagttcagtttggtcgtgatactgtattgactgtttttgactcataatgctgtatgatttacagttgattgccggtattgcacagcaggtgtttcttcaatgcctcaccggtctaacgaaattcctttgttcgcctctgctggcatacatgtgtaagtttgtggtgcaacctattaggatgaaaaccggcatggaaattcccnattggctctgtacggttttcgatcgtttctgatcatcaccgcgtatgaatattgaaactgttttcctaaaaaaaaaaaaaaaaaaaacctcgtgccgaattcctgcag

SEQ ID NO: 59859 - DNA, 1225 bp, Oryza sativa
  Clone ID: PAT_MRT4530_61442C.1
gtttcgggagaggattttagtgagggatttgaaggattttgaggtgggagaggagatggagttgccggcggatgggagcgcgctggcgaggcaggggtcgatctactcgctgacgttcgacgagttccagagcgcgctgggaagcgccgagaaggatttcgggtcgatgaacatggatgagctgctgcgcaacatctggacggcggaggagtcgcaggccatagcgccggcggcggcggctgcttcggcggcggcggtggttggggacgcgcagcagcagcagcagccgatccagaggcaggggtcgctgacgctgccacgcacgctgagccagaagacggtggacgaggtgtggcgcgacatcatgggcttgggcggcagcgacgacgaagaccccgcggcggcggcggctgcggcggcgcccgcgcagcggcagccgacgctgggggagatgacgctggaggagttcctggtgcgggccggcgtcgtgcgggaggacatggggcagaccatcgtgctgccgccgcaggcgcaggcgttgttccccgggagcaatgtggtcgccccggccatgcagctcgccaacgggatgctgcctggtgtcgtcggcgtcgcccccggcgccgccgccgcgatgacggtggcggcgccggccacgccggtggtgctgaacgggctggggaaggtggagggcggggatctctcgtcgctctcgccggtgccttacccattcgacaccgcgctcagggtgaggaagggccctaccgtcgagaaggtggtggagaggcggcagaggcggatgatcaagaacagggagtccgctgctaggtctcgcgcgcggaagcaggcttatataatggagttggaagctgaggtggcaaaactgaaggaacagaaggctgaattgcagaaaaagcaggtggaaatgatacagaagcaaaatgatgaggtcatggagagaatcactcagcaacttggaccaaaggcaaagagattttgcctccgacgaacactgactggtccatgctgttgcatctgctctgtatgttgctgttgcgttgacatgtcatcccgtttacagttcagtgattctgttctgtacccaagtttaagaggattcagtttcagtgatctgcattttaaggacaaagaagaaagactgatatctcagatgggtgaaaagcgtggcaatggcctggctaagaacattttcggaagattgtaa

SEQ ID NO: 59860 - DNA, 404 bp, Oryza sativa
  Clone ID: PAT_MRT4530_61443C.1
atttcgatatgggaaattcctggggtattcgaattctaatgggcgcccctttacatttcttctaggatataaggatccagagccttccagggcaaacttacccctgctacatgagtggcatgtccgatctggccttgatcgatacatatggattattggaatgatctatgcttacttccaccctaatgttgaacgttggatggagaagttggaggaatctgagactaaggttagactgtttatcaagggagccattgtcactctttctttgacggccggttacctatggtatgaatatatctacaggctagacaaaattacatacaacaagtaccatccctacacgtcatggattcctatcactgtttatatctggctacgcaactgcacccagcagttgagga

SEQ ID NO: 59861 - DNA, 643 bp, Oryza sativa
  Clone ID: PAT_MRT4530_61444C.1
ggcagcgcctcagcgcttcttctcctcctcccccggccagcgccgccgttccacttcctccggccggcgcccccttcctccttccccggccagcacgcgtttcccagccgacgcccctccctcttccgtgggcttgcaggatttggatgagggagatctcggaggcgatggcccggtcgagcaagggcgacagcggggccagcagcgcgctccccctaccgagccgacgtcgttccctccgcccctcctcccgtcctccgaccgtcgcttcctttgctgtcggcggctgccagtggggcggagcagtggcggacaagggcgacgtggaggcgcagggctcggagcggcggcggattgtggggaccacgtcgcagcggagcactcgtgcaccaatcgaatccagaggccatgtcgtcgtactgtgaaggacctcacaagtcacattggtagtacttgcctgcaacaggatccatgagcgtacaagtcctctacggagtactacatcactctctgaatccaaggtctgattggagaagagtggtctacacggcatgtctctccctctcttaagacttgatagatgacaggagcacgggttagggcagtaaacctctctcttcatggggaaagcacaaaatcgacc

SEQ ID NO: 59862 - DNA, 705 bp, Oryza sativa
  Clone ID: PAT_MRT4530_61445C.1
cgccggtgccttacccattcgacaccgcgctcagggtgaggaagggccctaccgtcgagaaggtggtggagaggcggcagagtcggatgatcaagaacagggagtccgctgctaggtctcgcgcgcggaagcaggcttatataatggagttggaagctgaggtggcaaaactgaaggaacagaaggctgaattgcagaaaaagcaggtggaaatgatacagaagcaaaatgatgaggtcatggagagaatcactcagcaacttggaccaaaggcaaagagattttgcctccgacgaacactgactggtccatgctgaagccagagtctccggtttcgccgtggcgctcagcttcagagttgcttctctccttgttggtgaatggtgatgcccacgcgtccgggacggtcgaatgctggcgtcgattactcactaggtttagctgcgagatcgttgcgtgagcaaaggcatactatctaatctgtttaactccttatttagggaaatctggcatggtgaaaacggggcatgccatctgtgtttgttgtttttgtgcagctgttgcatctgctctgtatgttgctgttgcgttgacatgtcatcccgtttacagttcagtgattctgttctgtacccaagtttaagaggattcagtttcagtgatcaaaaaaaaaaaaaaaaaaaagactattacaaataggaaaaa

SEQ ID NO: 59863 - DNA, 437 bp, Oryza sativa
  Clone ID: PAT_MRT4530_61446C.1
atccttgcaacatagcagcattatagtgggagcattacaccaagaacccctcgacaaggaggatcatttggtggtagacagacataggtatgcgggcaggaatagcattggcccagtttgtagctgaaagtaaggttacaggcaggattagatgaagggggatcaaatgctgcatgaacagatggtaagaccatgagaaagaccttctaaggctacaagagcaaaagagtgagaggcgagttcttgtaactactcgggttagataatgagaaacacgccaaggaatgcacctccactgctgccaacatctcagggagaaggcacaacagactaactggcaggacataagcagcgatcaggcgatggtgcagaagaaacagttacaacagtttaggtggcataacttcaatcaggctaaagttcaggcccaagctatg

SEQ ID NO: 59864 - DNA, 279 bp, Oryza sativa
  Clone ID: PAT_MRT4530_61447C.1
atggagctaagggaggaagacgaggggacgatgtggctagatctagagggtgggatggtcgtagctagggggcatgatgggaggacattgccatcaccgaccagggagacgacgagtagatctagatggcggcgtcactataaaagagctcccattgattcaaccaccagcatggagaagtggtgcgatgcggcttctaacgacgagaaggaaggaacgtgtgtcgttggtactcaagatcaaggaggagtgggcttgatcttgagagcggcacaatga

SEQ ID NO: 59865 - DNA, 2958 bp, Oryza sativa
  Clone ID: PAT_MRT4530_61448C.1
atgggatccaacactccaccctcccgcgccgccctcgagcccttcgccaccctcgaccccgccgccctcgccggcctcccagcctcctccccgctcaccgtccgctccgccgccatctcctccccatacctctacctcggcaccggcggcggcaagctcctcctcttcaccctcgattccccctcccccgacttcctccgcctcctccccatcggccccacccgccccgtctccgccatcctccccctccccgccgtcgcccgcctcctcctcctcgccgacggcctcctcctcctcgcggaccccctcctctcccgccccgtccgccgcctcggctccgtccgcaacgttgccgccgtcgccgcccgcgcctccgaatccgacgatgatcgcccctcctgctccctcgcggtctccgtcgggaagaagctgctcctcgttgacctcaccctacacgacgccgacgagttggaggtgcggacgcgtgacatcgccctcgtcgatggcgtcaaggcgctcgcttgggtcggggactccgtcttcgtcggcactgcctcgggctactcgctcttctccaccacgaacgcccaaggtggcgatatattcacgctccctgagtcctccaggccacccagggtgaagcccctgtccgggggcgacgaggtcatgctgctcgtcgacaatgtcggggtcgtcgtggaccgatcggggcatcccgttgaaagcagcttcgtctttaacaccacgccggattgtatagcggaggtgtacccctatgttgttgttgccggggactccaaggtagatgtctacagaagaaagaacggcgcacatttgcaggctattccttttgcaaggcctggtacaggtggactaattgtagcgagcgaggatgccggaattggcagcgacgtagttgtgattgctacggcttataaggtattttgctaccgtaaagtatcagcggtggaacagatcaaggcactactacgaagaaagagttatgcagaagctatttctttgttacaagagttcgaggccgatggggaaatctcaaatgacatgatttcctttgtgcatgcacaacttggattcttgttgtttttcgacttgcgtttcgaggatgctgtaaatcatttcttgctctcggaaactatgcaaccagcagaaatatttccattcatcatgcgggaccctaatcgttggtcagatctggtgccaagaaagcgttattggggcttgcatgctcccccaaagcctcttgaagaagttattgatgatgggctagtaacacttcaacaggcattgtttctcaaaaaggcaggtgtggacacagttgtggatgatgatttcctttcaaatccaccaagcagagctgatctgctggaagtagcaatcagaaatattatcaggtacctgtgtgcatcccgagagaaggatttatcttcttcagagatggaaggggttgatactcttctgatgtatctttatagagctctcaatcttgttgatgacatggagaagcttgcatcatctcagaatagctgtgttgtggaggaactagaatcacttttggatgactctggacatctgcggacgcttgcattcttatatggcagtaaaggaatgtgctccaaatcccttggtatctggcgtatcttagcaaggaattacagcactggtttgtggaaggatcatgcaatcctacctgaaactgactctcttgaaacttctgttggtaaaatgtctggtgaggaaattgctgccgttgaagcctccaagatacttcaagcatcatctgatcaggaccttgttctggagcatcttggatgggtggcagacattgatcaagagcttgcaactgcaattttaacatctgaaatgagggaaaaacagctttctcctgaaaaggttgttgctgccattgatccagagaaggttggcattcaccaaagatatttgcaatggttgattgaggaacaggaatgtgatgagcctcactatcacacgtcatatgcattgtccctctccagatctgccatggacgcagtccgtttgggatccaacaatgaagagagaaacaataaagaatttgattctgatatgcagttcatttatctattgagggaaaggttgcaattttttttgcaatcgtcagatttgtatgacccagaagaagtgctatatgtgatttcagaatctgagctatggctggaaaaggctattttgtataggaagatgggccaagagaacattgtacttcagatattagcgctgaaactggaggatagtgaagctgctgagcagtactgtgcagagattggtcgagatgatgcctatattcagctgttggatttgtatctggaccccaaaaatgggaaaggacccatgtttacagcagccgttcgacttctccataaccatggggaatcattggatccaatacaagtgttggagagattatctgctgatatgcctcttcagctagcatcagatacaattttgcgaatgctgagagcccgggtgcaccatcatcgtcaagggcaggtagttcataatttatcacgcgcaacgaaccttgatgcacggttgaccagattagaggagaggtcaaggcatgtgcagctaactgacgagagcatatgtgattcatgtcgagctcgccttggcaccaagctgtttgtcatgtacccagatgactcagttgtatgctacaggtgctaccgaaatcaaggtgattctgcatctccacatggacgcaacttcaggaaaggtggcaataacaatccagttggttggccattacgattcctgactcctgtgctgagtgatgagaattcagtgcctcctccctcactagaagggctgttaatccgtgaagcatgcgtgaatactggtgttgcaattggccgtctgcaactatctgtccacgcaatagtgcaggtgctcccaacttaa

SEQ ID NO: 59866 - DNA, 255 bp, Oryza sativa
  Clone ID: PAT_MRT4530_61449C.1
atgttggatcctacgggtggcaaccatcgacagagacagcggcgatggatgactgggtggaagaccttagaggcgacggatggagcaacatccacctccccatcccggcggcaccgtgaagccctaccagccgtgtatctaagctcgtcggttatcgtcgcctccatcgacaaggagcttgttgggacggggaccttgctagaattaggccaactcgctgacatgaggaaaggggaaggactgccaaggaagaag

SEQ ID NO: 59867 - DNA, 2214 bp, Oryza sativa
  Clone ID: PAT_MRT4530_6144C.1
atgtcgcgtcgcacggcggcggcggtggccgtgtccgtggtgctcctcctcctctcgtcgtgtctcccttgttgctcggaggcaaggctgcactaccaccggaggcagcaccggagggcgccgcaccgcgggcaccaccgcgcggcggcggcggcggcggcggcgacgaacggcggcagccacatctctcagccgcccgccgcgctgcctcccgacttcgacagcggggaatcgccggcggagacgccgggcttgcctccggctggcgtcgaggacgctccgccgcggcgatctccgcgtgagaagccgtgcccgacgatgcagcctcccgtcaagccgccggaggagttgtcgccggtgggcgcgccgaggtcgcgcgttcgggccatgccaccgtcaccctcgctgtcgccgccggccaaggcgccgtcacattctcacgctaagacgccgtcgatgccgccggcggagcggccggcgcttcctcccaccaaggcgccggcggcgatctcgccggccacgccacctcaactctccccagcgaacgcacattcgacgcaccatcacgcgaagccaccgtcattgcctccggccgagccaccagtgccctcgccgtcgccggagcatccaccgcggcactccccgtcaaagccaccggcgtacgctccggccaagccaccgacagcactacgtccggcgatccctccggccgcaatgccaaagccaccgtcagtcgctccggtgcagccaccgcagcggccgcctgccccggcaacaaagccaccgccgtcgtttccaccgcagctcgccccgacgatgccaccaccggcgcacgcgccggcggagacaccagcaccaccaacaacgccaccggcgctgccaccggccacgacggcgccatcaccgaagaacagctcatcatcaccacctccaccctgcaccggcggcggcggcggcatcagcaacgtgttcgacgtgagggcgttcggcgcgacgggcaacggctcgagcgccgacggcgacacgcgcgcgttccgcgcggcgtggaaggcggcgtgctcggcggagtccgccaccgtgctcgtgccgtccgacggcgtgttcaccatcacctccaccatcttcgccgggccatgcaagccaggcctcaccttccaaatcgacggcgtgctgatgccgccggacgggccggcgagctggccggcggcggacggccggcggcagtggatcgtcttctacagggccgacgggatgacgctgtccggcaagggcaccatcgaaggcaacggcgaggagtggtggaatctcccgtgtaaacctcacaggggccccaatggatcgaccctacccggcccatgtgagagccctgcactgatcaagttcgtggcgagcagcgacgtgagcgtgcagggcctgaggatggagaacagcccgcagttccacctcaagttcgacgggtgcagccgggtgctggtcgacggcctcgtcgtcagctcgccggcgtcgagcccgaacaccgacggcgtccacgtcgagaacacgagctccgtccggatcctcaactccaggatcagcaacggcgacgactgcgtcagcatcggcggcggctgctcgggggtgcgcgtcgagaacgtcacgtgcgtgcacggccacggcatcagcatcggcggcctgggcgcgcgcggcgcgcgggcgtgcgtgtcgaacgtgaccgtgcgcggcgcgcgcgtcgtcgactccgacaacggcgtgcggatcaagacgtggcagggcggcgccgggtcggtgtcgggggtggtgttcgacgccgtccagatggtgaacgtcaggggctgcatcgtcatcgaccagtactactgcgatgcgcacggcggcgccggcgccggctgcgccaaccagaccgccgccgtgcgcgtcgacggcgtcgcgtacagggggatccgcggcacgtacaacccgcgcggcggcggcggcgcgccggtgcgcttcgcgtgcagcgacaccgtcgcctgcacgggcatcaccatgaccgacgtcgagctgctgccggccggcggcggcgacgaaggcggcggtgccagcgccggcgcgaagctggccgacccgtactgctggaacgcgtacggggtgatggagacgctgacgcagccgccggtgcactgcctgcaggaaggtcgcccagagtcgctgcaagatcagctcgcaagctgctga

SEQ ID NO: 59868 - DNA, 247 bp, Oryza sativa
  Clone ID: PAT_MRT4530_61450C.1
gagggaagatttggtttccattgtattgtattgtttgtgcagctgtatcaatgtacatgaatgaggaaggcaggcaggccagttgttgaagagaagaagagcctattaggagtaggtgggaggggtacgccggctggtgcatgatcgtctttgaagatagttgcaaggtgatgaaggacgcccgccgatgaagcatctcggaccggctcgcaggccgattctctggaagaagcatggagcctgacca

SEQ ID NO: 59869 - DNA, 822 bp, Oryza sativa
  unsure (1)..(822): unsure at all n locations
  Clone ID: PAT_MRT4530_61451C.1
gggtgtaatatatgccatcatcattaaataaaagttctaacaccagcagcataaaacaattacaagatactatgaagttaaatagacagttccattaaagaagaaagccttgagttaattggggcaaaggtagcatttgagaagttatggtaaatctatcatacaacctgtttccatggttaatacagaacatcaagtactccaactggatgtggtttcaacactggccatgactctgcaattgtaaaataagtgatatgcctacataaccaccaagacagacacctactgtttcatatgactatctagaatgaacttcagaggaaaccaaactccttaactcagataaatgttcatcagttgagatgttcaatgtaagcctcagattagtcatcatagcctcttgctcccagctaattgacccagacgcatataatgccactcagtgttgcacgataagcatgtaactcaagcaaatgggttttctctttcagaccatcattaacaggagcaggtgattctcttcctgatacagaagcttcagcatcatcagtcctactaaacgattctcttccagatacagaaacttcagcatcatcagtcctactacaaatatctgcacaatcatactcttgaggatgtgttgatccaataggggctaccgcgggattgcaactaccaacagaggaaacgacactatcagtatcactatcttgagttgttacagcaggatccagataatcaaaattagctttttactgctgncaaatttgtttttatgaaagccatttgctcttttacttnaagggaatcatgccagta

SEQ ID NO: 59870 - DNA, 117 bp, Oryza sativa
  Clone ID: PAT_MRT4530_61452C.1
tcacccgatgacttggctcctgtgggctccgactttgtaggctgaggtggatgtgttggcggtgagattcgatgccttaggacctcccgggggtccccagaaatttccggcggccat

SEQ ID NO: 59871 - DNA, 956 bp, Oryza sativa
  unsure (1)..(956): unsure at all n locations
  Clone ID: PAT_MRT4530_61453C.1
gttcgggcctcatcctctctttcttttcccctcggcccaactcttctcctccccagtcggccagcccagcctagctcctattcaccttcttcttccttgaggcagctagccacgtgcacacaaggtgttcgacgaaatgtttcgcccggacgccgagtcgtgctgagccgtgtgttgcaccaaaacaccctcccgtgcgccgcgcgtcgtgccaacacccgcgccgcaccgcctccgcaccaggccgaggccgcgccacgccaaaatcgcgtcgcgccaagcccgacctcgctccggtttctctccgggagacacggagccacgtcgcctcgcgtcaccccgtcccgtcgccgttcgccgcctcacatccgtggacgcgcgtcccttcgctgtcgcctcgtcgtcttgtcgactgtctccttccgggaagtcgccgagccgcgtctctccctctctctcgcgttccatcgccaccgccgtgtgacgtcgctcgcgtcgcatcgatctgagaacccatcaccatctctctctctcctctctcacttttgctcgttctcctctctgtgttgccgtctatagccgctgtgccgcgccttctagcgccgccgtcgccggcggtgcctcgccggagatccgccggaattctccgccgcctccccggtcgccggctgccgagccgagcctcgccgccacggcacatcgtctgtcttagtgcgtcgcttcacatcgcgtcgccaccggtgcatgacgcaatgtcgtcgcatcgccatctcgtccgccccggaatcccgccctagctgctagccatctacgcccggaatgccgcgcctagaccgcccgctcgccaccgcgtcgctcgcctatnataggggaagcagcccgagctccttctccccacaccatcaccatctctctctctcctctctcacttttgctcgttctcctctctgtgttgc

SEQ ID NO: 59872 - DNA, 895 bp, Oryza sativa
  Clone ID: PAT_MRT4530_61454C.1
cacgagccggccggggctgcccggccgcctgcccctcaacctcatcgcgcaatctccatcaccgtccggcgtccgcgagcagcggtgcagagggcgtccttactcgttccgcgcgccccgcccaggtcaatctccccgtaccctcagcctcgactctctgagtctccacgcgatcgacttcgcccgcagcctgcgccgaccctctcgatctccatccatcccacgaggggagcaccggtgggtgccgtcgtcctccgaatttagggggttcatgtccctgttggtacacgatgaaccctgcaagccgaagacattatgattctctcgtcgcgcgatatggtgaccaagatgcactcgccgaccgtttcggcggccaaaacgacggccctgacgcctggtggtccaacctgcgtgtgcggatgtctcaggatcatctactgaggcacgaggcgcggaggcgagccgccaccttggaggttttcgaggatagagaaaactcgcatgatggtgcctttggttgcggtgaccgggcctctgctaaggccatggtaactctgcatcagcccaatttgggcgagaccagggagcaggattgcgccgtgtgccttgagcctttcgaggaaggcaacacgcttagaatgatgccatgtttccattccttccatcagcgctgcatcttcagttggctccgcattagccgcatctgcccggtgtgccgtttcacgctgccctcccaggctgattttgagtcggagaaggctgagaaagaacgagttagtgcttcacctgaagatggcaataactgattgatgtagatcaatctgcttagtgagttactttgcttgtgtcctgtctcacaattgagttgatcttatttatgcttcatggttgatat

SEQ ID NO: 59873 - DNA, 792 bp, Oryza sativa
  unsure (1)..(792): unsure at all n locations
  Clone ID: PAT_MRT4530_61455C.1
catcccgatgccggccggggacaacccccttacggcctcaccttcatccactccagtcccgtcccgtttccttgctgcccggccgcctgcccctcaacctcatcgcgcaatctccatcaccgtccggcgtccgcgagcagcggtgcagagggcgtccttactcgttccgcgcgccccgcccaggtcaatctccccgtaccctcagcctcgactctctgagtctccacgcgatcgacttcgcccgcagcctgcgccgaccctctcgatctccatccatcccacgaggggagcaccggtgggtgccgtcgtcctccgtactaacaacaacagttcttcccccaaaaagaatttagggggttcatgtccctgttggtacacgatgaaccctgcaagccgaagacattatgattctctcgtcgcgcgatatggtgaccaagatgcactcgccgaccgtttcggcggccaaaacgacggccctgacgcctggtggtccaacctgcgtgtgcggatgtctcaggatcatctactgaggcacgaggcgcggaggcgagccgccaccttggaggttttcgaggatagagaaaactcgcatgatggtgcctttggttgcggtgaccgggcctctgctaaggccatggtaactctgcatcagcccaatttgggcgagaccagngagcaggattgcgccgtgtgccttgagcctttcgaggaggcaacacgcttagaatgatgccatgtttccattccttccatcagcgctgcatcttcagttggctccgcattagccgcatc

SEQ ID NO: 59874 - DNA, 2669 bp, Oryza sativa
  Clone ID: PAT_MRT4530_61456C.1
cttccttcgttgagcttgagggtgtcgggtagcttttctgtagtcttttttttgttgtgattctaattggctatcaattaagacaggataatctcacttaaaatgcaccaatgccatctctaaatgttatcacaaataagaggtttcaaagcataaggaatcaaagagaactacaacttagactacagaccaatctagacagatgcaccagatcatcattcttcccccaaaactgcaccctgtttagatgagtcccttatttctgactggaataacctcactagtcactagagtctctagagcagatgcatgcgctcaacataaggattgtgcagccacctattcagtggctccccacatccaacgaagcatccagtattgcctcgcgtggtgacgaacgggaattcgaagagatgtagcagcttctgaactgactgtctaaccaaggaagacccggttaccctgctcctcctgccccagccagtgacaatgtcaattctttcagggcatttgcccattgtcagaatctgcctgtggaaccaagccagtgtccttgacagcgcagtcactgcagtgccctccgacatcaggtgtaagttgatgagccaatatgatgggtccttctccctcacagaatccgggtacacattcctctgggcagcaacctcccatatgaagccagcctcctccttgaggccggacttgtgtaggaaatctatgacagcatccattaaaccccttttactctctctgtcctcactgtgcatcatgtccaagaaatatctggtgtgatccctcacattctggccgccaggttctgcatcgggcaaatataacaagaacatgtgggcagggtgtccagtgatcgccatgagctggcagcataaacccatctgtgcttgagcctcagtacaacaactgagcagcaaggtgtaggtctgcaaagatggaacgagcccctgagcaagcatgttttggagcacgctgtaggcatcttggaacctgtttatcttaagaaaagcactcagtagggaattgcaggtcggcacattgggctgcaaaccatcctgaagcattgcatgataccatcctagtgccttgtcaacattgccagctttgccccagaggtccaccaaaagaccatatacaggctcatcaggagcccagtcatgcctcatctcaatgaacacagcctcagcctcatccagatgaccacaatgaccaagaacttccatgacaatactgtatgttattttgtcaggacgaaacccggcaacctgcatgtccttgtacagcttcacaacattttcataatttcttgctttggcctgaagagcaatcattatgttgtatgtaactaggttaggtgtgcagccattttcaaccatctcacagaaaagcttataagcagctgccaggtgaccaccttttccaaggcaattaaccatggcactgtacgtgaaagtatctggtgacagccctacttcttgcatcctggtatataaatccattgcaaattccaggtatccacctttagcatggatatcaatcaatgtacaatatgtaacccgatctggctcataaccggctttctgcatctcctcgaatactttaacagcctctcttagataatttgcacgaccatatgcatgtattattctgttgtatgttacaacagttggtttgcagtgaacactgttcatctcatcaagaagtttcctcatcgtaccaaattgcctggcttgtccaaggatgcctatcatggttgtgtagctatgaccatcatgcttgaaacctggttgccgctttaaccactggaagaaaccaagtgcaatggtgtggtcatgaagcagcttgagtacttggtttgcctggaatgcatctatcttgcaatggagattatccagaacgtgttccgtcataggaccccatttcatttgctgcagtgtatggtagtactgttcaactgagcgcaatgacttcaatgatcttaagttagactgaggtcctccaccatgactctttattgttcccgcaagggcctgagatttgtgaccagaaccagtatacatagcagctcctgcaattgcagaatgagaaatgcttctggcggtctgcttagaaggctgtacataatcatttcctagcacctgaggagttcgagggtggttgctagtgttgccagatgctggctctgtctcttgagatgagttggaaggaacaatatgaacagctggagcagggtaaccagtggcccgaccaatggatccaacaacatgttgtacagatggagtttgagcctttacagagggtcttgacccattaacgtagaaggaccgtgcacactgggttagcgtgccgagttgctttgccctcaacatgaatggtaaacctcgaatcgggtaccggagacggaggaacgaccgaaggggcctctttggtcgttccagccggcggcggcgcgctctcggctccaacgccagccgcgccacccagcaatcgcacggcgggagacccagctggacggcggcggcgttcggcaacccctcttctgcctcttcctcgtccttttcatagtcgacaatagggtagtcttcctcctcgggtctgtgcccggcgagatcagatatagcgctttcgtctctcctgacagtatccggagacaccat

SEQ ID NO: 59875 - DNA, 1158 bp, Oryza sativa
  Clone ID: PAT_MRT4530_61457C.1
atgtacgcaaccaagccgctctcggcgttcgcgggccacccggatgccacgtcgcggccgctgccgccggcggcggcggagggcggctgctccggctacctcgccgtgaagagcgacgaggagggcaccgacgagacgcggtgctggggcttgcgcagccagccgcgcgtgcgcgggctcccgttcccgcagaaccgcgtcgtcacggtcagcgacccggcgctcggcaagtacgccgacgcctacgcggacgccgtcgtgttcgtgcccgtccccggcgcgccgccctcctcgaaccggtactacgccgtcctcgccgcgggcaagcaccgcggcctcgtgcgcgcgtgctccagggaggacgacgcggcgacgcactgcttctgccggtgcgtccgcgacgcgaagccccggccgttcgaccccgccgacgtgtaccagcagatggagatcgtgccgaacaggggcgggttcacggcgaggtccgtcgccgccgacggcctcccctacttcctctaccggagcaagcgctggctggcgtacgcgtccaggcccaagcacttcgacctcgccgaggcgcttggcctcaacgacccgctccgctcgcgctcgctgaccaccccgccgccggcgacggcgacggcgacggcggcgacggcggtggccgtcgggcggtggtacaccccgttcttctacatcaaagaggacggcgttccactcaaggcgcagatggaccggtccacgttctacgagatcgtcctggagcaacgctgggatgaggccatgggcggcgaggcgagcaagagggtgctcgtcggcgggagcgtcgaggggaaacaagaggccgtgggggcggcggcgagcgcgcggaccggcggaggcagcggcgacgggtacgtgtggttcagcgcggcgacgacgacgtggcccgcggggcagagggtgggcgtgcacgcgagcctgtgggagaagatggtgtgggaggagcagagaggcgggtgggtcgccgacgaggaagttggcggcggcggcgtcaggaagacgatgtccggcggcgccggcggcaggtcggtgctggtggagaggttcgcggtgaggaggctggacggcagcgtggtggtggcgtttgacttttcccacgtcaacaagatcaactag

SEQ ID NO: 59876 - DNA, 454 bp, Oryza sativa
  unsure (1)..(454): unsure at all n locations
  Clone ID: PAT_MRT4530_61458C.1
gggaggggcccctaccaccgacggcggcgtcggcggcgccggcggaggatctancgggaggggaggcggcggcggcggcgctctcccctccgccagcgccctccatcgccgccgccggcggatctagcgggagtccnccggatccagcaggagaggagccgccggctgccagccgtccctgcggcggcgacggcgacggcggtgcttcggagatgatggggcggcggcgacttccttcgatctaatttttggtttttatttggatatatatgtgatgctttcttcgattttatttgtgtgattgaactccgattgggatttttttcgggggtttgaaaaaaaaaatattaaaaaagagagaagaaaatagataaaaaggaagagaagaagaaaaggaaaatagaaaataagaaaagaaaaagagagagaaaagaagaataaaaaaaaaaaaaaa

SEQ ID NO: 59877 - DNA, 1950 bp, Oryza sativa
  Clone ID: PAT_MRT4530_61459C.1
atggcggcagtgtctacttgttgcactcaccatctcctacctctactcctcctcgctgccatagtcgccaccaccaccaccaaccacgccgccgccgccgccacgttgaacatcaccaacctatgccccttcaccgtgtggccggccgccgtgccggtgggcggcggcaggcggctcgacccgggcacgtcgtgggcgctcgacgtgcccgccggcgccgccccgggccgcgtgtgggcgcgcacgggctgcaccttcgacgccaccggcgccaacgggacgtgcctgacgggcgactgcggcggcgcgctgtcgtgcacgggctacggcgagccgccgcagacgctcgccgagttctcgctcggccaggccgacggccaggacctcttcgacatctccctcgtcgacggcttcaacgtgcccatggacttcctcccggcgccgccgccggatcagtcaccgccgtgcagcaaggggccacggtgtccggccaacgtcacggcacagtgccccggcgagctcagagctcatggaggctgcaacagcgcgtgcagagtgttcaagcaggacaaatactgctgcactggcaacgggacgaacacctgcgaacccaccacctactcgctgccatttgtgaggatgtgcccggacgcctatagctactccaggaacgatgcatccagcccagggttcacttgcccgtcaggtacaaattaccagatcatcttctgccccccaattgatctcacatcttcatctcctgcatcaattgctgttgctgcaaataacagacaaggaaaaaaggttattgccgggatcatcatagcttctgtaatcggctccacttcagtactcaccatggttatggcttacaccagcatcaagcgaagaacacgacggcgccgggagatacgtgaagaggagcaggagcttgaggagataacccttcaaggaatgccaaggaggttcacatttcagcagctacaggaagcaaccgatcagttcagagataagctcggtgaaggaggatttgggtcggttttcttgggacagattggagacgaaagagttgcggtgaaacgcctggatcgaaatggtcaggggatgagagaattcttggcagaggttcagacgatcggcagcatccaccatatcaatctggtgaggctgattggattctgtgcagagaaatcacagaggctcttggtttatgagcatatgcccaaaggttccttggacaggtggatctatcaccagcaaggtgctgctatttttcctagtgttcctcctctagattggcaaacacgatacaaaattattacccaagtagccaaaggtctctcataccttcatgaggagtgcacaaagagaattgctcacttggatgtaaaaccacaaaatatcctcctggatgacaaattcaatgctaaactctctgattttggactatgcaagctcattgatcgagataagagccaagtgattacaagaatgagaggcacacctggatatttagctcctgaatggctgacatcgcagatcacagaaaaggcagatgtctatagctttggcatagtagtcatggaaatcatcagcggaagaaagaatgttgacacttcccggtctgaacagagcatccatctaattaccttattgcaagaaaaggtgaagagtgatcagttggtagatttgattgacaaagataataatgacatgcaagtacacgagcaagaagtaatagagatgatgaaatttgcaatgtggtgtttgcagatcgattgcaaaaggaggcctcaaatgtctgaggttgtaaaagcattggaaggcaccataagtatcgaaactaacatagttcatgattttgtcgcagtaaatccagtaagctttggttttactgcagttgtgggctcagctccacctcttgcctcagatctatccggacccaggtga

SEQ ID NO: 59878 - DNA, 327 bp, Oryza sativa
  Clone ID: PAT_MRT4530_6145C.1
atggaggcggcagcggcgaccatcccctccgccagatccggcgggaggggaagcgacagtggggtcggcggtggcagtaggcggagggctcgccagcgggaggcggtgatctaccgcagggaggagccctcccctccgccagatctggcgggaagggtggcggcggtcggcgggctcgccgacgggagacggcgcgacgggaggtggcgcgacagctcgaagatgaccaaccatgcgacggcgatgatggtggatctaaagaggtgtgtgtcgacgtttgatgtctcgactacggtatttggacagtacgaggatcgttggtgctag

SEQ ID NO: 59879 - DNA, 306 bp, Oryza sativa
  Clone ID: PAT_MRT4530_61460C.1
atggaggcagcaggaagtcaagctagtgcctcttgtgccactgcggtcctctcccgcggctggcgcggcggtcctctgccggaccgggggccctccctcttctctccaaatcaagggcggcgtggcgcgggcgcgggcgcgactggcgcggcaactgacgctggggtggcggtggtggaggaggcctggatctggccagccccctctctcctggaggacctcccccctccagcgtggcgttgggtggtggccaccagtgcggaggccggcgcggtgaggtggcggcgcggaggcgggcacggctag

SEQ ID NO: 59880 - DNA, 792 bp, Oryza sativa
  Clone ID: PAT_MRT4530_61461C.1
cgcacaagggaaaccctcgccgccgccgccgtcggggatgacgtccgtgcgcgccgtggggtccacgctgccgtcgatccgcgcggcggcggagctggcccggcaggagctgctgcggcgggagctggtggagtgccagctggtggcgggcatctggtgccacgggttcacggtgtcgcagctgcggagcatccgcgccagcctgccgccgacggcgaggctggttgtggcgaagaactcggacgtggcggcggcggtggccgggacgcggtgggaggcggtgcggccgttcgcgcgggggatgaacgcgtggctgttcgtccgctccgacgagatcccgccggcgctgcggccgtaccgcgacttccagaaggagtggaagctgcagctcaacgacttcactggcgccgtcttcgagggccgcctctacagccccgacgacttcgcgcagctcgagtccatgcccaccagggtccagtcctaccagtacctcgtcggctgcctccagatgcccgccgtctccgtcctcgccgcgctccgcgctcgccaggaggccatggcgcagccgccgcccgccgacgagccggctccaacgccaccggcggacaagtgatcaccgcatctctcttctcatttttttttctcctgcaaatttgtgttgcagaaacattggtagcccataaaaacgcattgcgttgcttgaatatgatgtatcatcttccaatattacatgttgatgttttgcaaacaaaaaaaaaaaaaaaaaaaaaaaaaaaaaaaaaaaaaaaaaaa

SEQ ID NO: 59881 - DNA, 399 bp, Oryza sativa
  unsure (1)..(399): unsure at all n locations
  Clone ID: PAT_MRT4530_61462C.1
cngggctgcaggattcggnacgaatcgctcctcccgtagccaacttccacgcagagatcncaaccaccatgccgccgccgtcgccgcaccacctcaccgcaacgggaaccacgtcccggngccctccggngagtcgttcgccaagttcttcgagtgctggatctccgagcagtcccgcganctcgccgcgctccgctccgccgcgtcgggggggaagaancccgcggggccgcccgacgangccgaagctccacgcctcgtcaaccgggtcctcgggcactacnaacactnctnncggancaagtccgccgccgnctccaccgangtgctccgcatgttctccccntcgtggaactccacacnanaactctacctctggtgcgggggattgnnncccnn

SEQ ID NO: 59882 - DNA, 694 bp, Oryza sativa
  Clone ID: PAT_MRT4530_61463C.1
ccggccggggattccatccattcctcaagctctcacttctctctcgcttccatggcgctcctcgccgtccacgccatggccgcgtccccggccaccttcccctcctcccaccaccacgccgccgtctcctcctactgcgcgctccccgccgccgccgcattctcccgctcccgctctcgcgtcgccgccgccgccgccgccaccctctcggccccgctcactccagttcttgaagtttactgcgggagaggggacaagaagaccaagaggggaaaaaggttcaaccactcgtacggaaatgcgaggccgcgcaacaagaagaagggaactggccctgcacggctgttcgcgccgcctgcgcctccgaggaaggaccagttcgacgacggcgaggtcaccccgatcgacatcgacgatgacatcctggaataggttgtctgaatttccccccttgaattatggtttaccttgagcttaccttttgtctagtctgtaccaaacactgtttcttgaaattaattacagtacattacatggtctcattctacataatgtagatgcctatgatttctttccttgtaatatatatgaatggtgctgcttagagtcattttttatgcattaccagctgaagcagaacataagtacagatacaatcaccaaaagtaaaaaaaaaaaaaaaaaaggggcggcc

SEQ ID NO: 59883 - DNA, 876 bp, Oryza sativa
  Clone ID: PAT_MRT4530_61464C.1
atggccgcctcgtcgtcctcgtctatggcgtcgtcgcaaccgaggatgatggagcaatcgttgttctacacgcagccaccggcgcgggccgtgcacacccgcaaggtcacggcggtgaacctccaccgtgagatgtcgctcatccggtcgctgatgccgaccttccccttcgtcgccgtcgacacccagttccccggcgtcgtccacccccacccgagaggggcgggggtcaccgccgacgatcggtacgcggcggtgagggcgaacgccgacgagctctgcctgctacagctcgggatcaccctctccgccgccgacggccgtctccccgtcgacggcgccctcgtcgagttcatgtgggatttcgactttgccggtttcgacgcccgctaccaccgccacgcgccggagtccgtacagttcttgagggcccaggggttcgacttcgaggccgcgcggctcgccggcgtgcccgccctcgcgttcgctgcggagctcgccgcctccggcatcctcggcctccgtggcgtgacgtgggtcgccttcggcggcatgtacgacgtcgcgttcctcctcaggctggccaccggcggcgcgccgctgccggcgacgaggctgggcttcctggcgcaggtcggcgccgtcttcggcacccaggtgttcgacgccaagcacatggcgtcgctgctccacatgcacggcggcctcgccgccgtcggagggatgctccggctgccgccgcagctgcctcgccgccacatggccgggcagaacagcgtcatggcgatccagctcttcatggagctgaggagaaggttcaatgacctgggaggcagccttcacagctgctcgctcaagatcgaaggcctgacttga

SEQ ID NO: 59884 - DNA, 1169 bp, Oryza sativa
  Clone ID: PAT_MRT4530_61465C.1
atcacagaaaccaaaacaaacaagatgactctggcataagcttaaaacgaaccgctgaccaagatggtaaaatctttgtacacgtacaagaagaatttttaccaagatggcagaggaggagcatatcgatctcatgtaaaaaaggaaaatggtaaaattctaaactatcaagccatattctaaatgatgataccgggttgatcaagatggccactgcagttagtcgatggaacttcagaaagctcaagcttccctgtccactcctctcccggtttcagagtgatttgtctctccgctgcagccgcatcaacgcacagcatctgtttgtactcctcatcgccgaagtccacgatgtttttcgatttcttttcccacggattccacacaacaacgtcaggcagtccttcctttcttatgacaaatgtgcgtttcttctcatggtccagaacagctattacatttggtgagctaacatagactcggtcaacctccgattcaaatgttatggcatctccttgttctgtaaaacgttctctctggctaagattatcgagataatcaagtgtctcaaggccttctatcctcacctcactgatgtcagaaacagacagatatgtgtgataaccaaatgagaaactgaatggcttgccattaacatttctgatgcgtgatactagtgacaggttcccatcctttgtaagagaaactctcaggcggaactcaaaaccatgtggccagcacttcaggtcatcttcagatggctttagtataaggtcaacagaagctttgctgttgttatcattttgatttaatggtggatgctcctcatctagggcccatatcctgtttcttgcaaatccatgttgctccaatgttccagaatttccaaactgtggaaaacatatcgggattccaccacgcatcgcctttggtggcttgaagattgcctgcaaaacacacaccacgacgaagaaaacaaagccatcagaatcgcaccaaaccaaaccaaaggactcaatgccaagccgatcaaaatccattcgcaaaaacctgctcacccgcgcgtaggcgccccgcggcgagcggagcacgacctggtcgacgccgttccagtccctgaccacctccagctccgtcctcggatccgtcaggttggtgtagtgccccat

SEQ ID NO: 59885 - DNA, 114 bp, Oryza sativa
  Clone ID: PAT_MRT4530_61466C.1
atggtcaggaggtttattagggatgcaggagtgcagcacgacgagaaggaccgctgcatacgagatgctcgtgacaatgcctcacagcaagatgatactcataactttctctga

SEQ ID NO: 59886 - DNA, 580 bp, Oryza sativa
  unsure (1)..(580): unsure at all n locations
  Clone ID: PAT_MRT4530_61467C.1
gcaccccatcgagttcgttcgtcggtgcggtcaatcatgccacacccatggataccggtggatccctccaattcgccaaaagttgcaaaagggaccatggttcaacccatgggatttaccgggtgaccccantggtccagcctttccaaggctgtgtgtggctgatgctggtgttggaccacgctgttggacacacacaagctgggccaatggtgaatgaaaatggagtgagatatgagcgatgcaagaaaaccacctgcacagtggtgacctgaggacctgaacgccacctccacggcgtgatggtattttgaggataggagaattgctgtggtgctgagtcaccttgtggtggtgattgcatgccagtntctttngntgaaaccccttggggttgcactccggcgtgcgtgttttgttagaagtggtgaaaaaggggattggaagtgtgagatgtgctggtaagatagaacaagatcttggtttcttgtatgtggggcttaaaaagtttggaccacagagaatggaatggaatggtttggagggacccctcggtctgaaaaaaaaaaaaaaaaaaaaa

SEQ ID NO: 59887 - DNA, 1422 bp, Oryza sativa
  Clone ID: PAT_MRT4530_61468C.1
atggagatgccacgaaagacaggagataaggagaggacgaggcggcaaagaggcggcgcattgaggcaggaaaagttgtccagccgctctccaccgtcgctggtcccgcttcgctctccgccgtcagccggccggtcacgaggcggcggcgccggtgcttcgattgttggctgggatcgatgggatcctcgtaccaatggaccccaataccctctatatctggtctacgggtacccaccgtcgacagcgctgccttcctgtggcgaccctgctgccgcctcccctcccgctggatctggcagaggagagggcgccaccgcttgccgccacctccccgtgggaagcacgccgcccctgcaacactccccgacctccatcaccagagagatagagtggatagagagagagggtcttccaatggacaatggtagaccgaggtatttcattgggaacaaaggtctggtcactaggatgttttctaggatctcatcgaggccgatgtcactgcatctaatagggcaacctgtgacttttgtcgatgaagaccgccagtcatatgcatatattaagattcggaaacgcaccgaccttcctcaaggattactaatcagcccaagctcgccgccgagcttccccaggatcacggcggatctttctttgcgtacggtcgaggagcatatggaggggtttctggtgaccgcggccaccggggcactcaagtccgtcctggtgaagctcgccgccatggccggcgaattcgaaggggtgcgcggccagatcagtttcctcgccgacgagttcgccgccatgcacgcgttcctcctcaggatgtcggattcggaggaggggaacgctgaccctcaggacaaggcctggacgagggaggtgcgggagctctcctacgacatcgaggacagcctcgacgagttcatgctccatgtcgtcgacggatccgctaatccggatgggttcatcgtcaaatgcaggaatttgctgaccaagaccatggcccggcgtcggattgccaagatgattgctgagttcaaggcacaaatcaaagaagtgggggagaggaatgcgcgatatatgaatggtgggatcagtttgatgaggacagctaatgcgaccgtagaccaaagagctcttaccatctttcaggatgtgtcatctctagttggggttgatcagccgaagaaggagctcatcgatctgttgatgaaagatgatgggcatgtggcatccgagcatctaaggaccatctccattgttggaattgggggattagggaagacaacgatcgcaaacctcatctttgaggagctgagggagcaattcgattgttctgcttttgtgtctgtgtcaagaaaccctgtgtggatattatgggtaccccatacccatacggcatggttatccgactag

SEQ ID NO: 59888 - DNA, 2322 bp, Oryza sativa
  Clone ID: PAT_MRT4530_61469C.1
atggtgcaagagggaatgctagatctcctactcaaaaccttggaggacaacaagaagaaaagaatggaggcagaggagaggaatcggatggacatgaaggagctcaaggcggtgtggaagctaggctacctcaagttgagaagcagggacaggcaggaagctttggtgaggcaatggttccacattagacaaactaatacagtagctgagtatgtggagaagttcgattccctaatgcatctgctgttggcttatgaacagtcagttcctcaagtgtattttgttcagaaatttattgatggacttaaggatgaagtgaggagggaggaagcgttggaaggggttaaaatcggggtattcaggaggagtgactgtaccaattatctgagacctatgcacaagttgcatgtagtacatgagctcctggatattctgcaagaggacactgaagaaatattgtctgctgaaactgcgacacagaaggaggatttaatagtcatggcaatttctcaacaagcagcaaatgtgacagagtctggtagtactaattctttcattgatgagcaagttggcatgaaaatgattggagtggaagagttccagcattccctgaaggtacaaatagcagatggaggacagttgatttgctctaaaattctgcctggctgtaattggtgtatgcaaggtcatagcttcaaaaatgatttcaagttgattcctctgggaagttatgatataattttaggcatggattggctgcagcaacatagtcctatgcagatagattggattcaaaaatgggttgagttccaatatcagaatcagttgattaggctccatggcattaagaagcaaagtagtacctatgctaacatttctatagagcaactggtgggaatggctaaatctggagctataatgtacttggtgaagatagctgagactactcatgaggaagaatttcccatacctgaaaaaattcagcaagtccttcaaagctatcaggatgtgcttgcagagcctaagaacttgccacctcgtagaaattgtgaccacaagattcctcttattgaaggggctcaaccagtcaacctgagaccatacaggtataatcctgagctcaaggatgagctagagaagcaagttaatgagatgttggagttggatgtaaaacaaccaagtcagagtgcatggagccccaactacttttcaagcagccatgaacaacacattagccccagtcctgagaagactcatgttgctaatgtatcacaagttctccaactacttcgcaaggatcattggcaggtgaagttctcaaagtgttcctttgcccagcagcagagacttcatacaccctggcagcagcgagcatttactaaattgatggggttacattataaaatctgctacaagaagggtagtactaactcaactgttgatgctttatccagaaaggataacctaggtgatgagcaggcaatggctatttctagtggagttcctatgtggatacatgaggtagttcaagggtatgataaggatgaatattcttctcaattgcttactgaacttgctgttcagcctattgcgagcatttttcccttcagaatggctaaaccagagagggttatatatccaggagtactacgaccacttctagttcctgagggtgcgtggcaagtaatctcgatggacttcattgaggggctgccagtttcagagagcctggaagattgttctgttccagatttggaggagtggttaagggacagaaagtttgtgcatcagctaattcaacagcatttacatcgggctcaacaacagatgaaagcttttcctgataagaacagatccttcagagagtttgctccagaagattgggtatatttgaaacttcaaccatatgtgcaatcttctgtggccaagagagctaatcacaaattatccttcaagttctttggccccttccagattttacaaaaacactcattaccttcgcctctagattctttgagtgtccctgttgcctttctggattatcgtcttactaggaaaggtggtgatacggtggacgctacatgggaagatcaagctaatttgcagaccagatttccatgtgcgccggcttgggggcaagccggattccaaggaagggagaatgtcagaataccgctggaacgcctggaggagaaggagcatggcgacaacgagctggatgaacaacagagtgaaggcgggaaggtggaagccgtcttccagaagttgaagcacaaacgcaaggctaacactaaatatatgttttcagagtgggttgtgtaa

SEQ ID NO: 59889 - DNA, 246 bp, Oryza sativa
  Clone ID: PAT_MRT4530_6146C.1
atggggaggaggagatggcgacgggactccgaggacgcggagaagcggcggtggccgggacggagaggaggcagtgcaaggatagctgacatgggggaggcaacggcacgtgcgaggaggagaggaggggtcgcagactcgcagcttggtgaccttgcagagggatgtgggaggatcattttgcaaaagaatctcttgaaggacttcgaagtgatttccctcattaagggatccgacggttactaa

SEQ ID NO: 59890 - DNA, 355 bp, Oryza sativa
  Clone ID: PAT_MRT4530_61470C.1
aggattcacattcatctagtaccctaagtgtaaatatatatagccggagctcacatatatttcattcacatatgcctcacccaacaacatagagccgtagcagataccaatcttacatcaagtcagagagagatcaggtgaaacaaaatcataagctgagcacggccggcacaatgaagagactatgcacaaactgggagcacacgatacatggcgggagacgtcatggaatcggagttgaacaattaaacaaggctatctatgacgatgacgggttacatgccaccagactcctatcagcccgggggcttggaggcgatgaatctgaagagctgaacctgacagacgttgtcca

SEQ ID NO: 59891 - DNA, 201 bp, Oryza sativa
  Clone ID: PAT_MRT4530_61471C.1
atgagcctggggatgattgaggatacaacgttggatccagaggttactttctacgtacgcatgcgctgtgcacggtgggaggaggggatccatcaaagccgatccgattccaaggacgcccaaccagcaagtaacctccaatgtgacctctccaacaagcacaacatctacgatgtcaccatcactattttgaacatctag

SEQ ID NO: 59892 - DNA, 280 bp, Oryza sativa
  Clone ID: PAT_MRT4530_61472C.1
aaaacctactccatgagtccggcgtaccctccctctcctagtcctggccgctacggcggaggcgcgacaggcgcatagatgtcgaggacggaggaaggacgcgccaccctcatgagtacgccaaggcctactgcgcccacctcaagcgctccggcaagatggagctccctgagtgggtcgacatccagaagactgcgaggctcaaggagctccctccttatgatccggactggtactacaccgagggctgacctccccccaagggaagagctacctgagg

SEQ ID NO: 59893 - DNA, 346 bp, Oryza sativa
  Clone ID: PAT_MRT4530_61473C.1
ccaccccgccgcattcgccgccgcgcacgcaacgccgccgccgccacgccacaccgccgccttcaccgccgcgcaatgccgccgccgcatgcaacgccacgccgccgccgccgtcgccacgccgccgccgccacgccaagcgccggcccgatgccgccacaccgccgttaacgaacacgtgaacgagaacgaacacgtcaacgtacgttgccgcgagaacgtgaacgagaacgagaaggatcgaacgaacgagagcgagaacgagaacgatcgaacgaattaacgtgaacgagaacgacaacgaacgtgaacgagaacgaacgtgaatgagaacgaccgaacgaac

SEQ ID NO: 59894 - DNA, 534 bp, Oryza sativa
  Clone ID: PAT_MRT4530_61474C.1
atgagtgactcatcgtttcatcgttctcggggcgccatgattcggtgcgggaaaatcgaaccggccgaggatgagaaggagaagaagaagaagaggagaaaaagaaagatgaagaaaaaggaatgggatttggacgtgtgggtagtaggacgcggaaaccgacgtattttagccgcgcgcgcgcgcgcgtccgcggtccacgaccacgagattgggctctacgcgcgcgcggggagccgagaatgttactactaccaccacggattttgccgtgtttttcttggcttttggctctgcgcgggggtcgtgcgtggcgtcttgcactcgtttcgttttcgggggtctccgggttggggaatcttattgcggtttgtgccgcatatcgggggccgtctggtgccctgcatttcaccggagaaacgggagggcatggttgctggagtacaaatctactcctttaatgatcttacaatcagttttcgccgacgtgacatgctgactatggttgattcgctgagtcaagaagtggaatcc

SEQ ID NO: 59895 - DNA, 459 bp, Oryza sativa
  Clone ID: PAT_MRT4530_61475C.1
atggcggcggcggcggcagcggggacaagggggatgcgggcgctggcaatcctggggcggtgcgtgcgggcgccgttccgcgtgctggtgcgcgcgcgggacctgtacgtgagccggatggcggcgtgcgcgggcggcggcgggagaggcgccccggtggggctggtcgcggtgccgcggtgccagagccacgggttctaccggtcggcggcgggaggcagcaccgacgacgacatacgcgagctgatacgcctagcctcgcgcgccggtgggccgccgaggcctcccggcgtcgggccgcggagccagagcgtggccatcgggaggatcgacgaggacgagccgtgcgagttcggcctcgacgccgaggccagggcgctggccatggctccgaagagcaagagctgcaccgtcgggccaaccgccaggaccgcgcacagggttggccccgttgcttga

SEQ ID NO: 59896 - DNA, 2445 bp, Oryza sativa
  Clone ID: PAT_MRT4530_61476C.1
ctaccgtggtaggctagcagatgacaagaattctttctccaagctatagcatgaggtttgagagcgttgagatgctacattagctctgtcaacatttactaaagcatgaatcacttggtcaatggctccttgagtcagtagtgattctatctcttggtttctgtctggactaacatgtgatggggtcatcttttctgttcgtaaaagctgcagtgttatctctacttgcctcattgtaggcctttcttcaccttttagctttatgcacatctcagcaagggaggcaacttgtctaatatcttcttcatttgccttgtcaagaaccggaggatctaccaaatctataattggtctggtcttaatctccgaaaggaagtaagtacacaaattttgtttcatccctgacattgttgtaaaaataggttgcattcttagaagaagctccaagagtaccacaccaaagctgtagacatcactcttctcatttagctgcccggtttggtaatattctggatccaagtaaccgaacgtgccctgtacatttgtaacaacatggctttggtcaactggaacagatcttgaagcgccgaaatccgaaactttagcggtataatttgcatccaacagtatattagaggacttcacatcacggtggaagatcgatatagatgctgcagaatgtagatagcatagagctcctgcggcctctgctgcaatccttaagcggtcgccccatgacaatgggaatgtgctacttgaatcatgatgaagaagttcaaataatgaaccgtttgggataaagtcatagactaataaggggacctcagtttcaagacaacatccaaagagtttaacaatatttctgtgatttattagagaaagtatggcaacctcgttgatgaaatcgttgatctcaccttcctttatgactttggctttttttatggctaccacatgttggtttgataagatacctttgtagatagtgccatgtcctccatgccctaggatacgtgtggaatcaaagttatttgttgccctttttagctcttctatggagaaaatctttgtcttctcactagcactttcatctgatgatatcaattgttctaggaggaggccttggttcttttggaaatattttctccgtatttttttatggacatctcttttccatcttctaatgatagctattacaatcgagctaagaatcaacacaccaaatccaatggtaaggccaattataatacctttacacccatctgggatatatggatttccatcataaccaggcaaacaagtacacctgtagccaacataaccttgcatggtgctgatgaccctggagcaggagctattggtacttacacaagcatatgtcgaagtgttttgctgcgcctgttggcaggtcagattggcaactgcccactgcaccgaggctgattccgttggatccacatacaggttaggccctttaccaaatatgttggatactactccttgagatgaaaatctgaattgcgaaaacatattgaataagatctccacgaaagatgagttgtatttaatgccaacaagcccctcactgacatttatatactgaacaccgatgaagtcattgtactgcagcacagaatttggcttgcctaggcacgagagctgaaacacttccctggcggcacaaccctcttcaaggccaaaaggaaatgggacaacgattgttccacattgtcgagagcaattatgtttttgtggtcttgggttataaccgtcatcgagtttgcagccatccataatatagggatttccaacgtagccatcattgcaccggcatgcatagccaacatcaatatactgcgaggagacacatgaactgtgattgctgatacaagcatggttcttcctgtcatcctccatgttattcaagcatcttgtttggtccacaatattccaagcaaggttggccttcacagtaatgttgattctatcccacaacatggttagattaaagtacttttgggtattaccggtcttgtgacgaacaaactgtaactgaactgtccgagctggtagtgaatctatagtgtaccaaccagggccttcagaatcctgtctgtataccatctcagcaatctctttgctgggacaagcgatagtgccaagcaaaataggtgtgcttttttcttgatctaccatgtatacatccaagtcacagctggtgacaacaaatgtcatgccctgtcgtgcaaaggtaaaagaatcccctggatttttccatgaaaagttgtagacatcaccaccggaatttatagggatgacatgggtggaggtgatcggaattaagttgaagtggataaaatagatattcagaccatctaccccaatatcaccaagaacctctgtcgatccattgttcaggaagagtttaggaggctgagtggccat

SEQ ID NO: 59897 - DNA, 198 bp, Oryza sativa
  Clone ID: PAT_MRT4530_61477C.1
atggcgccgacgccgctctcagcctctcacccgcgaggcgcgcgcgccatcccccgacgtgaagacagcgacgcggcggtggtggggggacgcacgatatgcggccgcatccgtgagaccgcgacggcggtggcattgggcgggccaaccgcctgccgcgccaatgagacgtctttgctatgttcagggcccgtttag

SEQ ID NO: 59898 - DNA, 2643 bp, Oryza sativa
  Clone ID: PAT_MRT4530_61478C.1
gcgggaattcgcttatgcacggtacccatgcacgtcagtttgtgctttgacccctcgaccggggttagctaccaggtgccccgaactcttgcgccgagcgctaccgtggtaggctagcagatgacaagaattctttctccaagctatagcatgaggtttgagagcgttgagatgctacattagctctgtcaacatttactaaagcatgaatcacttggtcaatggctccttgagtcagtagtgattctatctcttggtttctgtctggactaacatgtgatggggtcatcttttctgttcgtaaaagctgcagtgttatctctacttgcctcattgtaggcctttcttcaccttttagctttatgcacatctcagcaagggaggcaacttgtctaatatcttcttcatttgccttgtcaagaaccggaggatctaccaaatctataattggtctggtcttaatctccgaaaggaagtaagtacacaaattttgtttcatccctgacattgttgtaaaaataggttgcattcttagaagaagctccaagagtaccacaccaaagctgtagacatcactcttctcatttagctgcccggtttggtaatattctggatccaagtaaccgaacgtgccctgtacatttgtaacaacatggctttggtcaactggaacagatcttgaagcgccgaaatccgaaactttagcggtataatttgcatccaacagtatattagaggacttcacatcacggtggaagatcgatatagatgctgcagaatgtagatagcatagagctcctgcggcctctgctgcaatccttaagcggtcgccccatgacaatgggaatgtgctacttgaatcatgatgaagaagttcaaataatgaaccgtttgggataaagtcatagactaataaggggacctcagtttcaagacaacatccaaagagtttaacaatatttctgtgatttattagagaaagtatggcaacctcgttgatgaaatcgttgatctcaccttcctttatgactttggctttttttatggctaccacatgttggtttgataagatacctttgtagatagtgccatgtcctccatgccctaggatacgtgtggaatcaaagttatttgttgccctttttagctcttctatggagaaaatctttgtcttctcactagcactttcatctgatgatatcaattgttctaggaggaggccttggttcttttggaaatattttctccgtatttttttatggacatctcttttccatcttctaatgatagctattacaatcgagctaagaatcaacacaccaaatccaatggtaaggccaattataatactctgtatgatcagggcacatggtgcagctgtagtttccttcagtattgtggcaaagttccttgcaatccgtggtgtttgtaggcattcgtcaatatctttacacccatctgggatatatggatttccatcataaccaggcaaacaagtacacctgtagccaacataaccttgcatggtgctgatgaccctggagcaggagctattggtacttacacaagcatatgtcgaagtgttttgctgcgcctgttggcaggtcagattggcaactgcccactgcaccgaggctgattccgttggatccacatacaggttaggccctttaccaaatatgttggatactactccttgagatgaaaatctgaattgcgaaaacatattgaataagatctccacgaaagatgagttgtatttaatgccaacaagcccctcactgacatttatatactgaacaccgatgaagtcattgtactgcagcacagaatttggcttgcctaggcacgagagctgaaacacttccctggcggcacaaccctcttcaaggccaaaaggaaatgggacaacgattgttccacattgtcgagagcaattatgtttttgtggtcttgggttataaccgtcatcgagtttgcagccatccataatatagggatttccaacgtagccatcattgcaccggcatgcatagccaacatcaatatactgcgaggagacacatgaactgtgattgctgatacaagcatggttcttcctgtcatcctccatgttattcaagcatcttgtttggtccacaatattccaagcaaggttggccttcacagtaatgttgattctatcccacaacatggttagattaaagtacttttgggtattaccggtcttgtgacgaacaaactgtaactgaactgtccgagctggtagtgaatctatagtgtaccaaccagggccttcagaatcctgtctgtataccatctcagcaatctctttgctgggacaagcgatagtgccaagcaaaataggtgtgcttttttcttgatctaccatgtatacatccaagtcacagctggtgacaacaaatgtcatgccctgtcgtgcaaaggtaaaagaatcccctggatttttccatgaaaagttgtagacatcaccaccggaatttatagggatgacatgggtggaggtgatcggaattaagttgaagtggataaaataaggatattcagaccatctaccccaatatcaccaagaacctctgtcgatccattgttcaggaagagtttaggaggctgagtggccat

SEQ ID NO: 59899 - DNA, 409 bp, Oryza sativa
  unsure (1)..(409): unsure at all n locations
  Clone ID: PAT_MRT4530_61479C.1
gggaaacccatttttttttttgtttttttttaataaaaacaaaaactaaacccctttttattcttggaaaaatggcaaaattttggggacattttaccccaggggaggggggcaggttttccaggtaaacttcaaaaaggggaacttttttttcctcctgggggaattggcggggaacttctttttcccccgccgcggtggccggggctttccttttagcttgaactttgggggccttggccttttgaacctctttgacaaattngaaaaggaaggtttcggttttttccccgggggccttgggcgagaggtttttgggaacccgggggggggtttttttaacctctcccaggaccccccccccggggttaaaaagggggggggcgtcattcccaaggaaaaccttggg

SEQ ID NO: 59900 - DNA, 393 bp, Oryza sativa
  Clone ID: PAT_MRT4530_6147C.1
atgaacctcaacgcaatcgaaatatatcgaagcaagtccagagagggtgccctgaatgatctcccgtgcaaggtcctcgcacaaggtcagaatccctgcggggaggaaaatggcagcatcaaggccgtcatgcagcacggcctccacaatgcacaccacaatactgacaggaaggtcattcgggtgggtccgggtgacatccccgcacccggaataaaaccaacacccctactcacgatgactgagaggggccaaccagtggaaaaggaagtcagcggtgatcatgtgcgtggtcagccccctgtcaaccagcaggctgatgcgctcagaaacccgctccaggcgggggtcggtagcgggtgcgtcagaccaagccacccaccaacgggctag

SEQ ID NO: 59901 - DNA, 262 bp, Oryza sativa
  Clone ID: PAT_MRT4530_61480C.1
aatctcaatggcctcgccgaatgagattaaggcgatgcaaaggtgtgacacgacatgagggaatgctcagacaaataccaacatgtatacaatgcctgggtcaagtctacctgtgacatataccacgcactacgtcaaaattgtagcccaggcagcaaaagaaacctgtgaactcgttgctttgcagttacagaacagagcttacacgagaccgatggttcttgatgcactgatccattcttacggacgcgtgtgtataccc

SEQ ID NO: 59902 - DNA, 185 bp, Oryza sativa
  Clone ID: PAT_MRT4530_61481C.1
ccgggctgcaggaatcggcacgaggccaatttgtcaccgatttctcctcgcgaatccactgctgcttgctgctgtgctggctacagggtgtgttgttgttgggttagggattctttgtcggggggaagcgcggcctgcctggaaatcgtcggagctcgctgagatgtcgagtttttgcgcatgaa

SEQ ID NO: 59903 - DNA, 1040 bp, Oryza sativa
  Clone ID: PAT_MRT4530_61482C.1
gcacgaggcacagtctccactcacacgcattgcagaggagaggcgacaatggaggggaaggaggaggacgtgcggctgggggcgaacaggtactcggagaggcagccgatagggacggcggcgcagggcgccggggacgacaaggactacaaggagccgtcgccggcgccgatgatcgagccaggggagctcaagtcgaggtctctctaccggtccggcatcgacgagtacgattctatctttctcttctctacattatcatacttagcgttatggaggtaatttaagtattcattttagctctttcacctatctaattcactcctcattcacgctcttattctctttttcttttttttattttctcttaattgcctcttcttcttcaatctcgatataatcattttctcttccttaatacttcctaattctaactttttatattatctaccttctttcatcttataatcaactttaacaatactcttcatttctaatattccttttcttctattactcagcaccatataatcacgatactttatataattatatatatttatcctcacccacctaccaccaaattttctatattgtataacccccatctctaccatatttccactatctcatgtctccatcccattcttttctcttttttatagatcttttctttctaatcaacttttaattttatctccctcttcttgcacttcttatctttttttgtatatctttgtatagcaaatccacccacccctttttatcgctttattcttcttacatattttatacgttcctcgtagatatgtcctgcttatccgttaccagctcctcttacatattatgctcaaatatattgatgacttaagcgttttttatccgatctttacctactaccttctatattatatttcccacctattattccctctcttcttttatttattacacttttacatttcttctattcactctatttattctatattattttcttctatccatccctccctattatactatctctatatcctcca

SEQ ID NO: 59904 - DNA, 750 bp, Oryza sativa
  Clone ID: PAT_MRT4530_61483C.1
atgctccgcggcggggcagatctccccggcaccggcggcggcgcggccggatccaatccaaggaaagaggggagggagcgcgcacctgtgtcgccgatgatgatgtacttgaagaggtacgcgtacgacatcctcgatccctactgcgtgagggtgcggggtgcggccgcggcggcggaagattctccctcggggggcggcgctggatcggaggagaaaagcggcggcggcggattgatcgcgaacgatccggcgaggggagttgggggaagggagaggatgacgaggagagaggagagaggagagaagaaggggaattttctaattggcgttggctggcgtccgcgtctccgcacttggcttcgtgggaggagcatccaagatccaacggtgcggtgcgtgctggcactgcacgtcagtcgtcagggccttctcggcgaaggaataggatgggaggatccggacgtttgggacttgaactggcctgtgggcgtcacgcatcaccacaccgacggatcagcctcctctaccttcgaaggagggtgcctcaagatctgcacgaggagaggttacgcctggtctacaccgacatatcgggagagctcgttccaagggtggaggccttcttcatctccgacggaagttcttcgtgaggtggttgatggtgtcgagtcaagccgagttgaccccgaccttctatatatggaggcctcttttgggccaaaatctgcattgcggatctcgtcttga

SEQ ID NO: 59905 - DNA, 620 bp, Oryza sativa
  Clone ID: PAT_MRT4530_61484C.1
atgcttatatagggtagtagtaggagatgcgttcttctaccgagaaaattaacattatgccaggcttggcggtggaggggacgagctctagctcaccggcgaccacggggaggaccttggcggcggaggggacgagctcgagctcgccggcgaccacggggaggaccttggtggcggatgggacgagctcgagcttgccggcggcggcaggcacagggggaggggcggagagtggcggcggcgcgtgggacgagctcgagctcgccgatggcgtcgggcgtgggggcagggagaggcggagagcggcgagccgccgccagcgggcgctgggggtggaggcgcatagcggcggcgttgggcgtggccgcgtggaccgtgtcgcgtggcgccgccgtgtcagggagatggggagctcagccgccaccaccagggaaggggaaagggggaagggaagctaggggagaagtgcctttgagcgtgattttccctaagttacataacataagcagaaatcagggggtgtctgtaagtgaaatgtggttggctggtgggtggagatgggagtttagaagacaactatctataagagaccaaggagagttagctgagctggaagggat

SEQ ID NO: 59906 - DNA, 177 bp, Oryza sativa
  Clone ID: PAT_MRT4530_61485C.1
aaagtcgccggaaccggggaaatacgggacggcttaccgaaagagacaacgagcgccaacatactaatctagcaaattaacaatcccgggggcacaaaaaaggacaagccctgaccaaaaagaaaaaaagcacagggggaaatctccctaaatgtagaaaaaaaagccccacagaaa

SEQ ID NO: 59907 - DNA, 2643 bp, Oryza sativa
  Clone ID: PAT_MRT4530_61486C.1
atggccggatccggacttggggactccggatccgccgcctccccgcaccgccccaacatcgacgtcgccaactccgaccgcgaggagtttgttgcgcatgcttccgatgtcaactgtgtcaagtttgggaggaagacatcaagaatcctcatcactggtggggaggaccaaaagagcctgtcaggccttacgagtccagttgagtcagtgagctttgactcatctgaagctatgataggtgctggagcatcaagtgggacaataaagatatgggatgtagatgaagcaaaagtcgttcgtacttttactggacatagatcgagttgtgcgtcccttgatttccatccttttggagaattcttcgcttctgggtcttcagacactaacatgaaaatatgggatatgcggaaaaagggatgcattcacacatataaaggtcacacacggcggattgatgtgcttagattcactcctgatggccggtggattgtctctggtggatctgataactctgtaaagatctgggatttgacagctggaaagctcttgcatgactttaggaatcatgaaggcccaattaactgcttagattttcacccccatgagttcttattggctacaggttcagctgataagacagttaagttttgggaccttgaaacttttgagttgattggttcttctggacctgagaatagccgggaatactttgtgccagctagtgtagttcggtctatgacattcaacaaagatggtaaatcacttttttgcggattacatgaaagtttgaaggttctttcctgggaacccatcatatgccatgatgtggttgatgttggctggtccacattaggggatctaattgttcatgagggaaaacttcttggttgctcatataaccaaagttgtgctggaatatgggtcgtggacttgatgaaaattgaaccgtatgctgttagcattgctgaagcacatttgaatgaaagcgtaaataggtcaatacaggctgataatagcatatcatcagtgttgggaaggttatcagtttccagaagcccagccaaggaagcatcttccgatactttgcttaaactctcaatgtctgcttcaaaagaagttcctgttccagcttcttctgcagtgacaaagaaactaccaaaagaacctataacaagcaatattcggctcacaagatctgattctctaccagttgtttctcctagggttagattgaacccaaagttctctgatgaccagaagaggcagacagattatgctgtgcctataacaactccaagaattcgctccaaagtggatctctctataggtgctagagcattccatcgtaactcagtaccatcggttgctcccacaaatagatccaggtccaaaatatctgcatatagtagtgaaggatcgtcgttcatccctgttgttgtccctaggcatatccctaaagtggattctggtcccaatctcagtaaagttctcactactgatttaacaattgtcgagcctcaagacatagaacgaggtggtctggctgtggattgtggagaagatgataaattggtgtgtgtgattgattcaaggagctcaaatatgggtgtacaaaatggccgtagaagaaaagccggtgatattattacacataaagaaaccccagagactgctttgacagttaatatggatcgtgacttcagaagaaaggctcctgaaactgaaagtatgcaacaggacatatttcattcagagcccattagttcaaaatgtaaatatattaaagaaacttcaggtgctggagacattaacttgtctgggtcagccattactgaaagtgtcaagtctaatgaaggtggtgactggtataatgcatcttcttttgtaaaaccaaatttgactgttggaaggaatccagagacttcatacatcaacagaagaacaatgtttggattgagacattcaacggattcaagtgaaaaacacgctgttgaacatgggccttccaatttgtctgcaagttatgagagaaatcagtatgcaccaacactacataacttgaggaggcgctcttcggttgctagagaacagagtgcatcagctggtgatgaagatgatattgctgatctgatggaaaaccatcaagaattcattcatgcagtgaagtctcggctaacaaaactagaggtggtttacaggtgttggcacaataacgatgtaaagggatctattgatgctacacgcaggattcaggatcttgatgttaccgccgatataattagtgttctgatggagaatgataattctatcacactagatatttgtacttgtgtcttacctcttgcctccagtgttcttgaaaaaagcagctatgacaggcacctgaaagttgccttggagatgatccttaagcttgtgaaaagctttggttctacaatatcttcagctgtgtcatctactccaccagttggtgtagacattgaggcagaacagaggctcaatcggtgcaatttgtgctttctagagctgataaaagttcacagcgttctctttgccctgacacggcggcaaggcgaggttggaagatctgcacaggagctaagcctctttcttcaggatatctttcagctgacaagcagatag

SEQ ID NO: 59908 - DNA, 527 bp, Oryza sativa
  Clone ID: PAT_MRT4530_61487C.1
ttccgacctgtcccggccgaccccaccgctgcgagctgcggcgcgcgcaagcgggatttacagccacccacaccaccaaggcaccaacgcatccatccaaaccgccgcccgccgccgcccggcgtcgtcgtcgtctccacgctccctcgccaccgcgcgccctcccggcctagcccgccgggcccccgctgctaccagagagggcgatggcgacggcgagcggcgtctccactcccctgcagctcccctccacgcggcgggtgggcggctgctgctcccgccccggcagcccggccccgggcaagaacgcgttcccgcggagagcagccggtggtgccccggcaggtacattttttttgaagagagattctgtatataaagaacagagttgtcatcaatttttaccattgaaacaaagcggaaggttgcaagcagcagttctgcctgttactccacctttgttagatgatgaagaaaaaccggagcaaatgtgtgaagattatggattcaaacacattggagaacag

SEQ ID NO: 59909 - DNA, 685 bp, Oryza sativa
  Clone ID: PAT_MRT4530_61488C.1
ttgatcaaattaggctatacattttttgcaaaattaacggcaatcgctctcgcttactttagtattgcggcacaagctgctgaaaaactatatgtctataattggacggaatatgtcccctcttctttgctagagcaatttaccaaagaaacaggtattgaggtcatttattctacttttgaaagcaatgaagaaatgtactctaaattgaaattatcaaattcaaccggttacgatattgttttcccttccagctattatgttaataaaatggcaaaagaaggtatgctaaccgccattgataaaacaaaattaagcaatttaaaaaatattacccctgaattaatgggtaaaccatttgatcctgacaatacttattcattgccttatgtctatgaattgactgggattggcgtcaatgccaaagaaatagatcctcacacagtttcaagctgggaagatttatggcgtgatgaatataaaggcaaattattattaatgaatgatgcacgagaagtgtttcatattgctttattgcttgatggtaaatcaccgaatacagaagaagcagaaattaagcaggcttatcaacgtttacaaaaactagtgccaaatgtattagtctttaattccgattctccagaaatgccgtatttacaagaagaggtggcaattggaatgcaaa

SEQ ID NO: 59910 - DNA, 316 bp, Oryza sativa
  Clone ID: PAT_MRT4530_61489C.1
cacgaaaccccacatatatagtggcatatgatccattttctcaaaaccctcatccacgtccaactcgggatagaatccaaaggaaacctgaaacattccttcccgagcaaggaaacttcgagacccggtgaaacacactcagactcggacctgctggtcagaccggccacatgccgccggtctgaccggccctcaaccggcggtctgacctgccaacacacggcggttagaccagcctactcggaggaaaccgacatacttctaaagacctacacgtcgggccgggccgtgcccgcccacaagctgaaccaacggc

SEQ ID NO: 59911 - DNA, 959 bp, Oryza sativa
  Clone ID: PAT_MRT4530_6148C.1
tttttttttttttttttttttactttgaaaacatccttaccatagaaaaaaaatatttcagcttgtcattttacaacactgatgtgaaggataacagaagtgggagaaaagtattggcccagttctgtttcaaggcttccagagcaagaacatgaacacataacatggaccaaaggtatacacatcgcttggaatggagagaatataacaaagctatttaattccttaaacaacatatgcatgtccaaaattggcaagacgtgttgacaatgaatctgctgcgaattcctgaagacgatttgtcaatagactagctggtagcagcaggttcagcgtttggaacataccaaccacggagtatctcgatggccttcttcctcctcgcaagaagggacttgcgatggttaccagtattcctgtgcatggcgccaaccttcactgtcttgtcaatggctttgtatgcctcagaaatccatttctctatttgaatgatatcttcaggtgtggcatcagctttctttctcagcttttcaagggctttcaaaaccttcttcatcctggtgcgcatctcggccttgcgtgcatggttgcggatgcggtgccggtcgttctgccgctccctcttcttgaccgagtccgggcgcctcccggtcgcggtgccggtcttggccgcctcgcacaccacctccagtcccctcctcctccacctccccgacgacgccggcgtcgccgccgcccatgccccgatcccaccgatggggaaggcggcgtaggaggcggacaggcgggcccgcggggagacggcgcggagggagagagacgccggggctggctgcgcgggggaagggagagaggcggagagggaggagagggagaagagcgtggaggtggcggtcgccatggctgcggtgcggagtgagctcgaggagcaccgacttcgtgcccttcgccgatgatgt

SEQ ID NO: 59912 - DNA, 165 bp, Oryza sativa
  Clone ID: PAT_MRT4530_61490C.1
atggagctttacaggcggctcgcttggtccgcctacaaagatctatcttcgcaggcggaacaaaaccatggccccgcgggttgccaatgccgtggcctcctggtgcaggaggccacagctggtgcacacaaggatgttcttaaattcatctatgaccgtgtttag

SEQ ID NO: 59913 - DNA, 390 bp, Oryza sativa
  Clone ID: PAT_MRT4530_61491C.1
atggccatttttctttctatagtgctactatccatggcacagcttccctctctcgtcgccggcaccggccggccaagggtcataatcatcggcgccggcatatccggtatttcagcggggaagcggctgtcggaggctgggataacggacatattgatcttagaggcaacagaccacattggcgggcggatgcacaaacagaggtttgccggcgtcaatgtggagatcggcgccaattgggtggagggcgtcaatggtgagaagatgaaccccatttggcccatcgtcaactccaccctcaagcttaggaacttcctctccgacttcgacagtcttgcccaaaacgtctacaaggagtacgtacattccatgagtgggtggatcgattga

SEQ ID NO: 59914 - DNA, 2070 bp, Oryza sativa
  Clone ID: PAT_MRT4530_61492C.1
atgatgccgctatttctacacctgtcgtccgacatctgggtgattatggctcgaatctcgtagcgtcgctgcgccttgccaacctggtgcccctgaggcaacagcaccttttgaccctcggcaactggacatgacggtaccgttagcaccacctgtgagggcaatttcggtccacgcagctggaggggggtcatgtaccttaatcgttgaagaattttaagtaggtggataggtaaatatttcaagtccctgagcgctggagcgtggccctagaggaatttacgtccccgaagaatgcatcgctctagcagagttccggtcggaccgcggtctgtaatctgaatccctcagaatctgtttccgtattgtcctcacctcggccgcgccgagtgtagctggttgttacgttagtgcatttccaacgtccaaaggtataaaagtactcgtctgttgtactggtgaactggtcgagtcatcttctgttattatgtactatatgtgttccaatgtaaatcaaccaccaccagtatcataggtcaaccagatagtcactcaggcacgcatatactataataaatttcgacagaactgcccaaacacaccttttccgagttctaaattttcaactgatgtgctgaataaggcaaaggatctcaagctaataggtgattgtacattagaaaagctcaattatttgcaaacagatgaacaccaaaaattcattacaacaaaagagcatggacaagaacagtacttggagaaaacaagctttccttatttagaagttctaaatctctggcctggtgaaacatgccactttatgggcaggttcttgattacatggagaacctcggaggttgttgtgaatggaatgtgcttgcatgacagtcaaatgcgtgccggttgacacgagcatttatagataatgcctgcagtatggttttaaagaagtctttaacaataatggagcatggatatgctgtcattgacctggaaaaacttgacccacataacgttgatgatctttttctttcacgatatttagcatatgtattacagtttgtttcacaaaggcataggccactccgtggtagatctgctcaattgctcatagactacatccgtaccatcccctgcaaggctgccctgagtgtagctggttgttacctttgtgcagttccaaggtccaaaggtacaaaagtacttgtctgttgttctgttgatctgatggagtcatcttctgttcatatgtcctataagtgttcctatgtaaagcaaccaccaccagtatccgagatcaaccagatagtcactgaagcacgcatatactctgatcaatttcgacagaactgcccaaacacaccttttccgagctctaaattttcaactgatgtgctgaataaggcaaaggatctcaagctaataggtgattgtacattagaaaagctcaattatttgcaaacagatgaacaccaaaaattcattacaacaaaagagcatggacaagaacagtacttggagaaaacaagctttccttatttagaagttctaaatctctggcctggtgaaacatgccactttatgggcaggttcttgattacatggagaacctcggaggttgttgtgaatggaatgtgcttgcatgacagtcaaaagcatacttgccagtattgtatggtaaatcaggatggaagtcttgctattaggcatatgttcgataccgattggttgttccttgctgaagtttgtaagatccattctttggaagagaataagaattattcaaatgctctctgtgacaagttggaggatgctaaactcgtgcagcactctagatatttgcaattgtcagcaatgaaatctcttcaaatcctgagatctattccagcacctgcaagacgaatgctaccagtgttgaccaactcgcaaggtgctgtattgagtataccgtgccaaccaggtgtcgctgaggcaatagcaacttttggcactaggcaagtggaaatgaaggtaccactagatcactgtgagagcaattttgtcagcgctggaggtggctcaagtgcctaa

SEQ ID NO: 59915 - DNA, 2628 bp, Oryza sativa
  Clone ID: PAT_MRT4530_61493C.1
atgaggcggaacctgaagacgaacgtcggcatcaccgtcttcccgatcctcatctgcgtgctgctcgtcgtgcttcagaacgtgatcaacggggagctcgacaagcccaagtaccagtgcggctgcgaatgcaccgagagtgacctggatgggacctgcctgcggaaggagtgcggcatccagcactcgacgctggagcaggtgaatgtgttcatagttcttgagtacttccaattgacaggtgtttcaggtcgggtgtttcctgccctttatccgttgcctaatgtgacagactacctgatgcctcctcccttttctccctctcaagtgacagactatcttgatatcctctccaggatagttgttcctcgttgcatgcccttcatgtttgggaccattccatacaatgcagggggcgtacccttacatatcgactctttcgtagggctgcctagattgtattctgatgtcctgttgaatgaaccagatatacagtgtattgaagttcagatgttgtggcgtgaaagtgcatcagttatcaactatgaactgtttaagggttacgtacaaagaggaggagaaacaaatgagtttgttgcaggttatgacttcttgaacacgacaggatatgacctcaatataaatgtttggtacaactctacttataatgataacactgcatattcatttatcgcagcattacgagttccacgattggtgaatgcaatatccaatgcatacctaaaatttatcagaggaagtggggtggatatgctgcttgaatatgtaaaagagatgcccaaagttggaacaaggtttaggcttgatctctcttctcttctcagtgtgctattcttcacatggatagttgaactacttttcccagttatgttgacatatctggtgtatgagaaggaacaaaagctaaaaattatgatgaagatgcatggtctgaaggatgggccttactggctaatttcttatgcttatttctttgctctatcggttatctatatgacattttttgtgatttttggctccttaattggtctaaatttcttcagactcaatgactacagcatacagtttgctttcttcttcatttatataaatttgcagattgcacttgcattttttgtggcatctttcttttcatctgtcaagacagccactgtgattggatacatttatgtatttggctctggcttgctaggggcatttctttttcgtttctttgttgaggacaggacctttcccaatggttggttgttagtaatggagattgtcccaggattttccctctatcgaggactatatgaacttggccaatatgctttctctggaagtgctatgggagcctctggcatgacatggggaaatttgagagacccaatcaatggaatgtgtggtatatttatcatcatgacagtagaatgggcatttctccttatgttagcattctatttggatcaagtctctccagtaggtggtggtgtcaggaaaaggcccttattcttcttcaggtgtttacagaagaagcacacaccgtcattgcagaagcctagctttgtgcaacagggttctaaagtaattgtcgatatggagaagccagatgttgctcaagaaagagaagtagttgagcaacttttggtaggccgcaatgcaaatcaagctattatatgtcacaacctcaagaagatctatcctggaagggatggaaaccctgataagctggcggttcgaggattatctcttgccgtaccaaaagggcagtgctttggaatgcttggcccaaatggagctgggaaaacatccttcattagtatgatgattgggcttgttaaacctacatctggtacttcctatgttcatggaatggatatcaatatggatatggatcacatatatacaaacatgggggtgtgcccacagcatgacttactttgggaaccattgactggaaaagaacatctgttcttttatggcaggctgaagaatcttaaaggtgctgtgttggtgaaggctgttgaggatgctctgaagagcgtaaatctgttccatggtggtgttggtgataagcaagtgggaaagtacagcggaggcatgaaaagaaggctcagtgtggcaatatcattgattggagaccccaaagtcgttttcatggatgaaccaagcactgggctagaccccgcatcaagaaataacttgtggaatgttgtgaaggaggccaagcgaaacccgcactcgatggaggaggctgaagtactttgtgatcgacttggcatctttgtcgatggcgatttccaatgtcttggaaatcctaaggagctaaaggcgagatatgggggagcatacatattcacaatgacaacatctccagaccaagaacaagaggttgaacggctagttcatgacttgtctccgagcgcaaataagatctaccacctatctggaactcaaaagttcgagctgccaaagcaagaggtgaaaatagccgaggtatttcgcgcagttgaggatgcgaagaaacggttcaccgtgcatgcctggggcctggttgataccaccttggaggatgtcttcataaaggttgccaagggagcaaaggcatccagtgttaatagttag

SEQ ID NO: 59916 - DNA, 936 bp, Oryza sativa
  Clone ID: PAT_MRT4530_61494C.1
atggcggcgcgggcgcggcggtggaacacgggggcggccgcgggggtgccgtcgtgcgcgtcgaagctggtcccctgcggcggctacctcaacgccaccgcggcgccgccgccggcgtcgtgctgcggcccgctcagggaggccgccgccaacgagacggcgtgcttgtgcgccatcctcaccaacaaggccgcgctccaggcgttcggcgtcgcgccagagcagggcctcctcctcgccaaacgctgcggcgtcaccaccgacgcctccgcctgcgccaagtccgcctcctcctccgccaccgccgccgccgccgccgacgccgccggtgccggcactgcaggtagcactgctgcttcttcagcttccactggaaacgctgcatctacagcgcctaggcggcgggcgtcggcggtgatggcggcgacgcggcggcggcgtgcggtcgcgaggtcgctggccgtcgagctggagcaggaggccgacccggaggaagacgttgcgcggcggccggtgacgcgaacggcgggcggcacggaggaggaggacagcgtggagcggcgaggcggtggctcgtggccaagaggaggcggaggaggccgaggggaggcggaggaaggccacgccggtgcctcctcttcctgctcgagcagcgccctcacggtcgccggctcgtcgacgtcgacgtggggcatgaggtccaccctcgccctcgccatccagctcaggtgccgcgtcgccatcggcatgcccgggtcgtcctccggagcaccacctgccgcctcccgccgacagctcctccccccactgccgccggggcggtcggggaactcgctcgccaagatgcccgcctacgtgctccttgcgttgctcctcgactgcttcggccgtaagccgctcgccatcggcacgatgcttctcagcggcatctcctaa

SEQ ID NO: 59917 - DNA, 199 bp, Oryza sativa
  Clone ID: PAT_MRT4530_61495C.1
gcaccgcctcggctccggctgcctcctcttgtacgtgctgcgggtcagccatgcttgcacggacgtgcatggattttggtcagtggccgccagtgtggtgtcaaacatgcgcgacaaaacccgcgtttggttacaacatgccggcagctctgatacaccagtgcacgcacggacgcacccagtgaactctgaagcttag

SEQ ID NO: 59918 - DNA, 1977 bp, Oryza sativa
  Clone ID: PAT_MRT4530_61497C.1
tcatcctctccaccatacaagtaaaacctccctagcaattttagtgttgttgaaccacttctcatctatgtgcacaacgttgcgcatgtcatcaaaagtgggttgagtatgtactgtttgcatgtccagcatggacacacaaaattgcaggcaaagcttcttatttgcatctttgagaaaaggcttcagtgtgtttgagtgacgaagaaggatgccttctttgaaagctctatgcactgtggattttggaacattcaaagctgaggcaagatctctaatagttgtccgctggttcaatggaattgttgcagcctgtgaccaatctctatcaacccttttccagccacatttcttggacttttttgatgtaatgtcaactttgatacctgctgcttggcatttcttcacttttgtccacaaatcctggacaacccttcttctaacattgaacaaatttgcaacgatggttgtcgcgttcctttctattttgccattgatactttttgcaagtaaagcttcataaatatcttgtcgctgttcatctgataaatattttcttctcctaatatttttcatgtgcatctcatcctgaacgaagagaatgtccacatggtcagcatatacatcattatcctcataatggacttggtcttcttcaatggcaacaggttggttgaggtcaggaatttcttcatcttcctctgttggcactgtgtccatgttcaggtcaaaagggtagtggtcgacctcctcctggacagcaacatcttcttgacccacaacaggggcttctataacaatattgtggagattatggataccccatacccacacggcatctcggagttctatagcaacatcgtcttgatgcacaacagggacttctacatctcctacaacttgtatggtaaattcttgattgaagctgtgaggaagggcctgcccccggtagccgcgtggccttcccccaagggggttcggcccgaggcaggacggcggccgttccccacacgtcccggggtcggtctcttgcccctcatcatcaacaccttctactccaacaaggagatcttagcgccgcggcggcgttcgggcttcgtccggccgtgccccgcgcggccgccgctccagttgggccccggcagcagtagctgtcgtcccatcctgctccatgcccggcccctcgccgccggcatcgcctcctcttcgcgagggcccgccgccgtggcggcgcggtcgcttgggcggctgctgctgctgccgccgccgccgccgatctcgccggaccgggcggggagggggagggcgcgccacgtggcgtgcggcgcggcggccggggacgccaaggcggaggaggaggaaagcggcctcgccaagacgctgcagctcggcgcgctgttcgggctgtggtacctcttcaacatctacttcaacatctacaacaagcaggtcctgaaggttttcccatatccaataaacattacaacagttcaatttgctgttggtactgtcgttgctttgttcatgtggatcactggtatccttaggagaccaaagatttctggtgcacagctctttgccatccttcctctagctgtggtccatactatgggcaatcttttcactaacatgagcctggggaaggttgctgtgtcattcacacataccatcaaagctatggaacctttcttttctgttctcctctctgcaattttccttggcgagttgcctacagtttgggtgatactttcacttcttccgattgttggtggtgtagcattggcatctcttactgaggcttccttcaactgggctgggttttggagtgcaatggcttcaaatgtcaccttccagtcaaggaatgtgctgagcaagaaactcatggttaaaaaggagggtctgaatgtaaaacaggtgcttacaaggtctttacttgctgcactttgtttccacgcgtaccaacaggctggcagctag

SEQ ID NO: 59919 - DNA, 1166 bp, Oryza sativa
  Clone ID: PAT_MRT4530_61498C.1
ttggagcgtcacgggctagttccactcggggctagttcggggcgtgacaccgaccgcaaggaagacgaccccgccgccactccctagcatgttgactcaagccccctccgccacgccgcctatcggcctccacgttgaacccaacctatgggatcggactgggaacaacctcgccttggcaacctgagtcttccctgtaggccggccaacgcctccatcgtgcctaaaagctccccacaaaaaaggggaggagctccccaaacacagtgaacgcctggccaaccacaaggaagacgaccccgccgccaagcccaacggcggcctcgccgaagccaccgctccgccgccacctcgccgccccacaatggccacccgggtcgccatcgtcgctggtcacgcctccagccgactgcccgcctcgctgcctccggcatcaatgccaccgctgtcgtccagccgcccggacgctgcgccacctccagcgccgtcgacgccgacgccgatgccgtgcagcctcaaccgcagttgatgcaccgcagccttcgcgccacgccaccttctgctgcagtagccgccggcccggcatcttcccgtctagatccggcccagggccgcaatcgccaggacgcaccgccgccgccatccacgaaggccgtcgcaccttcggccgccgtcgccaccaccaccgtcggggagtcgtgccactgcccgaccgccgcccgaccggccgcgcggccctcgtgccgtcgctgcggcctccctgtggcccacacgccgccgccgtcgccaccaccccttaaccctaactcttctcctcctccccgtccagatcacgccgccaccactcctcccgtccccgtcgcgcgatcccccgccgccaccaccccaccacgttgccgcccgcctcgccggctagtcagagggcgtcgacggcgccgacgagccccccctcccccggccagccttctccccctccccctcccccctccttcctcctcgagtcgtcggcggcgagatgccccgccaccaacaccggctcatcgccgtcctctagccccgcggctccggtgcctcgccgcccgcccgatccgcggcccaccgctgggctgccgtctcccacggccatccctctaaagctggcaaactccccccctcttccccctccc

SEQ ID NO: 59920 - DNA, 106 bp, Oryza sativa
  Clone ID: PAT_MRT4530_61499C.1
tacgacttcactactagggacactttggcccttcgacgccaatgaacttctggcactgacggccaggcagccacgtgatcatgcaccaccacttgtgacacacgca

SEQ ID NO: 59921 - DNA, 226 bp, Oryza sativa
  Clone ID: PAT_MRT4530_6149C.1
gcggtccggctatggcattgccatcaaacaggttcgtcccttccgccatcggcgctggccgccctacaccgtcggacaccggcggcggccatacggcgctactacgcgacacctgcgagaactcgtggcgcggggagagggccgtgtcccaacaccggcccaccatcgcgccgcaactacatccggcggtgctgcgccgtcagcggccgcccggacggaccgcggc

SEQ ID NO: 59922 - DNA, 208 bp, Oryza sativa
  Clone ID: PAT_MRT4530_614C.1
aactagccagtttaaaaggaatagccggtctattcaactgaatgtagctagaccacggcagtaaggcgactgttcaaactgcgacgtaaagaacctgagagtgctaacgcaagagcagagatcagcttctaccacattgtgactgcacaccaggagcatgttgggattgcacaccagaactttgcacgacgcatcggtgtactggtct

SEQ ID NO: 59923 - DNA, 391 bp, Oryza sativa
  unsure (1)..(391): unsure at all n locations
  Clone ID: PAT_MRT4530_61500C.1
cactcgctctccagtctccacctcctctcgacgctcgacaggaagacgcgccgacgccgccgcccatccgacgccgcgacgccgacgtgccgtgcgtccgtgacgacgccgccgccaatccctcccgccttcgcgtcgtgccgccgcgccgtcggtggtcgcccgtcacccgtcgccggctcgccgcgtcttttgggtggcgccgtcgcgcttcgtatccaatccaccccgcgccggccggccgtgccgccgcccccaagaggccgagacggccaagtnccaacttccaacggccaaagtaatcgtttgaaggtgacaggtcaacattccacgtcatgctcttcttcggccggccgccgcttgtttcccaccgaacccgattccacattga

SEQ ID NO: 59924 - DNA, 5655 bp, Oryza sativa
  Clone ID: PAT_MRT4530_61501C.1
ttagccactaattacgcctgcttccctggctgcgctctcggcgcgctcagcggccctgcgcaggtcgcgcgctcggcgcctccgcgtataggtgcggccccacatgacatctctcccctcctcgagacgcagctcgtcctcgagctggaagtgtgggtacctggccgtgaatgggtcgacgtcttcccaggtggctgatgcaggcgatgaacctttccactggatgaggacttggcgcaccccgcgagccaagcgtgtcttgacggcttgttctggttcgggcaccacagcgccatggcggactggaggcaggggcggcgaagccggcggtggcgcgccgtggaacttcttgaggaggcccacatggaacacgtcgtggaggcgagcttggggcggcaggtcaaggcggacagcaacctcgttgatgagctcgacgacgcggtaaggaccgtagaacttgggcttcagcttgcctgtcaccgctgtgggcagggaggcagtcggccgctgcctgagccgtaggagcgcccaatcgcccacctgataggagacttgacgatgagcttgatcgtagtggcgcttctgaaccacctgcgcctgctcgaggcggtggcggatgtcttcgaggaactcagcgcgttccgccatggtctgcgccaccgcagcgacccgagtctcgcccgcctcgtaggagcggagggaggggggatcccggccgtagacgacgcggaacggcgtgtcgcgcagggacgactggaaggcggtgttgaagacgtactcagcccacggcagccagcggagccagtcgcgcggccggtcacctgtcaagcagcggagatacataacaatcaccctgttcgccgactcagactgcccgtcggactgtgggtgaaaggccgtcgtcatctggagcttggtgccgctgaggcgcatcagctcgcgccaaaagtttgaggtgaacaccgtgtcgcggtcggacacgatcgactgcggcacgccgtgcagccgaacgacctccgcgaagaacgcctgggccacactctccgctgagtacgggtgcgccaggggaatgaagtggcagtatttgctgaaccggtcgacgacggtgaggatgacggacttgcccttgacgcgcggcagggcatcgacgaagtccatggcgatgtcagaccatatgccttgcggcacaggtagcggcagcaaaagcccagcggggtggaggtgctctgacttgtgcctctggcacactgagcacgcgcgcacgaagtcctgcaccacagtcttcatattagggaagtgaaaatcacgccgtagccgatgcagagtgcgctgcacgccttcgtggccctcctcgtggaccgctcgcagggcctccggcaacaggggcgatgccggcgggatgtacagccgcccgctgtacgtgaccagcccgtccgtcagcttccacggtagcgcacgggagccggcgctgatctcctcctggagtgcgacgagggccgggtcagacgactgagccaggcgcagccgctggacgaagtcgaaccgaggggcggacagcaccagaaccgtcccctcgtctgcggtgtcccggcgcgagagggcatccgccaccgcgttggtgtgccccggcttgtactccaccgcgaagtcgaagcccagcagcttgccaacccaatggtgttgagggatggtcgacaagcgctggtccagcaggtacttgaggctgtagtgatcggtcttgacggtgaagcggcgcccccacaagtacggccgccagtggcgaacggcctggacgaggccgatgagctcgcgctcgtacgcggcgagagcctggtgacgcggggcgacaggccggctgaagtacgcgatcgggtggccgtcctggaccagcaccgccccgaagccgtgtgacgatgcgtcgcactcgacgacaaagggcttggagaagtccggcatggcgagcaccggtgccgatgtcaccgcttccttgagggcgtcgaaggcggcagaggcctcgggagaccacgagaaaccgtcctttttgaggagggcggtgaggggggcggcgatggtcccgtagttgtgcacaaacttgcggtagtagccggcgaggcccaggaagccgcgcacagcccgcgcggagcgaggaggcggccagtaccgcacggcctgtagcttggcgggatccatggcgacaccggcggcggagacgacatggccgaggtacgccaccgacggcgccgcgaaagcgcacttggagcgcttgaggaagagctggtgacggcggagttcgtcgaagacggcgcggagatgacgcaggtggtcggcccaggtgcgactgtaaatcaaaatgtcgtcaaagaacacaagcacaaagcggcggaggaacggcctaagcacatcgttcatcaaggcctggaatgtggccggggcgttgcacagcccaaaagccatgaccaggaactcgtagagaccgtcatgggtgcggaacgccgtcttgtggatgtcggccggcctcatgcggacctggtgatagccggagcggaggtccagcttggtgaagtagcaggcgccatggagctcgtccaggagctcgtcgacgacgggaatggggaacgcgtccttgatggtgagcgcgttgagcgccctgtagtcgacgcagaaacgccacgacccgtccggcttcttgacgaggaggaccggggacgagaacgcggagtcgctgcgccgcacgatgccctgctccatcattgcggcgcattgccgctccagctcatccttgtgagcagccgggtaccggtatggccggaccgccaccggtagcgtgcccggtttgagggtgatggcgtggtcgcgggcatgctgcgggggcagaccggtaggctcggcgaagaggccgctgaaggcggacagcagctcctccaggaggccggtcggggacgagaccgcagccacaagaggcggagcgcgcgcggtcacatcggaccagcagaccgcgcgatcctggcgagagaacgacatggtgcgggcggtgaagtcccacacgatcggtcccagggtcaccagccactgagtgcccaggaccaaatcgtatccggcgaggggcatgacgtagaggtcgacgttgaacgcctcgccggcgatcgtgatcggggcctgccgtatgacgccggggcaggcgatccgttccccgttggcgacggtggcggtgaggcgcaggttggcgaggacggaaaggccggtgcgcggcgccgccgactccgcgatgaagttgtgcgtgaagcccgtgtcgaggagggcggtgagcaccactgcacccacggccacccgcacctgcatagtgtcacagatcggcataccagccacggcgcggagggagaagaccggggcgccctggtccgcgtcgctaacggcgggctcctcgtccgcgagctcgatgccgtcgatgaagaagatgcggcggcagacccggttatggcccctggagtagggttcgttgcagttgtagcagaggccgaggcgacgacgttcggcctgttccgccggcgagaggcgcttggcctggttgggcgcaccccgcggaggtggagccgggagcgcggccacgggcggcgcaggcagcgccaggggagccggtgccgcctggagcgccgggcgcggggccgtgggaggcaggggcgcgcgcgccgccgggggaggcagtggtgcgcgctgtgcggcctggagcaggggcggctgggggcgctccaactccatcaactctacctggcgggcgagactcatcgcggcggcgagggactccgggttgtggagacggacggcgtggctgaatacgaatcgagccggtacccctgcagccgtcttcgaactacggcatttcaacatgtggttctcatataacatgagcaatgtgcgaggaataagaatcagcaaacaaagaaatgcaagcgtagaccacataattggttgatatagctgaccccactgacaacccatcacacggaactccttccaagtccacctaacttttgcagttaaaccattcacagaaaatggcctcagttggctataatatatcttcccggtcaaatcctttgcttctatctggagccagtaccgatctggcgattcatctacatatgctttccagttccatgggactgtatacatagcacctcttgctccctcaccactagtcatttccatgtctttttccaatactagatgatggctaccagaaaatgaatcgtatatttttactgagacagctataatcttatattttgagaagactagtgttcttaccatcccaaaatgactggtgctatttgcttggcagttcaaatcatgaggtgtagaaagtctttgcataaatcgagaatccaatggaaaggtgggtactatgatcacatccatagagccaaatctgaaatctatgtcagtatatgagacatggccagaatcaattgctaggatcctcatgctccgggcacttctccaatcacccatttcccactcccagaattctgcaacagattctgttgtcgtggaacagttgttactgcctatggatgttgatgtgccttcatgcatattagtttggtaatattgttttgcagaaagatgatttctgtcagatctatgatgacgcttcaagtttcttccaaagttagtatgaagatgcccacataagtaagctgacaatgcatgctttagaaatacatctctgaggcttccacctgaagttgttgatgatgaaaaggacataggaaaatgtccaaaggtaacctttgttactgcagaagttgaagagtaattatcccactgtgaaagggctgcatctaattcaacaagtaactgatctgttggttgcccgaatacatttgcagggcttcgtagaccaatacttgctgcactgtcgaatccaacaaatagatgcttccaaccactattctgtaatgttatgctttggacattacctgtccgtcctaatcttgcattaatactgtgcttttcgtagaaatcaaacatcccaccaacctcaggaacaccatatgaatcatgattacctcttaaatcataaaatatttccttgttcagcccacttaagccaacaacttcgtcaatcaactcttcatactccaaccattcagacttctcttgtcttgatgataacaaatctttactttttgcatcggtgagatccccggtgatgaggacgagggaggggttgaccatggcgagggcgccgcccacatggcggcggaagtcggccgcgcgttccgggtggaaggcgctgaggtggaggtcggacagctgcaccgcccacaccaccgacctcggctcgccctcgacctccaccacacgacgcaggtcgccacggatgggggcggcgccggcgagcacgccgagcagcgccacagggaggaagaagagggcgaggggatacgcgcggaggcgaggtggcgcccgcgcggccatcgtcggagtccggcgagccctcgccagttgggggagcttgcaggccagaggacggaccactggtggatttgctaggctgctgccatttttttcacatttttttggtgttggcttggctccactagacaattttcaggccatcgacgactaaccacggcagtcctgcagcccggg

SEQ ID NO: 59925 - DNA, 906 bp, Oryza sativa
  Clone ID: PAT_MRT4530_61502C.1
atggagagtgcaaagagatcttgccttgctatctccctcatcctactcctactccttgttccaagtatccatggagcaaggcatgttgctgcagctatcaagggtacaggcgccgacagcgagatggtggtgacggagaggacggccggcggcggcggcggacatggacgcggttacacaagccaccggtcgcacaaccccaacaatcccaacgacggtggctccggcacgccggtggtggacccgcacaatgtcgccaccaggggccaccaccaccgcggcgcggcgacgaggacggccgccggcggcgacccccgcctggcagcctgcatgcttcgtctgggagcgaccttcttcctgctgaaaattttatatgcaataaacaggtctcttaatgcaaatgagaaacttttggagaaaaagaaaaatgccactactattcacgattttgcggatggcgtcaaggatggcggcagcggcggcactcgagacctcccatcgcggatgcgatcgatgacagaaacggcggcggcggctcccgagccctcccacgcggatggcatcaaggatagtggcggcggcggcggctgcaggttccgagccctcccgtcgcggatggggtcgaggatagtgacggcggccggggctcctgagcccttccgcgtggatggcgttgaggacggctgctcccgagcctcctgccacagacggcagtggcagcaacggctcctaagtctcccgccgcagatagggccgacgatagtggcgacggtagtggctcctgaggccttcacggaggtggccgatgacagcagcagtgacggtggtggtcgacgacagtggtggagagagaggaaggggaaagagaagagaggggagggaagtgaagatgaaactaacagctag

SEQ ID NO: 59926 - DNA, 460 bp, Oryza sativa
  Clone ID: PAT_MRT4530_61503C.1
tttttttttttttttttttttttttttttccaaacatgttgtaacaatcaatattcataggttgtcttgagcatcattccagagcaaatgtttccagcaaaatgtaagagtaaaacataaacttttcgcagatcgagagtacatgcacaggtttgtaacgaagcaataaccaacatccaatttccccagtgtatacagattgacaaggcccatacttctgcccccaaacagcctcaatatgatatgcagagttgcagacagcgacggagtgtatagagaatgagagattgagaaggcccgtactgccgccgtaatcaggcagtcctcagtatgatatgcaccccactgtctgtatcaaccacatcaattatctccccaactttcagagcaagaactgccttgtcaaaagccttctgcatcttgcctctttcaaatggacctaggtcacccccacgcttgg

SEQ ID NO: 59927 - DNA, 688 bp, Oryza sativa
  Clone ID: PAT_MRT4530_61504C.1
ctatcctctttgccgcacttcggctgattcagctttacaccttctagcaaagtgtagaccatccaaaagcatctgggtggaggtgcaaagatgggaaaaaacatatctcaaacagccgccggagagggaggccgacgccgacgccgacgccgacgagcggcgcctcccccggaaagttcttcagccgggagtccgcgcgccggtcccacgcgcgcaagcagcggcacctcgacgagctccgcgcgcacgcagggcaggggcgggggtaggggcggaggcggctgggggcggcgggcgccgagtccggggctggcgggcgcagaggagaggccggagacgggcgccaaggccgcggctggcgggcgcggaggcgaggccggcggcgggcgccgaggcctcggatggcgggtgcggagacgaggctggcggtgggcgcggaggcaaggccagctacaggacacccggttcggctcctccgccaccggtcgcccggtagcgcgggcaagctccgcctcaacagtcggacgctcgggtgagctccacctctgccgccggccgtcgagcgcatgtgcttctccacctcaacacctcttggatcttggaggtggagggatcgatgagcgcgctgcgggcggctcaacctctccgagctcggggacaggcagtggctcgtcgtcgtcaccctcat

SEQ ID NO: 59928 - DNA, 582 bp, Oryza sativa
  unsure (1)..(582): unsure at all n locations
  Clone ID: PAT_MRT4530_61505C.1
ccccccccccccnnantttttttttttttttttgggggggggggggggnttnaaaaaaananaaanacncgngnnnncccccnnnttgtttaancccccnccttgggnaaaaaangggggttnccccccggggggggncngttttnggaaaaaaagaantcccccnggggccnggaatttngccangagngggggggaaggggtcccagcnccnccagcgtggngcgccccccgcgcgggcggccgtggcggccggcggctcgtcggaccgccaacgtggaggcgttctgtggaggaggtgaaggcgcgagcggctaaggcgtgacgtcacgcatggaatcataaatcgcagcgtttagttattaagtaagcggcagggacagatttaattaattgctacttcgtacaagtattttgccaccggtttgattttacccaagcgtcgtggtaaataaaaatagtggcgctgtcattttcgtcaaaattttgtttggtttgtgtagctgttttggcaaaataaaatttaacgtatacggacaaaaaaaaaaaaaattaaacgtnananaaaaanaaaaaaanaaa

SEQ ID NO: 59929 - DNA, 213 bp, Oryza sativa
  Clone ID: PAT_MRT4530_61506C.1
cgaccgtaccggtggcgcagccagcccagcagcccgtggaacttttgaacgcatcaataagtcaaaccgtggggcagacacgtgagatgagagggggacagtccaacgtgtgacgtcatcactctcgcacgtcacccggcgatcgtacggctcccccctcctccgatcctcctcccgaccccaaacatcgttgcagtagtattcctgtcccat

SEQ ID NO: 59930 - DNA, 366 bp, Oryza sativa
  Clone ID: PAT_MRT4530_61507C.1
tttatattacatacaaggaggtagcaatgggggagaaatatcatctcttgtacagtattatcgctgtacggaaagccatggatgacatgctgactttcttgttctactggattgacatcccactggacgacatggctactgaagatactattcctgtgtggggtctgccttatatgactacagccgttactaatatgaatgctatattacaaaccaggaacgcacatatcatgccaggctggagactattagagaatgcgatggccatgcaccgtatgcgtgtaacgatgagcggatgactagctactgggcctactgatgactgagtagctactgaaagagatacagagcaggtgaaggatgagc

SEQ ID NO: 59931 - DNA, 346 bp, Oryza sativa
  Clone ID: PAT_MRT4530_61508C.1
atgataccgacgagaccgtagtcgagttgattcgactagatcacccggcgtcttgctcctgtaggcttcgacttcgtaggctgtggtggatatgttggcggtcagattcgatgccttaggttctgcccagggggtcccttttatatcgcggatcaggtgatctccaagtagaactcggagatatcggacccctcacgatatggtaaagacccaatcctatccgagtaggacttctgactctgtttttcttacgtgatggatttccttaacgtataccggagctatccgtatatgtacgggtataccatatccgtactcgtcgtatatccaagggtagagggtattc

SEQ ID NO: 59932 - DNA, 500 bp, Oryza sativa
  Clone ID: PAT_MRT4530_61509C.1
gaaatgtgatgagatcttacaaatgaaagcatcagtaatgtgattcattcagccaacagtgactggttacaagaagtaactaacattgtaatcaattcatgctggtcaaacttaatcaagcctaatcatacagcctggcttaaaacaattggtcaaccccagccctgtactgttttatccgttggttttgcaaactctacctgtaacttgaacatgtacagtgacagatgatcatctctcgtgacagtttggccaattgcaagatacaaacaatatccaacaaactacgcgttcttacgactttgacaatgtagcatccagtttatctgctatcattgcaatccatgcctgcaaggaaaatcaacaggataatggttgcctctctactgtcatactgattctttttttacagtaaccgtcatactgaatttaaaacagtgcaagtgtgcaacctacaaccaacaggcttttcattacattcggtcttttgtgctctcaaa

SEQ ID NO: 59933 - DNA, 116 bp, Oryza sativa
  Clone ID: PAT_MRT4530_6150C.1
atcaatgatccggcttccattttcttgagagaaaaggcgcacaattttacaacaaaacgcagggcattcctactataacaaaggaggaaagcgtataaagcaggggacggatccca

SEQ ID NO: 59934 - DNA, 1186 bp, Oryza sativa
  Clone ID: PAT_MRT4530_61510C.1
ccacgggggagccacgactaaccccaaagccacaagagttgctgcatccttagcgcgcaagcgaaagcgagagggagctcgcgcgcgcgcgagagatcgactgatcgcacacagaaaaaagttgctgcatccttagcgcgcaagcgaaagcgagagggagctcgcgcgcgcgcgaggtgatcgatggatcgaccccaggtagttaccgagaactatgccaatgctgtgacgtgcctctttcatgtgctcttcaaggctggggcgctggtgttctacatcttgttttcgctcttcgtgaagagctttgtcatcatattcgtcatcaccgtgttcctggcggcgctcgacttctgggtggtgaagaatgtgagttgcaggatattggtcgggatggcgtggtggaatgagatcgactaacagggcaactggcgtgtggcaagtttgaggtgcctcgatggggaggctcttgctcgggtgaacaataagggactcgtaggctgttctggtggaactctttaccttgactgctgtttgagtgcctcgatggggaggctcttgactcggatgaccaaaaaggactcgtggctgttctggtggactctttacttgactgctgctgcatggatcattcttgggatattttcacttatcagacttgaagctgactaccttcttgttgttggagtttgcttgactctaagccttgcaaacattgttgggttcaccagatgcaacaaagatgccaagaagaatatccggggttactttgaaggtcatgctcaaaatgcgatcacatcccgcatcacatccaccctgcaatcagcatttggagtaatctaaaatccgagctccaaacagcaaggcccttttcgaatacaaccatgtaaaatctgtcaaaaggattagcgtgcattatcccatttccatacatttttgttgacccaatacacccagtaggttgattttgattggaaagacagagaacaccttgttagtactactgccttccaaaggagtaaaaaagaagtttttagccgagaatatgtcttgagtctgagtgtaccctttagggattttgaccctggaacctgtcttccaatgcagcttcttgttaattccatatattattaatcatttgctgtgctgtatcttaaaaaaaaaaaaaaacctcgtgccgattcctgca

SEQ ID NO: 59935 - DNA, 468 bp, Oryza sativa
  Clone ID: PAT_MRT4530_61511C.1
atggttgttggcgctgctcgtcggccagagcacccaggtggacatctggacgatgaacctcctccacaggacggccttgcgccgaatggcgtgcaccaaggtcatcgacttgacgggagtaccccggagtccctgcacgccgccggtgtcagagttggagatggcgcgttcctgtggtccggcgatgcgagcagcggcgtggtgctccggctcgggtggacggtctgcttgctttgctggaccggcgtcggcgcgccattgtggtctgcgcgctcggcgaggcgttcagcgagtttcgctctgggcgccgccatgtgttgccgccatatgaggtgggtttgtccagttgggttccctcgatttctccatgatttcattcgtcggctggggaacgtgaagtcgcaacacaatttcgccacccgcagttttgcaccccaccatgcatcatgcatggatctatgggagtga

SEQ ID NO: 59936 - DNA, 230 bp, Oryza sativa
  unsure (1)..(230): unsure at all n locations
  Clone ID: PAT_MRT4530_61512C.1
atttattattatttaatccttctataactcttgggcggactcttttaaaaaatcaaaaatatcncacacatacataaattattaccagctttacatatacacaatactattatagcttctcataaccatgattatatattactactaagataaatagactattcatcaaaattacatataatatacaaatcctatgcataaaatgtaaaaccatcaatccctaatcagtt

SEQ ID NO: 59937 - DNA, 297 bp, Oryza sativa
  Clone ID: PAT_MRT4530_61513C.1
atggggccggctggaagatgccgaggaacacaggggcgagggcggtgcgagccgcggtcgcgcgcgttcggcagcgtcgccagcgacagcggtggcctgggcgtcatcaaacccgggagggtgttggaaggaggagcgaacagcgtcggtgatgaccttgatggtgtcgtcgtggatggagtccccagtgagagaggaaggagcggccatggcagcggggagggcaaggtggcgacttttgagctgcaactgggaatagcatctacaagggcagcaggcatccctgactggagctga

SEQ ID NO: 59938 - DNA, 675 bp, Oryza sativa
  Clone ID: PAT_MRT4530_61514C.1
atggaggccgccgctgtgctgaagcaccgtcgtcggcgccagcgagttcttctcgagccatcgttgtcgctgtgctgtggaggtttcctttccgcctccgcccgtatggccgaagcccgccgttcccagctgggaggaaatcctaaccctagagccatgcagcgaagatttggagtggcaagtgaagaaggtagctcctcattacctggtcttattggggcaactcggtatcctataggtcccagtggcctcacccttgttcgttgccctcgttgtggaagtgcagtagtggagtgcagatcttggaggcagggggacgcgttttcttcaaatgcgaggataacgaacaatttgtgccaaattgttgtacattcttcaagtggattaagagctataagaagatggtggaagcaatggagcttaattatcctgatgaggccgttcagacatgagacagcacaaaaatggaaggttcaggttcagatagcacaaaatgacagtttcatgtttggcaacaagcaacaagcaacaaattcatacacatatcagatttggcagcaaagaacaagcaacccattcagattcagacagaggtccaaattcagccatatcacaaaaggacacaggttcaggtccaaattcagacattacaggttcagattcagagaggtttag

SEQ ID NO: 59939 - DNA, 1448 bp, Oryza sativa
  Clone ID: PAT_MRT4530_61515C.1
ggcgctctaaactagtggatccccgggctgcaggcgcagctcgccggggggggggggggggggggggggggagcaacgccgccgtggagtcccctgtccacccacgagggttcctggtgcctacttggtctgaatggctgacctgaccgacatgggctgctgtagttgttttggctttttaaggaagcctagggtgtctgtaagtcgacctcgcgacgctgatggcatcctatctgaagacttgttgaaccataaatctgcggaggatcctgatggaagcttctacaccggggatgatcctgatagaagcttctacgacagggatgatctcgatagaagcttctacaatggcgatgaccctgacagaagcttctatgatggagatgatcctgatcatctttatggaagtgatgatgggcagccaaggaagagatctgaagatattatactgtcaagggctcagaatggctttgcatgtagagaaagcctagttaaggagactaaaaaagtatttcgctcagaggatgaaaatggcagcaagatggtcaaccaatatgtccacctggggaagattggttctggaagctatggcaaagtggtcttataccgaagcatgaaagatggaaagctttacgcagtgaaggttttgaataaatcttacatgatgaaagtacgtgttgtgcgatcagaaactgccatgacagatgttcttcgggaagtatccatcatgaaaatgttggatcatcctaatatagtaaatctcattgaagtgattgatgacccaaatgcagataaattctacatggttcttgagtatgttgaaggaaaaatggtctgtgacaatggtttaggagaagctacctccagaaattacttgcgcgacataatctctggtgttatgtatcttcattctcataatattattcatggtgatatcaaaccagacaatttgttggtcacaagcactggcagtgtgaagataggggatttcagtgttagtcagatttttgaggatgatgatgatctgctttggaggtctccaggtactcctgttttcactgcaccagaatgctgtcaaggttcagcctaccatggtcgggcagctgatacatgggcagttggcgttactctgtattgtatgattactggtcactatccatttctaggagataccttacaggaaacttatgataagattgtcaatgatccggtgcaaatacctgacaacatgaacccccaacttgctgatttgctggaaaggcttctctgcaaagatccagcaaatcgtatcaccctgcaggctgtaggtgagcatccttgggttgctggggaccaggggccagttgttgaatacttctgtagatgtgggtttggccgaagaaagagagatgatcttaagggagaagtacaatagcaaaggcttgttcacagtttatcatccgatggtt

SEQ ID NO: 59940 - DNA, 425 bp, Oryza sativa
  Clone ID: PAT_MRT4530_61516C.1
gggggaaaaaacccccaacccccaaaaaaagggggaaaattgggtaagggaaaacccaaagaaaaaaacgggaagagggctctattaaaaaaaggaccaaacggggggaaaaaaaaacctctttttacccagaaaaaacccgggccccaccctttggggggaaaccacacccgggcacccggggaagcacccctggcccgggaacaaaaaccggggggaaaacggaacccttgcaggagccaatttccctcagggggggaaaaggcaaaaaaaaaccggggcctccccccaaaaaatctgcaacggcaattgacgggaaaggttcccaacggaagcacccccggggggaaaagccaaaggaaggcccatagcctctccccacaggggcccaaaaaaaaaaaaaaaaccctgaaccggggggcccc

SEQ ID NO: 59941 - DNA, 1638 bp, Oryza sativa
  Clone ID: PAT_MRT4530_61517C.1
gcacgagattctctctctctcaagctcaggagagtgagatcgacccaccacgccagcaaccaagaaggggcacgccccggagcacgacccgcagaaagcgaccgggaaatcgcaatggcagccatcctcgcgcgcgccggcgccaccgcggccggcggcctccgttccggcggcgacgtcccccggcgccgcaacatggtcgccatcgtcgcggcgacgacgaccaccggcgccgggccggcggtgccgaaggaggggtcgctggagcggccggcgtggtcgggcgagacgccgctgtcccggctcgtcggagcgctcatcgccttcaagccgctctactccctcatgaagctcgcctcccgggaggtcatcatcaggacggcggagaagtcgaacgtcccgtggagggagatgacgaagcaggtgctggagtccgacgtgtacgaggtgttcgacaggatacgcgacctcaacctcgtctaccctgactattatctgaacccattccatgcgtatgatgaaggcaacctgtcatggctggctgcagctgaagctgaaccggcaacgatgtcgattgctaagagggccatacctgacgctggttcaattgaagaagccaatcaaattgttcgcggaaactggctgaatgcaattgaggagcatcacctgaaatactcggggaattgtcagatcaatgacattctggatattggctgctccgttggagtaagcaccagatacctggctgagaagttcccttcagcgagaactgttggtttagatctttcaccctacttccttgcggttgcggcacataaggaagaaaaattgtcccggcaaaatcctatccgttgggttcatgcaaacggtgaagccacagggttgccctcaaattcattcgacctagtctcccttgcttatgtgtgccacgagtgtccagcacgagcaatcacaggactcgtgaacgaagcatttcggctgctccggccaggagggaccatcgccctgaccgacaattcaccaaaatccaaagtacttcaggaactatcaccagtgctatttactctgatgaagagcactgaaccgtttctggatgaatactacatgctggatttggaggagacgatgaggcaagcaggctttgttaatgttcattctatactgacagatcccaggcataggacagtcactgctaccgtgcctttctgaaacatctgatctcccactgaaattttgttccatctcaattgtgattgtggatgtatactggtaaacaaaagagttgaaaaactgtacccttgttcataaaataggacgacggctgtaccaaccacaataattacattgagtcgtgagctatttgttcgagatatttaattaactatttgccacatttagatgtgccgtttaacaatttgccactagactcagataatgtcaaatacatgaggacccacatgttaaacgccacattttaaaagtggcaaatagtaaatgtcacgatgttcaggggctttcagactaaaaaaaaaaaaaaaaaaaaaaaaaaaaaaaaaaaaaaaaaaaaaaaaaaaaaaaaaaaaaaaaaaaaaaaaaaaaaaaagaaaaaaaaaaaaaaaaaaaaccccgaggggggcc

SEQ ID NO: 59942 - DNA, 1896 bp, Oryza sativa
  Clone ID: PAT_MRT4530_61518C.1
gccgccttgatgttcctcgcctccgccgcgccgaccaccgcgagcaccagcaccgccgccaccgccatcatcttgctcgacttctccatctctagctcgatcgaactcttgtcaggcaactcaaccctgaataagtatggacagtatattcaaaagttaattagctcaattcatttgaattacataggcaaacgggtgggtggtggaacacatccataacataatacttatgaaagaatcaacaattgtagctaccaaaagctatacttcggtcaaacttacggttcatcgcatcgcacgcaagtcagcaactttggtcatacgaactcagatggactttacagattgaaacaatcaaaatgttaaaagaggaaaaacaaagatttccctcatgaggctccgctgtatcctgagctgtagccactgtagccgcctctcttggttgtcctgctctcgacttcctgggtttgttggccctcgctgcttgatgcagagggtatctggccatactcgctggttggtgcgctgtattgactgctcgtatcattattgttggtaaaagccatcttcctgaacttcttcatgtcctcgttgtattggccagaatcatagtcagagctgctgtacgatccaaaatagcggctgtgaccaggccgaacaccttcattaagatcctccaaagacacgtcaccttccaaagcccggacaacctggctcatgcgtgggcgacgacgagcggaatggcgtacacatgcagctgcacaagcaatcattctcgccatctcattgggattgaaatccttgccaagccgaggatctactaactcctcgtagttaccattctcaagtgcttgcatcagtaaaggccttgcccagtcaaccaagctgtcatccatatatgtttgacttgtatcaactggccgacgaccagttattaactcaagaagcataactccataggagaagacatctgatttctcagtgagcttgccagaagatgcgtactctggtgctagatatccaaaagtgcccattactcttgtcgaaacatgagtgttattatcactggtgaacttagcaagtccaaaatcagcaaccttagattcaaacttaaaatcaagaagaatgtttgacgccttaatatcacgatggatgatcttaggatggcagtcttcatgaagataagctaaaccctttgcagctcccaaagcaatctttagtcttgtgggccactccattgttggtcggccttttccgtgcaagtggaattccaatgtgttgttggggacaaactcatagacaagcaatctcttgcccccagaaatgcaataaccacccatggagacgagatgtttgtgatgtactctgctgataatctcaacctccgcctggaattcacgctctacctggccactaagaactttcaattgtttcgcagcaatctcttttccagtaggcagcactcctctatggacatagccaaaaccaccttgtccaaggagattagcatcagagaatccatccgttgccctcaacagctcttcataagtaaatgtgctctttgagaaaccaagggcagcgccaggggatggtggtggtaggatctctccacctgagtaagagccagacccaccgctgctgtttatcatagcagctggaggggtcgatggtggctgtggaggacggtttgcatacgctgccggaggtgatgggtgcatcttcactacatgctcaggcggaggtggtggggcattttgctgccaacttttctggtatgatccaccatatgcatcctccttgtacatccggcgacggcgtcgggtacacgtagtgctgcttcggcgacggcgggcgcctccgcttctttcggaggcatcagaggcacggacgcgtggg

SEQ ID NO: 59943 - DNA, 405 bp, Oryza sativa
  Clone ID: PAT_MRT4530_61519C.1
atggcggcagtgaggtggctcgtgcaggcagtggtggctctggtggcggtgctcgggagggcgggggtgctcggaagagaggatatgtctgcaaggatgattggaacaagcctttggttgcggatgtgtcatggccaattttgtcaattatgccgccactttggcactttgctacttctttttggatttatttacattgaaaaagctctaatgggaccttacataaagtataggctgaaaaaatcaattgagaacacacaactacagatgatatgggttaattggatccatggcaatgcaaatatgccaattcaaaaaaatgccagtgctatgcgcatatcggctacgtgctactggaatttagagaaattgaaaccaattgacgaattcccagatgcatcctaa

SEQ ID NO: 59944 - DNA, 285 bp, Oryza sativa
  Clone ID: PAT_MRT4530_6151C.1
atgggagagggaggcgtgaggcagggccgcgaggggaagaagcttggcgacagagtccatctcggtgtgatgggcgagttggagctagcgacgataaagaatgacactaacaggaggtcaccgcagaaagagatggggcccatcgacgactgtgaccccgacgcctcctacccttcttcgactaagcgccgatggcaacatcagcctagcaacagttgtgtcacgcgcgacagagctagcgccctgtccccatccctccccgcagtcgtcaacgtaaaagaccgg

SEQ ID NO: 59945 - DNA, 2229 bp, Oryza sativa
  Clone ID: PAT_MRT4530_61520C.1
atgccccgcgtttgcgccgcccctcgggcgccgccgccgccgtgcccgtgccatgtcggagtagggccgcttcggccgaggtggcgcgcctcccggcacggccctctccgggcggctggccaggagcagctcctcaccgccctgcgcgagcagccggaccccgacgcggcgctccggatgctcaacgcggcgctggcgcgggacgacttcgcgcccggccccgaggtctacgaggagatcatccgcaagctcggcgcggtcggggccctcgacctcatgaaggtgctcgtcgcggagatgcggcgggaggggcaccaggtgaaattgggcgtagtccactccttcttggacagctacgaggggcagcagctgttcgacgatgccgtcgacctgattctgaatcaactccaaccattgtttggcattcaggcagacaccgtggtgtacaatcaccttctcaatgttcttgtggaggggagcaaaatgaaactccttgaatcagtgtactcggagatgggtgctaggggaatcaagcctgatgttgtcacattcaacacactgatgaaggcgttgtgccgagcacatcaggtcaggactgcagttctcatgctcgaggaaatgtctagcagaggcgtggcgcctgacgagacgacgtttaccaccctgatgcaaggatttgtcgaggaggggagcatcgaggctgcactgagggtcaaagccaggatgttggaaatggggtgctcggcgacgaaggtgacggttaatgttttgattaatgggtactgcaagctagggagggtggaggatgctcttgggtatatacagcaggagattgccgatgggtttgagcctgaccagatcacatataacacttttgttaatggtctctgccaaaatgatcatgtcggccatgccctcaaagtcatggatgtgatggttcaggagggccatgatcctgatgttttcacctacaatatcgttgtgaattgcctttgtaaaaatggacagcttgaagaggcaaaaggaattctgaatcagatggtggatcggggttgtttgcctgacattaccacattcaacactctcattgctgccttatgcacggggaatcgacttgaggaagccttggaccttgcacgtcaggttacagtgaagggagtctctccagatgtttatactttcaatattctgattaacgcgctctgcaaagtaggcgatcctcatcttgcacttcgattgtttgaagagatgaagaacagtggatgcaccccggatgaagtaacatacaatactttgattgacaatctttgctcacttgggaagcttggtaaagcattggatttgttaaaagatatggagtccactggttgtcctcgaagtacaattacatataacactataattgacgggttatgcaagaaaatgagaatagaagaagcagaagaagtttttgatcaaatggatctgcaaggcatttcgaggaatgcaatcacattcaatactctcatcgatggtttgtgcaaggacaaaaagattgatgatgcttttgagcttattaatcaaatgataagtgaagggttgcaacctaacaatatcacttacaattctattctaactcattattgcaagcaaggtgacataaaaaaggctgcggatattttagaaactatgactgcaaatggatttgaagtggatgttgttacgtacggtactctgattaacggtctatgcaaggctggtaggacacaggttgctttgaaggtactcagaggtatgcggataaaagggatgaggcctactccaaaagcttacaatcctgtgctccagtctctcttcagacggaataatatcagagatgccctgagtcttttcagggagatggcagaggttggtgagcctcctgatgctttgacatataagattgtttttcgtgggctctgtcgtggtggagggcctattaaagaagcttttgatttcatgttggagatggttgataaggggttcataccagagttctcatccttccgtatgctagctgaaggtctattaaacctgggtatggatgattacttcattagagccattgaaataatcatggaaaaggtcgacctcagagagtctgatgtttctgcaataaggggatatctcaagatccgcaaattttatgatgcattagcaacctttggccgtttcctggagatcaacaaccctcaatggagttaccgatga

SEQ ID NO: 59946 - DNA, 1521 bp, Oryza sativa
  Clone ID: PAT_MRT4530_61521C.1
atggcggcgagtgtcgtgtccgacaagtccagcggcggagcgagcttgctccggccgtcgcgggtcttgttcctcgccgtgctctcgacggcgttctggtcggtgatattctacgcgcaccactccgccgtgcaaggtaacgcgaccatggcgtccgtcttgctccggccgtcgtcgttctcccgcccgctgctgacgtcgttccggctcatcggcggcgggcttgaccggtgcgccggccggcgggtgtacatgtacgagctcccgccgcggttcaacgccgagctcgtccgcgactgcaggctgtactcgaggtccatggacgtgtgcaagctcgtcgtgaacgacgggttcggcccggcgctccccggcggaggcgcgctgccggagcgggacgtgtacgacaccgaccagtacatgctggcgctgatctaccacgcgcggatgcggcggtacgagtgcctcaccggcgacgcggccgccgccgacgcggtgttcgtcccgttctacgccgggttcgacgcggcgatgaacctgatgaagagcgacctcgcggcgcgcgacgcgctgccgcggcagctcgccgagtggctggtgcggcggccggagtggcgcgccatgggcgggcgcgaccacttcatggtcgccgcgcgccccgtctgggacttctaccgcggcggcgacgacgggtggggcaacgcgctgctcacctacccggcgatccgcaacacgacggtgctcaccgtcgaggccaacccgtggaggggcatcgactttggcgtgccgttcccgtcccacttccacccgacctccgacgccgacgtgctccggtggcaggaccggatgcggcggcgcggccgccggtggctctgggcgttcgccggcgcgccgcggcccgggagcaccaagacggtgcgcgcccagatcatcgagcagtgcaccgcgtcgccgtcctgcacccacttcgggagctcgccggggcactacaactcgccggggcggatcatggagctcctcgagtccgccgcgttctgcgtccagccgcgcggcgactcctacacccgcaagtcgacgttcgactccatgctcgccggctgcatcccggtgttcctccacccggcgtcggcgtacacccagtacacgtggcacctgccgagggactaccggagctactcggtgttcgtcccccacaccgacgtcgtcgccggcggccggaacgcgagcatcgaggcggcgctgaggaggatcccggcggcgacggtggcgaggatgcgggaggaggtgatccggctgatcccgaggatcacgtacagggaccccgcggcgacgctggtgacgttccgggacgcgttcgacgtcgccgtcgacgccgtgctcgaccgcgtggcgaggcggcggcgcgccgccgccgaggggagggagtacgtggacgtgttcgacgggcacgacagctggaagcacaacctgctcgacgacggacagacgcagatcggcccgcacgagtttgatccatacctgtag

SEQ ID NO: 59947 - DNA, 413 bp, Oryza sativa
  Clone ID: PAT_MRT4530_61522C.1
ggaaattaaatctcccccaaattccatttgggttaaaaccatcggatctacaatgggtaaaacccagagaccacaccttagttttcttcactactgggattacccgggctttcccggggaatatatccaaacccccctgcctgaggggtggggggataatcttaaagggggggataagagggggcccatccacatccaaccttattaatagatggctaatcaaggctttacccataatacagcacaggtccaaacacagacagacggacggacagacgacggtttatatgccctaagattaaggggcttacagcaagttaggcttgataagagattttttgagcatgaggggtggggtacccgtatggatgtatgtatgttgctgggcccaccacaattataccatacataca

SEQ ID NO: 59948 - DNA, 316 bp, Oryza sativa
  Clone ID: PAT_MRT4530_61523C.1
tttttattacaccattcttttggggttttattttttctatgatgtttacacggtctttattctttaattctttatgtgactatcctgtttttttgcacggggggaaaacaacaaaaactaggggcataggaataactataatccgatggcgaaaacaaaacagggggataaaagaaaggtgtatcagaatgcataggtgttagcttcaggggattaaccttgaggtacatatcctaagacagcaagtcacggacccccgaggaagacagggccccaaaaagggagctagccttgagggcgtcacaccccattaacg

SEQ ID NO: 59949 - DNA, 206 bp, Oryza sativa
  unsure (1)..(206): unsure at all n locations
  Clone ID: PAT_MRT4530_61524C.1
tttttnntttttttttttaaannanagcggggagggccannaccaacgaacgaaaaaatataaccctcgaactttatttgcatgcatacatatgcatgatgaattgcttgggagaattacattatcaattatactagctatatatcgcgtagttaattataggataggcgggatatatataaaagaagagatgtatttaggggggt

SEQ ID NO: 59950 - DNA, 293 bp, Oryza sativa
  Clone ID: PAT_MRT4530_61525C.1
cccaagaaatgttcaacagataaaaaggcagtgtggaactagtatggattaatttatttcccgaatcctcagcctagttaatggcttaattcaattgtccattagattggattagtattttattaaaatgcagcttccgtgtaataggttgggttagtggtttattgaaatgcagcttccgtgtaataggttgggttagtggtttattgaaatgcagcttccgtgtaaggccgatttgtgttctgtagtcatggacatcatgtctgaactttaaacagcttctgtttgctgca

SEQ ID NO: 59951 - DNA, 1778 bp, Oryza sativa
  Clone ID: PAT_MRT4530_61526C.1
cggcgcccgggaggagaaggactccattggcgacaagctaagcttagctatagctatagctagctcagcttagcccctgccttccaaggagcgaagaaacgaggcatacatacacccatcccctcctcctcgacggctagctgctacctcgtctgatcgatcgatcgatctcctcgtcggccatggcgcagcagcagaagaagaacgcgcacgtgccgaaattcggcaactgggacaatggcggcaacgtgccgtacaccgtctacttcgagaacgcgcgcaagggcaaggtcgccgccgccggcaagatgttcaaccccaacgaccccgtcgacaacccggaggccttctcctcctccatcgccgcgccatcgccgagccgagcccctcctcctccgccgtcccaccacgagcgcgccccgagcgacgcgccgccgccgccgccgccggccccctacgccggcggctcgccgtaccaccgccacgccgctggtggtggcgagacgccgccggcaagaagaggaggcgggcggacaagcggcggcggcgggtcgtcgtacagcgtcgagcactcgccgtcgccgtcgccgctgcacccctactccgacagcgggagcggcagctacggcggcggcctcgtcgccaactcccgcgccaagggcggcggcggcggcgccccgcgcggcaacgagacaccgacgagggggtcggcggtgccgcggttcggcgactgggactcgaacccggcgtcggcggacggctacacgcacatcttcaacaaggtgagggaggagaagcagaccggccaggccgccgggaagccggcggcggggctcggcaagggcggcgccgccgccgccggccacggcaacgccgccaagcgataccacgacgacgacttcgcctccacggttattccaaatatcataagaatcatgagtactgcaagtactgcacgctctaggaagcgagcccatgatggatccagacaaaaagttgatgttataaacttggaaacaactgctccagtggtgaacactgggagccagcatgaggctctgatccttaggggtacacggacctcacccatcgatgttgaagctctagatgataaaaggaggagcagaaaaattatgaggcgctctgtggctgtagtggatccggagaaggatactggtccgggaggttatggcgttgctggagctatattttcccggggcagaaattttcagggtgctgtacatgttatatgcctttctccagatagggaagaagggaccagcaagccgaaaaatgtggcccaaaccagtacgacgcatgccaaggttgctccaaaggaaccaacctttacctgtcctgtgtgtctgaacaaactggacaagccatccacgacaaattgcggtcatatcttctgcgagaaatgcatccaggcatggctcaaggctcagaagaaatgccctacttgtaggaagagtctagggatcaagagcttccatcgtgtttacctccctactcctgctgattatgattaattagtttctgctggcctgaacctcactagtccactcctgcacattcatcttgtgtgcaaaagaacttgagcagtagttagagttagacatttagtctttgtttgttagccctgtaggctaacaatgtggtaagaagtgcacaacacgattcttagctcattgactacatctgatctgatttgtatgtaatggcgtgcatttttctcctgtgggttctgaaaaagggaaaatatctagttttccaag

SEQ ID NO: 59952 - DNA, 398 bp, Oryza sativa
  Clone ID: PAT_MRT4530_61527C.1
ggaaacaaagatatgggcagggcatacatatgaagcatctacatatgccgcagccaacaacagatattgatcgcagataccactctgacatcaagtcagagtgagggcacgggaaacagaaacaaaggctgagacacagacggtaaaacaaaaggacgatgaacagactgcgaacacactaaacaaggtgggagacatcatcggatgagacatgaacaatgaaacagggctgtatatgacgatgactgatcaatagccaccagacttctcgcagcccgggcgctaggctgcgatgaaactgataagctgcacctgactgacattgtcgaagccgatgataccgacgaatgcatcaggctacgccttcttggcctgctagagctccttgagcacctggg

SEQ ID NO: 59953 - DNA, 181 bp, Oryza sativa
  Clone ID: PAT_MRT4530_61528C.1
ttgattaatccccaaaatacggggcaaaaatagaacaagaacatgaattacttgaagaactcgcgctccgtcctctccaggctcctccgccacaagcccaccggctgcccgcggctgccaccgtcgccgccgttgccgcagggtgcccccgctggagtctccttcacctccccgagtctcc

SEQ ID NO: 59954 - DNA, 304 bp, Oryza sativa
  Clone ID: PAT_MRT4530_61529C.1
aaacatggtcttaccgccgctaatcgtcgacggcggtccacgagagcacagctggtcgacgattagcggcggtaggaccatggtttgtgtgtgtttttgtttgcccatcgagatgataggtttcataaaacgctctctcccccaccctgctgctgcctctggtttggttgccaacctcatcccccatcggtttttttcctcctcttgtttctaatttctaggagctgtgccttttggaatcatggaatgtcaagtatttgccaataatcaatccgtttgatttctgccaaaaaaaaaaaaaaaa

SEQ ID NO: 59955 - DNA, 171 bp, Oryza sativa
  Clone ID: PAT_MRT4530_6152C.1
atggcctggcaggcagtcaacgacaacgcggtgagaaggaccgatggcagtgaggatggcgaggagcacgacaaagaagatgcggccaagttcatggagctcatccatgaagtcgtgctggcactgacattgaagtcagccaggcctccaaccaatctaatttttgagtaa

SEQ ID NO: 59956 - DNA, 261 bp, Oryza sativa
  Clone ID: PAT_MRT4530_61530C.1
atgcgtatagggacgatgagagggaaattaaagctagcgacaggggctgggggctatggcgaaatcgccgaaatatatataccaaatgtacttgtgatccaccaagttgggcgatcatgggacaccaaggaggcaattgtattcacgggaagggatctgcctggctataaaaactggacaccttccgccccacttgatcaaggaaattggccggatgcaaaagtagctatcccgctgaaaaagatgggaaaaagggtttag

SEQ ID NO: 59957 - DNA, 688 bp, Oryza sativa
  unsure (1)..(688): unsure at all n locations
  Clone ID: PAT_MRT4530_61531C.1
tcaggttcattagaagatatatcacttagggtggtgtcataatatgacaatgtgcaagaaaagaaagntggaccaaatcactaaaaccatcatcaatatgaatagaacctagatggtcatattttctcaaagctctggaagatcgttttttccatagctcttgacaagaattagaaataattaacttaatatggtgattttaaagctcccatagagaaagtagccttccagctatggctaaaatttgggaccagtgatgctagcctatatgaaaagcaaaacatcacattacaagagaagctgctgttaattattaagaaataaacattcctgtggttcatttgaagggaaatctgtagttgtcagcagaggatacgtgtggccacatctgaggcttggaattctcaagttcctatgtgcaatgagaaactgagtgccatggcaatgcagatgaagaaaagatgctgttgaactgtttcctttccatctggtgttttacatcagctatgctcacagttactcttaaaagaaaatagaatgaaagaaaaaaaatacattcacagtcttgtgatgtttaggctgaatactgtaagccaaattattgcttaggaataaatcaaatattgactaaaacagaatccaaacattaaaaagggtatatttgaggggaacgtctcactacgatgag

SEQ ID NO: 59958 - DNA, 264 bp, Oryza sativa
  Clone ID: PAT_MRT4530_61532C.1
atggcggcgtcgtggagcgagagtgaaaacgcgaggttcgagcaggcgctggcgacgtacgacagcgacaatcccaaccggtgggagctcatcgccacggcggtcggcggcggcaagacggccgacgacgtcaggcgccactacgaccacctccaacacgacgtcaccaccatcgacgacgaccactcccacgccgccggcgaagccctccccaacggcaacaacaacaataatactaacaaaggaaaccgaaaccaggcatga

SEQ ID NO: 59959 - DNA, 611 bp, Oryza sativa
  Clone ID: PAT_MRT4530_61533C.1
gcacgaggccctctttttttttttttttttttttttttttttttctttttaaatttcctatttggcgacaaacaaatttcttttttctttcagcaaaaaatcaattatacaagattgaatttccttcttctttgtactctcccattgtcgtccattcgcagtacggcatagtacagattatggaagctccaagccaaacagattcctttcttggaggaggcatgatcaagctgatctttgtgtcaagaggtgcaaggttgatcaattcttttttgagccttttttcgaaaccattcatcaaacttgtccctccgtgaatcaaaatttcgtcatagaagcttcttcttgtatcgatgggactgttttgaatggattgatcaacaagttcttgcactccgcacatcttttctccccaacagaactgctttcccatcaatgaaggattgaacagcacctccccacatctgaactgttcgtctctcaattgaatcagctctccatcaggtagctcgaattgttgatcatgaaggttagtgtgagagactttaacaagctcttcttcataatccaagcagatgtagcccaacttctctttgatctctctgatgatg

SEQ ID NO: 59960 - DNA, 414 bp, Oryza sativa
  Clone ID: PAT_MRT4530_61534C.1
atggacacccacgcaaaaacgccgctcgccacgaggccgccgggcacgcacagaacccgcgtctcgcgcgcgaatactgttcccacacgtgacggtggcgagagtcccaacggtccatgccccgcgcagccgcaggcgccgctcgcgccacccacatccaccacgggtggacgcgcgccgcgctacacggggttcaggggaatcgcgcgcgagagtgacggggacctttgtcttaaaccctcctggtccctggactacgtgtgccgttctctgaacctagctttgcctgaacaagggccgggcgtacagctcaagtacccaaccacggacaggatatggtatgtcttcaagtccgagctgtctggtgttaaacaggatcgtaacaaggagatcctgtgcatccaacaggaataa

SEQ ID NO: 59961 - DNA, 179 bp, Oryza sativa
  Clone ID: PAT_MRT4530_61535C.1
ggcgatcaaaagaaccagtgagagaagcagttgcagatgacttagacggtgcacttgatgagtcaggagaacctccaccctttacaatggaaagcttcctctggtatgaattgccatgcatctacaagagaaacaagagtgagtacaacacattgaagatgaaaacaaggagcattatg

SEQ ID NO: 59962 - DNA, 195 bp, Oryza sativa
  Clone ID: PAT_MRT4530_61536C.1
cccactcgtccgcccacgcttccgcccacgcgtccggccggcatcacgtgccttaatggcctcgctcgtacccagaccggcagtccacagagaccgcgaagttaaagatcgacctgaccatgataagctacggccaaaagtcatacaacaaaaagtaccttttttttttttagaggggggggggaaacaaaaatt

SEQ ID NO: 59963 - DNA, 405 bp, Oryza sativa
  Clone ID: PAT_MRT4530_61537C.1
atgtcctttccgatgaaatacccgggcttacctttaatgctgggtaaattgagaaaagcagacctacaaccactattcgacaaatcggggaaggggggatggaatcaccggcaggaaatgcaagatgaactgagcaagaacttgctcgccaacttcaaatggaggtttagggttcctgcaactggagagattcacaagagccctacgtttcatatggcttcggcaagaatggaaatcagcgggaaagcgtggatcggtttggaaaccctatgcgatgaaatagataaactcctgttcatggctgccatgcgagttaagattggggatagtgctacaaccaaaggagttggaaccaaagttctatgcaatatccaggaaaaaaagagagtccttgtgatacactga

SEQ ID NO: 59964 - DNA, 1235 bp, Oryza sativa
  Clone ID: PAT_MRT4530_61538C.1
catcccttccgcagcttagcttcttagagggactatgcccctttaggccaccggaagtttgagccaataacaggtctgtgatgcccttagatgttctgggccgcacgcgcgctacactgatgtattcaacgagtatatagccttggccgacaggcccgggtaatcttgggaaatttcatcgtgatggggatagatcattgcaattgttggtcttcaacgaggaatgcctagtaagcgcgagtcatcagctcgcgttgactacgtccctgccctttgtacacaccgcccgtcgctcctaccgattgaatggtccggtgaagtgttcggatcgcggcgacgggggcggttcgccgcccccgacgtcgcgagaagtccattgaaccttatcatttagaggaaggagaagtcgtaacaaggtttccgtaggtgaacctgcggaaggatcattgtcgtgaccctgaccaaaacagaccgcgaacgcgtcacccctgcccgccgagcgctcgcgcgcgaggcaaccgaggcccccgggccgcaacagaacccacggcgccgacggcgtcaaggaacacagcgatacgccccgcgccggcccggtcggccctggccgtccggcggcgcggcgcgataccacgagttaaatccacacgactctcggcaacggatatctcggctctcgcatcgatgaagaacgtagcgaaatgcgatacctggtgtgaattgcagaatcccgtgaaccatcgagtctttgaacgcaagttgcgcccgaggccatccggccgagggcacgcctgcctgggcgtcacgccaaaagacgctccgcgcgccccccctatccgggagggcgcggggacgcggtgtctggccccccgcgcctcgcggcgcggtgggccgaagctcgggctgccggcgaagcgtgccgggcacagcgcatggtggacagctcacgctggctctaggccgcagtgcaccccggcgcgcggccggcgcggtggcccctcaggacccaaacgcaccgagagcgaacgcctcggaccgcgaccccaggtcaggcgggactacccgctgagtttaagcatataaataagcggaggagaagaaacttacgaggattcccctagtaacggcgagcgaaccgggagatgcccagcttgagaatcggcgccgctctagaggatccaagcttacgtacgcgtgcatgcgacgtcatagctcttctatagtgtcacctaatc

SEQ ID NO: 59965 - DNA, 361 bp, Oryza sativa
  Clone ID: PAT_MRT4530_61539C.1
gctttatctagcgattgatcgatcgatcggttgatgatgcagtagctgctactgttcttctgttcgatccataaaccactatctttttttttgtgttcttggaatcaagaattcaagatcaatggtggtcgatggcggcgccgccgtggcgtctcggccgagcacgtcgcgccgccgcgccgccgtcacggcgaagcccagggcagtcgtcgcctcgcgctacctcctcccgtcctccaggcccgcttcgccggcggcggcgacacggccggctgccacgaggcggccggcgacgatggcggctgacgccgtggcgagagccgggtcggtcgtgtttcaggacgcgagctactgcttggat

SEQ ID NO: 59966 - DNA, 774 bp, Oryza sativa
  Clone ID: PAT_MRT4530_6153C.1
attatgatcggtctgctcttgtacgctacttctccgctgcttctgcatcctttcccacaaagggaggtgctgctgctggtgttgagaaaagaattggtggcgccagattccctcagtgcaagcagcctgggaaagagcttgagaccttcaaggtgtcactaggaggactaaatggaagatatgcttgtagaagagcacctaacaattgtatcccaaccactattaccggtctcaacggttcattgtcatggtgtcttcagcaagatctttctcaagcagtgcaggggaacattgcaaggtggctgaagaaggaaggagataaggtctcacctggtgaagttctctgtgaggtggagacggataaagccactgtagagatggagtgcatggaagagggctatctcgctaagatcattcatggagatggtgccaaagagatcaaagttggtgagatcattgctgtaactgtggaagaagagggtgaccttgagaagtttaaggattataaaccttcaacttcagctgcacctgcagccccttctgaaccgaaggctcagcctgagcctgcagagccaaaggtgaaggagacagagccttccaggactcctgagccgaaagccccaaagactgaagaagcttctcaaccagggggtcgaatattctccagccctcttgcaagaaaattggcagaagataacaatgttccactgtcaagcgtaatgggaactggtcctgatgggcgaattttgaaggcggacattgaagattacttgg

SEQ ID NO: 59967 - DNA, 483 bp, Oryza sativa
  Clone ID: PAT_MRT4530_61540C.1
atgcagcaagggcgtttgtacgtgtcaaacactggtctcgcgctcgcatcatcgtcatcatcagaagtccagacggggttggacaggcacagagatgcagcggtggccaggcagtccggccgcgtggagttgatgatgagttgcctcgatcggttcgcaagcatcgggtgtccgctgcatactggatttccgcggggatccgatggcaacagcggcggggcgccgggcggcgtggatggaatttatgggggtggggctgggaggcatcatcagtggcggtgcatcgggggacaaaagggaggaatttggagctgcatgccgcgctgcgcccactgcacgcacacgggccagagctatagcaacgaccactggtttttttttttacacccatccttctggtgcttcccgctgttagctcgctgctgctccgccatgatcatcgcgagcttggccgactcctctcgctcatcatcaaggccgtga

SEQ ID NO: 59968 - DNA, 180 bp, Oryza sativa
  unsure (1)..(180): unsure at all n locations
  Clone ID: PAT_MRT4530_61541C.1
acgccttggggtgtactgcnccccacaagtgtgcaaaagatgttgcccataaatggatggagntgcaacagaacacccacaaggcgcagtatgggttttgagttgagggaatccaggacaaaaatgatttggagacgcaacaatgcaaaatggangcaagcttnacaccggagatgcccc

SEQ ID NO: 59969 - DNA, 1335 bp, Oryza sativa
  Clone ID: PAT_MRT4530_61542C.1
atggcgcgcctggagccagagccgctgccgctgccgctgccgccgtctctggagatggcatgccgggagccagagccgctgcgaacgttaacatcaacagaggcagttctgcctcacaatccagcggagggccattcttgggtcgtaattctattgcgttcttgtggtgtagcgattgcacggcgtcctggacttgttcggcgtcctggacttgttctggttggtagccacatcgcaaacgtcgcactcgatcaaagcgagagttatcccccttaccagaagatcgggccacgagagagagcgtcatcaactacgtgtgcgagatgcttggaatcaatgggagatacacaacaacttttgaagaatttgcctttgttctttgcggtgtttcgttttcacatccctggaaattttcagagcaaagacaacgtttgttgcaagaggaaagaggaaggcaataacagtgaacagatgagcaccactcctgcccctccgggcgaaaccagtagacagattccatctagagatgatgccaaacatgagaaggaagcggccaactcctcatcttcctcatcatcagaggaaatagacgaggatgatttctttcagatagaaggcccaatactcagtacccagtactccctgtctcctccacctgcagaaggtggcaaccgagacgcaaagcaggcagatgaaccccatgacccaaagaggatcccgtccgctgtctttgcgagatccaagtcatcaacaccaactgactggagcatcacctccaatgaatctctctttagcatcaatgtcgggaatgcgagcttctccaaggatcacatgtttttgtatggcaagtcaggagagctgggtgctaatgatccattgccaccattgccaaagcagagcccaagctccagccctctaaaaggtgaggtggccacaccagagaagcctagtacttccaaggagaagggggatgggcgtggactcacagaccggaatggggacgacaatacagactatacccatagctcgtcacaccgatctgatggaagcacaacaagttttgcatttccaatattgacagggtcagcgaaaacaagtgggtccttgaaagatagccatccggagttagctcggcaaaccacggcgcagctgacgcatcccagcgagatgcgtgatgagaatgagaataaggaaacaccatttccagcagttgtaatggaggcaccaaaagtcgaagcaaccccagcagcagcagcaacagcacctgcaccaccagcaccaccggccacaacaaaatggtttccttgctgttcatgctgccctttctgttgctaa

SEQ ID NO: 59970 - DNA, 207 bp, Oryza sativa
  Clone ID: PAT_MRT4530_61543C.1
atgatcaggatcctgccggtcagacctggtgtcctcgatgcatatgtgtctcgtccaggcacgcggttgacgcgcaccatcggtggtgccggggctctcaacgcacgccggaaaagacggagccatctcccgaaacgagcgtcgcgccagggcacatacaacgggtccctcaactatcaaaaccggtgcaaagcaggtccctcagcg

SEQ ID NO: 59971 - DNA, 1431 bp, Oryza sativa
  unsure (1)..(1431): unsure at all n locations
  Clone ID: PAT_MRT4530_61544C.1
ccgcgtcgtaagcttggcttctctanagcggccgccctggggtcggggcgtttttttttttttttttttttttttttttttttttttttttttttttttgtacgcgcgcagcatgcattttatttaggcacggtccacaattcatacatgtatagtggatacgtctcgtcggcagacactcacggtatagtagggtagtcgtgtgtacagtgatatagtcatatctgcgcgtcttttcatgccgttcgttgacttcgttcacagggtcagggtcgggtaggcgatatcgagtgtgacgccacacaggccggggccaccgacgtcgcggagaatccggatgtagccgcgctcgccccatgactggccccatgagttcttgatggtccagtacttggcgccggaagacgcgtcggtgccgtacccgacgacggtgacggcgtgcgctaggcgcgtgccgcacgggcccgtgtaaacgccacccttgtagaactgcatcccgctaccgacctcgatggccacagccacgggctgccgagcgacggcggcctgcaacgccgcctcgttccgcggcggcaccttcccgaagccggtgatcttggcggcatggtgcgcggacttggcgcggttgcaggggccccgccgcgccgtgtacgggtagtccgcctccgtggtgaggccaccgttctcgacaacccatttgtacgcccgcccgtacgaccctaagttgcagccgccgtcatagctgtcgcagtccaccagctgctgctccgacagagagaccagcttccccgtcttgatcatgttcaggctctcgatggtcgccgctgtcacgaacgcccagcagctactgcatgttgacgtttgggacttgggaggcacaacggcgccttgggccctccagtcgacactggccggaacgtccacgcggtaggagaagctggcgtcgacgtctccggcacccgtcgtgataacggagtcgtccacggggccatcgccggcgtagtacccggtgtacgtggccaggaactcctcctcggtgaggtctgcgaactcgttctcggcgagctggtaagtgaggtcgccgcgcaggttgacggcgtcgatgaactccgcgttgcggcggtacacatcgaaccgctgcagcgcctcttctgcgctcgggtacgaccggttgtgagctccctgccaagcgcggaacctgtccatcatcaccatgtcgccgacgtccaagcaactgcccgccgtcgcacgcgccgggagcatggaggtggcgagaagggcaccgcacgacgcgagcagggccagcgtgagtaccggtggcgaggcgcacgccatgaatggtgccatggcatgcacctaacttgtgggtaagtacgcgttccaccgttcaatattccaccggacgcgtgggtcgacccgggaattccggac

SEQ ID NO: 59972 - DNA, 741 bp, Oryza sativa
  Clone ID: PAT_MRT4530_61545C.1
atgtcgccgccgcgtcaccgtggccgcctcttcgtcatcgttgcggcgagggaggcggaggtgtccaccgatctggccggcgagattggtcgcgccgccgccatggaggacgtgctggagggggatcgggaggagcggcgttgggaaggagcctgcggtaccgggaggtaccaaaagtttggatggacggcgggagtccgacggccggcgacgggcgatgaggcggcggcggcggctgcgacgagcgacgaggccgcccgctccgcctccacatcgcctccgcctactcggagcgggaggcggccgcggccgacgacgacctcgccgtgggacgcgctcatcgcctacgcccgcgccctctccctcatcgagcccccagatccgacgacgacgacaaccgccgcgttcaactcctcgcccccccacccccgccgccgcccagctcctccccggcggctgccggccgcgcccatctccggttcgattgatcgaccatgcctcccctcgtggcgccgcctgacttgctcgccgagcatgtggccgctgcacgtgatggcgcgcttcgagtgtcgcgtggctgacctggtcgccgccgccgtggagctctacctccgggaggggcgccggctgctgctgctgtccgccgaccccgccgccttcggactctgcttcttcctctccccaaaggccgcaacgattgccgcaatcaccgccgccgccgctcctcccccaccagtttag

SEQ ID NO: 59973 - DNA, 276 bp, Oryza sativa
  unsure (1)..(276): unsure at all n locations
  Clone ID: PAT_MRT4530_61546C.1
ataacttctccgccattacaaccgccctctgagcaattcattcctgncaacatcctcccccccgcggacgagacntcgcgccccaaaccccccccctctaccctagaggccacaaacccaacngccctcaaaccgttctcctaccaaccttctcaggaacatcaacacacaaccacaccccacacaaacgttcccaaactcggccccccagccccaacacccacaaanantacgggtcctccgggacccccccacccccaccgccccctcccacac

SEQ ID NO: 59974 - DNA, 1098 bp, Oryza sativa
  Clone ID: PAT_MRT4530_61547C.1
atggctgttcctgcgagctgtctccggcagcccggaggacggttcctcgtccggaaaaagtcggcgctgccggccgacggggcgaggccgagcggcggggagtcggcggtggcggtgtcaaggtggcatgctcgccggagcgctgcttcgccatcgcgtccctctacctgcatcccgaagaagctcctcctggcccgcgtggcgtccatctcgatccgctccccctctccccgtgtaggacaagggcttgatgggcggcggcgttgggctagagccggagctggcgttagaggagaagcggaggagcgagaggagacgatgcggctgggggtggtggcggctagagtgggagaggaggaggaggaggcgagccatggcgatggcggggcatggcggcggctggctttgggcaggctggcgccgccggccgacggggcgaggccgagcagcggggagtcggcggcggcagtgtcgaggtggcctgctcgccggagcactgcttcgccgtcacgtccctccacgtcggcgtgcggcgagctgcacgaggacacgaggaggtcggcgatggcgaattccctggggcgcatcgcggcggtggagggcggtgaccacatctgtcgcgtcgtggcggcgctcatccgcctgtcctcccaccaccagcgccgccgtgccgccttcctcccgcgcccaagccacctctccgccatgtccgttgctgccgctgcctcatcgagggaggggtgcgccgccgccgacgaggccgagcgccgccactctccatccgcggtggcgtcccgtgggaggaggacatggcggcgcggcgatgcgggagcaggaggcggcatctcccctgccggccgagcgccgccactccccatgcgcctcccactctcccctggccgtcgtcattcttcttcccagcctgctcccgcctcgccgctgttcttctcccctgccggtcgccggccgccggccgccggacctcttctcctctcccgcctctccatcgtcgtcgccgcatcgcccgtcatcgctccaccagacaaggagcaaagtgaaagaaagagaggaaaggagagaagggggaaagagagatga

SEQ ID NO: 59975 - DNA, 704 bp, Oryza sativa
  Clone ID: PAT_MRT4530_61548C.1
cttttcatgttgataaatgaggatgctctttggcagagtttacttagaaggaaatatgtaaataattagtcaattatacaagttgtgaaaatgtctggtgattctcattttttgtcgggacttatgaaaagacaagttcttaagtatgtgcactttcatggggggttggatttaacaaatcaaattctgggaagataagtggattgataattcttctttcaaggagcaatacccttttctatataagttagttcgtagaaaaagtgcatcaattgcaattgttttgaattctgttacacacaatgtatcttgaagggcatttgtgggtcaaaaccttgtgctatggcataacttggttgcttatattgtgcagattaatctaaatgataataaaagtatgtttagatggaatcttcatcacagtggttaattaatttttggtccattctatatatttagccttgatcaacaatggttatatagagagtaataatgttttatggaaattaaggatgcctcttaaaataaagatcctatctagatgcctatatcgtagcgttgtgtactattgagggaatgtttatgacatgtcgggcaaggtagtaagaaagtgttgcttttgtcataaagacaaaaccatccaacatttcttcttccaatgtcatctggcctgcctgtttcgttgccagggacacgtgcggcta

SEQ ID NO: 59976 - DNA, 1590 bp, Oryza sativa
  Clone ID: PAT_MRT4530_61549C.1
atgttcaccggctcgcacgggaacactgtggacgccaggcttatcccccttgctcaccaaattgctgaaggtaatatagtgccatctgcacagtttagctggggatcagccgtccttgcagccacataccgtggattctgcgacgcttgtgttaagaccggacaaagggaggcgattttcacagggtgtccacttttggtcaagttgtggtcgtacgagcacttctcgttcggacatccatacatgagcgtggccgtggcccacaaggacgattacgctgacacagttgatgatcgtcctaccttcggtactcgctggtgctacggaccgccacagtgggcgagaatccaggtgcacaatgtgtacaagtacttcaccgagacgttcgaaagccttagggaaaacgaagttcggtggacaccgtacacgaacgaagaggccattttgcgtggaccaaatggagttagcatcttatgctaccgcgatgaagcggtaatgcgtcagatgggactgtaccagcaagttccagttcctgttggacttcaccttccaccagatgtgcacacgatgaccccatggatagaggcgtggtcgcaggccttgaatgatgtcgtccacgagaccagggcatacgatcacaacacttacgaacaatacatggcctggtactcatcgcagactcgcatccggctgcttgcacccgaggatcccgacgagcgaggggagttagtaagggatgcgaaaactttgtgggagaagcttagagatggtatcgcgggtaccaaccaggaagttatggccacggtcgactccctccgtagaaaaggtaaacgaatcatgcggctcgcgtcgtgccgacattcctcgaacgtgtatactccggcaacatcaataaggacgttcgagcaaatgccggagccacaaccggaacgggtacccccacatagctctgcgcccatcacctctcaatggcagggtgggtttgcggcgttcgctgggcctactcagtcggttccactgcatgcacctacatatggcaccaacccatggaaagcacaatccatagattacggtgggtttaggccttacactgcatcgtacggtgacatttccagcttcggtggagggtcatcattggtacccaatgagcttcgggcttcgcaaactgatgatgcaccccgggtgacacagcccacacaaccagaggttgacgatttacaaggaaacaacaatgacccgcatagatctaaccgtgagcgccatgagccaaaccaccgagtatatgaatatgcaaagtcgcactccgtcgacaccatctcctcctgcctcaaggctggcatagacgccgagtaccaccaggaaacccttgaaatcctcaagctcgccatcaagtccaccaagaagctctgggccgtcatgcttgacacagtcggcccagagttgcaggtggtgaacaagagcaaagcctccatctccctgttattctcaccccttaccaggggcaggaggcctcctcacatgtttcagaaaacaaagccgaatttacatgtctacactggcggcgcgccaatggcgcgccccatcgtctag

SEQ ID NO: 59977 - DNA, 319 bp, Oryza sativa
  Clone ID: PAT_MRT4530_6154C.1
atttatttctgaaaacatgggactcaaaaagtgcaggactttatataaagccggcgttggtgaactcctaccagattctccatcagctactgccagtaggactggtgggggataggtgtggataagtggatagaattatctccatcctgacaaataatgcaataaaccttgctgatgattactgtgactaattgctgacaaatcaaactatcttatctcatttcattggaaagttctacagtactaaaggtataactatttgttctatattagagccttaatacaccttgggagaaaacccaatgaaatcttttcttcc

SEQ ID NO: 59978 - DNA, 550 bp, Oryza sativa
  Clone ID: PAT_MRT4530_61550C.1
gacgatacatggagcgatgacagctccgaatccgatgatacatggagcgacgacagctccgaatccgcctccgggcggatctcctcctcctgctgctgctcctcctcctccttgtcctcctcctcctcctcctcccccgccgatgcagacgccttctccgccgaatccaacaccttctcctccaccacctccgactccaccttctccactgccccctccgacaccaccgcgccgcctcccttcttctccaccgcctccgacaccaccttctcgaacgcctcccacaaagccttctccaccaccgcctgcgacaccatcgtctccaccacctccgacgccatcgcgccctcgctcttcttctccaccgcctccgacaccaccttctcgaacgcctcccacaacgccttctccacaaccgcctgcgacaccatcttctccaccacctccgacgccgtcgcgccctctccctcccccaccaccgcggcctctccgccgttccccgccgccgcccaggggttctcccggcggatctcctcctcctcctccttac

SEQ ID NO: 59979 - DNA, 339 bp, Oryza sativa
  Clone ID: PAT_MRT4530_61551C.1
ccccggccaataaccaattttttttaggggggaaccaataatgcaataacagaatttactccaaattacaaccagttgcccaaagggtaaaacagaattatataatgcgtccggaaatgaaaagttccagggggaagccacatagcatggaaaaacaccacaaaagaagagcccaagcttttgcctgtttgtcggtatggttgggagcttaataaaatgcctaacgatgttgggcgtagggacacccacacccccaattgaatttgcccaagggagatctaaagcggcccccttgggttttttcgcgatgcctgcaaagtacttcccctgggggaaggg

SEQ ID NO: 59980 - DNA, 4380 bp, Oryza sativa
  Clone ID: PAT_MRT4530_61552C.1
atggcaggaatgtcggcatttagagtgtacttcggtgaaggtgaaattatggaaaatgaaagtggtgtcgatctgagcaactttaggcgatgcacactataccatccaaatcctgacactcttaccatgcccgaagtttggagacagggatatgaatatgtcatgctggtgcaagcatgtcaaggaagagtccccacgaagaacgcagcggggcaatccagcaactgtgaggagttggggtctagttcacacgaagaagatgaagttgtagctccccatcgtggtggcgatgttggtcctgacattcaaaatctatccatacaaggagatgaagtggtcaaccgccatcatactgatgaagccgatgaaggggaggacatacctgctatagttgaagaaattgagagggtggaccgacatgcagtcgaagatgaggaaaacctcgctgctaaagagaatgatgacgaagatgaacaagaagttgaggaaatgcaaaggcagttcagggttgtgaagtctaacaagactaagtacatggtcgtctgtgagacggaaggttgcaccttccgtcttcatggtcacgtgccaaagtacgagtcttaccggattgtgtccaaactgcaggaacactcctgtctgattcgggacactagggagtcgcaccgcaacctgatcgcggcatacgtcgcgaacaagtactacaatgaaattattgaaggtgatgacctgcctgtgcagcacataataaaactggtggagaaaggtgaacaatacacaattagttaccacaaggcttggagagcgaagcagaaggccatggagaaaagatatgggacatttgaggaagcatatgacactctgccacagatgcttaacattctaaagagcaggaaccctgggaccaatgttgctgtccaggatcgggagtcaattcgtcctccaaattatcttgtgatgcaacgggcattctttgcattcggagcatgcattcatgtgttccagtgctcgaggctggtgctgtgtgtcgacggtactttcctaaatgggaagtaccgaggccagatatcaacagctgttggtgcggatgcgaacaaccagataattctagtagcttttgcttttgttgaaagcgagaactatgaaagctggttgtgccggcggctgatgaacatgttcaagcagttgtgcaaggcaaatcagtctacaaagttcgatgagctttggaaacaacttgaccaggcgacaaggacacatatccggtcaaagcagaccaacaacaacccgcaggatgtacatgtcccccaggccctggaaccaatggatgatcttattccatcaaatggaaagaagtgtaggtcatcaaagaatatcaaatgttttacccattggattgagtgcgagccgaatgataagtgggcactcctgcatgacactaatggggctaggcatggcataatgaccactaatcttgcagaggcgtacaatgcggttcttcgcaaattaaggcctttacctctgactgctattgttgaaggcattatgcataggacaacgatgtggatgaagacgaggcgggccgcggcgttgcaacaaatgtctaacgcacaaacacctttctgcaaaaagatggcagagtacctccaagagaaggctaacaaggcaagatttcacacggtcattaccactgggaacgtcagacgaaggtgggaagtcacatgtcgcactaaggggggttttggatcttctactggggtcatcactcatgaagttactctagggcacgaatctgataacacatgttcgtgctcttgcaataagccaaagcttcttcataagccatgtagccatgtcctagccacatgcgataaaattaagcttgattcaacatcatacgtgtcgacgttctacctaaaggatagagttctgaatgcatggagtgctgagatcctcgggtggaggtccctccaacacctaggcgaaactgggggtgataaaaggatctatgtgccagacttgaatttgttgaaggctggtaagggtagaaaacaaacacggtgcttaagaaatgatatggatgcatccgaagtgggagggcctgtgaggcgatgtgaggactgtcttcagtacgggcaccgcactagagattgcaagaataacaaggagggtgcatcttcaagcatggaacctaggcaacaacatatggaagatgagtggccttacccgttgcttagcaaagagatcgatgcacgacatcgtgcaaagaagatatctgatggaaattcttgctctagtctagctgtcctgataccgcgtacagccggatggtgggggattgatccacgatggaagccgaggtgcataaatgggctgccactagccagccaggcaattgtacttccggaccctccggaagattggagagatgatattgtatcacggtatgcctgtattttgccacggtacgctaccggtgatacagacgatgatgaggacaaaatatttttctctgaaaaagaaactcatggccccacattgaagtggttgtcacagtttgaggtgcgatatatgcccgacgatgtccaggagtaccaactgacgttgtaccttgaggcttatctactttggctgtttggttgggtcatgttcaccggctcgcacgggaacactgtggacgccaggctaatcccccttgctcgccaaattactgaaggtaatatagcgccttctgcacagtttagctggggatcagccgtccttgccgccacatatcgtggattctgcgacgcttgtattaagaccggacaaagggaggcaattttcacgaggtgtccacttttggtcatgttgtggtcgtacgagcgcttctcgttcgaacgtccatacatgagcgtggccgtggcccacaaggacgattacactgacgcagttgatgatcgtcctaccttcggtactcgctggtgctacggactgtgggcgagaatccaggtgcacaatgtgtacgagtactttaccgaggcgttcgaaagccttagggaaaacaaagttcggtggactccgtacacgaacgaagaggccattttgcgtgcaccacatggagtaagcatcttatgctaccgcgatgaaccgtactggatgacacaaaaaatgctggtgtacgacatattcgtcgaggggtataatgttcaagggcaaaagaggcaagctgacagcaagtatcatcgatctatgcactcaaggatgaccccatggatagaggcatggtcacaggccttgaatgatgtcgtccaggagaccagggcatacgaccacaacaattacgaactatacatggcctggtactcatcgcagactcgcatccggctgcttgcacccaaggatcccgacaagcgaggtccaccaacaattgatcaaatatatgatatgcagctagcaccctccactcacttgacgatactactaccatttaaatatttcgttgcatcgaccgacattgcaggggaattaaaaagggatgcgaaaacattgtggaagaagcttagagatggaatggcgggtaccaaccaggaagttatggccgcggttgactccctccgtcgaaaaggaaagcgaatcatgcggctcgcatcgtgccgacattcctcggacgtctatactccggcaacatcaagaaggacgttcgagacaatgccggagcgtccctctacctcttcccggccgtccacctcagcccgcccttcagcctccgcgcgacgatccagtgatggttgtgcaggacacaaccggaacagagggaacgtgaatggtctgtcccgtgcctcatatgcctcctgcaaggccacaaatgattcctcaaatggctcccgatgtgccaacctcacactggcaaggaggatttgcaccttttgcagggcctactcagtcggttccactgcatccacctacatatggcaccaactcatggcaaggacaatccatggattacgatgcacgtcgtttgatggtggagtacagggttatatggacttgttgcaacaaggtgattggctatttggtcaatattcctcgcatcctaatgaaattccatatatgcaagcaccgtcaacagggtcatttcgccctgaaccaatgtcagggtttaggccttacactgcatcgtacggcgacatgtccagcttcggtggagggtcgtcaccggccacacaaccagaggttggcgaaggaaatgacaatgacccgcgtagatctaaccgtgagcgccatgagccaaaccgtatgtcactctcaggccctcgacatgccgcaggacaaaggaaaaaaactacaaaaaagcgaggtgaaacatctaggactacgactgaccatgacgatgatgacgagtag

SEQ ID NO: 59981 - DNA, 4355 bp, Oryza sativa
  Clone ID: PAT_MRT4530_61553C.1
atggcaggaatgtcggcatttagagtgtatttcagtgaaggtgaaattatggaaaatgaaagtggtgtcaatctgagcaactttaggcaatgcacactataccatccaaatcctgacacccttaccatgcccgaagtttggtactggctaacatgcacattttctttagatccgggtatatatagtgttaacgtgagggttatgtggagccgatcggccaacaacataagatgggagttaaaaaatgtgacacggagtaaggcctggcaggattggctcgctggctgcaggagacggggatatgaatatgtcatgctggtgcaagcatgtcaaggaagagtccccacggagagcgcagcggggcaatccagcaaccgtgaggagttggggtctagttcacacgaagaagatgaagttgtagctccccatcatggtggcgatgttggtcctgacattcaaaatctatccatacaaggagatgaagtggtcaaccgccatcctactggtgaagccgatgaaggggaggacatacctgctatagttgaagaaattgagagggtggaccgacatgcaatcgaagatgaggaaaacctcgctgctgaagagaatgatgacgaggatgaacaagaagttgaggaagttcctatgcctgcttcgtggaaccttgaagaccctggttatattgcagaaaactcttgtcatgattcaatatggttctacggggatggccaaatcaatctgggtgcaatgttccgtgacaaaacggggttgcaagacgcagtgaagtcatggtcattcaagacgcaaaggcagttcagggttgtgaagtctaacaagactgagtacacggtcgtcttccgtcttcatggtcacgtgccaaagtacgagtcttactggattctgtccaaactgcaggaacactcctgtctgattcggaacactagggagtcgcaccgcaacctgaccgcggcatacgttgcgaacaagtactacaaggaaattattgaaggtgatgacctgcctgtgcggcacataataaaactggtggagaaaggtgaacaatacacaattagttaccacaaggcttggagggcgaaacaaaaggccatggagaaaagatatgggacatttgaggaagcatacgacactctgtcacagatgcttaacattctgaagatcaggaaccctaggacctatgttgctgtgcaggatacgggagtcaattcgtcctccaaattatcttgtgatgcaacgggcattctttgcattcggagcatgcattcttgcgttccagtgctcgaggccggtgctgtgtgtcgacggtactttcctaactgggaagtaccgaggccaaatattaacagctgttggtgcggatgcgaacaaccagataattccagtagcttttgcttttgttgaaagcgagaattacgaaagctggttgtggttcttgcaacatctaaagtggggagtggtgcaaaaacgcacatcgatatgcatcatccatgaccggaatgccggtctgttgaaggcaatcaaagagctccaggaggatggtgatggtgcatactactggcctgacatgcacagccgttggtgcatgcggcacatgggagccaattttttcaaacaattcaacaaccggcgtctgatgaacatgttcaagcggttgtgcaaggcaaatcagtccacaaagttcgatgagctttggaaacaacttgacgaggtgacaaggacacatatccggtcaaagcagaccaacatcaacctgctggatgtacatgtcccccaggccctggaaccaatggatgatcttattccatcaaatggaaagaagcgtaggtcatcaaagaatatcaaatgttttacccattggattgagtgcgagccgaatgataagtgggcactcctgcatgacactaatggggctaggcatggcataatgaccactaatcttgcagaggcgtacaatgtggttcttagcaaattaaggcctttacctctgactgctattgttgaaggcattatgcacaggacaacgatgtggatgaggacgaggcgggccgcggcgttgcaacaaatgtctaatgcacaaacacctttctgcaaaaagatggcagagtacctccaagagaaggctaacaaggccagatttcacacggtcattaccactgggaacgtaagacgaaggtgggaagtcacatgtcgcactaagggggattttggatcttctactggggtcatcactcatgaagttactctagggcacgaatctgataacacatgttcgtgctcttgcaataagccgaagcttcttcataagccatgtagccatgtcctggccgcatgcgctaaaattaagcttgattcaacatcatacgtgtcgacgttctacctaaaggatagagttctaaatgcatggagtgctgagatcctcgggtggaggtccctccaacacctagtcgaaactgggggtgataacaggatctatgtgccagacttggatttgttgaaggccggtaagggtagaagacaaacacgtcgcttaagaaatgatatggatgcatccgaagcgggagggcctgtaaggcgatgtgagaactgtcttcagtacgggcaccgcactagagattgcaagaataacaaggagggtcttcttaccttcgtgcagatgacgcaggcaaggatgcattacgacgctagagaacctaaacaaaaacaaatgggggcacatagaaaacgacgacaaaatatcgacaagtccctacttatggcactggttgataggtggaggccagagacacatacatttcatctaccgtgcggagaaatgaccataactttgcaggatgtgtccatgctcatggggctgccactagccggccaggcaattgtacttccggaccctccgaaagattggagagatgatattgtatcacgatatgcctgtattttgccatggtacgctaccggtgatacagacgatgatgaggacaaaatatttttctctgaaaaagaaactcatggccccacattgaagtggttgtcacagtttgaggtgcgatatatgcccgacgatgtccaggagtaccaactgacgttgtaccttgaggcttatctactttggctgtttggttgggtcatgttcaccgggtcacacgggaacactgtggacgccaagctaatcccccttgctcaccaaattgctgaagaccgggcaaagcgcttctcgttcggacgtccatacatgagcgtggccgtggcccacaaggacgattacactaacgcaattgatgatcgtcctaccttcggtactcgctggtgctacggaccgccacagtgggcgagaatccaggtgcacaatgtgtacgagtactttaccgaggcgttcgaaagccttagggaaaatgaagttcggtggactccgtacacgaacgaagaggccattttgcgtgcaccgcatggagggtataatgttcaaagggtaatgcgtcagatgggactgtaccaacaagtcccagttcctgttggacttcaccttccaccagatgtgcacacgcaaaagaggcaagctgacaacaggagaccagggcatacgaccacaacacttacgaataatacatggcctggggagttagtaagggatgcaaaaacattgtgggagaagcttagagatggaactggcgggtaccaaccaggaagttatggctgcggtcgactccctccgtcgaaaaggaaagcgaatcatgcggctcgcatcgtgccggcattcctcggacgtctataatccggcaacatcaacaaggacgttcgagccaatgccggagtgtccctctacctcttcccggccgtccacctcagtccgcccttcagcatccgcgcgacgatccagtgatggtcgtgcaggagtaaggtcaacttcgtttcgtgatccacccactattccgactatcccagaaatcactgaaatttcggaacgcctaggaggctttggttcaactcaagagggaacgcgaatggtccgtcccgtgcctcatatgcctcctgctaggccacaaatgattcctcaaatggctctcgatgtgccaacctcacactggcaaggaggatttgcaccatttgcagggcctactcagtcggttccactgcatgcacctacatatggcaccaacccatggcaaggacaatccatagattacggtgggtcatttcgccctgaaataatgtcagggtttagtccttacactacatcgtacgacgacatgtctagcttcggtggagggtcgtcatcggtacccaacgagcttcggacttcacaaactaatgatgcgcctcatgtgacacagcccacataa

SEQ ID NO: 59982 - DNA, 3747 bp, Oryza sativa
  Clone ID: PAT_MRT4530_61554C.1
atggcaggaatgtcggcatttagagtgtatttcagtgaaggtgaaattatggaaaatgaaagtggtgtcgatctgagcaactttaggcaatgcacattataccatccaaatcctgacacacttaccatgcccgaagtttggtactggttaacatgcatattttctttagatccgggtatatatagtgttaacgtgagggttatgtggagccgatcggccaacaacataagatgggagttaaaaaatgtgatacggagtaaggcctggcaggattggctcgctggctgtaggagacggggatatgaatatgtcatgctggtgcaagcatgtcaaggaagagtccccacggagaacgcagcggggcaatccagcaaccgtgaggagatggggtctagttcacacgaagaagatgaagttgtagctccccatcatggtggcgatgttggtcctgacattcaaaatctatccatacaaggagatgaagtggtcaaccgccatcctactggtgaagccgatgaaggggaggacatacctgctatagttgaagaaattgagagggtggaccgacatgcagtcaaagatgaggaaaacctcactgctgaagagaatgatgacaaagatgaacaagaagttgaggaagtacctatgtctccttcgtggaaccttgaagaccctggttatattgcagaaaactcttgtcatgattcaatatggttctacggggatggccaaatcaatctgggtgcaatgttccatgacaaaactgggttgcaagacgcagtgaagtcatgggagtcgcactgcaacctgaccgcggcatacgtcgcgaacaagtactacaaggaaattattgaaggtgatgacctacctgtgcggcacataataaaactagtggagaaaggtgaacaatatacaattagttaccacaaggcttggagggcgaagcagaaggccatggagaaaagatatgggacatttgaggaagcatatgacacactgccacagatgcttaacattctaaagagcaggaaccctaggacctatgttgttgtgcaggatcgggagtcaattctttgcattcggagcatgcattcatgcgttccagtgctcaaggccagtgctgtgtgtcgacgccgttggagcatgtggtacatgggagccaattttttcaaacaattcaacagtcggcggctgctgaacatgttcaagcggttgtgcaaggcaaatcaatctacaaagttcgatgagctttggaaacaacttgatgaggggacaaggacacatatccggtcaaagcagaccaacaacaacccgcaggatgtacatgtcccccaggccctggaaccaatggatgatcttattccatcaaatggaaagaagcgtaggtcatcaaagaatatcaaatgttttacccattggattgagtgcgagccgaatgataagtgggcactcctgcatgacactaatggggctaggcatggcataatgaccactaatcttgcagaggcgtacaatgcagttcttcataaattaaggcctttacctctaactgctattgttgaaggcattatgcacaggacaacgatgtggatgaggatgaggtgggccacggcgttgcaacaaatgtctaacgcacaaacacctttctgcaaaaagatggcagagcacctccaagagaaggctaacaaggcaagatttcacacgccgaagcttcttcataagccatgtagccatatcctggccgtgtgtgctaaaattaagcttgattcaacatcatacatgtcgacgttctacctaaaggatagagttctgaatgcatggagtgctgagatcctcgggtggaggtccctccaacacctagtcgaaactgggggtgataaaaggatctatgtgccagacttggatttgttgaaggctggtaagggtagaagacaaacacggcacttaagaaatgatatggatgcatccgaagcgggagggcctgtgaggcgatgtgaggactgtcttcagtacgggcaccgcactagagattgcaggaataacaaggaggatacatcttcaagcatggaacctagggaacaacatatggaagaggagtggccttacccgttacttagcaaagagatcgatgcacgacatcgtgcaaagaagatatctgatggaaatttttgctctagtctagctgtcctaataccgcgtacagccggatggtgggggattgatccacgatggaagccgaggttgtcagctgcaggtcttcttaccttcgttcagatgacgcaggcaaggatgcattacgacgctagagaacctaaacaaaaacaaatgggggcacatagcaaacgacgacaaaatatcgacaagtccctacttatggcactggttgataggtggaggccagagaaatacattccatctaccgtgcggagaaatgaccataactttgcaggatgtgtccatgctcacggggctgccactagccagccaagcaattacgatgatgaggacaaaatatttttctctgaaaaagaaactcatggccccacattgaagtggttgtcacagtttgagctgtttggttgggtcatgttcaccggctcgcacaggaacactgtggacgccacgctaatcccccttgctcgccaaattgctgaaggtaacatagcgccttctgcacagtttagctggggatcagtcgtccttgcagccacataccgtggattctgcgacgcttgtattaagaccggacaaagggaggcaattttcacgggacgtccatacatgagcgtggccgtggcccacaaggacgattacactgacgcagttgatgatcgtcctaccttcggtactcgctgctgctacggaccgccacagtgggcgagaatccaggtgcacaatgtgtacgagtacttcactgaggcattcgaaagccttagggaaaacgaagttcggtggactccgtacacgaaagaagaggccattttacgtgcaccacatggagtaagcatcttatgctaccgcgatgaagcgtactggatgacacgaaaaatgctggtgtacgacatattcgtcgaggggtataatgttcaaagggtaatgcgtcagatgggacagtaccaacaagtcccagttcctgttggacttcaccttccaccagatgtgcacacgcaaaagaggcattgcatgcaaaagaggcaagctgacaacaggtatcgtcgatctatgcactcaaggatgaccccatggatagaggcgtggtcacaggccttgaatgatgtcgtccaggagaccaggccatacgaccacaacacttacgaacaatacatggcctggtactcatcgcagactcgcatccggctgcttgcacccgaggatcccgacgagcaaggtccaccaacaattgaccaaatatatgatatgcatctagcaccccccgctcacttgacgaccgacattgtaggggagttagtaaggggtgcgaaaacattgtgggagaagcttagagatggaatcgcgggtaccaaccaggaagttatggccgcggttgactccctccgtagaaaagggaacgcttatggtccgtcccatgcctcatatgcctcctgcaaggccacaaatgattcctcaaatggctcccgatgtgccaacctcacactagcaaggaggatttgcaccatttgcagggcctactcagttggttccactgcattgtcgcgaccgggaaaattgccttttcccgaacgctag

SEQ ID NO: 59983 - DNA, 445 bp, Oryza sativa
  unsure (1)..(445): unsure at all n locations
  Clone ID: PAT_MRT4530_61555C.1
tttgttttttttttttttttttttttttttaaaagaaatttggggttcacaaaaaaagaagaggctgggttacatacaaacaccaaaggtttcaagggacaaatcgatttaggtttacagaaacaacaaagggaatcagacgggcagggctccttgggaatgctgctagagcaaaaaatgggggttataactgggaaaaacaaggtccggaaaaactcatacagccggatttataattcttaaaaccttccntataaaggggaggaaatatattgtgcagaaatccatgagactcccatcctgggaccttgccattatgagtccacttgttttccaccatgggagcaccaagggccatttggcttgtgggggtctaaacaaggtccggaagcacctccaccttgggagggcccaaatgccccctaatcggagaaggtggtgccat

SEQ ID NO: 59984 - DNA, 748 bp, Oryza sativa
  unsure (1)..(748): unsure at all n locations
  Clone ID: PAT_MRT4530_61556C.1
gagtgaactgaggagaggaagagcaagagaagagaggaggcagtgcatgcagtggagagaaggaaaaaaagacacgttgttacgaacgaacaaataaatgcagtagtacgaagaactttgaaattgggacttttatatgagcaaattggttgaaaagaagaaggcaagacaagtgaactaaactttgaggcagcaattgttatacgagcaagctggttaaaaaggagtaggcggtatctaataaacgcaggaacactcctgtctgattcggaacactagggagtcgcaccgcaacctgaccgcggcatacgttgcgaacaagtactacaaggaaattattgaaggtgatgacctgcctgtgcggcacataataaaactggtggagaaaggtgaacaatacacaattagttaccacaaggcttggagggcgaaacaaaaggccatggagaaaagatatgggacatttgaggaagcatacgacactctgtcacagatgcttaacattctgaagatcaggaaccctaggacctatgttgctgtgcaggatcgggagtcaattcgtcctccaattatcttgtgatgcaacgggcattctttgcattcggagcatgcattcttgcgtttcagtgctcgaggccggtgctgtgtgtcgacggtactttncttactgggaagtaccgaggccaaaatatacagctgttggtgcggatgcnaacaccagatattccagtagcttttgcttttgttg

SEQ ID NO: 59985 - DNA, 3351 bp, Oryza sativa
  Clone ID: PAT_MRT4530_61557C.1
atggcgaaggctggaaagccgcgtcggtattccgaaagtaaaggcatctcgggcgaaggcatcttgggcgaactacaaagacttcgccatgacgagttcggcatcaaggaggcccaacaggccgcccccggccttttaggcccatttgccatagaccaggcccagcctatcagcccattaaaggcccatattgaaataaactttgaggcagcaattgttatacgagcaagatggttaaaaaggagtaggcggaatctgataaacgcagcatgtcaaggaagagtccctacggagagcgctgcagggcaatccagcaaccgtgaggtgttggggtctagttcacacgaagaagatgaagttgtagctccccatcgtggtggcgatgttggtcctgacattcaaaatctatccatacaaggagatgaagtggtcaaccgccatcctactggtgaagccgatgaaggggaggacatacctgctatagttgaagaaattgagagggtggaccgacatgcagtcgaagatgaggaaaacctcactgctgaagagaatgatgatgaagatgaacaagaagttgatgaactacctatgcctgcttcgtggaaccttgaagaccctggttatattgcagaaagctcttgtcatgattcaatatggttctacggggatggccaaatcaatctgggtgcaatgttccgtgacaaaactaggttgcaagacacagtgaagtcatggtcattccagatgcaaaggcagttcagggttgtgaagtctaacaagactgagtacacggtcgtctgtgagatggaaggttgcaccttccgtcttcatggtcacgtgccaaagtacgagtcttactggattgtgtccaaactgcaggaacactcctgtctgattcggaacactagggagtcgcatcgcaacctgaccgcggcatatgtcacgaacaagtactacaaggaaattattgaaggtgatgacctgcctgtgcggcacataataaaactggtggagaaaggtgaacaatacacaattagttaccacaaggcttggagggcgaagcagaaggccatggagaaaagatatgggacatttgaggaagcatatgacacactgccacagatgcttaacattctaaagagcaggaaccctgggacctatgttgctgtgcagaatcgggagtcaattcgtcctccaaattattttgtgatgcaatgggcattctttgcattcggagcatgcattcatgcgttccagtgctcgaggccgatgctgtgtgtcgacgccgttggtgcggatccgaagataattccagtagcttttggttttgttgaaagcgagaactacgaaagctggttgtggttcttgcaacatctaaagtggggagtggtgcaaaaacacacattgatatgcatcatacatgaccagaatgctggtctgttgaaggcaatcaaagagctccaggaggatggtgatggtgcatactactggcctgacatgcacagccattggtgcatgcggcacatgggagccaagtttttcaaacaattcaatagccgacagctgatgaacatgttcaagcggttgtgcaaggcaaatcaacctacaaagttcgatgagctttggaaacaacttgacgaggggacaaggacacatatccggtcaaagcagaccaacaacaacccgcaggatgtacatgtcacccaggccctggaaccaatggatgatcttattccatcaaatggaaagaagcgtaggtcatcaaagaatatcaaatgttttacccattggattgagtgcgagccgaatgataagtgggcactcctgcatgacactaatggggctaggcatggcataatgaccactaatcttgcagaggcgtacaatgcggttcttcacaaattaaggcctttacctctaactgcttttgttgaaggcattatgcacaggacaacgatgtggatgaggacgaggcgggccgcggcgttgcaacaaatgtctaacgcacaaacacctttctgcaaaaagatggcagagtacctccaagagaaggctaacaaggcaagatttctcacggtcattaccaatgggaacgtcagacgaaggtgggaagtcacatgtcgcactaaggggggttttggatcttctactggggtcatcactcatgaagttactctagggcacgaatctgataacaaatgttcgtgctcttgcaataagccgaagcttcttcataagccatgtagccatgtccccggccgcgatagagttctgaatgcatggagtgctgagatcctcgggtggaggtaccttcaacacctagtcgatactaggggtgataaaaggatctatgtgccagacttggatttgttgaaggctgccacataccgtggattctgcgacgcttgtattaagaccggacaaagggaggcgattttcatggggtgtccacttttggtcatgttgtggtcgtacgagctcttctcgttcggacgtccatacatgagtgtggccgtggcccacaaggacgattacactgacgcagttgatgatcgtcctaccttcggtactcgctggtgctacggaccggtgcacaatgtgtatgagtacttcaccgaggcgttcgaaagccttagggaaaacgaagttcgatggattccgtacacgaacgaagaggccattttgcgtgcaccacatggagtaagcatcttatgctaccgcgatgaagcgtactggatgacacgaaaaatactggtgtacgacatattcttcgaggggtataatgttcaaagggtaatgcgtcaaatgggattgtaccaacaagtcccagttcctgttgggcttcaccttctaccagatgtgcacacggaaaagaggcaagctgacaacagagggaatgtgaatggtccgtcttgtgcctcatatgcctcctgcaaggccacatatgattcctcaaatggctcacgatgtgccaacctcactctggcaaggaggatttgcaccatttgcagggcctactcagtcggttccactgcatgcacctacatatggcaccaacccatggcaaggacaatccatggattacggtgcttcggtggagggtcgtcatcggtacccaacgagcttcggacttcacaaattgatgatgcgccccatgtgacacagcccacacaacaagaggttggcgaaggaaacgacaatgacccgcgtagatctaaccgtgagctccatgagccaaaccgtctgtcactctcaggccctcgacatgccgcacgagcaagaaaaaaaactacaaaaaagcgagctggaacatctaggactacgactgaccatgatgatgatgacgagtag

SEQ ID NO: 59986 - DNA, 876 bp, Oryza sativa
  Clone ID: PAT_MRT4530_61558C.1
tccgcgaggcgcacacctctcctgtccccccgcacctccacctttcgttccccacgcctatcctctttactcggttcttcccgcgcccaccacctgttcgacaccgaactcaaccgtctctccacactgcgcgcgcgccgcagcttagcctctcgcaatggcgacgaccaccgcagccttggcgccgccgtccacctcgacgtcctccgtcctcctcccctcagccgccgccgccgccgccgcccgatgcctcgggccgctgccccgccgcgcgcgcctccggaccgcgcgccacgtcgccctcaccccccgcgacttgtccgcggaggacgtggccgcggaggaggccgccgtcgcgcccaagatcgggaagcgcgtgcgagtcacggcgcccgtgcgcgtgtaccacgtcatgaaggcgcccgacctggacatcaagggaatggagggcgtcgtcaagcagtacgtggccgtctggaaggggaagcgcatcacggccaatttccccttcaaggtggagttccatctcagcgtggagggccaggacaagccggtcaggttcttcgtccacctccgcgaggacgagttcgagttcatcgacgaatgagatcgatcagtaaccgtgaccaagtaagcctagcgccttttgttatacaataatgaccgcagctgtggcatgtgtatattgtttcggttgtgtggtgagagagatgagagagactgaagagagtagggaacatggcaaggaagttgtttgcttactgtcatgctcttcctcctccagttcgacatctaatttttcagatgtgggaaatgtttggatgatgatgatgatcgatagctataaatagtgatcattctcctgtcttgcttgct

SEQ ID NO: 59987 - DNA, 2154 bp, Oryza sativa
  Clone ID: PAT_MRT4530_61559C.1
atgcaggcagtggagagaaggaaaaaaagacacgtatgtattagttactactacattatgggtgtgtttgaggagaaagagattggggagattgggaagatacgcaaaacaagtgaaataaactttgaggcagcaattgttatacgagcaagctggttaaaaaggagtaggcgggttctgataaacgcagcatgtcaaggaagagtccccacggagaacgcagcggggcaatccagcaaccgtgaggagttggggtctagttcacacgaagaagatgaagttgtagctccccatcgtggtggcgatgttggtcttgacattcaaaatctatccatacaaggagatgaagtggtcaaccgccatcctattggtgaaaccgatgaaggggaggacatacctgctatagctgaagaaattgagagggtggaccgacatgcagtcgaagatgaggaaaacctcgctgctgaagagaatgatgacgaagatgaacaagaagttgaggaactacctatgcctgcttcgtggaaccttgaagaccctggttatattgcagaaaactcttgtcatgattcaatatggttctacggggatggccaaatcaatctaggtgcaatgttccgtgacaaaactgggttgcaagacgcagtgaagtcatggtcattccagatgcaaaggcagttcagggttgtgaagtctaacaggactgagtacacgatcgtctgtgagacggaaggttgcaccttccgtcttcatagtcacgtgccaaagtacgagtgttattggattgtgtccaaactgcaggaacactcctgtctgattcggaacactagggagtcgcaccgcaacctgaccgcggcatacgtcgcgaacaagtactacgaggaaattattgaaggtgatgacactgcctgtgcggcacataataaaactggtggagaaagtactttcctaactgggaagtaccgaggccagatattaacagccgttggtgcagatgcgaacaaccagataattccagtagcttttgcttttgttgaaagcgagaactacgaaagctggttgtggttcttgcaacatttaaagtggggagtggtgcaaaaacgcacatcgatatgcatcatccatgacgggaatgccggtctgttgaaggcaatcaaagagctccaggaggatggtgatggtgcatactactggcctgacatgcacagccgttggtgcatgcagcacatgggagacaattttttcaaacaattcaacagcccgcggctgatgaacatgttcaagcggttgtacaaggaaaatcagtctacaaagttcgatgagctttggaaacaacttgacgaggggacaaggacacatattcggtcaaagcagaccaataacaacccgcaggatgcgtacaatgcgattcttcgcaaattaaggcctttacctctaactgctattgttgaaggcattatgtataggacaacgatgtggatgaggacgaggcgggccgtgacattgcaacaaatgtctaacgcacaaacacctttctgcaaaaagatggcagagtacctccaagagaaggctaacaaggcaagatttcacacggtcattaccactgggaacatcagacaaagtgctaagatcctcgggtggaggtccctccaacacctagtcgaaactgggggtgataaaaggatctatgtgccagatttggatttgttgaaggctgatatggaagaggagtggccttacccgttgcttagcaaagagatcaatgcacgacatcgtgcaaataagatatctgatgaaaattcttgctctagtctagctgtcctgataccgcgtacagccggatggtggggatgtgtccatgctcacggggctgcccctagccggccaggcaattgtacttccggaccctcagaagattggagagatgatattgtatcacgatatgcatgtattttgccacagtacgctaccggtgatacagacgatgatgaggacaaaatatttttctctgaaaaagaaactcatggccccacattgacgtggttgtcacagtttgaggtcatgttcaccggctcgcacgggaacactgtggacgctagactaatcctccttgctcgccaaattgctgaagatcaaagtctatacaggggttaa

SEQ ID NO: 59988 - DNA, 2359 bp, Oryza sativa
  Clone ID: PAT_MRT4530_6155C.1
ccccgcctcccccctcccgcctcgtcgctccccccgccccctccccgccgccgccggcccccgccggtcccgggggcgcgcgcgcgcctgccgcggccgccccagcgccgccacggcgaccgtggccaaggagatccgccccctcgtcggtccgccgccaacgatctccgatcgagacaaaccctagccacgcccattgccttctcccgtcgccatgtctgcggcgcacctcctccgccactcccgcaagctgcggactctacgtgatgctctagattatgatcggtctgctcttgtacgctacttctccgctgcttctgcatcctttcccacaaagggaggtgctgctgctggtgttgagaaaagaattggtggcgccagattccctcagtgcaagcagcctgggaaagagcttgagaccttcaaggtgtcactaggaggactaaatggaagatatgcttgtagaagagcacctaacaattgtatcccaaccactattaccggtctcaacggttcattgtcatgtggacaggtgtcttcagcaagatctttctcaagcagtgcagacctgccaccacatcaggaaattgggatgccatcactctctcctacaatgaccgaggggaacattgcaaggtggctgaagaaggaaggagataaggtctcacctggtgaagttctctgtgaggtggagacggataaagccactgtagagatggagtgcatggaagagggctatctcgctaagatcattcatggagatggtgccaaagagatcaaagttggtgagatcattgctgtaactgtggaagaagagggtgacatcgagaagtttaaggattataaaccttcaactttggctgcacctgcagccccttctgaaccgaaggctcagtctgagcctacagagccaaaggtgaaggagacagagccttccaggacatctgagccgaaagccccaaagactgaagaagcttctcaaccagggggtcgaatattctccagccctcttgcaagaaaattggcagaagataacaatgttccactgtcaagcgtaatgggaactggtcctgatgggcgaattttgaaggcggacattgaagattacttggcttctgtagcaaagggtggcaaaagggaagctcttgcggctccagggttaagttacactgatgttcctaatactcagataagaaaggttactgcaaaccgcctgctaagctctaaacaaactattcctcattattacttgacagttgacgcccgtgttgataatcttatcaagttgcgaggggaactgaatccgttgcaagagtcatctggcggtaagaagatatctattaacgatcttgttataaaggctgcagctctggctcttcgaaaggtccctcagtgtaatagctcgtggatgagtgattttatccgccaataccacaacgtgaacatcaatgttgctgtacagactgagcatgggttgtttgttccagtaattagggatgcagacaagaagggacttggtacaattgctgaggaggtgaagcaggtggctcaaagagcaagggataacagcttaaaacctgaagattatgagggaggcacattcaccatatcaaacctaggaggtcctttcggaatcaaacaattctgtgccatcataaatcctcctcagtcagcaatcttggccattggtactgctgagaagagggtgatacctggcagcgtagacggccagtatgagtttggttccttcatgtcggcaacaatgagctgtgatcacagggttattgatggtgctatcggcgcagaatttctgaaagcattcaagggctatatcgagaatccaaactcaatgttactgtgaagctaaagatcatcaaaactattcttcccttgttctcgaatgatgcacagaacggtgctgtctcattttgtatatttccatcatgatttcgaggaggacctgaaaaccaagagcacagagccaagggcaggatgacctggtttttggattaatttttctttttcctgtttgtttcgttccagttacactgggaattaggatcaatttacaagccttcttttagcccgtttttatgggtttactccgcaagttcgttgacagcagagtaaattcccgggaaaccatgcaggatagcctttatacgatttgccccctttttactttttttttcatctttgtgcaaaaccaagaggcgcagaggtaataagttgcaaatcttggggagtttggtttataccctttctccgcaaaattctaacgagaaattcacaattgttcagagtaaatgatgcattgcttaatccaaaaaaaaaaaaaaaaaaaaaaaaaacaataaag

SEQ ID NO: 59989 - DNA, 570 bp, Oryza sativa
  Clone ID: PAT_MRT4530_61560C.1
cataagccatgtagccatgtcctggccgcatgcgctaaaattaagcttgattcaacatcatacgtgtcgacgttctacctaaaggatagagttctaaatgcatggagtgctgagatcctcgggtggaggtccctcccacacctagtcggaacttggggtgataccaggatctatgtgccagacttggatttgttgaaggccggttaaggtagaagacaaacacgtcgctttaagaaagatatggaagcatcgaaagcggaaggcccatgcagatatggaagagagtggccttactcgttgcttagcaaagagatcgatgcatgacatcgtgcaaagaagatatatgatggaaattcttgctctagtctagctgtcctgataccgcgtacagccggatggtgggggattgatcgacgatgggaggcgttgtcagctgcaggtcttcttaccttcgtgcagatgacgcaggcaggggcacatagaaaacgacgacaaaatatcgacaagtccctacttatggcactggttgataggtggaggccagagacacatacatttcatctaccgtgc

SEQ ID NO: 59990 - DNA, 450 bp, Oryza sativa
  Clone ID: PAT_MRT4530_61561C.1
atggaggtgggtactaaaagaaagggagaagggggcaccattgtctacgcgcgtggtcaatctccttcatgttgccacctagatctagaaagaggaagagccgagggaatcaagaagatggtcgtggcacgaagtagagggagccacatgaatgaagaggagcagatgaagcaaaagccacagttgccttcctctctcccctcgacgttgcgtcgggccccgttcgcgcatgaggacgccatctgccatgtatctatagtggctagttgcatcgtcagggttttcatcatcggccttgctgaggatatgtcgcttcgtggatctacatcacttctccttccggcggcttcctccaacctccgccatgctgccaggaggcaggtggcgagcggcggggagaagggtgaccgccggcaggaggcggtagaagaatccctgcggtttggctag

SEQ ID NO: 59991 - DNA, 375 bp, Oryza sativa
  Clone ID: PAT_MRT4530_61562C.1
atggcagagtacctccaagagaaggctaacaaggcaagatttcacacgacgttctccctaaaggatagagttctgaatgcatggagtgctgagatcctcgggtggaggtccctccaacacctagtcgaaactgggggtgataaaaggatctatgtgctagacttggatttgttgaaggctggtaagggtagaagacaaacacgacgcttaagaagtgatatggatgcattcaaaacgggagggcctgtgaggcgatgtgaggactgtcttcagtacgggcaccgcactagagattgcaagaataacaaggagggtacatcttcaagcatggaacctaggaaacaacgtgcgaggaggaatagaaggggctcttag

SEQ ID NO: 59992 - DNA, 711 bp, Oryza sativa
  Clone ID: PAT_MRT4530_61563C.1
atgcaagtgattgatctggtcctgaagtcaagttatcccttcaggacaacagatcgacttaatggtgtgtggttcttagtggttcttcaagttggcaatcggtttgttggtctagctgacaccctgcagtttgtgtatgtgctagaacgccacaattcggtatggactcgttatgagacaacttcaagatgcacagatctgactgcgaaaattatcatctccgggtttgtcgtgctcgatcgacgcagttttatgatatcggatgctgcaacatttgactgcttgttgctcaacattgtgaaggcatgccaatggtatcgctacggcgcattatttgttaggtctctatgcatccatggcttcgtatacacgctgttcgatggaggcattcttgctttcgaattggtcgtcagcgagaacgatggttcatactaccttgatgctcctatcttcttgagggcttggagcaagattgtcagggagaggagcatgatttgctttgcttcggttggtcaggatgatgacgatgatcacagctgtgatcactgccttgtgttctgtcttgctcgtggtggatacccccgcgcaggctattcttctacggttagaaaaaagctgtacgatgatgttcagatcaccatgatccaggtgatgactcgtgaaacaggaagaggaactagagaacctgtgaggccgcctcgaggatggtag

SEQ ID NO: 59993 - DNA, 286 bp, Oryza sativa
  unsure (1)..(286): unsure at all n locations
  Clone ID: PAT_MRT4530_61564C.1
ggacgatccccagccangccggcacagcccgccggcgctccacccggccgtcgtgccggagtacccgcccccggagtcggacgccgacgagtcgtgggtntggtcccagatcaaggccgagnngcgcngcgacgcngacgccgagccgggctcgnttngttcctntacgcnaccgtgctctcccacccntccttngaccgctcgctcgctttccacctngccaacaagctctgctcctncacgctgctctccacgntcctttacgacctcttngtngnctccttcg

SEQ ID NO: 59994 - DNA, 451 bp, Oryza sativa
  Clone ID: PAT_MRT4530_61565C.1
atggtggaccagattgccattggctttgtggacatggtccattctacgagcgtgtggtgggctgggaaaaatagaagcccgtccatgcgctgggagcacgcttggctgggcttgtccgtgcaccccggcgacctaatccttccgttcttgctgtcccaaggagttctttgtgccgtcaagccgccctctggttcttccatccgtcgtcttcaggccgtcaagccgccctctggttcttccatccgtcgtcttcaggcctccccttttgaaggtgattccttgctacggttttacatcctttactcgctttatggtctccgcttccgttatgccagagcattgccaggcgggatggtcgcggttggggtttccttcgtttcgttgttgaacgcggccgcttgccattgccgtcttcccttggtgtcgtacctttgggagctggatggcgatg

SEQ ID NO: 59995 - DNA, 2861 bp, Oryza sativa
  Clone ID: PAT_MRT4530_61566C.1
aatcatgcaaaacttttctttgctccaaggtaattttaaacatacaaaacttatgtgctctgagaatatgccagctacagtgtcattcgctccttaggggggaaggatatctagttatctagataggggaatcactgaattggcagttgacccaaccagaaaccgcaaaacatgttctagacttcctagtcctatcttcattggaaggacactgggatctgaaggaaggttgttaccacgaatatgctccagaggttggagctcggtgctttacccatgctactaacaagccagtctttgtgcaactgaacttcaactgtaatcacatctctggtgaagagattgatgaggtgaaggatgttctgccatccagaaggaagacccttgcagagctctgcaagatcaggttgtcctttatgcagatcggtgacactcactggtgcagaaatagtctcgctatttgcctccttttttgcttccgctctcctgcgtttcacacgatcacgccagtcaccaccaaggggaacaaaattggcattttcctgagcttctccgctggctatctgttgcttgcgccactcatcaatatccttttgacgctttctttctaatgcgtccaaagcactttctggctcttcatcctcctcatcacgaagctcctccttagcagctttccacttatccaccagacttgaaaccttcttattagacctcagtgatgttgcaacagaaacagctcgcttcttgctacgaacaactttgctctgacttgtggtacttgtagaagcctgtgcagaacttccctgtatggatgctgatgctgatgttgctcccacaggttggctcaaagatgcaagttttgcctccttggatatgatgttgtcagactccctggaatgcaaactactattcgcaggagcaagattggaagagcttgttgtgttatctaatacactgctagaagtggcagagactgatgccgcgtagtatccagaaggctcagctgcttctccagtggcagccatagtgactgaaggatagctatagtaagaaacaggtactggagcaatagatgtggcatcaacaggaatagatatgccacttgcagatactggtgcatagtaaccattctggtgtgcttgaacgacatgaggctcactcgtttgcatataatagctggcatgtgtaccttctgtacctgcagcagcatagtactccattccaggaactgtatagaccaagtttgcttgatcgacataggactgtggaattgtttcagtagaaacagatgacacagcaggttcttcaggaggaggtggaggagctggttcattctcaggtggtggaggtggaatccattcatcttctggtggtggtggaggaatgtcgctatcctctaggggtgcagctgaaccgtccaacaataacaaagccggtgactgaacttgctctgatggaggatattccttaataggcgtggaattcgagtgcttatgctcttcaacattgtcatcgtcaacctccatatccacatccatatcttcatcattgtcggattcaatttttgatgggactgttgtggtatcattttcttctgatttctgaatggatgatgttgaaaatggctcctcatttttaacatttccatccatcataacgtcagtgctcacctcagatttcaaaccctcaccattggagggtggcatcatcacttcagcttcattaggtgttttgtgttctgtgtctgctttctctggatgtctaggttcagtggtagagtaactagtttccaatttggaaactgagaattctagttgcttaaggtgtacctcagcatgcaaccacaatggaagcaaagaagatccatacgatgaaagtgcattgcagtctgatattcgtatctcaatttctctttttagcaattcaacattgtaaatggaaccatgcaacctttctagcggcttcaatctttgcagcaattcctcgccatatcttgcaagctgcaaaggatcaatgtccatcgattcatgactagtgacagctccagcataagcataagcatcatgagtaggctgtcccattcccaaagtagcataagccactgagccatttagcacagatatatcacttggataagcttccacggcattgtgggtaagggcatgtgcttgggcctccatagagtagtctacatgagtaggagcagatgcagaagtgacactgtcagctgcaatttcagaagctaatacattaggaatctcccaagaggtttctccagtaactgtgttccaatagtaacactggttgctctgctcatgcattatagtcttccaattcccaccaatgtcaccaacaatttgcatcccagatgagtcaggaatagcttcagttgctgttgcagtcccatcttccagagttggctttatggcaacaacattttcttcagcaatatttccagtgcacttcttatcatcagcttcagttaactcttgttggacattagcagaaccagccagatcactttgtgcatcaccttcattcctagtcaagtccccacgttcatgagtaatcttgacgcctgcatctgcaggattagcctctgtttcatcattgggttgatctgctgcttcctcttcctcttcatcatcactatattgcccaagcaacgctagaggattctccttcttatctgaagaagatggtgaagtgggaaccccagtttgttggtcatggttttcccctcgctctccctctttcgaaggtgttcccccgggggagggatcgaggaagaggtcgagcttcaccctgcggccgcccgcggccgccttggccgcaaggcggcgctccttcctcctccccat

SEQ ID NO: 59996 - DNA, 878 bp, Oryza sativa
  unsure (1)..(878): unsure at all n locations
  Clone ID: PAT_MRT4530_61567C.1
aaaaatcctcctcctcctcctcttcttcccccaagantcctccacaccatgcggccaccgaggggcggcggcggcgggcgcttcggaggcggaggcggcgggcggttcggcggcggtggcggcaggggtggccgcttcggtggcggcggcagggggggccgcggcggcggcggcgggttccgcgacgagggccccccggccgaggtcgtcgaggtgtcgacgttcatgcacgcgtgcgagggggacgcggtgacgaagctgacgaacgagaaggtgccctacttcaacgcgcccatctacctccagaacaagacccagatcggcaaggtcgacgagatcttcggccccatcaacgaatcccttttctccattaagatgctggaggggatcattgcaacttcatacagtgaaggcgataagttctacatcgaccccatgaagcttttgcctctctcacgcttcttgccacagccaaagggccaaagtcaaggagggggcagaggtggtggccgtggtggtggaagaggcggtttccgtggccgtggtggtggtggcttccgtggaagaggtgcgccaaggggccgtggtggacctcctaggggtggaggtcgtggtttcagggggcggggcagattctagtttcttagcttaagacctggtgtttgttgaaacatcatatcctacatgccctctgctcaattgaaaacattcatgttcttgtagcctgatgttaagttagcagagcgtttccagctcttcatgtgtggaagttgaatctctatggaacaaagttttcatttctcttcagtacaagttatgcatttatagttaatctttaatctttacagttaccgaaaaaaaaaaaaaaaaaaaaaaaa

SEQ ID NO: 59997 - DNA, 223 bp, Oryza sativa
  Clone ID: PAT_MRT4530_61568C.1
caacccatatataacagatatctgacggcctattgtttaaaaaattgtgcagtgaagtttagtccttcttaggtcaatatttgttttaaaaaagattgtgatactcatatatgggtttgtggctttttgcagtgcagatgaaaattcttcttaaatatacagttgcagaggacctcaaacttgttttaatgatgttaatggtgtctaggcaaaattgctacca

SEQ ID NO: 59998 - DNA, 372 bp, Oryza sativa
  unsure (1)..(372): unsure at all n locations
  Clone ID: PAT_MRT4530_61569C.1
ncgatttgatgatcccgttgctgctgcaagaagaggccgcattcttgcaaggcctgcgcaaggtttggctttggtctgtatctttacccacgaagacgagactccgtagggaagtggcgcagcatccacttcataagttctgcgttggttctcgcctgatttggttcaaaaggctgtggttgatccatctctctgtttatcaaggttttcagtctgtatcaggagttgaagtatcattcatactggaattctctttatcttctgaacctcttttcttgtagatacgagtcaatgaggccccgtctgccacttctttcctttttggcactgttataaagagcaaatacacgagtaaaaaaaaaaaaaaaaaaa

SEQ ID NO: 59999 - DNA, 455 bp, Oryza sativa
  Clone ID: PAT_MRT4530_6156C.1
aagagaacaattcggcaagctatttattcagctcaatttgggaagcacaggggaatatccaagttttgaatacaataaagcaaacatctgtttgctgccatcttcttttttaatgcttcaagctgctgcaccttttttcctaaaagcgagatttttatttactattcaccgggtttcaattgcagccttgcttccttttgcacaagacacattgcgggtgtcaggattaagctggaaatttaatcccaatctttgatatcaaaggaatgcatgcaataattctctatttctcttcctgaaatgattaaaaaatatatgttgataggggtgaccccctgagaacctggatgatctccaaggctggaaacaaaaggggatccattattatttaaacaactcctaataacaaagggcataactttttgacaacacagggcataatttcctggcttact

SEQ ID NO: 60000 - DNA, 303 bp, Oryza sativa
  Clone ID: PAT_MRT4530_61570C.1
ttttttttttttttttttttttttttttttttttttttttttttttttttttttttttttttttttgggaccaattaacgtagggtttagttaacaaggaccccctgttttattgtttttacgaaattgtttagaaaaacagggggggccctacctacttttactatttattatgaccccaacttttttttttttgcaaacccactaccctttttaacattttgatttattaaaaattcctaccctggtttcacaaaataatgtcttaaacttggggaaccccttaacttgggggtgcttttg

SEQ ID NO: 60001 - DNA, 312 bp, Oryza sativa
  Clone ID: PAT_MRT4530_61571C.1
tcacaacctctcctgcacccacagatcaggctcattctcatagtcattttgtacttgctcatttttgtaatagcagctgagttgaatcctcgtcgtcctcctcctaatcccaatgctgcatgcggcctcgtctgcatcaacggtgtacgacgtgttggagaaaaaagccctgatcccccgggcgtgaagtctttcgtgcttcacccatgacggccacatggaggggttagcctccccggtgagtgtaacatcgttgttaccgtacgtcgccggtaagaaatacaggatccatttcgacagcgtcgtcttcat

SEQ ID NO: 60002 - DNA, 219 bp, Oryza sativa
  Clone ID: PAT_MRT4530_61572C.1
atgacgacgatgaggctggcgtcctccgccctacgccggaagatgacgacgatgaggctggcgtcctccgcttggctccgccgccccgccggcttcgggtgccgccactccgcccgcgtgtccgctcatcgctgccccactccgtcccaccagcttcgcgtggcgatggggatgtgtgatggatctggagctccagtggagtgtcatggatcttcttag

SEQ ID NO: 60003 - DNA, 324 bp, Oryza sativa
  Clone ID: PAT_MRT4530_61573C.1
atggcactcctcgccgccaccgcccgccgcttctctcgcagcctccgtcgcttcagctcctatggcgtatctggaggagaagaagcaggagtgcccgcggacgtggtggaggccgagtcccccgtccgcgcgccgccggacgagcagttcgcggcgtgggtcgcgcggctccggccgggcttcacagcggggtacctggccgaggcgatctcctcggagcgtgacccggacctcgcgctccatcaccaccatccccttcatcagccgttagatcaccggattcgccgaccacgaactcgctgccatcagatccggcgaccttga

SEQ ID NO: 60004 - DNA, 1170 bp, Oryza sativa
  Clone ID: PAT_MRT4530_61574C.1
attggtagctgtgtggtagatgaaagtactggtggaagccaatttgcgggggagactgttagatagttagtgtttcatgccaaatccacatttgaagagttaaagtcccgcacgaaagatgaattggattggagtgatgagtcggttggtatgaaaggaagatacaatgtgggcgcaggtcccatatcacataattttatgttagacttgaatagagaggtggaatgggaaacatatgtagatatagtactagggtcacaattcaaatcgcttgagatgtttgcttggaagaaagagcgcagcaaatcggagaatgaatttttagacctcaattaaagttcgcgcatagaatccccctgtactgtcatgaaccgaagaacgatatgtttgtcgcggatcggaaggaataattaattgtggaagatgtggaggtagggcaggaagtacaggttgaggaggatatggaggtagggggaagtacccgttgaggatgaagtggaggtaggggaggatttgtcagatgttggcctagatgtgaatcaagttgagaatgagatgaaagttgaacttgatgataggcagatggcttcatacatcagagaattgctttgaagaaaaatttacacccgacaggagtgtgaggaggctatggtatttaatggattgaacatggatttgttgaatgtgcattcagatgatgatgtggatgagtatgcttctaactccaatgacgatcgtccaatgggcaagatgtcagaggaagagaggagagtgtttgagaaaatcgttggtcgcaatccggaaatcactcaattcaaggatcttagcaatgatgggctcgcagttgccgatggggatccacaataagatggaaccatcgatgccataggggaggaatcgagaacggggttggaatttcaatctatggaagacttgaaaatatggctgcagagctactctatccgggtgcatccatgtttcatgtgaaggagtccaatgcatctatcaagtacaccatggcttgcctcgggtattggcgttgaaccctcgcatcagggcagagcccaacacaggagctgtgttgagcgggcctgtggtgagcgactaagtcacaaaacttagcgccgaattagttggcaagcatcttaaaagaaaccacatgagcataag

SEQ ID NO: 60005 - DNA, 276 bp, Oryza sativa
  Clone ID: PAT_MRT4530_61575C.1
atggaatttcttgacttcaatccaaattctcgattacagcacgacgggagacttagtcgcatgttccgggttatctatgggtataaatacaaaccccctaggaggagaggggataggccacaaagccacaaagccacaaagccacaagccaacacacgtcgccggatatcgacatcaaagattagcctagccataccccatccggtgcctacggaagctggcaagagggatctagcgccatctctgatcccgccgagtacaaattcgaggagatag

SEQ ID NO: 60006 - DNA, 1736 bp, Oryza sativa
  Clone ID: PAT_MRT4530_61576C.1
tgtttttttttttcaggttttttttttttttttttttttttttttttacaaggaaaaaccaatgatatctccaagcaaaatatatcatctgatttacaaggaaattgggaaataagaaatataaattaagcaaagaactttactgtcccctcacggacccaatataaattaagcatttgattttaataaatataatctgaaacggagggagtaatagctgattaaagcacccaataatatatttcgctgataagcttgtacatctccgacttgtgcttcacgaggcggagcactccagtgtcgtcgcagcgctccacctcgacggcggtgaacacagcgaacagctccgggttgtgttgttcgtcggcgtcgaagaagccggtctcgaagaacctggcgatgcagaagttggcagagcccaggtgcacgaggtgggaagacacctgcgtcaacgccttgggcggcgtgtactccagaggaaggaggctgtgctgctccggctttctcccgccgctaatgagatcagacgcagataggacgttgtcggtgccggacgcgaggccatagaacaggccgtgctccggcacgtacacggcgaggccggtgaacggcatcgcgcaccactcgccgccgctcgccaccgcgctccactctccgcgctccgtgtggaacctgtaggtgccgacgccttgcttggatatccagatgtccaccccatccaccaccgcgtaggagtcgaattggaagtcgccgcgttgcttcaccatgtaaggaggcggcgggagagtgtggcaacaccagtcgccgtcggcgtcggtgaagctctccctactataggttagggcgtggaagcagtgatcatggccgccggtgaacgggccctggatgtcgtcgaggatgtaaaggtcgtcgtcgccgatggtgagggacacgggggagaacttgggcatggggagggtgggcagggagcggacgacgtgctcgtcggggtcgtacaggagggtgcgccccgtcaggtcggtgccgactatcttgttatgccttccaccaaggagcatgaactccatcgtctccatcgggcagaccgatgcacggaagctcatcaccgggcatggcagattgccgtactccaccgccgccgcgccgtcgtgtgctccggcgtccagcggcgttgccaatttacgggggaggaagaagcgtgacatgtccatgcgccgcactgtgtagttgccttggaccttatcaagcaccagattcacaaatcgccggtaactcataactgatcttcctcctccaaattatgaacaggaatctactagatatgtatatgcactagttgcatatacgatcgatcgattagttggatttatccgaaattctttgtgcttcggatgttaattgttcatcttgttgattccaacacatcgaggcagcatgaatatctgtacctcgatttctcctgcgatttacgaaaaaaccgactccggatttacttctgtccgccggaatccagtcgagtgttcatctggatccgatcgatatccaccggatttctcctactcctcctccacaacccggttgaatgcaagcagatggagaagcgaatcaggcgttgggttgcccgggcgggcagcggcggcggcggcggcggcggcggcgattttttattctgctgcgagggacaggaccagacttatgttcctcgtgccgattcctcagcccggggatccactagt

SEQ ID NO: 60007 - DNA, 324 bp, Oryza sativa
  Clone ID: PAT_MRT4530_61577C.1
atgccgtcctcgcatccgtgcagctgctgccggctgccctcgtcgcctccccaccggcccggtcatcatccccctctcgtcattcccggtcgtcatggcgttcgtccctccgtcaagccgatcgcgtttcgtcaagtgtgctgcagcctcttcgtcgtcttcgtcctcggctccgtgtcgtcaagccttgtgcaggcctcgtctcgccttcgtccaaggatcaccaccgaagtcattccatcaccgttcgcctccgttgtccccgagccgtctccgccgcgcccgttcgtcatcgtcgttccgcgcctcgtcttgtggtggtaa

SEQ ID NO: 60008 - DNA, 203 bp, Oryza sativa
  unsure (1)..(203): unsure at all n locations
  Clone ID: PAT_MRT4530_61578C.1
gacagcncgngcagcaagcaattaaagatgacaattttggcaatggaccctcaaggtgatacctttgtacttgtaattaccatatggaatgaaatttacagcatattgaaattgaaatcactattgttatgagcatggctgctatctctatgccagacatgtcagtctatgagatsatcttgcttgataatatcagtagcsas

SEQ ID NO: 60009 - DNA, 180 bp, Oryza sativa
  Clone ID: PAT_MRT4530_61579C.1
atggccgagggaggcgacagtggcctactagacggtttcgaggaagatggatggtggcggtgcaagacaaggaagaggaatggagccctcaccacggtgaagaaccaacaaggatcgagcgggaggtggattgatggccgctactataaagaaattatagatatttgcacatttatatag

SEQ ID NO: 60010 - DNA, 491 bp, Oryza sativa
  Clone ID: PAT_MRT4530_6157C.1
gttacaacgggatcccgttttgtagccgctctcatatttatattataattataaccagtcgctggtagttggattacccaccatggattagtctcttgtagttggattattcccccaccatggattagggtgattaaaccggacctcttgttgtgcaggcagtaaaaggtggttgtgtgcttgttgtgacacaacatttacccccaaatttagctctcatttgagctcgtcagctaattaaatatgtgaagatcaagttgctgcagttgatgattttgaattatggatcattcaatcatgggaaagagacaaagaatggtacactggtaatgatcggactttgagccgatttatatatgaggatcatttaaacatgggaaagagccaaagaatggtaagctggtactaatcggattttgtgagtcaatttatatatgaaaatttctgcagtggacaaaacacttggttctgctgtcataggagttctagag

SEQ ID NO: 60011 - DNA, 428 bp, Oryza sativa
  unsure (1)..(428): unsure at all n locations
  Clone ID: PAT_MRT4530_61580C.1
gacctgtctggcaagcaattgatgaaagtggatgttcagttttttgcttacaggaaactgaaaaggagagttttgatactgcttatattaagaaattattttcaaaacgttttgattctctctctttctctccttctgtgagggcttttggtggaatcttggtttgttgggttggggctatatttgctgnttatactgtttgnataactaggtctggagtgatcattaatttttttttaaagaactttgttgagtaatggacttttgtttaaatatatgggccttgtaatgatcttgataggtttttttttgtacaatggttgtttgatttgnaaattnntggagtaatatggaagaattggttgttttagagaagattgaatggttatttaattatgtttatatggatggatgatattaaagtattt

SEQ ID NO: 60012 - DNA, 175 bp, Oryza sativa
  Clone ID: PAT_MRT4530_61581C.1
cacattccttgttaaagttgttttcaaacgaagaaaaacacccctagcaaataattttttctgattattatgtttcccacattccccggaaaagcaacccggaaacaccggaccggcacctacaaaattcccagctttaattatcctgagacccatgggagccgggggtaacccc

SEQ ID NO: 60013 - DNA, 211 bp, Oryza sativa
  Clone ID: PAT_MRT4530_61582C.1
atagagaagttatttttgtttttatgctctttttcatgaatagaaagaacggaccgtgcatgatactttaagagctattttcagcgatagacatcttttgggcgtccatacagagaagagacatggaaaggaacacagcctccccggcgaccaatggaacaggaacatatggccctgtaataggtgggaggagccggggcgtgggctggag

SEQ ID NO: 60014 - DNA, 1758 bp, Oryza sativa
  Clone ID: PAT_MRT4530_61583C.1
atggctaccaatttctttaaggatctgtatacaaaggatcccctagtgacccctcaacccctccttgatttgattatgcttaaggtgacagagcagatgaatgaggacctctgtaaagctttctcggacaaggagatttcagatgctcttttccaaattggaccaattaaagcccccggaccggatggtttcccagcaagattctttcaaaggaattgggaagttctgaaaaatgatgtgtgcaaggctgttaaactcttttttgatcaaaaggtgatgcctgagggagttaatactactgcaattgttctaattcctaagaagaaggagtcaaaagagctaaaagatttcagaccaatcagtttgtgcaatgtgatatacaaggtggtagctaaatgcctggttaatcatctccgaccaatcctagagagtattatttcccaggagcaaagtgctttcattccgggacgcatgattacagataatgcgttaatcgcttttgagtgtttccacaatattgcccagagcaaaagggagtctcaagagttctgtgcctacaagttggacttggccaaggcttatgacagagttgattggcagtacttggaaggggtattggataggatgggtttcagtaacacatggattcaatggatgatggcctgcgtcacttcagttcgctatgctgttaggtttaatggatccatgctgaaatccttccaaccatccagagggctgagacaaggtgacccgctctccccataccttttcctgttcgttgctgatgggctatccaccattcttagttcggctgtaagaactggggatttagttccgctgaaagtgtgccgacaggctcctggaatttctcacttattgttcgcagatgatagtctcctctttttcaaagcaaacgtggaacaagcgacggttgtaaaagaggctcttaacctgtatgagcggtgtactagtcagttgttgagcccggcaaagtgctcaatgcttttcggcaaacactgttcagaccagactcagccgggcataaagtcactacttgatgtccagcaaaactcgtttgaagacaagtacctggggttgccgacgccagaagggagaatgaaagcagacagattccaatcaataaaggaaaggttcttcaaacggttaattgattgggcagagaagcatctgccaatggggggcaaagaagtgctgattaaatcagttatccaggcgctgcccacgtatatgatgagtgttttcaagctgccgccgagcttctgtgaggaatacatgcaattggtgaggaaattttggtggggagaagaccgcagccagagaaaggttcattgggcctcttggcagcagcttatcaaaccaaagagtatgggtggaatgggattcaaggatatgaaaatattcaatcaagccctgctagcccgtcaggcctggcgtttggtgcagtttccggatagtttatgtgcaagagtccttaaagctaagtactaccccaatggtgatcttctggacacggccttttcgtcagtttcgtcagattcctggaagggtatcgttcacggtttagagctgctgaaaaaaggagtgatatggagaattggaacaggaaggaaggttcacatttggcgggacgattggttgcctagagagcatgggttgaaagtcatgggaaagaaaacaggaacaagacttaaatgggtctcagaccttttagttccaaatgaacaaagttgggatgag

SEQ ID NO: 60015 - DNA, 410 bp, Oryza sativa
  Clone ID: PAT_MRT4530_61584C.1
tcatttgtgggccctggtggacagcgacttcttctctcgttcacattcacaccgcaaaaatcttatcgcctcccgctcggcgaaggcaacggggagacgcggcttcgttggcggcggcggaggcgacgggaagacgcgtcgtcgtcggcggcggaggcgacgaggagacgcggcgtcggcggcggcggcggcggaggcgtcgaggagacgcggcgtcggtggcggcggaggcgtccaggagacacgtcgtcgtcgtcggcggaggcgactgggagacgcggcgtcggcggtggtggaggcgacggtgatacgttcttgattcttgcagtggtggaggcaaatcatggttcttgcgatgttcatgctctactagtactagtattttctcaactggagagattttttttttt

SEQ ID NO: 60016 - DNA, 329 bp, Oryza sativa
  Clone ID: PAT_MRT4530_61585C.1
tgatgaaatagtatacactcttgtatcatttgtcttgatcagatattgacacctaataatgcagtatgcagaatttcagataatcatgagtcaactcgtaatctgtgtttaggtatagctgccagcctacactgcctaatgcttggtcaaaaaattattatcacttggttatctcatttaattgctaccatgaacatctaatctgccaattgcataatgtggcttgatgggattgacaacttttttttttcatagtttgggctgcaaatgcttccagccattccattcagacacaattgtcaacttttctcacacataaaatatcattg

SEQ ID NO: 60017 - DNA, 2151 bp, Oryza sativa
  Clone ID: PAT_MRT4530_61586C.1
gcgggtccccgcgctgcaagaccctagcaactactagggtttctctctctctcctccccccctacaccgccgccgctgcacccgccgccgccgccgccacaccaccgatggggaaggcgagcaagaagtccgtggccgtggccgtcgcgcccgctgctgtgccggccaaggggaagggcggcaagaagcgggaggcggaggacgagatcgagaaggcggtgagcgccaagaagcagaaggccgcggcggcgccgccggccaaggccgtccccgcgcccaaggcggacgccaagaaggccaagaagcagccgccgcccaagaaggccgcgagcagcagcagcggcagcagctctgaggaggactcgtcggagtccgaggaggaggtcaaggtccaggtgaagaagactactaagcctgtcaagcaggagtcttcttctgatgagagcagcgatgagagctctgatgatgaggatgctaagcctgcggatccggttgctaataatggtcttaagaaaggcaagccagcgagcagcgattctgagagtgattcagacgatgaaatggatgaggacgagaaacctgctgctccagtgaaaaaaacttctgtgactgcacaaaagaaaaaagatgattctgacagctctgagagtgagtcagatgagagtgattcggacgaggatgtgcctacaaagtctaaagcccctgctgtagctgccaagaatgatgattctactgatggttccgagtccgaaagtgactctgaggatgaggatgctgcacccaagggtgctgccaagaaggaaagcagcagtgatgaagaggatgacagttctgaggaaagctctgatgatgaacctaaacaacctcaacaaaaaaaggcccaagaggaatcctctgaagagtcttctgaagaagatagtgatgaagaggatgaaaaattggccaaaactcctaagaagaaaacgcctgctgccaccaaatcacaaaatgatgaacctaaaactcctgcgagtaaccaaagtcagggaactgagtcagcaaccctttttatgggcaacctttctttcaatttaaatcaggaccaagtgaaggaatttttccaggaagttggtgaggttatcagtgttcgtttggctacacatgaagatggctcctccaggggctttggccatgttcaatttgcttcatctgaagaagctaagaaggcgcttgaattgcatggctgtgatctggatggtcgtccagtgagacttgacttggctcatgaaagaggtgcatacacccctcacagcaggaatgatactggatcattccagaaacaaaacagaggttccagccagtctatatttgtcaagggttttgattcatctcttgaggagagcaagatccgagaatctcttgaaggacattttgctgattgcggagagatcacacgagtctcagttcccatggatcgtgaaactggtgcaagcaaagggatagcatacatagattttaaggatcaggcttccttctcgaaggcacttgaactaagtgggtctgaccttggtggctacaacctgtatgttgatgaagccaagcctaaaggagatagccgagatggtggtgggagaagaggtggccgatctggtgacagatttggcggccgatctggtgacaggtttggcggccgatctggtggtaggtttggaggtagagatggtggcagaagaggtggacgtggtggcagagatggtggcagaagaggcggacgtggcggttttcagagcaggcagagtgctggtacagctagtacaggaaagaagacaacttttggagatgagtaatggagcttgatcttgcacagctacatgcctacatcttatgcagctgtcaaaaggactgcctacctgcaactgtagtgaaatgcgatgagttctactcccatggtttactctatattgccgccgaatggctgtaccagtgaacaagttactgtgctggtatttttgtctgcagttttggtgtgtttccggtgattgtactggacatctagcgattagtgtaatgcaaggatttcctattacattgttatacatcaagtatttgcttcaaaaaaaaaaaaaaaaaaaaaaaaaaaaaaaaaaaaaaaaaaaaaaaaaaaaaaaaaaa

SEQ ID NO: 60018 - DNA, 484 bp, Oryza sativa
  unsure (1)..(484): unsure at all n locations
  Clone ID: PAT_MRT4530_61587C.1
ccacgcgtccgcgcttcgatgccggccaattcacgctaaacatcacacgcgtcaatggctccgtcgccatcgacaccggcatcgtgcaggcttcgatcacccgcacggtgttcgaccaaaatcccgttgcggtgtttgccgtctcgaaggttctactgcccaaggaaatgttcggtcggggcggtgctgatagcgacgtcatggcgccgccgccggacgcgatggcgccagatgctgccgagaacgtgcggacgccgccgacgagactgtcgtcacctccagcactgcggggtggcgctgatagtgagtcgtcatcagcattgtcaacggcaagggctgtcaattggtggtgtatacggttggtgctcctaaatctgcatctcttactactacctctggtatgagatccggatgttacccattgctcgnttcattttgctcaatttttggttcttctgcaaaaaaaaaaaaaaaaagggggggg

SEQ ID NO: 60019 - DNA, 2045 bp, Oryza sativa
  Clone ID: PAT_MRT4530_61588C.1
ccacgcgtccgggccaagccaaagcggtgaagggggggcaatttcctcaatttctcgcaagtacggggggcaaaacgggaaatttgccccaaaagaggaaaatgacactaacgacttgttcctctctctctttcttttcccacttggggagtcgtcgtctctgctctccggtctccagaaaagcaaaaggggaggcgaagccaagccaacccaaccacacgccaatccactcggaatccgcctagggtttcctcctcttcctcttcccctcgcggctgctgctcggcggattctgctgctgcggaggagggcggcgggggttggggctgcaagctggtccgatcagcttttcctgctgctgaggtagcgggagcgacaaccagggcatttcttgtacaaggatgaacagcctgccccggctcaaataatatttgcggttggatttattttttttcgacatgaacgggcagccaaggtttcacgatatgataggcggtggtggcaagggaatgcaagataatgagatcaatggcctcttcaacatgccgtcttaccataagtttgtggagggctcccagatgtctgttgacagcgccgacggcttcaacatggccaactacgttgggggttccgttgccatgtcggtggacaacagcagcgttggctcgaacgagtcccgcacggttatacttaagcacccaggcctccgtgatgccccgacggcaagctattcggttggcaacagtgtcttccgccccaaccgtgtggctgcgcacacgctaaatgaggatgcgttagctcgtgttttgatggatccgagccatccgactgagatcctaagtaattatgaggaatgggccattgatttggggaggttggacatgggggttccttttgcccaaggggcctttgggaagctataccggggaacatacaatggagaagatgttgccattaaactactggagaagcctgagaatgatccagagagagcacaagcattggagcaacaatttgtgcaagaagttatgatgttgtctagactgaggcacccaaacattgtgaggtttataggtgcatgtaggaagtcaattgtgtggtgcatcattactgagtatgctaaaggtggttcagtccggcagttcctggcaagaaggcaaaacaagtcagtgcctttgagattggctgtaaaacaggcattggatatagccagggggatggcctatgtacatgctttgggatttatccacagggatctgaagtcagataacctattaattgccgcagataaatccattaagattgctgactttggagtggctcgcatcgaagtaaaaactgagggtatgacaccagagacaggaacctaccgctggatggcaccggaaatgatccagcacaggccttatgatcataaagttgatgtatatagctttgggattgtcttgtgggagcttataactggcatgctcccattcacaaacatgacggctgttcaggcagcttttgctgtggtgaacaagggtgctcggccagtgatcccgcaggactgcctgcctgctctaagccacatcatgactctttgttgggatgcgaaccctgaagttcgccccgcatttactgatatcgtttgtatgcttgagagtgcagagatggagattctgagcaatgtccgtaaagcacgcttccgctgttgcatcactgagcccatgacaaccgactgaaattaaagcaatgtagatgattacaacatggatcgagggaggaagcaagggaggatgaagaaagaggcaatctcaatgtattcattagtaccagctcatagggtctgtgtgcccacagaagttcctaggctttgagcttctgtgttattcgattctatcttgtgtgagttgcacagctcaagtaatctcttctggaatatagatgttgccttgtatgttaacaggatctaatggagctttcctatgttaataacatctgcttgttggtgtaaaaaaaaaaaaaaaaaaaaaaaaaaaaaaaaaaaaaaaaaaaaaaaaaaa

SEQ ID NO: 60020 - DNA, 1800 bp, Oryza sativa
  Clone ID: PAT_MRT4530_61589C.1
gtcgcattctgttgaggtcatgcgagtcacgactagcattaaggtctcagctaacgagcagagaggccggtgacgattcatacttgttagcagcatgaatgctagctggacttgcaggatatggctctgctgcaggcacatcgctccttcctttcaggtagtccccaccaccgtcgccatgtccggccgcttgtcaggctccggaagcacacacaggaacccaacccggatcacccgctcaatctgctcctcatcgaaatcacccttcagcctctcgtctgccatatcggcgactgatttcctgtggcggaacgagtcctgtacccactcgacgaggctgttcttgttgttgtggccatgtatcgacgtcctgatgcattccgggtcgagatagctccgtgtaccaatcacggttgtctgccggcccggggtcacttcgtcatggttgatttgtttcaccagcccaaagtcgcacagcttcgcgcagctgaggttctcgtcgagcatcacgttgcttggcttgatgtcgcgatgcaggacacattcgttacgcgcggtgtgcaggtactggagaccattcgccatgtcgagtattatattgtaccagcccatcaggtccacgatattccgatgcttaagctgggtaacaatggttatcactgccacgaattcctgccacgctgcttcagacatcctctgaattttcttgacggccacaagagtctgagatggatctgacaggactccccggtacacagcaccaaacgcaccctggcccaactttcgttcatctgaaaaaccatttgttgcagtgtacaattcctcgtaggagtatgatcttggaccagccagtgcaaccttcttgatggctctatgcctgacgcaaagccaaacaacaactgaaacgaggaccacaaaaacgactgcagcaacaatggatccaatcatcaccggcccgttgttcttggcagaattcacggatccaggacctgccagcgacgacgtcggtgtacccgcactgccagtgctcagattgaagggcaccaccatgaaactggtgttgacgtcgtaccggacgcggcagctgtagctcttgcgctcgccgcgcgccgtcgccgggaacgtggccgagacgttggccgccagggcgtccaggcagcccttgcacgcgtcgggcggcaggtccctggtgcacttcctacatgcaaggcacaactcgctgcatgcatcccacatgcaaggcacaactcgcgcgaaccgcgccggcgagctcgccgcctgccggtcaagatctccccgtccgaaacgtatgttatattgaaaatatactatgcgtagttgcgtactgatatgggctgtgccgaagaagctactgtcggagtagcggaggaggcactggtcgaacatggcggagaccgtggtgctgccggggcaacgtttcacgacgcctcccgcgctgatcccagcggcgacgaggcagtccatgcagtcggcgcggctgaagtcggcggcgcacatggcgaggccgtacacggtggccgtgccgttgccgaccgtgccgttgaagaagccaccgttctttgacacggtctcgttcgggagcatggcgagcaagcggccaaggttggcggcgtacgcgccatcctgcgtgtagttgccggcggccgtcgaggtgcactccaacgcttgcagcacgggtgcgccgcctgcgtcagctacactcaccaacgagctggcaaaacaaaggaggcaaacacaggagaacgagcctagagcatggtagacgaacgtcgtcaacat

SEQ ID NO: 60021 - DNA, 222 bp, Oryza sativa
  Clone ID: PAT_MRT4530_6158C.1
atgccgatgggaaggtggaaacgttgtggtgtggagaaaggagacagcgatagtagagaagcagcagcaggaaagcttagcggagaaagggggtggagtcgccgccaaggagtcatcgggtcgagcgacgccatcgccgccacttcctgtcatctaggcaagtccatgacgcgcgtgcaaaggaaggcggcctcatcggtgacgcagaagggtttcagctag

SEQ ID NO: 60022 - DNA, 3193 bp, Oryza sativa
  Clone ID: PAT_MRT4530_61590C.1
ctacatattagccataagcaaaatagcaagcctcactgccctcagcaccaacagcaaaatgatccgcttgtttgcttcctgcccaaaactcattcctctcttggctgtcttcatcttctcaagttccctgccattagcaatcagtgatgacacagacactgatagagaagccctgctctgcttcaagtcccaaatctctgatcctaatggagctttaagctcttggaccaatacatccctgaacttctgcagctggcagggtgtttcatgcaacagcacacagccccaactccgagtcatggctctcaatgtcagctccaaaggccttggcggcttaataccaccttgcataggcaatctgagctccatcgcaagcctcgacttatcaaacaacgcattccttggaaaaattccaagtgagctcgggcacttgggacaaatcagctacctcaacctgagcatcaactctcttgaaggccacattccagatgaactgtctttgtgcagcaaactcaaggtactcagcttatgcaacaactccctccaaggtgagataccaccaagcttaacacaatgcactcacctccagcaagttgtgctttgcaataataagctccaaggcagaattcccaccaaatttgggatgctgcatgaattgaaaactttggatctctccaacaacgccctcacaggtgacataccaccattgttgggcagtagcccatcttttgtatatgttgatcttgggggcaatcagctcacaggaggaatcccggagttcttggcaaatagctcatcccttcaagtgcttagtctcaagcaaaataatcttacaggggggatcccaccatccctcttcaacagctccaaattgacaaccatttaccttaaccgtaacaacttagtgggttccataccacctattacagcagttgctgcacctattcaataccttagtctagcacagaataaactaacaggagggataccagcttcactgggaaacctttcttccatggttcttttatctctaggagcaaatagcttggtggggagcattcctgagagcctaagtaaaatccaaaccctagagaggctagttcttacatataacaagttgtctggtaatgtgccacagaacattttcaacatgacatctttgaaatatcttggaatggccaataactcactcatcggccgactaccaccagatataggcaacaggcttccaaaccttgaaaccttgatcctatcaacaacacagttaaatgggccgatcccagcttctcttgccaatatgtccaaactagaaatgatttatcttactgctactgggctcaccggtgtagtgccgtcttttgggtccttgccaaacttgcaggaccttgatcttgcatacaaccagcttgaagcaggggactggagcttcctctcatcccttgcaaactgcactcaactgaaaaagttggccttggatggcaatattctccgaggaagcttgcctagctcagtcggtaatcttccctcacagctcaactggttgtttctcaagcaaaacaaactttctgggacaattccatcagagattggtaacctaaagagtctcactgttatgtatatggataacaatatgtttagtgggagcatcccacctaccattggaaatcttagcaacttactggttctaagctttgcacaaaataacctctctggccatattccagattctattggcagcctttcccaactaaccgagttttatatagatgggaacaacttgaatgggagtatacctgcaaacatagggcagtggagacaattagaaaagcttgatctctctcacaatttcttcggtggaagccttccaagtgaggtcttcaacatttcttccctatcaaaaagtttagatttgtcacataatttgtttactgggcccataccactagaaattggcaacctcataaatcttggaagtatcagtatttcaaacaatcgcttgaacggcgaaataccgtccactctagggaaatgcgtgcttttggaataccttcacatggaagggaaccttcttactggaagcattccacaatctttcatgaacttaaaaagcatcaaggagctggatctctctcgtaacagcttgtcaggaaaagttccagagttcctcactctcttaagttctttgcagaaactcaacctttcattcaatgattttgaaggggcaataccatcaaatggtgtctttggtaatgctagcagggttatcttgggtgggaactacaggttgtgtgcgaatgctccagggtatggcctgcccttttgccctgaatcaggatcacaaagtaaaagcaagtctactgttttgaaaatagtaattccaatcgtagtgtctgctgttgtaatttcattgttatgtttaacggttgttctcatgaagagaagaaaagaagaaccaaatttgcagcactccagtgtgaacttgaggaaaatatcatatgaagatattgccaaagcgacagatgggttctctgccacaaatttggttggtttgggatcctttggggctgtttacaagggccttctggcatttgaggacaacccagttgctattaagattttcaatctcaacaagtacggagcacccacaagcttcaatgcggagtgcgaggcattaagatatattcgccatcgaaatcttgtcaaaatcattactttatgctctacggttgatccaaatggctatgattttaaagcacttgtctttcagtatatgccaaatggaagtctagaaatgtggctacatccagaggaccatggccttgagtacggaatgggtgggcaaatatcaacgaagggtgatgtctacagctatggagtactgttgttagagatattaactggaaagcgtccaaccgatgaaaaattcaatgatggtttgagcctccacgatcgcgtggatgctgcattaccccacagggtaaccgaggttttagaccccaatatgctacacaatgatttggatggtggaaactccgaactgatgcaaagttgtgtcctcccactggttaaggtggcgctcatgtgctccatagcatcaccgaaggacaggttagggatggcacaggtttccactgaaataaactccatcaagcaagcatttgttgatctttccagtggaggaaaaatggtttga

SEQ ID NO: 60023 - DNA, 261 bp, Oryza sativa
  Clone ID: PAT_MRT4530_61591C.1
accggacggacgagcgcagcatgaacactgtgtcgcctgcatgctctgagggatactgcacagcagcaaggcgtgaggtcccattcgatggctgggctaaactgttggcgaagcgcgtggtatatggcataagtatatcagacccatgcatgctatacctgctggaatgagagagatcataccatggagtatagccacactttggaatctccaccatctaatacggcgatgccattctgattacccggaaaagaagttttc

SEQ ID NO: 60024 - DNA, 234 bp, Oryza sativa
  Clone ID: PAT_MRT4530_61592C.1
gctctttaaataaaataatatatcacaatattatatattatatttttaaacaggcagcagaggaaagcattatgcagctgatctggtcaaacattacaaaccagagtaccgccactgtgcacggttacaaaccggacgcctcgattccgaacttctatggacctcgacggtgccacaacttccctactacgtgacgatcgtacttaacactatcgataactcacttgtcactac

SEQ ID NO: 60025 - DNA, 252 bp, Oryza sativa
  Clone ID: PAT_MRT4530_61593C.1
atggcccttgcagctggatctccggtaacagcaactctatccaggtgctttgagcctgctccttgtgttattcccctttcacatggcggagatatgtttgggcaaaagtctgccgcaaagacttatggtatcttagagtttgttagagataatggtcgtgtccggatcaaattaactggcacgctaacacacccgaagctggtcgcctggtccttagatgtaatggtagctcattcaagtggctcctattaa

SEQ ID NO: 60026 - DNA, 429 bp, Oryza sativa
  Clone ID: PAT_MRT4530_61594C.1
ttaaagcaacaacaattatattggcacaattacacagcccacatcagcgacctcatgctagaagatattgggctacacctaaagtgtgactaacataaccttcaaggcaaaggttgcagctgtactgctgaagtgctgattggatgccagaggctggggccaaccgcacgtttcatcagtgaaacggtgtaggagtcacggacatcagcgtccgtccaaatggagcccaggtaaactgtttcgttggaaattttgaaaagctttctgttcttgcgagaattgaaccccctttttttttttttgtttatttctaaaaaacgtgttctaaatgagtgcccgggcaaggttttgtccgtcccaacgtgccatggtgttaatgaatgcgtgaatctttacgtcttgcatcacaaaaaaaaaaaaaaaaaaaaa

SEQ ID NO: 60027 - DNA, 390 bp, Oryza sativa
  Clone ID: PAT_MRT4530_61595C.1
accaagacatttgattcttgacaccagaccaagtacatgcgtggataactggaccaaggaggcataaccgtctggcatcagcagggttccatgggcagttgcggacaatacctgccaacacacgcaggtgcctgctgttgggattccttgggagatgtccttgcatggggtcgcttatcatgacaggtgtttgcagacttgcagcgcaaaagaccggatccagggtgtgcagcatgaaatgctggcatggaaggagtgtatgtgagatcactcttgcagatcacggagattagcctggtgatatttcataagctggaaacccaaccatggtgatgggttgttatggataatatagtgagctgagtaccaccgggacaaaacctgctgtgt

SEQ ID NO: 60028 - DNA, 499 bp, Oryza sativa
  unsure (1)..(499): unsure at all n locations
  Clone ID: PAT_MRT4530_61596C.1
ccacgcgtccgcttaaatattatagcaatacacgactagaaacgtaggaatcggtgcggatgcgggtgcggcaccaggagcaccctgatgacaagtgtcggaattgcaataagataggccactgggctaaagattgtcgctcaaaggccaagaactgccgaaggccacatcgcagcggaggacgacgacgagcccacgctgctgatggcccggacgtgctttggttgaacggtgatgcccgcgcgggtgttgactgacagttttttttttttgggttcagatttggatagaacatgaggatccaaggacatagcagggtgccttcagcaagctgaccgtgcttaattttggtggaatcttagccgggcgtgagctctcttggacgatcttcctcctcccggaattcgaccttttcggttgatcgactctttggctggaaaagatgtccgaatgctncaataaagaaggctcttaaacagcaagctgaaggtgtgaagat

SEQ ID NO: 60029 - DNA, 3526 bp, Oryza sativa
  unsure (1)..(3526): unsure at all n locations
  Clone ID: PAT_MRT4530_61597C.1
attcccggngtcgacccacgccgtccgggnaacttaaatattaaagcaaatacaacgactagaaacgtaggaatcggtgcggatgcgggtgcggcaccaggagcaccctgatgacaagtgtcggaattgcaataagataggccactgggctaaagattgtcgctcaaaggccaagaatgccgaaggccacatcgcagcggaggacgacgacgagcccacgctgctgatggcccggacgtgctttggttgaacggtgatgcccgcgcgggtgttgactgacagtttttttttttttgggttcagatttggatagaacatgaggatccaaggacatagcagggtgccttcagcaagctgaccgtgcttaattttggtggaatcttagccgggcgtgagctctcttggacgatcttcctcctcccggaattcgacctttcgataactaaagactgaaaccactctaatgtcaccggcactgcactttgtcagacaaaatgagtacctctttctgctgttctcaatcaagtttcagccataaaaacagatagcggagtcatcattttgtgacatgcatgttcaatcctctctatgttaattaggatgcatcctctctatattaattctgttgcaaatatgccaggtcctcatggttcttcctgtttgtcttgcaatggcatagttattggcaacaaaatagagtgacaatcgcctgctcatgatgaatatttttcagttcaaatcccagtcccaactttagaaaccagccccgagtatggcccgcacggcgagtgccgccaccggtggcgacgagccgccgcccgaaccccaccatcaggccggcgtccagcggccgcccaaaaatgacggcgacggcggtgaggaggcggggggcgggaatgtgggtgttcctgcggccgccgccgacgaggatccaaccgccggcgcggtgggtgccgcggggaggggatcgaggaggaggaggaaggcgggcaggagagcggccgcgccagacgaagaggacctcgacacgatcctcgccgagatcgaccaaaatatggccagtgcggcgctcgattccatgccggagatgaatctggcccaggcttcggcgtccacggcgatggatgtggctgctaccgtgaacgatgttggtgccgaggtgaaggatgacgaaatggaggcggagtcggccgctcctaagaggaggaagcggaagaaggagaaggagaaggagaggaaaactacctcgaaggtggcggaggccgacgcgaagaagccacctaggcacgtgcgggtgatgctggaggtgctcgccaagaggaaagaggcggaggagctgaggaagcgcgaggaggagctgaggaagaggaaggcagaggaggagcggctacagagggaggaggacgagaggatggtggaagagatgaagatgcagcagaaggagagagataagggcaaaacgatgaagaagaggcaggatgggaagaccttgactgggaagcagaaggaggaggctaggaggcttgatgccatgaggcgacagttccttgggcagagtagaattcttgctcgcagcgaccttggcaatgatggtggtgccaatgagagaaagaagaggcccatatatgattccaagagaaagaaagtgcaatcaaaggctgatgaggctgctaatggagatggcggtcacatgcaggagcttcataaggttaacaaggaagaagaagaatgtgccattatggaagagcaaccccactaccgtgtggaggaggatggggagaaaatcaaacttgaggagattaaaggggctgaatcagtagaaagaattaactttgaggagagaatcacaaaggaagagaagaatgaagctatgaaatcctccaatgaggaggttgtttctctagtcacaggctggaagaatagaattgaagaatgggatgttgatgttgatgaaaatgataaggacactagaaaacttactccaaagagagatcctgctaaggtggacaaagctgagaaatatacggacctccgctcaccgatctgctgcattcttggtcatgttgatactggaaagactaaattgttggattgtattcgatgcaccaacgtgcaaggaggggaagcggggggtattacccaacagattggtgcaacattctttccaattgaaaacattagagaaagaaccaaggagttgaaagctggtgctgctcttcatgttccaggatttcttgttattgatactcctggtcatcagtccttctctaacttgcgtactagaggttccagtttgtgtgatatcgcgattttagttgttgacatcatgcgtggtattcaagcacaaacaattgagtctttgaatattttgaagagacataaggcagacttcatcattgttttaaataaggttgatcgactctttggctggaaaagatgtccgaatgctccaataaagaaggctcttaaacagcaagctgaaggtgtgaagatggagtttgatgcaaggctaacagattgtactgtcctagaggttaaggttactgaaggccactgcactacaattgatgttgtgttggccaatggtttcctccgtgaaggagatcaaatagttacatgtggcatgcagggacccattgtgactcatatcagggctctgttaacacctcatcctatgaaagagcttcgaattaagtgcccatatcaacatcataaggagatcaaagcttctcaaggcatcaagatatctgcgccaggcctagaacattcggttgcaggcacaagtctctttgtagtgcagccaggtgatgatcaggaaaagtcagtgaacaaagccatggcagagatggttgttttaatgaacaggattgacaagaacagtgatgctctcatagagtttctaaagagcccagctgtcaatatccctatttatgatttcaatatagggcctgtccacagaaaagatgttatgaaagccagtgtgatgcttgagaagaagaaagaatatgcagctatctttgcttttgatgtcaaagtgatgcctgatgcccgtgagattgccaatgaatctggtgtaaaaatctttgtggcagatgtaatatatcaccttttcgaccaatttaccacatacattgagggtttgagggaaatagagaaggatgaaaagattgtagaggctgtgttcccttgtgttctcaagatcattccagactatgtgttcaacttgaaggacccaattgtcttaggcgttgatgtccttgaaggagtagctaaggtgggaactcctctgtgtctcccttccaatggtttcgctcgtattgggaacattgcctctatccagaatagcagtaagcaagttgatgtggcaagaaaaggagagaaggttgctataaagaatatagtcttgggcgttttcgacagatcacaggaagcactccagatgagcaaaagaaatgtttcgggtgacctcacgttgaaagagtgggagcttgtgaggacgctaaagcacatcttccgtataccttga

SEQ ID NO: 60030 - DNA, 301 bp, Oryza sativa
  Clone ID: PAT_MRT4530_61598C.1
acacaaacgataaatcaatcggacgatgtcgagaaccagacttgtgtatgaatgggccaagaactcagaattgacacgacaaactgggccaaaattcacaagtctgcggagaagaacaacagaggaggccgccagccaaaccatgggctggttgggccggccctaggttcgaccgaacctggtggttcggccgaacccccctcatcgccgctggatgcagggtttcttctgaacggtgtggattagctcccaatgacggttggagggtatttctaactattccaaccgtcacaaccgtcat

SEQ ID NO: 60031 - DNA, 384 bp, Oryza sativa
  Clone ID: PAT_MRT4530_61599C.1
atggccatgccaaatgctattccacgggataaagtagaaaaggctccaggagcacgatggagggggcagagagggcgcccgggtcgccagaggccgcgtctaggtcgcagcggaggctggaggtggcgtgagcgcccgccgtgcgacggggaccagggggtgacgaatccggaggtcggggcggagatggatggaggcgtcgagggcggcggcagcggggtggcggcgcggacggggctgcgacgggagagagcgggcgagcgagaggagcgcggggcgttgcggaggaatagatgcggtcatgcagagaaagaggaagtcaggaacaaatgcggaggagcgtggaccgttgattctgcaggacgatccttccagcaatcttag

SEQ ID NO: 60032 - DNA, 107 bp, Oryza sativa
  Clone ID: PAT_MRT4530_6159C.1
ttgtacctcctctagacctctgctacttatagctttgtacgcgccactcactctccgagcttgacggcggaggcaacggcggaggtcgtcgattggaggtcggggag

SEQ ID NO: 60033 - DNA, 3364 bp, Oryza sativa
  Clone ID: PAT_MRT4530_615C.1
atggcgttggttccggcaacggcggacccgatgaagtgctttcctttaccgataactcacatcaacaaactacactagttggatgatacgggttcaagcaatgatggaggatcaaggcgtataggagacgatcgagccggcggctggggcggcagtcgacccgaagaaggacaagaaggccaagacgcatcttcttcagtcgctgccggaggatctcttgatgcaggtggcaaagaagtggacggcgaaggaggtgtgggactgcctgaagacaaggttcgtcggggcggactgggtgcgcaatgcgcgccttcaaactctcaagggagatcactagtatggtggtggaagccgaggagacgctgaaccagtacgccggcaggatcaccacgatgggggtccggaattctgctctgggtgcaacaacgtcgatatggtgaaaaagttgttcgacatcgtcccggagaaattcatcagtcttgttgccgtcatcgagcaattctacgacatcgacgaaataccgttcgaagaggctgtgggctatctaaaggcgtatgacgagcgcgtgtgcaagaagaaagctgctgttggcggagtgatcgcctacggctaggtgttgcacactcaggtcgagtggaagcgtgcttcaagaaaaatggcagagaaacttcgcgccacagaagaataagccctatggcgagggggcgaaccgcggccaggacgggtgcggacgtggcaggggtcgcagagctggcagacgcggcggggcacaaaacaacaactcaggaggtggttctggtggcggtggccatgacaagagccacataaagtgcttcaattgtgacgaatttggccactactccacgtagtgcccacaccctaagaagaagaataccgaaactcatcttgcgtagacgaaggatgccggcccagctttgttgctcgccatgacagaggcggtgcagaacacgccgcgtcaaggcgtgcactgtgggctggtcgtgcacgaggaccatgtatggccgcgcctgatgctggcaggcaatggcgccgccgccggtgatgtctggtacctatacaatggtgctagtaatcacatgaatggagatcgtcgaaaattccgggagctggacaaaaccgtgacggggcaagtcaggttcggcgatgcctcatcggtgcagataatagagaagggttcaatccttttctcattcaaaaatggcgaccagtggctactcgacgatgtctactacattgccagcctctgctgcaacatggtgagtctggggcaactcaccgaaactagccaccgagtcatgatggatggggatgacctcgaggtgttcgacaaaatcactgtcgattggtgatcagggtgagaagaaccgtgaacaggttgtatcgcatcgagctgaagttggcgtcccctgtgtgtttgctggccagtctcgactctcgacgacctggtgtggctctggcatgcccggctcgggcacgtgaacttctaggcgttgaagcatttggtggacaaggagatggcgacaggggtgcccgcagtccaccatccaaatcaattgtgccaagcatgttttgtggctaagccgatccggcagccgttcccagcgattgccaattatcgagcagagacaccgctcgagctgctccacatggacttatgtgggccgatcaccccatcaacactggccggtaatcgatactttatgttgatcgttgatgatttttctcgttggatgtgggtgtttgtgatcaagtctaaggaccaagcgctcacggcattcgagaaattcaaaccgttgccagagaacatggcaggccgaaccatcaagacactccgaacagaccgcggcggcgagttcttgtccagcgagttcacgagcgtctgcaccgaggccggcatcgagtgccacctgacagcaccgtactcaccgccacaagcgggtgttcaagctgaagaaaaacactaccggcgaggtgatcaaacacaaggcgcgtttggtggcgaagggctatgttcagaggcaaggtgtggactttgatgaagtgttcgcgccggttgcgtggctggacacggtgcaagccattctcgcagttgctgccaatcggagatgggaggtgcatcatctcgatgtcaagtcggcattccttaatggcgatctagaggaagaggtatttgttgatcagtcggaaggatttgtgaagcaggggaaggagcatcttgtttacaaactgagcaaggctctctacggcctgagacaggcacttcggggctggaacacttgtcttgactggagtatgaaggagcttgggttcagccggtgtgcacaaaagcaagctgtctacaccagaggtacagggaatgccggactaattgtcggggtttatgttgatgatttgatcgtgacaggagaaaactcaagcgagatcacaacatttaaacaacagatggtgggggagtttgatatgagtgatcttggacttctcacttattatttggggattgaagtgatacaatgcaaggtgcaaatgggatcgccatcaagcaggctgcttatgcaaggaagattctgacccagtttgggatgttacattgcaattccacctcaattcctattgagcaccgttcacagctgcataaagatgctaaagggagtccagttgatgccacacaattcaggcgagtgataggttgtctgcgttacttgttgcatacacggccggatctgtcctatgctgtgggtgtagtgagcagactcatggagcgaccgactgtgatgcatttcaaggtagtaaagcaaatcctcaagtatctcaagggtactatcaactgtgggttcacgtttgctgatggcaacggtgcagtggagatcaccagattcacagatagtgatcaggctggtaacactgatgattgtcagagtactagcgggatggcattttatctcaacaatagtttgatttcctggagttcacaaaagcataaaacggtggctctctcgtcctgtgaggctaagttcatggcagccactgcggcagcttgtcacgctctgtggctcaggggattgttgattgagattattggcgcagaacctaggccggtgaagttgtatactgtaaccaattagcgattgcactcatgaagaaccctgtgttttatgggagaagtaagtacatagatacccgctaccatttcattcgggagtgtgttgaaagtgggaagattcaaattgagttcgtccggactaaggagcagcgggcggatgcgttaacgaaaggtttgccagcagcaagattagagacagctcggcacctgctaggtgttcgtgattttgggccatagcagaat

SEQ ID NO: 60034 - DNA, 243 bp, Oryza sativa
  Clone ID: PAT_MRT4530_61600C.1
tctaagaattgttaggatccctttgaactagcccaggtctaaggggttaaccgtcctgtaagtgctccggagatgtattcgggggcaccaggacttactagttgcgtgatagaaatgtcaggacgtttggatgagtagtaaggaggatgtcaggatcatgcgaggatgaccgacatgtttgattcgcgcattcaccgattagacgtttgggtgaatattcacttttattcgcctaagcaccca

SEQ ID NO: 60035 - DNA, 279 bp, Oryza sativa
  Clone ID: PAT_MRT4530_61601C.1
cgcttcgtccacgacccgtcaaaggacccgccaagcaacggcccctgcccattccctttaaccacagtacgcctcaaaacatctaaatttataatcattcccattggcaattgccttccaagcaaaaaagaagaggagcagcctcgccatggaacagaattaagcaggatatgccaacctccaaccacggaccgcgcacgcccgcccaggccgccgcatatcgcattctgcacccccacctcgcaaggaaggggagcacgcatccgaccaagcacctaa

SEQ ID NO: 60036 - DNA, 2577 bp, Oryza sativa
  Clone ID: PAT_MRT4530_61602C.1
atggcgatttttaaaaatcgccctcccagagagcgccgagaaaagaaatgcgaaaagaagagaaaagaaaaaggcgagaaaaaggcaaatggcaaggggggaagaagagtggaggaagaacctaagcagcaaaccctagtcgcgactacaccaccaccaccaccattgattccgatggacttcgcggagctggaggcggtggagggcctccggtggccgtggcacgcgtggccgccgaccgcctccgccgccgcgtcgctcgtcgtcccgacctccgtcctctgcacgccgctgcacccggcggcgcccgacctcctcccgctcctcccctacgcgccgctccgctgcggcggcggcggaggagggggagggtgcggcgcggccatggacccgtgctatgttgtccactttgccagtgggacccacctctgcatcctgaagatatagctttccagaaggattgaatgtcatattcacagatgatgtttgcttgcaagtttattgaccaccctgtagtaatttgctgtcccaggattgatggatcatgtggactgttgtatatgttactttccggtcttcttcgtgttcgtcgtcgacgcggccacctcggggccagagctcgccgcgctcaaggcggaggtgctcagggtcgtgcaggggctgcccgagggggtcagggtcgcgctcgtctccttcgcggcgtcggtgtgggtgcacgatctcggcttcgaggggtgcaccagggtggtggtgatgaacggggagcgcgagctcgagtcggagaagatacaggaatttctaggtgttcgtgatgctcgatacaataagttggctatgccaaggtccactaaagtgcagagatttttgctgcctgtttctgaatgtgaatttaacatcacatctgcgatagaagacctgagatccatgtctgcttgcccacgtgggcatcgccctttaagagccactggtgctgctatttccacagctgttgctcttctagaaggttgttgttcacctaatgccggaggtcggatcatggtcttcacatctggtcccacaacagttggtccagggcttgtggtggaaaccgatctcgggaaagcaattcgttctcatcgcgacattttcaatggcaatgctcctctcattgacaaagcccgagaattctataagaaagttgcaaacaggttaacagctcatgcattagttcttgatctatttgcttgttctctagatcaggttggggctgcggagctgagatacccaattgaagtgtctgggggcttaatggtgcatacagaatcatttgagtctgagcagttcaaagcctgtttaagacacatattcaatcgtgagggggttggttaccttaacatgaactttaatgcaacaattgagatagtaacatcaagggaggtgaaaatttgtggtgcccttggtccctgcatctctcttcacaggaaaaacagctctgttagtgataaagaaattggggagggtgggacaaactattggaaaatgagtacagtggacagcaaaacctgcatcgtgttcttcttccgagtggactgtagccataatactgagcccccaactgtcttctttattcagttcatgacgaggtaccggcatggtgatggtagctatcgcctaagagtaacaactgttgcgagaagatgggctggacctcgttctcctgagattgcagcagggtttgatcaagaagctgctgcagctgttatggccaggcttgccgtgcacagggcagagacataccatgttagagatgtgataagatggcttgataagatgcttattcgctttactgccaagtttgggaactatgtccctgaagatccatctacattccggctgtcaactaacttctcgctgtatccccaattcatgtactacctgcggaggtcacagttcattgatgttttcaatagctcccctgacgaaactgctttctttcggttgatgttgaatagggaaggagttgtggggtccctaatcatgatccagccaactttattccagtactcgtttgatggcccacctattcctgtgttgctagatgtcagctccatctctcccgatgtcattttactatttgattcatacttctatattgttattcattatggctcaaagattgctcaatggaggaaacttggctatcataaggacccaaatcatgaaaatttgcggaagctgcttgaagccccagaagttgatgcggaggcactattggtagaccgtttcccagtgccaaaactcataaaatgtgatcagcatgggagccaggccaggtttcttctagctcggttgaatccatctgtgacacagaaaacacagctttcagatggttctgaagtcatattcaccgacgatgttagtttgcaagtttttattgaacacttgcaggagctggctgttcagggattgatggatcatgtggactgtttatatgttactttctggtcttctgttatcttgaaagttccgggagagctttactgcttggaaggatgggatctcctcgagttgttgtacatttcaccagctccagtttga

SEQ ID NO: 60037 - DNA, 474 bp, Oryza sativa
  Clone ID: PAT_MRT4530_61603C.1
cccaggcccaaaaacaaacgggttaaaaaaaacaggcaagaaaacaattcccccacaaaaacccccacttattcaacgaaaaaaaaaaaaaagaaccaaaacaaaagggccagggaaaaaccggccccgggggggccacccaaaaggacaaccaggagggggcctccaaaaacggaccggggaccaaattaaaaaccttttaaccccccgaaaaccccttcaaaaaaaaaccaccggaaaaaggggggcccaacccaacccccggatgggcaaaagaaaaacccccgggatttgggccccccagggcaacaagggcaacggccggctggggggggtaaaaatggaacgggaaggggagaaccccccaagggaacccaaacccccccccctgggggaccccccgggaaaaaacccgggtttcggggggggccgaaacaaacccaccggaaagggccccttaaacccccgggaaaa

SEQ ID NO: 60038 - DNA, 302 bp, Oryza sativa
  Clone ID: PAT_MRT4530_61604C.1
agccttccgttgaaaaaaagggaattgccgcttttgctcttaaaaaaccacacctggacttatttgggcttccacaaatggtctaaggactttaaacttcaagcctggtgggggtcctgcctttggagaaattagaactggttaccaggggtcgccaggtaattttgaaaatggccttaaggcgggccggctaaaatgggcccagccttagggttgaagatcttttggtcccagaatgtaatccgatgggatcggtggtagcatcagccctggataccttaagggacagaacccctgggggg

SEQ ID NO: 60039 - DNA, 729 bp, Oryza sativa
  unsure (1)..(729): unsure at all n locations
  Clone ID: PAT_MRT4530_61605C.1
ctgtaaataatgtacaatgtttttctatctataataataacagtggctttaggctggtttggtttcaaaataaaatgtaattttcttctttttttttatagtcacaacttgatggatgaatattgcagtttttttaaaattttcttttaccaaaactcattttatttatgaataataatgtaaccttgataatttatttattaaatattatgccatagtgataataggcgaacttcttaaagaaagtaccaaatggtaaagttgataggtttgaaaattttcaacataataattttaagaaaaattaaagcaattctactcgtcgctggtataccatttgtgatcttcatttgtgcccaccgccgtcgaggcttggggatttgctggatcctgccattgttgccgcttccctgcatctcgccattcgcatgaagctgttgtcgccgtcgcggtgtgatcgttgcatgtaggtgttctttaactctttgatgcatgtagatttgggagttcttcaactctttcttttttttccttcatcatgtatgcctgccacgattggctctctcctctccttgaataagtatattaatatgcagatcgttgcatgcaggcatggatctaggagaaatcatctaaaggttgtgcttgatgcatttggatttgggagttctttaactctttccttcncgtcttttttttaaaaaaaaaatttccttcatcatgtatgca

SEQ ID NO: 60040 - DNA, 309 bp, Oryza sativa
  Clone ID: PAT_MRT4530_61606C.1
atggcggcggtttacggaaacgaacgaccgggatctaatcgattcaaaacgaacggccgagatcatcttgatctatcgcgggtctacggggacatcgacgatgacgtcggcgatgacgtcatcaccggcgatgactcggcctcgcatgctcgccggcgaacgacggcgcgcaacggaggacgggacgaggacggcgacgacttcgcgaacccggcggtgaccttcccgagcgacgacgacgaccggagcggcggtggcgcacggctggacaagcggcggcgacggcggcacaagagctctcgcggctag

SEQ ID NO: 60041 - DNA, 549 bp, Oryza sativa
  Clone ID: PAT_MRT4530_61607C.1
atggcggagctccccgaggggcactcgtcgcggcgggtggtggagctcatcttctcgtcggggtggggcgccgccgccgccgccgccgccccgccggggccgacggtggaggcgatgttccgcgtccacagcgcggcgcgggcggtggcgcggttcgaggaggccagggcggcggcgcgcgctcacggcgccgccgcgcggtgcggcgccgacggcaacgagatgatgcggttccagtgccgcgcggcggcggggcccggcggggtgttcggcgcgggcgtcgccacctgccgcctcggcgccgccgacgccgcggtgcgcacgttcgccgggagcggcgccgcgcacgccagcgccggcgccggcccgggccgcagggcgatgctggtgtgccgcgtcatcgccggccgcgtccgttccgcgcagcaccagcacggccattcccgccacgcctcggattacgactccgtcgacatgggcaacggcgagctcgtcgtcctcgacagccgcgccgtcctcccatgcttcctcatcatctacaaggtctag

SEQ ID NO: 60042 - DNA, 7551 bp, Oryza sativa
  Clone ID: PAT_MRT4530_61608C.1
atggcgtcgtcgccggtcaagttcttctcggtcttcctcgctgtctccgtcgtcggatgggtcgtcttcacatttgcatcgcgattattagcttggttcttgagccgtgtactacatgcctctgttgggttccgagttgctgggttcaactgcttgcgtgatgtaacaataaaattctccaagggttctcttgaatctatttcaattggtgaaataaagctaagtttccgcaagtcattggtcaaattaagttttggtttcatatccaaagacccaaagctacagttactaataaatgatcttgaaattgtaacaagatcttcacaaggaaaaaaattaagcaagccaggaaagtcgcgttccacaggaaaaggaaaatgtgagctttttagtgggaggtgcacatgtagaggccctaaaggatatggtagggtaccaagtggtgctgttgacattaaagagttaaaggtggacacatttaaaattgctggacctaatcatattcttggtgttaagttacatcttgtacctttgaatgtacactatggagatttggggttgactgctgatccgctgggcaactgtaatcagcttgatgctttccagtctgatcaaatatctctagctaattcagagaaagttgttgctccatttgtttgtgaagatttgttcgttacttgtgactttggccatgaaaaggagaggggtgtcaaaatagttaacctcgaagtgaaatgtggggttattactgccaacattgatgaaagactctttcacaagaaacacacaaagccagagggttttagtggctctgaaaatggtggagatgcttccctggatgcttcagcaatgaaccaaacatcaaaaagcaaatccattctaccatcattgaagaaacagatccttgcatttccggataagattagcttcagtgtgccgaagcttgatgtgaagttcacacacctgggtgaaggacttagtgttgataacaatataatggggatccactttactagtgcaaagaccgtgccacaggatgatctagaggaagccacacctcattttgatgttcaaattgatctcagtgaaattcatttggtgagagaaggctctagttctctgttggaagtgcttaaagttgcagctggagcttctttggatattcctgttgatccatttcttccaatcagagctgagatcgatgccaagcttggtggtacacagtgcaatcttatgttaagcagattgatgccatggatgcgtcttcattatctgaaaagcaaaggaatgaagatttcaaaggagaactctcatcgaggaatttctcaaacaaaagagatcaagctaattatgtggacctgtacagtttctgctcctgaaatgtccgtaatgctttacaatcttaatggattggttttgtaccatatctgttcccaatcatctcatctgtatgcaaataacattgcaagcaagggtattcagatacacacagagcttggtgaattgcaagtgcatatgcaagatgaatacaaagaatttttaaaggggaacgtatttggtgttgacacctactctggttccttaatgcacattgctcgggtaagtcttgattggggatacagggggcctgagatcgaagatatggttgaaactagtagacttactcttgtattttccatcgatatcagtggcatatgtgtaaaatttggcttcaagcatttggaatctgttgtgcttaatttgatgacctttaggactctatttaagagtcttgcatcctctcgtggaagttcaaaagagaaaaatttggagcatagagagaaaaggagaaaaaaaggtgtggaaattttgaaattaagcgtacagaaattgtcaattacttactgtggtgatgcaaatgtagtaaatatgcctgtcgctgatccaaagcgtgtcaattatggatctcaaggtggtcaagtagttattagcgtgtctgctgatggcacacctcgtctggcaagtataacatcagaactaccaggcaggtctcgtaacttgatgttctctgcatctgtagctatttctcatctctctgtgtgtataaacaaggagaaaaggtcaacagaagctgaactggaacgggtgaaggcaatctatgaggaggatcttagctctagtgtcaaagtgacactgctagatatgcagaatgctaaaattgttcgccgatcaggtggccttccagatgttcctgcttgttccctctttagggcaacagacattaatctcagatgggagcctgatgcgcatttagcaatactcgagaccttcatccgcatcaagtatttcctacataataacaagccaatcaatgctgaagttggcgatatctgtgagaatggacctggtagtatatctactggtccaggaaaacctcagaagtctgacaaaagagggtcgatttttgctgttgatgtggaggtgctcagagtatctgctgagcttgcagacggtgttgaagcaaacatgcatatacaatctatttttactgaaaatattatgataggtgtactgtctgaaggcctttgtctcagtcttaatggtgccagaataatgaagagcacgcgaatacaaatctcatgtattccttttggcaccagtagtttgcttgatgcaaaggttgagtcatcatccaaaagagattgggttgttcaagggttagatgtccatatctgcatgccttataggctgccattgcgtgctatagaggatgctgttgaagatatgattcgtgccctaaagcttatctctgctgccaagaaaactatgctgtttcctgacggcaaagaaaacccaagaaaggttaagtctggcaccaccagctttggatctgtaaagtttgtgttacgtaaactgacagcagaaatagaggaggaacccattcaaggttggcttgatgaacattatcatttgatgaggaacaaagtctgtgaattgggagttaggttgaaatttcttgaagaggctatatcaggaagtgtagatcctaataattgcagttccaaggagaaacttctctatgatggcattgaggttgacatgcatgacactgcagctcttcaaaaattgcgggacgaaatccataagcaagcttttcaatcttattatacggcttgtcagaaaatggtacatgcagaaggatcaggagcatgtgcagagggttttcaagctggattcaaaccaagttcacggagagcttcacttctttcactttctgcttctgaactggatgttactttgaccaggatagatggtggagaggttgcaatggttgaattcataaaggggctcgatcctgtttgtcaggagaaagatataccattctcccggctatatgggagtgatattgctgtgcttgcaggttcattggtcatacaactgagagattatacttctcctctcttttctgcaaccagtgggcaatgccaaggtcgtgttattcttgctcagcaggcaacatgttttcaaccccaaatacagcagaatgtatatgttggaagatggcacaaggtcatgatgctacgttctgccagtggtaccacaccagcaattaaaatgtactcaaatttacctatttatttccagaggggggagatttcctttggtgttggttatgaaccatcttttgctgacataagttatgcatttcaaatagccctaaggagggttaatcttagcaccagagtaaaagattctggcccaacaaaccaaccacctaaaaaggagcgcagcttgccatggtgggatgacatgagatattacatccatggaaagatagttttgtatttcaatgagaccacatggaagttcctggcaacaacaaatccttatgagaaggtggacaggctccaaattgtttccgaatacatggagatccagcaaactgatgggcatgtagatgtttctgcaaaggaattcaagatgtatatcagtagcttagcaagtatgatgaagaactgcacattaaaagttccacctggtgtgcccagaccttttatctatgctcctttcttctcccttaatgttgttattgattggcagtgtgaatctggcaatccattgaatcattatttgcatgcgctccccattgagggtgagccaaggaagaaagtttatgatccatttcgatccacttatctctcgcttaggtggaacttctccctcaaacctttgcaagtacaatacgataatgacgcattatctcccagttatggaaatagttcaatgcaatgtggagccatctctgataatcattccaaactggctaatgttgaattccctaccatgaatctgggagcccatgaccttgcttgggttttcaagtggtggagcttaaattatagccctcctcacaaactgcgttcgttttcgagatggcctcgctacaaaattcctcgagctgctagatctggtaacctctcactggataaagttttggtcgagttctttttccgtgttgatgctactccctgttgcataagacatgcaaccttaactgaggatgatgcaaccttaactgaggatgatcctgctaatggcttgacctttaaaatgtcaaggttgaagtatgagttatgttacagtcggggcaaacagaaatacacatttgattgtaagcgtgaatctttggatcttgtttaccgtggtcttgacctttacaagccagaagtttatatcatgcgagacataaacctgtcttcagctgaaactgtatccaacttgaaaacaaatacacaactaggaaaggttattcataataaaggcaacatgggcaatttccaggataaacatgaggatggcttcctcttatcttgtgattatttcacaataagaagacaatctcgtaaggcagatcctgcaagacttatggaatggcaggatgctggtaggaatcttgagataacatatgttagatctgagtttgagaatggaagtgaaagtgaccacactctttctgagcctagtgatgatgatgatggcttcaatgtggtgctagcagacaattgtcagcgcatttttgtctatggccttagacttttatggactattgagaaccgagacgcagtttggtcatgggttggaggaatttccaaagcatttgagcctccaaaaccctctccgtcgcggcaatatgttcaaaggaagatgattgagcaaaggcaaactactgagggttctaaactaactcaagatgctacctcttctgtccatgttggttctccttcagggcaacatgttgaggctctgggttctacttccccattacatagtaaagccaatttatcctatgatattgccgggaagcatggcctttttgatgattcagataagggagggaatctccaattcatggttaatgttattaaaccccaattcaacctacattctgaagaagccaatggtaggtttctacttgctgcagccagtgggcgtgtgctggctcgttcgtttcattcagttgttcatgttgggaaagaaatgctagagcaagcactgggggcaagcagtatacaaattcctgagctacaacctgaaatgacctggcaaagggctgattactcagtgcttcttgaagatgttcaagctcatgttgcaccgactgatgtggacccaggtgctggcctgcaatggcttccgcggattcttggtagttccgagaaattaaagcgcacaggtgccttgttagagagagtatttatgccttgcgagatgtacttccgttacactaggcacaaaggaggaactgcagatttgaaggttaagccactgaaggagctaatttttaattctccaaacatcactgcaacaatgacttcgcgccagtttcaagttatgctagatgtgcttaccaatctcctttttgcaagactccccaagtatgaggatgcagtggtgaagccaccgcctgccgcaaatactagttatttgaagtttgcctgggctcaaaaatatttctggctccgccactgtgaggatgggaagggtaagggtaggagtgtaaggcgggatgggagtcgagatcgtgatgatcctgttacatacaagcctcggaaaaacagtctacaatattcatcagatgatgaagatgttgaagaagaggctgatgaggtggttcctgatggagtagaagaggtggagcttgcgaaaattagccttgagcagaaggagagggagaggaaactactactggacgatataaggtccctcatgggaactggtaacaatcatactagcaacttcctttcagttgaaagggatgattgtttatggatgatcaacagtggaaaatctttactggtggaaagattgaagagagatcttgaaaaccttaaaaagtctcgaaaatctgcatcttcaacattaaggaaagcattgcagaaagctgcacagctacgcttgatggagaaagaaaagaacaaaactccttcttgtgccaaacgaatttctatgaaaattagcaaggttgtatggagcatgatcgctgatgggaacacatttgctgaagctgagatcagcgaaatggtttttgattttgatcgggattacaaagacattggtgttggtcgatttacaactaaatgctttgaagtggagatacatccactgaaaatttatctgtccgaaacaatgtacagaatgatgtgggattatttctttcctgaggaagatgattcacaaaggcgtcaggtatccaaattgcagtctctaaagtccaacgtggtatgtggttcacatccagagttgcgacggacatcttcatttgaaatgactttggaggaaagtgcagttgatagtatcacaaataataatgtggtatcgctggtcaattcgaatgtttcctcaagagacaccaacaactttatggcagataactcggttgcagctgctgagatgttcaggagtagaactaaagattcaaagcccaccaagtctgttcgtttatctcaagatgaaaagaaagttggaaaatctcatgatgaaaaaaggacaagagctcggaagttgattgaatttcatgacatcaagattagtcaggttaagaagtttaaggcccacaatcgggaaacacatgatggagctgttcctgatcatgatctgaatttaagtgacagtgacggtgaccatcacggaaagcccgatcagtttcctgtgtcatggctgaagaggccgggtgaaggcgcaggggatggatttgtcacatcaattagagggctctttaattcacagcgccgtaaagcaaaggcgtttgtgctacggactgtgcgtggagatggagacaatgaatgccatgacgaatggagtgacagcgatggcgaattcccttttgctagacagcttacaatcactaagaagctcttacggagacatacaagaaagctccgtcccagggggcagaagaacacaggcctgacattgcaagattcactgccatctagtccacgcgaaacaacgccatatcaaagcgactcggactcatcatcagagtcaccttacgaggatttccatgagtag

SEQ ID NO: 60043 - DNA, 594 bp, Oryza sativa
  Clone ID: PAT_MRT4530_61609C.1
tttcaacacgctcaccaaggtcgacctggtggagaggacggccaagaactggcacgaggagggctccgtgccgtccgagcccttcttcgtgccacgccccggcgccaccgaggaagacgacggcgtggcgatatcgatggtgagcgccaaggacgggtcgggctatgcgctggtgctggacggcaagacgttcgaggaggtcgcgcgggccaagttcccgtacgggctgccctacggcttgcactgctgctgggtgcccaggaaaaggaacagcaagtaacacacacgccggtccatcccaacatgtcaccgccagtactgattcgtctctgctgcttgcgtcttgggtctgcgcatcgaatcacagtacaagtggaggcttggatttgtagctacgaaaatggcagcatgaatgcagtcaccgtttggtaggtggtctcagaaggaaagaaagacatacatacgctgcacgtggtgaactgttagtacgtgatgtatgaggtaccggaagatgtaatatacgtggaaatgaaactatagcgatctgtacgtgttaggctgtagtaattcacatgatgtgtaaaatgtgtacat

SEQ ID NO: 60044 - DNA, 1965 bp, Oryza sativa
  Clone ID: PAT_MRT4530_6160C.1
gcacctagtcaccaccgcaccaaccgcgcgcgaccggccccccgtcagtcgcaagctgagcctgagcgagcaactgatgccgctagctatagctgctgcctgcagcacgcagcgcccgtaacctaacgtatcatttacttccattgcactgcacatcctgtgagttcgttgtctgagtgagagctggacgtgctgcaccgagctcctggccgagatgcttgccgtgtcgccggcgatgtgccccgacattgaggaccgcgccgcggtggccggcgatgctggcatggaggtcgtcgggatgtcgtcggacgacatggatcagttcgacttctccgtcgatgacatagacttcggggacttcttcctgaggctggaggacggtgatgtgctcccggacctcgaggtcgacccggccgagatcttcaccgacttcgaggcaatcgcgacgagtggaggcgaaggtgtgcaggaccaggaggtgcccaccgtcgagctcttggcgcctgcggacgacgtcggtgtgctggatccgtgcggcgatgtcgtcgtcggggaggagaacgcggcgtttgccggggctggagaggagaagggagggtgtaaccaggacgatgatgcgggggaagcgaatgccgacgatggagccgcggcggttgaggccaagtcttcgtcgccgtcatcgacgacgtcgtcgtcgcaggaggctgagagccggcacaagtcatccagcaagagctcccatgggaagaagaaagcgaaggtggactggacgcctgagcttcaccggaggttcgtgcaggcggtggagcagctcggcatcgacaaggccgtgccgtcgaggatacttgagatcatggggatcgactctctcacccggcacaacatagccagccatcttcagaagtaccggtcacacagaaaacacatgattgcgagagaggcggaggcagcgagttggacccaacggcggcagatttacgccgccggtggaggtgctgttgcgaagaggccggagtccaacgcgtggaccgtgccaaccattggcttccctcctcctccgccaccaccaccatcaccggctccgatgcaacattttgctcgcccgttgcatgtttggggccacccgacgatggacccgtcccgagttccagtgtggccaccgcggcacctcgttccccgtggcccggcgccaccatgggttccaccgccgccgccgtcggaccctgctttctggcaccacccttacatgagggggccagcacatgtgccaactcaagggacaccttgcatggcgatgcccatgccagctgcgagatttcctgctccaccggtgccaggagttgtcccgtgtccaatgtataggccattgactccaccagcactggcgagcaagaatcagcaggacgcacagcttcaactccaggttcaaccatcaagcgagagcatcgacgcagctatcggtgatgttttatcgaaaccgtggttgcctttgcctcttggactgaagccaccttcagtggacagtgtgatgggcgagctgcagaggcaaggcgtagcaaacgttcctccagcgtgtggatgatatttgcatgatagattgatggttccgttactgactgattgcttatctggtcagttcaccaaaaaatgggaaaattcgccgacatgtccttttatttttcttttggccctagcgtttcttggacatctcgtttaatttttaacttgtgcagagttcgaaagacatctttgtttcgactccgggagaaattaacctgcgtattgtaaatgtaaaatgtatttgccgtgagttctcagcagctaagaataaattaaataatggtcctccgagtagggtttacttgaaataaaaaaaaaaaaaaaattcaaacgctctaatatctaaattccgcattgtactattttcacaaaggaaagtagcccccgcaattgcacaggcttctt

SEQ ID NO: 60045 - DNA, 338 bp, Oryza sativa
  Clone ID: PAT_MRT4530_61610C.1
aaaaggagggggcccgcgccatatatgatctttctgtaatccctccttattacatgaaaatggggaaaggtttgggtggatgaatacaaatccaatcctaaccataccaaaaaaaaaaaccccagctaattaactttttttttttttgacaccaatcgacaggggatgcaacaacacaaaagctcctatcccccatgaatttttgctggcctggggttgtcacatacacatgcgcgttgaatttaacacaaaattaaacccattcaacacgagaccggcgggcgccaacaaatcaaaaaaaagaacaggattcccaaaatttaacgaccttgatgaac

SEQ ID NO: 60046 - DNA, 299 bp, Oryza sativa
  Clone ID: PAT_MRT4530_61611C.1
ggcgccttggaacttgttttttttttctcttgtggcgatctgtgcgaagaaatcgaagaaccctactacctctgttcccccagattcagcgtcgattccccaaattggctcccgcggccaggctgagatggtacggcttccttccctgtgagtttgctcggtcttgttctcagtcatttatatctatttgtcagataatccggggctcgccttcgtatcgtagtgcgtttatactttagtcgatggtgctggagagggtccggttttgtgagctctttaggcctattaactgtgcatca

SEQ ID NO: 60047 - DNA, 557 bp, Oryza sativa
  Clone ID: PAT_MRT4530_61612C.1
ttgcacaaaataaagaagacaagtgacaaagaattttttcacctgatgttcggagcttgccaacttcctatgtcaccgttgaggcgagtccaacttcaccgctcaaccatggggtggccggtcatgccgctctctattgtaatggctagaaaactagtcattacagtgcatttaatgcacgggcgatggctagccagtctgaccgccataggcatgccggtcagaccgccatcggctccggtcagaccgtcttcggctctgtatcgtcaagatgagacctccttcaaaatcaggatcagcggtcagaccagacaacacacattggtcagaccgccataagggctgcggtcataccgcagttcacttttcagcacaaccagctgttagtaaaatgatgatatctcttgactcgggtctcggaatttgacgttcttggactctatgaaaagcttattcaaagggatatccaactcatgaaatttccatccatgaaacacaacttaaagcaaggagaaagggctcacactccgaaggatactccaccggagaataccaca

SEQ ID NO: 60048 - DNA, 7281 bp, Oryza sativa
  unsure (1)..(7281): unsure at all n locations
  Clone ID: PAT_MRT4530_61613C.1
cacaaggggcatgttttcatccctattatagcaatctccgaggctgtttaaacctccagagtccggaaaaataataatgataatgataatagtattaacaattcagacggcacaccatcgacttacacaacagcatattttgaaggttgcaaattttatccaggcatgtcacgatatcactataaagttttgacactggcaaccacactacctttttcttttctctantgcaagacaatgaaccaaaaatagataaatgatcagcacaggctataatcgccaaagaaaacaaaaaggatagacagacatggagtgacaacacatttcgcatgtgtctggtgcaaatatgctcgagtcgagctgttgcggcctcctgattgacgcaggctttgcaaaagagcatttgtgcttctaaccagatggggcatggccacttgctgatgatgattttgcaacatagatctgcttcatcctaccagtgcccaagttcttgtcagaaccggaattttgattccttccctggtatcctgaacggcgttgccattcattgacagctccagtcttttgggtcacccgagaccgacgatcttgattattaacttgatgttggtactgttgacccgatgatgatgaagattggtggggcttggaaggcatgctggcaacctgacttccatttgagttgctgacccctgtagcaatcccagggttaacatttggtgtgttcgacgacctacccataactttggcactgtttgggacttcattgctgatcatgcctacccgggcaaacgaaggctgaacagtttgagcatttgaacttgtggaggctggctgttcaacaaggcctaaatcatctgtaaactgagtagcagatgcatttggaatgttcttgctgttatctgctggaacaacagaagcagagggctcctggaaccggttattcgaactcgctttgttgtccacttggatgttatgaacaaactgcgctgcagctgtgccgtccattggatgctgctgtagtggcactgataatgggacggtgtgtagtggtgctacaggcatatgtggccaacaaggctgcatctgtatatctgtagatgactggaatggagcaatatcaaacatggtcagtggagatggaattggcatgatggaggttgggcgtagatgctgtactggagtaggaacactgggcgagcttacttgaccaggtaccatattttggttgtttggatcactctggctaacaccaacaaccggaggtccttggttttgcttccagtcaggctgcttgtcaccagaaatataagtggttcccatgaaaccaagtcccatttgactaaactgccctacaggagcaaagtgattgtagaccaccatatgtggaggaccttgtacgcctggtatccctccagggctaatgaaaggaccagcaaacccagtgggaggacgataaaatgactcaaccccagagtggcattgtggccaagctcccaatggtgctgaaggtaaagcattgcttctttgaggctgctgaacctgagaaccagcacattcatcacttggtccaaatgcaaaaatctgccctcctaacattgtgttcatctcaaagcaggaaaagtgggatggctgtgcaccaggaaattgagaaagcatcggtcctgatgcctgtggacttggcagagggtgccacagggacattggtggagtatcaactgacaagtctgctggaagagcgacgctgagtggttcatctgtggatgattgacctcctgatgctaatccagcaagattcttattgccgaaacttttgttgtctgaagcagaagctgccgttgcatcagctccagatccaactatctcatcactactaatagctgcaacagctacagcagaggcagctgcttcagcctcagcttcagcttcaacatcatcggagtttggtgatggttcctttgttgtagacgtctccttatcaaacaaaatggcagtactattgctatcaccaggcaagttgcgatgaatcttcatatcaggcctagatgaacctggaggaccaagcccacttgtaatagttcggctgactggaggcagtacagttggtgaggtaactgctccaaactgaatcttctccccggcaagaagggaattaatagggctagcagatgaagggaatgttttttcagaacctagtgtgggagacagagcattgttgggctccaaagaaaagccagaaccagcttgttcaaacttccctggtttcatagcttcttcaagttgagtttgagttaatggcataacctgctggtttaattgtgaattatcccaggtgcctatgttaaatggagtgctaatgggcatcgttttattgttttcttcagataggcttgtcacgagctttcctgaattgaccgcatctgaggatggctggctattgataggcttctttgcgtagtagtttgtatgagattctgcgttgaccaaaggttgccctatgggtgtcatggaagctttatcaccctttagtgcaacagatgattcagcagggtcaatgactctgctttcaacagccatgacagaatccaaagaagctttctttgcaggttctgccaaagaaacagttcccttgttcaaatttggactactagaactgtgcagagaaacttgatgctgtttgcggggagcctttgctatcctcatcttggatctattttctttctccctcagttctctcctgacactcatgatctgcctcttagaccttacttcaataaaaccatctgcatcaacagggatttcgatgccctgctgcctaacaacacgtgcaactgcagcctgtgatgaagcattaacatctccttcagggatagcaccacctgctctcgatttcttgttcccactatgagatctctcgtaagatggagccttgtgtgtacttctctctgtcttgctgtaataattagcacatgtagatggacctgcactaagatcgattgcttcattagccctaaatgacttatcaccttcccttctgtttggatttttcaaaggaatttctcttgctgttccattggaatatggcttctcgttctgctcactgtgactaaatgactcatcttgaatgtggttcttttcgacattttcccgaactctaaattcagttcttcttatgttcctacgagacctcctctgtaatcctcttgaatctttattagaatggtcaactgaacttgttgaccttatattagattccttgacagcataaccgtattttctccctcttccaccaggtacagcacctggagcctttggaccactcacaatttttgcatctgaattaacttgagaagattctctgttgttagaagtaggtctgtaattcctcttcagagagatatcatgattcctgtgactttcaggttttgaaactctgcacatgttttcccccagggaagatctatccagcaggttgtgaaatccctctgcatcaaccatctggttgattgcaggtgcaccaagcttctgagaatctgaatgctgcaacataaaggaaagattggctgcagacaccacagatttctcaatagagctggactgagctgcctctcttgggatattctggtgagtgtgttgattaatttcatttgggagaccacttgaaccatactggttcaatatataaggagctggtgcagatgaatgaattgaaggcatcgcctgagaaaccgactgaacattctgggcaatagggcgcacatacctcaactggccaaactggaacaatggagctggtgaagggtgtacttgagatagggatggattaatctggttgtggagatttataggcatttgaatggaaccaatctgaatggctggaacaggagttggtatcaaagaaggcccagaaaataaaccaaactggagattgacagggacttcactccggccactaactgctgaagctggtggcataataggatcagtggaaggtgcttgatgtaacttggagcctggcgcagatgctactaagctattggatggctcattgttagtttcatctgtcaaagcatttatttgatcaagagccaaattccgcagtgccttctctgcttcagtaaccaagtcagaaggacaaactgaactactgcccacctgctgctccatgacacctgagtgtgtgttcttcatggatactaactcaacctcaggatttggggggatttcaacctgtacaccctcatcaaatccaagtataaccggttccatttctatatgtgtactatgcccctctgcaaactcatcatccaagtcaagattttcatcgtcaccttcattgatttcatcttcctggtagctattgctttcttcgtcatactcatcttgcttttgacgattttcattattttcacttggccattcatcatcctccaagtgagaaactgtgcttgaggtattgattctgcttgtgttggctgcatctaaggttgaagccgcatggtcaatgtcagacatcacagttcgatcaccatcagcagaagttggcaacgcaggtgaatcaccagaaacatccatctcatcatgtgaaacatgtggaggtgaactaggagggctcgaaacagacagagaagattgtgagcccaatatagggttttccctatccccattttgctgttcatcgagaccaatgccttcagctgatgtcccatgctggtgagatgcctcttggtatacacgtccatattcggtctgcatagtatgctcttccctactagaactctctctcaacccactttccacaaaagaagaattcgcatgttgagtggaaggaccaaccgtacttctggccacagctgggggtgggggtacacgtggttgccgcatcgagtaacggggccttgtaaaagggaactcattatcctcagagctatgaaacatcttctctccttggtgacgattggggccctcatgtgaactactgggcagccaagctggatctccaaatctgtcgctactaaaaaactcagtgtcaaagtcagattgcttgtcaaacctatcgttctcccttggtgcatcccaccttggagcccttccatgatggtactcttctgatgcccaaggtgaatcgttagtccggcctctcgaagatggcctgactgtcacagtcacaaaaccatcataagaatctttcttagggtaatttcccctccttgcagtgaaagtttcacgccgtggactgtagtgagcactttcctggtcttgaaatgatgtccttccactaaaatgtgcatgttctctatcaacaagcgatgagtgtccatctctcaaagtgtgcactcttggaactatatcattgtacctgttgttactagaggactccgacgatgcagaggtattgacgcgctcacccattctatcaaaatcatgtctgtcgtcagtattagcagattgtggcacatctttatccttcacggctccaggcaaaagttcatcattgatacatgaagcaagatccccatccctaatgttcgattctgcttgtcgtctagcaatccttgcctccaactcttggagttttttgcgtgcaccttctttacgccgctcctcctcaatagcggccttccttttctcctcctccctagcaattctctgctcctcagctcttttagcagcttccaatctttcttgctccgcaagccacgcagcatgtcttgcctcttcttccaccaaccgttgcctctcttcctcctctcttattagtctctccctctcctcctcttgtttccgaacaatttctctggcccttgcctgttcttccagtacacgttgcctttcttgctcctgtaacctcaagattctatcaagctctgcctcaaacgattcccttactgggtcgtggaaatcagcgcgtgggccgccctttttttttttttttattgcacttaaattaacagctgtaatactatcgaaacctccatcctcaattaaaggcttcgcaggggttccagtgagacgcttctccctgccaaaatttgcaggtggctcattatttaaaggccctttattaccagggaatggttgcaccttggaaacaaaactattctggaaaggattccctctgtaccagttatttgaaatgttgccataacgttcaccaggagtctcccccacacgtgcattcctatacggttctgccccattctgtccatatacacgcacacctggctccctacttgtattccaggaatccttggaagcatcaccattcatgctttcacgataagatgattgcgcactgcttcctctccctgcgctgtatggccgtccgtctgtccgttctctatcttgttggctcgacataggagatcgccacgccgcatcctggccaccctctttgctgctagcaatcaaatcttttacaaagggctcttttttgaagggatccctcatgcccccataaatgtcacggcctgcaaccgcaggctcgctcctaccgaatcccctctccctactgtcacgctctgggagggtcaaccccgtatcacgctcatcatcagcccagtcggaatcgtacctaagccggacaagtggaagtggccccaaatcattcctttgcgccttctccgcagatacatgatcaccagtgccggtgccaccagtagaggacaagggctcagcggcacgagacggcgtcacctgcggtcgcatgcccagcggcggccgtgtctccggagtggcgacccgcaccccatcagcgtccttgtgacgttgcgcgggcggtggaggcggcggcgcgacggacgctttcagggaagggaagtcctccccacgcaagacaacggcggcggcggcggccttctccgggaatccatagggcgggggcctggggccgccgccagggagcagcacggaagcgggaggcagcggcttctcgacggccggggcgggcttggtccagccggccgtgggcgccccggatcggacgggcgcggaggcggccccgccgcccgcggccgcggcggcgccatcgaaccgctcgtgctccttgcggagcgaggggaggttcagcggcggcgggacggagagcttgggcggctggggcttggacacggaggagccacgggagcgggagagcacgaccatgccgccacccccacccccgccgccgccgccaccggatgaggcggaggggcgcgaggggcgggctccatggtgcgagggcgcgggctggccgtaggatcggttgaggttaacggagacgaacttgccggggtgcgacat

SEQ ID NO: 60049 - DNA, 849 bp, Oryza sativa
  Clone ID: PAT_MRT4530_61614C.1
atggcgaccaccggccggccggccggccggcgccgtccgggcgtgggcgcgcgcgcgatatgcctgatgaggaggaggggtggcgtcgcgtgcagcgtgcgtgcatcgatctgtccaaatgattcgcgacgccccaaccacggcgatggccacctcgctggccctaaaaaggttcatctgcagtacggcatgcagctagctgcagcatgcatggcgaaaacccagcaaaaatattgcagtagcagcagcgctagtacccatctttggtatgagcactactacctggaacggaacacagcgaggcaagagcaggagattgcagcagggatctttacagctgaacatattactggcagccagggccccacatgtgagagttgggaaagtgacaacggcattgtacagctctctgggcatacgcgtgatcgtgcccatctcaccacctgtactcctgcacaagctagatcctcttcttggggtcctgaaatcttgtttctcgttaaagccagggaagatattgtggactcccagcgactcctcgtccgcgcgtcagaaggagggaaaagagaatgcggcggcgagtcgctgcccgagctcatcaatggaggacgacggatgtggatttgggaaaacccatcgccgacgtcagcgcctgattccatcacccgctgcatgcgtccatggctgccgcctcgaccgacgcgcgccaggcagcagcggcaacggcgacaacccctcgccgggatgaagagctccttcgcggacccagaggatcacgatgagataaaattgtcatgtaagcgccacgtcaatgctacgtgggacgaagacctagtcaaaggatccatg

SEQ ID NO: 60050 - DNA, 1419 bp, Oryza sativa
  Clone ID: PAT_MRT4530_61615C.1
atgctgcgacgcgtgctcgccgggttccgggcgctgcacccgcggccgcgccggcgccgccacggcggcgcggagggcaaggcgagggtgaccgtgcggcggttggggtcgaacgggaggaaggaggcggcggcggcggcagcgggagcgcgtcgggataatcgcggcgatggcgcgacgggggaggcggtgaccatccgcgtggcgacgttcaacgccgcgatgttctccatggcgccggccgtggcggcggcgtcgtccgcagagacagctaccgagaccgcgcggcgtgtcaccacccccgccgccggcggcgggcggcgacccaagggcatcctgaaggcgcaggcgagcctggcgcgaacggcgagcaaggcgcgcgtgtccatcaacctccaggacaacgagatctcccgggagaggagcaagctaggcagcacggcggcgaggagcaccaccaccgccacaaccacgccggcggcgacgcagcagctgaacggcggcgcggaagggcggcggcggagcgtggaagaggtgctccgggaggtgggcgccgacatcatcgggctgcagaacgtgcgcgcggaggaggagcgcgggatgagcccgctgtcggagctcgccgaggggctcggcatgcggtacgtgttcgccgagagctgggcgccggagtacggcaacgccgtgctctcccggtggcctatcaagcgctggaagtcgcagcgcgtcgccgaccagtccgacttccggtgctcaaagattgcggtgacagtagcagttgggattaggagtttgttacacaatccgacaagaggcaacatgattactgggaacgtgctgagggccaccattgaggttccgagagccggggaggtcaacttccactgcacacatctcgaccaccttgatgagagctggaggatgaagcagatgaacgccatactgcgctccagcgatggccctcacatcctcaccggagggctcaatgcgctcgacggcaccgactactccgacgagcgatgggccgacatcgtcaagtactatgaggagatcgggaagccgacgccgaaggcggaggtgatgaagtacctgaaggggaagcagtatgttgatgccaaggattttgcaggagaatgtgaggctgtggtggttgttgctaaagggcaagatgtacaagggacatgcaagtatggcacaagggtggattacatactggcctcaccaaactctccctacaagttcgtgccaggatcttacacggtcatatcctcaaaaggaacatctgatcatcacatcgttaaagttgatgtaacaatacaggacaagaaagaaactgatgaagaaagcggcaaccagagacagagagtagtcaagataaacaagaagtgttcaaaaaagggattatgggcagctaaatga

SEQ ID NO: 60051 - DNA, 344 bp, Oryza sativa
  Clone ID: PAT_MRT4530_61616C.1
cggagacctatcccttgcactcgcctacagatccagtcaccccgacaagaccgcctcgtcaccgtcgtacaagaccctccgaggcggcagaccatggcgtagcttgacatatcgagatccgcatatgagtctggggaggaggtgacgcacctcgagcagcgtgaagcggaagatatcaacgagcagataatgggcccgctcggtttcagcgtcgatcagctcatgagaacttgcaaggcttaacagggcatgcggaagatgcggaggtttacaacttggatgaacatacaaaggagctagtaatctgaggtccatgaaataatgatggtgatggtcttgcagct

SEQ ID NO: 60052 - DNA, 386 bp, Oryza sativa
  unsure (1)..(386): unsure at all n locations
  Clone ID: PAT_MRT4530_61617C.1
ttggctgaggantccncatagctaaagcaagtgcatggaggcccncgacaanancnaccattttcatgctacncgcctccctcctctccccntcccctnttccccccaccaccacatcttccacgtcgccgagggctgtcaggctcgcgccggcgaagccgctcgccgccactctcgcagcggtggccgcggcggggctcctggcgctgtccccggccacggcggcggtngnggcggccggggaggcngaattcaaggtgtactacggcacggcggcgacgcgccagancgccgccgggtagctcctantcctagctagcnattgttcgccgccgccngccggcggnagtctcagtgtattctttgctttcgancgagtggagagc

SEQ ID NO: 60053 - DNA, 753 bp, Oryza sativa
  Clone ID: PAT_MRT4530_61618C.1
atgaggcgttcacgggtaaggccgatgcagcggtggtgccacccctgcatgcagcaacccaagccgtggaaggaggcggaggaggtcctctccggctacggcagcgacgtggaggagcagtggcggatgcagaaagaaatagcagtgggtctgagcaaattagatagagttacagtccccctaccatctacatatgtcttcacgccagtagcgggggctcgagacccgccgctcccgtactggatacgcccctgcggaggcccccgtgctggatccgcccctacggaggaggtcgtgcaggctcccaccattcacaagggtatgccgcatgttcacaagatcgtgcagactcccctccacaccaactgggggaagaaaaaaagaaagaaggaagaaacggcaggacgacgaggacacgaaggagatgatggagagctcgacagggttgaccatggcgtggaggatcccaacggcacgtgcggcgagcaggtggagggcgtcgattgccgcggtagggtgggcgctggcggagaggagggaatgggcgcggcggagcagggatgcggtgaggacgacgacggtggttgtgatgacctcggcaacggcgtcctggcctcctgggaacgagaggacgggaaggagggaggggatgaggacgggaacggagacggcgtgagagaagaggatagaaaaagtgactggaatggtatggttccaattttagaaatttccagtggcatacagccaatatga

SEQ ID NO: 60054 - DNA, 339 bp, Oryza sativa
  Clone ID: PAT_MRT4530_61619C.1
ctcacacatccgagctcatcgacatctgtctcaactatgacagtttactgcatcaatggccgcggccaccatggcgctatcctccccggtgatggcccgcgcggcgccgtcaacatgctccggactcttcggagaggcacggatcaccatgcgcaagaccgccgggaagcccaagccggcggcgtcctctaggagcccgcggtacggcgccaaccgcgtactttacctagggccgatctccggcgagacgacgagctacataaccggcgagtttccgggcgactacagacgggacaccagaacgctctactgcgagccaaagactttcggcaagaaacg

SEQ ID NO: 60055 - DNA, 240 bp, Oryza sativa
  Clone ID: PAT_MRT4530_6161C.1
atgtatgcaatgctatataaatctctcacccttcatcaccaccgctgcgtgtgcagcaagtacacgaggagacaggacagagcaagccggggaaggaatggcgcggcggcgaggcgggatcgggcggcggcgccagagtcgtcgctggagccgaggtccggggggctcaggccaccgccgtcggcggccggcggtgatggtttgaatgttacgatttctggtgaatccaaagcacagtag

SEQ ID NO: 60056 - DNA, 1704 bp, Oryza sativa
  Clone ID: PAT_MRT4530_61620C.1
gcacgaggtccaattataattttgtatcctctcagaattttttttctttggccgctgtacacgattgcgttcacacggagagagagggcaccgctcagtcagacatttacggatgaaaaatttgtgacgaaaggaaaaatactaatcttttagttagttaagatgtgacacatgctataggctatattcgttgaactaggatgtatcatatctcactaaaatctcttatatttagggacggagggagtataacttgatgaaggaattatcaacattattgctttgaaactgttgaatacaaaatgaaatcctagaatttgcgtatgtctgattagaaaatgtgacaatgccaatgtagcaggtaatttcttttagaaggtaatttcttttagagtaaatttcacaaaaccacatctctacccatactaatactacattcagtggttcaacaacagtggccgcattaaggtaacacaattggtgagattaaattttgcaattggttattactgtgattttgttgattgcgatgtcgtacctatgcatgcttgctccttgctccttgctgttgggtagactttcacaatatgataaaaacacgttgcatcatggtagaacaaaatcaatactcctttgtgcataatagaaaaaaaattgtgttgcatcctatgactcttgaagctgtttttgagaatgatgttgctagagctaagaaagagaaaaatgttgagcatgctaaaagtgaaaatcagattgtagcaaaagaacttgtacaacataacaagaaagattctaaatctgaacatgaagtattaggatgtgtttcccaaggacgtaccaccagggctgccaccgattttggggttagtcccacatttcacattgcaaatttgaaaccgtatttgggagaagaagatgagcttaagtcgaggacgactccaatgcaagaaggggaggatgatgaggacatcaacaccatcgatacatccacgtccccacaagtacaacttcatgatcctattacccgcgctcgtgcacgtcaactcaactatcagatcttgttggcaagaacttcagcgttggctagaaggtctcttgcaagaacagtgcgatggtttcggtttgtgatcgaagagtcaattgggttttttttgttcgatcaatgggttgtcaatctattaggtcttggttggttgaagatggggattaatctgcaaccatttgtgcacaaactcatttggaatgtcttagttttttgtttcaataaccagattattcttgctgtgtatttcgccatttgtgactccattctgactcattaccatgaacttgcatggttgctcttcttgtatgggagctttttgactggagatgagaccgttgatcttaagaatggcctcacatgttgcatctacaatgtgatttcaatgctcaccatggagatggccagagtctcggccgtgaacacaaagacaacaagatatttgttggtattttttatgatcacagataaatttgcaagcgtacagaatataccgatgtagcatttcacccgggagtattttcaggtatcgattttcacagggaatgtgtgtgctaactccggtttaggttcatccaagggcacgaagctatggataaggaaaggatagagaggtttcaccgataagaaatagtgtttatagaaatttcaactttaatcct

SEQ ID NO: 60057 - DNA, 242 bp, Oryza sativa
  Clone ID: PAT_MRT4530_61621C.1
cccacttgtgcgcgagctcgtgagcgagcgcgcggaggtccatctaacaaagggggcgctgaacgacacatgcatccgactaccactgtcgctagcgttcagacctaccaatcgcagtcggactggtactgggcctagaaatacgtaggtcacccctcacactggcgcgtatctgtaagcaagaagcccagcaagtcaactggagttctattacaaaatgtcgaccgcatagaccatcgacg

SEQ ID NO: 60058 - DNA, 644 bp, Oryza sativa
  unsure (1)..(644): unsure at all n locations
  Clone ID: PAT_MRT4530_61622C.1
ttctccttggaactcatcaccaggaaatgaattttagatagtaagaaatccagtcttgtttgtcgagtatgtcaattgttatgagaaagaanacccgtgggaggattatgtttgacaatgagatccctgcagaggaaaacatggccacccttgaagccattggcattctagcaatgaagtgtttaagtgataatatagatgaacgaccagaaatgagagaagtagccgaaccactggtgatgcttaaaatggcttggaagcagctcacaaggaaacatataagttgtcattttcaagacagccactgggaaaccacccaagcttgacaccagaagatttatgaggaatgaagtaaattagctcacaagatcctttcagcactacttgttctactagaatcgatcanatttaagtttctcatgtttggtgtaattgttatctgaacttctgttagcactttggaacacctagttatancacgtctgtatgttataagcagtaacagtaatttgctaccgctagtattccttttgatccgtgattaacaagtactattatccgacatgtcaaaggggtacaatagcaaccaagtacacacaaatttaatttgaaccgttgttcttcaaaaaaaaaaaaaaaaaaaa

SEQ ID NO: 60059 - DNA, 630 bp, Oryza sativa
  Clone ID: PAT_MRT4530_61623C.1
atgagaataagtgggagtatgggagtccttatgcgggctcagatgtggatgggggtggacaacggtgacaaatggcaggttcagacatcagtgacggactactccagccgtgcgacggtgttcgatgttttcctgaacgaaaagctgacctactttcggaaatccttcttcggcctggtgggtaccatatcagcgatgctagtgaaggtggagaaaggctccttctgcaggatggaaggggtacggctaatgctggcgcgcgttttgctggttctccagctggtggtgctggtggtgatcctctcccctctcgcggtgttctacctgttcggcctcctcatcaccgccggcctctcgctgtggcgcttgctgcagcgcgactacggcgccggcgaggaggcggccaacctcgcgccggcgctcaacgtgctctactcgctggcgctcgtccagggcgccctcttcttctactacttcacctcgcgcctcctcgggaggcggctggcgaacttggtcgccggagtttacagcttcggcggcgagggggaggaggaggatgacggcgggcgcacgtcggtggtggagtacatgcggcagacgaggaacggatgcgagaaggacccgtcgtcg

SEQ ID NO: 60060 - DNA, 295 bp, Oryza sativa
  unsure (1)..(295): unsure at all n locations
  Clone ID: PAT_MRT4530_61624C.1
atggggggctgggaaatcttgaaatggaaaaattcacaaataaccgcagttggggcgagcgagacggaggcggcgcgcgggggcgggcggtgggcggcggtgggtggtgagcggcgacgcgagacgaggcggatgaggcgcgcggaggcgggcggtgggcggcancgcgagatgaggaggctgccgtgcggggcaaggcggaggcggcgcgcggggcggggcgntctcgcggaaggggcgggnngggcnctttgtgtgtcggcgattggggttacgtcgggacttcgctcctggg

SEQ ID NO: 60061 - DNA, 464 bp, Oryza sativa
  Clone ID: PAT_MRT4530_61625C.1
ggaggatatacaggctgacaacattatttttttcacagcacacatgccgcatactgtatgtaagcacaccacaaccatcaactttatttatgtaaagcacacattcttcattccgtatggattggaacctatcccaaaaaatacctgatctacattaagcacaaactattctacaagcttgatactatttttacaacctcacacaatatccttaagcacatacaaaccagtggaaaggccctcaccaatccaagttactgcttccttggatttttcactttgtttgatgagcctgaagacatccatcacggatctgactggcaatatctgcaacagcaccagggccatgaaggaggaaaattgctgaagatttggatgttgaacccatctctttcatagtgtcaaagtactgcgtcagcaggactaaatccatcacatccttagctgaagtcccaggaacattg

SEQ ID NO: 60062 - DNA, 218 bp, Oryza sativa
  Clone ID: PAT_MRT4530_61626C.1
tcgacgcctgccggccccgcgccacgggtgaagccgggtcgaagcgagtcgggcccgcgtcgacgccgcgtggtcggcgcggcatcgccgcatccgtcagctcgggcatgggccggcatttcttcttccccggcaacaccgcaccgcatcgtcgccatcatcctccggcgtcccaaatcgtcggagagatgctcaagttccttgtcgaaggtggtggt

SEQ ID NO: 60063 - DNA, 340 bp, Oryza sativa
  Clone ID: PAT_MRT4530_61627C.1
taaagagatggagggcaagctcagagaaatgggctttgtgggtgcaagcgtgaagccactctctggaaaggatggacagagatccatgctggtgaaatttgctagcagcctcgctggtctcagcgagcccgagaggcttgctcagtccttggagaaacaaggccatggacgcgctgaatggtatcgcgtccgtagtgttccccctggtgctgatgggggcagcaatccgctgcttgtgaaagtgggcgcaaagggggaacggacatgggtcctatatggctacttggcgaccgcatgggacctggatgcactcgacctggagtcgaagcaaaatgctgta

SEQ ID NO: 60064 - DNA, 624 bp, Oryza sativa
  Clone ID: PAT_MRT4530_61628C.1
atggagcatctcaccatcgtcctcaatgaaccgtcagcgactgcaaagctcgccgactgcgccggagtggggataggagaggtgggggcgtcaccatccaccagatgcgcggcgaacacctgggatcccatcacggtgaccaaggagggaaccttaatccgcgccaataacagtgaccgaaggagaggcggcagggagggagctcgatcgtcgtggcggcggagagggagctcgatcgtcacggaggcggggagggagcttgttgtcctcaacaagcagaggccggatccgacgaccttgcgtctagatccagtggtgaaggggagcttgccatcgtgctcccaccatgtcccttctcccccagtggcagacgatgctgcggttgatgggaaaggtagagatgcggagatggatgacgaaggcgtgggcatcggcggaggcagcaaacatcatcaaagttatacatatgtttttttgaaagatacgaaaatatacgtgtaccgtgatgtggaggcgcgcaaccggttcactggtgctgcgtggacgtgcgggaccgatggtcctgcggcttggccgcatggcaccgcgcggtggcgcggtccggtcgcgcgccaccgggcttga

SEQ ID NO: 60065 - DNA, 1492 bp, Oryza sativa
  Clone ID: PAT_MRT4530_61629C.1
ccacgcgtccgattctcttgagaagggagagagaagagtgtagtagtagctagctaggagaaagagagagatagagagagaaacaatggacaggagagcagtagtgtatgatgctgaagcagttgatgatcatgagagacaagggacggtgtggacggcgacgtcgcacatcgtggcggcggtggtcggctccggcgtgctggcgctggcgtggacggtggcgcagctggggtgggtggtggggcccctcgtcctcgttggcttctcatgtgtcacttactacacatctaccctcctcgccaattgctaccgctaccccgaccccgtcaccggcaccgccaaccgcgagtacatcgacgccgttcgctgctacctcgggccgaagaacgtgatgttgtgtgggtgtgcgcagtatgtcaacctgtggggtacacttgtcgggtacaccatcacagcgagtgcaagcatgatagcggtgaagcgggtgaactgcttccaccgggaagggtacggcgccggcgactgcggcgcgtcggggagcacgtacatggtggtgttcggcgtcttccagctcctcctctcccagctcccctccctccacaacatcgcctggctctccgtcgtcgccgtcgccacctccttcggctactccttcatcagcctcggcctctgcgccgccaagtgggcctcccacggcggcgccgtccgcggcaccctcgccggcgccgacctcgacttcccccgcgacaaggccttcaacgtcctcctcgccctcggcaacatcgccttctcctacaccttcgccgacgtcctcatcgagatccaggacacgctccgctcgccgccggcggagaacaagaccatgaagagggcctccttctacggcctctccatgaccaccgtcttctacctcctcctcggctgcaccggctacgccgccttcggcaacgacgcccccggcaacatcctcaccggcttcgccttctacgagcccttctggctcgtcgacatcgccaacatctgcgtcatcgtccacctcatcggcgcctaccaagtgttcgcgcagccgatcttcgcgaggctggagagctacgtggcgtgccagtggccggacgccaagttcatcaacgcgacctactacgtgagggtgccggggaggtggtggccggcggcgacggtggcggtggcgccgctgaagctggtgctgcggacgatcatcatcatgttcaccacgctggtggcgatgctcctccccttcttcaacgccgtgctgggcctcatcggggcgctcggcttctggccgctctccgtctacttcccggtgagcatgcacgtcgcccgcctcggcatccgccgcggcgagccgcggtggtggtcgctgcaggccatgagcttcgtctgcctcctcatctccatcgccgccagcatcggctccgtccaggacatcgtccacaacctcaaggctgctgcacccttcaagactgtcaactga

SEQ ID NO: 60066 - DNA, 1557 bp, Oryza sativa
  Clone ID: PAT_MRT4530_6162C.1
cccccgggccggcgggcggcccgcgcgagggagaaactagtctcgagtttttttttttttttttttgcgtgttacagagtgaacttattcctcatgcatatactcttcagagattttgatccaaaagaaacatatgatccatgacaccatccatccacaaacacagaagcagttttccccagtccatcgtaagcaatcctggggttttaatttacatcttcctcaaatccgagctgttctagtttctacaagagggagcttgctagtaggcatggttggagaggatggccctcccatggcggtgcgggtggtgagcgcaggcgcagtggacggaggtgaggctgaggcatccgctgatgatgagggagtgccgctccgggcacgtgtggagcgccgggaaggagtcgcacaccgcctggaccgccggcggcgtcagcgccgtgcactggctgatgttcaggctggccagcccgtcggcgccggcgccggcgttcttcctcgccgccgcgtcccagctccggcctttgctcctcacccgccggctgttcgccgccagcgagtacattgcccggtcggtgatgttctggcagtagtagagccccagcgaccgcaggtgagggcagccattggcaagagcgaccacgctctcatctgttatcagaacacagccacacaagtccagagcccgaagttcagggcaccctgatgccaagctggtcactcccttgtcagttacactatcacaccagcctaggttcaaagactgaagctgaccacagttacaggcgatggcctgcaatgctctgtcggaaactgccctcacacacccgcacagattcaggcatttcaggttcttgcactggctactgagataggccaaagcagcatcgctgaaattggaacatccactgatgttgagccttgtaagatgggggcatccatgtgccagagcatacaacgatcggtcgctaagcctaaagcttctgctaagatccaactcgcgtaaatcatgacagttatttgctacagcctccactgcactgtcctcgagctgaggtttgatttgccgtaaagaaagaacttgcagcttcgtaaatttctgagcaagtgacatcactaagtcattcatgtgagcctggcaccacgaaagagaaagattcgtgactccccattctaatgtatcacgccaaccggtgcaaacaccagagcccacgattaccatcctgtcgtctccagccatcgataatatccgcaggagcagctccatgggaaggtccttccaacctaacaaggtagtccctgtgccctcatgatgtgcctgtccactctcaccctctccagaaaccatgagtgcgttgaacgaattgtccaattcaccactcatcagctgctcaccgtccattcttttttttttttttggataatctgaagctccgaatacagctaacctagtcctcgctcctcctccaagaacacgcgaagaaagaagaaactctagatgaggcagtcgataacccgggggagaattttgttttcggtttttgccgcagttgtgaa

SEQ ID NO: 60067 - DNA, 180 bp, Oryza sativa
  Clone ID: PAT_MRT4530_61630C.1
atggcgcacgatgggctgagtcgggagaaccactccccacccatggttctcctccttggtgtagctaaatctgcaactgagggaattggtgcgaagccggtggaggagtttggaggtgcacacgcagactccgatgaccaaggtctcctgacgatggtggcggtgaacgcagtctggtga

SEQ ID NO: 60068 - DNA, 180 bp, Oryza sativa
  Clone ID: PAT_MRT4530_61631C.1
gtattttttttatttcttttttttttatgcttacaaaacatttcatgagccaatattcgctttgatcactatctcgtcgcatgcaacacagccacggtagatcctactacctatgaggcaagccaagtaaacctactactgggcggcggcgaagatgctgcactgttggggctcaacccc

SEQ ID NO: 60069 - DNA, 323 bp, Oryza sativa
  Clone ID: PAT_MRT4530_61632C.1
atccatccaaggccgggaatcatctcctggtgcctactcatttcatttatacatactatatatactcaaatcctacaccactaactctcacacaaatatatatgtatgaaaagcaatacatctattaacactctatacactatataaactactacacacttacagacgtacttgaaagctcacacatccaactttaaccattcacaacaaacaccttacattccgaatacaaataaacaatcgcagaattaccctcattcacctgcccagttaacattttctccctcatgctttcctccaggaacctcaacattgccctcctt

SEQ ID NO: 60070 - DNA, 674 bp, Oryza sativa
  Clone ID: PAT_MRT4530_61633C.1
gtggacccctggaccccaggcacgcgacgccatcgccatggccaactccagctgcctctccacctctcccgccgcgctacgcctcgcgcgccccaagctcccggactccgccatgatcatgcagctccagctccagctccagcacgcgcccctgttcccccgcccgcccgcggcgcgcgcgcaccaccaccaccaccaccagcgatgcctcctgctcgcggtctccgaccacgtcgccgccaagcccgtcgccgtgccggtggggaggatgcgcatgcgcgcggcgacggcgatggtctcgcaggaggaggccgcggccacggctgtggaggagcaacaggaggaggaggtcgaagaggagcagttgcaagaggaagacggagcagctgtgcaggaggaggagcagggcggcgtcctggagggcagctcgggcggcggcgaggcggaggcggaggcggaggcagcgggcatcaccaccaagctctacttcgggaacctgccgtacaactgcgacagcgcgcagctcgccggcattgtgcaggactacgccaccccggagatggtggaggtgttgtacgatcgggcgacagggaggagccgaggcttcgcgttcgtgacgatgagcaccatcgaagactgcgcgcgtgcgttcttcgttcctcagttggtgaacg

SEQ ID NO: 60071 - DNA, 291 bp, Oryza sativa
  Clone ID: PAT_MRT4530_61634C.1
gtggggtttttttatgtttttgctgggctatttttttttttttttttttatttttttttttggggaaaaaaccagaccctttaaaagattggttattggaaaaattcaaattcgggaatggggataatacttaaaggttcccccaaaaagggggtgaaaattggttacaaaccaaggttttatcttggggcaaacattcaggtgcgggttaacattatggttgcttattataaccggaaaaacagcgcacatgggggctaaaataaaaatttttcgcagattttgcttttt

SEQ ID NO: 60072 - DNA, 459 bp, Oryza sativa
  Clone ID: PAT_MRT4530_61635C.1
cggtcgcgtgggtccagatccaccagatccaacaaagagcaccctatcctcctgcctacctcggaggcggctctaacggtggttctggtactcgggtgcaggagcgcggcggatccagcaactgtgtgtggcggtgatggagacggaaggagagtgcgcagcggagacaatagcaatgcatgcggcggtgatggtgacgaagggcgagcatcggttcttgggcggtgacgcgcagtcccttggactccctcctgttgccgcctctgtccctcctcccttctttctacaccgtcaccagactacgttacctgttcaccgctgtgtggcggaagagggcacagccacggtgaaggaggtgtggcaagcgagagccgtacggcgcgggggagggtcttgacagccagcgggccgcgcctggagcatgggacaggcaactacgacgacgacaaccacgaacgc

SEQ ID NO: 60073 - DNA, 288 bp, Oryza sativa
  Clone ID: PAT_MRT4530_61636C.1
atggcctggtcggcgcgcgcaaggagaggagcaaccggcagccgtcggcgtctcggcgcacgcaaggaggaggaggcggcggctctgggcactaatcctctcctttcgttccccctagacgccggcggcggaagaggagccgacggccgcgggggcacagacagcaccagccgctcccctcccagatctgagaagggagccagccggcagtggcggcaaaggcggcgctcccctcgccctcgggcagcggcgccggacagaggtggagagccgtcggcaattggatag

SEQ ID NO: 60074 - DNA, 440 bp, Oryza sativa
  Clone ID: PAT_MRT4530_61637C.1
agacttaaactaatttttgacttttatgcagactcgggcccctcattgttcaatctttccatcaggacaaggaactgcttaagaggactcctgcttcccgggaagccctagcttttcaaatttaaattgaaggcaaacccttgccccacttgaaaaacgtgctaaaaggggtgacaaacccaaacccgcatacgggaaccacttgtgctcccccaagggacacaagtttgtaagggggcacccccccaaccggtaatttttccgccacaaaacactaaaaacccttccaaggcttaattcaatccccaaaaaagtttcctgtccagagagttgaaaacttgggacaaaagggtgccccgccttttaaaactgggttccccatcggcagaaaaaatcagggggggtaaaaccccccccaattatttgcccgcggcatggaa

SEQ ID NO: 60075 - DNA, 519 bp, Oryza sativa
  Clone ID: PAT_MRT4530_61638C.1
atgacccacaggctggcgtaccgtgccgtgccgtgcctgggcctaggcatgagggctgaggcaccccggggaattccggcggaaaaaggagcagacgaccggacggcgaggggggttgagcggcggacggcggaggcagcgtgtgagcgcgcggcggccggcgaagcggaggcgcggagctgcggtggccggcggatggggagcggcgccgggacgtcgtcgacaggcgaggatcggcggggagaaggggtgccaggacgggaggcagctgatggggaggacaaccgacgagcagcggccgacggggagacgggacggcgtgcatgcctatccgggctgccaaatattcgaagcaatggcggcagcacggacgcctccgtgacacggcaggccttgcacgacgtcgccccggacaccgcgtcggtggcagtggcggcggcgccgccgcctggggtctcgaagcagcacgactgcgcatcctcggcgtcgccctcccccgcggtggcggcgacggcatag

SEQ ID NO: 60076 - DNA, 672 bp, Oryza sativa
  Clone ID: PAT_MRT4530_61639C.1
atgcgcgcggggctggaggaagcgcagcgacggcacgtccgggcgctggtggcggccgcggcgcgcgccccgacggggagggtgcgtgcggcggaggccaagctggatcgcgcatgctgccgcaacgcggagctagaggagaagtccccctatgccgtcgccgccgccacgggggagggcgacgccgaggacgcgcagtcatgctgcttcgagaccccaggcggcggcgccgccgccactgccgctgacgcggtgtccggggcgacgtcgtgcaaggcctgccgtgtcacggaggcgtttgtgccgttgctcccgtgccgccgcctgtgcctgtgcggcacctgcgaggccgccgttgatgcttgccccgtctgcgccaccaccaagattgcctccgtccatcccgggtcggcacgcacgccgccccgtctccccgtcggccgttgctcgtcggttgtcctccccatcggccgccgcccgtcccggtaccccttctccccgccgatcctcacctgtcgacgacgtcccggcgccgctccccactcgccggccaccgcagctccgcgcctccgcttcgctggccgccgcgcgctcacacgccgcctccgccgttcgccactcaaccccccctcgccgcccggttgtctgctccctacccgtcggccggcctga

SEQ ID NO: 60077 - DNA, 1056 bp, Oryza sativa
  Clone ID: PAT_MRT4530_6163C.1
atggcactggaggccgtgctgctctcgcgtggtgatctgtttggtcgtcgtcgttgcgccatggaaggaggaggaggtggttggagcagcccgttcagtggcttcgagggagtgatggatttggacggcggcaactgggacgccgccgcgtgctcatcgatgcttctgcatggcttccaggagctagagatccctgcggccgccgctgctgctgctgccatggcgccgccgccgccgccggtagagcctgctaattgcgcggagaatgcaggaggggttggtggtcatcaggaggatcaggctgcggtggcggcagcggcgacggcggtgcagtcggggaggaggaagcggcggcgggcgagggcggcgaagaacaaggaggaggtggagagccagcggatgacccacattgccgtcgagcgcaaccgccggaagcagatgaacgagtacctcgccgtgctccgctccctcatgccgccgtcctacgcgcaaaggggtgatcaggcgtccatcgtcggcggcgcaatcaacttcgtcaaggagctggagcagctgctccagtcgctggaggcgcggaagagttcccggcaatgcgcggcccacgacgcggcggcagcggcggcgccgttcgccagcttcttcaccttcccgcagtactcgatgagcgccgccgccgccgcggcgccggtggctcccgttgtgaacgagttgcacggccgtgacgacggcggagcaggcaccgccgaggccgaggcgtcagggtcgaagccgtcggcggtggccgacgtcgaggtgaccatggtggagagccacgccaacctgcgggtgctgtcacggcggcggccgaggcagctgctccggctggtggtggcgctgcagggccaccggctcaccgtgctccacctcaacatgaccagcgccggccacatggttctctactcgttcagcctcaaggtggaggatgattgccagcttacgtctgtggatgagattgcaaccgccgctcatcagatcattgagaagattcaagaagagcagggctgtagtttagattag

SEQ ID NO: 60078 - DNA, 531 bp, Oryza sativa
  Clone ID: PAT_MRT4530_61640C.1
atgggttggtccttggagagaaatattcctcttagatccgggaccaatccatccgggaaaaatggccggaggagctcgtcccacccgggacgagcgcacggcgtcagctcgtccacacccaccatcacctccgcatccgtcgacgcttgtccgcgcactccgccacctccgcgactgccgccgcccccacgaccggccgaccgtcgcctcgtccgcgaccgtcgtcgcccttgcgatcgaccgccgcctccgcgaccgaccgccgccttgtctgctaccgccgccggctcgtctatgccaggcgccacctctgcgaccgactgccgccgctcgaccgctgcttctcttagttccgggagccgcctcgccttctatcactcgtccacgacccgcctctcctccgcgagtgaccaccactcgtccgcgacctgcctccgctgcttgtccacgacctgcctctgcctctcctccgctcgcgccaacgagctcctccgcccccacgctcgccgctcgctgcgccccagccgctag

SEQ ID NO: 60079 - DNA, 366 bp, Oryza sativa
  Clone ID: PAT_MRT4530_61641C.1
ctcctccccactcccccacttctcagttcgtcggctccaccgttccacgactcgcgtttgctttcccttcttcccacttcgatctcctcgaatcacgcggtgcggaagtacgtggtgcgagtgggaggtgaggtcgctcgggaagtagcagtatatcaggggggaggggcgaggcttgactggagaatggctgggagacagagagactgaactgagctcaagccgctccgggatctccatcttgagctatccaagaactgagagtgctcccggctcctacatttgccctgtttgggcaccaataattggaggagcacgctgaggattcttgatttcttggtggctggaatcctttcaattacagac

SEQ ID NO: 60080 - DNA, 210 bp, Oryza sativa
  Clone ID: PAT_MRT4530_61642C.1
gcgccgctctttttttttttttgggttttttaatttttgggggtacattttaaattgttcttatatgttatgacttttaatttggaacagaacatgatgcacaaatgtcatccgaactatccaaaaacaaacacgcctttgaaggcgccacacaaatagtcaccaatgaaaacaccacaggaatcgtgataatcacaagggatctttaaa

SEQ ID NO: 60081 - DNA, 334 bp, Oryza sativa
  unsure (1)..(334): unsure at all n locations
  Clone ID: PAT_MRT4530_61643C.1
cggacgnncncngnccgcggggcagcttggatccaggatccgcgcgttctgcccgcggcgtcgcttctctgccccacgacgcccgggtcctcgtggtccaagtcctcgtccgacggggatggcgccgccgcggctgctgcccccgccggcgggccggtggcggtggcggtggcggtgacggcggcgcggcgccgtttcaagaactacgagaacggcaacttcagcagctacggcaacagcggcggcggcggcgcgattcagttcgccgtgtactcgagttggcagacaacggcggcggcggttgcggcggcggcgtcgantcgttccgccgcta

SEQ ID NO: 60082 - DNA, 296 bp, Oryza sativa
  Clone ID: PAT_MRT4530_61644C.1
ttatatccatccatcgatcgagaattcctcttctccctcttcttgttcttcttctcctctctgaatttaacaagaaatcaagaactaggtgtttgttttgactaacatgaactctgtcgaacactctgcgtgcgtgattgtttgtgtgtgtcatgtgctatgggccgtgcaagccgttcacaccgccggtgccgcaacagcagaaggaggcgactgtgatggctgagtacttgcttcttgagctggcggcagcggacgacgtggcggtggtgaggagggtcgtggtagatgagaat

SEQ ID NO: 60083 - DNA, 249 bp, Oryza sativa
  Clone ID: PAT_MRT4530_61645C.1
atcctcctcccctcccagcattatacggccaaaaataaagatatagtgtcccgtaggaatgaaaataattttaggctttgctcttcatgatatagctgggtgcaaggccactgagcaggacgatgcctcagacgacagacacgaggcaatatcagctgcaaggaactctcgagctacatcaacagggtcttaccacacataatgaccacgtaagccacccccatggactaccccgccagccccctaatg

SEQ ID NO: 60084 - DNA, 483 bp, Oryza sativa
  Clone ID: PAT_MRT4530_61646C.1
ctaaccacttaaatctttcctgaggaggaaggatcggggcacggcagagcggcacactccgacgaggtaggagtgctgggcctgggtgtcaggcaccgggctacaggaggtgccgcacctgatggctcggagtgcgacgggggtgccaaccggccgcggcgcgcgcgcccgccggcggctggcgagctcactcgcgcggccgagctgggtaccgggcgaagcaagcgaggcggagcaatcgaagcggacgcacggcaggagcgagcagatggccgagccgccgtcgccggccgcccaccacaaatagcacgccatgccacgccacccttcggctcgccgcgccgcccccctggccgctagccgcgccgcgccacgctgcatccgcatggccgctccaccgttccccggccgccgccccgcgccgcccccgccggtcgccgaccgagtcacgccatcggccgcccccacatggaaaggaaccat

SEQ ID NO: 60085 - DNA, 269 bp, Oryza sativa
  Clone ID: PAT_MRT4530_61647C.1
tcggttcaagcattaaacagcaaaaacgactgatctagtgttcctctgcaccgaagatcatcatcgtccatgctcatgcatgctattgctgaatgcaatgtctctgaccagtatgatgttaaaagtcaatgctatacgccgtctcaggtgcagacggctgtgctggtacagtaacatgtactgagcccacattatgtgtacggcacgcagcaagccggcatagcttgaagtcgattcttgctatcagctgcgtttaaactgacaaacag

SEQ ID NO: 60086 - DNA, 144 bp, Oryza sativa
  Clone ID: PAT_MRT4530_61648C.1
atggatgccgcgagttcggagctcaacataatcgccggtgcctccggtctagagcctttcagtggacggtcgaaggaattccgaggttgtaacgtggacgtttcacgccggcattcgataggcgctcaactccgggagagctag

SEQ ID NO: 60087 - DNA, 243 bp, Oryza sativa
  Clone ID: PAT_MRT4530_61649C.1
atggctcacctgcacctaggtatctgcgaaaatcactatttctgtatgcgggtacttaagtcgcttgaagctgcccatggatcctcgcgagtaggggcggagaggctggcggattcgcctgagagtgggaacgggcactggatccacccctcccgtcaccaccaccgacagatccttgcacaccaagggggttgggaggtggagaggaggtgggatccgcgcgggaggtggaagggtgcctga

SEQ ID NO: 60088 - DNA, 674 bp, Oryza sativa
  Clone ID: PAT_MRT4530_6164C.1
tctgcaaaggagacttaattcctgaatcttacctcatcattttttatgcagtttgcaggcataaatggcatcctctactatactcctgaaatacttgagcaagttggtgttggaggttttttctcgaagtttgatcttaattagttcttctacatctatacttttaagtgccatcgcaaccttagtgatgattccttgtattggtgttgctgtgccgttcgtagatacgaaaggaagaaattttattctccttggcacgatacccattctgctattatccctagctattatgcttgttgctaatattatgaatatgagcactgatttacatgctatcacctcagcattatgcgtaatcgtttatcaatgtgtttttgttatgggatttggccctattccaaatattttgtgtgctgaaattttccgttcatggatccgaccatgatgcttggtaatatgtagcctagcattttggatttgtgataccatcgtcacatacacttttcctgtgttgatgaatgcgattggtcttgcgggtgtttttgggatctttgctactgtttgtgcactagctaactatttgtatatttcaaggtgccagaaactaaaggtatatacctcttgaggttctgtcggagtgttttgcttctaccaacatctcatccaaagatgat

SEQ ID NO: 60089 - DNA, 1577 bp, Oryza sativa
  Clone ID: PAT_MRT4530_61650C.1
cccaaccatgtgcttgagaatgtactgctggaaagcattctccagttcctcacaacggcacgtgataggaacatggcatcgctagtctgtcgctactggtaccatgctgaggcggagacacggcaagagctcttcatcagaaactgttatgctgtttctccgaatcgtgtcattgagcgttttcgtggcctgcgctccatcactctgaagggcaggccatgcttcgcagactccactttagtgcccaaaggctggggtgcatacgcatcgccctgggtggctgctttgggtcccgcatacccgcaccttaagtgcatcttcctcaagcggatgacggtatcagacaatgacctcaggctcatcgcgcagtcattccctcagttaagggagctctcactgatgagctgcgacaagttcagtgccaccggcctcgccataattgcggagcagtgcaggcatctccatgtgcttgatctgattaatgataaagtcgaggacacagtggacaagcaggtggactggatctctatgtttcccaagcccagcacgtcgctggagtctcttctgttcagctgtgttgacacgccctgcaactttgagtcactggaggcccttgtcgcgcgctcaccaggtctgtgccagctgggtgtgaatcgccatgtgacggtagagcagctgtgctgcctcatggcaatcgctcccaatctaacgcaccttggcacgggtgtgttccggtccaagactggctaccctgcaggtctccaggacgccaatccagattacctccctgcgatctacccggtttgtgccaatctcacatccctcaacatcagctctgccaccttaacagggcaacagcttgctcccatcattcgctcctgtggcaatctccggacattctgtgtgcgcgactccataggtgatgatggcctttctgccatcgctgagacgtgcttagatctccaggatttacgagtgtatcgtttgcttcgtgggagtgagcatcatctctcagtatcagatgttgggcttgaaactatctcgaaaggctgccaaaagcttaaaaccctaacatactattgtggaagcatgacaaatgcagcaatggtcattatgtccagcaactgccctaatcttgaggtctttcgcctcagcattttgaaaacttatctccctgatcggatcaccggggagccaatggatgaaggttttggagcaattgtgatgaattgcaagaagctttccaggctttcgacctctggtctggtcacggacaaggccttcgcgtacattgggcaatatgggaaatcgatcaaaactctgtctgttgccttctctggcaatactgacatgtcactcagatatgtgtttgaaggatgcactcggttgcagaagcttgaggagggagcggtgcgggaggtctctgaccttgcaaatgccgacggagatggcgcggcggcggctaaggctgcggctgcgctagggcggtggggaggccgcgccgcgcgggatcacgacgccgatgcgccgccgcggccgcggtggcgaaatcgcgtggaggtgtactactgggctag

SEQ ID NO: 60090 - DNA, 284 bp, Oryza sativa
  Clone ID: PAT_MRT4530_61651C.1
cacatctatttgccttttttttgaggggcattgtttctcttgaggaaatcccagaaaaattggctaaggggtatataacccaccatgggatctcaccttaagacacataatgtgggaaaattcccatttccaattggaactttaatcgcactgaacgatttcccgaaaggacgattattcgtgaaaccccccgggggggatccagcattccgcccaccattgccagggggacaaggcctgctcaactgcattccgtccaatgttctaggaacctaataaggggc

SEQ ID NO: 60091 - DNA, 514 bp, Oryza sativa
  Clone ID: PAT_MRT4530_61652C.1
actagtggatcccccgggctgcaggctccaaatgaagtacattcaagtatgctaatcatttacttatgcctaacaggggctggttgactgtaaaatgtatgtaacacttcttccacgtggagtggtacactggtctcaccaatgacattttcctatggttgtggactattccctgaagtctgaagcagcacagctgtacagtactgacagattctgctattacgccgcattgaaggctttgtttaaaaataagcaagaggaatttgagagcttataattttgataagggatgaaaggggtgattgaaaacggtttcctgaaggatgataatgactgcaaatgattttcggaggaatcatgttgaggaattgttttggtcaaaacaagttaaatttttgttcttctcaggattcctagagagcagtatgaaagcaaagatcttgtccagcattttgtatatcattcaaggaatattctaatcttcgggaaaaacagttccatttcagtactttgt

SEQ ID NO: 60092 - DNA, 1267 bp, Oryza sativa
  Clone ID: PAT_MRT4530_61653C.1
gatatggcctttgctgaatcaatatggacctttatgccaggaaagaagggatcagttgttcaggggccaaacactagaactctaacaaatgctcatgatggtatcttggatgatattaattgtgctcagattgctgggaagcatgtgggagatcattccaattgtgctaatgtcatcaaggctggagtcatatcattgctaggaaagctagttcaatatcctgagagacctggtgaaccattctgtcgatactacatgaagtttggggaatgtaaacatatgactttctgtaaatacaatcacccaaaagataggttcagttgcaagaccacaaacactatcagatcagaatccggttccccgcacggccagcagacaacaattttggaaaatcaatttgggttaccttcacttgttgataaggccacagctaacacaacaaaatcttgtggcatctgcgtcatcttccatgacacccgatgaaataggagaggggaaaaacaatccagatgaggtgtttgtatgtatatgtggagagaagcttttattccatacaaacttcaatacaacggcagtaaaagaacttgtcgtatttgctctccagaggaggaacatcaagtattgtgatatttatgtaacatggttaattccaatggaatatgagcgtatggatgaacttattgaccgtgcggtccgtgacaataataatgaccttttctattatgtgaaccttcccccagaattgataaacccttataaggatacatgggtaacttttctaagtgatttctcgagatatatcatacaccaactattgcaatatttgaatgatacttttggagatcctccttcttggatcgctgatatcagctgggttcctgacatgtggaagacatacaattatagtcctaataacaactcaacgttatggaccccacgatatactttggatctaaacagttgctcacattttgccaggaatttcttgaaccatttcggtcgtgaggtgtcggcgcccgctcctgcgcctgcccttgctcagaatctagagtttctgcttccaaccatcatgatgctaatgcctgtgtacagtggacctcatcattggaacaatgacttcatggagatcacgtaccattttgctgctatcttgctttctgaggtggaagaggacggtaggtacaacagcattaaagagaaggccacatcatatggatctggaataaaaactttccggacaatttgtgcaagctttattgtattttaa

SEQ ID NO: 60093 - DNA, 144 bp, Oryza sativa
  Clone ID: PAT_MRT4530_61654C.1
atggacgacaatgtgttgacgaaaaaaattgaacacaccggcctgggagatctgcttagctcctgtgcaggtccaaagattgccgtccggctggacgtcggcgtggcagcggccagcgtagatgttgtcctcatgtatccgtag

SEQ ID NO: 60094 - DNA, 284 bp, Oryza sativa
  Clone ID: PAT_MRT4530_61655C.1
gtacgcttgtttttatttgggaatttttgtaccgtttcctgcaggcggcccgggattccccaaaaagagcggaacgaaacctgggggaaaccaaggctaaaccaaaaatgcggggagaaaaagttaggcgaaacaatggcacacaagataccagggggaaacataaagggccaaaccgggggagcccaaagagggagcctgcaaaaaaaagaggagccgcggggacggcccgagatccagccagccaacaggactggccaagcgcaaaaaggacggggccaagg

SEQ ID NO: 60095 - DNA, 498 bp, Oryza sativa
  unsure (1)..(498): unsure at all n locations
  Clone ID: PAT_MRT4530_61656C.1
agcaatttcatgtaccggagatctggtgtccgtcgagatattgaacctagaggccttctactaccccattacactagtggtgcacatctagtagatatcatccaagggagaggtatagcagggccagctcttgccaggctgtcctgagtcctaccaacaacaggtncaacagtcaggccaagcccagttgaccgaaagtcatagccaatgtcaaaagttcaaggatgaacatcaaaagagccaccgtttcagacagggagacgtcagtgcattgcctgctggcgtagctcattggtgctacaatgatggtgaagtgccagttgttgccaagatgccactgatctcagcagcggtgctcataaacttgaccctaggcaaagggagttcttgttagcctggaaatatggagaaaccctcaggcatacgaggcgtgagggctgaggagccgggcacagaacatatttagcgggctctagcactgagctacttagcgaggct

SEQ ID NO: 60096 - DNA, 125 bp, Oryza sativa
  Clone ID: PAT_MRT4530_61657C.1
ttgttttaaaaaaattctggggtttgttccaaagttcagtattacacctcttttatagtggtctgtgtcggaaggtgtgttttattattcgacaggtcatgccgttcctctgtacgaagggggaa

SEQ ID NO: 60097 - DNA, 411 bp, Oryza sativa
  Clone ID: PAT_MRT4530_61658C.1
atgtcgacaaggcgaggcggcgacgaccgggcgggcgcggcgaggcggcgggcgacggcaaccgggcccctcgcgctcgtatccggtggcgacgggcgccccccgcacggatctggcggcggtggcggccggcgcgactatggtggtgatggcagcggcggccgtcccccgcgcgcccggatccgggagcggcggccgtcccccgcccggatccgacagcggcggccatcccccgtggcggtgaggggcggcggtgggcgggctcaacagcgatgcgactgggtggccgtgggccgtggctggtcgcggtggcggtggccagaaaagagcgacgacccctccggcaagcaccaacctcctgccatcgtgccccgtgcctgtgcactagtcctcggcaagagagagaagtga

SEQ ID NO: 60098 - DNA, 221 bp, Oryza sativa
  Clone ID: PAT_MRT4530_61659C.1
cataatcgcagagaaaaaaaaaatctcccctcgaagcgaagcgtcgaatcgccttctcaagatgcagatctttgtgaagaccctcaccggcaagaccatcaccctcgaggttgagtccccggacaccatcgtcattgtcttggccacgatccaggacatggaggtcattctccctgtctagccactttttatctttgctggctagcagcttgtggtcgttc

SEQ ID NO: 60099 - DNA, 1446 bp, Oryza sativa
  Clone ID: PAT_MRT4530_6165C.1
atggcctcctccctcctctcctccgccgcctccggcctccctcccaagccgcagccaccttcctccacccctccctcctccgcctccgcgcggccgcggggcttccgtcgcttcatgctcgcccgcgccgccgggggccgcgacccggagccgccgccgctgcccgaggggaccgagaagaggtcgctcgcggtgaggacgggggaggtgttcctggggctggcggcgctgctggttccccccgggaagggccggggggccggcggtggaggaggtggaggcgaaggacggggtggtgtgggagcagcggcccgaggacgtggaggcggagcggcggcggcgggagctgaccggccccgggttcagcttctccgccgccgggctgctcttcccctaccacatcggcgtcgcgcagtgcctcatcgacaggggctacctcacgtgattgcatctgggaacacgatgcgagatgctttgcaagtgaccaaggatctagctgataactgtcggagcaatgggacagcctttcgccttggggctgtactcaaggatgttctagacaggtttctcccagatgatgtgcacattaggtgcaacggaaggatccgtgttgctattactcagctgtcctggaggcctaggggcttactggttgaccaatttgactcaaaagatgatgtaatcagtgcagttattacatcctcttttattcctggatatttagctcccaggcctgcaactttcttccggaacaggctgtgcattgatgggggccttacgttgtttatgccaccaacttctgcttccgaaacagttcgaatttgtgctttcccagccagtcgactaggattgcaagggattggtattagtccagactgcaatccggagaacagagctagcccccgacagctgtttaactgggctctggaacccgccgaagacgaggttctagacaaattatatgagcttgggtatctggatgcagctgatctcgtcacccagttccaggaggccacggatgaagagtccaaggagagaattgttgcaaatttggcgaatttcgcatatgatccttataactacacctttatgcgccagctaaatatcctagaattgttcttggactgcattacggagccaaacgaaaggcttatcgaatttggcatcggtggaatctgtaactcttgtgccgatccagcaaatgcttcagtcattactcattgcggtggaattccgttggtcatacaatgcttatctagcccagtgaagaatacggtgaactatgcacttggggctttatattatctgtgtaacccttcgacaaagaaagatattctgaaaccagaagtacttaaggcagtaagagagtatgccgtggctggagatgctaataccagcttcagaaatctggcaaacgctttcctagacaagcatgtcaactcatga

SEQ ID NO: 60100 - DNA, 282 bp, Oryza sativa
  Clone ID: PAT_MRT4530_61660C.1
atgccttgccagtccaaactccattgggctgccatcaagctcatcacgggcacacgaccccgacgttgctctatcctgcaatcattggaaatcgacttcccaaagttcctagacaccccgtcgtactactgcttggtcgaattgaagctgcgcatatttcccctttgcaacccgatgtcccgcaccgacaccctagctgtgcggctctctcatggcgccgctgacgggtggccaagctccaggcctacctcctccaaccagctgccgcatgctctgccctag

SEQ ID NO: 60101 - DNA, 573 bp, Oryza sativa
  Clone ID: PAT_MRT4530_61661C.1
atggctgatatcgcttatatgaatcagtttagctgtctgtctggtctgtggttcctcatgttggataagggtgtccctaggcatccaggacccctcaaggttcggccgcattgggaggcattggcgttgcagagcgagtatgtcgagcttgtcgccgtcaatgactccttcatcaccactgagtacatggtaactcttgatctggctaaaggtgtatatgcaaagttcattgactgggatgaacaaatgttcgatcgggaaacatatgccagatttctagatgctgtttcgcgtaacgatcctgatattgccaaatttctcatggtgatggctctttgcagtacagttgttcctatcaaaagaaatgatggtactataacataccaagcacaatcacaagacgaggaagctttggtcactgctgcatcaaaactaaatatggtgcttgcgagtaaagacagcaacactgctgagatttctttcaacggttgtaagttctattatgatttgttggatattttggagtttacttccgatcgcaaaagaatgtttgctgtggtaaaggatgtctag

SEQ ID NO: 60102 - DNA, 1133 bp, Oryza sativa
  Clone ID: PAT_MRT4530_61662C.1
gactccttcatcaccactgagtacatggtaactcttgatctggctaaaggtgtatatgcaaagttcattgactgggatgaacaaatgttcgatcgggaaacatgtacgcctgctcattcagctaaatgccagatttctagatgctgtttcgtgtaacgatcctgatattgccaaatttctcatggtgatggctctttgcagtacagttgttcctatcaaaagcaatggtggtactataacataccaagcacaatcacaagacgaggaagctttggtcactgctgcatcaaaactaaatacggtgcttgtgagtaaagacagcaacactgctgagatttctttcaacggttgtaagttctattatgatttgttggatattttggagtttacttccgatcgcaaaagaatgtctgctgtggtgaaggatgtccagagtgggaagatccttcttctttctaaaggagctgatgaagctattcttcctcgttgtcatcaagctggtgatggtagttgttgctcgagatcccttattctactgctgtcctgatcttgaggtgcttatcatgatttctgggatagtatttttcacgttcaagcaatatctaatacctgtagcaaatgggttgcggcttctccctggtagatcaatgctcacctatcacgcattgtagtagtaaaattgcttgagaaatcgtattcatgaattctccttcgagaaatcttgtgttgcttcaggatggatttttcaattggtccttgtctaagaaaaatattttataattggtggagtaattaattgtgggaaactgactagagataatcttttgcaagctatttgagaaggtgtcagtgaaaatacaatgttttgcttactggtggccattttacttggtttttggtaagagataccggttgacccttccaatatccagggcaccacaccaattggttgaaaatggaggtttcaaaaccaatgaaaatggaggtttcattgggactctaggctgtctgtatatgttggttttgtatgtatatgtcgttcttaagtcaagcacgaattagtgaatgatccttcgtccctagccttgtataaatgtatagtatatgaaatgtacatatttttttattactgt

SEQ ID NO: 60103 - DNA, 1168 bp, Oryza sativa
  Clone ID: PAT_MRT4530_61663C.1
agaaaataatatagattttgttggtataatggaaacagtgaaacatgacttttcccctagaatgccgaggggattagtggtcatatatcttcgtgatggaactggatgcctgcttttggtaaatctggggtattctagttggcattaatactgaaaaatttgatatcttggaagttaatagaaaacaaattctatgtcaaagtgaagctgataaatattactaccaagtttaaatgggacttgataatttgtggagcagcctcaaaagaggaaaagagtgtttcttaacgcatttggtaaatcttttacatcaacaaaaaaaaatcctttggtgatgggaggtgattttattatcttaagaaaagaaagtgaaaaaaaaacaaagccggtggttataacaaatggagtttcattttcaatgcaattatcgaacaagctagtctcagagaactttgtttgggaggaaggcaatttacttggagtaataaccaggacagcccaaccctagaaaacttggacagagtttttataagcaataaatgggaggttcaattcccactcattgctgttagatctttgccaaggggcttgtctgatcataaccctctgatagttaccactggataaaacacaatcagtcatcccatttttaaatttgaacagagctggttccttagggaagacttgaataaagtagtggaggaggtctggaacaagaattattctaggaccagtatagaaaaatgacagttgaggcttaaagcccttaggaaaaaaactaaatgggtggaacaaaaactgggaaggcttatataggatcgaaaagcaggacattctggaaagaattgatgccattgacattagagtagaaagcatgggtatgagtggttctgatagagaggagagaagggagcttgaaaagagactcaaatttgttattagggaagagaaactgaagtggattcaaagggatcgtaatactaagttcttccatgctaaggcaaatgggaggaagaggttaaccactcctgtcactttagaggaactcaaaacattgatttttgaaataaaaaagaacaaagccccaggtccagatggaataacaggagaattttacatgcatttttgggacttgctttggccttgcaattccctaagatttataaca

SEQ ID NO: 60104 - DNA, 1640 bp, Oryza sativa
  Clone ID: PAT_MRT4530_61664C.1
tagactcccgacgcgaccaagcgccgccgtcgccgacgcttccccgccgtcggagatggacttccaggtcgtcgtcctcgccgggggcacctccgagaagctctcgcccctcgtctccaaggatgtccccaaggcgctcctccccgtcgccaaccgccccgtgctctcctacgtgctcgacctcctcgaggccagcgacctcaaggacatcatcgtggtggtggaggggcaggaggccgcgcgactcgtcggagcttgggcctcgagcgcctacctagaccgccttctcgtggaggttgtggcagttccagaggacattggaacagctggtgcactacgagctatttcaaagcgactgactgcaaatgatgttttggtgattagcggcgacctagtaactgatgtacttcctggggctgttgctgctactcatagaagaaatggtgccgctgttactgctttactatgttctgttcctatcagtggtccttcagatgctgcttcttctggagggaaagataaagctaaaaaaccaactcgactgaatatagttgggctagacataacaaggcaattcttgttgcatattgtatcaggaaccgatgttgaaaaagatgtacgtgtttacaagcgaaaaatccgagctgtaggcgagatggaaattcgaagtgatctgatggatgcacatctgtatgcttttaagaggacaacattacagaatatactggaagagaaagaatcataccgtagcattagacttgaagtcctaccatacttagtgaggagtcagttggttgtaggggatgctagtcacttgtccggttattccttctctgcacagaacaacatcatccatccaacttctgtgcttggatcgaagactacaatcggaccacaatgcatgcttgctgagggttcacaattaggtgacaaatgtagtgtgaagcgatctgttattggccgtcattgtcgaattggttcaaatgtaaagattgtcaattctgtcgtgatgaaccatgtggttattgaagatggttgtcacatacaaggttctgtgatatgcaataatgtgcaacttcaagaacgtgctgttttgaaagattgtcaggttggtgctggttatattgtaactgctagcagtgaacacaaagcagaatctctcagcaagaaagtagagcgattttgatagtgtggttgaccttgaacaattttgtttgctaagtcagatacagccgtacaaggagttaagaagggagggggtaacatgtatttcgaaaaaatgatttcaccgtgataccccaaaaaatagtgtgctcttgtctattctaacagattgagcttggacttgacagttgaagcgcttctagcgagattgatccatgatattatgagtaaactatgtgtatccgtttgttggccctgttcctgttattgatttgtaattttcttgtcaatttgggtggtacagtaattcatttggtacaccaaggtggttcttgtcgctattttgtaatacattatgttagctttgggcggcttactctctccattccacaatattataacctagtaacggatgagatattctatttgtctaaaaaacctgcagaaaaaaaaataaaaaaacctgcagcccgggg

SEQ ID NO: 60105 - DNA, 279 bp, Oryza sativa
  Clone ID: PAT_MRT4530_61665C.1
atggcagggcagcagattgttccttccttccttccttccacaaaagcatatgattgcaagaacgtagtaaccaaagctcaacctcaagcatggcgatccatgagcaagaagaagaagaagaagaagaagaagaagggtcctgaaatggaaagaggggcgtttcctaataaaacggcagcaaggcgactcgcttacaaccttcttatattaaatgccccaggcgagaagcagggaagcaaccggggtcagggactcaggggagagcaggggacgccatga

SEQ ID NO: 60106 - DNA, 5013 bp, Oryza sativa
  Clone ID: PAT_MRT4530_61666C.1
atggccataacagcttatgtgtcttcaaataaacagcgtttcatgaatcagtattttcttctaatcgcctgccttcagttatggtcaagtatcacacctgttagtcctgcaactacatggggtccacttgccatcatcttcatagtttcagcttcaaaagaggcttgggatgattacaataggtacctttcagacaagaaagcaaacggaagggaagttttggtgatcaaagcacaagatatccatgttggaaatatagtgtggctttatcagaatgatgagataccatgtgatcttgttcttataggaacttctgatcctcagggcatctgttatgttgagacagctgctttagatggtgaaactgacttgaaaacaagaattgttccttctatctgtgctaacctttctccagatcaattaggcagagtcaagggtgtagttgagtgctccaacccagataatgacataagaagatttgacgctaacatgcgcttgtttcctcctatcattgatagtgaaaaatgtcctttaactatcaataatactcttcttcaatcatgttacttaaggtacacagaatgggcgtgtggagttgcagtttacacaggcaatcaaacaaaatctggaatgagcaggggaaccgcagagcccaagctcactgctgctgatgcaatgatagacaaactcactgttgcaatatttatgttccaaattgttgttgttcttgttctgggttttgctggcaatatctggaagaagaaccagggtcttaaggcttgtagcttcttgaaggctcttctgttatattttataattttgaactgttatggattgcatgtaactcttgatctgtctaaaggtgtatatgcaaagttcattgactgggatgaacaaatgtttgatcgggaaacatcttacataagtgtctctttcagcacagctattagtgaagaccttggacaggttgagtacgttttgagtgacaaaactggaacgctgacagaaaacagaatgattttcagaagatgttgcataagtgatattctgtatggagaaaacaatgaagatgctttaaaagatgccagacttctagatgctgtttcgcgtaacgatcctgatattgtcaaatttctcatggtgatggctctttgcaatacagttgttcctatcaaaagcaatgatggtactataacataccaagcacaatcacaagacgaggaagctttggtcactgctgcatcaaaactaaatatggtgcttgttgctttttcttatctcagactgatttttgctttcatttcactattttctatttctacagagatttctttcaacggttctaagttctattatgatttgttggatattttggagtttacttccgatcgcaaaagaatgtctgctgtggtaaaggatgtccagagtgggaagatccttcttctttctaaaggagctgatgaagctattcttcctcgttgccatcaaggacagcaaattagaacctatcttgagacagtagaaatgtattctcagttgggcttgcgaacattatgtttgggatggcgtgaattagaagaagatgaatacaaagattggtccaaaacatttcaagatgctagctgctccttggagaacagggagcgtaaaattgccgaagtatgtcaccgtttagagcaagatcttcaaattcttggtgttagtgccatagaagaccgtctccaggattgtgcatttgttttggatggatgggcacttgaaataattctaaagcattccaaggagtccttcactaagctggccatgttgtcaagaacagcgatatgctgtcgaatgacacccttgcagaaagcacagcttgttgggctcctgaaatctgtcggttacctaactctagcaattggtgatggtggtaatgatgtaagaatgattcaagaggcaaacattggagttgggattagtggtagggaagggctacaagctgcaagggctgctgattatagcattggaaaattcaagtttctcaaaaggttgatacttgtccatggtcgatattcatacaatcgtacggcatttatttcacagtactccttctacaagtcactcttgatatgctttatacagattcttcttcctgtgacgactataatttttgacaaggatatctctgaggaaacagtactgcaatatccccagattttactctattctcagtctggaaggcttttgaatccaactacatttgctggatggtttggacgatcggtttaccatgcacttgttgtattcttaactacaatctgtgcatattctgatgaaaaaagtgagattgaggaactctccatggttgcgctatctggatgcatttggttgcaggcttttgttgtgacactggacacaaactcattcacttatccgcaaatcattctcatatggggaaactttatcgccttctacatgatcaacttaatagtcagtgcggtaccaacactccaaatcctaaccttacgcttcctcaaaccatctggtgaaaccatcttcttgcagctgattgttgcggaactaaaagccagccaaacgaaccaatccgaggcgtcttcgcggcatatgctctccaaggcgaggcatttcgcccggtggaaaccaataccgccgccgcccacccacgcaagaaggctatcgccgcggccaccgcgccggccctcgtcggccgcgactgagcccgaggccgaggccgaccaggatgcaggcgccaccaccgccgccgccgccgcttcggccgagcagatcggctcggccgcacgcggggtgttcgacggaatgcggcgccgggccgcgctgtcctggaacgccacggtagcggcccacgcgaggcgcgggcgcgtccgcgacgcgctcgggacggccgcgcggatgcaccgctccgcggcggggctcgacgaggccacctacgcgtcggcgctcggcgcctgcgcccgcgggcgctgcctccgcatggggtggcaggtgcactgccaggtggtgaagtccgggtccgacgacttcccggtcgtcggggcatctcttctcgacttctactcctcgtgccttgatctcgatgcggcacggacgctcttcgacacccttcatgccaacaacgagctgctgtggagccccatggtcgtcgcgcttgtcaggttcaacttgctgagtgacgccctggatttgcttcagcggatgccaccatctcgtgatttgtttgcgtggaccgccatcatctcgggctacgcgcggggcgctaacgagtactgttgcaagtcactggagctgtttgtgcagctgctggctgaggatggtgtcatgcccaatgagttcacttatgacagtgttttgagggcttgtgtgaagatgggagcattggaatttgggcgatcgattcacggatgcttgatccaaagtgggtttgagtcggagcagttaatcacgagcgctcttgtcgatctttactgtaggtctggtgctgtggatgatgctgtgatggtttacaatggcttgcaaatgccatccctgataacatccaatacactcattgcagggtttatatcaatgggcaggacagaggatgctaagttggttttttcgcagatgacagagcatgattcaggttcctataatctgatgataaaagcgtacgctgatgagggaaggcttgaagactgtcggcggatgtttgagatgatgcctcggagaaatatggttaccttgaactccatgatgtcagtgcttctccagaatgggaaattggaggaggggcggaagttgttcgaacagataaaggatgaaaggaacacggtaacatggaactctatgatttcaggttatgttcaaaatgatcagtcttcagaagctctaaaactgtttgcggtcatgtgccgattgtctattgaatgcagtgcttcaacgtttcctgctctactgcatgcatgtgccacaattggtaccatcgagcaaggcaaaatggttcatgctctcctatgcaagactccatttgagtccaatggctatgttgggacagctctagttgatatgtattcaaaatgcggctgtgtgagcgatgcacgggctgcatttagttgcattatgtcacccaatgttgcttcttggacatcactcatcaatgggcttgcacaaaacggccattggatggaagctatagtacaatttgcaaggatgctgaagaacaacgttaaacccaatgagatcacctttttgggcatcctgatggctagtgctcgcgctggtttggttaacaaggggatgagatttttccactctatggaaagctatggagtagttccaactgtggagcattatacgtgtgcagttgatcttcttggtcgagctagacgtgtaagggaagcggagaagttcatctccaaaatgcctataccagcagatggtgtggtgtggggagcccttcttactgcctgttggtacacaatggacttggagatgggtgagaaagttgctgaaaagctgttctacatgggcacgaagcacatatctgcctatgtcgctatgtcaaacatctatgctaagctggggaaatgggaagatgttgtgaaggtaagaacaaggttgaggagtatcaatgcaaaaaaggagccagggtgtagttgcattgaggtgaaggatatggttcatgtattccttgtggaagataggaatcatccagagagagaagagatctatctaatgctagaagatttagtttctaatatatcttactctgaaactgatgatgaaacacatggttattatctcgagcctgcatcattagacctccttacttcccagaaaaggctagctaaccaatagtcaataggcaagttgaatggaattaacatttatgtacatatttcattttgcaaggtattctgtacagattgtaacatctcttttggcacaacaattgttagctcattgaatggggcaatcttggaagaaagaacgtattttcgttgtttttttttc

SEQ ID NO: 60107 - DNA, 235 bp, Oryza sativa
  Clone ID: PAT_MRT4530_61667C.1
aagcagtctacgatagaaaatggcaatctttgagatgacgtgaacactatgagaagaaaggtattttttgttattgctgctatgagcataaggctacatgcagcacttatttattcccattgaaaggctatgaatttgatgattatagtcctgaagctattcacttaaatagtattatttcaataattaaaatgcttaaatagttttgtttttctggttctgatatatgtggaac

SEQ ID NO: 60108 - DNA, 312 bp, Oryza sativa
  Clone ID: PAT_MRT4530_61668C.1
atcgttcatttttttatttgttttttaaaaagaaaaaaaacgcgcattctcggggttacactaccctttttcaaaaaacacaaaaaaatgggacgagtaccaatagctctcacgggtttgaaaacggaggaaccatttattttaaacaatttcggacaatcaaattgcacattctgggagggggatttttaagaaagagaacaaaggaaacaccatctaatgtcttaagagaataaaggtgcagaaaggagagaactcgggggaaacaaaacaaaaaggggcaagttttaataaggggccgccggagctgaa

SEQ ID NO: 60109 - DNA, 330 bp, Oryza sativa
  Clone ID: PAT_MRT4530_61669C.1
atggagctgggctcccgctgcgtgagcgtctcgacggtggtcgcggagaaggggagcgaaccgatgttgaggaggaccggggaggaggaggaggactccggcggcgactccatcaccgcggcggcggcgcggccgacgagggcgtgcgagcgcgatatctactcccaccgcgcgtccctccccttcgccatcgccgccgccgccgccgtcgccgtcgccgattttgccaccgtcgccttcgtcctccaccacgcccccctcccggggccgcacggagatcggaatccccggtacggcccaaccataacagggcccgcacggatgccgtaa

SEQ ID NO: 60110 - DNA, 1586 bp, Oryza sativa
  Clone ID: PAT_MRT4530_6166C.1
gcacgaggaacgaattaacgacgtagcagatgcttcgccgcgcgtgcacacgtgtcgtcggcggcggccgccggcgagcccccatggcccccatggcctcctccctcctctcctccgccgcctccggcctccctcccaagccgcagccaccttcctccacccctccctcctccgcctccgcgcggccgcggggcttccgtcgcttcatgctcgcccgcgccgccgcgggccgcgacccggagccgccgccgctgcccgaggggaccgagaagaggtcgctcgcggtgaggacgggggaggtgttcctggggctggcggcgctgctggtgcgcgcggggaggggcgggggggcggcggtggaggaggtggaggcgaaggacggggtggtgtgggagcagcggcccgaggacgtggaggcggagcggcggcggcgggagctgaccggccccgggttcagcttctccgccgccgggctgctcttcccctaccacatcggcgtcgcgcagtgcctcatcgacaggggctacctcacggaaagaactccgttagctggttcatcagctggtgccataatctgtgcagtgattgcatctgggaacacgatgcgagatgctttgcaagtgaccaaggatctagctgataactgtcggagcaatgggacagcctttcgccttggggctgtactcaaggatgttctagacaggtttctcccagatgatgtgcacattaggtgcaacggaaggatccgtgttgctattactcagctgtcctggaggcctaggggcttactggttgaccaatttgactcaaaagatgatgtaatcagtgcagttattacatcctcttttattcctggatatttagctcccaggcctgcaactttcttccggaacaggctgtgcattgatgggggccttacgttgtttatgccaccaacttctgcttccgaaacagttcgaatttgtgctttcccagccagtcgactaggattgcaagggattggtattagtccagactgcaatccggagaacagagctagcccccgacagctgtttaactgggctctggaacccgccgaagacgaggttctagacaaattatatgagcttgggtatctggatgcagctgaactcgtcacccagttccaggaggccacggatgaagagtccaaggagagaattgttgcaaatttggcgaatttcgcatatgatccttataactacacctttatgcgccagctaaatatcctagaattgttcttggactgcattacggagccaaacgaaaggcttatcgaatttggcatcggtggaatctgtaactcttgtgccgatccagcaaatgcttcagtcattactcattgcggtggaattccgttggtcatacaatgcttatctagcccagtgaagaatacggtgaactatgcacttggggctttatattatctgtgtaacccttcgacaaagaaagatattctgaaaccagaagtacttaaggcagtaagagagtatgccgtggctggagatgctaataccagcttcagaaatctggcaaacgctttcctagacaagcatgtcaactcatga

SEQ ID NO: 60111 - DNA, 612 bp, Oryza sativa
  unsure (1)..(612): unsure at all n locations
  Clone ID: PAT_MRT4530_61670C.1
gnctnngtggtccccctgggctgcaggnnttcggnacgnggaaagaaaccctagnccttcgtcnccggcgaccctcccctnacctnctcgccgcggctncccccgcctgacctccgcgcgccccccgtcgactcccccccgngaatccggatcccgcgngcgcgaggaaggagggggggaggaggagcgngagatggggtcnttgtcgaaggtggtgcggccggnggnggtnctggntcgctcgtcaacgacggcaccatcgncgcgntccgcatgaagatcatcgcccagctcaaggccaacgnggatatnaagaaaaaaaccatgacgatggtggagcaaagcagngttctaaacactcctggngctnngnagaagaccaagagggngtttttttttatgcccttcggcaggaattggaaaanccagtccttngaaancttcaagggaagtctnggncnnatacttgagantggtngnctttgntaanagattnctttcactanntngagnggcttctttcnccccanngntgntcnacaatatgccacctccacctttnaacatctnntcctctnaccatgantgtgnngaaacatttcttcatttntt

SEQ ID NO: 60112 - DNA, 301 bp, Oryza sativa
  Clone ID: PAT_MRT4530_61671C.1
tgtcgtagatcgcgtgctgccgcgcttgcctttttttctctgaataatttgcccatttctaattatgagactcacaaaacacaacacggattaattatggggggaaccgcctaagacagcgtgctatgccttgtggatacactgataccgtgtgtgtactacacgtattgcaccacacatcgatcgatcatgccgcagctgaaggactacaaggggtacatacgggactgtgggcctatggtgatgcactgggtattgaccatatactgcgagcagaatcgcagattcaccttcaggacca

SEQ ID NO: 60113 - DNA, 488 bp, Oryza sativa
  Clone ID: PAT_MRT4530_61672C.1
gcacgagggcgccgttgagcaaacagcccaagctagcagtagaaaagatctgctagcctgtggcgatcaagaagccaggaactaaaccaaaaacacgtcatggttatggaggacggcgagatgagcctgtcgaacctggtgctcggcttcttcgaggaggctgagagggagcagagatggccggagaacggcgacgacgacgacgagggctccagcggcagcggcgccgccgagagcaaggccttctggcagaaccagcactcccagctgcatgaggctttggccaagaccagccaggtagagagcaggatacgggaggacacggaggaggcaatcaggaagatgcgcgccgcgggcgccgtctgctcctgcgcgaggcgggcggcggccggggactgccggagctgcacgctccggcatgtcgaacaacggctgcgcgacaccgggtacagacgaggagcggcaaggcggtgcgggtggtggtggag

SEQ ID NO: 60114 - DNA, 3191 bp, Oryza sativa
  Clone ID: PAT_MRT4530_61673C.1
cacgaggccggcatccagatcgggacagtctctcttctcccgcaattttataatctcgatcgatccaatctgctccccttcttcttctactctccccatctcggctctcgccatcgccatcctcctctcccttcccggagaagacgcctccctccgccgatcaccacccggtagggcgaggagggagccaaatccaaatcagcagccatggcgcagatgctgctccatgggacgctgcacgccaccatcttcgaggcggcgtcgctctccaacccgcaccgcgccagcggaagcgcccccaagttcatccgcaagtttgtggaggggattgaggacactgtgggtgtcggcaaaggcgccaccaaggtgtattctaccattgatctggagaaagctcgtgtagggcgaactaggatgataaccaatgagcccatcaaccctcgctggtatgagtcgttccacatctattgcgctcatatggcttccaatgtgatcttcactgtcaagattgataaccctattggggcaacgaatattgggagggcttacctgcctgtccaagagcttctcaatggagaggagattgacagatggctcgatatctgtgataataaccgcgagcctgttggtgagagcaagatccatgtgaagcttcagtacttcgatgtttccaaggatcgcaattgggcgaggggtgtccgcagtaccaagtatccaggtgttccttacaccttcttctctcagaggcaagggtgcaaagttaccttgtaccaagatgctcatgtcccagacaacttcattccaaagattccgcttgccgatggcaagaattatgaaccccacagatgctgggaggatatctttgatgctataagcaatgctcaacatttgatttacatcactggctggtctgtatacactgagatcaccttggttagggactccaatcgtccaaaacctggaggggatgtcacccttggggagttgctcaagaagaaggccagtgaaggtgttcgggtcctcatgcttgtgtgggatgacaggacttcagttggtttgctaaagagggatggcttgatggcaacacatgatgaggaaactgaaaattacttccatggctctgacgtgaactgtgttctatgccctcgcaaccctgatgactcaggcagcattgttcaggatctgtcgatctcaactatgtttacacaccatcagaagatagtagttgttgaccatgagttgccaaaccagggctcccaacaaaggaggatagtcagtttcgttggtggccttgatctctgtgatggaaggtatgacactcagtaccattctttgtttaggacactcgacagtacccatcatgatgacttccaccagccaaactttgccactgcatcaatcaaaaagggtggacctagagagccatggcatgatattcactcacggctggaagggccaatcgcatgggatgttctttacaatttcgagcagagatggagaaagcagggtggtaaggatctccttctgcagctcagggatctgtctgacactattattccaccttctcctgttatgtttccagaggacagagaaacatggaatgttcagctatttagatccattgatggtggtgctgcttttgggttccctgatacccctgaggaggctgcaaaagctgggcttgtaagcggaaaggatcaaatcattgacaggagcatccaggatgcatacatacatgccatccggagggcaaagaacttcatctatatagagaaccaatacttccttggaagttcctatgcctggaaacccgagggcatcaagcctgaagacattggtgccctgcatttgattcctaaggagcttgcactgaaagttgtcagtaagattgaagccggggaacggttcactgtttatgttgtggtgccaatgtggcctgagggtgttccagagagtggatctgttcaggcaatcctggactggcaaaggagaacaatggagatgatgtacactgacattacagaggctctccaagccaagggaattgaagcgaaccccaaggactacctcactttcttctgcttgggtaaccgtgaggtgaagcaggctggggaatatcagcctgaagaacaaccagaagctgacactgattacagccgagctcaggaagctaggaggttcatgatctatgtccacaccaaaatgatgatagttgacgatgagtacatcatcatcggttctgcaaacatcaaccagaggtcgatggacggcgctagggactctgagatcgccatgggcgggtaccagccataccatctggcgaccaggcaaccagcccgtggccagatccatggcttccggatggcgctgtggtacgagcacctgggaatgctggatgatgtgttccagcgccccgagagcctggagtgtgtgcagaaggtgaacaggatcgcggagaagtactgggacatgtactccagcgacgacctccagcaggacctccctggccacctcctcagctaccccattggcgtcgccagcgatggtgtggtgactgagctgcccgggatggagtactttcctgacacacgggcccgcgtcctcggcgccaagtcggattacatgccccccatcctcacctcatagacgaggaagcactacactacaatctgctggcttctcctgtcagtccttctgtacttcttcagtttggtggcgagatggtatggccgttgttcagaatttcttcagaatagcagttgttacagttgtgaatcataaagtaataagtgcagtatctgtgcatggttgagttgggaagaagatcggggatgcaatgatgcttgtgaagttgtgatgccgtttgtaagatgggaagttgggaactactaagtaattggcatgattgtactttgcactactgtttagcgttgttgatactggttaaccgtgtgttcatctgaacttgattcttgatgcagtttgtggcattaccagtttatcatcgttcatcaggaaaaacaccaaacgtgtccttgattcagacttcagaggacaagttcccagcccatatgctgtgtttggcctgctttgtttctcactatgatggtgtgattgtttatggctcgtttggaacacatgactcaagatataatattaatagaaaacagaggaaaaaaaaaaaaaaaaaa

SEQ ID NO: 60115 - DNA, 368 bp, Oryza sativa
  Clone ID: PAT_MRT4530_61674C.1
ggaggaaagccgagggagattattttaaaaagcctggcccccctgaggagatggagccggagtccctgatgggaccaccctgatgatagatgatccctccaagctagctagggatccatccaacattgatcgacacacgcccacactgacaacgacgacgacggttttatttaggggtcaaaaaaaaaggcaaggcctgcctacatataagctggggcctaatgcaagcaaattaagggctcgatcaaagctctgatcgacagtagcagcatccataccataaaacctcatgcagccgggcgacgaccaccattgattcagttgcaggagcaccaggagcagccccggcagctggggcccccttgcag

SEQ ID NO: 60116 - DNA, 611 bp, Oryza sativa
  Clone ID: PAT_MRT4530_61675C.1
aatttgccgtcactgtgagactcaagtgtaaggaagtccttattaactctcatggcccatatctaattaaatgtgaccctgaaatcccatgtacctgtgaggtaagaaatttaggcatgtttatttccaaggcatccgcctgcgttcctttgctccaggcaagttttcagggcactcacacatattgtgaatacttggggaagtctctccgaggttagtacacactgaatcccactgttctgctcaggttctaagccagtgtgcccccagtggtgggggctggggcagaccagtgcagcttcctgcttccagccagatcaggccatttgacacctgcttaggttaagctgcagaagaacagggcccatccctgtatgtccactgtcccctcactggtatcctgcacccaccccacccctcaggacagaaactccaaatactgacctgtttctgtttggaaaatctcttttccccaaggctagttcctccaaacctcaggacactttcagttcttccattgatttgtttttcaagtgtttatcgtagaatcatttttgaccatgttattagaatatagttggcttacaaagttgtattaatttcaggcatat

SEQ ID NO: 60117 - DNA, 260 bp, Oryza sativa
  unsure (1)..(260): unsure at all n locations
  Clone ID: PAT_MRT4530_61676C.1
gttccgatagcttctctcctctctctcaactccggggagaggaggaggcggcggtggggcgttcgtcgggagagagaccagggccggggggctagggttcggccgttcagagaggcggcggctgaggaggaggaggaggaggaggagggggtgangatatatttctactcctgctaggaagcggctgatgcgggacttcaagcggctgcagcgtgagacccctattaaccaagggagtaccatcactattatctgctttt

SEQ ID NO: 60118 - DNA, 813 bp, Oryza sativa
  unsure (1)..(813): unsure at all n locations
  Clone ID: PAT_MRT4530_61677C.1
cggacgtgtcnggncaacggccttgttggcgactggccgccgccgcccttcggcgccngggcgncagcggggggtggctaatgagggctccgctgcccgcccagcatatgccgggtgccggggcccccagtccggtagaaagcgcgggaaggctgcgacttgggtaagccaggcgcgtggagcggtggaggcaagcgccggccggtgggggagccggctgcgtgcgctcggtgtctgcgtcgcatcgagcattcgagctggtggaaggagcctatcgaggagctgagcaagcgagctgtggttcccgattactgatttcctggtggctgaaaatcagcgacggaaggtatctcaaagagatttgaatagctattttaaccgtgggtgatgtgccaccaaccccaactacttgtggcaatggaattgttgcggtggaagaggctgcgctgaacaggtagaaggggtcgtggaagtacaattgggttcatttcatattgctggacgagcggaagaggtaatctaagcatgtttggatgtcgattaattttagttgttggtctatttagtgtcatataaacgatgtaatcgcatttgtgtttaggcgaagttgttttcggttttagtgttgatcttctcttcagcaactgggcacacctcagattcttaccatcctccaccaccacgaacagatatcaatgtttcaacgggctcgtccctctaattatttagatttgtttaaacaaactatattatatacgaatgaacggtaatatatatatatttgccggttgctgtcaaaaaaaaaaaaaaaaa

SEQ ID NO: 60119 - DNA, 888 bp, Oryza sativa
  Clone ID: PAT_MRT4530_61678C.1
atgtcaactatccaggttcctaaccctaccgaccccgaacttgctcaacggcttgttcttgatctgctagatccagatctcagagggcatgctctggctgaactacgcaagaaaagggagatgtttccagatttggctccactattgtggcactcttttggcacaattattgtgctgctacaggagattatagtagtctaccctgtcctttcacccccaacattatcattacttgcttcaagtcgagtctgcaatgcgcttgcacttcttcagtgtgttgcatcccatcccgagactaggagccatttcttaaaagctcatattccattgtacctatgttcatttttggaaaataccagcaagaccagaccttttgaatacttgcggctgaccagcttgggtgtcattggtgctcttgtgaaggctgaaggtacagaagtcatcaattttctactgcaatatgaatttgttcctctctgcctgcatgccatggcggtaggcagtgagctttcaaaaactgtggcaacttttattattgaaaagattgtcttggatgacgctgggcttggttacatttgcgctactgctgatcggttcttcgctgtggggactgccttagcaggcatggtgacctcaatggatgacaagccctccccaaggttgttgaagcacattatccactgttaccttaggatcacagacaatcctaggggcttggaggcactgcagacttgccttcctaccacacttatagatgggacattcaacaatcttactaaggatgaccctacaatgcagcaatggctccaagaactgttggtcaaagtgaggagtggaaaaatgggaggactacctcctccagttcaaggtcacatgccgagggtttaa

SEQ ID NO: 60120 - DNA, 326 bp, Oryza sativa
  Clone ID: PAT_MRT4530_61679C.1
ttggtttttttaaaatgcatggtcccttgtcccacttatacaggcaatggtgggtattgagtctgaactattccgtgctccaagaatgaatagacggggtacatgaacttagcagtagtaatgcgaaactcggatgggagccaactcgtgacggggaaccgatggacacggtaggaattgcgaagcgggacttacgaagagcatcatactaataggagacgacccgagctgggcagctgacttgttctagcagacgccgctggcctccttgagggccagcacggtccatcttgcagagggagaccacattgggctgcctctccaac

SEQ ID NO: 60121 - DNA, 1260 bp, Oryza sativa
  Clone ID: PAT_MRT4530_6167C.1
atgtccaacgtggtgccgggggctactgtcggaaatataggcccaggagtatgcaaaaagcggccggtgggcctcggggtgccacgtcatgcccctcgggccctcggtccctcgcgctgccttgccccgaggccctcgcccaactgccatgtggcggggggaggagcccgagtcaaggcaacaacggccggtggagtcaggacggcgacgtggggagagggcaattaccgcgccgatttctacggagggagtaggggaggagcgcggggacgtggggcgaagcggacccaccagtgggtgcgagtgtgcagagcggaggaggtggaccgggcggggtgggtgacccgtcatggagagcacggcgacgagcggctggagacagcaaatgcgatggcagcctcagcgaagccggcggtggggggctgcgcagcagagtctagggcggcagcggcacgcgactggagcccaccggcgagaagcagagatggctcgggaggcggcgaggagctcgggtcgaggtggcaacggctagaggagtgggggcggtgtcatggggagagaggagttgcggcgtcgattcccgcgggtagagtagggaagagcggggatgttcgtggtggcaacagggtttcggcaggtttcgatgctgaagaagtgatggacgaggagcggcgtgcaacggcgaagccgacagttggggcggcatggtcgaggcacgcgaccggagctcaccggcgagagggagagatgaggagcggcgtggggagcccaggagaggacgcagggagctcaggttaccgcgccgatttccgcgaagggagtgggggaggagaggggggatgtagggcgaagcggtcccacgggcgggtgcgagatggcggccgaggagcggtgcgcaacggcgaagcaggcaatgggggcggcgcggcggcagctaggacggtggctaggggcggcggctgctcgcaaccggcgctcaccggcgagaggcagagatggggagcgacatggggagctcgggtggcggtgaggagctcgggtagggtcggcaacggccggtacagtgggagcatcgtcgggcgggtgacctgttgtggtcctaaccgccggcgacgagcggctggagacggcaaatgtggtgacggccgtaggttcatggtggcaatagggtttcggcaggtttcgatgccgaagaagtggtggccgaggagcggcgcgcaacggcgaagccggcagtggaggcggcgcggcggcggatag

SEQ ID NO: 60122 - DNA, 416 bp, Oryza sativa
  unsure (1)..(416): unsure at all n locations
  Clone ID: PAT_MRT4530_61680C.1
atggcgccgccgtcgctaccgattcttctcgtcttgctctccctgtcgtcgtcgctgtactccttctctgcggcagcagccgaccgctggaccgacgcccacgccaccttctacggtggcgccgacgcctccggcaccatgggtggcgcgtgcgggtacgggaacacgtacgggcaggggtacggcacggacacggcggcgctgagcgcggtgatgttcggggacgggctgagctgcggcgcctgcttcgagctgcggtgcgggggcgggnnnnnaaaaaaaaccngnaaaggtggactgccgccggcagaccggcaagccataggggggagagggacacgaccaggtgtcctgggaaaccactgccttcacaggtatcccggctggtgtgtgaaaccccaccgtttcaacatttc

SEQ ID NO: 60123 - DNA, 435 bp, Oryza sativa
  Clone ID: PAT_MRT4530_61681C.1
atgcaccatgctgaagaactctacgcgcacgaatctttacgagaagaacacacgggatcgatcgagcagagcacccatccccacccaaccaagaactcaccaggtcaagcaggatacgaggaggacgacgaggccaagccgaagaaagggaggggaggagggaagcgcggagaccgcgccgtgctgtgctcacgagagagaaagccgcacggcgagaagagagatggcggcgacgacgggaaagggagaagagaagaaaaccctaacctagctttgcaagagaaggggaaaggcagcgtgctcaccggagagaaggtggcggccggaggagagagccgtgccatcgcctccgggtcgtgccgcgcgccgccccctccgtggcatcttcgttgcgccgcgactcctctcgaggaaattttccacgccccagtatag

SEQ ID NO: 60124 - DNA, 753 bp, Oryza sativa
  Clone ID: PAT_MRT4530_61682C.1
cgctcactgcagatagaagaaaaagagatttgtttctgcttccgctgctgcgagcgatccgaggggcggggagaaaaaagaaaaaaaggaaaacaagccgcgcagcctctccccgcgccgacaaatcgctgtgggcggcaaccaactctgcgagctccgcgggcggcggttcggatcggcggatctcgtcggccggcggtgcggtcgccaccaccatgatgagcagcagtagctcccctccaccgccctcaattcccacggggggtggaggcttcttcagaggttacacgaagctttgcaagggcctcgctgtcatattgcttctcgtgcaccttttgatccagctttttccatcagctgtcacctatcttgctcttgttcctggaaggacgatcccttttgcctggaacctgataactggtggctatgttgagctaacaattccaggggttattatcagcatagttggtcttcttttatttgggaaattattagaacctttatggggctcaaaggagttatcgaagttcatttttgtcgtcaacttttcaacatctgtgtgtgtcttcataactgctattgctctatactacacaacacaagaagagagctacctctatgctcctctttctggattttatggagttctgactggactgctggtgggtatcaagcaacttatgtcagaacaggagctaaatctttttgtgctgaagattaaggcaaagtggattccatcacttgttgcattga

SEQ ID NO: 60125 - DNA, 480 bp, Oryza sativa
  Clone ID: PAT_MRT4530_61683C.1
atgtttttgaccggaataaaaaagttcaaaaaacgcaaaaacacgattttcggacatattggagtgtattgggtgcattcgtggcaaaaactcacttcgtgattcgtccggcgaacttttgtcaatcagtgccaatattggcatatattggcccacgcgggtgcgatgtttttgaccggaatgaaatagttcaaaaagcaacaaaacatgattttgggacatataggtgtgtattgggtgtattcgtggccaaaactcacttcgtgattcgcgcggcgaacttttgtcaactaattccaacattggcatatattggaccgcacgggtgcgatgtttttgaccggaatgaaaaagttcaaaaagcaccaaaacatgatttttggacatattggagtgtattgggtgcattcgtgaccaaaactctcttcatgattcgcgcggctaacttttgtcaatcaatgccaatattggcatatattg

SEQ ID NO: 60126 - DNA, 3423 bp, Oryza sativa
  Clone ID: PAT_MRT4530_61684C.1
gccttgttatcccagaccggctacctgcactgccgccagccgttcactctctctctctctctctctctctctcggcaccacggacactcgtacagctgccgcctgccggagggttggtggtgtgtttcaggttccagaaaaatcctccagcgttttgtggtcgcttgaggagctgagctgtgtgagccttgcaaggtttgcatcaacaagcttgggggtttttcctatcttgttgttctgagggaattcaagaaatgctccatatggtctgaattcgtaggtctttttgtgttggaatctctcagagggtttaagaggaaaaaggaaagaggagaaattgtaaggacaagtagagaagaacatggctgacctggaagcaggcatggttgctgctgccacagaccagggcaattcaacaaggtcacaagatgacgcagccacactgatcccgaacagtggcaatctgggctcgagcaacaggagcaccaagacggccaggttcaaggacgacgacgagctggtcgagatcaccctcgacgtgcagcgcgattcggtggcaatccaagaagtgagaggggtggatgagggtggctccgggcacggtaccgggttcgacggcctgccactggtgtcaccctcgtcgaagagcggaaagctgacgtcaaagctcaggcaggtgaccaatgggctcaagatgaagagctccagcaggaaggcgccatccccgcaggcgcagcagtctgcgaagagggtgaggaagaggctggacaggaccaagagcagcgccgccgtggcgctcaaaggattgcagtttgtgactgcaaaggttggcaatgacggctgggccgcggtggagaagcggttcaatcagctgcaggtggatggtgtgctgctccgttcaagatttgggaaatgcattggaatggatgggtccgacgagtttgcggtgcaaatgttcgattctctggcgaggaagagagggatagtgaagcaggtgctcactaaggacgagctcaaagatttctatgagcaattgactgatcaggggtttgacaatcgtcttcggacattctttgacatggttgacaagaacgctgatggaaggctcacagcagaagaggttaaggagattattgcccttagtgcatcagcaaacaaactttccaagatcaaggagcgagctgatgagtacacagcactcattatggaagagcttgaccctacaaacttgggatacatcgagatggaggacttggaagcactattgcttcagtcaccatctgaagctgctgcaagatcaacaacgacgcacagctccaaacttagcaaagctcttagcatgaagcttgcgtctaacaaagaaatgagcccagttcgtcattactggcagcagttcatgtacttccttgaagagaattggaagcgcagttgggttatgactctgtggatctcaatctgcattgcccttttcatttggaagttcattcagtaccgtaatcgagccgtattcggcatcatgggttattgtgtgaccactgcaaagggtgctgcagagaccctcaaattcaacatggctttggtcctacttcctgtctgcagaaatacaatcacatggattcggtcaaagacacaggttggagctgttgtacccttcaacgacaatataaactttcataaggtcatagccgcaggtgttgcagttggtgttgctttgcatgcaggtgctcatctgacatgtgattttccccggctgctccatgcgagtgatgcacaatatgaactaatgaagcccttctttggggagaagaggccaccaaattactggtggtttgtaaagggaactgaaggctggacaggtgtggtcatggtggtgctcatggcaatagcatttacattagcccaaccatggttccgacgtaacaagctcaaggactccaatcccctcaaaaaaatgactggcttcaatgccttctggtttacccaccacctgtttgtcattgtgtacactttgctctttgtccatggaacgtgcttgtatctaagcaggaaatggtacaagaagacgacatggatgtacctcgctgttcctgttgtcctgtatgtaagtgagcgtattcttcggttgtttaggagccatgatgcagttgggattcagaaggttgcagtgtatcccgggaatgtattggctctttatatgtcgaagccacctggtttcagataccgtagtgggcagtacatcttcataaaatgcactgctgtgtctccatatgaatggcatccattttccataacatcagcacctggagatgattatcttagtgttcatattcgcacaaggggtgattggacttcacggcttagaactgttttctctgaggcatgccgaccccccactgagggagaaagtggactacttagagctgacctttccaagggaataacggacgaaaacgcaagattcccaaaacttttggtcgatggaccgtatggtgcaccggcacaagattaccgtgaatacgatgtgctacttctcatcgggctgggcatcggagccacccctttgattagcattgtgaaggacgtgcttaaccacattcaaggtgagggatcagttggaaccacggagccggagagcagcagcaaggcgaagaagaaacctttcatgacgaagagagcctacttctactgggtgacgagagaggagggctcgtttgagtggttcagaggcgtcatgaacgaggtgtctgagaaggacaaggatggagtcattgagctccataaccactgctcaagcgtgtaccaggaaggcgatgctcgttctgctctcattgtcatgctccaagaacttcagcatgcgaagaagggcgtcgatatcttgtcgggaactagtgtgaagacccatttcgcacgacctaattggcgaagcgtcttcaagaaggttgcggtcagccatgagaaccagcgcgtcggtgtgttctactgtggtgagcctgtgctggttccccaactaaggcagttgtcagcagatttcacccacaagacaaacacaagatttgatttccacaaggagaacttctaatggtacaaattgagaaatacccgtgtatggttttgtatgtagttctttatcatgtgaattatatggtttctaatatatataaagttggacaaaataaatgaaatgatggaagctattttgttttttaagatgtcaaaagtctgcaatatctttttacaagagtgctgtctattcatgtatacacctagtggaagaagctgtgcttcatgttgtagcttacatagatgaagggaagttctctttgttgtgacccaaggatgcctagaatcatgtaaccttgtgatgttccctttcatagtgatgagctttaaactttacagcttcaaaaaaaaaaaaaaaaaaaa

SEQ ID NO: 60127 - DNA, 393 bp, Oryza sativa
  Clone ID: PAT_MRT4530_61685C.1
atgccgccgccgccacgccacgccgccgccgccacggcctcgcaacgccacgccgccgccgccgtcgccacgccgccgccgccgccgccacgctgccgcgccaaccgccgccccgatgccgccacaccgccgttaacgaacgagaacgagaacgatcgaacgaacgagagcgagaacgtgaacgagaacgagaacgatcgaacgaacgagagcgagaacgaacacgtcaacgtacgttgccgcgagaacgtgaacgagaacgatcgaacgaacgagagcgagaacgagaacgatcgaacgaagacaagcaagaacgagggaacgaacgtgaatgagaacaagcgaacgaacgtgaacgagaacgagcgaacgaacgtgaacgagctagggaac

SEQ ID NO: 60128 - DNA, 2751 bp, Oryza sativa
  Clone ID: PAT_MRT4530_61686C.1
atggctgacctggaagcaggcatggttgctgctgccacagaccagggcaattcaacaaggtcacaagatgacgcagccacactgatcccgaacagtggcaatctgggctcgagcaacaggagcaccaagacggccaggttcaaggacgacgacgagctggtcgagatcaccctcgacgtgcagcgcgattcggtggcaatccaagaagtgagaggggtggatgagggtggctccgggcacggtaccgggttcgacggcctgccactggtgtcaccctcgtcgaagagcggaaagctgacgtcaaagctcaggcaggtgaccaatgggctcaagatgaagagctccagcaggaaggcgccatccccgcaggcgcagcagtctgcgaagagggtgaggaagaggctggacaggaccaagagcagcgccgccgtggcgctcaaaggattgcagtttgtgactgcaaaggttggcaatgacggctgggccgcggtggagaagcggttcaatcagctgcaggtggatggtgtgctgctccgttcaagatttgggaaatgcattggaatggatgggtccgacgagtttgcggtgcaaatgttcgattctctggcgaggaagagagggatagtgaagcaggtgctcactaaggacgagctcaaagatttctatgagcaattgactgatcaggggtttgacaatcgtcttcggacattctttgacatggttgacaagaacgctgatggaaggctcacagcagaagaggttaaggagattattgcccttagtgcatcagcaaacaaactttccaagatcaaggagcgagctgatgagtacacagcactcattatggaagagcttgaccctacaaacttgggatacatcgagatggaggacttggaagcactattgcttcagtcaccatctgaagctgctgcaagatcaacaacgacgcacagctccaaacttagcaaagctcttagcatgaagcttgcgtctaacaaagaaatgagcccagttcgtcattactggcagcagttcatgtacttccttgaagagaattggaagcgcagttgggttatgactctgtggatctcaatctgcattgcccttttcatttggaagttcattcagtaccgtaatcgagccgtattcggcatcatgggttattgtgtgaccactgcaaagggtgctgcagagaccctcaaattcaacatggctttggtcctacttcctgtctgcagaaatacaatcacatggattcggtcaaagacacaggttggagctgttgtacccttcaacgacaatataaactttcataaggtcatagccgcaggtgttgcagttggtgttgctttgcatgcaggtgctcatctgacatgtgattttccccggctgctccatgcgagtgatgcacaatatgaactaatgaagcccttctttggggagaagaggccaccaaattactggtggtttgtaaagggaactgaaggctggacaggtgtggtcatggtggtgctcatggcaatagcatttacattagcccaaccatggttccgacgtaacaagctcaaggactccaatcccctcaaaaaaatgactggcttcaatgccttctggtttacccaccacctgtttgtcattgtgtacactttgctctttgtccatggaacgtgcttgtatctaagcaggaaatggtacaagaagacgacatggatgtacctcgctgttcctgttgtcctgtatgtaagtgagcgtattcttcggttgtttaggagccatgatgcagttgggattcagaaggttgcagtgtatcccgggaatgtattggctctttatatgtcgaagccacctggtttcagataccgtagtgggcagtacatcttcataaaatgcactgctgtgtctccatatgaatggtgctggtcttacacattttatggaaagaaaatgcatccattttccataacatcagcacctggagatgattatcttagtgttcatattcgcacaaggggtgattggacttcacggcttagaactgttttctctgaggcatgccgaccccccactgagggagaaagtggactacttagagctgacctttccaagggaataacggacgaaaaagcaagattcccaaaacttttggtcgatggaccgtatggtgcaccggcacaagattaccgtgaatacgatgtgctacttctcatcgggctgggcatcggagccacccctttgattagcattgtgaaggacgtgcttaaccacattcaaggtgagggatcagttggaaccacggagccggagagcagcagcaaggcgaagaagaaacctttcatgacgaagagagcctacttctactgggtgacgagagaggagggctcgtttgagtggttcagaggcgtcatgaacgaggtgtctgagaaggacaaggatggagtcattgagctccataaccactgctcaagcgtgtaccaggaaggcgatgctcgttctgctctcattgtcatgctccaagaacttcagcatgcgaagaagggcgtcgatatcttgtcgggaactagtgtgaagacccatttcgcacgacctaattggcgaagcgtcttcaagaaggttgcggtcagccatgagaaccagcgcgtcggtgtgttctactgtggtgagcctgtgctggttccccaactaaggcagttgtcagcagatttcacccacaagacaaacacaagatttgatttccacaaggagaacttctaa

SEQ ID NO: 60129 - DNA, 209 bp, Oryza sativa
  unsure (1)..(209): unsure at all n locations
  Clone ID: PAT_MRT4530_61687C.1
atcagagcgagngagagagagagagagagagagagggaagaagaagaagtggnagtggtatgtatgtncccatgnccattgccgcagnaacaaactntagcagcagcagcagcagctagtgaagtactacagtacagtagtgaggacttaatcaaacggggngcgcggggtgccccctagctctcctcattccaccaccatgcccaccc

SEQ ID NO: 60130 - DNA, 272 bp, Oryza sativa
  Clone ID: PAT_MRT4530_61688C.1
tatcttattctgttccgtctggtgtgcctgtgggtggggccgtccgagatcaagggtggcggtggctgctgtcggtgacggagcggcggcggcggcggcggcggagcccaacctggtggtgtcgttcggggagatgctgatcgacttcggccccgacgttgctgatgcttctctggtccagatcagcaattatgtcacagaccccgggtgggtccccgctctctctagctttagggtggatcaattatttggacattgcctcctttaccctt

SEQ ID NO: 60131 - DNA, 241 bp, Oryza sativa
  Clone ID: PAT_MRT4530_61689C.1
aggtgtaataatgtagattcatgtgacatcaaggttcaattgtcacgcatgatgatgcatgactttatttttaacagttgaaccattatactattacaatgcagaaccagacaccaccaacggtgggaatgctcctcggagcaatgtagtagttaggatagataccacatatgggatagcaagtttaaggccagaaaagcttgaacttggagcttgagtctgatcaaagtatacaacaccg

SEQ ID NO: 60132 - DNA, 270 bp, Oryza sativa
  Clone ID: PAT_MRT4530_6168C.1
atgaggaaggaggagcgtgagaacggatgctcaccaccagatagacctctgatgcagcgggaggacgccggcgaagataggcggacgccgcctagcaagtggcgtggagagcgcgtggtggacgacgtggagaggggctgcgagagcgccacccctgctccaccttcctttctggcttgcacacgactggtgttcgactgggccgctgctcgcgaggtggcggcggtggcggtggagaatgggcgaagcccgatcaaatctattacttga

SEQ ID NO: 60133 - DNA, 735 bp, Oryza sativa
  unsure (1)..(735): unsure at all n locations
  Clone ID: PAT_MRT4530_61690C.1
ccggccgggatctcgcgtcgcgacccgcgacccgcggcggcgcgtcccgaatggcggccgatcgcccgctcgcgagggttgatgagatagcaaggcgccatttccaaatatttcgatccgcagcgtaatctctctcgcgtgcgccggtgcgcgatcccctccctccctcctcctcaatcccccagatcgcgtgcgccgcgggctctccccgcgttgcctctccagcatctagatccgcgcctgcgctcccgacgaggtcggccggtctacggtcactctcgtggtttccattgacttgtttttctcttctttttctttttttcccctcttctccccaacctcgcaacaaaatcggcggctatcctcgtgtttcttcttcgctccgtggccgcagaatccccccaccgctgttcttgcggcgccggtgttcgtttgaaagatgtctaatctatcagagccctcaaaagaagctgcatcagctgatgattcaagtgctgtccagaaaactggagcatggagtaacacgttgaacattcttctgcaacaagcttcagtctatggtgtggctgctggttattgcctgtcagcatccctgctctccattatcaacaaatgggcagtcatgaaatttccataccctggagcattgacagctttacagtacttcactagtggntgntggagttctcttatgtggacacctaaagcttattgagcatgatggccttaatttga

SEQ ID NO: 60134 - DNA, 319 bp, Oryza sativa
  Clone ID: PAT_MRT4530_61691C.1
ctcgcgctccgcctctctctctctctccatcgatccaagccccccaccaagactacacagatagctctaggcgcatacactctggtgggacttgggggaccaattcatcgactgccaaaatgttgatttaaaggaggcgttcagactatgtcacaaggacgtgaacggttgtgtaacaaacaggggacgtgcatacgctgtcgcctcatgaagacacaaccctactgatggttgtctttaggacttgaataacgaaggggaagctgatggaaaaggaacgagtggatttattgaggttgtcaagcatggggctcgcagg

SEQ ID NO: 60135 - DNA, 496 bp, Oryza sativa
  unsure (1)..(496): unsure at all n locations
  Clone ID: PAT_MRT4530_61693C.1
gaaaacgacgaatncnccgggcatactacgatgggcaggtactggaccatgtggaactgcccatgttcgggtgcactgacgccacccaggtgctcaagggagctcgaggangccaagaangcgtacctgatgcattcgtccgtatcatcggcttcgacaacgtcaggcaggtgcagctcatcancttcatcgcctacaagcccccgggctgcgaagantctggtggcaactaagccgtcatccgtcatatatagccttgtttaattgttcatctctgattcnatgatatctccccaccttgttttcntgtgttccccaatttgtttcatcctcttttgantttaaccgggccgtgctctgcttttgttttttgtttcccctgatctctctctganttgaatgttaagaatggtatctgctaccaantatatntttgtttggggtnaaggcatatnttnaatgaaaatatatgggaaactcccgctatatatatttt

SEQ ID NO: 60136 - DNA, 831 bp, Oryza sativa
  unsure (1)..(831): unsure at all n locations
  Clone ID: PAT_MRT4530_61694C.1
cccacgcgtccgcccacgcgtacagccacgcgtacgctatttagttgattgggcgatgtggtagttgcatactagtcgtcctttcttcccttgtcacctttggcggcctcggcttgcttaaaaggatacatatgcttttgtaactagaacatttgttgttgaatttggattatttgatcccatggcgaattctcgggctagcccaaccaaggtattaaatcggcggctatcctcgtgtttcttcttcgctccgtggccgcagaatccccccaccgctgttcttgcggcgccggtgttcgtttgaaagttggctgcgctgtcctgggaggcctcagcagcagcagcagcgagctttgctcttgtgagcgcttcgtgtgcttgcagctgcgttttattattgcgtcattgcttgtacacgacgtggttgttgagaggaatctatcatcccttcacagttgcgaggaaagcttcctgtgatgtctaatctatcagagccctcaaaagaagctgcatcagctgatgattcaagtgctgtccagaaaactggagcatggagtaacacgttgaacattcttctgcaacaagcttcagtctatggtgtggctgctggttattgcctgtcagcatccctgctctccattatcaacaaatgggcagtcatgaaatttccataccctgnagcattgacagctntacagtacttcactagtgttgttggagttctcttatgtggaccactaaagcttattgagcatgatggccttaatttgaggaccatgtggaagttcttgcctgctgcggtgatgttctacatctccatcttcacaaaca

SEQ ID NO: 60137 - DNA, 1350 bp, Oryza sativa
  Clone ID: PAT_MRT4530_61695C.1
atggacgaccaccctggccatctcgtctacatccccttgctcgagttcttccgctgccgctgctgccacaacagcagcagcagggcggtgcctccggcgagggccgtcaaggcggccctagctgaggctctcgtgtggtactatccggttgccggccggctgcgggagatcgccggaggtaagctggtggtggactgcacggcggaaggggtggcattcgtcgaggccgacgccgacgtgcggctagaggagctcggcgagccgttgctgccgccgttcccgtgcgtggaggtgctgttgtgcgatgccggcgacattggcgttgtcgttggcaagccaatcgtcttcctgcaggtgacagagttcaagtgcggaggatttgtgatggggttctacataagccactgcatcgccgacgggttcggcatgatccaattcatcaaagccatcgtcgacatcgcgcgaggcgagcaagctccaatggtgctccccgtctgggagagacacatcctcacatcccgatcaccaccacctaccattggagctaccaataccaataccgtcaagttcagctcagtcctcaaggactccacctccattgacgatgacatcatgctctccacgccccaagaatccatggtcggcaactacttcctctttcgtcccaaccacatctccgccctgcgaagccatgtccacgaacacggggcgacgacggcgacgaggtttgagctgatcaccgcggtgatctggcggtgccgcacggtggcgctcggctacaagaccgaccaccgcgtccacttgctgttcgccgccaactcgcgccgccaccgcggggacggcacgctccgcatcccggaggggtactacggcaacgccctcacctaccacgtcgccgccgccaccgccggcgagctgtgcggcaccacgctggctcgcacggtggcgctgatacgcgaggcgaagctggacggcacgacggaggagcgcgtgaggtccaccgtcgccttcctggcgtcgctgcgcctgcgccgcagcggcggccggttcccggcgctggcgttcgacaaggcgtacgcggtgtccgacttcacgaggctcggcgaggacgggctggatttcgggtgggcggagcgcgtgggcggcggcgtggccacgccgtcgttcgtgagcttccacagcaggtggaagctggtgagctctgacggcgatggcgaggaagaagaagctgttgctgcgttgatgctgctgccgaagccggccatggataggttcgacaaggagttggcattatggttggacttggacaagccatcagttggaggcctctgcctctccagcaaattttga

SEQ ID NO: 60138 - DNA, 1105 bp, Oryza sativa
  Clone ID: PAT_MRT4530_61696C.1
atggcggcgggcggaggcggcggctacagggcggaggacgactacgactacctgttcaagacgaacgagttctgcctcgagtccaagtccaccatcggggtcgagttcgccacccgcagcatccaggtcgacggcaaggtcgtcaaggcccagatttgggacaccgccggccaggagagataccgtgctattacaagtgcctattacagaggagcagtaggtgcactgcttgtctatgatgtcactcggcgtgctactttcgataatgtggcacgctggctaaaagagctgagagaccacactgaccctagtattgttgtcatgctagtaggcaacaaatccgatctccgccatctggtggctgtttcaactgaagatggaaaggaatatgctgaggctgagtcattgtacttcatggagacatctgcattagacgccacaaatgtagagaatgcttttgcagaagttttgactcagatataccaaactgtcagcaagaagacggttgaggcatcagatgatggatcaaatgctccaatcaaaggagagaagattaatgtgaaagatgacgtgtctgcgctgaagagaattggctgttgctcaaattagagtagagatgcatttcttgttgattttttccactaggtgtacggctgtatgttgcttctattgaaagaggtccattaattttcattttgttgtggtgatattgagagttagattgttccaactttcagttataccatttcttgaaagtcttaactcaagacagctcctttcgtcagattggttacttttggcgacattgcaaaaggaaattcccatggttcttccagccctaggtgttatgtaggtcgcttgactccttttggcctgtaattctggtggggttgtaatcccaatttaaatcgctagaaagaaatattccttttaaggtagataccatgtgtagttgcaaaattttggtagagactgttgctgggcaagactttctacagtttcatatctatatcatgttttctatcagtatgcttgtgttaaaaatcttgtaaaagtctaaattgttggagctgagaaaaactatgatgttttccatgttggtggg

SEQ ID NO: 60139 - DNA, 255 bp, Oryza sativa
  Clone ID: PAT_MRT4530_61697C.1
atgtcgagcgaggtcgatataatggtggttgtggacaagcttgagggcatagcagtagtgattgtttcagttgagatcgaggatgagacgatcatgaataagctcggatacccagcccttgctgatgagtttcagttgcaagttttgagctcgaggacaatagcaattgtgcatgaggcgagatcaaacaaggtgacaaccacaactatggttctaagcttgcgcaacaccatggcacaattaatatatgcttaa

SEQ ID NO: 60140 - DNA, 309 bp, Oryza sativa
  Clone ID: PAT_MRT4530_61698C.1
atgctgctgggggcgtcggtggcgctgatgctgtgcgggtcggtgaccttcatgctggggttcttcctcatgccctgggtcatcggcctcgcctgcgtcttcctcctcgtcgggttcgtcaccaacctgtccgtgatctggagggccatcctctggcccgcctcgtgctcctcctcgcccaaggtggcctccacatttcgggaggacatcattccaaataatgtgaagctgaacctcaatttccctgccaaccttgatgtgcttgttcctcacaaacgaacagtattctacatcaattttctgtggtaa

SEQ ID NO: 60141 - DNA, 483 bp, Oryza sativa
  Clone ID: PAT_MRT4530_61699C.1
atgggagaagggaggggatcgatcgtggagtggttagggattcttcggatcgtggaggctagggatttctgcggcgaatgggggcacgagacggcggggagacgacgactcgacgaggaagacgatgctttaaatgctgggaaacaaaatctgggagggaggggggaggggagccgacgccgtcgcccatacttcggccgcgctgccctcctaggccgcgcctcctcgccgctgctgtcctccgccgccctcgcccgccgctaccgccctccgccgtcgccgggagcacacgtcaccgcgccgccctccttcgtcgccctcctcggccgcgccgcctcgcctcctccgccaccgcccgccgccgccgccgagagcacacgccgccgcaccgccgggagccgctgccgcctccggccggcggccggggagaggggaggggagaggagaagaggcgcaccacttaagcggcgcctgcgaaaatga

SEQ ID NO: 60142 - DNA, 395 bp, Oryza sativa
  Clone ID: PAT_MRT4530_6169C.1
cggacgcgtgggtgagaattgatagtaagatttcttttcattctttgaagtggtttttaggcacctttggtgctgaaggccaaatgtgtttgttatcagttcacttatatgcatgtgtgggtggtctctgtgttcttaaaacgaattgtcacattcataccctgtgatttgagatagtaagagatataagcacttataagaaacataaacacaatgcagttgaagaattgaacctttaaggaatagaggcattgagttggcttcattatctagcaatttggaaagcatttatgtggacctgcaacaggtggttcttagttctaacattattgaaaattattcatggattttatacttcgacaaactgatgttttatacatgacaatgagattaac

SEQ ID NO: 60143 - DNA, 437 bp, Oryza sativa
  Clone ID: PAT_MRT4530_616C.1
acatgaaagtttattgtattaaaacacacggcttagcaaaattaggaagcgtgctcataaaaaatactgtaaggaaaaaaaaaagaagtgaagaaccagctatcgactcaaaattgaatgagaacgtgatcaatcgaaaaacttcacccctctatcaaagtcctcgcagaccttgacgtgcctggccacgccctacttgtcgacgacggcggccatttcccggaactccggctggcccacccgcggcggcgtgaggttgcacggctccatggacacggttcgactgcacggaagagcggggaccctgtggccgtgcgcgggcatcaggatcgtagggcgacgcccgcgaggctgctgtccaatacccgaacgtgacatccggacgtgacagctcagggaagccctgcaggggatctcgcagctctttgtccagacag

SEQ ID NO: 60144 - DNA, 288 bp, Oryza sativa
  Clone ID: PAT_MRT4530_61700C.1
ccggtttccgatctgtaccgacatgtttccgtccgtattgttccgtttccggttttccgatatttccgatatcgttttcgtttccgactttaccgtttccgatttcgtttccgagaaaaatatggttacggaaatggttgaggctgttttccgatcgtttccgaccgttttcatccccaaggcacgagtgtttgacatgcccttaattaccatcttctctcgtagcatcgatttcttctcgccgcaactcaccaagtgagaaatcagctttcccttgtacttctccat

SEQ ID NO: 60145 - DNA, 1635 bp, Oryza sativa
  Clone ID: PAT_MRT4530_61701C.1
atggcgagctcgcgtgggtggggcgatctcccgccggatctcctcgcgctcatcgccgacggcctcaccatcaaggcctacacccgcgtccgcgccgtctgcaccgcctggcgcgccgccataccggcggcctcgccgtcgctcctcgtccgcctcgactggaaccgccacgacgcgtggttcctgtccccgaggatctccaccgcgctccacgagaggctggccacgctcctccctgacaggagcgtctgcctcggctccggccacggctgggtcgccgtccacgaccccatcttctacgagctgcagttcggcctcgtcgatcccctcaccggcgtcgacatccccttcagttcgttcccgcatttcgccgaacacaagctgcgggtgtccaaggtggtgttcgcgccccacccgacgccgaccgacttcaccgcggcggccatcaccggccacgacgagggccgcgtcatcacctacacggctcaggggagcagcgggtgggccgacgccgggtgcccccgtctcggcgaccgggacagcatcgccgacgtggtgtaccacgaggaacgcggcggcggcggcgagagggcggtgtactgcctcgcgacgagcggcgacgtgcacgtcctccgcctccacgacgccggcggcgcgttcgagccgctgttcgacaggggcaacgcggcgttcgacgccgccgccgcgttcgcgccgccgtacgacacgatccgccactgcaccaatgccaagaacctggtggtctgcgacgacggcgacatgtaccagatctggcggaacaacacctgcaccaggatggggccattgcccggcgggggagagtaccgcgtggagtacaaccagatgttcgttctgagataccaccctcgccgccggccgtgctgggtgccagtggaggatctcggcggacgctcggtgttcgtcgggaagaacaattcggtggcgctgcgcgtggacggcggcggcggcggcggcggcgtgccggggctgagagctaactgcgtgtactggactgacatctgtccagctcgggccaaggaaacggagggggaacaaaatttcatgcaccgtgttcacatcatcatcaccctgtcatctccggcatcctttgagccactgttcgacaaggccagccgcagggtgttccaccccgccgtcgcgtttgcgccgccgcacgacatgatccgcgcctcctccaccaattccaagaacctcgtggtctgcggcgacggccatctataccagacatggaggtgcgacggcgtccacatactcgttctccggtaccaccctcgccgccggccgtgctggctgccggcgaaggatctcgggggatactcggtgttcgtcgggaagaacaacaatgcggtggcgctgcgcgtggacgacggcggcggcgcaccggggctgagaggtaactgcgtgtactggatagaccattgcagtgatgaggccaaggtgttcgacatggagactggcaagtcggcgccatgctttcccggcgttggcgctatctgctggtgtcatatgcagagcagcagccgtaatacaactagtgtggcagcttcagcttatcagcttcagaaagggctcgtcatgcgtgaatcggcctga

SEQ ID NO: 60146 - DNA, 246 bp, Oryza sativa
  Clone ID: PAT_MRT4530_61702C.1
atggctgggtactctcgcgccacccaaatcgaagaccccgctacccagatgagcccgccaccactagagcgagctcctcccagcaagacaacctgtgggctgctgcttagggtgctaacatccggcagtgttggtgcggtgctcaatttttgcaagtgtgcattaaacaaagtttgtgctccatttgatccagaggaagagaagaaaaatgagaaggggagcagagctagcaaagctaggatttaa

SEQ ID NO: 60147 - DNA, 356 bp, Oryza sativa
  Clone ID: PAT_MRT4530_61703C.1
gtatgccctctatccttggatatacgatgggtaccgatacagtatacccgcgcgtgtacgaatagtttccgtatacattaaggaaatctatcccatgataggaacagaatctacggatggaaagagtcctactcggacgagactgggtctttaccatatcgtgaggggtccgatatctccaagttctacttggagatcgactgaaccgcggtataaaagggaccccctggcaggatctatggcatcgaatctcaccgccaacacacccaccacagcctacgaagccggagcttacaagagccaagtcactaggagatctagtcgggccaactcgactacggtctcgtcgatatcac

SEQ ID NO: 60148 - DNA, 2021 bp, Oryza sativa
  Clone ID: PAT_MRT4530_61704C.1
ggcagctcctctatctagctagctactctactctactcgatcaagatcaagatctatcgtggacgcagcagcagccatggagaagcagcagcagccgggcggcgaggaggaggaggaggtgatcagcatggagaagcagcagcagccgggcgagaagaagatcaccggcggcgaggaggaggaggaggaggaggtgatcagcagcgtccggtaccgaggatggaagtcgatgccatacgtgatagggaacgagacgttcgagaagctgggcaccatcggcaccaccgccaacctgctggtgtacctcaccaccgtctaccacctccccagcgtccgcgccgccaccctcctcaacttcttctccggcaccaccaacctcgcccccctcctcggcgccttcctctccgacaccttcctcggccgctacaccaccatcgccgccgcctccctcgcctcctgcctcggcatgcttgtgcttaccctcaccgccgccatcccatctctccaccccccaccttgcactgcctcctcttcctcgtcgtcgtgccagggccccacacacggccagctcgccgctctcctcgccgccttcgccttcctcgtcgtcggcgccggcggcatccgcccctgcaacctcgccttcggcgccgaccagttcgacccgcgcaccgactccggccgccgcggcattgccagcttcttcaactggtactacttcaccttcaccgtcgccatgatgctctccgccaccctcatcatctacctccagagcaacgtcagctgggcgatcggactcgccgtccccgccgccctcatggccatctcctgcgcgctcttcttcatgggcacccgcctctacgtccgcgtccgccccgagggcagccccttcaccagcttcgcccgggtcatcgtcgccgccgtccgcaagcgccgcgtccccgcaccggcctccgccgacgacctgttcgacccgccgcaccagagcaagctggtggccaagatcgcgtacacggaccagttccggtgcctggacaaggccgccgtggtgacgccggagtcgagatcgagcccgtggcggctgtgcacggtgcagcaggtggaggaggtgaagtgcctggcgcggatcatcccggtgtggtcggcggggatcgtgtacttcatcgtggtaacgcagctgggcacgttcgtggtgctccaggcgctccagatggaccggcggctgacgaggtggtgggcgttcgaggtgccggcggggtcgatggtggtgttcaacatgatggcgatgacggtgtggatcccggtgtacgaccgggtggtggtgccggcgctgcggcgggtgacggggaaggagggcgggatcagccagctgcagcgcatcggggtggggctggtgctgtcggtggcgacgatggtggtggcggcggcggtggagcagcggcggcgccggctgggcgcggtgggagtgaagatgtcgttcctgtggctggtgccgcagcaggtggcggcggggatgtcggaggcgttcgcggcgatcgggcagacggagctgtactacaggcagttcccggagaacatgaggagcgtggcgggggcgctcttcttcctggcgttcgcgctggccaactacgcgagcggcttcatggtggcggcggtgcaccggaccacggggtggctggcgcaggatctgaaccacgcccgcctcgacctcttctacctaaccgtcgcggccatcgcggcggccaacgtctgctacttcctcctctgcgcccgctggtacaggttcaagaacaccaccatcgccgaccacgtcgagctgccggattatcatcatcatcagcccggaaccgccaacaccatagcctccaaggtttaattaattttattatcacaatcgatcactctactgtagatggtagatagatttagaggtacgtcatcgatcgatgcatcaccatacacagtaggagtataatatctgtatgtatcagacgcaaaaacactataatctcttcttcctcctc

SEQ ID NO: 60149 - DNA, 608 bp, Oryza sativa
  Clone ID: PAT_MRT4530_61705C.1
ccagcatgcatctcactgtggagatgggcaaccgagcaaggaggaggccaggagggagtggcgacgaggaaaacgagcagcggaaggtcggaggcagccggcgtgctccctccctctgtccctggcatcctccctcctccactccccacgagcccatccatggcgaggtgcatgcagcagcgcgggagaaactacgacgagcggcggcgcggcatcagatagggcagcgcgggagaagctgtgacgagcacgagacaagctgttggatcttgaactcgtgctcgccggcgacgaattcaccggtgctcgggagtgcggctacagagggggacctgggggaggggggaggggggatctggaggtcaccagttcttggaagggcgatgcagagggggagatcaagctcaccggcgctcgggggtgcggcaatagaggaggagctcaagctcaccaccggtcactcggggacgagagaaaggaaagaaagagctcaccgccggctgcactgtgtgggggacaaagtcgggtcttcacaaattcctcgtggcataccacaagcttgggtgctcgccgatgactcctatccatctaggaacctatatctctaa

SEQ ID NO: 60150 - DNA, 2066 bp, Oryza sativa
  Clone ID: PAT_MRT4530_61706C.1
ttttttttttttttttttagaaccaacatgcatgtgtatctgatctgatcaaggagtatgtacagaatttacaatacaaatgtacaatggatgattcattcatgcctgcagttttggcaaatgaatctcacagcgagaagttctggagtgaggcatctctctccttgtaaaaaaaataaagctatacaaaacctcctagatttggggaaacacaagcactgacaaaacggcgtgcgatatttactgaagaaagaagaccatttgaagaagggacctatctgactctgatttctgaatatggtttaacttgtagacccgttcatcttagggaggaatagacatagagggcagaggaacaagattgcaaaaggtaaaagaaccaacatgcatgtgtatctgataattccaaccaacctgcaaaccaacagcattagaacaaccttccaaggatcggacagaacaacctcactaataacactgctacttctactgatggcctggatctgtcctgcccttacaggatcttgggggatttcagcaccattatcccacccatttgccctctcagaattaccaatgaaaagggtcagcttctccaagaacctcacttcttcctccgtcattttcagcgcttgtatttgatctttcagcaccagcacagggtgcaagaaccagtctatcaaccgatcttgggggcggttatattgattgatttcgatgccattgcctatcaatagccctccagaaccggccttgatcgaatggaggatcatacacagcagagaataagaaggtactcccagtcctattgcttcatgcccactttcctttgttcgtaaccattcagtaagatcaacagttgttatgacgtttaaattcagaagatccctgcccctcagttcacaattcttcatcatattttcccatatctggaccattttgacttcctgtatggcctctctaactgaccttgctggggccaaagttggaaccagcattgctggagcttcattggaactaggttggtcgcctcctttaacagaagcattcgttctgactgaaaactccgtggaactggacgattttctcttacggtaggaaggcttcggaagaactgtcccttcccggagataaagccagtcattggtgtactcgtcaaattccgcaaccatggcaaccacataagaaactcccctctggaacgacttctcctggtagacaacgactgctccgtagagacccacaaaaatgctcgagacgatagctagtaggacactcccaacaaccaccagaggccagaaaaggatagccaggccagcgatcggcacacaaactgtctcaaggaatggaccttcgcggcttataaggtcatgaagcagcctctgccaacctttgaagagcatataggggctctttatcagcgcaattacggtgtagagcggaatgtcaacgattaatcccaagagaccaacagctatacatgagggcacatccaacaccctgatggaatggggctcgcaattctgcgagctttcgcgcagctccttcagataaacaggatacgagtggaagcataaatccgcaaagtccctaaccaccgtgcagctgcctttaatcgtcccccacgtcccgtccacgacgccatgcacgaacttcttggactcgctctcctgcctgaacgcctcgaaggtggcgatccacggcgtgaagaagccatagccgagggcgaccagcgcgctcccgaagatgcccagccccagccagaggccgaacagcaccggcagcgcgatgagcaccgctagtttcaggccggcgttgatgcgttcagtcttgatgagggagtaaatggtccaccagacgtgcgccgggaagaggaggagtatcacgccgacgttgcccagcaccatcagcgccgccgccaccgggccgacgaccgccgctttgatgccgccgaggaagaaggcggcgcagaaggagaggaccacgtacgcgacgcgcagcgactgctccaccgaccccatgggctccgcgtagttggcccccgcccacgccttcaccttgtccat

SEQ ID NO: 60151 - DNA, 179 bp, Oryza sativa
  Clone ID: PAT_MRT4530_61707C.1
gaggaagctgcggaggaggagttcgcggcggagccccccgaggagcgccaaggtgtacgtcggaaacctgccgtacgacgtggacagcgagggcctcgcccagctctcttgagcaagccggtgctccctagggcgccgctgcgatttgcgctacacatacatggccgacgcgatcaatt

SEQ ID NO: 60152 - DNA, 444 bp, Oryza sativa
  Clone ID: PAT_MRT4530_61708C.1
caatacaaaaataattgaatttatgcatatgactatatgacagctataaagatttagtatatttttgtactgttacattgatcatcatgatcggtgcaaacttcgtcatgacatcaagaattgagatctactatagttaaactttacaccaccaccaacagaatcagcccaatcttatgtatctctacgatcatctgcccttggagctcgtcctcgcactatcgctccttggagaattcccctgtccacgcaccagtgaggagctgttcctgggctccctcgacttgctcttaatcaactcgatcttctcgagagcctcaacgacttccttcatggatggtcggctcttgggatcaccagacagacacttgagagtgagctgagcaccttggagggctcccctggaatgatactgccccttaagacgactgtccatcagctggc

SEQ ID NO: 60153 - DNA, 255 bp, Oryza sativa
  Clone ID: PAT_MRT4530_61709C.1
atgtgggtgcggtttggcgctgagttcaagcttctccaccatctcgctgctagccaagttattgcagctacctcaatcaatgatcatgcggcaagaacgttatttgatgacacactttgtttggatcaacgtgtgtcgctgattttgctccgccttcttcatttgtgcgctgaggacacgctgcataatgaggctctcatagtgatccgcatcttcagccccaatatgctcttcaggtggctcattatctacatg

SEQ ID NO: 60154 - DNA, 3029 bp, Oryza sativa
  Clone ID: PAT_MRT4530_6170C.1
ttttttttttttttttttaacacacatacggataagtattattattattataattctgacctagagagctttcagaggaaaagagagagagagagagagagaaaaaaaaacagtagtgacctagacttggacgtggacatttcctagttcttctgacacaggcacaattgtgtcagtcagttcaggagctggagtgtgcagtagtctctgcagcctgaatctatctacacaaacacattgctatccatctctctgatatctacctcaattcatgtgccctgtggctgttgtgtgacctactcctacacccttgtgagccgaatagtacaccggatatccctatccaaacaccacaccttttctttccaatctctgaacatggatggactatctctcttcttctctcaggacagggagatcttggaaggggatgcagtatctgtagtacactgctgctctgcaacaccaatgtcctcatccccaacactcctgcaacctcccttgcatgataccttggtatatttttgttgtcttacatcactctcttcctcctcctcctccttcttctgcttcttctggttcttcttcttcttctttgccttcttgttcttcttcttcttcggcttcttcttcaccttcgccttcgccttcttctttcttaattctaggatcttcttcaattctgctcttctggttctttgagagagtgtgcatgtgtgagagagaaattgctgattaattagcttcagcaattcttgtggtacatagtatacatagatagaaagagagagagagagagagagaaagcaagcaagctgaattgatgcttgtgtgtgcttgtgttgacatctgtatacacatgtgcacggttctttgttaaatcacttgatgaagatgggtaattaaattaagaagagagaagcatatatatacatttccagtagaattgtagctagagtgatctatagctgccggccggcgaggcgatctcgatggcggcgtactaccacggcggcgccggcacggacatccagtccggcaccgacggcctgcagacgctgtacctcatgaacccgagctacgccggctacggcgacgccgccgccgccgccgccgcgcccggggcggcggccaacatgatgctcctgaactcggcggtgacctccatgacgccggtgtcgttcggccaccagccgtcgccgtcgtcgtcgtcggcggcgcagcacttcgtcggcatccctctccaggcgccgccggcttccgggtacaacctgtggaccccggcggcggccaccggcgcgggcgacatgtcgccgccgacgccgcagcaccagcatcagcaagctcacggcggtggcgcggcgggtgtcagtgctgtcctcagcctgtcgtcccgcgaggcggcgccgccggtgacggtggcggccgtggtggccgccggcgacgaggggaagtacctgcaggcggtggcgcagggcgcggcgtcgcacgggcagatggtgatgagctccaagtacctcaaggcggcgcaggagctgctcgacgaggtggtgagcgtcagcaagggcgtggacgacgtcaaggccgccgcggcggcgaagagcccggcctcggtgaagaagaaggaggactcggagggcgtgtccggcggcggcacggaggatggcggcggcgccaagagcggcggcgcgccgccgccgccggagatgtcgacggcggagcggcaggagctgcagatgaagaaaggaaagctgattaacatgcttgatgaggtggagcagcggtacaggcagtaccaccagcagatgcaggtggtggtggcgtcgttcgaggcggtggcggggggcgggtcggcgaggacgtacacggcgctggcgctgcggaccatctcgcggcagttccggtgcctgcgggacgcgatcgcggggcaggtgagggcggcgagccgggcgctgggggaggccgtcgacgccgacggcggatgcggccgcacggtggggtccaggctccggtacatcgaccaccagctccggcagcagcgcgcgctgcagcagctgggcatgatgcagagcagcgcgtggcgcccccagcgcggcctccccgagcgctccgtctccatcctccgggcttggctcttcgaacacttcctccacccatatcccaaggattcggacaagatcatgctcgccaagcaaaccggcctcaccaggagccaggtttcgaactggttcatcaatgccagggtgaggctgtggaagccgatggtggaggagatgtacctggaggagaccaaggaccaggacggcggcggcggcgccggcgccggcgacgaggggagcaagcccggtgggagcaagggcggcggcgccggcgtcaatggcggtgtggttgacagtgccgcgaagatggacagcaaggcggcgcacatggagagcggcggcggcgtacatccgtcgctgctcgagctcgccggtgaccaccaggcgcaggcggggttctacgacgacgacgacgaggatggcggcgccgccgccgcgctgcagcagaagctgaagaaggcgaggacggaggagcagcagcaggcggcgttccacgtgtccgacgtggccacgctgcacgcgcatgccgcggcggcggcggcggcgaggcacgacgaggtgagccaccgggagctcctcatgaagttcatggagagcggcagcgccggcgccggcgccggcgccgccgcgagggaccaccaccacgaacaccatggcggcgtcggctactcgctgttcgcgccggcgccgtacgggcagttcgccacggagcagttcgcgttcgccggccacggcggcggtggcggcggcggcggcgtgtcgctcacgctcggcctcccgcacggcgccgagcagacggcgtcgttcctcatgaccagcagcaacggcagcgacggcgccggccacgtcgccggcggcggcggctacgacatgaacatgcagagcacaaagtccttcgcggctcagctcatgagagacttcgtggcctag

SEQ ID NO: 60155 - DNA, 571 bp, Oryza sativa
  Clone ID: PAT_MRT4530_61710C.1
gagctgctgcctcggacgtctgctgccatcgggctgcctgccaccaccgtctgagtatgccgctgaggacagccacccacgccagccgggcagccgccgacgccgtggtgacgctaatgcctctaccgccgccaccctgcaccctccccccacctcctggacccttcactgcccttgctcaggcctccccactcaccctagggtgggggacaggctaggcttgcacagccagccgcttgtcttgccagggacatgcccaggtcttgatgacacgacggggtcggggaacggagcggtccaggtggagcgcacgagttctcgccaggagccaccctgcatgccatgtagaatggcggggctccagcagacatgcagcgagggttcactttgaggaggaactccggcaggattagcacggtgtcagtgtgtgcaacggcgtctccagcgaatagtccggcgatggtgatcgagaaatggcgcggcgaagatgctgggtccaaccgtgatgaggacagaagccgtcaccatgtcggcagctcctctgcgccgctttagaggatccaagcttacg

SEQ ID NO: 60156 - DNA, 464 bp, Oryza sativa
  Clone ID: PAT_MRT4530_61711C.1
gatggggaagattgcgcaactgatcgaatgctagagaggaaggaagatctggaagagaggctgatgccagaactgaaatccctggtcctgggcacaagcaaagaatgagcagcattctggagctgccttgctagctagacttatgtctgtgcatatacactgggcggggctatcttcgttccttgcatcctctgcgttgatcttctttgctctatcaggaagtaaaaaagagctgggaagtggtcttctctatagatagaagagaaaatggaaaaaggagaaatgcaccatcgtttgggaagttgatgtgaacatctgattgacatctctcatgtaatttagggcatgcatttcagcaaatgctcaggctaattttagtggccgaaggcatctgaattcacacctgaatctgaatcttgaacttgatgctgctcggttttgtagcgacagataatgaacttttc

SEQ ID NO: 60157 - DNA, 112 bp, Oryza sativa
  Clone ID: PAT_MRT4530_61712C.1
gccggttgaaccacgcgtacgggcaccttctaaggcgacgtcgagatcttcttcaagccgacctttaacggggaccgctaaatgtttcaaggggttttctacaaggaccccc

SEQ ID NO: 60158 - DNA, 3366 bp, Oryza sativa
  Clone ID: PAT_MRT4530_61713C.1
tcacataattgtgcagttgcacttcgactccatctttggaggcttcaagctatcaaatgtagtaatttcagaagaagaacgtacaggtgctggctctttagtaattacttctgtcctggcagtatctgtgatggattctccatcaccttctggtattttcctttcaaccttacgccttgtcgttcgcctctgaggacctctcaacaaaccatcttcccttggaatgaatttttctaccatggtcactgttggtcgaggggcatgagcgaattcagcttcctgctctcgctccagtccaactgttgcagccttgtatgctaggtcatgaacaatggaactacaaaagagaattgtatccgtagcctcttctaaagtgaagcatctctgaaattgtttcctccttccttcatctttggtttcatctcttgcagaaaccaatgcaccctcctcagggacagatgatacaccacaatcatccaacttgctttcgtcatcagaagctgcaaccgtttcagacagaattctaggaatgtcagaattgttctcatcacatggatgttctggagttgcaactgagtagtcagcgatggccggaacttcttgactatcgttctctgtcttttctatgaagctaacgtcagcagcaggagactggggcatgtcacttggcacttcagtgtatgatgaacacatgtcaacacctaaattatcatcacgagccatcctttctttatcttgattctgagttacttcatcttctacttcacaatcatcatttacaatggcttgtgcaacagaccagcactctatagcacttgagagagcttctttaaaagatccatcatgttcttcggtaaaaaccgcagctgtcaaagcacttgtttccaaactatagattggatggcaaccatctccatttacataactctgagggtaatgtgaagctgatgaaccgctaattgacatatccgacactgaagcaatgctttgacaacttatttgagacttctcgaagtcacccttcttaccacttctaaggcgctcaaagcgtacatctgattgccctgatggccctagatcaatggaagaagcagctgaagagctatcccgtccaatgctacgcttcatcaaactgacactatctgctgtataatagggttccaaacaatgaatgttggtagtaaccaaagtcctcccttccacaataggccatttcttgcttcttgtctcctccaataagagtaccgatataccgttgccctcagcattttcaaccttaaggcttggaggcccagttgaccccagttcatgagatccactggccaccataccagaaataaatccattatgttggcaatctgattctgacaggcattgggccatttcatgattttggttacctttttgtagtctgaaaagcttatactctgtcacatgtgctgcttcagcttcttgatagtcacttacactacatgtatgtggtgaaatatcattgctatttcccattgaagagtcaccaatatcatgtggactgatattttctttaagattcatcaaatgcttccccaacatcttttcctcatttgtgtgcaccactgattcagtggagtacctttgtaaataatcagctggaggttcattgctcactaactgatggtcaagagatacatcactgctatcttctacacaatctagtgctataggacgacgatcttccgatggaatgcaaactttagattgcgtaaatttatggtccttctgatgtagtccttctgtagtttgtatcttagatcctgcagaaaatatcccatccccaaaatcacactcttcacaataattatcaccactcaaatacatcacattaaaaatctttccacatctagtgcatgtggccatttcaccatctccaacctcagaactacttgcaaaaccacatgaaatctgatcagctgttcgtctacttttcatatcaaggccttctttggtgctctctacacaattgactctgcctgatgagttctctaaaccactacaagtagttgataaactgtgctgatgacaattggatccttcattcagctcatcagatttatcaaacataaatatctcttcatggattctggaactgtcatttgtttcccattgaccaactagatcatgtcgttcatggtcaatgtccacacaagggctaaaagtggcaccatgctcagaacttgcgttgctgctggttgtgactgaggaaatgtgtgaaaacgtagggcgatgaacaacatttcctttgccggctacaaaagtggtagtggggacacttgacagaagtggcctgaacatactttgaggtgctttgcgatgatccatcaaccaaacagcagaatcaaatgatctctttggggcagaactaggagagaaactcttggatggcttctgtgatgatgcaattgttctggtcttcatcactgccaggctcttttttacagctggactgctggaatagtcaattggcacagactgcatagagtctagatcatcttcaccagaagatgttgcagaagctttgctgtatgaactgaaacgatctcgttcagtactatgggacgaaatagttcttcttgacggggtaggagacattgattgtcttctacctcttgaaaccatgtttaatccactgaaagatgaaggggacccaccccttgaacgggataatgggcggtctgacatagatgtgcgaaggtttggaggtgcatcaaaagagaaaccgggatcacttgactgccatccttgaaattttggagaagatgacctacgattagttttcacaggtgaagctccccttgttccattcagcgttggtccacttgaagtagcactcatcctccttgaggcaggactaggtgacctccgtggtggtgttaatgtcttattacccggaggagttggagatcttcgagatggtgtggatgattgcagagaaagtggtgggctacaacgagaagatgaattcgttgatcttgtccttgtcagagctgtattgctgctacttgagcgtggtgacaagcttagtctatttgggcttgcactgcttctactagatctttgagcattttccattgttgatgaccttgaaatcaatattggctttgtctgagccctgcccctaggagctggaccagcgagcttgtcttcatcatcatccaatgaacggaaaagtggtgtttctggaggagtcaacaaccaatcataatcattcttgtcaccatcagtgttaagaaaatcacggctttcttctcgtctggcaatgttgacgccaagcttgagatccggaaaatagctcaattttgctggtacacgtgaagcagaaaccaacat

SEQ ID NO: 60159 - DNA, 258 bp, Oryza sativa
  Clone ID: PAT_MRT4530_61714C.1
tgcacctcgtaagctgtcttaacggcgctttttttttttttgagaggcgattgtttaactacttagtagtctgagcactagattggcatgccccatatcggagaaaagaggaaagccctagcatatcacacttacagaccaaaaggggagtatactgcacttctgtgactgtctatcaaaatgaatatgaacacccacctaatcttggtttggacattatgactgtgctaatagaccgaactcactgatgtgaatcaa

SEQ ID NO: 60160 - DNA, 884 bp, Oryza sativa
  Clone ID: PAT_MRT4530_61715C.1
ttttttttttttttttttcatcaagaacaacacatcaacatcaagaacacattcatcaagaacacagtcacacacattcatcaagccaaaccccaaaaccctcgcctcgcctcgcctcctcctcgaagcgcgaatttgaagcggcggctcctcccctcccatggcggcggcggctagggttttccgcgggtgcaggttcctcatggcggcggcggggggcaagaggcccgcgtcggcttccgcgtcggcgtcggcggcgggggcgaaggtgaccaagacggaggcggcgcaggcgaaggagaagcgagggatcatgcagcccgtgccggtctccgacgccctcagcaggttcgccggcggcgcccccgagatgtcccgtgctggcgccgtcaagctcatctggaaccacatcaaggccaacggcctccagaacccagcaaacaaaagggagattaactgtgacgataagcttaaaagcttattcgccgggaaggacaaggtcgggatgatggagattgccaagctgctgtcccctcatttcattaaagctaactaaaccagtcatatggagcaagtattagtgcttactgctcggacttgtgttgggatgcttcttttgtgatccatgttaggccccaaggttccactaggttttaggtcatgtggctgtgttaagacttaaaagacttcgttgaacatctaggccggggttcccagtgatgcatgtaaaaaaaaaaggcactcccaatattttattgcgtcctactactgtgatcccaggcgttttatgtggttcaatttttaatctgccattggcatcttgtaccaaaaaaaaaatacatatatgtatgtatgcatgctggtttggttgagaaaaaaaaaaa

SEQ ID NO: 60161 - DNA, 202 bp, Oryza sativa
  Clone ID: PAT_MRT4530_61716C.1
gttctctgagattcaccctcccctcgagcacagttctggagaacgtgggccttgggtctttgtggtccaccaggcaccatgattaaaagcgtccatattgctccagccacacctcgcgaggacccatatcctaaatcttttgagaggtgttgggtcctctctcccgatgtgtcaccagagccaatgagcgtgcggcgcaccc

SEQ ID NO: 60162 - DNA, 339 bp, Oryza sativa
  Clone ID: PAT_MRT4530_61717C.1
tttttttttatccgtagggtccataagacaagtatatcattgatcacgatcaaatgttactgcaggcctgcagcattcagtcatgcagtagcttaccgataagttacagcttaacagaacacttttaggcccatagaacagcctgggaacaaaatttttctactagatagatgatacaacagacctccactatcttaaaactaggtaaaaatcgcacatttactggtggtggaaaaacttcgaattatcgcatgaagaggaagcgcatcctcagtcctgcagtacgccaatttgtaaaccccaacacctcacatgagcccctcctccgccggtgggggt

SEQ ID NO: 60163 - DNA, 990 bp, Oryza sativa
  Clone ID: PAT_MRT4530_61718C.1
atgcctccggcgcatccgcctccgtgcggggtcgcgcccgccgcggcggcgacctgccccctcttcctcctcccccgccggagcctgagccggagcctccacctccgcctccgccgcctctccctccccgccccgcgcgccgcctcccacgcccacgacgccgtcctccttcgccgcgccgccgacgcggccgaccgctccgcggggctcacctccccgcaccccaacttcgggtgcgtcatcgccaggccccagctcgagaccgacaacgccgaggcatgggtggtgggcgaggggttcctctacgcgcagggcacgccctgcgccgagctcctcgccgcccaggaggccggcgagcacgcccgcggcgccacggcctacctcaacctcgagcccggggactgctacggggacagcactgccgtttccaccctagtccaggaagctcttaagtcatgcctcattgtaaatgccccattactttaccgagctgccttccgtgttccgttctctgtcctgaagtatgctatgactgcagatgctgagcaaaagtatccaaccatgctctactggaaactggcaggaaaaattgcagcaagcagtgggcatgcatcttggtctcttaatcttcccgaggaagcaaatttatggaatgtacatgatgcatacacaatagttgcaacacaaagaggtgctcggagagatctccaaaagaaacttgctttgaagggtgttgaagtagtggagtttgacatgctgaatcctagagatgttatgtcatattgttatgatcgtggttacctctccgtattatgggagtgtggtgggaccctagcagcttctgctatatctgcaagtgttattcataaggtgtatgcattcttggctccaaaaataattgggggagtgaatgctccaacaccagtcggtgaactagggatgaatcaaatgactcaagcgattgatttaattgatgtttcttacgagcag

SEQ ID NO: 60164 - DNA, 1056 bp, Oryza sativa
  Clone ID: PAT_MRT4530_61719C.1
atgggggtgacctgcccgcaaactcgacggccgatccatctcgccgagccacccctatccccggaaccaaaccctagctccccgctcatggacgacggcgcggcgcccgccgccgccgccgccgccgaattaccctcgccgtcgccctcctcctccggcacctccccctccccgcgctccaagcgccgccgcaccgaccgctacgcgcaaggcttcgagttcgccccgcgccccgcccccgcgaccgcgaccgcgaccgctccggcgccgacgcccgcgcgcggcacgcccgagtggtcggagggctccaccttcgcgctcctcgacgcctggggcgaccgcttcgtgcgcgccggccgccgcagcctccgcgcggacgagtggctggaggtctcccgcctcgccgccgccgcggcctcccgcccccccgggtactactcggagcagcagtgccgcaaccgcatcgacaccctcaggaagaagtacaggaaggagaaggagaggatgcgcctcgccgcccgccgccccgaccgccccgaccgcccctcgccttccaagtggatctacttcgacaagatgcagtctctcatgtgcccaccgccgctcccgttgcagccacccgtagtgacgcgccgccgagacacgcagccggtgccgcgccaatcttggggtctggacgccgcggagtacgtgctgggcgggtgtgagaacgcgggaacaagggattctgggtctggtgcggaattgggtgaagagcagccaaacgaggctggtgcagggaaaggggaagactttgagttgctcgtggagtcgattcggaagcttggggatgtctatgagagggtggagagtagcaagaggcagcacatggctgaggttgagtggttgcggagggatctccaaagggatcttgaggtgaggaggagggagattttggagaaggcgcaagcagagattgcgcgtctcactgaggaagatggggaggagggtgacctcaaggagggtgagggtgatgataacaagaggtttggggatgatggtggtggcgaagagtag

SEQ ID NO: 60165 - DNA, 247 bp, Oryza sativa
  Clone ID: PAT_MRT4530_6171C.1
aattattcttgttttgtcgaggggagctttttcgtggcatgcaacacagccacgcggggatcctactagctatgaggcaagccagctaaacctagtactggccggggcgaagatgctgcactgctggggcttaacccggcacatcgacggcagctgagccgcgtactgtcttgtcctggtcaccctcacgcgggtcatccccggctgctgctgctgctcaccgtagtagccctcctgcgacgacccc

SEQ ID NO: 60166 - DNA, 601 bp, Oryza sativa
  Clone ID: PAT_MRT4530_61720C.1
gttggtgtgttttttttttttttttttttttttttttttttttttttttttttttttttttttttttttttttttttttttttttttttttttttttattttttaaaaaaaaaaaaacaactttttttttatttaaaacacccaaaatttcacggggggggggggaaaaaatctgaccttatttttattttccaaaccaccccaaccctccccggaccccgggggccaccccgaaaatccggaccgggccctggaggggtaccaactttccctaaaagggggggaataaaaacttggggaaaaaaagggaaaaactgtttcccgggggaaaatgttatcccctaaaaaatccaaaaaaaaaacaaccccgaagcaaaaaaagaaaaacccggggggcccaaagagggagccaacccaaaaaaaatggggggggccaaccgccccctttccaatgggaaaacctgccgggccccccccattaataaaatggccaaccccccggggggggggggtgtttttttttgggccgcccaggggggtgttttttttttactctgggggacggggaaaaaacttattttgctctttacccccccggccc

SEQ ID NO: 60167 - DNA, 162 bp, Oryza sativa
  Clone ID: PAT_MRT4530_61721C.1
atgggccggtcagaccgccgttgtggcgccggtcagaccagccagggcacgccggtcagaccagcgaaggcacgccggtcagaccgccactgtgtggccggtctgaccgccctggtcaggccgaacccagtcattacccccttgatagtacgacaaaactaa

SEQ ID NO: 60168 - DNA, 446 bp, Oryza sativa
  unsure (1)..(446): unsure at all n locations
  Clone ID: PAT_MRT4530_61722C.1
gcacacatgtcaccaactgatgagcacaaaccaggctccagctgggttgcgttgttacatgatatgctagcaagcaaatggcttggtgcaagtgccaaatgttgcttccggtttaaaccnagatgataactaaagggcctgggactggaaagcccgtgcgtgcgatttgcggaccaaatgatgccacccaagggtggcccttggagaagataaccacagaattggcttgctgatgcaaactgatgcaggagtgcacaacaaatggtgcacaacgttaatgttgtcatcataaatatcggtattggtcnccccggaactaaaancgaacggagtgatggcttgcttgtgttttcgataatcgttatcagttctaattttttttctattgttttctccangtaccgattttcaaactgtgggtcttgtcatttatacntgtaaaaaaa

SEQ ID NO: 60169 - DNA, 1737 bp, Oryza sativa
  Clone ID: PAT_MRT4530_61723C.1
atgccgctcgccacgctgctcggccacctcgccgccggccgcttcggcctcgtgcaggcgctcaccggcgccgcgaccgcggcggccgcgcaccgactcctccacctcctcctccgcacagcgccgccgcctcccctcccggacctcgtctccctcgcgcggtggtcgcgcgcccacttccgcgcgccgctcccgctccggctccacgggctcctcctcgcccgcctcgcctccaaggggctctaccccctcctccgctccgagctccacgtcctcgccgcggcgcgcctccactcccccgcatccatcctccgcgctctcccctccccgtccgcgtccgcgtccgcatccacgccgctcatcgccgacatgctcgtcctcgccctcgccagggcatcccagcccctcagggcgtacgacgcgttcctcctcgccggggagagccacccgcggcaccgcccctccacctcctccgtgaacgcccttctcgccggcctcgtcggcgccaagcgggtcgacctcgccgagaaggcgttcaggagcgcgctgcggcggcgcgtgtcaccggacatctacaccttcaacaccgtcatctccggcctctgcaggatcggccagctccgcaaagccggcgatgtcgccaaggacatcaaggcatggggtctggctccctctgtggccacctacaatagcctcatcgatgggtactgcaagaagggtggagctgggaacatgtaccatgtcgacatgcttttgaaggagatggtcgaagccgggatctcaccgactgcagttacatttggtgtgttgatcaatgggtattgcaagaactcgaatactgcggccgcagtgagagtcttcgaggagatgaagcagcaggggatcgctgcgagtgtcgtgacgtataattcgctaatttcaggtctctgcagtgagggtaaggtggaggaaggggtgaagctgatggaggagatggaggatttggggctgtcacccaatgaaatcacctttggctgtgttctgaaagggttttgtaagaagggaatgatggcagatgccaatgattggattgatggtatgacagagaggaatgtggaacctgatgtggttatttacaatatcttgatcgatgtgtatcgccgtcttggaaaaatggaggatgcaatggcggtgaaggaggcaatggcaaagaaggggatcagtcccaatgtcacaacatataattgcttgataacagggtttagccgcagtggggattggaggagtgcttctggccttctggatgagatgaaggagaaaggtattgaagcagacgtcgtcacttacaatgtgcttattggtgctttgtgctgcaaaggtgaggtacggaaagctgtaaagctcttggatgaaatgtcggaagttggattggaaccaaaccatctgacctacaataccataatacaggggttctgtgataagggtaacattaagtctgcctatgaaattagaaccaggatggaaaaatgtcggaaacgggcaaatgtggttacgtacaatgtgttcatcaagtatttctgccagatagggaagatggatgaagctaatgatctactcaatgagatgttggacaaatgtctagttccaaacgggatcacttatgaaacgataaaagaggggatgatggaaaaaggctatacaccagatattagagggtgcactgtctcacaagcttctgaaaacccagcatcatcctga

SEQ ID NO: 60170 - DNA, 724 bp, Oryza sativa
  Clone ID: PAT_MRT4530_61724C.1
tccctgcacggctaagaaattatcgtacggtggctgaggcgcttcttgaaatcatcgtacggtggctgaggcacttgcactatggctctgggcatccaagcaatcctggagtatctcaaactctgggatatccttatgtcaatccaactatcggatgagcctgactctatgatttggagtacaagcctatttggaaatctttggcgcctcctcgttatcactacttcctttggttggtctctctcaatagatgctggacgacagaccgtctccggagccgtggcttgtcgcacccggagtgctgtgttctttgcgatcaaagtgacgagactatcgaacaccttttggttgcatgtccggagtactggcagttgtggtggattgctctcagagcaattggacattcggaatgcttgccgatcaatgaaccctcctttcacctttggctctgtgacaacagaaataaggtgaccaatgcgcatcgtcggggatttgacaccatcgcaaccctggtagtatggacgatttggaaagagagtaacaatagagttttcaatcagaccagcagatcttggatggagatcactcgggccatgataggtgaagctgatctttggagactggctagggcagccattcctagcttagtagtccattcggatagggaggggttttcgcaagtagatgaagatggcgcatcctcctcgtcgtgttcttggccttc

SEQ ID NO: 60171 - DNA, 497 bp, Oryza sativa
  Clone ID: PAT_MRT4530_61725C.1
atggaggccgcgcccatctcttcagctcaacaacgcccaacgacttggtgggcaggcaagcggaatccgcggcatgaactcaccgcccatggccaagcctccaagcttgccgcttcccaatctgtcgtcaccgggaacaggagagaccctcgcggatcttggggccccacgccctctccggagccatccctccaccgtcgccggatagaggggcaccaccagggagaaccatgcttcatcgacggccagatccaccggtcacccttcccgctggtcgtcggcgctagatccaccacgtcactagatccgtgccacgacgctttgccgccagagtgatggatgccgagctccactcgggcgctggcgttggatccggccttctcactagtcatcagcgccgcatccgacctaggatggatagtattcacatgccccttgtccccaccgctgcccccatatttgtcgcaccccgattgttatgtggggcccaaagtcat

SEQ ID NO: 60172 - DNA, 609 bp, Oryza sativa
  Clone ID: PAT_MRT4530_61726C.1
gccgccgccgccgccgccgcggcgggcgccgtgacggctgcgctcccctccggagaaggccgcggcgcagccccctccgtgctccacgccgtcgcccgctcctcccgcgccgtctacacgattggcttcgtggtagtggactacaagtactcgctccgtgggctggctcatgggtcggcggattaccgggataagctctccgaggttcatttgcgttcagcaaaaaagatactcaaactatgtgaagcgaacagagggttttatgtaaaggctggtcaatttgtttcgtcaataagacaagtaccaaaagaatactcatcaacactctcttgtctgcaagatcaggcaactccatgcaactttcaagatatcaaaatagtgatagagcagaaacttggcaaggatttacatagcatattcctggaatttgatgaacatccgattgctgctgcatcaattgctcaggttcatcgaggtcggttgaataataatcaggaagtagctgtgaaggttcaatatcctgggcttgagcggcgcatgaagatagacataatgactatgtctttcttgtcaaaatctgtctcttgggtatgttacatgtatcaattt

SEQ ID NO: 60173 - DNA, 1539 bp, Oryza sativa
  Clone ID: PAT_MRT4530_61727C.1
tttttttttttttttttttttttttttgctcaagggaagctagtccatccatacatgaactcaacagagatatgtacaacagcaatggtgtgaacaatagcagtaacatgtcaacaaaacgcagaaaaataataacgaggaaaaaaaatggcctacaaaactgccggctgctcaccctccctgctccacctcagcagcctctcaacaaatcagaagaacaaaaaacaactaatgtcagcatatgtacacaagtgtgaagtggccacaaccaaacaccggcgcctcgccctagcgatcagtctccagccagctcctcaggttgcacagggcctccgcagagaggctcttgcaactcctcggcctcgccacccccgcctgcccccccacctgctcctgccgcggcgacccaagctccgagacgaagcagacgacgatcaccgtcaggttgtcggcggtctcgagcctcttggcctccatgacaagctccctcgcgcacctctcggggtcgtcgtgctgccggagcccccgtcggacgatgctcaccgcgtgctggctggtcatcacgtcccagatcccgtcgcaccccatgatgaggaactcgtcgtcctccgtgagcatggtctgtcggaactctggctcggcgatgagaggggatatcgagccgtcgggcattttcatgtcccagtcccctagggcccgtgtcacggataggactccgttgaggtagccatcctcgatgtatcctccggatgcagcaacccgttcacactcctcggcatagtttgctctgtgatctcgagacatctccatcgctacgcctctccggcaaaggaccgcacggcaatcccccgcatttgcaaccagcaattgccttccgaagactaatgcggtgagtgctgtagttccggaagagcggctgatatctaaatcatcagctaaggcaagatctgcttgcaagaacgctctgcgcacagagttctcaactgactgaacatatgtttcatctacttgcgatgcttgtgggaactcactgtcctcaaacaggaacctcattgcatgccttttcatgtaggctgcagcatccaggcctccatggccatcgaagaccccatagaaggcactaggcaacggacacaccaagagcgatccaagatgggcagagagatcatctatccggatgtgctcatcttccatgtacctcctaggtccaatatcagcaaagctaccagatcgaatactgggaacaaactgtagtgcatcaactgatatgctcggtgcaccagcagcactctccaacccaaactgtgtcagtcttttgcatccacgaacagaaaacaatctcgtgtaataaacagaaaggcagtaaactccataataaaccatgtgaggcacctggacggcaacctcgacctcgaccaccggcggcggcgcgaccgccgccgcggcggccacctcctcgacacccttggcgacgcaccggtggtacggcacctccaacaccggcacgggctgatgcatcacctccgcctccgccaccat

SEQ ID NO: 60174 - DNA, 753 bp, Oryza sativa
  Clone ID: PAT_MRT4530_61728C.1
atgctccgccgccgccgcggcccgctcctcctcgccgccgccgccgccgccgcggcgggcgccgtggcggctgcgctcccctccggagaaggccgcggcgcagccccctccgtgctccacgccgtcgcccgctcctcccgcgccgtctacacggttcgcccccagtttgatgagacgctaacctctatctctgtgatttggttgttccagattggcttcgtggtagtggactacaagtactcgctccgtgggctggctcatgggtcggcggattaccgggataagctctccgaggttcatttgcgttcagcaaaaaagatactcaaactatgtgaagcgaacagagggttttatgtaaaggctggtcaatttgtttcgtcaataagacaagtaccaaaagaatactcatcaacactctcttgtctgcaagatcaggcaactccatgcaactttcaagatatcaaaatagtgatagagcagaaacttggcaaggatttacatagcattatgcagagctgtggttataggcaggttcatcgaggtcggttgaataataatcaggaagtagctgtgaaggttcaatatcctgggcttgagcggcgcatgaagatagacataatgactatgtctttcttgtcaaaatctctctcttggatttttcctgattataggtttgagaagttattgactgagtttgagagaaccatgtcaatggaactaggggcctccaaaggcattgagagaagtctttga

SEQ ID NO: 60175 - DNA, 549 bp, Oryza sativa
  Clone ID: PAT_MRT4530_61729C.1
atggccggaaaagggagctacgttccgcctcagtacattccattatatggcctggatactgaggaggatcgcgtttctgcggaggagaatgatgccgcgcgccacaagttaacccgggatcctacacaatggtcttcaggcatctgtgcttgttttgatgatccacagagctgttttattggtgcaacttgtccttgcttcctttttggaaggaatgcacagttcttgggatctggaactcttgctggatcatgcactacacattgcatgctttggggccttctcacaagtctctgctgtgtgtttactgggggccttgtattggcagttccaggatctgctgttgcttgttatgcttgtggatatcgacaagcactaagagcaaaatacaatcttccggaagcaccatgtggcgatttaacaacgcacttattctgtcacctgtgtgctatatgtcaagagtacagggagatccgcgagaggacagacagcggctcctccgctccgaccgtcacgccacctgcaatacagacaatggatgagccttga

SEQ ID NO: 60176 - DNA, 1011 bp, Oryza sativa
  Clone ID: PAT_MRT4530_6172C.1
atgggtatgagtggttctgatagagaggagagaagggagcttgaaaagagactcaaatttgttattagggaagagaaactgaggtggattcaaagaagtaaagagaaggaagtattagaagggaattgtaatactaagttcttccatgctaaggcaaatgggaggaagaggaagagtcagattcatagtttggtgcatgaaggagaggtgattgaaggacaagataagttattgctttatattacaaatttttacaaagatctctttggacattcaaaggaaaataggttttcaattgatatggcaaatgtatctaaggtggcagaggaagatatgaagaagttaaccactcctgtcactttagaggaactcaaaacaatgatttttgaactaaaaaagaacaaagccctatgtccagatggattaacaggagtggagatattacatgaagtgctgaattcagtacatcaaaaaaagcagagtgggatcttgtttaaagctgatttcgaaaaagcatatgataaggtggactgggtctttatctatcgaatgccgaaagcaaagggattcccagatcaatggtgtgattggagcatgaaagtgattatgggagggaatgtggccgtcaaaatgacacaattttccttattgatgataatctggagcatgcaaaaaaatttgaagtacatcttgtgtctgtttgagcaccttaatggacttaaaattttaccaaaagaccaaggaggtcttggggtgattgatttagaagcaatgaacaaagctttgctgggaaagtggatctggaaattagagaatgaagagggttggtggcaagagatcattattgagaaatattacaaaaacaaaccactatctggtctgaaactcaaacctggaactgtttggttcctggattaagcaggaagcaacaaagaggctggtggtgcgagcagacgacgatcggtggcctgcggcggcggatccgcggatgaccacggcagcgtggcttga

SEQ ID NO: 60177 - DNA, 498 bp, Oryza sativa
  Clone ID: PAT_MRT4530_61730C.1
atggccaccgcacccgtcgccgctgccgccgctgccgccgccgccgccgccgccgaggtcatcgctgcactcaccgcggtcgctggaccctgccgcaaccacaacccgccgccaccatcgaggtcgtcgtccccacacaaatccggtaatcacgaggccggatccgtgccgatagcggcagcggcgtctcgatctcgccagtggagaaggggagagctcgagatcgagcgtcgccacatggagcttgacgtcgccgccacatggagtggggaggacctcattgcggcggcggggagggagcccgtcatggctctctcgcggccggatccgccgcccgcggcccagcagcggtcgcgtcgtcgtcgcggcagcctcccccatagtagcggtagtggatccgacctcccctgtcatggtggctgcagatcgggcttcccccgtcatcacgatgccggatccggcctcccccgtcgtcgtggcggctggatccggccctga

SEQ ID NO: 60178 - DNA, 353 bp, Oryza sativa
  unsure (1)..(353): unsure at all n locations
  Clone ID: PAT_MRT4530_61731C.1
aaacatataaatattaacacccaaaaaaaacaaacccacaccatcttccaattaattacacttaacatacacactttttccaataatatcccacacaaaacacataaaactttttnatacaactaatatacttaatttacatnnatataacaaccaattaattcttggttggtgcacaaacaaaaacacttttgggatctaaattgataataaaaagcagcacttgttttgttgggcaaaaggttggcctcttatttgcacagttgcaggctttcttatatttagagccggatggcttgccatactgttatttatctgtcctgccatggtcatgaatgccttttccacatttg

SEQ ID NO: 60179 - DNA, 1026 bp, Oryza sativa
  Clone ID: PAT_MRT4530_61732C.1
aacattagccattaggagactacggatcattatattaagacattacaagcctcagaatatgagaaagaaactgaggcaatggacaacaagtgtgttctttacctttgccatcatattccaatatgtgaaaagataaatgttacatgtaacaatcgtgctacagttcaatgacacagctacacctgcaaactgtgatttgctcatttgtcgaaaaatcatctttacaacaactctacggaaccagcctcgtagtagtacccgtggaagcacaatcaaagaagatataacaaacactcgcaagcagcaacaaccaaagattcgtcagaattcagatagagaggcgttcatcaatatttcatatttccattcaaggctcatcccattgtctgtattgcaggtggcgtgacggtcggagcggaggagccgctgtctgtcctctcgcggatctccctgtactcttgacatatagcacacaggtgacagaataagtgcgttgttaaatcgccacatggtgcttccggaagattgtattttgctcttagtgcttgtcgatatccacaagcataacaagcaacagcagatcctggaactgccaatacaaggcccccagtaaacacacagcagagacttgtgagaaggccccaaagcatgcaatgtgtagtgcatgatccagcaagagttccagatcccaagaactgtgcattccttccaaaaaggaagcaaggacaagttgcaccaataaacccttttatctttccttctgaaatcaaggagtcacaggtcagagagtagcatacagctctgtggatcatcaaaacaagcacagatgcctgaagaccattgtgtaggatcccgggttaacttgtggcgcgcggcatcattctcctccgcagaaacgcgatcctcctcagtatccaggccatataatggaatgtactgaggcggaacgtagctcccttttccggccatctcttcgattcgattcgaacaaagccaagacggaggccggcgcggtggaacgaggtc

SEQ ID NO: 60180 - DNA, 1995 bp, Oryza sativa
  Clone ID: PAT_MRT4530_61733C.1
ctagaatctctcaactacatcaacggctatcttattggcggctttctgcgcatcgttgatgaggtcaagggcggcctcttcgctcgtcccatctgcaaagccatcaatggcgtcaatatcaatcttcgggtataaagacttggtcattgccaacgccaggcttgctcccatacttccagcttccttgatattcttaaagtatgtatccggagcaattctcagcttgtcgaaaatctcagaagcatcaaatgtactcggaccattgttattgaaaaacatggcttggatgagtggggtagcagcgttggcgacttcatccctagccccttcaagcctcttgattttgttgaccaagacattaaattgagcgtttacgatacgagtagcttgcccgagtgcctttttcagcagacatacttcctcgtcttccttttgcttgtttatcatgattccctgaggttgcatgtcgtcatcccaccacttgacttgaatgggtgggcgagaatcttcagccgatcgtatctgaaggacctcttcttcatcaccaatcattggcccttgtatattcatgaataaaggtgaaacaatcgaagaaagccctggatcagcactagtatcctttctaggagggctgtccatttgagcttctacttcagggacatctttatttagttctgcacccgactggtttccagccgggggctcctgattagcaccgactctagcttcggctgactggtttccagtcaggggctcgttgctgggttctacattgtcggttgccgactgattgtcactcggatgatcttctgcagtcggcccggtttcttttgaaggacccatctccatgtcagttggctcagagtcttttccagaaggatctatgtcagatggcttcctacgaatttgagttatgctatcagtgctggagaacttcctgatttttggcataggacgactggatgttttcttcttcgggttagcttgccttgttgattttccggtcaccctcttgctgccagctttttcagagtcatcattttggtcgtcactcagaaccaatttcctctttcggaagtctgattggttggccgattgagtggtgctgggttgagagtcagatcggatttttggtcctccgttagcttgactagtttgccgacggggtgagtggcgttgagcagttggggggtctgacttcatcaaggcgaattccttgaattcaagagattcaggatcttcacggttagggtcatgtttgccgtcgaattcgaaggccgtgcgagatctttctttgattggggccagccggctcttgataaaatgccgggtgatctgttctccttgcagaccttgctccttcagcttcagcatatggtccatcagggcaagcgcctgggcggcttcttctcccattggtagtgaattccaagtgtcctgataaactggaggatgacaggagtactcagggagtgcaggctcggggttttgtacatagaaccaatttgcatgccagcctttgtttgaggttttgaagggcatggagaaatacttttggctcagagttcccctaagttgaaatccagctcccccaactacgcatggcttgcttttgttcggttggggcttgaggaagaagatgcgacggaatagggcaaaatgtggcctgatgcccaaaaaagcttcgcaggcatgtatgaagttggcaatacgaactatggagttcgggtttaggtgatgtaaactaatcccgtagaaatccaaaattccccggaagaatcttgaggttggaagagaaaatcctccatagaagaaatgagaaaataccacgacttcatgtgtgtcgggggtcgggaatgcttcgccgaatgctggacgccatccaatgatctccttcgccggaagaacaccgtgcgccaccatctccttcaggttttcctctgttacatcggagggcgcccactgacactcgaagctttctttctcttctgccat

SEQ ID NO: 60181 - DNA, 1557 bp, Oryza sativa
  Clone ID: PAT_MRT4530_61734C.1
atggtggcgcacggtgttcttccggcaaaggagatcattgggtggcgtccagcatgcggcgaagcattcccaacccctgacagacatgagatcgtgggctggcatgcaaattggttctatgtacaaaaccctgagccagcgcttcccgggtactcttgtcttcctccggtatatcgtgatacttggaactcacttcctatgggagaagaagctgcccaagcgcttgacttgctggataggatgctgaaacttaaagaacagggcctgcaaggggaacaaatcactcggcactttatcaagagccggctggccccaatcaaagaaagatccagaacagccttcgagttcgacggcaagcatgaccccaaccgagaggacctagagtctcttgagttcagaattatgcaggagagaatgtacaaaatattctcaaatgccttcgtggtcagctattcacacttattgccagtcgtgccatacaatgccttcaaccctcctccaccggagcccccgactggaaaccagtcgggtacagaaccaaataaagatatcccagaagtagaagctcaagctaacagccctcccaagacagacaccggtgctagccctggaactagttctcctgttagggtgcaaggacagactcgtcctcgaccggaaattatcacaggtccgatgattggtgatgaagaagaggttctccggatacaatcggctgaaaattctcgcccacccattttagtcaagtggtgggatgacgacatgcacccacagggaattgtaataaataagcaaaaggaagacgaggaaagaatccatctcaggaacgaggcgaagactgcgactcttgagaaattagttccccatcttggaacccttgaggccaccagaaaccagctgcacgaagctaaggagctcgccaggaagactgagcatgatctgagagaccggatcgccgatctccaagactccaactttgaactgaacggttcatcaaaagtgcaagctgccaagatatccgagctggaaaagcggatccaagctctggagaaagataaggccgaattggcaagacaaagggactcggctctgaaagatgtcgaagaccgcaagatcaaatcccaagctcaattcgacgtcctagttaacaaaatcaaaaagcttgaaggagccagagatgaagtcgccaatgccgctacaccactcgtccaagccatgttcttcaataacaatggtccgagtgcatttgatgcttccgaaatcttcgacaagctgagaattgctccggatacatattttaagaatatcaaggaagctggaagtatgggagcgagcttggcgttggcaatgaccaagtccttgtacccgaagattgacattgacgccgttgatggctttgcagacgggacaagcgaagaagccgctctcgacctcatcaacaatgcgcaaaaagctgccgataagatagccgttgatgtagttgagagattccaggacaacaacctccggccgactggatctaataattctgatgatgaaaagactgatactgattga

SEQ ID NO: 60182 - DNA, 1521 bp, Oryza sativa
  Clone ID: PAT_MRT4530_61735C.1
atggcggaagagagagaaagcttcgagagtcaatgggcgccctctgacgttacggaggagagcttgaaggaaatggtagcgcacggtgttcttccggcgaaggaaatcatcgggtggcgtccgacgtgcggcaaagcgtttccaacccctgatacacatgaagtcgtggtattttctcatttcttctatggcggattttctcttccaacctcaagattcttccggggaattttggatttctacgggattagtttacatcatctaaacccaaactccatagttcatattgccaacttcatacacgcctgcgaagctgttttgggcatcgtaccacattttgccctattccgtcgcatcttcttccttaagccccaaccaaacaaaagcaagccatgcgtagttgggggagctggattccaactgaggggaactctgagccaaaagtatttctccatgcccttcaaaacctcaaacaaaggctggcatgcaaattggttctatgtacaaaaccccgagcctgctctccccgagtactcctgtcttcctccagttttcgatggaaaacttgaatcatcatgcccaggaattcgccttgatgaagtcagaccctccaattgctcaacgccgatcacctcgccggcagactggaagccatctgatatagatccttccggaaaagactcggagccgactgacatggagacaggcccttcaaaagaaaccgggccaacaacagaggattgttcgagtgacaaacaaccgacaaccaacaatagaatccatctcaggaacgaagcgaagactgcgactcttgagaggttagttctccatcttggaacccttgaggccaccagaaatcagctgcacgaagctaaggagcttgccagaaaaactgagcatgatctacgggaccgaatcgccgagcttcaagattctaactttgagctgagcggttcgtcaaaagtgcaagctgctgagatatctgaattggaaaaacgaatccaagctctggagaatgacaaggccgaattggcgagacaaagggactcggctctaaaagacgtcgaagatcgcaaaatcaagtctcaggctcaattcgatgtcttggtcaacaaaattaagaggcttgaaggggttagggatgaagtcgccatccctactacaccactcgtgcaagccatgttcttcaataacaatggtccaagtacatttgatgcttccgaaatcttcgacaagctgagaattgctccggatacatactttaagaatatcaaagaggctggaagtatgggagcaagcctgacgttagcaatgaccaagtctttatacccgaagatcgacattgatgccattgatggctttgcagacggaacgagcgaagaggccgcccttgacctcatcaacgatgcgcagaaagccgccgataagattgccgttgatgtagttgagagattccaggacaacgatcttcggccgactggatctaataactccgatgatgaaaaaactgatactgattga

SEQ ID NO: 60183 - DNA, 457 bp, Oryza sativa
  unsure (1)..(457): unsure at all n locations
  Clone ID: PAT_MRT4530_61736C.1
cccacgcgtccgctagctcacagcttcgcggttgccactgcactagaaaactcacggtttccaatgccggataaccataggctcgcttcgccgtactcgccgccatgacccacctgctcacggtcacgggcgtcgcgcacgcccccgtagcgggccccgtgccggcgcccaagatgagccacgatgacctgtccccctgtgagagtccccggctcaccgtgcccgcgccggtcggcacaacaggcaacagcaggtcgccgtgccccatggggtctgcacctgtcccgctcactgactcacctgcggatctaggcttggcccgccgaacagcccacctggtgctcggtgacagcgcatccgccgccactgggacgggatatgactcggctggagaacacgccatgggagatgatccagggtgccatcgcggncgccgccgtgctctatggtcacatac

SEQ ID NO: 60184 - DNA, 300 bp, Oryza sativa
  Clone ID: PAT_MRT4530_61737C.1
ataaaacataatacattgtatcctagtgctggtctgctggtggtgcctagaagaaagaaaaaaaataaaaaggagaaaaattataaaaaaaaaaaaaaaaatagaaaaacaatataaaaaaaacagcgcttaccttctcgtgcatgcgaccttatctagccgatcttgcgtctcccctcctttcttctcggttcagcttttttcatttgagtgtccgtcgcttcacatcacttcctctgcttaaaccctgtcctcactcaaccatgttctcttgctgcacatatatctactacctgctgt

SEQ ID NO: 60185 - DNA, 2022 bp, Oryza sativa
  Clone ID: PAT_MRT4530_61738C.1
atggcggaagagagagaaagctttgagagtcagtgggcgccctccgacgtgaccaaggaaaatctgaaagaaatggtggcgcacgacgttcttctggcgaaagagatcatcgggtggcgaccagcattcggcgaagcgttcccgacccatgatacacatgaagttgtggtattttctcacttcttctatggcggtttttctcttccaacctcaagattcttccgggtttatcaggacacttgtaactcattgcctatgggagatgaagctgctcaagcactggaactgatggagcgcatgataaagctgaaggaacaaggtctgcaaggtgaacagatcactcggcactttatcaagagtcggttagctcctattaaggcgagatctcgtacagccttcgaatttgatggcaagcacgacccaaaccgtgaagatccagattctcttgattttgaggtcatgaaggagagaatgtacaagatcttctcaaatgctatcgtagtcagctactcacacttgctgccggtagtgccgtacaatgtattcaatcctcctccaccggagttcgcgttgatgaagtcggatcctccaatcgctcagcgccgatcacctcgccttcaaactggtcaggaaagtggaggaccaaagattcggtctgaaacccaaccaaacacctctaatccagccggccagtcagattcccacaagaggaagttagttctgagtgacgacgaaggcgatgatgccagaaaacctgaagataaaggggcgaccggaaaactaccgaagcaagccaatccaaagaagaaaacatccagttgtcctatgccgaaaatcaggaagtcttccaggaaaccatctgatatagatccttctgggaaagactcttatccgactaacatggagacgggctcctcaaaagaaactgggccgactgcaaaagatcatccgagtgacaatcagccggcaaccgacaatgtagaacccagcaacgaacccccgactggaagccagtcggccgaagctggagccgaagttaaccaggagcccccgactagaaaccagtcggacacagggccaagccaagagatctctgaagttgaagctcaagcaggcagccctcccggaaaggatgccagcaatggcccaggatccagatctcctgtaaaggcacaagagtccactcgtccccgtcgagaaatcatcacagggccaatgattggtgatgaagaagaaattctccggatacgagcggctgaagattcgcgccctcctattctggtcaagtggtgggataacgatgggatcgtaataaataagcaaaaagaagatgaggaggtatgcctgctgaagaaggcactcagccaggctactcgcattgtaaacaggattcatctcaggaacgaagcaaaaaccgcaaccctggagaaattagttcctcatctcggcacccttgaggccaccagaaatcaactgcacgaagccaaagaacttgccaggaaaactaagcatgatctgagggatcggattgctgaggtccaggaatccaattttgaactgagtggctcatcaaaagtcaatatagtgcaagccgccaagatatctcaactggagaaacagattcagactctggagaatgacaaggctgaactagcaagacagagggactcggctttgaaagatgttgaagaccgcaagatcaagtcacaagctcaatttgacatcttagtcggcaaaatcaaaaggcttgaaagggctagggatgaaaatatcaaagaggctgggagtatgggagcgagcctggctttagcgatgaccaagtccctatacccgaagatcgatattgacgctgttgatggctttgcagacgggacaagcgaagaagctgctcttgacctcatcaatgacgcacaaaaagccatcgataaggtagcggttgatgtagttgagagattgcaggacaccgatcttcgaccgactggtcctgataactctgatgatgaaaagactgatactaattga

SEQ ID NO: 60186 - DNA, 1767 bp, Oryza sativa
  Clone ID: PAT_MRT4530_61739C.1
atggtggcgcatggtgttcttccggcgaaggagatcattggatggcgtctggcattcggcgaagcattcccgacccccaacactcatgaagtcgtggtattttctcatttcttctatggcggattttctcttccaacctcaaggttcttccggggaattctggatttctacggaatcagtttacatcacctaaacccaaactccatagttcatattgccaacttcatacacacctgtgaagcttttttgggcattagaccacattttgccctattccgtcgcatcttcttcctcaagccccaaccgaacaaaagcaagccatccgtagttgggggagctggattccaactgaggggaactctgagccaaaagtacttctccatgccgtttaaaacttcaaacaaaggctggcacgcaaattggttttatgtacaaaaccccgagcctgcactccccgagtactcctatctccctccagtttatcaggacacctggaattcactaccaatgggagaggaagccgtccaagcggtcaccctgatggatcgcatgctgaagctaaaggagcaaggtctgcagggagaacaaatcacccggcacttcatcaagagccggctggccccgatcaaagaaagatctcgcacagcctttgaattcgacggcaaacatgatcctaaccgcgaagatcccaaatcccttgaattcaaggtcatgaaggagagaatgtataaaatcttctcaaatgcaattgttgtcagctattctcacttgctgcctgtggtgccatataatgccttcaatccccctccaccgcttgaatcatcatacccaggaattcgccttgatgaaatcagaccctccaattacccaacgccgatcacctcgccagtagacaggaagccatctgacatagatcctactggaaaagactctgaaccaactgacatggagacgggtccttcaaaagaaaccgggccgactgcagaagatcacccgagtgacaatcagccggcaaccgacaatgaacccccaactggaaaccagtcaggcgtagaaccaaaccgagatgtccctaaagttgaaacccaaacggacagccctcctaaaaaggatactagtaatgacccagtgtccagctctcctattaagggaatcgtaataaacaagcaaaaagaagatgaggaagtatgtctgctgaaaaaggcactcagccaggctactcgtatcgtaaacagaatccatctcaggaatgaagcaaaaactgcgactcttgagaggttagttccccaccttggaacccttgaggccaccagaaaccagctgcacgaagctagggaacttgccaggaaaactgaacatgatttgagagatcggatcgccgaacttcaagactccaacttcgaactgagtggctcatcaaaagaccgcaaaatcaagtctcaagctcaattcgatgtcttagtcaacaaaatcaagaggcttgaaggggccagggatgaagtcgccaacgctactaccccactcgtccaagccatgttctttaataacaatggtccgagtacatttgatgcttccaaaatcttcgacaagctgagagttgctccggatacatattttaagaatatcaaagaggctggaagtatgggggcaagcctggtgttggcaatgaccaagtctttatacccaaagatcgatattgacgccattgatggctttgcagatgggacgagcgaagaagttgctcttgacctcatcaacgaagcgtag

SEQ ID NO: 60187 - DNA, 1398 bp, Oryza sativa
  Clone ID: PAT_MRT4530_6173C.1
atgtgcgagatgcccttggcttcaaagctcgatgacagatgctttggttatcctggtctcctcttttgctcccgcgtggacggtggtgcggcggccatcagcgtgccgagtgaccacctcgtctccccgccaccgccgagagggctgcggtgcacgctcttcaacaacatggacgcgtggctcaccatcgccaccgacggcgaggtggaccccgtctggcgctcggcgctgctgatcgaggaactgcctcttcctcgccacgacgccgcaccacgccggcttgccgctgcttccctctacatgcacggctgctccaccggctgcagcacgctccgtctcgccaaggacatcgccgagaacaaccgcggcgcgtgcgtgctcgtggcctgcgcggaggtcttcctcatagcatggtgggcggtgccggcgcggttcggctcggcggtgcgcttggagacagggatggtggcggcgcggctagggatggggatggcagcggcgtggctggggacggggatcgtcgccgtgtggctgtttggtgacggctccggcgccgtcgtcgtgggcaccgacccgagagaacgagatgatggtgattacggcgaggaagatgaagggcaaatggcgggcggcgatggcgagcagcttcacgtcgacaagcacgtggccggaggcaggcggagcagcggcgtcggcgggcgggcgcggcggcaagcagcgggcgagcagtggcttcaggcgcggcggaggggcggtgttagcgcaaggccagagcaggcggagcggcggctgcagcgatggcaagcggtgggcgagcgacggctcttggcgccgacaaagcagaggggcgggggacgcggcggcgaggtgtcacctctttccctctctccgaccggcctcatctccccaactccgcccggcctcctctcctcgtctccggcggatactagacctcaacgcggatacgacggcacgctttgcctcaacgcggtggcgtcggtgtacctgcagtcctggacatggcacatcaacgggagccacgtgaacaagaccaccgcgacgagcagccgcctcaatgatgcggccaacgacgcgactacggaggaccacggtgagcacgcgcggccgccgccgctctcccccattgcccttgcctgcttcgcccgctgttgccgctgttctcgcctgtcgcccctacctacttcgcccgccgccaccgcgctcacctgccaccgccgcccctgcctgcttctcccaccgccaccgcgttcgcctaccccccccccccccacgctcctgcctgccttcgcctaccgcggctgcgctcgcccgccatcgccctgcccgccgaagaagacgagagaagagaagaaaataaaggagaaaagagaagaaagg

SEQ ID NO: 60188 - DNA, 2151 bp, Oryza sativa
  Clone ID: PAT_MRT4530_61740C.1
ctaaatcaatccatccagttcacattcatggcggaagaaagagaaagcttcgagagtcagtgggcgccctccgatgtgacggaagacaatctgaaggagatggtggcacacggcgttcttccagcaaaatagatcatcgggtggcgaccggcatttggtgaggctttcccgacccccgatacacatgaaatcgtggtatttgctcatttcttctatggcggattttctcttccaacttcgagatttttccggggcattctgaacttctacgggattagcttgcatcacttgaatccaaactccatagtacatattgccaattttatccacgcttgcgaagcttttctgggcattaggcctcatttcgccttgttccgccgcatattcttcctcaagccccagccaaacaaaaacaagtcgtgcgttgttgggggagctggtttccaactcagaggaaccttgagccaaaaatatttctccatgcccttcaaaacctcgaacaaaggctggcatgcaaactggttctatgtacaaaaccccgagcctgcacttcctgagtactcctgtcttcctccagtttatcaggacacttggaactcacttccaatgggagaagaagccgctcaggcgcttgccctgatggaccgtatgctgaaactaaaggagcaaggtctgcaaggagaacagatcacccggcattttatcaagagccggctagccccaatcaaagaaagatctcgtacggcctttgaatttgacggcaaacatgaccccaaccgtgaagatctagactctcttgattttaaggtcatgaaggagagaatgtacaaaatcttctcaaatgctatcgtggtgagtggaggaccaaaaattcggtctgatactcaaccaaacacctcgaaatcaactagccagtcagactctcgcaagaggaaattggttctgagtgatgatgagggcgatgatgctaaaaaaactggcaacaaagaagtgactggaaaacaaccaagacaaactaatccgaagaagaaaacatccagtcgtcccatgtcgaaaatcagaaaatcttccaggaagccatctgacatagatccttctggaaaagactttgagccgactgacatggagataggcccttcaaaagaaactgggccgactgcagaagatcacccgagtgacaatcaaccggcaaccgacaatgtagaacccagcaacaagcccccgactgggaaccagtcggccgaagctggagttggcgctaatcaggatcccccaactagaaaccagtcgggtacagagccagataaagatatcccagaagtagaagctcaagctaacagccctcccaagatagacaccggtgctagcccaggaactagttctcctgttagggtgcaaggacctgctcgtccccgaccggaaatcaaaacaggcctgatgatcggcgacgaagaagaggtcctccggatacagtcagctgaagattctcgcccacctattttagtcaagtggtgggatgacgacatgcaacctcagggaattgtgataaagaagcaaaaggaagacgaggaaagaatccatctcaggaatgaggcgaagactgcaacccttgaaaaattagttcctcatcttggaacccttgaagctaccagaaaccagctgcatgaagctaaagagcttgccaggaagactgaacatgatctgagagaccggatcgctgagctccaagattccaactttgagctgagtggttcgtcaaaagaccgcaagatcaaatcccaaactcaattcgatgtcttagttaacaaaatcaagaagcttgaaggagccagagatgaaatcgccaatgccgctacaccacttgtccaagccatgttcttcaataacaatggtccgagtgcatttgatgctaccgaaatcttcgacaagctgagaattgctccggatacatattttaagaatatcaaggaagctggaagtatgggagcgagcttagcgttggcaatgaccaagtccttgtacccgaagattgacattgacgctgttgatggttttgcagacgggacaagcgaagaagccgctctcgacctcatcaatgatgcgcagaaagctgctgataagatagccgttgatgtagttgagggattctag

SEQ ID NO: 60189 - DNA, 466 bp, Oryza sativa
  Clone ID: PAT_MRT4530_61741C.1
ttttacctcgcagcctgggaggccgtgcgctacctgctccgcgccgacgccgacctcctcgtcgccgcgcgcctcgttgtggcggaccgtggtatgaccaacttctccatcgcctctcccacatcggtcctagccttcgagggcgcactcggtttggccgcgcgcttggccggacaccccgatccccaccgcctcctttgcatttgggtctcactgtctactcgtctccccgaggctgtcaatatgatctctcaagtgcagggctatcgtccccatgacactatcacttaccgtcttagagattggcttgtttaaaagccccggccatcgccattgtcgccagtcgttctggacctgatgcaatcttgggaccttgccgttgcttcttatggtggtaacagcattaccaccgacgacatgttttctgataagcatttttgggccctcgaatgatgctttcttaata

SEQ ID NO: 60190 - DNA, 1168 bp, Oryza sativa
  Clone ID: PAT_MRT4530_61742C.1
tagacattattggtttgcgtcaaggaggtgactgccatgacaaaggtgtccggcctaagcagtttctggcattatggaggacaaggcgaactgaacaatggtatcaacaatttattcaactgctcctgattccaaaacaaagcacaatcaagcaattttcagtctaactgggtatagagaaaagaaactcagtgggaaatagaagaaaggttccaaaaaaagctaagtagttggaagggcaagttcttatcagtgggaggccggctagtactcatcaactcggttttgagtagccttgcgatgtacatgctttccttctttgaggttgctaaaggcatccttaagaaactggacttttttaggtctaggtttttttggcaaagtgatgagcacaaaaagaagtacagattgaccagatggagtgtgttgtgtaaacccaaggagtgcgggggtttagggatacaaaatcttgagattcagaataaatgcttgttgagtaagtggttatacaagctgatcaatgaggagggggtctggcagaatttgttgagaagaaaatatctttctagtaaaaccattatgcaagtgcagaagcgaaggggggactctcacttctgggcaggactaatgggggttaaggatacctttcgttcttttggttcatttaaattgcatgatggctcacaagtgagattctgggaaagaccgttggctcgggaatcagtctttagataagaaatacccttctttgtataatcttgtaaggaataaaaatgaggtggtggccaaggtagttggaagggtacctttgaacgtttcctttaggagggccatagtgggagacaatctccatgcttggcatgagattgtagctaacgtggttgacttaagcttaaaggggcaaaaggatgtgtttttttgggaggctaacaaaaatggaactttcacggtcaattcgatgtacaaaaagctcatgtatggtaatgtaataccgaggaaatcttttatttggaagctaagacttcctttgaagataaaaattttcttgtggtatttgaaagagggagtcattttaaccaaggataacttagcaaagaggaggtggaaaggtagcccttaggtgttcttttgtagatctaatgagacaatacaacacctgttttttgat

SEQ ID NO: 60191 - DNA, 2389 bp, Oryza sativa
  Clone ID: PAT_MRT4530_61743C.1
atggcggaagagagagaaagctttgagagtcagtgggcgccctccgatgtaacggaggagaacctgaaggagatggtggcgcacgactttcttccggcaaaagagatcattgggtggcgtccagcatgtggtgaaacgtttccgacccctgacacacacgaggtggtggtgttctcccatttcttttatggcgggttttctcttccgacctcaagtttcttccgggggattttggatttcgataggatcagtttgcatcacctaaaccccaattccatagtccacatcgccaatttcatcgtagcttgtgaggcttttctggggattaggccgcattttgctctattccgccgcatcttcttcctcaagccccagccaaataagagcaaaccatgcgtagttgggggagccggatttcaactgagggggaccatgagccaaaaatacttctccatgccattcaagacctcaaacaaaggttggcacacgaactggttctatgtgcaaaaccctgagccagcgcttcccggatactcctgtcttcccccagtctatcgcgatacctggaactcactgccgatgggagaagaggccgcccaagcactcgacttgttggatcgcatgctgaagctgaaagaacaaggtctgcaggggaaacaaatcacccggcacttcatcaagacccggctggcactaatcaaggaaagatccagaacggcctttcagtttgacagcaagcatgaccccaaccgagagaacccagaatctcttgagttcaaaattatgcaggagaggatgtacaaaatcttctcgaatgccatcgtggtcagctattcacatttattgccagttgtgccatacaactccttcaaccctcctccaccgagtggagggccgaagatccagtcggatgttcaacccaacccttcaaggtcaactaattagtcagattcttgtaagaggaagttggtttcaagtgacgatgaaggtgatgacgcagaaaagacgggcaacaaaagggtgactgggaaacagccaaagcaagccaatccgaagaagaaaacatccagtcgtcccatgccaaaaacaaggaagtcatccaagaaaccatctgacatagatccctctagaaaagaccccacgccaactggcacggagactggtccttcagcagaaactgggccgactgccgaagaccgtctgggcaataatcaaccggcaacttgcaatgtagaaatcaataacgagaccccgactggaaatcagtcggctgaagctggagtcgatgctgatcaagagcccccgactggaaaccagtcgggtgagaaccaaataaagatattcctgaagtagaggctcaagctgacagccctcctaaaaaggatgccagtgccgatccagggtacagctctcctgttaaagtacaagggcctgctcgtccctgaccggaaattatcacaggtccaatgatcggtgatgaggaagaggttctttggatacaatcagctgaggattctcgcccacccattttagtcaagtggtgggatgacaacatgcaacctcaggggattgtgataaataagcaaaaggaagacgaggaagtatgcctgctgaaaaaggcactcggccaagctactcacctcgtaaatagaatccatctcaggaacgtggcgaagactgcgactctttagaagttagttccccatcttggaacccttgaggccaccagaaaccagctgtacgaagctaaggagcttgccaggaaaactgagcatgatctgagggaccggatcgccgagcttcaagactccaactttgaactgagcggttcatcaaaagtacaagctgccaagatatccgagctggaaaagcggatccaaactctagaaaatgacaaggccgagtaggcaagacagagggattcggctctgaaagatgtcgaagatcgcaagatcaaatctcaggctcaattttatgtcttggtcaacaaaattaagaggcttgagggagctagagatgaaattgccaacgccgctacaccacttgtccaagccatgttcttcaataataatggtccgagtacatttgatgcttccaaaatcttcgacaagctgagaatcgctccggatatatcaagaacatcaaggaagctagaagtatgggagcgagcttggcgttggcaataaccaagtctttgtacccgaagattgacattgacgccgttgatggctttgcggacgggacgagcgaagaagccacccttgacctcatcaatgacgcgcaaaaagctgccgataagatagccgttgatgtagttgagagattccaggacaacgaccttcggccaactagatctaataattccaatgatgaaaaaactgatactaat

SEQ ID NO: 60192 - DNA, 274 bp, Oryza sativa
  Clone ID: PAT_MRT4530_61744C.1
atgcgcaggtgctcaagcaagggctccacctcaacctgcgctccgcggcgaggctggtgtccgcctacgcgctactccgtctcctcccgcgtcttcaacgcggtccaggacccgcacgccgacgccttcctcgccaacaccttgctccgtgcctacgtgctcggcggcgcgccacaggacacgctcaccacgttctccgccatgctgcgcagggggcatggcgaggcactcaaggaggaggtcgtcggagaggacgaagataggagccgacgac

SEQ ID NO: 60193 - DNA, 2472 bp, Oryza sativa
  Clone ID: PAT_MRT4530_61745C.1
atggcggaggagagagaaagcttcgagagccaatgggcacccttcgatgtaacagaggaaaacctgaaggaaatggtggcgcacggcgttcttccagcgaaggaaatcattgggtggtgcccagcattcggtgaagcgttcccgacccccgacacacatgaagtcgtggtattttctcatttcttctatagcggattttcccttcgaacctcaagattcttccggggaattctgaatttctatgggtttagcctgcatcacttaaacccgaactccatagttcacattgccaactttattcacgcctgcgaagcttttttcggcattaggccgcattttgccttgttccgccgcatcttcttcctcaagccccaaccgaacaagagtaaaccatgtgttgttggggagggggggctggtttccaacttaggggaagtttgagccaaaaaatacttttccatgcccttcaaaacctcgaacaaaggcaagcatgcaaattggttctatgtacagaaccctgagcctgcactccccgagtactcctgtctccctccactttatcaggacacttggaactcattgccaattgaagatgaagccgcacaggcgcttgacctgatggaccgtatgctgaagctaaaggagcaaggtctgcaaggagaacagatcacccggcattttatcaagagtcggctagctccaattaaagagagatctcgtacggccttcgaatttgacagcaagcatgatcaaaaccgcgaagatctagactctcttgattttaaggtcatgaaggagagaatgtgcaagatcttctcaaacgttatcgtagtcagctattcgcacttgctgccggtggtgccatacaacgccttcaatcttcctccaccggagtttgcattgatgaagtcagatcccccaattgctcagtgctgatcacctcgccagtagactggtcaggggagtggaggaccaaaaattcggtctgatgctcaaccaaacacctctaaaccagccagccagtcagactcccacaagaggaaattggttctgagtgatgatgaaggcgatgatgctggaaaatttggaaataaagaggcgaccggaaatcaaccgagacaagccaatccgaagaagaaaacatctagtcgtcccatgctgaaaatcaggaagtcttccaggaagccatctgacatagatccttctggaaaggactctgatctgactaacatggagacgggttcttcaaaagaaactaggccgactgcaaaagatcacctgagtgataatcaaccggcaaccgataatgtagaacccagcaacatgcccccgactggaaaccagtcggccgaagctggaattggagttaaccaggagcccccgactggaaaccagtcggggacagaaccaaaccaagagatccctgaagttgaaactcaagcaaacaaccctctcggaaaggatgccgataatgatccaggatccagctcttctgtaaaagcataagagcccactcgtctccgaccggaaatcatcacaggcccgatagtcagcgacaaagaagaagtcctccagatacagtcagctgaggattaccgtccacccattttagtcaagtggtgggacgacgatatgcaacctcaaggaattgtgatcaataagcaaaaagaagatgaggaagtatgcctgctgaaaaaggcactcagccaggctacccgcattgtaaacagaatctatctcaggaatgaagcgaaaaccgcgaccctggaaaaattagttcctcatctcggaacccttcaggccaccagagaccagctgcacgaagtcaaagaacttgccagaaaaactgagcatgatctgagggatcggattgtcgagctccaggaatccaactttgaactaagtggctcatcaaaagtgcaagccgccaagatatctcaactggaaaagcagattcagactctggaaaacgacaaggctgaattggcaagacagagggactcggctttgaaagacgttgaagaccgcaaaatcaagtcgcaggctcaatttgatgtcttagtcaacaaaatcaagaggcttgaaggggccagggatgaagtcgctaacgctactaccccactcgtccaagccatgttcttcaataacaatggtccgagtacattcgatgcttccgaaatcttcgacaagctgagagttgctcccgatacatattttaagaatatcaaagaggctagaagtatgggagcaagcctggcgttggcaatgaccaagtctctatacccgaggaccgacattgacgccattgatggctttgcagacgggacgagcgaagaagctgctcttgacctcatcaacgatgcgcagaaagccgccaataagatagcagtttatgtagttgagagattccaggacaacgaccttcagccgactggatctgataactctgataatgaaaaaactgataccgat

SEQ ID NO: 60194 - DNA, 2160 bp, Oryza sativa
  Clone ID: PAT_MRT4530_61746C.1
atggtggtgcatggtgttcttctggtaaaggagatcattgggtggcgtccagcatgcggcgaagcattcccaacccctgacacacacgaggtcgtggtattttctcatttcttctatggcaggttctctcttccaacctcaagattcttccggggaattttggatttctatgggattagcttgcatcacctaaacccgaattccatagtccatattgccaacttcatacatgcctgcgaagcatttttgggcatcaggcctcatttcgccctattccgccatatcttcttcctcaaaccccaaccgaacaagagcaagccatgcatagttgggggagctggatttcaactgagaggaacactaagccaaaaatatttctccatgcccttcaaaacctcaaacaaaggctggcatgcaaattggttctatgtacaaaaccccgagcctgcactccccgagtactcgtgtcttcctccggtttatcaggacacttggaactcacttccaatgggagaggaagctgctcaggcacttgccctgatggaccgtatgctgaagctaaaggagcaaggtctgcagggagaacagatcacccggcattttatcaacagccggctagctccaattaaagagagatcccgtacagcctttgaatttaacggcaagcatgacccgaaccatgaagatccagactctcttgactttaaagtcatgaaggagagaatgtacaaaatcttctcaaacgctaccgcagtcagttattcgcacttgctactagtggtgccatacaacgccttcaatcctcctccaccggaaactagccagccagactctcgcaagaggaaattggtcctgagtgatgatgagggcgatgatgctgaaaaaactggcgacaaagaagcgaccggaaaacaaccaaggcaaactaatctgaagaagaaaacatccagtcgtcccatgtcgaaaatcagaaaatcttccaggaagccatctgacatatatccttctggaaaagactccgagccgactgacatggagacaggcccgtcaaaagaaaccgggctgactgcagaagatcacccgagtgataatcaaccggccaccgacaatgtagaacccagcaacaagcccccgactgggaaccagtcggccgaagctagaactggcgctaatcaggagcccccgactggaaaccagtcgggtacagagccagataaagatatcccagaagtagaagctcaagctaacagccctcccaagacagacaccggtgttgatcctggaattagttctcctgttagggtacaaagacctcctcgtccccgaccggaaatcataacaggcccgatgattggcgacgaagaagagatcctccagatacagtcagctgaagattctcgcccacccattttagtcaagtggtgggatgatgacatgcaaccacagggaattgtgataaataagcaaaaggaagacgaggaagtatgcctactgaaaaaggcactcggccaagccactcgtcttgtaaatagaatccatctcaggaacgaggcgaagactacgactcttgagagactagttccccatcttggaacccttgaggccacccgaaaccagctgcatgaaactaaagagctcgccaggaagactgaacatgatctaagagaccgaatcaccgagcttcaagattccaactttgagctgagtgactgcaagatcaaatcccaagctcaattcgacgtcttagttaacaaaatcaagaagcttgaaggagccagagatgaagtcgccaatgccactacaccacttgtccaagccatgttcttcaataacaatggtccgagtgcatttgatgcttccgaaatcttcgacaagctgagaattgctgcggatacatattttaagaatatcaaggaagctggaagtatgggagcgagcttggcattgacaatgaccaagtccttgtacccgaagattgacattgacgccattgatggctttgcagacgagacaagcgaagaagccgttctcgacctcatcaatgatacgcagaaagctgctgataagatagccgttgatgtagttgagatattccaggacaacgacctccagccgactggatctaatgactctgatgatgaaaaaactgataccgattga

SEQ ID NO: 60195 - DNA, 336 bp, Oryza sativa
  Clone ID: PAT_MRT4530_61747C.1
gtaccagtaatcaaatcaatattcatgtgaaaacacaaacattttccatgcacatggcacttatacgggcagcacactgaacacatcaggcaaggtgatgctatcacctgcctgactagccgtgactttctatattattttcaacgatggaagcaattttgaggcagctgcctgaagctagcttcatcgagtacactggggatatagaccggatcgaatgactgacgatcaggagcttgaagcataagagatgatcatcattgaccgcggaaatacgcgcaccagtggctggacttcttgccaaaccgaatgagcgtggctcgcccgacatatatg

SEQ ID NO: 60196 - DNA, 1205 bp, Oryza sativa
  Clone ID: PAT_MRT4530_61748C.1
ttttttttttttttttttttaacatcaaaaattgaacataggattttgactaatgttgatcaaaatatacaaagttggttttctgaaattaaaaaaatgactgggtaaatcgacggagggagtaactcttcgatgtggtgagttactgagatgaatcaaaggatcttccagaaaaaaaaaaagagccccattaatatcttggccagcaggagctgaagtacatattcaacggatatcctatgcatttaccctataagaatgtacattatttgcagctagaagttgcagaccgtaaaactgtaagtactatacacacttgaaagaactacctaggcctactgcaacgcaaggagcgatgaaatataaatccctaatgagacggccccaactgttgcaactgcttgagttaactccaagaataaatttggcctttgagcaggcagctccttccagtttgtcctccccaagtcagctatgactatactaatgttgtcttgcgaccgacgatccagagctatctgaccaagtgcctcacaggcaacctggacatccccatgttgccgtagttgatccctaactaatgctactgcttcagagcttttaatgtaatcccaaagaccatctgttgctagcaaaacaaattccacatctggtccaagttcgaccagggatacgtcaggtgaagagactattaaatctcctgctgctctgatccgcttcacctcttcaagagacgctttcttgttcccgtacggtcggtggaagttggtcacagcttgaggcctcccaccgcgtgatacgaccaagcaggagtcgccaatgtgcgagacaacaaggacatcgttcctgaggaacatggccgtggccgtggcgccggactcatcttccttgtccatctgctcgagccaggtggagaggttggcgtcgacggtggcgaaggcgcgctggatcgagtcggtgatggcgtcgaggttcttggtgctcagcaccgcgccgccgtccaacgccgccgcgcattccttgtacagctcgtcccggatggcctccagctccgacgacgacgacgccacgctgccggccgccgacgcgtggcaccacgccgccgacccggccctgccgccgctgacgcagcaccggagccccgctccagcggcggaggcggaggcgagcggcagccgcggcacacgcgggctcagcagcgccat

SEQ ID NO: 60197 - DNA, 1518 bp, Oryza sativa
  Clone ID: PAT_MRT4530_61749C.1
atggatttatcaggacgtgacattgctcaacaccgatcaccttgccggcagactggtcaggcgagtggaggaccaaaaattcggtctgatactcaaccaaacacctcgaaatcagccagccagtcagactcccgcaagaggaaattggttctgagtgatcatgagggcgatgatgctggaaaatctggcaataaagaggtgactggaaaacaaccaaggcaaaccaatccgaagaagaaaacatcccgtcatcccatgccgaaaatcaggaaatcttccaggaagccgtctgacatagatccttctggaaaagactccaagccaactgacatggagacgggcccttcaaaagaaaccgggccaactgcagaggatcacccaagtgacaaacaaccggcaaccgacaatgtagaacccagcaacgagcccccgactgggaaccagtcggtcgaagctggaattgaaccaaataaagatattcctgatgtagaagctcaagctgacagccctcctaaaaaggatgccagcgccgatccaaggtccagctctcctgttaaagtacaagggcctgctcgtccccgaccggaaatcattacagaagaagtcctccagatacagtcagctgagcattctcgcccacccattttagtcaagtggtgggatgacgacatgcaacctcagggaattgtgataaacaagcaaaaggaagatgaggaagtatgcctgctgaaaaaggcactcggccaagctactcgcctcgtaaatagaatccatctcaggaacgaggcgaagactacgactcttgagaagttagttcctcatcttggaacccttgaggccactagaaaccagctgcacgaaactaaggagcttgccaggaaaactgagcatgatctgagggaccggatcgccgagcttcaagactccaactttgagatgagcagttcgtcaaaagtgcaagccgccaagatatccgaactggaaaagcagatacaagctctagagaatgacaaggccgagttggcaagacaaagggattcggctctgaaatatgttgaaggtgcggatcgcaagatcaaatctcaggctcaatttgatgtcttggtcaacaaaattaaaaggcttgaggaagctagagatgaagttgccaacgtcgctacactacttgtccaagcgatgttcttcaataacaatggtccgagtacatttgacgcttccgaaatctttgacaagctgagaattgctccggatacatatttcaagaatatcaaggaagctggaagtatgggagcgagcctagcattggcaatgaccaagtctttgtacccgaagattgacattgacgccgttgatggctttgcagacgggacgagcgaagaagccgcccttgacctcatcaacgatgcgcagaaagccgccgataagatagccgttgatgtagttgaaagattccaggacaacgacctccggccgactggatctactaattccgatgatgaaaaaactgatactgattga

SEQ ID NO: 60198 - DNA, 482 bp, Oryza sativa
  unsure (1)..(482): unsure at all n locations
  Clone ID: PAT_MRT4530_6174C.1
atttgatctcaccttgtttcctctttgtttgagcttcccataaatctgtctatgagcggcttgaattgtttatatggccaagtgatctggacatctatgtaattattgacccaaaagacgagtgtttgttttcttctgaaagactgactttatggagttcatatatatcccaatcccatgtcaagatttgattaaactgtttccacgtttctcttgcttagtctaattttgctgattgaaacttttttttgagggactttcaggttgaaacttgacagtctctttggctagcaacagctactggatgttctttttaattgcgaggcaagccacaattctcattaacagaggccataattgtgaactatcttgtcttcattccagtgctctatttcagcatatatgctaatgtgtaagatatgcaggagacgaatggaagtgtttcttaatttgaacttctaaaatgccagcanaactcttgg

SEQ ID NO: 60199 - DNA, 955 bp, Oryza sativa
  Clone ID: PAT_MRT4530_61750C.1
cccacgcgtccgccacgcgtccgcggacgcgtgggttggaatcttttcttgcatatggtgccaacatgaaaatccacttaaatcattgaattctgaggcacaattcgctagttcggatgtttggtttcccatgtaaggaatcttaccaactgagggcacagttaagaaaaatcttgtgcagcaggaacttcagattgctccagtttcatgattcatgggtatataaatttgtgcagctcagagaccaaatgttctgaatctgcatcagtgcgcatacttagaaaaaggacaatatgctcttatctgctcaatcgtatctccaatgattaagttgaagcatgaggtttctcctggtcttgtcaaatgatgagggcaactaccggttgcgcatgtcaaatacaccatatgtgcacttttatgctgtatatactggaaagatcacccttgccgtacgaggattcagcttacaaggtcaacatttgtggctacagccttttcgtttctttggtcacgttgctatgatttgccatgccctgtggcctgcaatgatctacctcttgtggagggcatgctgcctcacatcacatggacatccaatccaatacctgtatgcatggtgcaaaatgcttgccaagaagttgccaggtgcatgcgtgcttgctccgggtgacacaagatgtcacccccccatttttttcccctcttttttagtccttatccatgttgctttcatgtatgtgtaggcctcctttcttcgttgctgtagacctttgcttttgccttttggctatcctttgtgtaatggatcatatacagaattgtgacggcaagaattttggcagcatcgatcaacctgtggactgatctgttctgctgagcattcagccacacatgtccatttttgtttaggcaagagaaatttgttttgggaaaataaaaaaaaaaaaaaaaaaaa

SEQ ID NO: 60200 - DNA, 114 bp, Oryza sativa
  Clone ID: PAT_MRT4530_61751C.1
gggggaatgggattgtcttcctgcagcggctctcactcttggccgcgaccgcgcgagcataaggacgtcacatccctctcatgtctactcacagcgacgtgccaatcacacttc

SEQ ID NO: 60201 - DNA, 651 bp, Oryza sativa
  Clone ID: PAT_MRT4530_61752C.1
tactaatgttgtcttgcgaccgacgatccagagctatctgaccaagtgcctcacaggcaacctggacatccccatgttgccgtagttgatccctaactaatgctactgcttcagagcttttaatgtaatcccaaagaccatctgttgctagcaaaacaaattccacatctggtccaagttcgaccagggatacgtcaggtgaagagactattaaatctcctttaaaatttattcgtgagataaacttttcagtccatctcccttctttaactccttttaccaacatctcattcttccgtgtcttaaatctaatgtctccaaaagcacgagacacagaaatttctccacatatgcgtccatcaacaatccatccacctgctgctctgatccgcttcacctcttcaagagacgctttcttgttcccgtacggtcggtggaagttggtcacagcttgaggcctcccaccgcgtgatacgaccaagcaggagtcgccaatgtgcgagacaacaaggacatcgttcctgaggaacatggccgtggccgtggcgccggactcatcttccttgtccatctgctcgagccaggtggagaggttggcgtcgacggtggcgaaggcgcgctggatcgagtcggtgatggcgtcgaggttct

SEQ ID NO: 60202 - DNA, 537 bp, Oryza sativa
  Clone ID: PAT_MRT4530_61753C.1
cccacgcttttcgttttttcgtgggaaaaatcaaaattcccgagaagaagaagggaaaaaaacacacacacatacagagagaaaatatcatggcgctgctgagcccgcgtgtgccgcggctgccgctcgcctccgcctccgccgctggagcggggctccggtgctgcgtcagcggcggcagggccgggtcggcggcgtggtgccacgcgtcggcggccggcagcgtggcgtcgtcgtcgtcggagctggaggccatccggtgggggaccgccaagctgcagggcgcgcgcgacgagatggaggatcgaggtcgtcctccgccccggctccctcctcgacggcttctccttcgccgccgtcttcgacggccacgccggattctccgccgtcgagttcctcaaggacgagtgtacaaggaatgcgcggcggtgttggacggcggcgcggtgctgagcaccaagaacctagacgccatcacccgactcgatccagcgcgccttttgtcaacgtagaacgccaaacctcttcaccttggct

SEQ ID NO: 60203 - DNA, 232 bp, Oryza sativa
  Clone ID: PAT_MRT4530_61754C.1
cggacgcgtgggtgtcgctaagatcgtaaagatgcaagcgggacgggagttggacgtgcccgccccgcgggtcgcattgccggccaaggtgacatgcgtgctagcagatgacccgccccgcacatttctgcgtgttaccttgtccaacgggatccttgggttgatccagcaagcaaacagtccactaccaagttggcaagttataccactacctgtactaagattatttctg

SEQ ID NO: 60204 - DNA, 2508 bp, Oryza sativa
  Clone ID: PAT_MRT4530_61755C.1
atggagagaagcagcggcgggggcatggaaaaggaggagtcgacggccggggcaggaaggaggagaaggggagggggtgcgggcggcgtctccgccaccaagcgcgccgtcacacttgcctgcagcttgcttgccggcgtcactgttggcttgcagctggcccgctgctgtctgccgcctcccgtgcacgcccgcgcagtgtcacgccatcgccatctactgtgcgtgtcacgacatcggctcggaacacaagtcaacccaaaagatcggaccgaccatgtacccacagagtgtgtggacccggtagtcagagaccgggccacgagcatcgatcctggagaagccacgctatacatctcgccttcagctgcaggtcgaagcgatggagaagcagaatatcgactttggcaaggtcttaatggagattcaggagtcgcttgtctcgctgaatcgggcgcaaggcgagacgcaaccgccgtcaacaagctggaccaaggcgtgaccaactggagaccgcaagtagaagcggcagtgaaggagttgcgtgaggaggtgggtgatatccgccagcaaatggacctgctcggcaaatcgcagtccgcgccgccggcgacgtcttcccctcgagttccgttgacggacgaggaaaggaaggcgccgttgcttcctacgccaccagcttcgcgcgtggctgcggcgggggacagcggagacaagtgggccagtggccgccaacatccacatgaacaccggggaagggcaccaggtgtggttaccaccgtggtcccgacctcggtcaagggtacgttcagttcacctgctccatctttgggaattttggattgggaaaatgattttgattcgggagagcgtaggtttaaccatagagtccctaagttagatttcccaaaatttgatggttcagatccacatgattggagaatgaagtgtgagcattactttgatgtgaataacacttatccagggttgtgggttagagtctctatcatttacttttctgggagggctgcttcgtggctgagatcaactagagctcacttgcggttccctaattgggaggatttttgcgctgcagtatctgataagtttgatagagaccagcatgattcgctaattagacagatggatcaaattaaacagacgggttcggtttgggagtattatgaacgattcgatgaattgatgaatcaattgctagtttatgatcctggggtaaatatgtgttacttgacacatagatttattgatgggttgcgtcgggagattagaaatgctgttttacttcagagacccaagaatctcgagtctgctctggctgttgcttccttgcaggaggaagtgttggaatcatctgactccacaccggtgaaggagggcaagaagtttgagagttctgggcagcacaagactggtggaaattttaagggagcttttcctttaccattgcctcctggtcgtcatttgggggtaattcagagtgcaagagtggatgagaagaaggaaggggaaattaaaagattgtctgcatcttcagagaaagtgtcagctcttaaagcacagcgtcgggcacaaggattatgttacatatgtgctgagaaatggtctcccactcataagtgtgctaacactgtgcaattgcatgcagttcaggagctgttttctgttttgcatgaagcttgtgatgaggcagtttgcaatcctgagaattctgttttatcggacagtcaggtgttgatggcaatctctgtacatgcagttcaaggatctgaagctagtggatgcatgaggatgttgggtcagattcaaggcaaggacgtttttattttggtagattctggtagcactgcaagtttcattagtgctcgagtggcagaagggttatcggaactttctcagattgctactaatttgcaagtgaaggtggctgatggagctactttgcactacctggaaccttcagaagaatttcctcttgcagtacaacaggtgctaaataaatttgcttcagtatttgaggaacctcagggtctgccacctgtgagatcgtttgatcacaccattcctttaatccctggagcaatgcctgtcaacgtgaggccttaccgttatactccatcccagaaagatgagattgagtctcaagtccaagaaatgctgtctaagggattgattcagcccagctcaagtccattctcttcacctgtgctgttggataagaagcacttgacttatcctaaagtaccagtatggatgccacctccagaagattgcgtaaagataaatgtggatgcagcaatatcacgatggggtaacaagggagctgttggggcagtgtgtcatactgtatctggtgaatttgtggcagccagtgctatggtctgggaagggctctctgactcggcaactttggaagcacttggatgcaatgaaggcttggcaatagctatgggctgtaatatgtcagaggaatgtaaatgtggacagtaa

SEQ ID NO: 60205 - DNA, 213 bp, Oryza sativa
  Clone ID: PAT_MRT4530_61756C.1
atggccatggacgacgcgcgagcgagccccaccccaggtgggccggccatgtcagtgtccccgtactggtcaatggaggctggtttcgctgacgggtggggccggaggtccgacgtgtccgggttctgcacgccaggtgtgactgaaaactgggtgggtgtggggccagggcagggcgcgcaggccggagttaactgccctggagcgcagtag

SEQ ID NO: 60206 - DNA, 3830 bp, Oryza sativa
  Clone ID: PAT_MRT4530_61757C.1
ctaactataaagtaaaagtagagtaaatgactcgtctcaggaagaatacagcaaagcaacgttcgaaaaaaaaaagcaatagcaattaaagctactatgttctgctcttggtaagatcatgcaaaatcgatgccaaagaacagcacagctcgagtaatttcagccacaattaaagctttattcagagtgaaagcatgatttagtatgttgggccattgggctgaagagggcttggttggcatgggagtaggcgaggtggctgaggtcaccaagctgcacggacaaggcctgctcggcgccaccaggaagcagctgagcgctgaccagctccgacgtcatccgactgccggccgccaacagctccgctgacacctccgaaatcttctcgaactagggtggtgcggatggggcaacccctttctcctcgctggtccacactggatccaggcatccaaccaccaagcttgcggcggcaagctttggcacctccgagctaggcattgttagatccggtaggagcagttgtcgtctggaagcggcgacgtgcttaagctccaccgagatgtggagggaggcgtgccgaggtggcgcggatggagagaagcagcggcgggggcatggaacacgaggagtcgacggccggggcaggaaggaggagaaggggagggggtgcgggcggcgtctccgccaccaagcgcgccgtcacctcctccgggacgaggccgctgccgccgccggggggtggaggtggacgccccgtgcgcgtcctcgtctacgacgcgttcctcctctgggcgcgcgctgtggcggtggcgttcacgttcttcacgcagtcgtgcgccgtcaacgtggtgtacggccacgcgtggtgcggccgtgtacacgtccccgtggaggccggcgccatcgcgctgatcggcttgccggcgctggagctggagggcttgccgtggttcattaaggtcggccccggcccgtacccggcgtacttcgacttggtgatgaagcagttcgacaggctggagctcgccgacgacgtgctcgtcaattcattctacgagttcgaacccgagctgagctacttgcttgccggcgtcactgttggcttgcagctggcccgctgctgtctgccgcctcccgtgcacgcccgcgcagtgtcacgccatcgccatctactgtgcgtgtcacgacatcggctcggaacacaagtcaacccaaaagatcggaccgaccatgtacccacagagtgtgtggacccggtagtcagagaccgggccacgagcatcgatcctggagaagccacgctatacatctcgccttcagctgcaggtcgaagcgatggagaagcagaatatcgactttggcaaggtcttaatggagattcaggagtcgcttgtctcgctgaatcgggcgcaaggccgagacgcaaccgccgtcaacaagctggaccaaggcgtgaccaactggagaccgcaagtagaagcggcagtgaaggagttgcgtgaggaggtgggtgatatccgccagcaaatggacctgctcggcaaatcgcagtccgcgccgccggcgacgtcttcccctcgagttccgttgacggacgaggaaaggaaggcgccgttgcttcctacgccaccagcttcgcgcgtggctgcggcgggggacagcggagacaagtgggccagtggccgccaacatccacatgaacaccggggaagggcaccaggtgtggttaccaccgtggtcccgacctcggtcaagggtacgttcagttcacctgctccatctttgggaattttggattgggaaaatgattttgattcgggagagcgtaggtttaaccatagagtccctaagttagatttcccaaaatttgatggttcagatccacatgattggagaatgaagtgtgagcattactttgatgtgaataacacttatccagggttgtgggttagagtctctatcatttacttttctgggagggctgcttcgtggctgagatcaactagagctcacttgcggttccctaattgggaggatttttgcgctgcagtatctgataagtttgatagagaccagcatgattcgctaattagacagatggatcaaattaaacagacgggttcggtttgggagtattatgaacgattcgatgaattgatgaatcaattgctagtttatgatcctggggtaaatatgtgttacttgacacatagatttattgatgggttgcgtcgggagattagaaatgctgttttacttcagagacccaagaatctcgagtctgctctggctgttgcttccttgcaggaggaagtgttggaatcatctgactccacaccggtgaaggagggcaagaagtttgagagttctgggcagcacaagactggtggaaattttaagggagcttttcctttaccattgcctcctggtcgtcatttgggggtaattcagagtgcaagagtggatgagaagaaggaaggggaaattaaaagattgtctgcatcttcagagaaagtgtcagctcttaaagcacagcgtcgggcacaaggattatgttacatatgtgctgagaaatggtctcccactcataagtgtgctaacactgtgcaattgcatgcagttcaggagctgttttctgttttgcatgaagcttgtgatgaggcagtttgcaatcctgagaattctgttttatcggacagtcaggtgttgatggcaatctctgtacatgcagttcaaggatctgaagctagtggatgcatgaggatgttgggtcagattcaaggcaaggacgtttttattttggtagattctggtagcactgcaagtttcattagtgctcgagtggcagaagggttatcggaactttctcagattgctactaatttgcaagtgaaggtggctgatggagctactttgcactacctggaaccttcagaagaatttcctcttgcagtacaacaggtgctaaataaatttgcttcagtatttgaggaacctcagggtctgccacctgtgagatcgtttgatcacaccattcctttaatccctggagcaatgcctgtcaacgtgaggccttaccgttatactccatcccagaaagatgagattgagtctcaagtccaagaaatgctgtctaagggattgattcagcccagctcaagtccattctcttcacctgtgctgttggataagaagcacttgacttatcctaaagtaccagtatggatgccacctccagaagattgcgtaaagataaatgtggatgcagcaatatcacgatggggtaacaagggagctgttggggcagtgtgccatgctgtatctggtgaatttgtggcagccagtgctatggtctgggaagggctctctgactcggcaactttggaagcacttggatgcaatgaaggcttggcaatagctatgggcgggtgtacggctgtgccatgcggaggtggaccctcgacgaagccgccgccaccgccgcgcatcgtcttgtccatccccaaggtgctctttcctccctccaattcctcaaatatccacgaactcgctgaagaattagtatactcgtgacacgcagtcgagccatttgtcgccgcccgccagctgctcgctattgtcacccagcgcagttttggccctcaccgcccccccccggccgaagggggaagaacccattagaaagggagagaaaaaaaaaaagaaaagagggaggaggaaaaagggatttatgtgggccccccatgtcagtgggcccccaattttttttttgaatgacaaatgggccccgcaaaaatatttttaattttaatgccccttaagcgccc

SEQ ID NO: 60207 - DNA, 1281 bp, Oryza sativa
  Clone ID: PAT_MRT4530_61758C.1
ataacaaggtggtcctcatttactataacatcagcagcagcagtgataacctcgcacatataaaacctatgaaatttcatcaccaattcaaatttgcatggtaaacacgaattccattatatacctgttctactccgtacaactaatttatatatatatacttgccctactccataccaaatttagtaattgcatgctcttagggcatataatttgtacctctatctgtccatgttcaaatgtcattactgaagatataaccaattgctaaaggggagctcttatggtataatagataatgttttttttgttttgaaatgaggcattcatgagctgcaaagaatgtgaagaaattggttcacaaaggcggcacgaaggtggtggtgcccaggcgcggttccaatccggtggtggtggatggtggcaccggcattgtcggcaaagactggaacccaggcctggcggcaggcttgttacggatcggcgggcggcgtggtcgtgctcgatggggatcagcggtggcgtggccgcggaagacgtgcgggcgacggtcgatgggatcggcgacgagggaggcggcgtcgcgagggaggggatcggtggcggcgcgcgatggaggatcggcgtgaggcgtggtcgtgctcgacggggatcgacggtggcgtggccgcggaagacgtgcgggtgacggtcgatggggattggcggcgagggaggcggcggcgcgaggccggggatggagggcggcgggtagggaatcgcgaggggaggagggcgataggaatcggtggcgctgcggagcaaattgaggggcggcgcggggcgtggagatcggcggcgagattgaggcgcgtgacgggagttacgggagaaagagagaataaagggaagaagttacgggagaaagagagagggggaggggaggccaatctgcgcgcgagggagagccggagagatcagaaagatcgcttctcttggaaaaacaataaagaaggcattttcacagtaaaatctatgtacaagttgctcatgtatgaagggctggttcctaggaagaatttcatttggaagctcaaaattccacttaaaatcaaaattttcttgtggtacctcaaggaaggggtcattttcatggaaacacattgggcaaggacttggtctttgcttcttaagggaaccgatgaagaaatagttaagaactattgcaaagtgctggagaagcgtgtggtgaaattcttctccgtgtatggctggaaccttagaagaagatgggaagcctag

SEQ ID NO: 60208 - DNA, 351 bp, Oryza sativa
  Clone ID: PAT_MRT4530_61759C.1
atggcgtgcctcgcgctgtggcagctgtggcgcgccgcgccggccgtgtgcctcgacgccgcgatggcgtacgagttctacaagctcagcgtcatggcgtcggatctccggcgacggggcttctcccccgacctgctcatccggcttaagttcgtaatcactatcattatgctcatcaaggacttccacaaaaagattattccccttgattatatcaggctggcaattttcttcatgtatttatcttcagtctggtgggaaatgaaaggtttgaagaaatatgcaaaatattgtatccctctgatcttcaagggcttcgactttgagacctcagaagaatatacggcgtga

SEQ ID NO: 60209 - DNA, 2439 bp, Oryza sativa
  Clone ID: PAT_MRT4530_6175C.1
ttttttttttttggatcgcaacaaactatgttaacatacagtgtgtaacatcgaataaacacaaaggaaacctcttaggcagtgaaatacaacaattaaatagcgtctggtatcggaacgatgtcacatatgaaaaaggtggcaatgtttacatacatcatttcaggcactatactgtcaaggcccttttagtggctctgcaacacgttacacgttacacttcgaacgagggcaaaccatcctcttaaaatggagagtaatggtatggtaaactcatgctacacattccaatcggggcgataattttacaatttggctgaaatgccttattgtgcttcttcagacacctcacacaaatttcaactacagccaatttaattcaagtatagcctccattttagctgtctcagtagtcatgctgcaaatcagaaaccacgcgctgattgaggaactcaaaaacatggctaaacagtcggggcctcctcattggtacccaactttttcgtcaccatatcataaacgttatctactttggcagggtcaaccttaaataatacatgggcatcttccttcttggcgacactacccttgaatatttcctgcatcaaaacctcctgcattttcaggtaatggttgggtagcaatctgttctgacagcatagatttttttcactggtgcttaatagctctgccccaggaaaaccaacaatatcccagtcatcccaatgtttagtgcctgcatgccctgtggtttttggagaatccctgccagtagaatccaagctggcaccacctttcttctgatccaaattaccatctgactcgattttcataggtcgattcgtcttatgcaccactttagtgttggataagagctgaccactttccttagctttttgggcattcacctcatgttcctttttcctcttttgctctatgtgaatctttgcttcagccaatgtacggcatccagcagaacgacattcctgaagctcttgaatcctccttcgaattttccgttcctcaagaacactcctaacaagtgcttcatgttcctccttagaaaggaaacgcatgaacaccttatagcgatggtaaacttccttgtcttcatttgtgagatccttctccaaaggattaggaaatagtaagtttctttccagtatgaactcttttctcctttttctttcatcaagccttgacaagtaaatacgcaatacccttagcttcagttcacgatcagtttccgaatcagtttctttaaactccatctcagcgagtgcctgttcagcatcgttatcatactctgggtcaaattcatgtctctttgaattgtatccactcagttcagtcaaagaaggcccttcatctgcagaatatcggggttttttcacacctatacttctatccacatgaccatcttcaacttttgctacattagcaccatctttgaattgtccaacatttgatgctttcttatttgcacccccagctatgtgtgaaggtgatcgaccagctaaaccttctccaagtgcatcttccaccttgacccttgggggagaaaatggagactcgtccttaggggtcaaatcccctggtaacactgaagttccggctcttgaaagggtgaaagggagctcgacctcgccggttctcgcaagggtgacggggagggggagatcgagctcaccgctgatgccgatcttatgagttcatgtatgcagttgtataatgatcgatgcattgtgccttggtcttggtgccaacatgctccgcaacttcagcccaatttcccagaccatacatttcaattccctctagaagaaggatttcctcgtctgcattccaatctggacaaataagagggaaagacaggttgtccatgaccctgtaaggatggttgctgcggtgcggggtgacctcggcgccgaccgagaagcactcgacgcagaggtcgaagtcggggcacttggagcacttgatccggatcttcccggaaatatccttattgcagtagttgcagtggtacagcgccttcttcccaccaccctctccggctcccccgcaggccgccgagagcgagtccggcgcatcgccgctcgacgcgaccctcctccgcttcgacctgtggttcgtatcatcgtcgccggaattgggcaccccgcgagaccggcccatcgcgggcgcgcccccaaaccctagcgcaaaccctagaaaccctaagctcgcgcgcacgccgccacggcctccgccgccgccgccgccgcctccactcgcatcgggcgggatcgaatcgaatcgaggggatcgatcggggcgaggcgagggcggatttggattggggaatttggagagagatctgcggctgctgggcacgcgtgttggaattggggccggggtgtcgcggacgagacgaccatcgcagatcgcgacacggag

SEQ ID NO: 60210 - DNA, 144 bp, Oryza sativa
  Clone ID: PAT_MRT4530_61760C.1
atgcatcctcctgcaagtacctactccggtggtggcgacaccactgacaaagacataacccaaagctcggcgtcgacgatccttgtgccaagttttggcgctaggttagggccaatggtgacccttggcatggagctagcatag

SEQ ID NO: 60211 - DNA, 274 bp, Oryza sativa
  Clone ID: PAT_MRT4530_61761C.1
gagccgtccgatcagatcgtcgccccggcaccgcaccgcgcggcacgcccacgcacgcacgctccgcccaaaaatcctacgctctcatcctccctatatcacggcgcccccctaaatcgcacgccgcctcctgttcattttcccctcttcccccgctccgctctcgtctccgctctgctctggtctgctctgctgcgagggtgggtgttgcttgtaccgggcggggatggaggcggcgacgatggcgtggacggcggcgggggtggggatgccg

SEQ ID NO: 60212 - DNA, 404 bp, Oryza sativa
  unsure (1)..(404): unsure at all n locations
  Clone ID: PAT_MRT4530_61762C.1
gatttccncccgatggactcncccaanggcaatccttgccnccncccncccccaaagcaacnccgccgaaanccagcgaaangancctccnaacccaanaaagacccgccgctgccaaaacccaanaangcccccccccgctngcnccangcgcaaggcgccggganaaaaaagtngtcgccaagnccnanaaatctcccgcngntaaatgcgaatgccanncccaagaccgtccggtcgccggccgcnaanaaaaccccccaggcacctgcagcttgaanttgggaatttggttgataactatntacgtcccctcntggtngaaatggttggtgtntnngatctgtncaaangctgcctcggcnntgtctccctattnanatanttctcttggagtcngccaa

SEQ ID NO: 60213 - DNA, 707 bp, Oryza sativa
  Clone ID: PAT_MRT4530_61763C.1
atggcgtctgggttgaatggaaggccggatggctttcttcgctcctcagcctggctcactcgatgcaaggtggatgcaagcgttgcatcagtgggtgcacgcgcgtggcaggggtctggcgtccgctcacctcctccctctcattttcatcttcccattctcaactgctctcctcttccctctctcccttgccgccgccgcctccaccaaatcccctacggtcaccaccactcgttcggcgtcttctccgatggtggactggcggccgacctcgagctccctcggccgaccccggtggagaagctgcagccgctattacatcccttgccatctccatcgccggcttcctcgccattgccggcgccgcctctcttttctgtcgccacaatcgccttctccgaccgccaggccaccagatccggcgaccatggtggcgttgagcagctaggagcagctgggagcgccggtgaagcaagtcaacgatgagattgaggggatttttttttgttttctcttttctattttcaattgagagaagagcggaggagcgcgcgtggcaaatccgtatgagaggccagcgaccgaggagcgtggtactggccggccggcggcagaggagccgggaacggctggcaacgatgagtttctagctatgtttgccacatgtatatcacatatagtgtcatgggaggaatccatcgctgctc

SEQ ID NO: 60214 - DNA, 1017 bp, Oryza sativa
  Clone ID: PAT_MRT4530_61764C.1
atggaggcagaggacgagtactcggccgggtgctccttctccctcatgtgccaggaggatagcaccgacctcgacgacgacggcggcggcggtggctgcttcgccggcgacggccgcgccgacctgctcctggtttacaatgccgccgccgccgccgacgacgaggatgaggaggaggtggaggagtacatggaccatctcgtgtccaaggagagcagcttctgctcctcttcttcttctacgtcgtcgtcgtcgtgctgcttctccgacgccggcggcgagtcggcggcggcggcggcgccgatggactggttcgcactcgcgcggcgcgccaccgtgaagtggatcctcgagaggtcggtgatgccgtgggcggcgcggctgctggcggtggcgtgcgtgtcgctggcggcgaagatggaggagtaccgggcgccggcgctgtcggagttccgcgccggcgtcggcgacgacggctacgagttcagctgcgtctgcatccgccgcatggagctgctcgtgctctccacgctcgactggcgcatggccgccgtcacgccgttcgactacctcccctgcctctcctccaggctccggcgacacgtcggcggcggcggcggcgcgggcgcgtccgccgccctcatcttctccgccgccgaagcggcgagcgtgctcgaccaccggccgtccacggtggccgccgccgcggtgctcgcggcgacacacggcgcgctgacgagggaggcattggagtccaagatgagcggcctctccccatctttcctcctcgacaaggaggacgtgttcgcgtgctacagcgcgatgctgagccagccaacttcaccggcgagcaagtcgacgacgacgacgaccggcaagagatcgtcgtcgtcgtcgtgctccgagtccaccgacgccgcgagttcatacgacgccaccgccgcctccttcccggcggcggcgagctgtggcagcaagaggatgaggctggagctgccgggaggcatcctccgatga

SEQ ID NO: 60215 - DNA, 1198 bp, Oryza sativa
  Clone ID: PAT_MRT4530_61765C.1
atggcggaggagagagaaagcttcgagagccaatgggcgccctccgacatcacggaggaaagcttgaaggaaatggtagcacatggtgttcttccggcgaaggagatcattggatggcgtccggcgttcggcgaagcattcccgacccctgacacaaatgaagtcatggtattttctcatttcttctatggcggattttctcttccaacctcaagattcttccgggggatattagagttttatgggattagtttgcatcacctaaacccgaattccatagttcatatcgccaacttcatacatgcctgcgatgcttttttgggcgtcagaccacattttgcactatttcgccgcatcttcttcctcaaaccccaaccgaacaagaacaagccatgcgtagtagggggggctggatttcaactaaggggaactctgagccaaaagtatttctccatgcccttcaaaacctcaaacaaaggctggcatgaaaattggttctatgtacaaaaccccgagcctgcactccccgagtactcctgtcttcctccagtttatcaggacacttggaactcacttccaatgggagaggaagccgctcaggcacttgccctgatggaccgtatgctgaaactaaaggagcaaggtctgcaaggagaacagatcacccggcattttatcaagagccagctagccccaatcaaagaaagatctcgcacgacctttgaattcgacggcaagcatgaccccaaccgtgaagatcctgaatctcttgaattcaaggttatgaaggagagaatgtataagatcttctcaaatgcaatcgtagtaagctattcgcacttgctgccagtggtgccatacagtgccttcaaccaccctccaccggaattcgccttgatgaagtcagaccctccaactgctcaacgccgctcaccccgtcggcaaactggtcaagctggcagaggaccaaaaatctggtctgactctcaacccagcaccactcaattggccaaccaatcagacttccgcaagaggaaattagttctgagcgatgatgaaaatgatgactctgaaaaagctggcagcaaggggatgactggaaaaccagcaaggcaagctaacccgaagaagaaaacatcccgttgtcccatgtcgaaaatcaagaagtcctccaggtacaacttgtcccaggaggcaa

SEQ ID NO: 60216 - DNA, 345 bp, Oryza sativa
  Clone ID: PAT_MRT4530_61766C.1
atggcgctcgggcacagcatggccggcccggccatggcgcgcggcggctcggcgcggccaccggcggcgagcggcggcgcacgacgcggcgacgggtgtgacggcggcggcgcgatagagtgcacggggaagggaggcgaaaaggggaaattcggcgaccacgtgcactttctcatcggcagcgttgtctatggagtcggcaaccacgaccacttcctcaccggcctcatcgtgcatggagtccgagactacgagctatttcttgctcgcctcgttcatggtgtctctggccatcgactcctcatcgtgagcctcacaggcctcataaggggccacaagccataa

SEQ ID NO: 60217 - DNA, 393 bp, Oryza sativa
  Clone ID: PAT_MRT4530_61767C.1
atggaggaagctaaggagtgcacctttgtgtcggcttataccatctgcacggtgggcaatggagttatggagcatccattttgttctaggaggacaactggctcggagggtccgctcttcgtttctccgcaccgtccctatacgcctgtgttccggcgcgcatcaagcgcaggagaatggtcgctgaagctctccttggtcgcaggtggatcagagacatcacgggagccctcggggacaaaagtcatgaaggatcgtcatcggggcttcgacaccattgcggctttgatagcttggacgatttggaaagagagaaacgaccgggtgttcaaccttcaacagcggccatgggcggagatagcaagagctatggctgcggaggcggagctatag

SEQ ID NO: 60218 - DNA, 939 bp, Oryza sativa
  Clone ID: PAT_MRT4530_61768C.1
atgtacatgacagatctattccctgatgttataccccagacaacagagtcctcccctccacatcaaagcaataatggtagggacattgaatatgccccaggactaattccaaatggaggtggaccatcccctcctgtcattggctatgatgcccccaagaccttaactcttcttcaaggactcatcagagaaccagccgatacagagaaaaccaaacttgatcagctatctgagggcccgatcaagtccaatattgatcggctcgaagctcgcaagattgagctcttggcacaacttgaagaatgcaacgacgagctagtcgtcgccatcgctcgggaagaccgccatcgtggtcgccaagtcgtcgccgtcctcgtccgccgcttcaccatcgccgaagaccgccggagaaccgtcgccgccgtagacccgatctatgccgccgcttcttcctcgtcgccggcgctgtccgttgttcctccgccgcttctttggtcaccgcatgattcattgcggagcaccagactgagaagtggcggagataagcccacgggggtcactggggagtccatgcctctggtttttgaggggatgattatgatccaggaatggaaagcttctttcttgtccgacaaggacttgtatcaacccatgggtataaatatgtacacccgggtctacatcggcgtcgttcaaggctgcatcagtacattcgacctcttggattgctctggcaaaagaaaaatcgttggagtagaggacaagactgacgaggattacaatcagttggatgggcaaccccctttcacggtgacgattgaccctagcatcctcctatcaaatgaagacaccccttactcacgtagcgatcacaaggaaggaacaatagtgaggagaaagtacgtgcggtcaaccgtcaccgccgatgtattgccataa

SEQ ID NO: 60219 - DNA, 2370 bp, Oryza sativa
  Clone ID: PAT_MRT4530_61769C.1
atggcggaagagagagaaagctttgagagccagtgggcgccctccgatgttatggaggagaacctgaaggagatggtggcgcacggcgttattccggcgaaagaaatcatcgggtggcgtccagcattcggcgaagcatttccaacccccgacacacatgaggtcgtagtattctctcatttcttctatggcgggttttcccttccgacctcaagcttcttccgaggaattttggatttctatgggatcagtttgcaccacctaaaccccaattccatagtccacatcaccaattttatccacgcttgcgaagctttcctagggattaggccatatttcgctctattccgtcgcatcttcttcctcaagccccagccaaacaaaagcaaaccatgtgtagttgggggagccggatttcaactgagggggaccttgagccaaaaatacttctccatgccattcaagacctcgaacaaaggttggcacgcaaactggttctatgtgcaaaaccctgagccagcacttctcggatactcctgtcttcccccaatatatcgcgacacctggaactcaatgcctatgggagaagaggccgcccaagcactcaacttgttggatcgcatgctaaagctaaaagaacaggatccagactctcttgattttaaggttatgaaggagagaatgtacaaaatcttctcgaatgccatcgtggtcagctattcacacttactgccagttgtgccatacaatgccttcaacccccctccaccgttgactgaaaacttggaataccatgcccaggagtttgctttgatgaagtccgatactccaattgctcaacgccgctcacctcgccggcacacctgccaagccagtggagggccgaagattcagtcggatgtccaacccaacgcttcaagaacaactaaccagccagattctcgtaagagggaatcggtgctgaccgacgatgagggccatgacgccaaaaaacccagcaaccaaaaggaaggagccgagagacagccaaagcaagctaacttaaggaagaaaacatccagtcgtccaacactaaaaataaggaagtcagccagatccttctggaaaagaacccacgctgactggctcggagactggtccttcagcggaaactgggcagctgccgaagactgcccagataataatcaaccggcgaccggcaatgtagataccagcaatgagcccctgactggaaaccagtcggcggaagctgaagccggcgctgatgaggaacctccgactagaaaccagtcgggtgcagaacataatgaagatattcctaaagtagaagctcaagctgacagccctcctaaaaaggatgcaagcgtcgatccagggaccagctctcctgttaaagtacaagggcccgctcatccccgaccggaaataatcataggcccaatgatcggcgatgaagaagaagtcctccggatacagtcagctgagaattctcgcccacccattttagtcaagtggtggaatcacgacatgcaacctcaaggaatcgtgataaacaagcaaaaagaagatgaggaagtatgcttgctgaaaaaggcactcagccaggctacttgcatcgtgaatagaatccatctcaggaacgaggcgaagaccgcgactcttgagaagttagttcctcatcttggaacccttgaagccaccagaaaccagctgcacgaggcaaaggagcttgccaggaaaactgagtatgatctgagggatcggatcgccgagcttcaagaatccagctttgaactgagcggttcgtcaaaagtgcaagccgccaagatatctgaactagaaaagcagatccaaactctggagaacgacaaggctgaattggcgagacagaggaactcggctctgaaagatgttgaagatcgcaaaatcaagtctcaggctcaattcgatatcttggtcaataaaatcaaaaggcttgaaggggctagggatgaagtcgccaacactgctaccccactcgtccaagccatgttcttcaataataatggtccgagtacatttgatgcctccgaaatcttcgacaagctgaggatcgctccggacacatactttaagaatatcaaggacgctggaaatatgggagcaagcctggcgttggcaatgtccaagcctttatacccgaagattgacattgacgccattgatggatttgcagacgggacgagcgaagaagccgcccttgacctcatcaacgatgcgcagaaagcagccgataagatagccgttgatgtagttgagagattccaggacaacgacctccggccgactggatctaataattccgatgatgagaaaactgatactgattga

SEQ ID NO: 60220 - DNA, 1503 bp, Oryza sativa
  Clone ID: PAT_MRT4530_6176C.1
atggcggaaacaagcagtgcacggtcgccattgctggacgtcgatgagtcttcgggtgcgtcggaggagctgctgcgccgggagcccgtgccgcggagcgttctgtcgcggctggcggcatgggaggccggcaacctgtggcgcatctcgtgggcgtccatcctcatcacgctcctcagcttcactctcagcctcgtcacccagatgttcgtcggccacctcggtgagctcgagctcgccggcgcctccatcaccaacattggcattcagggcctagcctatggcatcatgattggcatggcgagcgcggtgcagacggtgtgcggccaggcgtacggcgccaggaagttcagggccatgggcattgtgtgccagagggcgctggtgctccagttcgcgacagccatcgtcatcgcattcctttactggtacgccggcccgttcctgcggctcattgggcaggccgcggatgtggcggcagcggggcagctgtacgcgcgcggcctggtgcctcagctgctcgcgttcgcgctcttctgcccgatgcagaggttcctgcaggcccagaacatcgtcaaccccgttgcctacatcaccatggccgtgctgatcttccacatcctcatatcgtggctgaccgtgttcgtgctcggctttggcctcctcggcgcggcactgacgctgagcttctcttggtgggtgctcgtggcattgacatgggggctcatggtctggactccggcttgtaaggagacgtggactggattgtccgtgctcgcgttcagaggcctctggggatatgccaagcttgccttcgcgtcagccgtcatgctagcgttggagatttggtatgtgcaaggatttgtgcttcttactggcttcctccccgacccagagattgcacttgattcgctctctatctgcatcaattactggaattgggacttccagatcatgcttggtttaagctatgcggccagtattcgtgtcggtaatgagcttggagctggccatccaaatgtggcaaggttctcggtcttcgtggttatcacagcaagcgttgccttcagcatcctggctacaattctagtcctagttctcaggtatcccctgagcacgctctacacaagcagcaccaccgtgatcgaggctgtcatcaaactgacaccgttgctgtccatcagcatcttcttgaatggaattcagccaatcctctcaggagtggccgttggtagtggatggcaggtggtggttgcctatgtcaatgttggtgcctactacctgattgggctgccaattggatgcgtccttggatacaaaacaagcctgggggcagctgggatctggtggggcttgatcataggagtatctgtgcaaacggtagctctgatcatcatcactgccaggaccaactgggacaatgaggtgatgaaggcgattcagcgactgcggcaaaccgccgtggatgatggcacggttcccatcgtcgacgacatcgagtga

SEQ ID NO: 60221 - DNA, 1899 bp, Oryza sativa
  Clone ID: PAT_MRT4530_61770C.1
atggctgccgccacctatttctggtccaacaccatcaacgccttcttgttcaaccaagggccaatgactccaactttgatcaacattaccatgatcatcggtttagatgtaacttcatcggctaatcctatgagtatgaacaccaagaatcaattcgatttcaggacaaaaagcataggtggttggtctggctatgtggcagcatatatgggccaaggatctgttactcctcgagaacatgtggcctttttactcatgtggctagaaaagtttcttttctgtggatccagttgcagccctacgaacaactggcaatttgtagccgaagccctagaatcaaagagacaatttcctttgggcagaatccttctcggctatctataccaaatgctgaatgatgcatcagccaagatagctgttggctcagtagttggagcaggtggaccatggtggctattgcagacttggctaaatctgatggttatgaaagttatcaatcgaccatctgtgacagaagctgaatttctaagatgcatgacatatgaagaatatgcatccacaccagctgatgctggtgcaaaactatcggctgaactactcaaggattggttctgcagcttttatgaaggctttcaaaaagatgcccgagtctggtttccttatgaatattcagcagacctcaaactaccatcagacttcagatttgaagacatcaaccatgaaagataccaaaaagtccgagaagttttcacagctgcaatcagcccatgcatcttacccgtcggcattcaccaagggagaaacatacaagattcaagagcagaaactttgacagatggtgggggtgaatggaagctgcatctatttcatcaaacggcctcgatatacatgacagatctattccttgatgtcataccccagacaacagaatcttcccctccacatcaaagcaatagtggtataaatattcaatatgccccaggtttaattcctaatggaggtggaccatcccctcctgtcattggctataatgcccccaagacctcaactcttcttcaaggattcatcagagaaccagccgatacaggtaagaagagaagaacgaggttatcggccgcagatacattaactctagccccaaagaagaaggccaaactcaagaaacctaaaccaaccgatgatctgcctgtcctggatccatctattgagcaagctctggatgaagaagacattgaggataatgttgatcaggctgcagccgaaaagaagaaaattgttgtaaagaagaaatcggcagcaccaattttcaaaccagctccaccagttttagccgatctcttctcttttgacattagagattatcttaacgaagaaacagaagaagacaccaccagcaaatctttggttctcttgcccgatgacgtgaagaaaacactcgaagacatatctcatcggctggaagcatcgtcactagacaacttggtgctggagaaggccaagctaagactagccgaacgtcgggagcgcaaggacattgaagccacaatccaagccaatcgacagcttgttcatgaagagaagaccaaacttgatcagctatctaagggtccgattaagtccaatattgatcggctcgaagctcgcaagattgagctcttggcacaacttgaagaatgcaatgccgagctggatatggaacatagaaagttggccgatctcccaaagtctatcgaagagcagaaagtgagactcaaatcggctatcaagaatgttgccgatctgaccaagtctttgaaaatcatccgtggaaccgatgctcaagacgcccaagccattgaagaagtagaacaaattaggcaaagggccatttcggctatccaacaattcttgtctcgatga

SEQ ID NO: 60222 - DNA, 1794 bp, Oryza sativa
  Clone ID: PAT_MRT4530_61771C.1
atggcggaggagagagaaagctttgagagccaatggacgccctccgacgtcacggaggagagcttgaaggaaatggtagcacatggtgttcttccggtgaaggagatcattggatggcgtccggcgtacggcgaagcatttccgaccccggacacacacgaggacacttggaactcacttccaatgggagaggaagccgctcaggcgcttgccctgatggaccgtatgctgaaactaaaagagcaaggtctgcaaggggtacagatcacccgacattttatcaagagcctgctggccccaatcaaagaaagatctcgcacagcttttgaattcaacggcaagcatgaccctaaccgcgaagatcctgaatctcttgaattcaaagttatgaaggagagaatgtataaaatcttctcaaatgcaatcgtagtcagctattcacacttgctgccagtggtgctgtacaacgctttcaatccccctccaccggaattcaccttgatgaaatcagaccctccaactgctcaacgccgatcaccccatcggcaaactggtcaagctggcggaggacctaaaatccggtctgattctcaacccagcaccactcaatcggccaaccaatcagacttccgcaagaggaaattggttatgagcgacgatgaaaatgatgactctgaaaaagctggcagcaaggggccatctgacatagatccttctggaaaagaccctgagccgactaacatggagacgggcccttcaaaagaaaccgggttgaccgccgaagatcgcccgagtgataatcaaccagcaaccgacaacgtagagaccaacgatgagcccccgactggaaatcagtcagccgaagctggagttggtgctaatcaggagcccccgattggaaatcagtcgggcacagggcaaaataatgacatcccggaggtagagacccaggctgatagccctcccaagacgagcgctggcaccaactctggaactaattcccctgctagggtgcaaggtcctgctcgtcctcgaccggaaatcataacagaggacgaggaagtatgtctgctgaaaaagacactcggccaagctactcgcctcgtaaatagaatccatctcaggaatgaggcgaagactgcaactcttgaaaaattagttccccatcttggaacccttgaggccaccagaaaacagctgcacgaagctaaagagctcgccaggaagactaagcatgatctgagagaccggatcgccgagctccaagattccaactttgagctgagcagttcgtcaaaagtgcaagctgccaagatatccgagctggaaaagcgcatccaagctctggagaaagacaaggccgaattggcaaaacaaagggactcggctctgaaagatgtcgaagaccgcaagatcaaatcccaggccaaattcgacgtcttagttaataaaattaagaagcttgaaggagccagagatgaagtcaccaatgccgctacgccactcgtccaggcaatgtttttcaataacaacgatccgagttcacttgatgctatcgagatcttcgacaagctgagagctgctctagatacatattttaagaacatcaaagaagctgggagtatgggagcaggcctagcgctggcgatgaccatgtacttgtacccgaagattgatattgatgctgttgacggctttgctgacgggacaagtgacgaggccgcccttgaccttattagtgatgcgcaaaaggccactgacaagatagccgctgatgtggttgagagattctag

SEQ ID NO: 60223 - DNA, 809 bp, Oryza sativa
  unsure (1)..(809): unsure at all n locations
  Clone ID: PAT_MRT4530_61772C.1
accaccggcatcgtcctcgactccggcgacggcgtcagccacaccgtccccatctacgagggctacgccctcccccacgccatcctccgcctcgacctcgccggccgcgacctcaccgactacctcatgaagatcctcaccgagcgcggctactccttcaccaccaccgccgagcgcgagatcgtccgcgacgtcaaggagaagctctcctacatcgccctcgacttcgaccaggagatggccaccgccgccacggggtcgtccgtcgagaagagctacgagctgcccgacggccaggtcatcaccatcggcgccgagaggttccgctgccccgaggtgctgttccagccctccttcgtggggatggaggctgcggggatccacgagaccacctacaactccatcatgaagtgcgacgtcgacatccgcaaggacctctacggcaacatcgtcctcagcggtggcaccaccatgttccccggcatcgccgacaggatgagcaaggagatcaccgccctcgctcccagcagcatgaagatcaaggtcgtcgcgccgcccgagaggaagtactccgtctggatcggaggctccatcctcgcatcactcagcaccttccagcagatgtggattgccaaggctgagtacgacgagtccggcccctncatcgttaccgaagtgcttctatttcttttttacctattatttataantaatccttaattaanaaacaaacataaactaactaagcaccacataaatananatatatatatatatatatatatatatatatatatatatatatatat

SEQ ID NO: 60224 - DNA, 345 bp, Oryza sativa
  Clone ID: PAT_MRT4530_61773C.1
atgggagaggaagcagcccaggcacttgtcctgatggatcgcatgctgaagctgaaagagcaaggtctgcaaggagaacagatcacccggcattttatcaagagccggctagctctaattaaagagagatcccgtacagcctttgaatttgacggcaagcatgacccaaaccgtgaagatccataccctcttgattttaaggtcataaaggagagaatgtacaaaatcttctcaaacgctatcgtggtcagttattcgcatttgctgccagtggtgccatataacgccttcaatcctcctccaccggaatttgctttgatgaagtcggatcctccaaccgcttaa

SEQ ID NO: 60225 - DNA, 356 bp, Oryza sativa
  Clone ID: PAT_MRT4530_61774C.1
gcacgaggctcctacctgccgttctttcccccctctctctttctctttctctctcgcggggcgctgcgtgtttgcgcttatcttcgccgccgcctcgccacggcctccttctcagctcgcccaatctctctctcgcccgccgcataaatatagcccttgcctctcctcccctctctcgcctcgcgagcgagcggacgaacggacgagcgagcggggagcgcggcgagccggaggcgggggggctgtgcgcctcggtgtctcttctcccctcctccccaacctccccttttctccgccctcctctcgattcccgcggttcagggactttgctgatcttaaatcttattcctgactga

SEQ ID NO: 60226 - DNA, 1386 bp, Oryza sativa
  unsure (1)..(1386): unsure at all n locations
  Clone ID: PAT_MRT4530_61775C.1
tcatctctcacgagcggctcggaaggcgacggccactccttcgaccaaaaccctcacatcacccctccagccaatcccgatagtggagccggcagtgacgccgcctccctctttttcctttcttttcttcctcctttctctttcctttttcttcccattttcccctttgcatccagatctgtgtgtgaggatactgttgagcacgcggctagcttcgtggaggttgttgattgcaatgtcaacagcttggcggcagaggttctccagtgagataagcttcggtggctcggtggaggtgaggttcaattttgcctccctctgtatcacccaaaaccgaatcgtactcgcctggttaagctgtgtctgtaatatctggttatcttccaataaccggtcatattcaagcaggagctcctcagattgcttctgtagggcattgacatgtgcttcggcctccaatctctgcctttcatgctcctccgattctgattttagcttcttcatcttttcactaaggctggctaattccgcacgaagcttcttgacttccttggatttatcttccttgccttggagctcaatttgtagtttctcaacctcctccctggaggtgtttgcggttttcttcagtatagtcagcttccggtggtagtggtgtaaccgatcaatgacaaatgcaaggaatagtatgtacccctggaacatcaagtaaaccatcaaattcacttgtatcaaatcaaatggcctacaaatatgtgcagcagggttaaaggatccttctacccagacagttattctggtttcctggtccatggggctgacggtgccgagcttgatgccgcggttctggatccggaggatgctggcgacgctggacatgaagatgacgagcagcgtgcacgccagcgtcttcaccgccgcggggcctttaccgtccttggcctgctccacgccgcgcatcgccagctcccgcagcggcccgatcttcaccatcagcagcagcgccgccgcgccctccgcgaacagcaccaggaacagcagctgaatcatcctcggccacgcccaccggcgctcaagaaatcttggcctcctccaaaatgttgtgctccagaaggagggggattccttccaagaatctcccttgcaccggattggtcacttcgccgcgattcttggcggctacaagatatcgatcccgcgagcaatctgggcgttcgggaccgtgccttttttttggcctttgctgctccccacgagatgattaggcgcgccgcacgcgaagaacacgaatcacgcgaatctgtgggggttgcgncgcatggggattggggagaggaggagggcgaagagagagctcgggtggggaagcaacgaagctcgctcagc

SEQ ID NO: 60227 - DNA, 687 bp, Oryza sativa
  Clone ID: PAT_MRT4530_61776C.1
atggtagaggagagagaaagcttcgagagccaatgggcgccctccgacgtcacggtggaaagcttgaaggaaatggtagcacatggtgttcttccagcgaaggagatcattggatggcgttcggcgtacgacgaagcattcccgaccccggacacacacgaggtcatggtgttctcctatttcttttacggtgggttctctcttccaacctcaagattcttccggtggattttggatttctatgggattagtttgcatcacctaaacccgaattccatagttcatattgccaacttcatacatgcctgcgaagcttttatgggcgtcaggccacattttgccctattctgctatatcttcttcctcaaaccccaaccgaacaagagcaagccatgcgtagttgggggtgctggatttcaactgaggggaactctgagccaaaagtatttgtccatgcccttcaaaacttcaaacaaaggctggcatgcaaattggttctatgtacaaaaccccgagcctgcactccccgagtactcctgtcttcctccagtttatcaggacacttggaactcacttctaatgggaaaggaagccgctcaggcgcttgccctgatggactgtatgctgaaactaaaggagcaaggtctgcaaggagaacagatcacccggcactttatcaagagctga

SEQ ID NO: 60228 - DNA, 1788 bp, Oryza sativa
  Clone ID: PAT_MRT4530_61777C.1
atggcggaggagagagaaagcttcgagagccaatgggcacccttcgatgtaacagaggaaaacttgaaggaaatggtggtgcacggcgttcttccagcgaaggaaatcattgggtggcgcccagcattcggcgaagcgttcccgacccctgacacgcatgaagtcatggtattctctcatttcttctatggcggattttcccttccaacctcaagattcttccggggaattctgaatttctatgggattagcctgcatcacttaaacccgaactccatagttcacattgccaactttattcacgcctgcgaggcttttttgggcatcaggccgcattttgccttgttccgccgcatcttcttcctcaagccccaaccgaacaagagtagaccatgtgttgttgggggggctggtttccaacttacgggaactttgggccaaaaatacttttccatgcccttcaaaacttcgaacaaaggctgtcatgcaaattggttctatgtacaaaaccctgagcatgcactccccgagtacttctgtctccctccagtttatcaggacacttggaactcactgccgattggagatgaagccgctcaggcgctagacctgatggaccgtatgataaagctaaaggagcaaggtctacaaggagaacagatcacccggcattttatcaagagctggctagctccaattaaagagagatctcgtacagccttcgaatttgacggcaagcatgatccaaaccgtgaagatccagattctcttgattttaaggtcatgaaggagagaatgtacaagatcttctcaaatgctatcgtagtcagctattcgcacttgctgcttgtggtgtcctacaacgccttcaatcctcctccactgcaaaccggtcaggggagtggagaaccaaaaatctggtctgatgctcaaccaaacacctctaaaccagctggccagtcagattcccgcaagagaaaattggttctgagtgatgatgaaggcgatgatgctggaaaatctgggaataaagaggcgaccagtaaacaaccgaagcaagccaatccgaagaagaaaacatctagtcgtcccatgccaaaaatcaggaagtcttccagtcggccgaagctggagtcggagttaaccaggagcccccgactggaagagattcctgaagttgaagctcaagcgaacagccctcttggaaaggatgccagcaatgacccaggatctagatctcctgtaaaagcacaagagcctactcgtccccgaccggaaatcatcacaggcccgatggtcagcaacgaagaagaagtcctccggatacaatcagctgaggattcccttccacccattttagtcaagtggtgggacgacgatatgcaacctcaaggaattgtgatcaataagcaaaaagaagatgaggaagtatgcctgctgaaaaaggcactcaaccaggctacccacattgtaaacgaatccaactttgaactgagtgtctcgtcaaaagaccgcaaaatcaagtcgcaggctcaattcgatgtcttagtcagcaaaatcaaaaggcttgaaggggccagggataaagtcgccaacactgctaccccactcgtccaagccatgttcttcaataacaatggtccaagtacattcgatgcttccgaaatcttcgacaagctgagagttgctccggatacatattttaagaatatcaaggaggctggaaatatgagagcgagcctggcattagcgatgaccaagtctctataccccgaagatcgatattga

SEQ ID NO: 60229 - DNA, 600 bp, Oryza sativa
  Clone ID: PAT_MRT4530_61778C.1
agaatccatttcaggaacgaggcgaagactgcgactcttgagaggttagttccccatcttggaacccttgaggccaccagaaaccagctgcacgaagctaaggagcttgcaaggaaaactgagcatgatctgagggatcggatcgccgagcttcaagactccaacttcgaactgagcggttcgtcaaaagtgcaagctgccaagatatccgagctggaaaagtggatccaagctctggagaatgacaagaccgaattggcaagacaaagggattcggctctaaaagatgttgaagattgcaagattaaatctaaggctcaatttgatgtcttggtcaataaaatcaagaggcttgaagggctagggatgaagtcgccaacgctgctaccccactcgtccaagccatgttcttcaataacaatgctgagaattgctccggatacatactttaagaatatcaaggaagctggaagtatgggagcaagcctggcattggcaatgaccaagtctttatacccgaagattgacattgacgccattgatggctttgtagacgggacgagcgaagaggccgcccttgacctcatcaacgatgcgtag

SEQ ID NO: 60230 - DNA, 2253 bp, Oryza sativa
  Clone ID: PAT_MRT4530_61779C.1
atggcggaagagagagaaagcttcgagagtcaatgggcgccctctgatgtaacagaggaaaacctgaaggagatggtggcgcacggcgttcttccggcgaaggagatcattgggcggcgtgcggcgtgcggcgaagcatttccaacccctgatacccatgaagtcgtggtattttctcatttcttctatggcggattttctcttccaacctcaagattattccagggaattttggatttctacgggattagtttacataacctaaacccaaactccatagttcatattgccaacttcatacacgcctgtgaagcttttttaggcatcaggccaaatttcgccctattccatcgtatcttcttcctcaaaccccagccgaacaaaagcaagccatgcgtagttgggggagctagattccaactgagaggaactctgagccaaaagtatttctccatgccctgtaaaacttcaaacaaaggctggcatgcaaattggttttatgtacaaaacctcgagccggcactccccgagtactcctgtcttcctccagtttatcaggacacttggaattcactaccaatgggagaggaagccgcccaagagctcgccctgatggatcgtatgctgaagctaaaggagcaaggtctgcaaggagaacaaatcacccgacatttcatcaagagccggttggccccaatcaaagaaagatctcgcacagcctttgaattcgacggcaaacatgaccctaaccgtgaagatcctgaatcccttgaattcaaggttatgaaggagagaatgtataaaatcttctcaaatgcaattgtagtcagctattcgcacttgctgccagtggtgccatacaatgccttcaatccccctcaaccggaattcgccttgatgaaatcagaccctccaattgcccaacgccgatcaccttgccggcagactggtcaggcaagtggtggaccaaaaattcggtctgatactcaatcaaacatctcaaaatcagccatccagttggactcgcgcaagaggaaattggttctgagtaatgatgaaggcgatgatgctggaaaatctggcaataaagagccatctgatatagatccttccggaaaagactcggagccgactaacgtggagacaggtccttcaaaagaaaccgggccaactgcagaggattgttcaagtgacaaacaaccggcaaccgacaatgtagaagctagcaacgaacccccgactgggaaccagtcggcccaagctggagccgatgctaatcaagagcccccgactggaaaccagtcgggtacagagccaagcccaataatcagcgacgaagaggagatcctccagatacaatcagctgaggattctcgcccgcccattttagtcaagtggtgggacgatgacatgcaacctcagggaattataataaacaagcaaaaggaagacgaagaagtatgcctgctaaaaaaggcactcggccaagccactcgcatcgtaaatagaatccatctcaagaacgaagcgaagactgcaactcttgagaggttggttccccatctcaaaacccttgaagccactaggaatcagctgcacgaagccaaggagcttgccagaaaaactgagcatgatctacgggaccgaatcgctgagcttcaagactccaactttgagatgagcggttcgtcaaaagtgcaagtggctaagatatctgaattagaaaaacggatccaagctctggagaatgacaaggccgaattggcgagacaaagggactcggctctgaaagacgtcgaagatcgcaaaatcaagtctcaagctcaattcgatgtcttggtcaacaaaatcaagaggcttgaagggtctagggatgaagtcgccaacactgctaccctactcgtccaaaccatgttctttaataacaatggtccgagtacatttgatgcttccgaaatcttcgacaagctgagagttgctccggatacatactttacgaatatcaaagaggctgggagtatgggggcaagcctggcgttggcaatgaccaagtctttatacccgaagatcgacattgacgccattaatggctttgcagacgggacgagcgaagaagccgcccttgacctcatcaacgatgcgcagaaaaccgccgataagatagcagttgatgtagttgagagattccaggacaacgaccttcggccgactggatctgataattccgatgaggaaaaaactgacaccgagtga

SEQ ID NO: 60231 - DNA, 1875 bp, Oryza sativa
  Clone ID: PAT_MRT4530_6177C.1
ctagtcgccgctccctcgcctggccgcgaacgcagtggcgcccagccggctcgacgccgtcgctggcccgccgagtgcgccgcacgccgtcgtttcgtgagtcaccgccgacctcacccgcgatttgccgccgccgcccgcccgcgagtcgccgacctcgccatcagccgttgcccgcccgccaccgtgatggagtccggcgcgcgcgacgccatggagtcgcatttcggcgttggcagcggcagcccttcatgccatctggacggtgagcctgtagtcgtcgttgattctacctctgttgaggctgctgccttggatcatgtcatcatcaccgtcgacgccggagttggagcccaccttgaacatccaagcacaccacaaccaaaatcttctgtgagtatagcagtctcttgtacaagtgacacatgcaacacacattggaaagaacatttgaagcctatggttggaatgatctttgatacactcacagatgtggagaaattttacaaatcatatgcacataaagctggtttctctgttcgtgttgcacatattgttgtcaagcttggcagtgacaagaagtatagaatatcttcaatggttgaggagcacaaccatggttttgtgtcgctagataagaggcatttgctaagatccaaccgtaatgttagtgagagggcaaagagtactttgttcagttgtcataaggctagcattggcacctcacaggcatatcgacttctccatgttagtgagggtgggtttgagaatgttgggtgcacgaagagggatttgcaaaactattaccgtgaccttagaaccaaaatcaaggatgcagatgcacaaatttttgtggcacaacttgagcgaaagaaggaagtaaatcctgccttcttttatgactttatggtggatgaacaaggacgacttgttcgtgtattttgggcagatgctttatgcaggaaaaactatagtgtttttggtgatgtggtttcagtagattcaacatataccactaaccagtataacatgatttttgtgccatttactggagtcaatcatcacttgcaaagtgttttccttggggcagcattcttagcaaatgaaaagatcgagtcatatgtatggttgtttaagacctttcttaaggctatgcgtggagtagcacctcatctaatcatcacagatgaagatatgagcatgaaggctgctattgctcagattctaccagatacagctcatagactttgcatgtggcatataatggaaaaggtacctgagaaggtcgggcccaccttgaacaaggatgaaaagttttgggatagactaaacaagtgtgtttggggcttcgagaattcagatgattttgagtcgcaatggaactctatcataacagattttggactcatgggaaatgattggttttccacaagggaactattatttgatgatgaaggaaacctactagatgaaaagcctaaagatcctatggaggtggcaatgcagaaaaagatttcagtttcacgcaacaagtttgaagatcttatccaaatggccaagaattctgaacaagggatggactttttacattctagtttgtccaacctagtagaacctctccaaaagatcacgcctgctacgagagttaataaacaggatgagtatgaatctttccttggtagtaaaattccaaatgaaatcaatatacatccaccaaatgatatcaaatcgaaagggagatgcaaaagaattaggaagagcaaggagaagaaggctggaagtggaagtaagggtacaagtaaacggaagtgtcgaaagtgtaagcaagtagtggatcatgatgcacgcaattgcccaaacaatgttgttggctga

SEQ ID NO: 60232 - DNA, 2139 bp, Oryza sativa
  Clone ID: PAT_MRT4530_61780C.1
atggtgatggttggattggagcgcagcaacccagtaacagttctccgattcttgttgcttgctgccgacggggacgaggctggcaggttcagattgaacagcagcggcaagcagcgcgggacggcagcatcgtcggcggcgcccaagacaccatcctcacagagcacggaggatgaggagttgatggggagcgcaacggggagagcgaggaggccgccgtcctcatccatgggagttggtggagaggcgacggagaccggcggcatagggggcggccctcctgctcccacgtcgtcgtcgtcgccgccgccgccgccgccgcatcgcccgtcgccgcatcacacaccccacttctttgatcgatcgatcgatcgatctgcgcctcttcttctccaagatgtcgacggcggctgcaccgtcagcttcggctccgcggcgatcgacacgacggtcaccagcgacgccgcggcggccgacgagtgggtgcgccgcgtccgcgcctcggccgccaccaccccgcgcggcggcgggggcctcctcgtcggcctcgactgcgagtggaagccctgcgaccacctctggccggcggtggcgcccacggtggccatcctccagctctgcgccggcgacagctgcctcatcctgcagctgctccacgtcgccggcgcccgccgggtcccgcccctcgtcggggacctcctcgccgacccgtccgtccgcctcgtcggcatcggcatcggcgagaacgccgccaagctggccgacggctacggcgtgcggtgcgcggcgccggtggacctggaggacgtctgcgaccgccgcctcgggcgcctccccggcgcgaggaggctggggctcaagggatacgtgagggaggtgctggggctgaccatggagaagcccatggacgtgaccaggagcgactgggagaggcgccacctcgacgccgctcagtggggacggcggctggctagcgcggcggcgagggcggcacgaaggagcggcgccgcggtcgggacgaggcggtgtcggtggcagtggggacgacagctggctagtgcggcagcagggacggcacgaacaacggcggtggggagcagcggcggctatggcggtggggagcggcggcgatggggagcggcggtggtggggacgaggcaaaggggagtggagcggcggcgatggtgcaagcacgagcacgagcacggcggtggaccggtggtggcgcaaacacgagctcctccccgaaggacgtcgtactcctcctccgctctcctccgccgcgcatcctcccgcaaatcacctcttccgtcttctcctcctccaaccgccgccgccgccgccgccgctccccaccgccgccgctccacaccgcctcgtccccaccgccgctccccaccgccacagccaccgccgctccccgacctccgtcgccgccactccccgacctccgcctcgaccccgcagcaatcaccgccgctcgccaccgccaccgccgccaccactcccctccgcctcgtccccaccgtcacagccgccggcccgccgccgctcccgagaacgccggtctccgtcccgcgagctgcggtggtgccgccgtctctgtccctgctgctgctgctgcttccgccgccggcgaaaactccatggaatgatcttatagctatgaaggatgatcaccacattccttgctgctcgtcacgctctcaagatttcgccgtgaaaagcggagaagataggacgtccgatggcgagatgaaggttgggcttttggataagtcgatgggggagaaggagaagaagaagcggtcgaaaaagccaccacgaccgccgcgaccaccttctgcttcaccattagatgctgctgaccagaagctcattagtgaactatctgagctcgcaagtttaaaaagggcaaggattgaacggatgaaggctttgaagaagatgaagaacaccaaaccagcttcctcaattggcaacctggtagctttgattattaccattatcttctgcctcgtcatactttggcaaggccgatcacatggcagcctgttctccatccagttctacaagaagaatgagacggctaccagccctcggagttcttcttcagctccaaagtgcgacagcctttga

SEQ ID NO: 60233 - DNA, 285 bp, Oryza sativa
  unsure (1)..(285): unsure at all n locations
  Clone ID: PAT_MRT4530_61781C.1
ttgaagaaatgtttacgtgtacctacggagaagcagatcctgatcgtatagagcttcaagaagatttaacttatgttgagaagcccgtcagaattttggaagtaagcgagaggaataccaggaatcgcgttatacgttctgcnngggnnnatggagcaatcattcaaagaagaagccacttgggagcgagaagatgaattgaagtcagctcatcctcatctgttcgccagttcttctgaatctcgaggacgagattccgtttaaggggggtaggtttgtcacgcc

SEQ ID NO: 60234 - DNA, 891 bp, Oryza sativa
  Clone ID: PAT_MRT4530_61782C.1
atgctaatatctcctatgctcgccgcgccgccccctcctgcagccgctgcaagcccgcgctgccgcggcttcctcccggcagctgcggcgacggggagtcgacgccaccggggagggtgccgcttgcttcgccgctccgcacctcccagggtcggcgccgtcacgagcaccgtacgaacgcggcgtgaagagggccgcctcgaccgtgacgagctccggaggctgtgccaggagcctaacccggaggcagccgttaacctgctcgacgaaatgctcgtgcgaggcggcgctggcgcattggccgacctcgcgccggaggagcaagccgcggttctccaggcctgcggagaggcgcggtcgctggcgtcgctcaggcgagcgcaccgattgctgtccaagtccctgcccgggatcgccacgcccatcctgcacatgatctccacgctgtactgcaagctcggcgcccgcggcgacgcgcggcgagcactcgagggagcgtcgaggccgcgggggaaggatcatgagcaggagcaggagcacggcgacgaggcgaagaggcgggaggcgtacgagaaggtgcgggagctgcacgaggagatacgcgcggcggggtacgtgccggacacccgctacgtgctgcacgacatcgacgaggacgccaaggcccgcgcgctcatgtaccacagcgagcgcctcgccatcgcgttcgggctggtcagcacgccaccgggcaccccgctccgcgtcatcaagaacctccgcatctgcggtgactgccacaatgccgtcaagctcatcgccaaggtcaccggccgcgagattgtcgtcagggacaacaagcgcttccaccatttcaaggacggcgcctgctcctgcggcgattactggtga

SEQ ID NO: 60235 - DNA, 217 bp, Oryza sativa
  Clone ID: PAT_MRT4530_61783C.1
ggtgctagggcgctacggacgacgagaggcgaaggcgagggtggcggcgggtagaggaggacctgggggtgcttttaaaggggttgaaaggcggcggcgaaggcccacggcggctggcgacggcgatggaaaggccgaagccgccatggatggccgttcccgcccacgtcccgccgagtccggcgccctcccgctcgcaccctcgctctcaaaccaa

SEQ ID NO: 60236 - DNA, 616 bp, Oryza sativa
  Clone ID: PAT_MRT4530_61784C.1
atggaattagtatttattcgtcacggatttagtgaatggaatgcgaaaaacttatttactggttggcgcgatgtgaatctaaccgaacgaggcgttgaagaagcaaaagccgcaggccaaaaactcttagctgcgggatatgaatttgatatcgcattcacttccgtactgactcgtgcaatcaaaacgtgtaatattgtattagaagaatctaatcaattatggattccacaggtgaaacattggcgtttaaatgagcgtcattatggtgaattacaaggcttagataaaaaagccacggcagaaaaatatggcgatgaacaagtacatatttggcgccgttcttatgataccctaccaccactattagcaccatcagatccaaattcagcccataatgatcgccgttatgcgcacctacccaaagaagttgtgccaaatggcgagaatttaaaagtcactttagaacgtgttctgccattttgggaagatcaaattgccccggcattattatctggcaaacgcgttttagtaacggcccacggtaattcattacgcgcacttgccaaacatattatcgggatttctgatgctgaaattatggactttgagattc

SEQ ID NO: 60237 - DNA, 1611 bp, Oryza sativa
  Clone ID: PAT_MRT4530_61785C.1
atggctggaggtaatacccataggaagaagtcttgtgcttgttgcaaagaatacctggagcatctgggtggaaaaatgagatgtttcctcaggcgaatggctgctgattctatgcacagcatgatcatgccagatagatttgtcagccattttggaggaaagatcccaggaaccataaaattggaatctcctaatggtattttgtatgttgttgaagtcactgagtgcatgaataagacactcctacaatgcggttgggaggcatttgttgatgctcataacataaaagagggtgaatctttgttattccgacacatcgagaattcccgttatgaggttctgattctagattctgatgactgtgagaaagtattctcctgtgctggcataagaaacggttcttgtgttcaagacaaaactgtagatcctgttgatagttcaggtagctctagtaatgataccacgcaatcatcacggagtagaaacactgaaaatttgacagcaatgtgctcttcatctgagaaatcaggagaagacagtccttctggatatgaatttcatgagtcagttgaacctcagacaccttcagggtctgattacgtgctatcacgcaggacttatttatctgaagcacaaaaggagagagtggtcacgcatatccaggatattcaacctgaaattactgtgtttgtggctgttatgaagaagtgcaatcttcagtctccagctccttatctggttatttctagccgctatgcttctgtacactttccacgtgaaaccgcaactatcacgcttcagaggccaagcaagagaaagaagtggtatcccaggttctacaagagaatagacaagagtgatcacatgcttaggggacagtggcaaaactttgtccatgacaattgtctgcaggaagaagacatctgcctcttcgtaccaacaaaaggaggaagaaacttcgcgtttactgtccatttgctccaagcagaagtgactcattccagggatgggactgatgttcacaagattggctcaagtcaaaacaaaagaaattcaaagatggcttcacaagtccatattaaggaggcaccagggggggacgtttcctctgagagcaacaagcatggagtttcacacgaatcactggagagtgaagactctgacggtccttctgaacctccctacatctcatcaatgagacgccggttatctcaattgcagaagaagacagttgaggagaaagtgcgagccatccaatctgaaattcccatttgtgtagcaaccataagcaaacttgctggcagtggtggcaaggggaaattccgcggactagagctaagttcgcgatatgctgcctcatatcttccggataaaaatcatcaaactttggtgctccaatgcaaggggatgatctggcaaatcaatttggtggtgcgtcgtagatatacaaagggaaagaggtggttccttactgcaggttggcgcaaatttgctcacgacaaccgccttcgtgtcggggacttctgtctgttcgaactgaagaagaagaagaagctcaccatggaggtccatatcatttccaatctgcagcgttaccctgaagtagagtag

SEQ ID NO: 60238 - DNA, 481 bp, Oryza sativa
  Clone ID: PAT_MRT4530_61786C.1
gctccaaactggtgcgcacctacacccgcgcacacaacacagacacggacgtacactttgcacctctctcaccgcacgtagtcgccatggtcgctgtcaccgtgatgaggaagtcccggaacttcgtcgggccgtctcctccgacgccgccggccgagatcacgacgacgctcgagctgtcgtccatcgaccgcgtgcccgggctgtgccacaacgtgcggtccctgcacgtgttccgccgccacaagaacagcgggcccgtcgtcgacggtgatagcaggaggccggccgccgtgatccgcgcggcgctcgcccgggcgctggcggactaccccggcgttcgtcggccgattcgtcggctccctgctggccggcgacgcctgcgttgcgtgcacccgctagggcgcgtggttcgtggaggcatccgcggactgcagcctttactacgtgaacggcctttagtacccgcttctgatcttcg

SEQ ID NO: 60239 - DNA, 237 bp, Oryza sativa
  Clone ID: PAT_MRT4530_61787C.1
atgacgcggctggagatttcagctgctgtttgttttcgttttctgaagcctgagagcaccagtgatgtttacatccacactcatccttgcactatgaggcttgtttcagcagctggaaccgggtttttctatgtgaagcgcaagaatcctcgtcggatcacagagaagcttgaatttaggaagtatgatccacgagttaacaagcatgttctctttacagaagcaaagatgaagtga

SEQ ID NO: 60240 - DNA, 237 bp, Oryza sativa
  Clone ID: PAT_MRT4530_61788C.1
atggcgagtcaggtcccatccaagtcagtccggaccggcggagcaatggcgggaggcgacgcgccgcagcataagccaatcgagtgcccgaaatgccacggggtgttcaacacccggcgcgagttcgtgaatcataagtgctccaacactcgtctattcatgctcgcccaggccaagaaggccgctaagaaagcagtcctgaagcagatccgcaacaagggcaacaagtttaactaa

SEQ ID NO: 60241 - DNA, 1152 bp, Oryza sativa
  Clone ID: PAT_MRT4530_61789C.1
atgtcgtctaagcggaagcggcaggacagagatgagtacgacagatgcggtggcgtcaagacggcgccggcgccggagaagaggaggaagcacctctatctgatgctggatgaccgtgacaatgcgtaccgcatgcacaagatcgatgtggacgccttggccgattccgaggaggacgacatgctgctcctccctgagccagcactcctccagttcggaacggatcgtcacagcggcatgtgcttcttcgccttgggcagcagcatcttcgccacccgacctccccacacgcccgcgctcgtctacgacacggacaccggtggcctcaccgtcggccctcccctccccaacaagctctgcggcgggccgaacatcaccatggccatggccgacaacaagaccatgtacgccttgtacgactacgacaccaactacttgaacccgcaccccatggaggccatgtcgtgggaagcggtgccatgcaccgagcgccatcttccgcgagtcaaggaatggacatggaaatccgtgccgtcgcagccgccgtacggcaggttggacgagatcgtgtcgtacgccgtgcacccggaccaacgcaccttttttgtctccgtcaaggaggccttctgcagcagaagcgatggtggcaacaaggggaccttctccttcgacaccaagcactgcgagtggaggtggcacggcgactggatgctgccattcgagaggcaaggctactacgacgccgagctggacgcgtgggtgggtctccgcctcaccgatggccgcgtctgcgcctgcagagtcgcctcccgcagcagcagcgccccgccggagtggaagctgctccaggagaagctgttttgcaaggatccacaggagaggcagctgatggcgttgtcaggaataaggcccagccttgcgtacatgcagggcagcggcaggttctgcctcctcgagtgcgtgctgcgagagggagtcgactggaagcacgccttcggcgacgatgcccatggctgcctgctccgcctcaccatattcggcctcaagtacgaccaccagggggaactgcacacttccatccaccgcaccaatgcctcctacattgtctccaagcataactcctccttttctcctgtagcattctggatgtag

SEQ ID NO: 60242 - DNA, 466 bp, Oryza sativa
  Clone ID: PAT_MRT4530_6178C.1
tattcctttattcttccctcgcatcccttcctccgccgcagcgccggcgtcccgtagattggaaatccatccggacttggggatcgatttcgttccctccggttaacccatccggtttcttctcgattttcttgatatctatggagttggtagggactttcatagagggcgaagtatacggggcagtgtgaagttccctgttcgttcagccattcatacttacatttctcaagtcttcaacaagatttcacagctgtgtgacctgtattgtgtatttaggtttacaatgatgagtgcgaaattgctccggagcatgagcgtgaggaggctcctaggacagcaaagaaactcagttggtgggcacttagttttagcctttctaatgtttggtgtaaggtgctcatcttgtgtatataagtataactgagagtttggtgtctgttgcttttagagttttacagaaaat

SEQ ID NO: 60243 - DNA, 991 bp, Oryza sativa
  Clone ID: PAT_MRT4530_61790C.1
cggacgcggcggttggcatcgtgcgagcctcaaacccgcgaacccccaaaccctagtttccccaaccgcggcggcggcggcgatggctgcggtgaccaacgccgatgtggaggcggtcgacttcgaccccgatgacgacgacctcatggacgaggacgccgccgaccccacgccggcgcccgccccgcgcctccgctccaccatcgcgggcggcggcggcggcggcggcggcggcgacgacgggcaacgcaagaccaagggccgcgggttccgcgacgacgccgcgccccgcgactcccgcttagccggcgccgggcgcgcctccgacttcgactccctcggctccgacggtggccctggccccgtccgatccattgaaggatggattgtgctagtcactggggttcatgaagaagctcaggaagatgatcttcacaatattttccgggactttgggcaggtcaagaacttgcatttgaatttggatcgccgaactggattcgtgaagggatatgctcttattgagtatgaaactttcgaggaagctcaggctgcaataaaagcattggatggaactgagcttctaacacaaatcataagtgttgattgggcatttagtaatggccctgtcaagcgcaggaatattcggaagagatcaccaagacgctccagatccccaccgaggagaagatactgagtgctccccaccatgtgatgatggtgctttagaatgcaagaattgcttgtaggattccggttgtttgcttggcctcctaccgtagtttgattatcaatattagctcgtctgctattttcagtcgatggctgtgatagttctgtggcattgtaactcttttcagtatatggatggagctgtgtttactgttccaagtttggcacgctagttgccgtggattgtaaccgctgatgttggatctttgtgatgagatgcttgttgcttggggtgtttacaaaaaaaaaaaaaacagct

SEQ ID NO: 60244 - DNA, 790 bp, Oryza sativa
  Clone ID: PAT_MRT4530_61791C.1
ccagcgtgctcctcctctcctccacacacaatccgatcggtacgccgcgggctcgttgtttgctgatggccggcaagaacgggagcctctacgcggtgctcggcgtcgccagcgactgctccgacgccgacctgcgcaccgcctaccgcaagctcgccatgaaatggcacccggacaagtgcggcgccgccgggagctcagccggcggcggtgcagaggcggccaaggtgaggttccagaagatccagggagcctacgccgtgctctccgatcccaacaagaggatcctctatgacgtcggagcctacgacagcgacggcgatgatgatggcgccggtgaaattctcggcgacattctcgaggccatgaacaaaaccggccctacggagaatggcaagaacgagagcttcgaagacctgcagaggcagttcgaggagctgttcctccggccgccggcgccggcgccgccgacgtcgtcgtcgttccggtcggcgtgctcaagacgaccgtcatttgtgctaataattaagctgattgatcaagaagaaaacgattcagataatgatatgacgcactgatgatctagggcagtaacctgtaatctcaataacacctttggcagacgtcattcggtttgcatgtatgcaggtggctattaatttgcctagctagaaattggccaatttaaagtttggccacacgtcaattcttatatgaatatgtgcaatattgtcaaatctgggtacttctccctgatgaattaaatgaagaaaaatgagggctaatgatc

SEQ ID NO: 60245 - DNA, 141 bp, Oryza sativa
  Clone ID: PAT_MRT4530_61792C.1
ggattgcttcctataataatagaacgcagcttagtatggtgctatgttgaagatatacaaataggtaatgtgccatatattgggactctgcagtcagcgcatattgccatgttaatggcccttgctcttaacacatatgta

SEQ ID NO: 60246 - DNA, 3684 bp, Oryza sativa
  Clone ID: PAT_MRT4530_61793C.1
atggagatggagaccggcgagacggcgcagaacgagacgggacggacgggtgttgagggttccatggacgtcttaaacacccttcaagttacgtttcacttcaatagagattttgtggtgtctggtagggagaagcactatgttggtggaaggaaagatcttaattctgagttaagggcactattggatgacgacagtatgtgccaatacatgaatgattgtattgtggatggaggggtggctgaggtgtatgcagatgcaccaatcctagttgatctatcatatgaggatgaaggaagtgactatgagttggagatggaagaggacatgggagatgaatcagatgggaatggggtagaacaagttgacatggaaagtgataatgcagaaatggagcaagttggcatggaaggtgataatgcagaagtgcagcaagtaggcatggaaggtgacaatgcagaggctgaggctgaacaagttcatgttagtgagagaagtatagtggtatacacacaggatcttgagccattggcaactcaaacacctgatttaacagaggaagctgagccaatgccaatgtctcaagccctcctggaagtagtgtccagagtaggaataggaaggcaccttcatctgctaccactggcaccaatggagcaccttcaaattgtaaagatcaatgcaaaagcaaaagtggcaacacagcaggttcaggagcctgcaaagaagggaaacaagtctcagcatagccttggaaataattttaaccaattaaaactacttcgcgaagcttgctccagctgcggccccgcacccgacccgtcacatgacttcggtgccggttcgcccggttacacctcaagtacagtatccgaagcccactcgcacgccacaagcaatgatggaggcagcttcggccttgaaagcccagtttcaagcctttctgcagcagcaggagccgcgccacctccgacggcggcgccatctctcccaccttcggcaccgactacttcgacagaccaagagggggcgaaggcagcggccgcggtggaaacgctccagatcagggacgtaatcctttcgtctcaaatattgggggcgtctcaagctgccgcctcttcgcaacaagctacaacttcgacaacaatcaccatctcgcaagccaacgccaaacttgaagctcaagccgaagctgacatgggggctatgcgtcagaacatgaccaagttgcaagatacgcttcgccagatgcaagagcagcagcaagcatacgaagcggagaggcaagccaaggcctatgcccagcagtttttgaccgtcttcacccagccccaagcttttcctctgcatgctgcacaagtcgtacaagctccgacgtacttcgccaagcctgctccagctgtggccccgtgcccgacccctgacatgattttggcgccggttcgcacggttgcacctcaagtacagtacccgaagcccactcacatgccaaaagcaatgatggaggcagctttggccttgcaagcccagtttcaagcctttctgcagcagctaaatcaacccaacaacttaccaagaatttcaccttcgacccaagccgagggaactccaagtcagggtgctctagctgggcaactgctgggccagtacggcatttcaagccaagcgaaccagctggctcaaggggtttcgcctcgaagccaattaccgcaattcgaccccagtgccacgattcaagcacctatgaccttcatgcaagctacgcccctcgggttcggaacagctccactgccgaaccaagcctggacccaagccatgatcgacccaaccgtggcggcacaagccgtttcgacggatcagcaagcccaggcgttggtgtttggcacggggcaccaatcaacgcccagggcccaacctcattaccctcccatcccaaggtatttgggagaaacggacccaaaagagttcctttccatctatgaatccgcaattgaagccgctcatggcaatgagaatatcaaggcgaaggccaggggaatcgacacgggaatacatgtgctggttctcacaggcgcgatgccaagtgcaagatataacgaagcatccgttgtcaacgcagctttggctggcttacttgagggtgaactcacaaggaagatcgctcgcaaggagccaaggacgatcggacacctctttcgcataatcaatggttatgctcgagttgaggaagacaccaagcagtggcaggaaatccaagccgactatgacaaggcagctgccgctgcaactgccgccgcacaagctcaagctcaagccattggtctagcacctgtgctggttcggcccccacctccagcaaatcaagggcaacctccaaggccgagtcaagctccaatgacgtggaaaaaattcagaaccaatcgcgccggaaaggcagtgatggctgtcgaagaagtacaagccctttgcaaggagttcgacgcccaacaagcaggcagccagcaacaacctttttgcaagaaaatcaagaaggatttgtaccgcgcctttcacggacgctcttcgcacacgactgagcaatgtcgaaatatccgacagcaagtgcacaacatcgtctcagcaggtgaagggaccccaaggtatttcgcgcaacagatatctttcggaccagaggatgccgaaggagttctgttcccacaccaagacccactggtggtatcggcagaaatggccggttttgaagttcggtgtatcttgattgatgggggaagctcagctgatgtcattttcgccggaacatatgccaagatggggctaccgaccgtggcgttgtctcaagcaccgacttcgcttcggggttttggaggcgaagccgtgcaagtcttgggtcaagccctcctaaaggtcgccttcggtactcaagaaaacaaaagagaagaggagatactcttcaacattgttgacatcctgtacaactacaatgccatattcgaccgaggcactctgaacaaattcgaagcagtctcccaccacaactatctcaagctcaagatgcctggtccagccggtgtgattgtcgtcaaggggctgcagccctcggccgccgtagtggcccccttcgacagggaagtgcatactgtcgacatcgaagggcaagaaagagctagaccaatgccgaagctttctctacatggcaaggttacccaggtgcagatagacgatatcgaccccacaaaagtcgtatcgctcgggggagatctgggcgagcaagaggtgaacagtatcttggctgtgctcaagaagaacattgatatcttcgcctgggggccagatgaagttggaggcatttcgctagaccgcatcatgcaccacctagtagttaaacctgacgcaaagccgaaaaagcagaaattaagaaagatgtcagcagatcgccaagaagcggcgaaagcagaagtgcaaaagctactcaaggcaggggtaattcaaaaaatcgaccacccagagtggttagcaaatccggtactggtgaaaaagtcgaacggcgtggtgtctagattacgggatatcattatttggggttatatgctgcgaatgagaggtgggccgctgatggtgacagctcagtacgggaactcggcagtcaggggttacttctcgaagtaccaggaggtcatcggatag

SEQ ID NO: 60247 - DNA, 601 bp, Oryza sativa
  Clone ID: PAT_MRT4530_61794C.1
cctggtctgcaagaattcggcacgagaattgttacaatgccagccaaggcagctgccaaaaaacccgaaaaggaacctgaaggttcatcaggtggcaaggctaagaagaagaagtggtcgaaaggaaaagtccgtgacaaacttaacaacatggtcttattcgacaaagccacatacgacaaatgcgttaaagatttgccacaatacaaattaatcacaccagctatcatctgtgaacgttttaaagttcgtggttcactcgcacgagctattcttcgtgaactcgcgaagaaaaatcttatccgaccggttgttaaacatagccgacaagaaatttacacacgagcaacaaaagaagatgttgttgccgaacaagaagctgccaaagaagcaacaacagaaaagaaaggcggtggtggtgtgaaaaaaagagcgaagaaaaatgccgctgcttgttgctgccgaagaaactgcagcttgatagattcgttttcggtttggtttctttttttggaaataaaaacttttgaagaaaaaattaaaaataaatccttagatccaaaaaaaacacgagaaatttctttcgtccgatttttttttt

SEQ ID NO: 60248 - DNA, 1014 bp, Oryza sativa
  Clone ID: PAT_MRT4530_61795C.1
gtgaaaggtgtgagactaatcacgaaaaacattgctcaacccgcccataaccgcgggcacggctattcgaatagttttactctggccagaggtgtaccactgtacccacaagacacgattccacacatgttgccatgccccgaaataccaccacggcattgcaaagggggaaatcgtgacaataccctttgcacaacacaactcaaaacagtgcaccgttcctggatcataatcaaccccttataaacaaggcatggactccccagcgacccccgtggacttctcgccacttctcagtctggcgcactataatgaaccatgctatacaaaggataaagccgttgcccacgctggctctagggaccttggccgggtgattggaggacacctacgcgtagaggacgacgaggcgaacccaacggtactcaccacaacgacaaacgacgaacgatgatggccggcgacgaagaggacggcggcggcggctcggcttgacggcgacggcggagctccggtggtcggcggcgaagggggacgggcggccgaggttctcctcaccacggcgcacctaacggcggcggcggcaagcggcggcgacgacgcaagcgacggcgcggcgtggctgaagacggccggcggcggcggcgaactaagtgcgcgcggcggcgactctacggagcacgggagaccacgggagatggggcaaacgaaagaggggaactagggggtcctatttatagccttggattgaagagatcggactcctcccgcaagaaatcgatccgagaaaactcggttttggagataaactcgaaaacgagtttgattcgggcaagatactcaaccatttgctccgattcttgaggggaaagatagaggaggacgagaggataaaatcccctcaaaaacccggaagaaaaagagccggattggagcggatttgagggagaaaaggggcggctcgggcgacggcttgggctcggccggccggctgctagaggaagaagaagggcc

SEQ ID NO: 60249 - DNA, 445 bp, Oryza sativa
  Clone ID: PAT_MRT4530_61796C.1
aggttcaaattagaaattttaccagcttataatcatattacaaagagaataaaatacatcttgctcaaaatcactgttacaaacatgccatttcagctcttttaatgggacgccattcaaaatttttagttcagttcacacattgtgtatattaacattcggacatactataatggcaacagtgtctgtcagatctttaactggcagctcgtaggcatgtaaataggtaaattccagaaatcctttctaattggtagcacttcagtgtcaagcttctgaaaacggactgctggttggatcataatgaatctcccgctaatggaaccatcgttacatgaaaagcagacatagttagaaaccagcctatgggtcaacccacaggtccaattcaacattggcaaagtactgcttttttccgtctcatgaatatgtaagcatagttgct

SEQ ID NO: 60250 - DNA, 504 bp, Oryza sativa
  unsure (1)..(504): unsure at all n locations
  Clone ID: PAT_MRT4530_61797C.1
gtattatcgtcaccatcttggatccttagcaagaggagaaaggagggtgcttttttccttgacatgagaaaatgggggctctgttgcctgttggattctcttcacctttgttctctgtttgagaattagtaggtactagcttttatgatcagtgaggctaagctgatggttggttgcagcctttggctgggttcgtgcgtgctgatggcgacccggacacagatctggagacagatggggtggccactccatcctccaatgcctctgcagcattcgccgagccacacgacgaggaggagggggacgaggtgttgtgtggggggtggaanggggactggtcccagntgcangaaccaaccaagagtgcggcagaccgtaccaccggagaatgcctgtaccagcggcgccggtcagaagcttgtcttttgcagggtaggatggggttgaagcaacggccagcctttttggactttggcaacggcagccccgggttcaatggaaccc

SEQ ID NO: 60251 - DNA, 2723 bp, Oryza sativa
  Clone ID: PAT_MRT4530_61798C.1
atgcggtgtgttggtggtggtgacaccccgttggggtttcggggcgtcgtggaggaggagctagaggaggaggtggcggcggtgtcagcgtcggggaggccaatgcagcggcagcggcggcggcggcggcggtggggagaggatgccgacgatggctactcggcgagctcgactggcggcggcgggagcagcggatgcggctccttcggctgtgactcgcctttggctgggttcgtgcgtgctgatggcgacccggacacagatctggagacagatggggtggccactccatcctccaatgcccttaaaaggagttctgttctcgctgaagcctctgcagcattcgccgagccacacgacgaggaggagggggacgaggtgttgtgtggggtggtggaaggggactgggcacagctgcaagaaccaaccaagagtccggcagaccgtaccaccggagaatgcctgtaccagcggcgccggtcagaagctgttcttttgcagggtaggaaggggttgaagcaacggccagcctctctggactttggcagcggcagccccgggttcaatggagcccctctttctccgggctttgtggttgggggtgtgggtttgatgaacaagggtcttgtgtcatcatcattcatcagatcagacgtttttcctagtcccaggacaccgaactatcggcggcatcgttcatcagtatttggttaccaaaaggggtggagctctgagagagtaccgcttgcttccaaaggtaacaggaggtacccaggcagcagcatggcatttcccttcagcaatgggaggacattgccctccaaatgggaggatgcagagagatggatcttcagtccgaattcgagtgacgtgctcgagaagacttcatttgctcctgctcggcgaccaaagtccaaaagtggtccattagggcctcctggaaaatttggtggacaatactcatctgtgtcattgcttgacaatgggagagttggacatttgacagcaaactcgcctttcttggctggagtactgataccagaacattattgtggagagaaagataacattgggaggtatatgagcagaacagctggtgaggaggccagcattggcattggaggcaagtcttgtctggcaaatggtgggtctcatgctactcaatataacagagttcgtcgacgactggatactgcgattgagtcatcaccttcattgcctagcacccaagcgtctgtacaagatgaacaggttggaatcacagaagagtcagcctccattatcacccctataattttgcggaaggatgcggcaactcaaacaagcccaaatctaagtcggtcatcttcgcccagtgtcagtactccatttatccatttgcttacgacacaccaagtcagagaaaaggagaattgtttctctgatgttatcagggatgtgcacatggacgatcgagtgactcttaccaggtggtccaagaaacatgttacacgagcatctagcaagaactcaacaaatgttatagatgtgaagaaaaagacagtggagtctaagtcttcttcctgggaattaacagaagcaaaatccatatcaaaggttgagcgagagcaagaaaaaattactgcttgggaacacctccaaaaagccaaggctgaggcagcaatccaaaagttagtgatgaaaatcgagaaaaagagatcatcttcactggacaagatttggaacaccctcaggtctgcacaaagaagagcacagtgtttcctgttttaagcagcagcaaaccaggatgagcaatcttccgggaaggctaaaaggacatcacaccttaataagaacggccagatcagctctctgagtggctgcttcacttgccatgccttctagtgtcatgtagtttaagaaggaacaggacttaaagtaattcttcgtgttatcaacacgctcgtgttgacttagtgaagttcagagatttacagaataaagatgatccagcagatggaaattatccccccttgaattttgacaagatgctgctgcaacaatgggggaccatgcattatcatgatatagatttctacagttctgctttgtgttagtttcgattctgccatggggggacaagagaaaatggtgccacgaaggaaaggtgaaattcttctgcatacatcccatgtgcctgattgatatcttagcacaatgataattgataaggtcctcctctatcattcattacccattaccaacattctagatgctatgagtttgtgtgcgatgaaaacaaagcagatatgtatcatttgcaccacaattccaacggatagataagaagggaatgtttcagtcagagggaatacagtgccttactgtgattcatgctggaaaactctactggattgtgaaagggaaccaggtggaatgcaatagatttagctagcgtatgctacatttgcatacacagttacaatagcatgtgttggagaaaaatataggaatacaggaaaatagagattctgtttgaatttcatggcaatttgacaagctcttcgcagaacaactctcccatttctgtaatgagctgtttcttgtaattcctattgcaacacataggcgttactgaatgttgataaatgatattgccatcgcaatttttttttagaaaaaaaaaaaaaaaaaaaactcgagactagttctctctctctctccctcgtgccgaattcctgcag

SEQ ID NO: 60252 - DNA, 2176 bp, Oryza sativa
  Clone ID: PAT_MRT4530_61799C.1
cacttccaaaatatactcgatattgacatcattcacatcatatagtacaaatcaccagatcagattgatgaacaggtgcggggcatggctgccatggcaggcatgccatattgcgatgtacagtatcactcttcacatctacctgccgagcccgagcgagcgccgccgccgctgccgcgtgtgcaccatccagaagacgatggacatcatgacggcgccggagatgaggagcaggccgaggtagacgtgccggctgtagagctcgaggcccgggcagttgttgtcgctgatcgccgtgaacgtctcccggacgaagctgcagtcctggagctccatcaagaacgggccgtactggtacagcccctggctgatgctcgccgccgccgtcatctgcccgtacgccgccggcgtcaccctcccctccgtcgcgcacacctcggacccgggcggcccggtggtctggcactcgaacttcttccactccgccgccgcggtgtcgaagttgacctcgccgggggcgcatttccgggggctcatgtccgggttgaaggggtcgcagagcttgggcatcagcgggccggactggttgatgtagagcggccggaacgacggcgggaagtccctgttcgagatgttgacgatgacgttgttcaccagcgccaccagctgcaccgtcacctcctcgctccggtacatggactcgttcgccgtcgcgacgtcgacgcaggggaggatgtcgtccagcgccgtgtgcgcctgcgggtgcgtcacccagtcgtccatggccacgcatgtgtcggcgaccacgttgtgcaggaggaggaaagcagcagacatcatgattgtgatgacgagaacgaaccagccagcgatcaccagcagggaaacaagaaaccgcagccccaggatggagaagaggaatccgaatatcgcaaggccaagcattacagctgcaataaccatcaaattgtactgcatcttgtccatcacatgcttgatcttcttggagttttcgagcgcgcgcgtggagaactcatttgcagaagaattcagcttatcctcgatgacgtcgatcttctgctgcacttgaactggtaggaagacctgatccaccccgatgttcttggctgcagccaagctacctgagaagttcctcagactatccaccgtcagattgccttgtccgacaatgtagtccacggttttgatcgtgctactgtggaatagctcctgcccacaatgcagtatgatacatccggctattgtggccaaggtgaatattatgaggaggatcagcgagatgaagtaggtcgccggcgagtaggtgttgtactttttccggcagaagcagcagcagcaggagatgatgagcaggacgatcccgaagacgatgaaccacagcatgccgacgaggatgaggggaaccgcggtgtatgccacagaagcccagtaatgctggtcgctgatgttccagccgccgctgtacatggtgaggttggcgagggggtctctccggtgagtcctcgccgcggccagcggaagagatttggttcctggatgagcagcgtcagcaccggctcccggcgacggtgtctcgacgatcaatcgcctccatgtagccagcaacccacttcttccttgctcatctgacatcagaacacggctggatacctcgaacccagcatccgagacgcaggcgttggcgaggaacaagagcagaacgacataggcgacgccgccgacgccgccgccgatgagcgaggtggccggcggcgccatgggagaattcttttacaggagaccagaccaaaccagatcgatcgatctttcttctgccacagaatccaatttcacgtcctcaatggggaatcgatctcctccagtcctcttctgcgattgctcccgttaccgcaccattttcgggagctcggcgatggcaatgcgcgaggagacgaacctccagggcttcagagtgacgactgatgacacgcaggcaggcaaggcaaggcaatcatcaaaattgtcagctggttgtcagcatacagcctacaagaataactcaagcacagagaaaacagtaaacaaaaaggccgcgtcagaaactgaaaatatatataggttgctgccacaaatgtgcatggtgcttcgtctctacactatctgctgctgcaactag

SEQ ID NO: 60253 - DNA, 363 bp, Oryza sativa
  Clone ID: PAT_MRT4530_6179C.1
ctagctccacgctcccggccttgaaccacgctccacgctctcccgcatgatccgcatctcaccgttggccatgatccccaccagcttcaactccatccccttcttgttggcaaggatggtgacccccgcagccatgccgcatgcctctagcatggggtcggcatcggaggaggaggtggcgatggcagtggcggcgtagtacttgtcgactccaaggttgacgacttcggcgacggacaagttggcgcggtcgcacggaggtgcgcaacgacaacgtccttgagcggatggttgaaggcgttggcaaccgcgaagatcttgaagcggtggtcgacggcggctgccatgggggatctgagctag

SEQ ID NO: 60254 - DNA, 960 bp, Oryza sativa
  Clone ID: PAT_MRT4530_617C.1
atggagctcaacaaggcggtggccgtggcggcggcggcgatggtcgccgtggtggcaatggtggcggcgccggcgtcggggcaggcggtggcggcgtcgtgcacggcgtcgctgatcaccagcttcacgccgtgcttcaacttcatcaccagcagcagcggcggcggcggcggcaacggcacggccgccggcggcggcgcgccgacggcggagtgctgccagtcggtggcggcgatgatcaacacgagcgccagctgcgcctgcctcgtcctcaccggcaacgtgcccctcggcatccccatcaaccggacgctagccgttacattgcctaaagcctgcaactccatcgccaagtccgccggagtcgacggccggtgccggatcgccgacggcgacggccacgccgccggcgacgagccagacgcagacgaggccgcagtgtccagaatggcagcgagggtggcgtggatcggcgcggcggcggcggtggtggtggtggcgctgatggccggtggcgcggcggcgcagccgccgtcgtcgacaagcgggtgcacgcagacgctgctgagcatgtcgccgtgcctcaactacctgaccgggaacgagacggcgccgtcggcgtcgtgctgcggcaagctgggcgaggtggtgaagtcgcagccggagtgcctgtgcgtcgcgctcaacgccgacacggcggcgctcggcctcagcatcaaccgcacccgcgcgctcggcctccccgacgcctgcaaggtccagacgccgccggtcagcaactgcaagagtggcgctgctgctgctcctgcgggacagacgccgacgactccggcggggacagggtcgaaggcgacgccggcgacgcccgtgggctccggcgtcgcgccgctccgtgtctcgccggtggggatcctcgccggcatcgtcgtcgccgccgtctacgccgtctccgccgtgtga

SEQ ID NO: 60255 - DNA, 140 bp, Oryza sativa
  Clone ID: PAT_MRT4530_61800C.1
atggcagcaaggcggtgcttgagctcaaggagagtagcggggccacaccttagcaccgcctacctccatagcaaccttgttgacgagctgcggcccttcatctcctttgcctttgccgccaccatcgaatgcgaccggag

SEQ ID NO: 60256 - DNA, 255 bp, Oryza sativa
  unsure (1)..(255): unsure at all n locations
  Clone ID: PAT_MRT4530_61801C.1
ccttgttgttacatataacaagagtgaacattcttcctttctccnaaaaaatttaattttacattaaaagtcgccaataccctctataaaactccccaaatgtcaacttacttccatacaaaaacaaacttctaacacaataaacattactaaattttaatcaattaccaccatccccaaccaatgtattaatcaactaacccttttcatgttaccattaattcacataacccaacccataaaatattactctac

SEQ ID NO: 60257 - DNA, 290 bp, Oryza sativa
  Clone ID: PAT_MRT4530_61802C.1
aaaacatgggaatgcgaatccaattgtttatggacagggaaaatggattaccgtctatacaagattgtacagtctaaaaccatgaacagaaccaaggtagccaaacacttatatggagcctgctggaaggtcaacaaaagtacacccagctgggtgaaccaaactcctaacgaggatcggggaaccaccaaccataacgctgaaaggtgaaaaaccggaccaatggtaggttgaccatactttgcactagctatgattgaggagactaccattttaatttcaccggggag

SEQ ID NO: 60258 - DNA, 227 bp, Oryza sativa
  Clone ID: PAT_MRT4530_61803C.1
cggcacgaggaattaactaagtgtacaagaatttcttggtaagaaattctgtttttccctgaattgtcggggtttttctcgtgtaaaactgtaaaggtgaacattttggcacctgttctgcctctccatgcatggccgcatgggtacccctgcttgctagtccacgaaaggtccggattctgcacttctggctctgttcatctcaaaaaaaaggaaaaaactcgagt

SEQ ID NO: 60259 - DNA, 414 bp, Oryza sativa
  Clone ID: PAT_MRT4530_61804C.1
aatagtaatatttttttttgttattcttgtggtggtttattgtactctacgcacatactagtagctaattgacattactttggaggtgactgctcccggactaattccaaaaacaagggtagaattgttgaaagagaaataagagggagggcaatgtactaaccccaacagcagttgttgaaagaagcggacaaggaaccctgagatgcgatacgcattaccgactacataaactggcaaggcacggaatactgagcacatccctgcaagggggccgacaaaagaattagcgtttgccgtgatatgcaaataaggggatcccacacactctggttgatgaaaaacagcataatgttgcggaatgaacaataatagccctgagcgaaggacaccagcaaacacagccgacccaaa

SEQ ID NO: 60260 - DNA, 249 bp, Oryza sativa
  Clone ID: PAT_MRT4530_61805C.1
agaaaaaaaaaaaaaaaaaaaaaaaagacaatataaaggggcgactgtatttaaggaaccaagctaacgaacaggaggacaccttgtgctcgctgtaggttaggcgcgaccttcgatcattccagtgcgcgctggtacttccacgccaggacctggaaagcttacgaatctcaacactcagaatttttgcattcttagccttgttcagctgagtgcaaactaagtgaatatatcccagaatgcactcct

SEQ ID NO: 60261 - DNA, 450 bp, Oryza sativa
  Clone ID: PAT_MRT4530_61806C.1
cttggtgctcatatcttctatgcaacaaaaaattgttctaaactctatgtaattgtagatgtgatatataatcattttcatgtatttttttaaaattacgtagtttcttaatttatcaaatgatagggctccacgaagcacaaaaaaggtaaatactgaaagataagttctgtgcactttgagttttattttctttcttggaactcaggacttctgatgatgatagattgatagctctattttattcattcatgcatatttgcttcatattgttcttgattcagtagctaggctggttgagagggataattgataaattgtatttcctatcttctgagatttcttctaaccgtgcatgtcagctaaaactatggcataaaatccatattgcaagtatggagctggtgaggtgcttgactgatggggagacattgtgaggtgctcggcgct

SEQ ID NO: 60262 - DNA, 1684 bp, Oryza sativa
  Clone ID: PAT_MRT4530_61807C.1
ctgcaggggtccggcacgaggagtagcacctccttccccaagaatcgcgcgcgcgcgcctgcctcgtcgccggcggccatggcgctcctcctccgccactctcccaagttgcgaagagcgcatgctatcctcggatgcgagcgtgggactgttgttcgtcacttctcatccagcacttgctcctctcttgtaaaggaagatactgtatcaagttccaaccttcatccagagtatgcaaaaaaaattggaggatcagatttttcccatgacaggcagtctggaaaagagcttcagaatttcaaggtctcaccgcaagaagcaagtagagcctccaatttcatgagagcatccaaatatggaatgccatttactgctaatgggatacatagtttgttctcatgtgggcacacagtaccgactaggtggttctcccaatgagaagattgccctccaaaacagaatatcggaatgccctaacgcgcccctaccatgactgcggggtacgttgctaggtgggtgagggaagaatgaaacgacagcggagatggaatgcatggaggaaggctaccttgctaaaattatccatggagatggtgccaaagaaattaaagttggtgagattattgccgtaaccgtggaagaagaggaagacatcggcaaatttaaggattataaggctccatcatctgctgaatctgcagctccagccgaatcgaagccccaatctgagcccacagaaccaaaaaaggagaaagagcagcccaaggctcctgagccaaaggctacaaagacagaagaatcttttctttcagaggatcgcacattctccagtccaattgcaaggaaattggcagaagacaacaatgtaccactgtcaagcataaaaggtactggccccgatgggcgaattttgaaggcagatattgaggattacttggcttctgtggccaagggtgccaagaaggaaacagcagcagctcctggactaggctatgtggatcttcctaatacgcaaataaggaaggttactgcaaaccgcctgctgcactccaagcaaaccattcctcactactatctgacagttgatactcgtgttgacaaacttattaagttgcgaagtgagttgaatcctctgcaggatacctctggtggcaagaagatatccataaatgatcttgttatcaaggccgcagcattggctcttcgtaatgttcctgagtgtaatagctcttggatgaatgattttattcgccaataccacaatgtgaacatcaatgttgctgtacaaactgaggatggcttgtttgttcccgtaataagggatgctgacaagaagggcctagccactatcgctgatgaggtgaagcaactggctcagagagcaagggacaacagccttaagccagaggattatgagggtggcactttcactgtgtcaaacttgggaggcccttttggaattaagcaattctgtgccatcgtaaatcctccacaatcagcaattttggctattggctcagctgagaagagggtgatccctggagctgagggtcagtttgaagttggttcgtttatgtcagcaacattgagctgcgaccaccgggtcattgacggtgccattggtgcagaatggatgaaggcgttcaagggctacatcgagaatccaacgaccatgttgctgtaa

SEQ ID NO: 60263 - DNA, 138 bp, Oryza sativa
  Clone ID: PAT_MRT4530_61808C.1
atgaaggctggcaacaagggcagatcgaaagtcgactacgctgggcacaataaaagccgacgtcaggagcgtgcgacaggaatcaggagtggtggcatctgcagggagtggttacgagagaaagaggataaggtctag

SEQ ID NO: 60264 - DNA, 287 bp, Oryza sativa
  unsure (1)..(287): unsure at all n locations
  Clone ID: PAT_MRT4530_61809C.1
ggattcggcacgaaantnacgctacatannaatagtcctatgctttttcatgtnttaaangaaganaacatgtnctaaangggcgggcatctttctccanngtccatttttcttcngcgtnnanacatcncaagtaatccaaaanggtgtttgtgttgttttactgtaacgcnntnaaaaaaaaatctgcaatgangtncnatgcttganttctctctccantggncnaaccaaccngaaatttttattgtttgtcgtcaaaaaaaaaactttttattgtccaactc

SEQ ID NO: 60265 - DNA, 189 bp, Oryza sativa
  Clone ID: PAT_MRT4530_6180C.1
atggaggcgaatccaacattcaattccaattcaagaagaaaagtagtagtcaagggaggagcgagggaggatgccggtcgagcaaggctcgctggtgtgtctttgccggcttcacgcaccgacgacaagactgggtggcagcacaatagggcgatggaggtagcggagtgggggtgggaatgcgagtga

SEQ ID NO: 60266 - DNA, 305 bp, Oryza sativa
  Clone ID: PAT_MRT4530_61810C.1
ttgttaaaagcctctcatacattcttcgaaccgtctccatcaccaagatgatgctcacagcgattgatcgatcgttaggaggaagagacggacagccacggacgaagaagtcctcaacacccaaccacgggaagaaaaaagccccatgttccaaggcgagcaagacaaaggatcttgcatatgcgagctatgaaagcgacgtcgcacccaacacagcaaaccgaaccccgttcgctgccaaggcagaaaatgactcaacgagagaggtacttttcctagtcaaaaaagcaggttctgattcctga

SEQ ID NO: 60267 - DNA, 1725 bp, Oryza sativa
  Clone ID: PAT_MRT4530_61811C.1
atggcagccaatgaattagcagaggtcaagaggcaagtagatgatttgcttcagaaaggatacattagaccaagttcatctccatggggagctccagttatttttgtggagaagaaagatcataccaagaggatgtgtgtggattatcgtgcactaaatgatgtgactatcaagaataaatacccgttgcctagaattgatgatttgtttgatcaacttaaaggagccaccgttttctccaagatcgatcttcggtcagggtatcaccagttaaggatcaaaaaggaaaatatacctaagacggcttttaccactcgatatgggttgttcgaatgtactgttatgtcttttggacttaccaatgcccccgctttcttcatgaacttgatgaataaggtgtttatggaatacctggacaagtttgtggcggtctttattgatgacattcttatctattctcgaaccaaagaagagcatgaagaacatcttcgtcttgcactagagaagctacgagaacatcaactgtatgctattaccggagtttggcgtcactacctctttggtactcatacggaggtgtacacggatcacaagagtttgaagtatatctttactcagccggatctgaacatgagacagcggagatggttagaactgattaaggattatgacatgggaattcattatcacccaggaaaggctaatgttgtagcagacgctctcagcaggaaaggctattgcaatgctatggaagtacgacagttgccatgggaattatgcaaggaatttgaaagattgaatatgggaatcgtcagtagaggttttgttgcagcattagaagcgaagcccactctcattgatcaggttagagaagctcaaatcaatgatcctgatattcaagagattaaaaagaatatgagaagaggaaaggctattgggtatttggaagatgagcaaggaaccatatggttgggcgagagaatttgtgtcccagagagcaaggagttgaaagatgcaatcttgaaggaagctcatgacactttatactccattcaccctggtagtaccaagatgtaccaagatctcaaggagaaattttggtgggcaagtatgaagcgtgagatagcagagtatgtagctgtgtgtgatgtttgtcagcgagtcaagggagaacatcagaaacccgcaggtttgctgcagcctttaaagataccaaaatggaagtgggaggaaattgggatggatttcatctccggtctacccagaacatcatcgggccatgactctatttgggtgatcgtcgacagacttaccaaagtagctcattttatccctgtgaggacaacatattccggaagccgtttggcggaattgtatatggcaaggattgtgtgtttgcatggcgttcctaagaaaatagtatccgatcgaggtgttcataatatgttccatgcgtcacagataaagaaatgtttaagggtacccactgaagaagccaatcttgagcagatagaaatccaagaggatctgaagtatgttgagaaaccaatccgtatcctggagacagatgagagaaggaccaggaatcgagttatctgtttttgcaagattccgacgttcccggagagtccgaatttgcaggagaagactttgaagagttccaaggccagcaaggcaagtcacacagatcccaaacaaccctttgagcatgttgatcctgtttaa

SEQ ID NO: 60268 - DNA, 1782 bp, Oryza sativa
  Clone ID: PAT_MRT4530_61812C.1
atggccctgcctctgagtggtgggatcacttccgtctcaacaggatcactgcggaaccaattacttggcttgagttcactgctgctttcagaagatgtgcgcactgatgaagagcgtcaagagaagttcttggaaggactgaatgatgagctctcttacccattaatgaccggggattatcatgatttccagaagttggtggataaggccattcgtcaggaggataagtacaacctgtcacaaggaggatcttcgtcagttgttcgtccgcagcgtcaattcttcaacaacaatgctggcaacaacaaccgcaaccaagctccacgccctgttgcaactccaacccagcaccagcttgccaagagggagcaaggaaacaagccaggagtgtgcttcaactgtggggaaccaggtcattattctgacaagtgtctgaagccccgacgcgtgaaggttgtccctgcgcagaacaactccaccgcaccagcgtcaaaggctcgtgtcaatcatgttgctgctgcagaagcccaatgtgctccagatgtgattttggccaatgaattagcagaggtcaagaggcaagtagatgatttgcttcagaaaggatacattagaccaagttcatctccatggggagctccagttatttttgtggagaagaaagatcataccaagaggatgtgtgtggattatcgtgcactaaatgatgtgactatcaagaataaatacccgttgcctagaattgatgatttgtttgatcaacttaaaggagccaccgttttctccaagatcgatcttcgtggttcatgcgttgaagtttggcgtcactacctctttggtactcatacggaggtgtacacggatcacaagagtttgaagtatatctttactcagccggatctgaacatgagacagcggagatggttagaactgattaaggattatgacatgggaattcattatcacccaggaaaggctaatgttgtagcagacgctctcagcaggaaaggctattgcaatgctatggaagtacgacagttgccatgggaattatgcaaggaatttgaaagattgaatatgggaatcgtcagtagaggttttgttgcagcattagaagcgaagcccactctcattgatcaggttagagaagctcaaatcaatgatcctgatattcaagagattaaaaagaatatgagaagaggaaaggctattgggtatttggaagatgagcaaggaaccatatggttgggcgagagaatttgtgtcccagagagcaaggagttgaaagatgcaatcttgaaggaagctcatgacactttatactccattcaccctggtagtaccaagatgtaccaagatctcaaggagaaattttggtgggcaagtatgaagcgtgagatagcagaccgtgcgccgccgccgctctggtcgtcgtcgtcgctcgggaaggccgccgtcgggatcgccaagtcatcaccgtcctcgtctcgtcctccatttccgtcgaagatcaccggagcaccgtcgtcgccgcttcaactcgtcgccgtcgccgtccgttgccgttcgccgtcgtttaaaccctcgattccgacgttcccggagagtccgaatttgcaggagaagactttgaagagttccaaggccagcaaggcaaaaactccggacgtaactggtcgcttgctcgctggtgggggcgcccggaaagagatgggcttgggaagccctgaagatggcttcgcccgcggcgtgtacgtgctcgccttgttcttgacctgttga

SEQ ID NO: 60269 - DNA, 4653 bp, Oryza sativa
  Clone ID: PAT_MRT4530_61813C.1
atggaggagaccacagcggcggcggcgggaggcacacgcggcggggtacggcgagctcggtcgcggccgaccaggtcttcgacgctgtacccggcgggcgggagccggcggcggcggtgggagggcgggcggattacgatattcccggagagtccgaatttgcaggagaagactttgaagagctccaaggccagcaaggcaactcctggtttggaatggtatattcctagtttggagatagaactgtgcagccgggattggttgttcagaatggttgggcctatgcaacggtatttattaaatgctatttatgcaaatgagactatattatgccatcctttgttatcccttgcatttgcttatttgctgcgtggcttgttgagtatgccatatactcaccttgcaatcattcatcaggggaggagttctacagtgatgctgaagatgccgcgcttcaagcctgagtacttgttcggtactgagggatttgtccaggagttgcgtacgatgtccttcgccataggattcgggactgcccctttgtatgcccagattcctcatgatcgtgatgaagagaagtgccgtgtcaaggtcaccttgaacagtaatcgtgaagacatcccatcggtgatgttcgaggctggagggggaaactatcctcatgcttgtcaggaggtggcaaggatcgccataggagagctccgcgattgctacagtgatcagttagccgacactgagtatcgctaccatccttgccaacccctggaaagtgaccgtggcagctatcttgaacctgcagggattgagaatgatgctaccacaaggcatttggttgagatgctgtgggccatggatgagtcccgcgctgaggtcgtattagttgctcaagattgcgaagatcagaatcgtggtaagatctgtaagctggaggacaaggtggatcgtttggagaaggaactagccgcattgaagggagaagcaccaccacaaaaggccagggttcttcttaccgcaaagaagagagctctatttgtccctcgctaccagttggcgcctaaggttcgtgtggtggaagaagaagaagctgccccagttccagcagatcctcccgtcgttaacatggtgcttactcgcagcaatgggaatggccccaacaacaactacaacaagaacaatggagagaatcccacgcttgcccaagtcctggctcaacaggcacagctcatgaacatgatgatgcagcaactccagaaccagcagaaccaggggaacaatcatgcacctccccagaacaagttagcagaatttcttcgtgtgaggccgcccactttttccagcactaccaatccagttgaagctgcctctgagtggtgggatcacttccgtctcaacaggaccactgcggaaccaatcacttggcttgagttcactgctgctttcaggaagactcacgtaccctcgggagtggtgtctctcaagaagaaggagttcagggcactcactcagggatctcgctctgtcactgaatatctgcatgaattcaatcgtctggcctgttatgctccagaggatgtacgtacagatgaagagcttcaagagaagttcttggaaggactgaatgatgagctttcttacccactaatgactggggattattctgattttcagaagttggtggataaggccattcgccaggaggataagtacaaccgaatggaacagaagaaacgcaggattgctcacttcaaagctcagcagaggaatagtcagaggctgcgtcttgctatgggacctcaggcacatcagttcttcaacaacaatgctagcaacaacaaccttaaccaagctccacgtcctgttgcaactccaacccagcaccagcctgccaagagggagcaaggaaacaagccaggagtgtactttagctgtggggaactaggtcattattctgacaagtgtccgaagccccgacgcgtgaaggttgtccttgcacagaacaactccaccgcaccagcgtcaaaggctcgtatcaatcatgttgctactgcagaagcccaaggtgctccagatgtgattttgggaaatcatgggatggagatagaagatcttagacgtccgttgatggttagtaccccgagtaaccaagcactctcatcacaacgtagcccctctgtcagaatagagattcaaggtgtaccatttctagccaaccttattttgttagaatccaaagaccttgacgtcatcctagggatggactggttagcccgatataaaggtgtgatagactgtgccaatagaaaagtaactctcaccagcaatgacggtcaagttgtaactgtttatgcaatgcattctgaacctttaaggtcaagtcttaaccaaataactttggaagagatttccatagtacgggactacccggatgtgttcccggatgatttacctggcatgccgcctaaaagagatatagaattcagaatagatctggtaccagggacaactccgatccataagagaccttatagaatggcagccaatgaattagtagaggtcaagaggcaagtagatgatttgcttcagaaaggatacattagaccaagttcgtctccatggggagctccagtcatttttgtggaaaagaaagaccatacccagaggatgtgtgtggattatcgtgcactaaatgatgtgaccattaagaataagtacccgctgcctagaattgatgatttgttcgatcaactcaaaggtgccaccgttttctccaagatcgatcttcgattagggtatcaccagttaaggatcaaagaggaagatatacctaagacggcttttaccactcgatatgggttgtttgaatgtactgttatgtcttttggacttaccaatgcctccgctttcttcatgaacttgatgaataaggtgtttatggaatacctggacaagttcgtggtggtctttattgatgacatccttatctactcccgaaccaaagaagagcatgaagaacatctttgccttacactagagaagttacgagaacatcaattgtatgccaagtttagcaagtgtgaattttggttgtctgaaaaagatgtgaagtacaagtggtcagaagtatgtgagcagagttttcaagagttgaaaagtcgcttaatatcagcacccattttgattttgcctgatccaaagaagggtttccaagtgtactgcgacgcatctaagcttggattaggttgtgttctgatgcaagatgggaaggtggttgcctatgcatctcgtcagatacgtccgcatgagaagaactaccctactcatgatcttgagttagccgcagtggttcatgcgttgaagatttggcgtcactacctctttggtactcgtacggaggtgtacacggatcacaagagtttgaagtatatcttcacccagccagatctgaacatgaggcagcagagatggttggaactgattaaggattatgacatgggaatttattatcacccaggaaaggctaatgttgtagcagatgctcttagcaggaaaggctattgcaatgctacggaaggacgacagttgccgtgggaattatgcaaggaatttgaaaaattgaatttgggaattgttagagaagctcaaatcaatgatcctgatattcaagagattaagaagaacatgagaagaggaaaggctatcgggtatttggaagatgagcaaggaaccatatggttaggcgagagaatttgtgtcccagagaacaaggagttgaaagatgcaatcctgaaggaagctcatgacactttatactccattcatcctggtagtaccaagatgtaccaagatctcaagaagaaattttggtgggcaagtatgaagcatgagatagcagagtatgtagctgtgtgtgatgtttgtcagcgagtcaaggcagaacatcagaaacccgcaggtttgctgcagcctttaaagataccagaatggaagtgggaggaaatagagatggatttcatcactggtctacccagaacgtcatcgggccatgactctatttgggtgatagtcgacagacttaccaaagtggctcatttcatcctggtgaggacaacatattccggaagccgtttggcggaattgtatatggcaaggattgtgtgtttgcatggtgttcctaagaaaatagtatccgatcgagatagccagtttacttcaaagttttggaagaagcttcaggaagagatgggttccaagctgaactttagtaccgcttatcatccgcagacagacggacaaactgaaagggtaaatcagattttggaagacatgttgagagcttgtgctttagacttcggtggaagttgggataagaatctgccttacgcggaattctcatacaacaacagttatcaagcaagtctccaaatggctccttatgaagcactgtatggtcggaagtgccgcactccactgttgtgggatcaaacgggagaacgtcaggttttcgggaccgatatcctgagggaagctgaagagaagattccgacgttcccggagagtccgaatttgcaggagaagactttgaagagttccaaggccagcaaggcaagttacacagatcccaaacaaccctttgagcatgttgatcccatttaa

SEQ ID NO: 60270 - DNA, 1104 bp, Oryza sativa
  Clone ID: PAT_MRT4530_61814C.1
atggtcgcgagcccgcgcatgcgacaccacggacgagagtccacgctggtaacgcacaagtcacgccacaccgagcgccgacaaggctgcagcgccaagccgcacagccacgccagcgccgtcgatccgggcgttccccggccgctgcagatggcagagtcatcaggggagaagaaggaaaaggaaagagaaggggaacgcgggaggcagtgtcgatggcgacgccgttcaccgtcgcccacgctgcgccagcacggaggccactgcacccgcgccgaggccgccgccccccgagctcgcgctgaaacgtccaccggccggcgcggcgcacgagacaccgtagtcggcgtccagcttcgccgcgtcctctccaacgccaatgcttgcgtcggggcgctgcacgccatgctttcttgtgccatgccattgtgcgcgggccggagggggaggcagcaccgacgggtgctggggccggagggggaggcggcacgggcgggtgcaagggcggaggcagcaccggcgtcggcgccagttggaggccaggagctcggggtcgccgcctccatcgcccaccgcccaaagtcgcctccttcacagccatcggcctccaggagcttggggtcaccgacgccttcccccgccttccggccgctgacgccgtcgcctcgaccgccgccttcatcaccgacactaccgtcgtctcccgaccaccggtcgctagatctggccgccgggaagccggatctggccgccggtgccttcccccgcctcccggccgccgacgccgccaagtctagcctccaagacgcggatctggccgctagccgccggatctggcctccgggatgcgaatccggccgtcgacgcctcccctacctcccgaccgtcgtacatgatcgccgcggcctctccatcgattgccggacgttgcttcctcttccaccgacagctgactgcctcctcctcccgactcttattatctgtgacgggccgaatgtaaggtacccgtcaaagactgaccccttcccggatgcaatgagtgtggtgggcacatccatcgacatccccaacagcgtcgatggcggtgacaacaaggcaattagc

SEQ ID NO: 60271 - DNA, 111 bp, Oryza sativa
  Clone ID: PAT_MRT4530_61815C.1
agtccgacgttcctggagagtccgaatttgcaggagaagactttgaagagttccaaggctagcaaggcaagtcacacagatcccaaacaaccctttgagcatgttgatccc

SEQ ID NO: 60272 - DNA, 385 bp, Oryza sativa
  Clone ID: PAT_MRT4530_61816C.1
ggagatgtcctcgtcttccttattatttaaatacaaataattttacgagcggcaacttgcagattcaaatcgagttcgccttctctgccgtcaacggagtaatggacaaaatgtggaccagtacgccgcttccggccatcgagttcgtccatatatattcagatattcatcgtgccttccaggtcattactgcgtgttcctcatgcctgaggttggtcgttcgaacgctagaaagttccagtcaccatgctgatcacgggaggtggcaaaaatcaatgtggcaactcctcagtatatatagaagagccaatgcattacttctacatttccagtacattccccagttccaagtgatggacttcgatcggcacggattcctgaccaa

SEQ ID NO: 60273 - DNA, 307 bp, Oryza sativa
  Clone ID: PAT_MRT4530_61817C.1
cgggcgccgccgcgtctccttctccggcgagacacgccaccgccgggactcctcctccggcgagaaggcgcttgcatcgcaagcaccgacgcgtgggcgcggcgggtggcaccgcggcagccggttcaacgccgacgaggcggcgcgccggcagcgcgggcacacggctccaagcaggcggggacaggggggatccaaggcggcgcgactcaccggcagaggaggcgctgaggcgcagatccgcctcctcctcgttgcgcgacgcccgccggcggttgcccggctaggtttgtgcgtgcccttgtag

SEQ ID NO: 60274 - DNA, 589 bp, Oryza sativa
  Clone ID: PAT_MRT4530_61818C.1
tgcaatgtttgcaactatcagagatcggttcatgtcaaagttgacaatgatcaaagcaaacaaactttctcatgcaggagttcaaactgaggacagtaaaaaatgagtttgttggcgatcgtgggagggtatatgcaaacctacagaccaaggaggactaggtatacgagatttgctcaatgttaatcgaagtcttcttattcaatcaacttggagaattgttagtaatcccaatgatctagtttctactattatcaaagcaaaatatttgaataatacctctttctggaaagctaatgaaaacatttccaaatctgccttctggtcctctatccttaaagttgcagaattatgggatgagaacaaaaaatgggacacaaaagctgcaacaaatttttgaccaagaagcaatccaagccattcagaatgttcagcttgttccaaatgaagacccagacaaactttgctggaagcatactccatccggaggttgcactaccaaaagtgcttacaaagaggttcataaagccactcattctcatttacaagtcatttataaggcattcaccaaacatctttttagaacacc

SEQ ID NO: 60275 - DNA, 1219 bp, Oryza sativa
  Clone ID: PAT_MRT4530_61819C.1
ccggccgggacagaatagtgtcccaacattagtttcacttccttccctttccttttattttctcatggagaaggctctagttctgattgttggagcaggcccatctggtcttgcaacagcggcgtgccttggccagctctctataccctatgttattatcgagcgtgaggattgtaccgcgtcgctgtggcgtaagcacacatatgatcgcctcaagcttcacctcgcaaaggagttctgcgagatgccccacatgccatatccggaagacacaccaacctacatccccaagattcaatttttgaggtatatggatgattatgtggagcatttcaacatttgtcccaaatttaactcatctgttgagtcatgtttgtatgatgatgtgcaaaaatattgggttgtcacaacacatgaccaagtgaatggcatggtgtccaagtatgcagctaggttcttagttgtagcaagtggtgaaaatagtgcagggaacattcctagcatccctggactagaggatttctctggccatgtcatacactcatcaagctttaggtcagcagattcctatgctgcgcaaagggtgcttgttgttggatgtggaaactcaggcatggagattgcctatgatctttcaagccatggagcaaatacctccatagtcatccgcagccctctgcatgtgatgacaaaggagctgattcacatggggatgaaacttgcaagctggagcctcccagtgaaatttgttgattttattcttgtggtccttgcatatctctggtttggcaatctctcaaagtatggcatcgtgaggcccaataaggggccattgcttcttaaggccaatactggtcggtcagcagttatagatgttggcactgtggagttaataaagaaaggggatatcatggtctttggtacaatatcttgcatcaagggaaatgttgttgaatttgatgatgggaaagaaagttactttgatgctattgtttttgctacaggctacacaagtactgcaaacaactggcttaagaatggtgaggatatgatgaacaaagaaggcatgcccaagaaggacttcccaaatcactggaaaggttcaaatggactctactgtgttgggtttgcgaggagaggattatctggtattgctcatgacgccaaaaacgttgctaatgacgtcaaggccttcctagatttgatggcaccattctaa

SEQ ID NO: 60276 - DNA, 136 bp, Oryza sativa
  unsure (1)..(136): unsure at all n locations
  Clone ID: PAT_MRT4530_6181C.1
ttgaatcccagaatgcatccngatgactgatactgtctatgttaattagatgttatatatganatggaaactaagaactgggattatgtaaattccgactgttttcagtctttcggaattaaagaataatctgtgg

SEQ ID NO: 60277 - DNA, 1560 bp, Oryza sativa
  Clone ID: PAT_MRT4530_61820C.1
ctatctcccaacccttagagttcgattatgcgtccgatggtggtttctccgaggagtaggcttcgtccgtgccgtcgaggatgcctgtggagtggtgttcccgctgctatccaagtcaaggcttaggtcagccgatggtattatgtggctagcaggaagttgtatatgtttctcccgaattagcaagtcaaaaattttatcagcttttgtatatgtttctctgaacctctggatgtaatcttgcgcggtttcatcatgcctctgcctaactgctgccagatcggagagcttcatctcatgggtcccactgtagaagtagctatgtaattgcttctccaaatcgacccaaccttgaacaaaattgtaaggcaatgaagaaaaccatgtgaatgctgatccggacaaagacaaaggaaacaactgaacccttaaagcgtcaaccgccgatgcctctccacactgagccaagaatcgactgacatgttcatatgtcgaaacattgttctgtcttgagaactttgagaaatcgggaactttgtatcggtttggcagtggaaccctctcaaaccgctcagggtatgggtgccgatacaaatttccggtattctttggcttaagtctaaactgttccctcatgacatctgcaatcaagtcggcccatggcctctgttgaggtactccttgcacctgttgttgtatcggctcgaactgattgagttgaggaacatattggggctgaggtaatcctccttgttggtactggatgcgaggcgaaggaggttggtattggtaattcaagttaccctcagcatgttgcggttgctctctagaaaagagacgaggattaattgtctgcctttgcaccgatgatggcgcagctgagatagccggagtcgaagctgctgccgtcgactgaactggtggtgcattggaagtactctgttggttacctatcaccaagttcctgtaatttgggaagacaccacttggcaagtagactggccctgtgttctgatgttcagctatcgtgccaaccatcacagatttgaacatatttgttagtgtattgacgatctctccagattggttgatcaaggcatgttgcaccgcataatcaacttggtcatggaaattggtgcacctaggaggttcttcttgcacttcagcaccatcttcgccaagatcttcaaccacaccatcctgaagcccgtcacctttgtcacccaaggcatctacaacacatttaccaccttgagatgagcttgagccaacttcatcagcagcaaccactttcagcttgtatttctgaacaattatcccttggcgggtttccttgaatgagttcatgaacttgtcctttacgctactcatcatctgttcaagctcatgcctctgttcggacgtcagtttgtctagtgtgattggaataatgtttgtctcattgacctcagactcaaccccagttgatggtagattagttcctggaggtttcggaagcttggttttcggaggaattggcggcttgcttgccgacgacggagattgcttttctgttgacat

SEQ ID NO: 60278 - DNA, 382 bp, Oryza sativa
  Clone ID: PAT_MRT4530_61821C.1
cctgcgggtgccggtccggtcttcccgggtcgcccgccgcgtccgatttgatgggataagcaagggtagatctggggggtttttttggaattatggcggggtgttttccccgtcttgttgtttgtatcggtgccagggtttcctccgctggctggcggcgcttctcggggggggggggcgtttttggggttcccttctttccccccggttcctcgctcttgcttcttttttttttggggccccttaatttttccggccggcccggtttttcccccgttgggcttggacatccctgggttttccccattttgtttgctggcatatccccttttttttggctgggggggctaatggggggggggccccatcggtgcttttttcc

SEQ ID NO: 60279 - DNA, 558 bp, Oryza sativa
  unsure (1)..(558): unsure at all n locations
  Clone ID: PAT_MRT4530_61822C.1
ggtgtgttctttttttgtctacacagaacaaacaagaaattgctgaaaggccgtggaaggaaccgagggcaacacagaaaaacacccacatctggctaaaaagggaagggtttagatggaaaaatcccaaacggcccgcaaaaccaaggagggcccggaaaaataaaccttttgtagggggacttcgggggaaacttgtactcagggcaccttaaaacggcgagagaagggtacatgttcaagtacggacaagctgtgatgaacaaacaaggggcaaaaaagctttttgctcaaagaacaaaaaggttcccccttaaccggacaaggacaataccctgggtaggggggaaaattttcgaagcattctaacacttggcaaaaaaggttaccctggcgactatccaaaaaagaaaatttttacagggcgaggaaagaaaacaatccttggctccgtcgaaattgcttaaatacaaagggggcagggaaaaaagctnagcgggaaaccccccccaccgtggggcctttagggggaaagggccatggaaattttgggcaaaa

SEQ ID NO: 60280 - DNA, 1080 bp, Oryza sativa
  Clone ID: PAT_MRT4530_61823C.1
atggcctctgctcgccgctggctctgcctgatactcgccgccgcggcggcggcggcggcgtcgggtgctccagctccggaggacgacccgggcatgccgatggcggcgcggcaccggtgctggatggcgagggtggggcgcacgtacgcggacgccgcggagaaggcgcgccgcttcgaggtgttccgcgccaacgcggagcggatcgacgccgccaaccgcgccggtgacctcacctacaccctggggctcaccccgttcgccgacctcaccgccgacgagttccgcgccaggcacctcatgcccgacgctgacgtcgacgagccggcgaccgcgagggtgttgttcgagcaggaggagaaggcggcgaagcagcatctccctccctcacgcccgcctgcggtgtggggcagcaaggactggcgtgacctcggcgccgtcacccctgtccaggatcaaggcaagaataattgcaacagctgctgggcgttcgcggtggtggcggcgacggaggggctgatcaagatcgagaccggcaacgtgacgccgttgtcggcgcagcaggtgctggactgcaccggcggggacaacacgtgcaagggaggccacatccacgaggccctgcgctacatcgccaccgccagcgccggcggccggctgagcacggacaagagctaccggccgtacgacggggagaagggcacctgcgccgccggctccggctccgcgtcgtcctcgtccgtcgccgtcgtcatccgcggcgtgcagaaggtgacgccgcacgacaaggacgcgctgcgcgccgccgtggagaggcagcccgtggcggcggacatggactcgagcgacccagagttcaggggattcaagggaggacgcgtgtaccgcggcagcgctggctgcgggaagaagcggaaccacgcggtggcggtggtcgggtacgggacggcgagcgacggcacgccgtactggctgctcaagaactcgtgggccaccgactggggggagaacggctacatgcgcatcgccgtcgacgccgactgcggcgtctccagccgccccgcctaccccttcgtctaa

SEQ ID NO: 60281 - DNA, 516 bp, Oryza sativa
  Clone ID: PAT_MRT4530_61824C.1
atgaaggataggaatgcttctgctgagcctgtggtgaagccaggattatcaccatcaagatttgtgaaggttttcatgcatggggaaccctttgggaggaagatcaatttggctctccataacaactatgactctttgtccttcactttaaaaaaattgggcaacaactattccatgtcaccatttgaacttgaaggcttggtgaacaaggaagaagatggtgcaatagacagcgactttgacctcttgtatgatgatatggatggtgttcgttacttccttggtgatgtcccatgggaggttttcaccactacagtgaaaaagatctacattgtccctgcagaacaacagaatgaaaatgattatcaggaggaggaagaggacaacgcggctgctgctgctactgctgacgaagatggagatggagctgctgctgacgatggcgttgctgctgcagctgacgacgttgacgatgttgctggatacacgagcaacgatgacccaagcttcgactga

SEQ ID NO: 60282 - DNA, 238 bp, Oryza sativa
  Clone ID: PAT_MRT4530_61825C.1
ggatgcactcaaagaaggaatgggaggaggcagcagcaactctcctccatagcccactcgatgatcgagcactgtcccataaccccggtggcttggggggccgaggacacagacttaagcccgtcgaagatgcagcccctactatggccgcttctttagaagacctgtctaatggcactaccaacaaactcaacttgacatggaatgctatgagcacataagtgctagggtcaaggat

SEQ ID NO: 60283 - DNA, 261 bp, Oryza sativa
  Clone ID: PAT_MRT4530_61826C.1
atgacaggtgtgtataaagagaacaggattgagcatataaaacattggctttcacatcaagaacaggaaggtaaaaacaattttgaagagaagaacaatgaagcacctaaattatgtcaagagagcgtttcaggtaatttaagtgatggtcaactggaccaaggctcaccgtgccgagggagtagcctaaggcacgaccgtgattggggcgggccaaattgccgtgccttgggccgggtcatcgggactcaggccatatag

SEQ ID NO: 60284 - DNA, 2519 bp, Oryza sativa
  Clone ID: PAT_MRT4530_61827C.1
atggcgaccccctcccgcacctcctgggccgacgtcgccgacgccgaccccgccccggcccccgcccccgccgccaacggccccgcccgccccgaccggagctcctacgtgcccccccacctccgcaaccgcggggcttcgtcgggtgggggcgcggcggcgcctccgccctcatcatcctcctcctccgcgccgccccctcgcgccgcccctggcctcctcgccccccgccccgccgccgccggcatggggaggatgggcggcggcggtggcggcggaggattcggtgggccaaggaggtgggaccgggagccgaacccgttcgggaacgacggcgacgccgcggcgggggcgggggacgagccggaggtgttcgacgcgcaccagaacaccgggatcaacttcgacgcgtacgaggacatccccgtggagacgagcgggagggaggtgccgccgccggtgggcacgttcgccgagatcgacctgggccaggcgctcaacgacaacatccgccggtgcaagtacgtgcgccccacgcccgtgcagcggtacgccatcccgatctcgctcgcggggagggacctcatggcgtgcgcgcagaccgggtccgggaagacggccgccttctgcttccccatcatcagcggcatcatgcgcggcccgcccgcgcaaaggccccagcgcggcgggatgaggaccgcctgccccctcgcgctcatcctctcccccaccagggagctctccatgcagattcatgaggaggcgagaaaattttcctatcagaccggtgtcagggtggttgttgcatatggaggagcacctattaatcagcagttgagagatcttgagaggggtgttgacattcttgtggctactcctggccgtttggttgatttattggagagggcaagagtatctttgcaatctatcagatatcttgcccttgatgaggcagatagaatgcttgatatgggttttgaaccgcaagttaggagaattgttgagcaaatggacatgcctccgccaggtgccaggcagacaatgttgttcagcgccacgttcccaaaagaaatccagagaatggcatctgacttcctggagaactacatattcctggctgttggaagagttgggtcaagtacagatttgattgtacagagagttgagtttgtgcaggaggcagacaaaagaagccacttgatggatctgcttcatgcacaaagagacagtgctactccaggaaagccaactcttacacttgtctttgtggaaaccaaaaggggtgctgattcgttggagcactggttgtgtatgaatggatttccagctacttctattcacggtgatagaaaccagcaggaaagagagtatgctttgagatccttcaaaagtggacatactcctattctagttgcaactgatgtggcagcccggggccttgacattcctcatgttgctcatgttgtgaactttgatcttcccaatgatatagatgattacgtccacaggattgggaggacagggagggcaggaaaaagtggtcttgcaactgctttcttcaatgagaataactcttccatggcaaggtctttggctgagcgtatgcaagaatctaatcaagaggtacctgcgtggttgtctcgctatgctgctcgcccatcttatggtgggggtggtgggaggaacagaaggtccggtggtgggagccgcttcggtggccgtgacttccgcagggattcttcctctggaagaggtggcggtgactactatggtggaggcagcagcggtggagctggtggatatggtggttcctctgcatatgggggtggcggctatggtggcggcgcgggtgctccaagtgcctgggattaatttatagttgctccctattagggtccgtcaggtctaggttgcgttttactctagtttcctcaatagtatacatttttggtaggagctgatatacagcgacaatacaaggtgaactgtgtcatccccttttttttcttctggttgctacaaggtagtcttatctcgcagatgtccattatggagagtcttgaggactttcaagcacacacaagattcctagttaggaatagtttttccggggactgaaattcctagttagggatagtagttggtattggtagactgacatttggtgcttgatgccaagtttctgcctttttgccgtttccttggtccatgtctcattttggtggtcggttggttgtagagcttgtggtgaggaggctttttgcggcttgatttttgaccgaagtttgattttgatacccaggttgaacaaagaggtaggaggatatgtagtcctttagatcttgttgtaatgtatatactgtgaggtgaggctgggaaagaataagttttgtctaggtttataaaggaagaagggggaaattctgtgatgtttgttccttgagaggatacatgttgtgaatttgttttgaatggatgagtgtcaattattattatattactaaaaaaaaaaaaaaaaa

SEQ ID NO: 60285 - DNA, 154 bp, Oryza sativa
  Clone ID: PAT_MRT4530_61828C.1
gcgtgaaaatgccctccgggccccttttttgagccacaaagctgctgcatgatgtggtgtggttgttgctgtgttgattggctgtgtgatggaattgagcacacaagtgagtgggttgactgaagtctgaagcggtactggtatgagtcaaatt

SEQ ID NO: 60286 - DNA, 2121 bp, Oryza sativa
  Clone ID: PAT_MRT4530_61829C.1
ccccgccgccgccggtcggcgcgggggcgcgatccccccccgcccccccccggcgctgtccccccccgccgaccccgagccgggcgtgccctccgcccgcggccccccccccccggcggtggccgcgccgcgcccgcgtcccccgcgccgccgccccctgccccccccccctcccccgcctcttgtgcccgccccggccctccgcggcccggcccgcccggatggcggtcggcggcgacgacgacatggagagggacttcgccgccaggctccgcctcgcgccctcccccgcctccccgaacgccgccgccggaggtggcggtggcgggatcgccttccgcgcgccgcaggagcagttcaccgtcggcgacttcgagcttggcaagatctacggcgtcggctcctactccaaggtggtgagggccaagaagaaggatacggggaatgtgtacgcgctcaagatcatggacaagaagttcatcaccaaggagaacaagatctcctacgtcaagatggagcgcatcgtgctcgatcagctggatcacccgggcgtcatcaggctcttcttcaccttccaggacacctactccctctatatggcgcttgagtcgtgtgaaggtggggagctgtttgaccaaattgttcgggttggtgtcgtgctgctcacaatgccaacaatgcggataatttatcttaaaggtcgcctgtctgaggatgaggcccggttttatgctgctgaaattgttgatattctggagtatttgcatagtttaggcctaattcatcgggatgttaagccagaaaatttactgcttacttctgatgggcacatcaagattgccgattttggtagtgtgaagcctacaaaggacaccccgatcaaagtccttccaaattccactaacgagagggcctgtacatttgttgggacagctgcatatgtaccacctgaggtcctgaactctgccccaccaacctttggaaatgacttatgggcattggggtgtactctatatcaattgctttctggctcttcaccatttaaagatgccagtgagtggttaattttccagagaattatagcacgcgatctcaaaattcctgagtacttctcagatgatgcaagggatctcattgacaagctgctggatgtcgacccaagcaaacgtccaggtgcaggacctgatggttatgtgtcattgaagaaacatcctttttttagaggcattgattggaaaaatataaggagcacacgggcaccgaagcttgcaatggaggcaaatgcaaatgaggatgaagatagtcaggattcaagttggttgtcacacatgggaagtgctccagtcaaccaacatgtcagtcctgttgggaatgatggtgcctcatcatcttctgaagtacgctcccatatatctagattagcttccatcgactccttcgactctagatggcaggacttcctggagcctggcgaatctgtcgttctaatatcaaaactgaagaagataaacaagctaacgaacaagaaggttcagttgatcctcaccgacaaaccacagctgatctgtgtagatcctggaaaaatggtgactaaagggaacatcatgtggtctgatgacccaagtgaactcaatgtgcaagtatcaaactcttcgcatttcaggatatgcacgccaaagaaggtgtcatcgtttgaggatgcaaaacagcgcgcctggcaatggaagaaggcgatcgaagacctacaacgctgccagaagaactgaccatgaccaactcaagacgtcaaaatggtgatattaagcattgtgtatacaccatagccatccttttcgcctggaggaacatgggggagactattgttcctggtctcctgcatctgtgcccgattgcaacgaagtctcaacagttggcacatcgatggatgttcctacatttttttgttttcttttccggccctgctaaattctcttatagcaaacaattttgctcgtttgttttgtaatttggtgcagcagatagcatcaggaattcaggatgattgaaaacgtttgcacttgaaacatttaacacaggaaactacatgagattgccagtttaaaaaaaaaaaaaaaaaaaagg

SEQ ID NO: 60287 - DNA, 917 bp, Oryza sativa
  Clone ID: PAT_MRT4530_6182C.1
ccggccgggccggccgggacacctaggttttcacctcgccgtcccactcccacccacgccgccgccaccgccgccgccgccgccgcttcactcgccggagcgccatctctagccgccgccgccgtcctccccctgagaaagcgtcgattccgtccgggggtgggcagcggtgggactcgtatccggacggccgcagattcgttgagcgacccgcgctgctggttttagtcttgttggcatccttctgttaaggaaaatggcaagcaaagcaggtggtgacggcaaagaagccatcaatgagcaaataattgcaaacacttatgggaacatgcggtctgaaatgactcaactttacaccaagattacagaattagagatggaagtcagtgaacactctcttgtgattggcgcaatcgagccactggatcactcaaggcgctgctacagaatggttggtggcgtcctggttgaaaggaccatcagggaagtcttgcctgcggtgcatcgcaacaaggagggccttgaagaggtaatcgctcgcatgcatgaagcactggagaagaaaaagaaggagatcaccgagtttgagctgaagtacaagatcaggatccggaaggcggacagcaacgctgatgaggaagaaggcagcaagaaggaagggtctgctcagggtgttcttgttggtcctgctggccagtgaagcaaaatgtcaagcttgcatactggtttttcctagagattatgaaagttaggttgctctttgctagatgtcaactgatttcggtctctctttctatctgtgtgtgaagtatactactattcttctgtggaaccgtggaatccgttccatgtacaattgaatgctatctggctatgctagttgataacttcggtcataaaaaaaaaaaaaaaaaaaa

SEQ ID NO: 60288 - DNA, 399 bp, Oryza sativa
  unsure (1)..(399): unsure at all n locations
  Clone ID: PAT_MRT4530_61830C.1
tgacnccgatcgacccgccagattcttctatttttgtaaactccaacttgctgattcaatcagccaggttaattttcagaaattggagaagaagatcagcgtgatcctgaaactggaagtggctcaaggcctctccctcctcaattccaaatggcaaatgttcagatatttggtctttgtcagatcatcttaattaatctgctcccttttctggttcttgtagagtggtagctaagctcattaggtgagcaattaggagctagtgttcagacttcagagttgagatccatgtcgccttcagagattggcattgtccctgtttttgtttaagtatgtataagagtggttcatgcaactgttgcgttccatgaaaaaaaaaaaaaaaaaaaaaaaaaaaaa

SEQ ID NO: 60289 - DNA, 491 bp, Oryza sativa
  Clone ID: PAT_MRT4530_61831C.1
ggctctgagcgcgcgcgagcgcgacatgcaccccacgttcgcgcgcggtttaaattaggcaagaggcgcgccacggtcgcgccttctttgtctctcccttgttttttttaaaatttttttataagctgcgaggccgcgtcgtccgccattctcttcttcttcttgttgcacaccgccggccggccgtgcgtagtgcgtggcatgtccgtgttccccctagcagctgattgatttgatttggtttttttctttgcttgattacttccttcgatcttgccctggttggttggtggtggtggtgggttctttgctatctctgcgtgcgtgttccggccgtgtcggcggcggtgagcgaagctcgaggcggtgggctgggtgatggtgcggttcctccggcgccatagcctcgacaagaacagcgcgcagttccatcgccagctgagccacgacagcagcagcagcagcagcgacaccgccgacatgcacgagcc

SEQ ID NO: 60290 - DNA, 2563 bp, Oryza sativa
  unsure (1)..(2563): unsure at all n locations
  Clone ID: PAT_MRT4530_61832C.1
tttttgtttttttttttttttgttttttttttttttttgtaacaaaaagattagtttgaaacaaatgaaagaatacagtgtgtgttccccgtccacccagttacatacatacatcccaaggagttcatcttctccttttttcaagagaactcagaactgcttggtacaaaccagtactagttacatgatcagtagcaatggcgtcgaattgcaggtattgcagatgaaaccacctttgttcttttccccctctagaataaagatggagaaggaagaaaaaaaaagaaatcaatagtaattacctcccagcattaattggcattggtaagaagagattagatgctgattagattaataatcaagctgatctctactccagtgtcgtcgttgatctctagtgtccgtcgagttcggttatgtacagcgtgcaagaaagcggcggcgccggtcatcttgtccgactccggcgatggtgccgatcatcttgtgcgtgtgagagagagtgtaatggcggcggtggtggtgatcagtggcgcgcggaggggctcctcatgccgccggcggagaggctgtcgacgtaggagaacttcttgggggcgaggctgggggccttcttgagcttggcctcgccggcctcgtcgagggtgccttcctccttcttcctcatgagctcgtcctggtcgaagtgccaccccatgaagtcgtagagcgtcatggacgccggcgcctcgttgagcttctccagctcctccatggcgtccagcttcctcgccgccgcgtccccgtccatcagcctcctcgccgcctccgtcgccgtcaggttctgcgccgccgcgtccgcccccagcacgtcctctatcctcgacatcacgctgtacgccaggctctccagcaccctcgagtagctctccagtatcgcgtaccccacgtcccggttgtattggatcttggagatgtcgagctgggactgaggggtgccggggaactggagcttgaggaggtggaggatggtctcggcgcgctcctcgaactgctcgcgcttctcgaagctgatgatggagccccacgacgacttggcctcctgcttggtctgcatcttgcgcttccagatgatggtggacgcctcgatgcggttcttgaggtcgagcaccttgtgctccgtggacaggtccacgccttccaggaactcgatcgggtcgaactcctcgtcggtgatgctccggtagatggcgtcgccgaggctggtcttgcccttcttgggcagcgactcgatgtacacctccgggatctccatctccaccagcacctgcgcgttgatcgccatggccgccttcagcacctggttcacgcactccttctggtactgcagccacttcctcgtcacctccgatagcccctccgccggcaccttcaccgtcggcatccaccacttgtcgtcgtccctcttgttgtcccctcccttctcgtaccagaactcgctctggtccacgaagttgtccatgtacccgatgagcatggcgtcgagcttgcggagggcggggacgttcatctggaggtcgcggcgctgggcggtggacatgatctccatggtggtgccgttctcggcggtctggcgggtggggacgaactcgacgatgtggtcggtgacggagaggagccacccgacctccttcttccaccgctccttggtgtccggcgccatgggctccagcttgcggtgctcgccgaacacggacgccgccaggttcgtgatcgcattcgacagcgccagcgccgacgacacgcccttgccggtgccggacatgtcctcgcccagcaggagcttcgcgaacctctccttcatcacgtccaaatcggagggcggcccgtcgcggccgaagcgggagcgcggcgcgcctgcggcggcggctctccccttaggcagcgggggagtgcccccgctgccattgccgtgaggctcgtgcatgtcggcggtgtcgctgctgctgctgctgctgtcgtggctcagctggcgatggaactgcgcgctgttcttgtcgaggctatggcgccggaggaaccgcaccatcacccagcccaccgcctcgagcttcgcgcgcaaggcgtgggcacgtggcacccgccgttcgctcaccgccgcctccgccgccgcgcctcctcacgctcgccgccgccgacacggccggaacacgcacgcagagatagcaaaacccaccaccaccaccaaccaaccagggcaagatcgaaggaagtaatcaagcaaagaaaaaaaccaaatcaaatcaatcagctgctagggggaacacggacatgccacgcactacgcacggccggccggcggtgtgcaacaagaagaagaagagaatggcggacgacgcggcctcgcagcttataaaaaaatttaaaaaaaaacaagggagagacaaagaaggcgcgaccgtggcgcgcctcttgcctaatttaagccgcgcgcgaacgtggggtgccattggtnatcgcgcgcnctcgcggccggatttgcgatgggagatgaggagggggaggaggaggagaagaagaagag

SEQ ID NO: 60291 - DNA, 707 bp, Oryza sativa
  Clone ID: PAT_MRT4530_61833C.1
atggccgcgcaagcctgcgccgcgtccaccacctccgtcggccccgcgcacccgcgcgtctccgccgactcccgtggacccgcgaggctccgtcgcctccgcgtgatcccgcgcgcctccgccgactcggtagcggctcccccggctccgctgcctccgcgcgggcaagccccgcggtcccctttgttgcgagttgccatccccgcgtcgacagcggccgaagcggtttccggccccgtgtggttcggttgcatgcacatgcacttgattcccatcctgcgagtgtaagtgacatgcacgggcgcatgctgcatgcatgtgcatggcacctccgccgactcacgcccggcgctggccccgtgtggcgcgttttgcctccggctcggccccttccgccggaccacgtcacgacacagaggctcgcgcccggcggactccacagtccttccgctggccccggacagctccgccggtcacgccggccttaaaagccaagctccaccggccacacgcggcttcgcgcggcacccccggcactcgccttcgcacacttcatttctagcgggctccggacggtggtacctccgtcgagcaccgcggctttcaccactagatggggtggaccggactccacatctcaagagctcaagatggcgccgccttttcagtgtggtctttgctgagcgtgagggtatccgatgcaaaat

SEQ ID NO: 60292 - DNA, 681 bp, Oryza sativa
  Clone ID: PAT_MRT4530_61834C.1
atggccacaccatcgccggcaggccgtaccgaccccggcggatccgactgccactcgatcgcatttatctgctgggacctgcaaagaatgatggagccaggctacgatccatccagcacgcacgtcccatcagaacgggtggcaatcggcaaatcacgccgagcaagcgagcgcgctacagttccctcctcgctagtggggagaggggcgtggctgatgagcccatccacaggaggtgacaacggtggtgggacgctcacctcccttgcacgcagccggacggcgggtggcgctacttcgtcgaggactcaagacgacggtggtaccggggtggcaagaccacccaaggcggatggcggcgacgcggaggggactacgagggtagacactaacaagggaggggatgctaagggcatggatccaccggctttaaaggtggacgacggaagcgacgaagagatcgcggctcgtcgcgccgacgacggggagggaggggcgccggcgacgttgatggggatgggaaggaggggcgccagcgacagggatagggatgggagagagggcgccgacgatggggagggaggggcgccggcgatggggatggggatgggacgcggtgagggggagaagaagtggcagctccagccttatctgattggggagaaatctatacgtattatc

SEQ ID NO: 60293 - DNA, 324 bp, Oryza sativa
  Clone ID: PAT_MRT4530_61835C.1
gcacgaggatcaagagctgctggttcacttgctcgctgccggccggcgcgcgtgcacattgctagctagctagggatcgatcggccggcggccgtgtcgagcgcgcgcgcgaacggggcatccggcagctagcatggcgcagctgccgcccaggatcccgacggcggtgcaccactggccggagggtgggcaccacggcgcggcggcgtgggccgacgacttcgccgagttcgcggcgtcgcggcggggcgcgcaccggaggtcgctcagcgactcggtggccttcgtcgaggtggcgcccgcggacggcgcgcccggcgagtt

SEQ ID NO: 60294 - DNA, 378 bp, Oryza sativa
  Clone ID: PAT_MRT4530_61836C.1
atgctgtggctgatgctctatctcgtagggaagttggggaagggggacagttatcagccatctcagtttgcattcaagccaaaccagaaagagtcaaatatccagggttacttcaacccttgccggtaccagaaggagcatggcagacgattaccatggatttccttgagggtcttccaaagtctgaaagtacctgatttacaggaatggctgagggacagaaaatttatgcatcagcttatacagcagcatctgcatcgtgctcagcaacagatgaaggcttatgctgataaaaatagaagcttccgggagtttcagccgggtactgcagctgctgatgcgacttgggaggaccaagaagatctgaaggctcgctag

SEQ ID NO: 60295 - DNA, 181 bp, Oryza sativa
  Clone ID: PAT_MRT4530_61837C.1
gcaggccatggcgggcgctaaaggggaagttcagacgagcgccatggcggagcgctcagtacgggtggcggctaggctaacgatttacccaaggagtgggggaggattgaggagagcagacgatgatggaaggcccgtcaaagccgataagaactgcggtcaaataggaaaaaaaaaatga

SEQ ID NO: 60296 - DNA, 1944 bp, Oryza sativa
  Clone ID: PAT_MRT4530_61838C.1
gttgcccgtcctccggccgccgctccccacccgccgccgccgccgccgcccgatagtgctgcagatggcgtcgtcggcgtccaccctcgagatcgaggcccgcgacgtggtgaagatagtgctgcagttctgcaaggagaactcgctgcagcagacgttccagacgctgcagaacgagtgccaggtctcgctcaacaccgtcgacagcatcgacaccttcatcgccgacatcaatgccgggcgctgggacgctgtgctgccccaggttgcgcagctcaagctgccgcgcaagaagctcgaggacctgtacgagcagattgtgctcgagatggctgagctccgtgagctggacacggcgcgcgccatcctccgccagacccaggtcatgggcgtcatgaagcaggagcagcccgagcggtacctcaggcttgagcatctccttgtccggacatactttgaccccaatgaggcctaccaagaatccaccaaggagaaacgacgtgcacagatttcccaagctattgcttctgaagtttcagtagttccaccttctcggttaatggcactgattggtcaggctttgaaatggcaacagcaccaaggattgttaccacctggcacacagtttgatttatttagaggaactgctgcaatgaagcaagatgaagaggaaacatatcctactactttatcacatcaaacaaagttcgggaagaaaactcaccctgaatgtgctcgattttcacctgatggccagtaccttgtatcatgctcagtggatggaatcattgaggtttgggattatatcagcgggaagcttaaaaaggatcttcaatatcaagctgacgaaagcttcatgatgcacgatgatgcggtgctttctgttgatttcagtagagattctgagatgctggcatctggatcacaggatggaaagattaaggtttggcgtatacgaactggccagtgtttgcgtcgcctcgagcgtgcacatgcaaaaggtgttacaagtgttacattctcacgtgatggaactcagatattgagttcatcctttgacactactgcaagagtacatggcctcaagtccggaaagatgctgaaggaattccgaggccataactcatatgtgaattgtgccatcttttctacagatggtagccgtgttattacagcttccagtgattgtactgttaaggtgtgggatacgaaaacaacagattgtttgcaaacattcaagccaccacctcctttgagggccctcaatcatgcttcttaccttatggtggtgctccatttccagggaggagatgcaactgttaactctgtccatttatctccaaagaatagtgatcacattattgtgtgcaataagacatcttcaatatacataatgactctacaaggacaggttgtaaaaagtttttcatctggtaaacgggaagggggagatttccttgcagcttccgtttcaccaaaaggagaatggatatattgtgttggtgaagacatgaacatgtattgctttagctaccagtccggtaaactggagcatctaatgaaggtccacgacaaggatgtgataggcatcactcaccaccctcataggaacttgattgctacttatgctgaagattgcacgatgaaaacatggaagccttgattatttgtaacttgcctttgttcttatcttgtaattgtaggaagcatgattatccatctctgttctaagtgctagataaataggatctattttgatttttgtaatttagagaactgggaggtgaccttactagctaacattatcttccctggtgcttctggagcccagtgtattcccattgtatcttatattatatagcattagtaggtatcattgtatggaggaaaccaaaattaggtgaggtgagaatgattcctttaaaaaaaaaaaaaaaaaaaaaa

SEQ ID NO: 60297 - DNA, 324 bp, Oryza sativa
  unsure (1)..(324): unsure at all n locations
  Clone ID: PAT_MRT4530_61839C.1
aagtagagcatggtgctggtgttgctggtgatgccctgttatgtgtgtacctgtgctgagcttggtgccctgactntacatgccgaatgtggtgcacgtgcaaatagtgagaccacgtttgccatgcatgattgtgcatggattccaatgcgtgtgtcatgatgggatgcaatggttatgttgcatgattgggagtacttgttttcatgttagcatgccagggtgaactggcatattctgaaaccaccatgtaatagtttttactgttctcaacttgtgtagnacccnacatgttcatttgtatgataaaaaaaaaaaaaaaaa

SEQ ID NO: 60298 - DNA, 427 bp, Oryza sativa
  Clone ID: PAT_MRT4530_6183C.1
ggagcctgtcccggagcttgaacgcgaccactatgtcagcgacaccggagatgtggtctactaccagaccgaccctgctaactaaattaattttacatttccttcaattcttttaagcccggaggcttaaattagcttaattagctagctgcgactgacctggacatgtattcaacattcgatccacagacagatagaaagagacctatatatatcgccgatcgatcgatatatatgtgcgtgtccgtgtggagatatggaggtcacaattctttccatggatatataggagtatacatacatgtattgaaggatatgtagctagatttgatgtgcgtgcgtgctgtactttgtaagaccagcataaagctagtgacatttggacaggccatattgatatatcccttatatacaaaaaaaaaaaaaa

SEQ ID NO: 60299 - DNA, 268 bp, Oryza sativa
  unsure (1)..(268): unsure at all n locations
  Clone ID: PAT_MRT4530_61840C.1
cgaaggcccagcacactcagagctcaatgagaaacagcggaaggctagggcgcggaccacaggcgcttgtcggcaggcacgagatagacaccatagccttcatcttgcaggggctcatagtctgggtttgggaaaaattgagcaagactgagtacacccaccaccgaagtggcaacctgaccaagggagccagctcgtcgcaagccaacccaggccaaccattccggggatcctctaaaatcnacntgcnggcntgtgggatgtngag

SEQ ID NO: 60300 - DNA, 600 bp, Oryza sativa
  Clone ID: PAT_MRT4530_61841C.1
ttacagatccaatacattgttgttgagggcgaactcaaacacatcgtttacatcttcattaggatcagctggacctggagctgcttcctctggaatttgtggtacatctgcaaggcctaggtcaggctgctgctgatttaaccctgctggctcctccttgttttgttgtacgttgtcatcagtgtcagtttcttcctccataatttgagctatgccatttgcagtggttgattcctgcagcatggtgatacctgctgcttccagtggaatttgtggtccaccatgtgcaaggcctaggtaagcaggctgctgttgatttaaccctgctggctcctcctggttttgttgtatgttgttcacagtgccaatttggtgcacaaagtcagttgcttcctccataatttggtctttgccatgagcaaatgttgttgattccttcagcttgatgatacctgaaggtccatcagtcgatgccctttttgatttggcatgattggatgaagaagctttattcctttttctcgtttggggaggcttgaatttagttacaggtgccgctaatgctagaactataattctagcatccttctcttgcttcat

SEQ ID NO: 60301 - DNA, 471 bp, Oryza sativa
  Clone ID: PAT_MRT4530_61842C.1
acgggcggtggcaaatctgacgacggggtcgatgacatgagagcaaccgcgacgacgacgaccatgaccgcggcgacgacggcgacgacgctgtgctctggccgggagcacggatctggcggcttcttccctcccctccttctccctctcccaaaggggaggtggcagcggcggcgacgacaggtgggcggcggcggatctgacgacggtggcgacgatgacgaccgcgaccgtggcgacggcaggtgggcagtggtggcggatctgactgcggcggtgacgatgacgaccgcaaccgtggtggtgacgacgacgacgacgatgatgccgctaccggcggctcgatgcgtggccgacggtccacgccggctggactggcggaggctgcctgccatcggctatgcacaagcacgcagcagcatgcatgccgtcacggtggccagagagtcggcgataagcagcggctgctga

SEQ ID NO: 60302 - DNA, 1314 bp, Oryza sativa
  Clone ID: PAT_MRT4530_61843C.1
atggcatccaggtacatgctagccccatgtagcagatgtccccgttggcctgcagcagcagcaatgccaagccaagccgtgtgcgagccggaaaacggcgctgattcgctaccccttggcgagtgcgagcagagtaggaagggccccaaggggagcagtgttttttacatgaacttctacgacggtgacgacgacgacgacgacgatctcattaccgaatggtgggatcaagaggagttgtctgacgatgatgactattacattgcagctgctcttcttacggacatagaacataagaggaccaaaagaaagcgtcgtggttcggtcccaggtcgtgagataatttatagggacaggaggaggttcagaatgtcaaaggagctcttcttgcgcatcgtggctagtgtggaggcttatgatgactacttcaggcagagaccgaatgcaaaggtgtatggtgcaatttgcatgcttgcatatgatattctagccgatagtcttgatgaagtcgtgagaatttcagagagcaccatgatagaagctttcaagcactttgtcaaggctgtggtagatgtgtttgctgatcaatacttgagggcaccaactgctgaggacactgcaaggttgatggctataaacactccaagggggttcccagggatgctaggttgtattgactgtatgcattggaggtggaagaattgcccaacaggctggaaaggacaatactcagggcatgtggatgggccaaccatgattcttgaatctgttgcatctaaagatttatggatttggcattccttctttggattaccaggttctcttaattatatcaatgtactacagagatcaccactctttcaaaggcttacatcagggacagcttctgagctggagtttatggtgaatggaaagaaatacactatgggttactatcttgctgatggcgtatacccttcttgggccacttttgtgaagaccatttccaatccacaaggtaacaagagaatacattatgcaaaagttcaagaaggagtgagaaaggatgttgaaagagcatttggtgttctacaagcctgctttgcaatggtgaggggtcctgctagattttgggatacagagaccctatggtacataatgacagcttgtgtaatcatgcacaacatgatcattgacaatgagcgagatgaagatgtagactacgactatgatcaggaggacagtgaggtgttgagaaaggaggaataccaacggcgtaataaacctatgttagagaagtttctaaagatacataaagaaattgaagaccactaa

SEQ ID NO: 60303 - DNA, 310 bp, Oryza sativa
  unsure (1)..(310): unsure at all n locations
  Clone ID: PAT_MRT4530_61844C.1
cgactcttgtggagcgctcgctcgggggggtcggggggcggcgcnngacncngngaggcgcaggcggcggggnncggcgagctcggccgcgccctgctcgacctgcaggctgccgtcggcctgggcttcgacgccgtcgcggcgcgggcggcggcggtttttttgtngctctccnccttttgggttggccgcgggcgcttctttttctctcntnntacccttgtctccctccgcggggccgttggcggttgtgtcnccngcgccgcntccttcgtggtgtgctgtccntgtggacttggggccgctgttt

SEQ ID NO: 60304 - DNA, 2017 bp, Oryza sativa
  Clone ID: PAT_MRT4530_61845C.1
atgaccattgtcctgcaggttggggtgaaggatatatatggagatgacattagacctttaggcagagcaagtggcaagggaagttctcacgcctgctctgcccgtgttttttatatggacttctacgacgacgatgacgacgacgatgatctcattaccgattggtgggatcaggaggagttgtctgacgatgatgactactacattgcagctgctcttcttacagacatagagcataagaggaccaaaagaaagcatcatggttcagtcccaggtcgtgagataattcatagggacaggtttgctggcaatttacgcatagtggctgattattttgcagatcctcctatatatagtgcaaaattatttaggaggaggttcagaatgtcaagggagctcttcttgcgcatcgtggctagtgtggaggctcatgatgactacttcaggcagagaccaaatgcagtgggtcttctcggtgccactgcattgcagaaggtgtatggtgcaattcgcatgcttgcatatgatattccagccgatagtcttgatgaagtcgtgaggatttcagagagcaccatgatagaagctttcaagcactttgtcaaggctgtggtggatgtgtttgctgatcaatacttgagggcaccaactgctgaggacactgcaaggttgatggctataaacactccaagggggttcccagggatgctaggttgtattgactgttctcttaatgatatcaatgtactacagagatcgccactctttcaaaggcttacatcagggacagctccagagttggagtttatggtgaatggaaataaatacaccatgggttactatcttgctgatggcatatacctttcttgggccacttttgtgaagaccatttctaattcacaaggtaacaagagaatacattatgcaaaagttcaagaaggagtgagaaaggatgttgaaagagcatttggtgttctacaagcccgctttgcaatggtgaggggtcctgctagattttgggatacagagaccctatggtacataatgacagcttgtgtaatcatgcacaacatgatcattgacaatgagcgagatgaaaatgtagattttgactatgatcaggaggacagtgaggtgttgaggaaggaggaataccaacgacgtaataaacctgtgttagagaaatttctaaagatacataaagaaattgaagaccgacggccaaatgacccaagccgtgcaaatgattattccatcgaaaatattcctttgatccttcaccatatcttccttcagcaagtgtcccaccagctcatgaagttaccatcaaagcaggaggaggccttgacggcgcaggttcatattggcgggaccttgacttggcagccggtgcaggctgaggagtcggtgcagacttggcagctggtgcaggctgaggagtcgtttgccatggaccagacggtgcagacttggcagcaggtgcaggcggaggaggtggtggaggcggaggagccggtgcaggcgaaggagccagaggagccgatgcaggcaaaggagccggaggagatggaggaggcggaggagacggcgcttgcggcggggatggaggtgtggacaccccatcttgcccgggaaacatgatgtacctcttcagccagagtaaaatggcatgggctgtgtctccaagtctcgtctccccgtctcctccggggatgtccagctcgagatcctcgtaggttcgttccaccagctctatctcgaccctcgcgtatccaggtggaatgggcttgcaatggtatgtacccaaagggtccgtggatattgatcgggagaggcatcgaatttgcaatagcctgcaaagaagacgacggcaattttctcctcgagtttcagggagcgattttttcttcccaatcacggtcttcactctcttgcacacgcacgatgaaaaaggttcccgcgctccttttctcgcctccctcaccccgcagcgaacgttactcttcctcgcaggcat

SEQ ID NO: 60305 - DNA, 1173 bp, Oryza sativa
  Clone ID: PAT_MRT4530_61846C.1
atggacttctacgacggtgacgacgacgacgacgacgatcttattaccgaatggtgggatcaagaggagttgtttgacgatgatgactactacattgcagctgctcttcttacggacatagagcataagaggaccaaaagaaagcgtcgtggttcagtcccaggtcgtgagataatttatagggataggtttgctggcaatttgcgcatagtggctgattattttgcagatcctcctgtatataatgcaaaattatttaggagaaggttcagaatgtcaagggagctcttcttgcgcatcgtggctagtgtggaggctcatgatgactacttcaggtggagaccgaatgcagtgggtcttctcggtgctactgcattgcagaaggtgtatggtgcaattcgcatgcttgcatatgatattccaaccgatagtcttgatgaagttgtgaggatttcagagagcaccatgatagaagctttcaagcactttgtcaaggctgtggtagatgtgcttgctgatcaatacttgagggcaccaactgctgaggacactgcaaggttgatggctataaacactccaagggggttcccagggatgttaggttgtattggctgttctcttaatgatatcaatgtactacagagatcaccactctttcaaaggcttacatcaaggacagctcctgagctggagtttatagtgaatggaaagaaatacactatgggttactatcttgctgatggcatatacccttcttgggccacttttgtgaagaccatttccaatccacaaggtaacaagagaatacattatgcaaaagttcaagaaggagtgagaaaggatgttgaaagagcatttggtgttctacaagcccgctttgcaatggtgaggggtcctgctagattttgggatacagagaccctatggtacataatgacagcttgtgtaatcatgcacaacatgatcattgacaatgagcgagatgaagatgtagactatgactatgatcgggaggacagtgaggtgttgagaaaggaggaataccaatggcgtaataaacctgtgttagagaagtttctaaagatacataaagaaattgaagaccgacaggtacatgagcaacttcgagatgatgttgtggaacagttgtgggcgcttcatggtgctcgatag

SEQ ID NO: 60306 - DNA, 999 bp, Oryza sativa
  Clone ID: PAT_MRT4530_61847C.1
atggacttctacgacgacgatgatctcattaccgattggtgggatcaggaggagttgtctgacgatgatgactactacattgcagctgctcttcttacagacatagagcataagaggaccaaaagaaagcatcgtggttcagtcccaggtcgtgagataattaatagggacaggtttgctggcaatttacgcatagtggctgattattttgcagatcctcctgtatatagtgcaaaattatttaggaggaggttcagaatgtcaagggagctcttcttgcgcatcgtggctagtgtggaggctcatgatgactacttcaggcagagaccaaatgcagtgggtcttctcggtgccactgcattgcagaaggtgtatggtgcaattcgcatgcttgcatatgatattccagccgatagtcttgatgaagtcgtgaggatttcagagagcaccatgatagaagctttcaagcactttgtcaaggctgtggtggatgtgtttgctgatcaatacttgagagcaccaactgctgaggacactacaaggttgatggctataaacactccaagggggttcccagggatgctaggttgtattgactgctggaaaggacaatactcagggcatgtggatgggccaaccatgattcttgaagctgttgcatctaaagatttgtggatttggcattccttctttggactaccaggttctcttaatgatatcattgtactacagagatcaccactctttcaaaggcttacattagggacagctccagagttggagtttatggtgaatggaaataaatacaccatgggttactatcttgctgttggcatatacccttcttgggccacttttgtgaagaccatttctaatccacaaggtaacaagagaatacattatgcaaaagttcaagaaggagtgagaaaggatgttgaaagagcatttggtgttctacaagcccgctttgcaatggtgaggggtcctgctagattttga

SEQ ID NO: 60307 - DNA, 800 bp, Oryza sativa
  Clone ID: PAT_MRT4530_61848C.1
tttcgcttgttgtgtccatgatggcattacagcaaatgggagacccaggatggcactgcatgtttcacagtgttttttttttccaaggagttctgaacattcgccgaaaagaggagagcggcatgattgagtgatgaggacatcacttggagagaggctagaattaattgatgctaaaattaaataaggtgagtatgctcaagctgaattacatatgtccaccttttatcctatcatagagcaatcattaattaatggaacccattgttgagattcctttgtcataagttgattttcttcttgtttcttatactaaaaaggaattctttggtaatatttcacttatatccatgccacaacttgtgaatgaacatacaaattctatgggtggtctgttaggtgttaattttaagcatcatgttcataatgttatattgtttaaatactttgggctatattttgtttgatgatctttttgagctcaataatttaaagcagaaactatttgctagatcttatttgccatgtcttggtaattgaatttttcacatctttgacaaatataatgataaaagagtttatatggtgcacatattttatttatgtttagatctagatcttcttgtagcgatgcgttatttttgaatttgttttgttttaatttaaagagccatatattatataatgaaagtttgttacgtttcttttcatgtatgtacttttatgggcaagataaagagtaccatatgaaaaaaccaagtacagttttacgtgaataaggaaatgattgggatgatatg

SEQ ID NO: 60308 - DNA, 1290 bp, Oryza sativa
  Clone ID: PAT_MRT4530_61849C.1
atggtcctcctgctgcacggccatcgtccctaccgctgtccgcccgcatgccactatccgctcgccggcaggagaaccggtggctgcccacccccacgctgccccattggcccaacggatggagggccaccgccttcgcactgccggagggccaccgctccaagccagcctacacgccgccctatgctcgccgctctctgccccctacggcttgtttggcaccttgagggaatgggattgggagtttacacgagggaattgatggaggaagcgtctgacgacgatgactactatattgcagctgctcttcttactgacatagagcataagagaaccaaaaggaagcatcgtggttcagtcatgggtcaagagataatttacagggacagatttgctggcaatttgcgcatagtggctgattattttgcagatcctcctatatatagtgcaaaattatttagaaggaggttcaggaggatgtcaagggagctctttttgcgcatagtggctagtgtggaggcacatgatgactactttaggcaaagaccaaacgcggtgggtcttcttggtgccactgcattgcaaaaggtgtatggtgcagttcgcatgcttgcatatgatattccagccgatagtcttgatgaagttgtgagaatttcaaaaaacaccatgatagaagctttcaaacactttgtcaaggctgtggtggatgtgtttgctgaccaatacttgagggcaccaacagctgatgacactgcaaggttgatggctatgaacactccaagagggtttccagggatgctaggttgcactgactgttggaaagggcaatactcagggcatgtggatgggccaaccatgattcttgaagctgttgcatctaaagatttgtggatttggcattccttctttggattaccaagttctcttaatgatatcaatgtcgtacagagatcaccactctttcaaaggcttacttcagggacagctccagagctagagtttatggtgaatggtaagaaatacactatgggttactatcttgctaatggcatatacctttcctgggccacttttgtgaagaccatttccaatccacagggtaacaagagaatccattacacaaaagttcaagaaggagtgaggaaggatgttgaaagagcatttggtgttttacaagcccgctttgcaatggtgaggggtcctgctaaattttgggataccgagaccctatgtgagcgagatgaagatgtagacttcgattatgatcaggggatagtgaggtgttga

SEQ ID NO: 60309 - DNA, 297 bp, Oryza sativa
  unsure (1)..(297): unsure at all n locations
  Clone ID: PAT_MRT4530_6184C.1
atgctgcaattgagaactacatanctctgggacataagtatctttttcatgcatacaatgctgtctgctttgttgcttaaattagaacaaccacatatcagtgataacatatcacttctttatttagctcatacatgcctcattattaatattagtttactaaatgttgctgggttgaccaagagtcactaccaaactattctgccaatgtataaaattgctctctcacaaggttgtttcctgttgtggcctccccatatcactagaattgtaattccgaaacagataccaaacccc

SEQ ID NO: 60310 - DNA, 1455 bp, Oryza sativa
  Clone ID: PAT_MRT4530_61850C.1
atgcccctcttgctggcgccgccgccgagcgccgcccgcccgctgctcgccccgaccgtgccccacctcgcgcgcaccctcctcgccggcgcgccggagaccccgccgctcctcctcgcgatactccaggcctcgccgcctctcctcacgccgctcctctcccacctcctcctctcccactccccgcccctcccggcgctctccctcttccgccgcctcctcgccctcccgggcttccccgtcccggaggcctccctccccgccctcctccgcctcctcgcgcgctcccgccgccacgccgtcctctcgttccgcctgctcgactccctcccgcccacgcacccgcacctcctctccactccggcgctcgcggtgctcctctccaccgcgctctccgcgtccgccccgggcgcgtccttcgacgccgctgtcacctgcttcgactccgccgcgcgcgtgtgggcgcgcgccgggcgcgagttcggggtcgccgagctcaacgcgctgctccgcgcgttctgcgcccgcggccgcgtcgccgaggcccgcgcgctgttccaccggtactgcgacgcgtacccgcccgacgcacgcacgttcaacacgctgctgctcggattcaaggaggcagggaacgcccaggcgctggacctgttctaccatgacgccgtgcttcgcggcttcgtgccggacgccgtgtcgtactgcgtgaggatggacgcctactgcaagaaagggagattcttggacgccctcgacctgctcgacgaaatgcgtaagcgggagaactgcaggccgacactgcaggtgttcaccacgctgatctatggagctgggattgtgaggaatgcgatacgtgcgcgccagcttttcgatgaaatggggcagtggggagtgaccccagaccgtggcgctcacaatgcgctcatgggcgcatatgttagggcgagagacttgcagtctgggatgacagtcatgagcgagatggagcgcaaggggattggtctggatgacgttagctacaatacaatgttgtgtggatttcagagaattggggatttggagggcatctggaaagtgtatagcaagatggttggttcagggttcatgccgaggactaggacaacaatgttgcttatgaaggtcttctgcgagaatgcacgaccagatcttgggctagagctgtgggattatctgctggggaagggatgtgtgcctcaccggcatgcattggatgttctggtcactggtttatgctgcagaggtgtggttttggaagcatacaggtgttttagggagatgattgagatggggatgactcctacagaacgagcttttagggttttggaagggtttttgaagcggaagcgggaattcgaaaagcttgaggagattaggcaaatgatgaaggcagcccaattggatgaacatcaatgtgatgaagaggctgcctga

SEQ ID NO: 60311 - DNA, 543 bp, Oryza sativa
  Clone ID: PAT_MRT4530_61851C.1
atgatgacatcatcgccggcggcggctcggcacaccatgctcgccggcgaacgacggcgcgacagcgcaaacgaagggcaccagcgggtagagcgcaacgcggcgaactcaccgaaggctcagatgacgacggacggcaatagatggcaacggcggcgaggtcgaggcggcggagaccttcgggacgacggcgacggcgatgatccggtggtcttcggtggaaacggaggatgggacggggacggcgatgacttggcgatcccgacggcggcggcttgcacgcggctagggcgcggctggcggctggaggtggaagacggccctgacaggtgggccccacctcatggcctcgacgtggatagcacgcacaccgccgtgacacctgacttcccgagcctcctttaccttcacgatatcccgcagagccttgcaccattggccaacatcgtgataacgaccgccgctgatgaattgatgcgtgctattgtgccaagcttagcagatgaaaatggcgtatccatgatcaggccagctagggagtga

SEQ ID NO: 60312 - DNA, 476 bp, Oryza sativa
  unsure (1)..(476): unsure at all n locations
  Clone ID: PAT_MRT4530_61852C.1
aagcacccacccnctcccacaatgctccccatgcctcaattcttctaactttcagagcccagcacaggccaaataccccgtctcggcancacctcagcccactaatgacgcaaatcaaaccccagtcttctcgctcaccccatgggatctgaacaacaccaagagttggttttcagcttccaatgcagcgcttcagttttgatcgctacctgttgcatcagatcgggcgcagtgcatgggctcggatcgaacagattggagtcggaggacaagtaccaaaaatgtatcattgttgtgttcagtgcccagcttttggtttggtgtgtgcagtgaacacaaatgggggaattaatcaaggagttattttttttatttttcttcccagtgtatgtaccatangtaatatatataattaagctcaggatgacaaggatatttcatggatctcatggtgttcgtccaaaaaaaaaaaaaaa

SEQ ID NO: 60313 - DNA, 2128 bp, Oryza sativa
  Clone ID: PAT_MRT4530_61853C.1
atggcggtggctggtgcatttcgtcgttctacttccactgccctgcaggcgctaactgccttgtctgtgcttgcagctctccttcaagttgaagggcagatgtacgggcccgaggaggcagcgcagacagcgcagtgtcctcccttctcctggggccatctcaagaacgtttcccctccgttccgccggcacggcgatccacctgattgcggctataaatctcacgagctggtttgcagcgacaccaaggccacaattcgcatcaacaatgcaacatactacgtgactcgcattatccattggagccttttcgtcgtcgttgacacagacttgctgaattcacataacagcagctgccctcttccgcggcggcagcatcaacctccacacgagcgcatatccatggcccctaccagtgacggagtccaagtaattgaactggccccttttacaaataggtgggctgcatttgtgaattgttccaaggagataacgaggaatgtcaggtacaaacccgtcgcttgcctgagcaccagccattccttcgtctacgtgctgactggctcggagtcagaaactgtttatgttgagagcctagagccttcttgtgggtacctgggcatgacacctctggatgacaggggagcgtctatcaatgcaagcttaagctatgctgatgtcctgaaatacatgaggaaagggtttgccattggaatttcttcttcatcagggacatatcactttgattttagagcatgcctggcagagtccgttaggttcctgttggcgccgcttgttgtattaaccttcctttcccacaaatactggaaagcaaggatcacaatcgatgcagttgagaagttcctccgaatgcaagagatgctcagcccaatgaggtatggctacacagacatcattgcaatcacaagccatttcagagacaggctaggccaaggaagctatgggactgtgtataaaggcgtattgctcccgggcaatatccatgttgccgtcaagatgctaaatggcaactccaactgcaacggagaagagttcatcagtgaggtctctaccattggccggatccaccatgtcaatgtggtgcgcctggtagggttctgctctgaagaaatgagaagagcgcttgtctacgagtacatgcctcggggttctcttgacaagtacatcttctcatccgacaagagtttctccagggataagctaaatgaaatcgcgttgggcatagccagaggaatcaactacctgcatcaggggtgtgatctgcagattctacactttgacatcaagccacacaacatccttctagacaagaactttgttccaaaagttgcagattttggtctcgcaaggctatacccaagggacaagagctttgtgccggtgagcgctgcacgaggaacagtaggttacattgcccctgagatgatctctcggagctttggtgttatatcaagcaagtccgacgtttacagcttcgggatgctactattggagatggccggaggaagaaggaatgctgatccgaatgcagagaattcaagccaggcatactatccatcacgagtgtaccgtcagctgacccgacaagaaacaggtgagatcaccgctgccgccgacatgcatgagttggagaagaagctctgcatcgttggattgtggtgcatccagatgaggtcttgtgaccgaccgatgatgagcgaggtgatagagatgcttgaaggtggtgttgattgtttgcaaattcctcctaggccattcttctgtgacgatgactacatcccggcaatggagtcgctgtatctgtcctccgagctggagctggctgccatctccgaggagaaagacgaggagagtatcactgagttgaattagctagtaggagttgcaagtatagtgtgttgatgtcttttcgtgagcaggttgtgctgaagcctgtgatgattgtagacagtcgcacagatgcagtttctatgatcctactcctatattcctgtagaatgcgtatatgtgggcttgtacgatttattatcttgtgcttcatctgtatgaatgcatgcaaaaatcgagctaagctagtgttctgtgttgtcggcaaaaaaaaaaaaaa

SEQ ID NO: 60314 - DNA, 2106 bp, Oryza sativa
  Clone ID: PAT_MRT4530_61854C.1
atggctggtgcgtttcgtcgttctgctgccctgcaggccatggctgccttctctgtgcttgcacttgttgtaccagatcaggttcaggggagaggcaagtgcccatctttctcctgcggacgtcttagctatgtgcatttcccattccgtcgtcaaggcgaccccgctgaatgtggtgttccatcatatgagctgacttgtgcagacagcaatgctacaattcagatcgacaaggcaacatacttggtaactgacatcaactacagtgatcagtacttctgggtggtcgatgcaagcttggattcagctaacaactgccctcttcctcggtggagtcagactccttataatgaaaactacaggcttggagaagattcacaccgccgtgtccaagtccagttgtcccctgatgtggattggttcgctacctttgtgaaatgctcgcaggaaatgaatagcagcaatgtcatgtacaggcctgtggcttgccggagcggcaactcttctttcgtctatgtgctaactggtctgggatcttatttagctgagaaccttgagccttcctgtggatacctggcaatgactcctttagctctgggtggtctagagaattggcgaactgctactgcggctgcgacactggaggatgtaaattatgaagatgttgtcagatccatgagtgaaggattcgctgttcgttttcctttcaggtctgggggattcatcgactgcctaaggggcttgatcagcagggatgaacatgtttatggtgtagcatgcaggttcgtcctggtgatgctgctgatgtggacctccgttgcctacatgtactggaaaataaagatgagagttgatgaagtagagaagtttctgcaattgcaacaaatgctgaccccaacgagatactcctacaccgacattattgccatcacaagtcattacagagacaagcttggccaaggaggatatggctccgtctacaaaggtgtgctactccctggtgatgtccgagttgccattaagatgctgaagggtgacgcaaattgcaaaggggaagagttcatcagcgaggtctccaccattggtaggatccaccatgtcaatgtggtgcgactcgtcgggttctgctctgaagaaataagaagagcgcttgtgtacgagtatatgcctcagggttctcttgacaagtacatcttctcgtctgaaaagagtttctcctgggataagctaaatgaaattgcattgggcattgccagagggatcaactacctgcatcatgggtgtgatatgcaaattctacactttgacatcaaaccgcacaacatccttcttgacaacaactttgtcccaaaagttgccgattttggccttgcaaagctgtacccaagggacaagagttttgtcccagtgagcgcagcacgaggaacagtgggatacatagctcctgagatgatctctcggggttttggtgccatatcaagcaagtccgatgtttacagcttcgggatgctactattggagatggccggaggaagaaggaatgctgatccgaatgcggagaattcaagccaggcatactatccatcacgagtgtaccgtcagctgacccgacaagaaacaggtgagatcaccgctgccgccgacatgcatgagttggagaagaagctctgcatcgttggattgtggtgcatccagatgaggtcttgtgaccgaccgatgatgagcgaggtgatagagatgcttgaaggtggtgttgattgtttgcaaattcctcctaggccattcttctgtgacgatgactacatcccggcaatggagtcgctgtatctgtcctccgaggtggagctggctgcaatctccgaggaggaagacgagagtatcactgagttgaattagctagtactagcaagtatggtgtgttgatgtcttttcgtgagcaggttgtgctcaagcctgtgatgattgtagacagtcacacagatgcagtttctatgctcctattcctatattcctgtagaatgcgtatatgtgggcttgtacgatttattatcttgtgcttcatctgtatgaatgcatgcaaaaatcgagctaaaaaaaaaaaaaaaa

SEQ ID NO: 60315 - DNA, 153 bp, Oryza sativa
  unsure (1)..(153): unsure at all n locations
  Clone ID: PAT_MRT4530_61855C.1
cccactcgtccggcgagcggccggtggcgatggagaactaaatgcaagcggncantntanannatncaatnnnactnntntnananaanataacaannatttacactttntntttncttttnnanacaacctcacaccacnatacannattaa

SEQ ID NO: 60316 - DNA, 249 bp, Oryza sativa
  Clone ID: PAT_MRT4530_61856C.1
atggtgctcatgcttcctctacaactggcgctgctgctgattagttctgctggagtttattggcgcggtggctactggctagctggctgccggatactgccaaggaatagtccagtcggtaacaaaatctgcgagaacctggaacttgatagctgttctcagaacgaagtggacattaaattggctaagcttgatgacccacttggcaatgcgtcctacaacatctttgttcctgaccacctcgcatag

SEQ ID NO: 60317 - DNA, 275 bp, Oryza sativa
  Clone ID: PAT_MRT4530_61857C.1
gccgcgtcggcggtttatatctcgggcgccgggacgatgacggggtgggttccagcattgaagaaggaggctattgccatgcgacattcattaaggtacacgaggacgcgctgcatgacggtcttgtacaagccattggataacacaatctgttgggccccgctgatgatcactatggtatgatgtactagcgattcacacaaggattgctacaacttgaggggctaacggcaacataagatgcgggcctgtgacattgggaggactcaatcggt

SEQ ID NO: 60318 - DNA, 611 bp, Oryza sativa
  Clone ID: PAT_MRT4530_61858C.1
cccactcgtccgaaggcgccggcggggaagaagcccaaggcggagaagcggctgccggcgtcgaaggcgtcgtccaaggagggcggcgccggcgacaagaaggggaggaagaaggcgaagaagagcgtcgagacctacaagatctacatcttcaaggtcctgaagcaggtgcacccggacatcggaatctcctccaaggccatgtcgatcatgaactccttcatcaacgacatcttcgagaagctcgcgcaggaggccgcccgcctcgcccgctacaacaagaagcccaccatcacctcccgcgagatccagacctccgtccgcctcgtcctccccggcgagctcgccaagcacgccgtctccgagggcaccaaggcggtcaccaagttcaccagcaactaggcctgtctctctagggtttcgatgccatgcttctctccttccctttcccctcgtgtgcagtgtgctaggtggcagtagttgcaaacttgtgcctgctttgtaaattgtgcttgatcataatgggcagcttggatttgaagtaatagacgtgtcgagtgttatttattggtcggtggctggttcgcatcttggggttttcttttctcttt

SEQ ID NO: 60319 - DNA, 1233 bp, Oryza sativa
  Clone ID: PAT_MRT4530_61859C.1
acacacagagttgtttgcattgtagattgacaatggcctcttgtctgtcagtcctgttgctcttgtgtctagcacttgcaggttcagtctccgggcaacaactgtcggctacattctattcgaggtcgtgcccgagagctctggccatcatcagggccggcgtgagagctgcggtggcgcaggagcctcgcatgggggcgtcactgctcaggcttcacttccatgactgctttgtccaagggtgcgacgcgtccgtactgctgaacgacacggccaacttcaccggcgagcagggggcgaaccccaacgtcggatccatcagaggattcaacgtcgtcgacaacatcaaggcgcaggtcgaggccgcgtgcaagcagaccgtctcctgcgccgacatcctcgccgtcgccgcccgcgactccgtcgtcgccttgggtgggccgtcatggagggttcttctcgggaggcgtgactcgacgacggcgagcttggcgctggcgaacagcgacctgccacctccgtccttcgacgtcgccaacctcaccgcctcgttcgccgccaaggggctgagccaagccgacatggtggcgctctccggcgcgcacacggtcgggcaggcgcagtgccaaaacttccgcgacaggctctacaacgagaccaacatcgacgccgccttcgcggcggcgctcaaggccagctgcccgcggccgacgggcagcggcgacggcaacctggcgccgctggacacgacgacgcccaccgcgttcgacaacgcctactacaccaacctgctgtcgaacaaggggctcctgcactccgaccaggtgctcttcaacggcggcgccgtcgacggccaggtccggtcgtacgcgtccgggccgtcgaggttcagaagggacttcgcggcggccatggtgaagatggggaacatcgccccgttgacgggaacgcagggacaaatcaggctcgtctgctccaaggtgaattaattagcggtgatcatcaacgaaaattctgagtgcatgaggggacaataataaggctatatatgccactgaaatcgatatttgtgctttgcactgatcagtgatcatgttcacgctttcttggatcaaattgtgtccgagaaagtggcgtgtttgcaagaatttgatcgtgtacactgaattctgaagagccctcatgcaaatgcccgcgagattaactcccttgcctaaaaaaaaaaaaaccaaa

SEQ ID NO: 60320 - DNA, 692 bp, Oryza sativa
  unsure (1)..(692): unsure at all n locations
  Clone ID: PAT_MRT4530_6185C.1
ccggccgggatactctgttttagtgttcacaaacacagacttccttctcgagcaaatacgtgaaccagtagtcgatgatccgccgaggaagcgtgttcgaccccttctccctcaacctctgcgatcccggccacgggttccccttcggctccggagatattctgacgagacgaggagactattgcctcggcgcaactccaaggcggcgggctttggcggcgggcgaatccactgaaaagagacacccgaggtgcacgggtatgaggcgcacgagccgggggtgaaaaaggaagaggatgaggtggatgcgcactcacggaaacatcctgcagattagcgcggagggcatcactcagcaagaggagaagccggacaagtgggaccgctgtggagcgcagcagcaggaaggtcctccgcagggtacgcctacccgagaacaccaagacggattacatctgggtccccatggtagaatggagtggtcaccgttagcgtgccctaggaagagcccaggaagcccgacgtcaagtgcatccagatctccggctagatccgcgattgttgattctgctgcttctcctcattgatgatactgatctgctcctttgagactttgtttgtgtcgcgaggnacacagaccaaaatgagcagtgatatgatcatgcgtttatgaatgtgtggtctcctccaag

SEQ ID NO: 60321 - DNA, 366 bp, Oryza sativa
  Clone ID: PAT_MRT4530_61860C.1
catgttagccccgatagcgcgggccattgagacgggttacctcttgcgaagaactcaccggaaaacgagaaaatacaattgccttaatcgagctctatctcttattggcaatgacggttatcccgatctaggcccacgccgagcccaagtcatgtcatatcggttgtatcggccatcagcctcatcaaccttgatcaaccccatactctgttttcagccgatacggcatccagccgatgcgcagtccgactcccagttcagctcgattccacaccagatccgcttcgaccttcttcctccttctccgaatctgatgccaaattccgttgttaacaacattgcaaatgtgctgggctgcagggagaa

SEQ ID NO: 60322 - DNA, 489 bp, Oryza sativa
  unsure (1)..(489): unsure at all n locations
  Clone ID: PAT_MRT4530_61861C.1
ctgggggcggggtttgtgggtaaaaaannnnnggggggggggggctataacctacgggaattttcatttatggaaacaacagcttacaaaggggaagtccccaacaaattcggggtttgaattacccaaattttacttcaaaccattcnaggggaaatgctcgggaacctttttttttttaacccaaaacaatcaattgntttaaaaaacttattacctggggaataactccccccccatcanntaaaatcattcctcctcctccttccaacnacaattcnaaagggcatctcaaccttttgtttgccttccatgcttttncctggccaatctttttccttgctgggtttccctccccgccccggggtgccgccctccggttttttgaacccccccttctttgaccccattttttttcctcggaaggaaaaagtaaaccgcccctgattattaaccggggggccctcccctaaagggaacccgaaaaac

SEQ ID NO: 60323 - DNA, 350 bp, Oryza sativa
  Clone ID: PAT_MRT4530_61862C.1
attggttccccaagcaacagaggcagaaatatccggggggaacagaagccgaacagggggacctaaagagaacacggatgaaggatatttccgccgactcttcagaggacagggggccctgaacataaaaggctctggccctccatcccacaaagaaatatggtcagcaggagacgacgggttgacaaaccatagcctccagctgagcctgaaccaactactgatgatcatccagcagcggagactctcagggaagaccgcatcagacctgccatcgagcgggtttagaggcccgggggtaagggcgaagagcccgggaacaagccaccagagactccctaggagaaaga

SEQ ID NO: 60324 - DNA, 147 bp, Oryza sativa
  Clone ID: PAT_MRT4530_61863C.1
ctcagctgccagctcgatcgactcgaccagcttatgcattcagagatggacgatggctggccgtcatggggtcctcctgcagctgggcatggtggttgcgtcgttgcgagcattcgatccgatggggacgacacattgcgccgctag

SEQ ID NO: 60325 - DNA, 411 bp, Oryza sativa
  Clone ID: PAT_MRT4530_61864C.1
atgacaggtgtgtataaagagaacgagattgaacatataaaacattggctttcacatcaagaagaggtgcatgatgagttacttttgcatgcttgcgatattgaaagtcagattgagaaagaaacaaaaatgcctatgatacatgagaatattcttgtgccttctattgtatctaacatcgtgcaggaagatatgaatcctcatttaaatatggaaaaatatgagaaaccaaatggatcatacaatgttgatgctattggaataaattcacctaacgttgttttaaatattgatgacaatattcaaggagaggagtgttgtgcactattaaattcaaaggtcaagtctcgctatcattttaagacatattcattcagtaagttgatctctcctatacgacaattgcaataa

SEQ ID NO: 60326 - DNA, 643 bp, Oryza sativa
  Clone ID: PAT_MRT4530_61865C.1
ctgttagcaaacatgggaatggcaccatatcaagggatcaggggatcattataacacgtgcaggaacaataatgtacattggaagtacaatgaaattggcaagcacgttactccaaacaacaaaattgggaacaatattgtttggctcgatgtaagcaataacttaactaaactctgtacaatgaaacagtagagtgtatactttttttgaaatcccaatctcaggaaagaatgttgcaaaaagtatttgtgagcaatgttggattctaaaactctgcagagcctggaacccggggaaatggaatggtgtctctaatgttgtccattccagttgcaaactgtactagtctttcaaatccaagaccaaaaccagcatgaggaactgatccatatcgccgtagatctaagtaccaccagtagctatcttggttaagatttaactcatccaagcgagcttcaaggtaatcaagacgttcttcccttgggcttccaccaatgagttcaccaacccgaggaaccaatagatccattgcagcaacggtattaccatcatcattttctcgcatatagaaagctttgattaccttgggataatctctaattatcaccgggcgcccaccaaaagcaacttctgtgatatatc

SEQ ID NO: 60327 - DNA, 585 bp, Oryza sativa
  Clone ID: PAT_MRT4530_61866C.1
atgacagaagtgtacaaagagaatgggattgaacaaataaaacattggctttcacaacgagaagagttacttctgcttgcttgcgatattgaaagtcagattgagaaagaaacaaaaatagctatgatacatgacaatattcctgtgccttctattatatctaacatcgtgcaggaaggtaaaaacaattttgaagaaaagaagaatgaagcacctaaatttggtcaagagagcgtttcagatatgaatcctcctttaaatatggaaaaatatgagaaaccaaatggattgcacaacgttgatgctattgggataaattcacctaacgttgttttaaatatcgatgacaatattcaagaaggtgagtgctgtgcactgttaacttcgaaggtcaagtctcgctatcattttaagacatattcattcagtacgtgttctctcgtttgcattgcagagatcatcaaatgcgcgtcacggttgggacgtgattcaaaatccacattgagagacctaaagtggacttatttcccagcaaaatcagtcgcttcaacttcaaccaatgacatttttaagttcattttttaa

SEQ ID NO: 60328 - DNA, 507 bp, Oryza sativa
  Clone ID: PAT_MRT4530_61867C.1
atggggagggaaggagaaggggaggccgggggtttaaggaggcggcaatgtcggtttggggaaccgacttgcgcggtcaagagcgcgagctggcgctcggctagcggccaaagcggtggcagacgggatgacgccggcgggagaggaaaaaggaggaaggggaaaaggaggaggagaaaggaattctctcctttgccgattcgggaaaaggagggtgggcgcggggcgacgacgcggcagagggaggcgccacgacggaacgggcgctacaagcagccaccgccgccgcccttcgtgtccgggcttggcggggacctggtggtggttaagctagtgtccgcgacggtgccgaggtggaagaagtacgacttcgccaggtgtaaggtgcagatcatggcgatggccaggttttgccacccccgcatcctcttcgatgaccatcgcgatggcgtgtccctccctgccgcgctcttgacaaacagtgttggtgatgatgtggcatcctga

SEQ ID NO: 60329 - DNA, 955 bp, Oryza sativa
  Clone ID: PAT_MRT4530_61868C.1
tttttttttttttttgaattggagatagtagttggctatattattgaacttgctcttaagcatttgcacatttattcatgtcatgtgatcgtgtactactcctctctgcacttggggaaaaaagagagaacatggcggcaatatactagtagtagtgatactattcagcaactaatttaatcagcaccctcaactctactggatctcttcctctgtctctctattgttcatcatttgcagaaaagagtctccttcgtggcgtttccagtggttgtattgaccccatcagcaattttgcagaggtattcacgctgatcgtctcgcagtggaacatctgtaaaatctatttgaacgtcgtgtttcctgtggcaagtgccccttccaagttggcatttgtcagatttacctgtgaaatccatgcttgacaaactggtagtaacttaatcagaaagtggtcaatgactttcttcgatacatttgccagtgagaaatctgcacctctaagatcagcatcagagagatcagcacctgtcagatctgcatcaaagaagctcgcgccgagcagcttcgcgcctttgaagttcgcctgcctcagtatagacgtcttgaagtcctgcctgatgagcgtctggccactgaagtccttgccggtgaggtcctgcccccgtgtcacctgctgcccgtacgggcctcctcccttgaatgccagggccgggtcggcgacgaggagcgaggccgcgacgagcgcggcggcgccggcgttggcgaggtggaaatgcagggaggaggaggcggaggagcgcaccggcgtggcggagggtggggatggcgtgagcttcagactgcccaggatggtggggatggccatgatcgatcgtcgtcgattcttgatgctctccgactccggtggtcgtcggagctggtttcttcgcccacgcgtccgcccacgcgtccg

SEQ ID NO: 60330 - DNA, 505 bp, Oryza sativa
  Clone ID: PAT_MRT4530_61869C.1
atgccgccaccgccgggggagcccacggtgataggtgccatgctcaatgccgccgtcctcctccccccacgacggtgcggacaagctcgccaacggcgtggcgagcttggcggcggcgggctcgccgaatctggcgatggggggccacaacgcagtggatccggacgcggcctcgacgccgtcgtcctgctccccccacgacagcacggacgagctcgccgacggcgtggcgagcttggcggcggcaggcttgccggatccgggcacgggctcgccggatcctgcggcggggaacagcggtggcgacggatctaacgacgacaagaaagacggcgaagcggtggcggggagtagcgacaacgactgcggtggatctggcgaggcgacgacgaccacaacgagatggagatttggggcgcgacgcttgcaccggttcctcttcaagctcgctgacagcctgcgagaccacccaatcccgtgccatctcggctcggctccgacgtag

SEQ ID NO: 60331 - DNA, 726 bp, Oryza sativa
  Clone ID: PAT_MRT4530_6186C.1
ataggctgtggcagaagaggaaggctgaggtcaagcagcagtagatcttgctactagttttacctggaagaactcgtttcaatttcatgaagaactccgcctcggcgaactccaggttcagcgcgaaccgcaccgggtccactgtgtgtgtgtaaaatcaaagtgtgtttgattattgtttcgtgatgaataattggcatatgagattattggttttgatgttgagatattattggcgaagtggttttggagatgattgatttacaggtgatggacaggattgacaagtctgacggttgcgacattcgaacgatcaggatatcatgtggaatactttggctaaacatcattgcacgtggttggtgaagatttcatatggcatacgatgtagatattgtgtgcgtatgagatacggagtcgaatttggaaggagtccaaatttggtacatttggagtttgtaaagtttgtttctttttcggaaaggtttcctatatgattaggacttcttgtacaaggttggttcgtgactttaggctacctacctcagttataaatagagagggagggtgtgaccgactgcaacgtggcgtcaaactggcgggcacacggtggtctaaccgtgcccgccagtttgaccggcaactgcaacaggcgcatcgggcggtcagaccggagtgactgcaccagttagatcggatgtcatcgagcggtttgaccgtccgatc

SEQ ID NO: 60332 - DNA, 1592 bp, Oryza sativa
  Clone ID: PAT_MRT4530_61870C.1
atgtcgtcttccgcagcggcgctcgcctggcgccgctccctccgcgacgccctcctgcgcggctccgcgtggcgcggcgcgcccgccgccaactccgccgccgcgcggttggccagcacggcctccgcatccgaagcggcggctggtccgaagaaggtgcctccgcctccccgcaagggaaggcttttaactggagccatgatagggttggcaattgctggaggtgcctacgtgagtaccgccgatgaagccaagttttgtggctggttattcaagtccacacaactcgtgaatccactttttgcactgcttgatgcagagtttgctcatcgcttggcagttactgctgcttcccatggatttgttccaagagaaaaaagacctgatccatcagttcttgggctagaaatttggggtaggaagtttacaaatccaattggtctagctgctggctttgataaaaacgccgaggcagttgaaggcctattaggtatgggatttggctttgtggaagttggctctgtgacccctcttcctcaggagggaaatcctaagcctcgcatattcagattacgagaacacggtgcggtaatcaatcgttgcggatttaatagtgaaggaattgtggtagtcgctaagcgtcttggtgctcaacatggtaagcgtaagatggaagagacttcaagctccacatctcccacaaccagcgacgtgaagcaaggagggaaagcagggcctggaatcttgggagtcaatcttgggaagaacaagatcagcgaagatgctactgctgactacgtgcaaggagttcatacactatcacaatatgctgattacttggtcataaatgtctcttccccaaatactcctggtcttcgcaaattacaaggtagaaaacagttgaaagatctcgtgaagaaggtgcaagctgcaagagacgagatgcaatgggctgaagatggtcctccaccattgcttgttaagatcgcaccggacttgtctaagcaagatcttgaggatattgctgcggttgctcttgctcttaggttggatggcctgattatatcaaacactactatttcaagaccttctcctgcagacacacatccattggctcaggaagctggtggactaagtggcaaacctttatttgacctatccactaatgttctcagggagatgtatatccttacccggggaaagattcccctcataggctgtggtggtgtaagtagtggcgaggatgcatacaagaagatccgttctggagctacacttgttcagctttacactgcatttgcctatggtggcccagctcttatacccagaataaaggctgagctggctgaatgtttggaaagagatggtttcaaatctgttcaggaagctgttggggcagatttcaaatgagcttcgtgagatttcaagattgtatggttccctcaagcagcagacttcttctccacagccatgctcactcatttcattgggatgttaatctaaagaggaacaccgactgaaacttcttttgcgggtgcatcactcatcgaccttaagtaatgtgtggtaatatcacgggcgcatacatcata

SEQ ID NO: 60333 - DNA, 723 bp, Oryza sativa
  Clone ID: PAT_MRT4530_61871C.1
tcaaacctctacgtcggagccgagccgagatggcacgggattgggtggtctcgcaggctgtcagcgagcttgaagaggaaccggtgcaagcgtcgcgcctgggctcaggagccgcgaagcctcgcgttggaggagtcgaagccccgcgcgtcacctcgtccggtcaccccgtgcacctaccccaaatctccatctcgttgtggtcgtcgtcgcctcgccagatccaccgcagtcgttgtcgctactccccgccaccgcttcgccgtctttcttgtcgtcgttagatccgtcgccaccgctgttccccgccgcaggatccggcgagcccgtgcccggatccggcaagcctgccgccgccaagctcgccacgccgtcggcgagctcgtccgtgctgtcgtggggggagcaggacgacggcgtcgaggccgcgtccggatccactgcgttgtggcccccatcgccagattcggcgagcccgccgccgccaagctcgccacgccgttggcgagcttgtccgcaccgtcgtggggggaggaggacggcggcattgagcctgcgtccggatccgccgccgagaacccggatccgccgccgagatggagagctcgccggagaatgagagaggggggagagagaggtggctcgggagagagggggagagaaatggctcgggagagagaggggagagagggagagagtaaaaaagtgaggggaagaggctga

SEQ ID NO: 60334 - DNA, 349 bp, Oryza sativa
  Clone ID: PAT_MRT4530_61872C.1
ccacgcgtccggccaaactcagatcttatccaaatctgctttgcgtactctaaagtcctacggaccattgctgcctatatgtgcacggacagtgacgagctcatcaatagtgctgcctaaattggcactcgtgccaaggagcttcattgctgcatatgacgccactggacacattggcgagcgctttgacgcataatgtcataacgttgacgagaaccggagctctgtgcgccagctgctgttaaccaaccctggtgccctccaccacctaacgagggagatcctggttaaggataccctgctcctaaccaccatggacgggaagcgcttgccacccgtgctcatggag

SEQ ID NO: 60335 - DNA, 396 bp, Oryza sativa
  Clone ID: PAT_MRT4530_61873C.1
cccacgcgtgcggctagtttgcgctccactagcacgggacagtccgagggtgaatacgaggcttacaaagtcggattgttgccctgctgcttcaggtcctgcttgatcaggatctaccacccgcagttgaacaagctattcaactctctaatcgatagacgcaagatcacgttgggtgcgccagagtctgtgtaacacaatgcgccctttgctgcacacttaaatgacctagcgcaataggttgcagtctgagcatattcgacccgccacgctcattcttcggatgcggtgacaacagcaactggaagagaccacgcccctagtgccgttgtgccgtcatccgtccaatggtgagtagctacgatgataatatgccaatggctctatagcaaggat

SEQ ID NO: 60336 - DNA, 120 bp, Oryza sativa
  Clone ID: PAT_MRT4530_61874C.1
acgaggactcgtagtcggacgcgtgggaagcgtcaggacgcccatgagcatgacgataatgctaccttaggcctaccatattaatgtcgttctttcacacttgtacgtgtttaataaatt

SEQ ID NO: 60337 - DNA, 540 bp, Oryza sativa
  Clone ID: PAT_MRT4530_61875C.1
atggccggagccgagggagagagcgacggcggtggccagagtcggggagccggcggttggagccagagagcggagggatggggtggcggcggtggccggagccagagagccgagggagggggcggcggcggtggccggagccggcgggggacggggcggggacggtggccggagccgggggagggagcggcggcggtggtcggagccgatgggggagggagcggcgacgggggccggagccggatccaggggatgggagggggtggcggtggtgcgtcgctggagccggaggagggagcggcggcggtggccggagctagggaggaaggggcgctggggcggcagtggttggcggcgtcaatgtcgggtgtgtatcgcgtgatacctggtaggtatcgcgtgatacctggctggtatcgcatgattcctgataggtatcacccgatacctcgcaagtatcaccttatatgtggcaagaatcgcatgatacctgataggtatcacctgatacgtcgcgagtattacctgaaaacgtggtag

SEQ ID NO: 60338 - DNA, 390 bp, Oryza sativa
  Clone ID: PAT_MRT4530_61876C.1
tgtgttggtttatattgtttgggttttatttttttttttttttttttttttttgccccctaacaaaataaaatttaccgctcacccagtttccaggtttaggaaaaagaattcaccctaaacactttttgaacggggcaaaaccttctggaagatccaacggtttttccttttgacaatgaaccatggaatctctggggccaacataataaaagggggaagaaaaaaccccctagcttggacacttggggcctcggtttctgaaatccataaaactggaaaatcgggggaaggaaacaggaataccctgtcttttgccgctaaaggggcaaaaagggggaaacttccgcctggctcacgggcggggggggggaaccgggaaattgggccc

SEQ ID NO: 60339 - DNA, 1017 bp, Oryza sativa
  Clone ID: PAT_MRT4530_61877C.1
gctcgtggctggtgttgtgggcagagttgcttcgggtcgcgccggctttcgcttggctcgcgcggtggggtgctcccgcgttctctctcccaggtcccgcgctgctccgtctcctctcttgcagatttccacctccaaatccgccacgctccgccccgctgccggttccccccccgtggggcgtcagctctcgttgactctcaccttgcggccgcagcaaccgccgcccttcgccggccgcgtcgccggcgccggcgacgacgcggtggtgccgtcggtggtggtgcggtcgaggaactcgcggttctccttccagacctcgccgtcgtcgtacacctccttcttccagatgggcacggacgctttgacctcgtcgatgacgtagcggcacgcctccatcgcgtcggcgcggtgcaccgcggacgccgccacgaacacgctcgcctcgccggcggggaccgtcccgaggcggtgcgccacggcgagccgccgcagcgagtgggcggcgcgggcctcccggaggatggccgcgagccggcgccgcgccatggccccgtacgcctcgtaccggagctccaccacccgcctcccctcgaagctgtcgcgggtggtgccctcgaacgtggcgatggcgcccgccgccaggtcgcggacgtggtccacgtaccgtgcgatgtcgagccggcctgacccctcgtcgaggatctccacgaggtcctcctcctcggttgccgctgccgccacggggagctcgtcgctagccatggggtggggttgagatcgaagtcgtcgcgttcgtgggagagagagagagagagataaggtttcgtggggacgggagcgcgcccgcgcgactgcgcgaggggaggcggcggccggcggcgcgcgctcgtcgacggttggggacgggaccgagcccgcgcgacggcgcaaggggaggcggcggccggcggcgcgcgcgttggactctggagcggcggcggcggcgcggtggaggtggagatggagcactcgtgc

SEQ ID NO: 60340 - DNA, 971 bp, Oryza sativa
  Clone ID: PAT_MRT4530_61878C.1
ttttttttttttttttgaacattttaaacaaacactttggatttgaaattcatagcatacaccgagcaggttactgaatatcttttggtactaacatcatactctaagataatagtctatctatctaggagactaggagagtagttgatgagggatctacaggagcagaagaagaacacccacatcttgtgttcttgcctgcctacccaatttcatcatcatcatcatccattggctgatttgattctacaagaagaaatggaaccgaactagtactacaaagagatgatcaagcttttgttaaacaagtaataacaaaaatcaagattaaaccacaggaaggatgcaaagaagaagagtaatttctaagctaaagctgcttctgcctactcttcacatcaacatctgcacaggggaaacccggaaacctatgtacagttgagtagtacaagcccttgtctgcttcacgctttcatggcgtccgccgccgtgtcaccgtcgtcgtctccgactccggcgaggtcggcgccggcgacgctctcggagagcaccgtctcctcggcgacgacgccggcagcgtccaccacgcagccgtcgcggtggcggtcgcggcagagggtttccacggcgaggaggcggcggcggaggtcgtccatgtcgcgctccatcaggaacagccgctcgcgcagggtcaggttctcctcctccagccgcgcggtgcgggcctcgtcgccgtcgtcgtcgtcttcgtcgtcctcgcagtcgccggccgcgacggggagctgcaccatctcgaagcggctgaggtcgtggtcgaggcggcgctccacctcgacgtgctcctccacgtcgctctcgccggatccggagtcctcgccggggaggccaccggcgtcggcggcctgggagcggaggcggatgaggcccttcatggagccgtacccgtcgacgccccacttctccttggccat

SEQ ID NO: 60341 - DNA, 381 bp, Oryza sativa
  Clone ID: PAT_MRT4530_61879C.1
atgacgtaccagagtaccggagcagcggtgcgcaacgagctggggagcagcaccggcaagctactcctcggcgtccgcggctctccttccgcgcagcgacgcctctccgtccctcgcctcctctccctcgccatggggccgcgggagggctcgatgctgatgggtggtggcaggcggtggcgccctcccttctggcgggaggggaggcggcggtggtccggcgtcccagatccgtcctcttctgctccatctcctcctcttcctgcactcacccttcccggcaagggcacgacgactcgaggcggcggcgacggcgactcggtcttccggactcctcccgccgccggctacggcatcaaccggcgacgacctccatggtaa

SEQ ID NO: 60342 - DNA, 353 bp, Oryza sativa
  Clone ID: PAT_MRT4530_6187C.1
ttctatcttgataccgagagatcctcatggtgccaatgatttatggttccacaagccatgttgagaggacctgaattctgcatcaattcaataacagctcacatgtgactacaaccttacttgcaaaggtggcagataacatgactgatattcgagaagccaatgtgatcatacaaatattatatcatgctggctcacgggagccacgaagctcaacggctgggacgtattgttacgcctagagggacgacatgaagacaggatggctggcggaaaagaagaatgccatgtgctcttctactatattgtgtggactgacactcaggagatgttctactcttctaaaaggcaac

SEQ ID NO: 60343 - DNA, 171 bp, Oryza sativa
  Clone ID: PAT_MRT4530_61880C.1
atggacggaggccaggatggtggctcgcggtggccggtgcggggtgtggaggagcgggaagaaggggaatggatctgcggccggcgcatggctcggaaagagaagcgggggttcgcagcaaggaggcattggaaccccaaatcttgtggtcaccggcttcagcagctgtag

SEQ ID NO: 60344 - DNA, 816 bp, Oryza sativa
  Clone ID: PAT_MRT4530_61881C.1
gcgatccaattttcttcattgagtacttcaatgcccatccccaaattgaagatgaatatatgaacaacaaacaataatccccataaccttatttcaagatatgaacaacacatacaaatcctcaagataaaaaaaacatgaataaacatgaacaaatcacacgagtaattcattatcatcgccatcgtcactgcttctgcttctggtgtgggaggaagaacaggagggggcggcgtcaccatcgcacctcccagatcggcccatctccgacctccaacactaatggatcggacaagccaccagaggaaagtagaggagaaagagaggagaagaagggcatttgtcgcacctgcagcccgctgtcgccgtcagctcgttaccatggaggtcgtcgccggttgatgccgtagccggcggcgggaggagtccggaagaccgagtcgccgtcgccgccgcctcgagtcaccgtgcccttgccaggaagggtgagtgcaggaagaggacggatctgggacgtcggaccgccgccgcctcccctcccaccggaagggagggcgccgccaccggtactctggtacgtcattcgagccctcccgcggccccatggcgagggagaggaggcgagggacggagaggcgtcgctgcgcggaaggagagccgccgacaccgaggagtagcttgccgggctgctccccagctcgttgtgcaccactgctcctgctctctactctctaggcatcattgccgcgggacgtcgggtcgtgggtagagggagagaggaggcgtagagaactagagaggagaggagaggatgtg

SEQ ID NO: 60345 - DNA, 646 bp, Oryza sativa
  Clone ID: PAT_MRT4530_61882C.1
ggttcatgccaaaatttatactccggcatcatgccacagaaaatgtactctcttttttctagtttggagggacaactccagaggtcacagttattaaaatccatagttacaaccaggtccaaccggaacgcagcacaccgaaaggctgcaacaatctcaccttctgttcttgagatttctttaaccaattcatggcagcttccagtaagcatcaaggcatcaaccactgattctaccagtatgcttcaatggctgtagcgatcaattcatggttcattccagccacagatcatagcagattttgtcacccccagaaactcagatatggtttcttgaaggagatcctcatgtaccattttcccgacctcactagcaacaagatcgatgccatcttcagaaccaacccaccccaagtccatgaataggccctcatgagcatactccatttcttgccgaagctcgaccaccctttgccacaccacctcaacgaatccctcctggtccaatctggacgagcagctccacgacaacccctttgagctatgctgcatcacagaagggattatttgtgcgctgacatgttttgggagatcaaacaggggcttgctttccggggacgggcccggaagggggctatggggcttgg

SEQ ID NO: 60346 - DNA, 171 bp, Oryza sativa
  Clone ID: PAT_MRT4530_61883C.1
atgtgtgtaccccttcaacttttgttggtcggtggcaatggcctcccctgcttcgagaatcgagcagtgatcgtggagatgaactgggcagagtgccgattcgtcctttggaggacggaggtgagaggcggagagcagagagagaggtcagtggacggggcaaacagctga

SEQ ID NO: 60347 - DNA, 504 bp, Oryza sativa
  Clone ID: PAT_MRT4530_61884C.1
atgccgccgctgcagtctccagctatcattgcggcaccgggcatcgccctcctggctggcatatccggccacccggatgagagggatttcatctccacgccactgtgggccatctcttccctctccctcgctctctccactccgctcgccgccactggcctcccgcattccaccggttgcggcccggccggctcgctctggtgccaccgcccggccgcctcccctcccggatccggcggaggggagcccaccgccgccctcgcgcccctcgcgccgtccccgcgccaccaccgccgcaggctgccgcccctcgcacaggctgccaccgccgccgccgcccggccacctgccacgtggccggctctttgtgccaccgccgcatgccgcctaggcgctgctgcccgccggaagggagccggaggggaggggagaatggggaggagaggggaggggaccggaggagaagaggggagaagaggggtggagatgggggtgagtgaatga

SEQ ID NO: 60348 - DNA, 2199 bp, Oryza sativa
  Clone ID: PAT_MRT4530_61885C.1
atgagctcgagcgggcgaggcggcaagcggcaaggggcgccgcccccagcgccattcggggctgcggcgaagagggcccaaccccacggtgggcacctagcagatgactccatccgcgctagcggtgacttctcatctactatcgcttcaacgcctaacggtcccttcctgttgaaccgatgtgcttgtttcgttgcccgattccttgcattgctacaagcctctattctagcaatgtcacttttcggtttttcttgcgattaacatgagtttttgggttaggagtaaataatatttttcctttctgctttaagtgtctctttagaaagaataaaatgagtcctggcgtcataagtaggtgggttagtcgactaggttcgagcctcaccacatctcaataaatatcgatatgttggcccgactttcatagtatggtggatagggctaggtgaggccatagtgacagtgcggatgagacttaataatagtgctcctggggtcgttagaaatttggagtactatagttggaagtcggaactcgaaagatacggaaacggttgcatcctctcctcataggttcacaaagtcactcacaccccggcaccttaccgagcggcggctcagcacgctgctgctacgcacatggacaagagccagggagtcctactgtccagcaacgtcggggccggctcccggccgtggccggagctgctcggctccgcccactgggacggcctcctcgacccgctcgacctcacgctgcgccgcctcatcctgctctgcggcgacctctgccaggtcacctacgactccttcaactccgactcccactccaagtactgcggctcctgccgcttctccaggtccacgctcctcgaccgcacgcagttcccggccgccggcgacctctccgtcgccgcctacctctacgccacctccgacgccacggcgttcccggggagcatggtgtactcgatgtcgcgcgaggcgtggagcaaggagtccaactggatcggctacgtcgccgtgtccaacgacgccgcggcggccgcctcgggccagcgcgtcatctacgtcgcgtggcgcggcaccatccggtcgctggagtgggtcgacgtgctcaagccggacctggtcgaccacgacgacatcctccccgaggggcacccggggcgcggccggtcgcgcgtcatgaaggggtggtacctcatctacagctccaccgacgagcgctcccctttctccaagtacagcgcccgcgaccagatgctcgccgccgtgcgcgagctggtggcgaggtacaggaacgagagcctcggcgtcgtctgcacggggcacagcctcggcgcgtcgctcgccacgctctgcgcgttcgatatcgtcgtcaacggcgtgtccaaggtcggcgacggcgcgcacatcccggtgaccgccgtggtgttcgggagcccgcagatcgggaacccggagttcaagaagcagttcgaggagcagcccaacctgcgggcgctgcacgtcaggaacatgcccgacctcatcccgctctacccgagcggcctcctcggctacgccaacgtcggcaaaaccctccaggtcgactccaagaagtcgccctacgtgaagcgagacaccagcccaggcgactaccacaacctgcaggggatcctacacacggtggccggctggaacgggaaggacggcgagttcaagctccaggtgaagcgcagcgtcgcgctggtgaacaagtcgagcggcttcctcaaggacagcaaccttgtgccggagtcatggtgggtggagaggaacaaaggcatggtgctcggccagaacggggaatggcagctcgaggggcccgcagaggagaacctgcccgtgccaccggtggtgaccgggaagatcatcgacgacgacgtcgctgccgtggccacctccagcagtgccaaggaggataagaagacgggcaaagggtctaagcttctgtctggattgattgatcaactgctttgtgtgtaagtgaatttattacatgatcaaaccatttacttttgcaattgtggtaaataagtagtctgttacatatcaatagaagtgatgatgcatgatgctattacaggctttacagcaatgtggttaattattaaaggcgagacaagtttgtataagaaaaaaaaaaaaaaaaaaaaaaaaggtggccgccgg

SEQ ID NO: 60349 - DNA, 155 bp, Oryza sativa
  unsure (1)..(155): unsure at all n locations
  Clone ID: PAT_MRT4530_61886C.1
gttgtnnntagaaactttcaaaagtttgatagagcaaaacagcattgagggtgtgtgatttccattccgactgaggacagaagacactctaaacactataagcgcgaggaagggtttcctacaggttgtgcgtccaacaaaaaaaaatgaacgca

SEQ ID NO: 60350 - DNA, 1157 bp, Oryza sativa
  Clone ID: PAT_MRT4530_61887C.1
gcacgaggcctccccacctcgcccgcgtcctcgccgccactccgctctctcccctccttatccccgtcctcacctcaccatttcaccaaccacctcgcgtactccggccaacaccacggcgaccatgatggccgcgccgctcgccgccgtccacgccatcatcacctgctccgcctccaacaagaacagcccccccagcgccaggcagcagcagcagacgacgacgacgacggcgacgcgtggctcgcctgctgccctgccgtcgttgctgaggacgacggcggcggcggcggcgacggcggcgctggcgctggcgccgccggacgcgctggccgcgggcggcgagttcgggatcctcgagggccggagcgtcgcgctgctgcacccgctcgtcatgggcggcctcttcgcctacacgctctgggcgggctacctcgggtggcagtggcgcagggtgcgcaccatccaggacgagatcaacgagctcaagaagcagctcaagcccgccgccgccgccgccacgcccgccgccgtcgccgccggtgactcctcctcctcctcctcctcacctcccccttccgcacccaagtcgcctgtcgaaatcaagatcgacgaactcaccgaggagaggaagaagctgatcaagggatcgttccgggaccggcatttcaacgccggctccatcctgctcgggctgggggtcaccgagtccgtcggcggcgcgctcaacacgtggttccgcaccggcaagctcttcccggggccgcacctcttcgccggcgccgccatcaccgtgctctgggccgccgcggcggcgctggtcccggcgatgcagaaggggaacgagacggcgcggagcctgcacatcgcgctcaacgccatcaacgtcctcctcttcatctggcagatccccaccggcctcgagatcgtcggcaaggtcttcgagttcaccacatggccatgaacaaacaacacaacacaacacaatgcagtgctgcaattccattctcctcttaattaggttttcttttgactccatagccgatcttgcgtgtgttcagctgcttcaccttccacagtgttcattggttcgtccctgttcaaaaaatatagtgaatgaatgacatgaaagaattcagatgtgcaaaaaaaaaaaa

SEQ ID NO: 60351 - DNA, 849 bp, Oryza sativa
  Clone ID: PAT_MRT4530_61888C.1
atggcgtccctccggccaactgctgctattgttgctgatgcggcgtcctacatctcaaccctgctcgcgccaccatctcaggcagctccacggcacacgggacggcgtagatccatgcgcggggggctggcggcgccgtccgcctcctcctcgtcatcgtcgttggccaggacggtgcggatccggccggcgtgcgcgcggggccggtggcgcccctcccggccgcctcctcatcatcgtcgtcgcttcaggccgccatcgaagcttcatggggaggttgagggagccgccgccttcaccgtcaaccgggccgcccaccgcccattgcgaggctggccgaggaaggcaggggcgccaacaccttcgccatccacggcgagcctcgccttcgggctagggaggacgccacaatgccgcgccgggaagaagagcacgttgctcctcggcgactccgagaaacacgctggcgtcggaacttatgctgctggggttcatctcgctgctgctcgtcgtgttccaagaccgaggatacgcatcgccgagagcctcatgggccactggctgccttgccggagcgacgggaaggcgtcgtcgaactcgcatcacggcgtcaccgccccgtcggctgccgtcgtctccggcactggcgcgaggaggctgctcggagaagggacagccggatctgggcaccgttcgacgtccccggtgcgcacgccgaggcggagcgactgggcggcggcgacggctcgtcgaggcggcgcggcatcaggcggggtctgcggggaggagaaggggcggtgccggggagaggagctgggccggcgtcgggcagggagggcgcgcgtgtga

SEQ ID NO: 60352 - DNA, 1038 bp, Oryza sativa
  Clone ID: PAT_MRT4530_61889C.1
atggcgtccctccgcgcggtccccctcctcgtcctaggcatggcgctagagggggctgagccacctgagcttcactcgtcggcgacaatggcgtccctccggccaactgctgctattgttgctgatgcggcgtcctacatctcaaccctgctcgcgccaccatctcaggcagctccacggcacacgggacggcgtagatccatgcgcggggggctggcggcgccgtccgcctcctcctcgtcatcgtcgttggccaggacggtgcggatccggccggcgtgcgcgcggggccggtggcgcccctcccggccgcctcctcatcatcgtcgtcgcttcaggccgccatcgaagcttcatggggaggttgagggagccgccgccttcaccgtcaaccgggccgcccaccgcccattgcgaggctggccgaggtggatccgcccgccaccgaacagctcagtgccgcgggctacacccaccgccgtccgcgtccgctgccgagccgctcagtgctgccatccgcgcccaccactgaaggcaggggcgccaacaccttcgccatccacggcgagcctcgccttcgggctagggaggacgccacaatgccgcgccgggaagaagagcacgttgctcctcggcgactccgagaaacacgctggcgtcggaacttatgctgctggggttcatctcgctgctgctcgtcgtgttccaagaccgaggatacgcatcgccgagagcctcatgggccactggctgccttgccggagcgacgggaaggcgtcgtcgaactcgcatcacggcgtcaccgccccgtcggctgccgtcgtctccggcactggcgcgaggaggctgctcggagaagggacagccggatctgggcaccgttcgacgtccccggtgcgcacgccgaggcggagcgactgggcggcggcgacggctcgtcgaggcggcgcggcatcaggcggggtctgcggggaggagaaggggcggtgccggggagaggagctgggccggcgtcgggcagggagggcgcgcgtgtga

SEQ ID NO: 60353 - DNA, 669 bp, Oryza sativa
  Clone ID: PAT_MRT4530_6188C.1
caaatatagcgtttctctctcctcacgctatatcacagtggccgcagctcccacccctatcaggagttttggatcgacctcccctatgttgtcatcgtcgccggtcggatgtgtatttttctgtacggtggatggtgtagagggagtgtgtagccatggagggagggtgagagagagacataccagatctagaaggagaaccccgccagcgagcatgcatccctccaacccttcatgccggccggttgtggccgtcggcccggcgcgcgccccgccgactgcctccgccccttgctgctatcttcgtccgcccttccacgcccgtcggccgccaccatcgatcctgctagctccagttgcctccgcgcccaccggcctccacgtccgtaggccgccgtgcctctacaccgacaggccgccgtacctctgcgctcgcaggccaccttgcctccacgcatgcttcctgggtagaatgaagagtgtagaacagagcagagagaaaaggaggaatagaaaaggttggaatatattggaatgggcaaaaggcagactatgggtagagaaaaaagagaaacatagtctgagtaattttagagaaagtagcaatttaatgcactaaattatctattagaaatatgtccgttaaaatctaaaaaaaaaaaaaaaaaa

SEQ ID NO: 60354 - DNA, 498 bp, Oryza sativa
  Clone ID: PAT_MRT4530_61890C.1
tcaaaattggtcgataacgaccgtcaacaatgctccacccttctatgaaccctctcttcccaagatcgttactgttgccatccacgtaccaccgtttccccacacttctgacgaccaagtggttggagcctgggattcgcgcgagctcgagggcctcaggtttcgtcccgactacaactggtcactaccctttggtcacagccgcaccgaagggcggcggatcccctccctccccccccccgagggcggcgccgaagaatctgtcgccctcaccacccaccgtcaccgcctgccatcgccgaggtcgctgttgacggctgttaagtaccaaattaacgctgtcactaccgtcccgaggccacaactacacccgagggcggcagatccggccctcctgagggcggcgccgctggatccgccgcccactgtcgccgcccgccgttgcgaagccgcagccattgccacggctgcaccttcgctgagccgccgcccgcccat

SEQ ID NO: 60355 - DNA, 1213 bp, Oryza sativa
  unsure (1)..(1213): unsure at all n locations
  Clone ID: PAT_MRT4530_61891C.1
aagccgcctggccccgggagtgaaccgaaccccaggaggaacgcgaggtgaaccgggcgccgganggngngcgatgatgatcagcaggcagctcgtgctgacctacctctacctgctaatctacgtctgcctctcgtcgggagtcatcctgttcaacaagtgggtactttctccaaagtacttcaaatttccctttcctattacccttacaatgattcacatggcgttttctggagtcgtaacgttcttccttgtccgtgtgtttaaggtcgttgcaccagtcaagatgacattccaaatatatgccacatgtgtgattccaattagtgccttcttcgcgtcaagtctttggtttggaaacacagcatacttgtatatttcagtcgccttcattcagatgctcaaggccttgatgcctgtggcaacatttataatggctgttctatgtggtactgacaaattaagatgggatcttttcttgaacatggtcttggtcagtgttggtgtcgtagtttcatcatatggcgagattcattttaatatcataggaacattataccaagtaacaggcatttttgcggaagccctcaggctggttctgacacaggtcctccttcaaaagaaggggttaactctaaaccctatcacaagcctatattatatagccccttgcagtttcatcttcctgtttgttccttggtttttacttgaaaagccagaaatggatgtttctcaaattcagttcaactactggatatttttctttaatgcagttgctgcatttgcattgaacatatccatctttctagttattggaagaacaggagcagtcaccatccgagtcgcaggagttctgaaggactggatactcattgccctctcaaccattatctttcctgaatctattattacaagcctcaatataattggatatgctgttgctctctctggcgttgtcatgtacaattatttgaagatgaaagatgtcagagcgaaccaacttccagctgatatcgctcctgacagagctacgaaggataagaagatttcaaacatatacaagcctgacaatttcatggattctaatgatgaaaccactgttggaagtctggcgtcagaaggtgcaggggttgatgaagaagcccctttgattccttcttcacgcctctcctatgttacccggacacaaactggcagcttcaatagcagatga

SEQ ID NO: 60356 - DNA, 716 bp, Oryza sativa
  Clone ID: PAT_MRT4530_61892C.1
ggaaatagatatattattattcatatatatatgcatacactttacaagcatccaatacaacaatatgaatattctctcagcattgaaaaaagtgggacaaatcttagatctggttttaattccactctaaatataacatttggggggaatcttattccctgaaataatatatcctccaggaacaattttatttactactagatacacataaaaattgggaaccttcttcttaagatgtttcccacaccttgtagtctctgccttcaacggctacagaccagttttgcgatccgtttggtggttcataatgccctggtccgatcttcattgcaaccttttcatctattatagccgcatacacatctctctcactcttgtctatattcacctcactccgacagtggagtttctgtctgttcctgagagagagaagtgcagcaatctcggaatgataatccgagaagatatggtcgaagaagaccgctggtgttcctggatgagttaggatgtaagcatatccttgcatttccttcccctccggaaatctccaatgacccctgtgtagagccagtgtcatgattctcgatgaatgttacagcacgagaaggccaccaaccaactacacctggaggctttccttttgggtctgagagtctccaatattcacatttttgaagcgccggatgaagaaatccttttggtagtgacatcaaatg

SEQ ID NO: 60357 - DNA, 1438 bp, Oryza sativa
  Clone ID: PAT_MRT4530_61893C.1
ggccccccctcgagtttttttttttttttttttttttttttttttttttttttttttttggtgtgggtgtgttcttgttcgataaatgatgttttttaatgttgctagaaatattatcattcgatcatgaattctgattgcgagagttacatcaaaccagcatacctctggaaactgaacgacaaacttacagaatttattctctaaacttgctatgatcaacatcattgagccgttgacaacagaaagttgtgccctataacgtcacaggtaagtagtgctttgagacacactggcagaaggttagactaaagatgaagtttcagtggttctggcaaatcttcaattttgtcctttggacgatagcagcaacaactaaactgagaacacttcttgaaggtctgacaccatgtgcagttcttcataagcaaattaaggttcgcctcagaaatttttcttaggaggatttattcatccttcaggagttttctagcatcatctttccatttgataaagtttagttctgattggaaccaaattgtttttgtaagtcactaaatgatacagtagcagaaccccttctcttagctttttgctgtgatggatgctccttccagccagtcatataaataacctgaaaggttgctggaacagttccatcttctagcccaaacattgactggtaaatggccgcagttgccaaagctgtatctttctttaatataggatttctttgaaagagagcatttgtttcccccatcgctctaagatgttcaacaagttccaaagcttacaaaccactattgtatttcacagtgtaacggtcaacgtcaactcctggaagggtgaagcctgctcttgtcaaaaggtttcctgcatcacggacttgtgctaaaggtgacattcggggactgatgccaccctcacgctccatttgagcaattgtacaagctattcttagttccctttctttgattggaaggtattcttcatctccgacgacaaactgcgtctcgaggacgtcatcggtagcattatccatctctcgccactttctcaccatgtcggccgacatgtccatcatgatcagcttctcaattccaccgcggccgcggagcgagcggcggacggcgccggcggagccgccgaggcagagcgcggaggggaacgccttcctgcagtcctcgaggcggtcgaggaggttgtcggcgacggcgtcggcgagcgcgtcggtctcccccatggcccacgccgcccggtcccggtgccgccgcttcaggtcgcggtcgaagatcttgacgcggccgccgccaccgctcccgtccccgccgtccagccctcccgcgggagcagcggaggaggagaggtgggcccagcggtggcgaggaaggtggaggaggcggcggcgggccgccgccgcggcgagccccgtggccat

SEQ ID NO: 60358 - DNA, 1584 bp, Oryza sativa
  Clone ID: PAT_MRT4530_61894C.1
atgaaaatcttatattccctgaggaggttctaccatgtggaaacgctctttaatggaacttttgttttagctggtcgtgaccaagaaaccaccggttttgcttggtgggccgggaatgccagacttatcaatttgtcgggtaaactacttggaggtcacgtagcccatgcaggattaatcgcattctgggccggagcaatgaacctatttgaagtggcccatttcgtaccagaaaaacccatgtatgaacaagggttgattttacttccgcacttagctactctaggttggggagtagggcccgggggagaagttctagatacttttccgtactttgtatctggagtacttcatctaatttcctccgcagtcttaggcttcggtggcatttatcacgcgcttctgggaccggagactcttgaagaatcttttccattctttggttatgtgtggaaagatagaaataaaatgactacaattttgggtattcacctaattttgttaggtataggtgcttttcttctagtactcaaagctctttattttggcggtatatatgatacctgggctcctgggggaggagatgtaagaaaaattaccaatttgacccttagccccggtgttatatttggttatttactaaaatccccttttgggggagagggttggattgttagtgtggatgatttagaagatataattgggggacatgtatggttgggtttcatttgtgtatttggcggaatttggcatatcttaaccaaacccttcgcatgggctcgccgtgcatttgtatggtctggagaagcttacttgtcttatagtttaggcgctttatctgtctttggttttatcgcttgttgttttgtctggttcaataatacagcttatccgagtgagttttatggacctactgggccagaagcttctcaagctcaagcatttacttttctagttagagatcagcgtcttggagctaatgtgggatctgcccaaggacccacaggtttaggtaaatatctaatgcgttccccaacgggagaggttatttttggaggggaaactatgcgtttttgggaccttcgtgctccatggttagaacctctaaggggccccaacggtttggacttgagtaggttgaaaaaagacatacaaccttggcaagaacgacgttcggcagaatatatgacccatgctcctttaggctctttaaattctgtgggtggcgtagctaccgagatcaatgcagttaattatgtttctcctagaagttggttagcgacttcccattttgttctaggattcttcttttttgtgggccatttgtggcatgcaggaagagcccgggctgctgcagcaggatttgaaaagggaatcgatcgtgatttggagcctgttctttacatgacccctcttaactaagattttcttatttatacctgttctactgtttttttctgttctggctcggttattctatctagccgagccattcattcctttctatgaaagaaagataaggggacagaacaaaaaaaacaaataaagaaacaaacgtattcaatacgcaaaaaaaaaaaaaaa

SEQ ID NO: 60359 - DNA, 167 bp, Oryza sativa
  Clone ID: PAT_MRT4530_61895C.1
agtcatgcttacattatgcaggtctgagaaatggccatcttatgtgaattatgcatgttttagtgccagatggatcagatgtcaacagattgaacatcaggcacttacatatgctgacatcacataagatggccaatatcgccgacctgcataaagtatgcatgact

SEQ ID NO: 60360 - DNA, 249 bp, Oryza sativa
  Clone ID: PAT_MRT4530_61896C.1
atggcgctgctggaggaaagggaagcatcaaggatgctcaagtatggagctactgatgatatatataaagggagtcgaatggaagtacaggattgcacctgtggttgctgcatgaagccgtgggttgggcaccaccaggcaccagcaggctgcatcgtgattcgtgaagcacaggaggccacgcacggcggaggtcagccactggccgccgcaccagtcgaccacgtgccgcagagccgaccacactga

SEQ ID NO: 60361 - DNA, 225 bp, Oryza sativa
  Clone ID: PAT_MRT4530_61897C.1
tatgatgaagatcataaggagattgcctcactttatggaggctcgcagcaggagggccagctctggacgcagctttgtggtggaagtggaaatgccgcgacggagatagagatgagtcgtattacgcgcgctcactggccgtcgttttacaacgtcgtgactgggaaaaccctggcgttacccaacttaatcgccttgcagcacatccccctttcgccagctggc

SEQ ID NO: 60362 - DNA, 229 bp, Oryza sativa
  Clone ID: PAT_MRT4530_61898C.1
ggggggaaagttcggcatgcatttcttttttgggagaattggttattttctcgaacgggggctgaaactaacactaacgaaatcctttccttttggtaaacccccgggaaaaagaagaccctttttcccccggagaaggagaccgcggggccccaaacggaggggggctttacaaactgtaccccacgttgccccccttccgaaaaagaagaaagggccggaatgggcc

SEQ ID NO: 60363 - DNA, 345 bp, Oryza sativa
  Clone ID: PAT_MRT4530_61899C.1
atggagcctcctgtggaactggaagcccaatcctccggcctatcctacattcctcagcatgaccacctgccggcaatgcaagatatcgagctgttgcgcgcatcgatgagaagcggcgtggggatggtgagtggcgacgggagcgggagcgagagcgaggcagccgccagatcgggcgaccatcgctggatccatcggctgccattaacccaccacgctaggcttcacccagtggcgctgctccttgggcgagagggctccgtccgtgttcttgctttccttgcggagaccaaggccgcacggacgcatgagttgagctcacctgacctgagcggctctgcttga

SEQ ID NO: 60364 - DNA, 1455 bp, Oryza sativa
  Clone ID: PAT_MRT4530_6189C.1
atgatcaagcagatccttggccggctgccgaggaagccagggaaggccggcgatagccgggacgccgctgggccgaacggcaatgagccgtctaactcgtacagcgtcgccaggagcgtggagcaagggaacaagaggagtggaaatggggattacgtggtgccggctgggctgacgcccaatccgatgatgaatgggactgtggtgtatcactccaacgagccgctgccggcgttcaaggacgtgccggcctcggagaagcagaatttgtttgtcaagaaggtgaacctgtgctgcgcggtgtacgatttcgcggatccgacaaagaatctgaaggaaaaggagacgaagcggcagacgcttatggaacttgttgactatgtcacttctgcaaatggcaagttctctgaagtcgtcatgtcggagattaccaagatggtgtcgattaacttgttccggagctccagccccacccctcgagagaacaaggccatcgaaggagttgatctggaggaggaggagcctctcatggacccagcatggtcacatttacagatagtttatgaggttttcttgaggtttgtcgcatcacaggagacagatgcaaagctggctaagagatacatagatcattccttcatccttaggctactagatctttttgattcggaagaccccagggaaagggattatttgaagacaatcctccatcgcatatatgagaagcataatggtgttgcagagctgctggagatcttgggcagcataattaatggttttgctcttccacttaaagaagagcacaaattgttccttgtccgggcactgatcccacttcacaagccaaaatgtgtatctatgtaccatcagcaattatcatactgcatcacacagtttgttgagaaggactgcaaacttgctgacactgttattaggggcttgctaaaatattggcctgtgacaaacagttcaaaggaggtgatgttcttgggtgaactagaagaggttctggaggcaacacagcctgcagaattccaaagatgcatggttccactcttccgtcagattgcctgtagcatgaatagctcacatttccaggtggcagagcgggcgctgtttctttggaacaatgaccacattgagaacttaattaagcagaattacaaggtgatattacccattatctttcctgcgcttgagaggaatgcaaggggtcactggaaccaagcagttcgaagcctgacactgaacgtacgcaagatcttctcagatcatgattctgcatttttcggggagtgcacacagaagttcaacgacgatgaactcaagcaggaagaatctaattcgaagcgagaagctttgtggaagcgcttagaggaagcggctgtccccagatccgacaataacaaccctgtgggcacgcctaatggcaaattcagtcaagcagctggctag

SEQ ID NO: 60365 - DNA, 1696 bp, Oryza sativa
  unsure (1)..(1696): unsure at all n locations
  Clone ID: PAT_MRT4530_618C.1
ccggtgctttctttcttgtcggtttggttgtggtgtttttttttttttttttttagggagaaatacaagtttttattcagaattaatggaagtgatgaatcaatcctagataataataataataaaaagataatcaaacaagctcctctgatcgtggcacaaatgggagcagcagtagcataaaccaatggaggaagaacagctcaaatccgtaacgaattcctacacgcacgcgtgccatgctcacatcacatcgaaatcctcaaatgcgtgcaccgatcaagattgatacagacggtgataggcttgccgggttcgtcgtcgacgtcgagctcacacggcggagacggcgtagacggcggcgacgacgatgccggcgaggatccccaccggcgagacacggagcggcgcgacggccggagcccacgggcgtcgccggcgtcgccttcgaccctgtccccgccggagtcgtcggcgtctgtcccgcaggaggagcagcagcgccactcttgcagttgctgacccggcgggncgtcttggaccttgcaggcctctcggggaggccgagcgcgcgggtgcggttgatgctgaggccgagcgccgccgtgtcggcgttgagcgcgacgcacaggcactccggctgcgacttcaccacctcgcccagcttgccgcagcacgacgccgacggcgccgtctcgttcccggtcaggtagttgaggcacggcgacatgctcagcagcgtctgcgtgcacccgcttgtcgacgacggcggctgcgccgccgcgccaccggccatcagcgccaccaccaccaccgccgccgccgcgccgatccacgccaccctcgctgccattctggacactgacaagcaaacaagcaagcaaacaaaactctgcgtaggtggtacaagatgctcttggtgtctgaaactctgaatcgccaaatgaattatctggtggtgaggaggtggggctttcagaaccgcatggccgctagccgccgcagaaacgcaggaaaaccggcattggtggcgaccctccgtgcagagctgggcaccacctgcggcctcgtctgcgtctggctcgtcgccggcggcgtggccgtcgccgtcggcgatccggcaccggccgtcgactccggcggacttggcggcagtggtggcatggccggagaaactgcaacgggtactcctgcagctggaatctgagctgatgtatctttgcattggaggggaacagacatggagttgcaggctttaggcaatgtaacggctagcgtccggttgatggggatgccgaggggcacgttgccggtgaggacgaggcaggcgcagctggcgctcgtgttgatcatcgccgccaccgactggcagcactccgccgtcggcgcgccgccgccggcggccgtgccgttgccgccgccgccgccgctgctgctggtgatgaagttgaagcacggcgtgaagctggtgatcagcgacgccgtgcacgacgccgccaccgcctgccccgacgccggcgccgccaccattgccaccacggcgaccatcgccgccgccgccacggccaccgccttgttgagctccatgtcactgttttgcggtgtaattgattgcaccgtaaatcgtccggtgatcttgcgttgataaaaaaaaaacgtcaacagtcacgtctcactctaactcgacgcgtgggtc

SEQ ID NO: 60366 - DNA, 1426 bp, Oryza sativa
  Clone ID: PAT_MRT4530_61900C.1
ctagtgcttgagcacctccgggatgtcgacggggtaccggcagatgctgtcggcccatggcccgtcggcgttgcgcgccggcgagatgcactcccacgcggcgctgttgcacttgaagccggagccgaacccgatcatccacacgcggtcgccggggcgcatgcggcccttggcctcgatgtaggccagctcgtaccacaccgagctgctcgacgtgttgccgaaccggtgcagcgccatccgcgacgcctccacgtgctcgtcggagagccccaggctgcgctgcagctcgtcgatcaccgcgcggccgccggcgtggatgcagaagtgctcgaacgccatgcggaagtccgggaggtacggcttcacccgccggttcagcacccgccgcgcgatgaaggacagcgcgaacaggagctgctccgacgccggcaggacgaggggcccgatggcggtgatgttcgccttgagcgagtcgccggcgatggtcatgaggtccttggagaggttgatgccccggtgtccctcgccgtcctcctcctggaacacgcaccggtacgcgctgtcctgggcgccggtcagcgtccgcacgacgcgggagaggcggaaccgtgccttggcgcgcgacgtggacagcagcacggcggcgccgcccatccggaagaggcagttgggcaggagcatcgcgcgctccttgccgacgtagtagtttggcgtgatggtctccgtcgacacgaccagcgcgtgcgcgccgtgcggcgccacctgcaggaagttgcgggcgaggccgacggagatgaggcccgcgctgcagcccatcccggagaggtgcacgttgcggatgtcgctgcgcatcttgtagttgttgatgatcatgtcggtgaaggaggggatgggcgcgaagaggctgcagttgacgacgaggatgtcgatcgcggcggggctgatgcccgtcttggcgagcaggtcgtcgatggcgttgaagatgacgacctccacctcggcgcgcgacgcctccaggttccggtacggcgggatgaagtggtgcgccggcggcaggcaagtctcctccccgagccccgaccgctcgagcagccgcgtcatgaaccgcacgctgcgctcgtcgatggacgcgccctccacgtacgtcaccagcttggcgtgctcgaggaacgtggcgaacgggacgcggcagttgggcttggtgcggaagcacgcgtagtcgacgaggtacacggggcgcggccgcagcatgaggtacagcgtcgcggccgccgccggcacgaacgctgccaggaagacgtgcaccggccgcagcgcgcgcgccatccggagcagctcgtccggcccgacccgcgccgcgttgacgatcgtcgccacggccagcggcgcggccatcaccctcgtgccgaattcctgcagcccg

SEQ ID NO: 60367 - DNA, 544 bp, Oryza sativa
  Clone ID: PAT_MRT4530_61901C.1
gtgccgctgcttgtagattccccaacattggcactgcgagatctgccttcaaccaatccatttggaaagcgtggcccccaccaaaatgcaaattcttttcctggctcgtcacccaaaatagactttggacaactgacagactcaagaaaagaggttggcaaaatcagaagatttgtccgctgtgctacataatcaatgaatcatcggtccaccttctgacacactgtagagttaccaagagggtatggatagaaatacaaaggtggaccaaactgacctccaaatgagcaaatggagtgactacgactcggtggaacaatggtggagccttgtggtagactcccttaacaattcccgcattcctttgcgaatattggtgatcttggtttcctaggaaatttggtgcaaacgaaacacaaaaatcttccaaaacaccgcctcaacgccgatttccatcatcgccaagatcaaggaggaagctcgagcttgggtcaaggctggagcctcaaagcttcaagagtttggaatttttcgcggattcttg

SEQ ID NO: 60368 - DNA, 852 bp, Oryza sativa
  Clone ID: PAT_MRT4530_61902C.1
ccggccgggctgaatatattacatgtctaggtgacatgtacagtgttgcttggatggaggacagtgagactcataatctacagaaggaaactatcgaggatcagtatgagctggttaaaaaaagaacatcaaatgcaaataagttaaatgagggctctcatgtcatggaatatggtgacaagacattcaaggatgagaagctcttcctctatcaaggttttaatcctgcaaatggcaacatcacaaatgaattgatttggccagtaccaaaggctacagtcaatcaaagagatgccgatcttcttttcatgtggaagaggtatgagcagttgaatggggtgtctgaagacaagctgagggctcttagggagatagaagacaccatagcacacaggaagcatcttgacagcagtatcgatttcatcgggaagcttgtgtttggttttgaaaatgggcctttagcccttgaggctgcaagaagctctggtcaaccattagtcgacaactgggattgtttgaagaagatggtgcgaatttttgaatctcaatgtggatcactcactcagtatggcatgaaatacatgagagcatttgcaaacatatgcaacaacggtgtctctgaggccaaaatgatggaagcaagtatcaacgcttgcggccgttacaactcggcgagatggagcccaatgactgaaggaggacacagtgcttgatccccggctatatacaggtaaaattgaataccaaaggccccggtttgcagacctcatttgtgtgaacttctgtatataccatggagacaacaatatagctagcgacccaacaatatggcttgatcccgcctatatacag

SEQ ID NO: 60369 - DNA, 1857 bp, Oryza sativa
  Clone ID: PAT_MRT4530_61903C.1
aaaaaaaaagtttggctgcttgacctttgtactgtgcttgtgctgtggtcgcggacgacgatggctgcgcggtgctgggtatggggcttcgtcgtcgcgctcctggctgtggcggcggcggcggatggggaggaggaggaggggaagtgggagccgctgattcggatgccgacggaggaaggggacgacgctgaggctgctgctcccgctcctgctcctgcggcggcggattacggggggacgaggtgggcggtgctcgtcgccggctcctccggctacgggaactaccggcaccaggccgatgtgtgccatgcgtaccagattctgcagaagggaggagtgaaggaggagaacattgtggtgtttatgtatgatgacattgcccataacattctcaatccaaggcctgggaccatcatcaaccatcctaaaggtggagatgtttatgctggtgttccaaaggactacactggtcaccaggtcaccactgagaacttctttgctgttctcttgggcaataaaaccgcagttactggagggagtgggaaggttatagacagcaaaccagaggatcacatcttcatctattactcagatcatgggggtcctggagttcttggtatgcctaacctgccgtatctttatgctggtgattttattaaagtgttacaaaagaaacatgcttccaacagctactcgaaaatggttatatatgtcgaagcatgtgaaagtggcagtatcttcgagggcttaatgccagaaaatcttaatatttatgtcacaacagcatccaatgcagttgagaatagttggggaacatactgccctggggaggaaccatcacctcctcctgaatatattacatgtctaggtgacatgtacagtgttgcttggatggaggacagtgagactcataatctaaagaaggaaactatcgaggatcagtatgagctggttaaaaaaagaacatcaaatgcaaataagttaaatgagggctctcatgtcatggaatatggtgacaagacattcaaggatgagaagctcttcctctatcaaggttttaatcctgcaaatggcaacatcacaaatgaattgatttggccagtaccaaaggctacagtcaatcaaagagatgccgatcttcttttcatgtggaagagggattatggtgttgaatttgcgcgagtagtttttttcatgttgatttggttgacttcgccttttgagcagttgtatggggtttcggaagacaaggtgcgggttcttagggagatagaagaaaccatagcacacaggaagcatcttgacagcagtatcgatttcatcgggaagcttgtgtttggttttgaaaatgggcctttagcccttgaggctgcaagaagctctggtcaaccattagtcgacaactgggattgtttgaagaagatggtgcgaatttttgaatctcaatgtggatcactcactcagtatggcatgaaatacatgagagcatttgcaaacatatgcaacaacggtgtctctgaggccaaaatgatggaagcaagtataacgcttgcggccgttacaactcggcgagatggagcccaatgactgaaggaggacacagtgcttgatccccggctatatacaggtaaaattgaataccaaaggccccggaggtttgcagacctcatttgtgtgaacttctgtatataccatggagacaacaatatagctagcgacccaacaatatggccccttgtgtgatggctaatcagtaggtgtcatatgcttgttgtacccaacaatatggcttgtgtgtgatgtggccctctgtaaattactcgattagcaatcgatccaagaatgattatgacc

SEQ ID NO: 60370 - DNA, 333 bp, Oryza sativa
  unsure (1)..(333): unsure at all n locations
  Clone ID: PAT_MRT4530_61904C.1
ttaacttaggtacactgctgaaatgcatatgcataaataaacatgggcttnattnaacattgattttctgttttgataacctcatagctcagtattttcgaactgcacttctgtttttcattctgggtcatgtgatgagaaacaatatgcaactcacgacggtcgtctgagacacttagtgtgtaatggtgcagtcatattatctctgatgccctgccatttctctttaaacttcttacattgctagggtcatgtatgtttttagtttnatgtgaaccacatactatttttgcagaattttataatatcttattgttggttcataattgtcaa

SEQ ID NO: 60371 - DNA, 602 bp, Oryza sativa
  Clone ID: PAT_MRT4530_61905C.1
cacagtaacgaaactgaccaaaacgaacccaaaacatcactattgggtccaaaaaaagtggatggggtgcgttcgtttcttttttggcccgaatcggtagttcaattcggttccggcccgaatcggtgctttcaatgcaacccggcatggttttttacacagtaacgaaactgaccaaaacgaaccaaaacatcactattgggtccaagaggagtggattgggtgcgttcatttcgtttctggcgtgaatcggtatttcgtttcggttccggcccgaatcggtgcattcaatgtaacccggcatggttttttgcacagtaacgaaactgaccaaaacgaaccaaaacatcactattgggtccaaaaaagtggattgggtgcgttcatttcctttctggcccgaatcagtagttcattttgattccggcctgactcggtgcattcaatgcaacccggcatggttttttgcacagtaacgaaactgaccaaaacgaaccagaacatcactattgggtccaaaaaagtggatttggtgcgttcgtttcatttctggcgtgaatcggtagttcgtttcggttctggcccgaatcgatgcattcaat

SEQ ID NO: 60372 - DNA, 340 bp, Oryza sativa
  Clone ID: PAT_MRT4530_61906C.1
agcaaatcgatccatgcgaccatgcttgcaaatcagttggagcacaaatttacatgttacacccacaccctacacccatgcataataatacatggtatatacgttcgttcatacatacccctttggatcacacgcaccatcgatcgtacaaagttgggtacatacatacgttacacacattatacgtcatacgcatcgtacatacagtacataatttaaaaaactcgtaattaattaaataccgtagtttgatggcattctctaatggaaccttgaggctggtgaggaatgtttgttgtggtcgggtttcagtcgcggtgattcaagcaggtttctgcca

SEQ ID NO: 60373 - DNA, 395 bp, Oryza sativa
  Clone ID: PAT_MRT4530_61907C.1
aaaatggccctgtagaagttgctttcaccgtttatgaggtaccattgactttctattttttttccatgctctttcaccaaattgttgattgttggctagcagaaatcaaaatggactgtaggctgcagctgctgctttgtcactttcaaataaaatatgacgtgcagaatataaagcttcttaaaaagagctttacgtatagagataaggcttaggaagaacaagacggaagaagaggggtgggggatgaaaataacccaaacaggaaagtagttcttagatattttctggggcctggagtatttatctttttctggtgcactacatgagaagatgtgcacactagtaatctttcaaacggttggagttgggtcaattggctacacatctaattt

SEQ ID NO: 60374 - DNA, 4176 bp, Oryza sativa
  Clone ID: PAT_MRT4530_61908C.1
atgaagtgccactcggtggccgcgctctggtcgccctccccgccgtcccaccacatcaccgccgccgccgccacccccgccgccctcttcaccggcgccgccgacggcaccatcctccactggccgctcctccctcccccttccccttcccctcgcccctcctcccttctctgcgcccacgccgcggccatcacctccctctgcccactcccctcctcccctccatgcctcctcgcctcctgcgccgcgggggtcctctccctcttctcctcctccgcctccgcctccgcctccctccgctgcctccgccgccgctcgctcccgccctgggccggctccccttccctcgtcgcgccgcttcctccctcctcctcctccgctggatcgtcgagcgcgagcgtcgcgatcctctgccacgccccggacgacgggggccgccacgtgtccgccgtcgtggtcgtcgacgcccgcaccctcgtcgtcctccgcaccgccttccacggcgcactctccgtcgcgccgcccagggcgatcgctgtcgcggtcgatgccggcgtcgaggatgcttccgtcagcgtcgtgctggccgatgcgcaggggcgggcgcaggtggttcccgtcgcggagggcgcggccgtcgagggggactcgccgaggcggctcagcgcgagctcggcgtccagcgttacatccgccgaggcggtggatggaagggtggaggctgtgtctttgtctgatgatggcaaagtggtggcattggtgatgaagaacagctgcttgttgaaatgcatctccgagggtgttgtgctgggtgaggtgactctaccgagtgatctgctttgcaaggaaggggaggcaggcatgaagggttggcttgttggagggttcttcctccgtggcggggagtggggagcacatggctcggagaatggcaatgtggtcaggagcctggtgttgtggagtataaatggtggtgccatagtgtacagggttgaggttggtactggatcatttgggtgtaaagctgtttgtgaaattcctgatattgtgtcggagcgaggagatggttccttagttcagttttgtcagtccggcaaccaacttatcagggtggaatctcgcccctataagattgctggatcattgttgtggaaaccatttgtctccatatggtctatggatcatctggaactgaatattgcaaataacatagagaaaccacctttgagcaaaattcttggagaaggtggtcttcagggagaagaatttagatcagatcactctcattcgttctgccagtcaaacaatggagtggacataaattcactgatatgctcatcaaacagcaatggattgggaaggcatggagggacagtgtcttcttcgatggtactttctgaggattcctacactccatatgctgtggtttatggtttccataatggtgatattgaagtaatccgttttcttaacctattaccagctgcaaaatttggcagtggaggaatttacccacacatttcagaaagattctttttgggacacacaggagcaattctctgcttggctgcacatcacatgcatgctcaacctgattccagaacctttaaccgagtgctcatatcagggagttttgattctacaattcgtgtttgggatctggatgctggcaccatcctttctgtgatgcatcatcatgttgccccagttaaacaaatcatgttaccgccagcttggactcatcaaccttgggatgattgctttctttctgttggagaagatggcattgtggctcttgtttctcttcaaaccatgagagttgaaaggatgtttcctggccatcctagttacccatcgatggtagcatgggatggagtaaaagggtacatagcttgtttatgccggaatctccactcctgtaatgattcaggtagtgtattatatatctgggatctgaaaacaggtgctcgagagagaattattacagggacatcgtctcaatcaacatttgaacacttctgccgaggcatatccaagaatgcagttactggcagcatcttgggagggacaacttcggcatcttcactacttgttccaattttcaaagacacaagcctccttcagtctcatgcaaataaaaagggtcttagtatatcatctgtatcaacaaaccatcacaatgcaaatacaaattctgtgactgtaagtgtccctgcagcatctgatgttatggggaagatgtcagctacagatgaagcacacgaactccatggaaatagttcagggaaagttgcctctggtcagtgcataaacaacagaagaaaacaccccataaagtgctcttgcccatatcctggcattgcaagtctgagattcgatctcacagcaatcatgtctacacaaggcatggcaaacaacaatagtgataggcagttgagagatcatttttatagggataatgttaatgattctatacaggctgaaacttgcgataatacttctggaatgcatgtaatcgacagcccttctagagaatcattggaagggcgtttacttcgatttagcctctgttttctgcatttatggggtgttgatcatgagctagacaaattacttgtagatgaaatgcaagtttgcaagccagaaggctgtcatatagctacaggggtggtgggggatagaggttcatttacattgatgttcccaggaaaagaagccactctcgagatatggtcagaatctgctaagtgcctaatggataaccaagtaaatgcaattcttatggatttacagcttctgaaaaacaaagtatttgattcccagttgcctacatctgatcagatggacaatattattactgcaattcagagtgcctctgtatctagttatggacagttaaaagcggataatgaagatgttgggagagaagattgtgatacttctgagataagctcatggttggaatcatttgaaaatcaagagtggctatcttggattggaggaacaagtcaggatgcagtggcatcaaatatcattgttgcagctgctttggttgtttggtacccaagcatcgtgaaacctaagcttgctcatttggttgttaatcaactaatcaagttagttatgtcgatgaatgatcgttatagttcaacggcagctgaacttctagcagagggaatggaaagcacatggaaagtatgtttaggcactgatatgactcattttttgagtgatgtccttttccaaattgaatgtctaagcagtgcaccttccaacaatgctgtctataaaactgcagttgctgtcacaatgcgggaggcattggttggtactctcttgccaagcttggctatggctgacatagttggattttttggcgtaatacaaagccaaatctgggctacttcatctgattcacctgttcatgtaatttcacttaaaactctcattcgagttgttcgaggttctccaaaggccttggctccttaccttgacaaggcaatcagctacgtcctacacactatggatccaagcaatttaattatgcgtaaagcttgcattattaactcaatgatggctctgagagaaatcgcacgggtatttcctatggttgccctcaatgaatcgatgacaagattagctgttggtgatgctattggggagatacataatgccacaatccgagtttatgacatagaaagtgtcacgaaaataaggattcttgatgcaagtggaccaccaggtcttccaagtttgcttgatggatcatcgaatacaacggcaactatactgataacagctttgagtttttcactggagggagagggtcttgttgctttttctgagaacggactgatgattagatggtggtcactaggcaatgcctggtgggagagactcagcagaagtcttactcctatccaatgcacaaagcttatctatgttcctccatgggaagggttttcacccaattcagctcgtctaagtataatttcaagcattttaggacatgataaacatcaaaactcagagaccaagacaagagaactagatgaggctgataatttgaagctgttgcttcataatcttgacctttcttaccgccttcagtgggtcagtggaaaaactattaagcttacaaggcatggtcaggagttgggtacatttcagctgtga

SEQ ID NO: 60375 - DNA, 592 bp, Oryza sativa
  unsure (1)..(592): unsure at all n locations
  Clone ID: PAT_MRT4530_61909C.1
cggacgcgtgggcggacgcgtgggtttatgaagactgtcatgggatgtatggtgaattgagtgcacttcatggtggaaacctttggatatagcagaaggttcatcaagaagggacccggatgtactnaacccttcagttagaagtagcattgcatgtagaacatctattttcacagtaatctactaaccctgtaactcgtattgtcgcatcaggatacacctccatgagatcgtgtagacatgctttgtgaggtcaggaaattgtatgctgtgcatgagttgcatccgttattcttgacatatcatttgttcctcttatgatttaatctgatggtggcatggtgcatgtttatcatttaatctgatagattttttttttaccatcatttgtgcaccgataagatagttgatttgaactgcaccagtcaacagcaattatatgcgagtgaactaggtcttactatcacaagtcctagaatatacaaacaattcctttcatggataccatgagataattttcatgcacacatgccaccaccagaaataaggcaggtccagtctagaaaactttggtgtaatacaatttctgcat

SEQ ID NO: 60376 - DNA, 439 bp, Oryza sativa
  Clone ID: PAT_MRT4530_6190C.1
attaattaatttttttttatttttttcaaaatttaacaattttgattcataataaaaaaaataaaaaaaaattttaaaacgaaagttaattaaaaaaagacatgaagaaggtgaaacttatgtacttaaaaaaaaaggaaaaaaataagaggaaaaaaataaattattttcagggacttttttttgttgaaaaaaaaaaaatatcaacaggggcttctttctgggcaagaatatacttaaaatttgtgagttataaatgtttaatatttaactcaaattgaaaaaaggccaaaattttattttaaaattcaaactcatttgttaaaacattaatgtttttatacaacatattgaattgagaacagaaatattgttacaagtttaaaaaatgaatttttaatccaaggtcaaggaaatttcaatcacaattttttatccc

SEQ ID NO: 60377 - DNA, 390 bp, Oryza sativa
  Clone ID: PAT_MRT4530_61910C.1
aagacacctaaccgggagatgataagatagattggagtcgaggcagtaagggcaaggggagtgcaagaagaaatgtaacgtctcgcctctcccagaccgggctcgcttacatctggccgctttcataggtcatagactgccatcacagaccaacacaagccttttctgcacactttgtcctcactcatgcgcaatcaggaagaatttcctgatcggtcacccatcccgaaattgctccaagctaagcacgcttaacctcagagttctttcgagatcggcttccggaaaagaagttgcaacttgttgatatgagtattctatttatcctattaagccttaggctgggatgtcacattgtagtacctgcactggtaatatctctcccatagt

SEQ ID NO: 60378 - DNA, 825 bp, Oryza sativa
  unsure (1)..(825): unsure at all n locations
  Clone ID: PAT_MRT4530_61911C.1
tttttttttttttttttgttttttttgttttggtttttttttgtgttttctttttttttttgttgtatttttttttgtgtttttttgttcttgggccttcggcggttagccccgggctcgggcatgggggggccttacgaagggaacaaaaggggggggtgggagcccncgcgcgagcccgtcactttctgatcttgaagggggggggcccgtaggggggaacggagggggtttggcccacgggccggggcagggggggagctacccggggtggtgctggcgggcgggggggggagcgggaggcggtggcggcgccgcctgcccggggcgggcgggccgccgcggggggccggtccggggggtccggggcggccttcgccggtccgggggcgcggggggggggtcggggtccgcttgggggttggcctggcgggggcggcgccctggggcggccccgggcgcggggccggggggggggtttcgggggggcggtggggggccggcgggggggcgggggcccgggggggcggcgccccggggcctggggcctggggcgcggggggggcggccggggcggcgggggcccgggggggggggcccccgggggggntgggggcgggcggggggggggggttggtgggggggggggggggcgggggagggcnaaggtggtgggggttgggggggggggggggggggggggggcgggggtttggggggtgtccgtggacttgtggggggggggggnngtcgttcgcgggcaattttacccgggtggggggnnggttgggcggtgcctggtnttttnnctctnncnntcccctt

SEQ ID NO: 60379 - DNA, 477 bp, Oryza sativa
  Clone ID: PAT_MRT4530_61912C.1
atggccgttattgagctgccccttgcgattgttgctgcctgggctcaaattgattgtactgtggagcaaattgaggctgaattaaccccccttgctgatattggtcttgcggggaagggagttgatattgataatttaaattgcccccctggtaattttggtagtttggctgaatatttcgcaccaagtgctcagggacaatctgagtctgctgtcttgatggcgtttgctgaatcggttgtacaatctgctgccttggtggcgtttgctgaactggctgcacaacctgttgctgaattggttgtacaacctattggattgggggtgtttgttgaatcagctgctgctggactgggtcaacagcaaattgaggtggtagaaatatggcagcaacctgatcttgcattagctgattcgcaacttgcccactatgctgcggctgctctctcgtcaacagccgaggaaaaagcgtgttga

SEQ ID NO: 60380 - DNA, 1592 bp, Oryza sativa
  Clone ID: PAT_MRT4530_61913C.1
cccgggctgcaggctcgtcgtcgtcgtccagcctgagaaccaaacgaagaaaaaggagggggaaaaaaggggaaaacggggagaggctaccgacgcggcaggcccggccgtcctcccctctcccggtcagcgcgccgcggctttttgcgtccggagaggcggagacggggcgccatggaggcgctgtggaagcaggcctccaggctcaaggagcaggtctcccgccagggcgtgtttaagccatttggagctgcctatggaaattcagaaaatgcgtttacagatgaatcagaagttaatctacaccagaggctggaaaaactttacttatcaactcgtgctgctaaacattttcaaagggacattgtccggggtgtggagggatacatagtcactggatctaaacaagttgacataggaaataaattgtccgacgatagccagaaatatggcactggaaacacatgtacaagtgataacactttatccaaggctgctatgtactatgggaaggctcgttctctgatggaaaaggaacgtgggaacatgttgagagcatttggtacacaggtggcagagccactgcgagcaatggtcatgggtgcgcctttagaagatgcgagacatctagcccaaagatatgaccgaatgaggcaagaagctgaagcccaggctgttgaagtttcaagacggcaaaacagagtaagagagtcagctccgaatggagatgtgataacaaagctggaagctgctgaatacaaacttgaagaacttaagtcaagcatggtaggattagggaaggaagctgttgcagcaatggctgccgttgaggctcagcaacaaagattgacattacagcgccttattgcgatgctgctaatcagtcttgctctgaaggttgaagccgaaagagcctaccatcagagagttctggagatccttgaccacctggaacaagaaatggtatcagagcgtcaaaagattgaagcacctccgaccccatcagcagaaaattacatggcacagccaccaccatcttatgacgaagtcaatggcatgtttgcatcctcctctgtcgatgattcagtgacatctgtagatttcttcctaggagaggcccttgattccttcaaggctgaaagtgagtctgagcttaacttgtcagctggagacattgttattgtccggaagatatcaaccaatggttgggcagaaggcgaatgcaagggaaaagcaggatggttcccacatggttatatcgaaagacgagagcgagttctagctagcaaggttccacatattttctaggagttcgaggataaatgtgtgtagttttgatttcaaatgttgaaacagtatattcgtcttctttgcccccacttatagcttccacgtgatgctttctgattcatgtgtatagactacacttcgtgttatttacaagttttgaatggtatagtttgtaagacatttcggtagactgaattggcactagagggccttacatagttgaaccctggtttccaaagggagtaaagtatttactgaggcagttcgtaaccttcttttttaaaaaaaaaaaaaaaaaaaaa

SEQ ID NO: 60381 - DNA, 2213 bp, Oryza sativa
  Clone ID: PAT_MRT4530_61914C.1
ctcccggatctcgcgcgccacgaccctcctcccccttccagaagcttctcgaagctccgttcctcaccaccccaacccaatccccactccccactccctccgcgcggatgagcggcggcggcggcggctcgggccccctcccctactcgatgcgcgatgtggacggccgcggcgcctacaacaacgccaagttccgccaccgatctcgcctcaaggttttgctccctcccgatccccttccacccctcccatttctttccccgcgaggagatgtagaaggtgtggaatctggttggcttgagggattcatggctccccgatctgtgggtttagctgctgccgaattagttcttggtcatgtccgtgggcgtctgcgccttaggatggcctctcaggctctgtttaccaatagcagcaagtaccaatgtggaaagttcactgttggaaaatttttgagtcttttaatggtttctggcgtaatatacttacttgtgcacaaaagttcggatggttttgtatccggtgagctccatgaaaaagtagggaatacacataccaagaaagattttcccaaaattcgtacattttggagaaagccaccaaggctgccgccacgtcttcctccaaatgaaatctatagaaacaattcattgcttctacagtctcctcaatctgaatggacactcagacagaagaaagttaaagaagcatttgaacatgcatggtctggctatcgaaattatgcaatgggttatgatgagcttatgcctttaacccgccgaggtatagatggactaggaggtctaggcgctactgttgtagattctttagacactgcaataataatgggtgctgatgatgttgtttccgaagcatcaaaatggattgaagataatctcatgaaaaagttaagtgagaaagggcaggtcaatctatttgaaactactatccgtgtcttgggagggcttcttagtgcctatcacttgagtggtggtgacaaagcaagaggtgactctgggataccaatgacatctaaaagggctaatccggagcgtcttttggaagtttcaaaggacttggcagacagattattgttagcctttacatcaagcccaactgctatacctttaagtgatgttgttcttcgagatcgaactgcacatgcagcccctgatggtttaagcagtacctctgaggctacaacattgcagctggagtacagttaccttagcacaatatcaggagatccaaagtatgacttagaggcaatgaaagtgttagagcatatgcgaacactcccaacagtggagggtttggttcctatttacatcaatccctcctctggtcaatttagtggagaaaatattcgattaggatctcgtggtgacagttactatgaatacctattgaaagtatgggttcagcaagaaagatatcgtgacactagtttgaagtatctatttgaaatgtatacagaagcaatgaaaggggtcaagcatcttcttgttcgaaaaactattccaaatgggctggtcttcgttggggagctcccctatggacgaaatagtggttttagccctaaaatggatcacctggtgtgttttcttcctggtacccttgctctgggtgcaacgaagggtataaccaagaaaaaagctcttgaaaatcatttattgactgcggaagacatagacaatctgcagcttgctgaagatttggccaaaacttgtgttgaaatgtactttgtgacatctactggacttgctcctgaaattgcttattttcacattgagggtaattctgagggaggacctgatggtgggaacaaaagttctcaatatgttaatgatatcataatcaaacctctggatcgtcacaatcttttacgcccagagactgtagaatcactatttgttttatatagaatcacagaggatccgaagtatagggaatggggttggcagatttttcaggcttttgagaagtatacaagagttgattctggtggctatacttcattggatgatgtcacaagcttgcccccacctaggagagacaaaatggaaactttcttccttggagaaacactgaaatacttgtatttgctgtttggtgaaagcaatattcttccattagataagtatgtattcaacacagaggcccatccacttccaatcattcagtctgcacaacagatctctcattcggtatag

SEQ ID NO: 60382 - DNA, 337 bp, Oryza sativa
  unsure (1)..(337): unsure at all n locations
  Clone ID: PAT_MRT4530_61915C.1
ccctcctcaacctctgcttggctgtctgcctcctcgcctgtcatctgtccctctcatcagcagcggcgcacgggtcaaaccaagagccgcagcatcgccaccaccattcaccaccgccactcagactctccaatggcggctcctccccctcctcctcgtcaaaaccgcccctctcctctccttgtagcgggtagttgcttgtcgcgagtagggacgaatctgtgctaggggcgagaggtgtgtgcgcgctctagggggcaatggaggggatgtggaggaaggccaagaaggcgctgggcgccgggcctcttgcgttcgcntccccggcggtcggcgg

SEQ ID NO: 60383 - DNA, 276 bp, Oryza sativa
  Clone ID: PAT_MRT4530_61916C.1
atggatcgggcatttttgctcatccaggccgacgctcgaccatgcagttgcacatactacctacatgtattgtatgtactcattaggagggacggcagcatggcccttcgcttccagcggaggatttaccttgcactttctgtccgcaccgtcccggcccataaccgaaattgtgggtccgcaccgtgctgcaagactggtcctcctacggcggtccggtcctacccccccataccaccgctccgaactctatcctgtggtatcaacgcggctccc

SEQ ID NO: 60384 - DNA, 1614 bp, Oryza sativa
  Clone ID: PAT_MRT4530_61917C.1
ccggccgggaaagaggggaaattcaaaacctcccccaaaaccctcgccccaccgccgccgcccccgccgccatggacagggcaccgccgcgcggcgccccgcgcgacgccgtcggccagcggtggctcgccgtcttcgtcttccaggccgcgctctcagccgcggcctccgcgctctacctcgccgcgtccccgcgccgccgccacgcccgcctcggcgtgccccggggcctcctcctcgcgctccacccgttcctctccctggccgccacggggctcctcgcgctcgccttcctcgtctccgcgtcgccccacccgcgcgctccccccgtgccgcgccgcgccctcgcggcgtccctcctcgccgccgccggggcgctctgcgtgggcgccgccgcgtcgctggtacccgaggactccgggtgggcggctgttgctgggatggagttccgcggcgctgtgttgggagccgtgttcgccgcgcactatttcgggcgtcggaggtggttgctccagttccccgttgtgcagcgacctccgttctatggtttgaaaatggggcttctgccatctggaaaaagggctctgaaggtgtcacttcaggccttcttcctttccctttatcttgattttcgttcttcctcagcaattcagaatcagaggatccattggaagccaaattatcgcccaaatcggtatttttataatgagcactgccgttgccttctgttgggaaataagtcatcattttgtccaggttgtgcatacaagaaggtgcagtttcgctccaccacagagcactgctgctgcagagactaatcctactgagtatatcctagaaacattggaactgagtgatccaagatcactaatgcagtatcttgcataccaagatttgtgtgctgtatctgaatgtaacttagaactggatcatgtgaaggaagaaaacctgtattttggttcacagtctgtgttgattcagaagctgagcctgaagccgcttgaggagttcacgtcaaaaattgctgaagctcttgaagggttttctagtgagaaaccagaattgttgtcacaacagttcaaacttgctgctgcatttaatgattcacagatctgcatccaggaagatctgcttgtaaagatatgcacatggtgcgctcggacattgtcatctttaactgcacggtcacgccaagaagatcggtatggagttgctcaactcacaggctgcaatgctgctgtgatgtctactttgctgtctgcgctagttgccgttgaggcctgtttggggaagaaaactaacccacaacctgcgcactcactgggtccagcaagcattaagtgggctaacttttccaccgggagaaaaggcaatgtaactgccattgcaagcacgcaaagaggtggtcttcacactaaagctttttccatggccgatgttattcgaacttcgatctatcagatggtttcagcctttgagcatgacatgcgggcaaatgctaaagcatcaagtttggagaagaactggatcagtgaaggaagaaaacctgtatttggttcacaggctgtgttggttcagaagctgagcctgtttattgagtaccgtgctgtctga

SEQ ID NO: 60385 - DNA, 276 bp, Oryza sativa
  unsure (1)..(276): unsure at all n locations
  Clone ID: PAT_MRT4530_61918C.1
anacctctctccctctcgcacgncctctcctctcggtcgccgccacagcagccccganccacgncgctgccgccagangcgcccttctcctccctcgnangccgcacgcctcaccctcaccgccaccccgccgccgccgatctacacactcnccgcccccgnctccgctcccacacgcccttctcgnccctcgcgcaccgatctccgctgtagttctccgcgccgnccccgctctccaccgnccgaacacagtcgctcgnctcgccggtctccact

SEQ ID NO: 60386 - DNA, 327 bp, Oryza sativa
  Clone ID: PAT_MRT4530_61919C.1
atggagaagcagaagccggcaggccacgacgcccgcctcctcctcgcgctgcgctgctccagggcgtcgctgctcctctcctcgctccgccatccccgcgcggcgccgccgcggcgggcgacgacaccacggagatcgagctccactgccgcgggtggtagcgtgctccgggacgccggcctcctccgcgcggagctcgctgcggcgcggcgcgaggccacgatgcacgcggcgaactccggggcggaggttctcctcgtcctctccctggtccccgtcctcctgctcctcctcgggttcctcgcggcagcggcggtggcggcgtag

SEQ ID NO: 60387 - DNA, 225 bp, Oryza sativa
  Clone ID: PAT_MRT4530_6191C.1
atgcaacggacgcaggtagctgctgccctcctccatggcaggatacatgaacaagctttggcaaatggcaagaggatttcagtggcagcagcagctgcagcagcaaggtgtgaggttgttgttatagctgccattgcaaaccagggtaaattaaagtggggccagctaaaagctacacacactaaacaggagaatccagtgcgccaaagagtgaagcgtcagtga

SEQ ID NO: 60388 - DNA, 237 bp, Oryza sativa
  unsure (1)..(237): unsure at all n locations
  Clone ID: PAT_MRT4530_61920C.1
cggngctcgcctcttncgactnanagcctgagcganacacagagttctaagatcnacatgggatggagaggattcatttttnacatccatctaatcgcctcgacattacaatttgtaatagcgattgcacattcattcattagatccgtacatccatgggggcgtcattctngtcgancctcaccgncgccgcgcgcgncgtgcacatgttcaagatcaatggctactccgccacca

SEQ ID NO: 60389 - DNA, 420 bp, Oryza sativa
  Clone ID: PAT_MRT4530_61921C.1
aaacaacttcgtaatgtgaacttgatgttatttcctggaacatccttgctaactaaaagattggatggaattacagctgccaaatcagaagaggacaaggatgcatacaatgtttctggattacctaatggtaagtgtttgcctagcaggaaaggaaacgggcatcttgaactccatgatcttgacttgttagaggccgagttgaatactgaggatgcaaccaatgcttctttcagagcactgaaacatgaatgtggtccttgcaacatggtttaatcatgccaagctagctgttgggggaagtgtgattttattttaaatcgaatttctgggctgtctctggctgttactctgtgttgggcaactgttcaggctactcatccttccagttccagtccagtactatgcaatgaattctcc

SEQ ID NO: 60390 - DNA, 159 bp, Oryza sativa
  Clone ID: PAT_MRT4530_61922C.1
atgcacgccttcgagtcaatgagcgtcttcgacgcaaccaccggtagcgaggagtggagctgtggagggatatcgatgcgcgtgacctatactgagaagatgatcaagtcggtagtgagcaccacagagtacggcatgaagctggtgatgacggtgtaa

SEQ ID NO: 60391 - DNA, 826 bp, Oryza sativa
  unsure (1)..(826): unsure at all n locations
  Clone ID: PAT_MRT4530_61923C.1
gaatntacggataccgagtcgaaaagcagtgaacattttccggggggtttggccagttttccggaatagggatggggctggactgccctattgataatgnctgacctatccctatggatggggaggtctgcggtttggnaacnagggtgacgatntgctcgtgtggtgcgatggagggccgtgtgtcaaagatgggctcgatatagctcggaggaccggggatagcgccgtgtgcggatggaataaccgggatgtgtgctaaagaaatgtggctgcgaccttggagatgccttgggggcgcaatgtggatgggctggcaaagctgaagatgggcataaatgccaatatgatgcagggtgttgcgaccataccaagtggtgactgccaatggaggcgcataatggtgccaactgtgcgtgtgccaaccctggctgtgtgcgccatgctggcacgccgtgcggcacaaatgggtggtgcaatgcaccggagtggaatgaagaaggcaaggatgggaaagganagctggatgcatgaggaatgggacaagtgggagaatgatgaatgtgtgccactggggtggtgatacaagtgaacctggcaatgatgaatggctgggtgtttgctgtgctggatgcaatggaacagaactgcagtgaacttggatgaggtgtggccatggtgaactgggagacccctgggtgcaaatgatggtgttggtgttgggtgtttgtaactgacgttctaagttttagttcggaataataaggcttctaattaagccagcagtngaacaacggggaataatttanttcaaaaaaaaaaaaaa

SEQ ID NO: 60392 - DNA, 178 bp, Oryza sativa
  Clone ID: PAT_MRT4530_61924C.1
tccatctctgtttggggggacacagcttcgtggtgaaacccccggcacaggggaaccccgggtctcccggaaatttctcccgggggggcagacccacacacgcgcgtgctcgcgggcgagacacacagaaagggctccccacacccccgagatagagaacccggtgcacatgctctga

SEQ ID NO: 60393 - DNA, 458 bp, Oryza sativa
  unsure (1)..(458): unsure at all n locations
  Clone ID: PAT_MRT4530_61925C.1
aggtgtaggataagtgggagccctcgggccgcaagtgaaataccactacttttaacgttattttacttattccgtgagtcggaagcggggcctggcccctccttttggctctaaacgcccgagtccctcgggccgaaccgggcggaagacattgtcaggtggggagtttggctggggcggcacatctgttaaaagataacgcaggtgtcctaagatgagctcaacgagaacagaaatctcgtgtggaacaaaagggcggccgcaccgcggtggaagctccagcttttgttccctttagtgagggttaattgcgcgcttggcgtaatcatggtcatagctgtttcctgtgtgaaattgttatccgctcacaattccacacaacatacgagccggaagcataaagtgtaaagcctggggtgcctaatgaagtgagctaactnacaattaattgcgttgcg

SEQ ID NO: 60394 - DNA, 1512 bp, Oryza sativa
  Clone ID: PAT_MRT4530_61926C.1
atgacgatggacacgatcctccacttggtctactcctccctccccgaaaatcccgtctcccccaccgccaccctctccgccgccttcacttcctcctcatccgccgggggcggcggcgaggatcgcatcagcgccctccccgacgacctcctccgccacatcgtctcccgcctccccaccaaggatgccgcccgcaccaccgcgctctcctcccgctggcgcggaatctggcgctccacccctctcgtcctcatcgacggcgacctcttcccgcaggggccgcacatctccgccgccgccggcgcgtccctccgcagcatcagggacgctgtcgcgaacgccgtgacgcgcgtcctcgcctcccacccgggtcccctccgcttcgtcggcgtcatcaacttcttcctgggccggcacgtcgacgcgctcgcggactggctccgcctcctcgcggccaagggcgtcgaggacctcgtgctcgtcaaccgcccgtggccgctcgacgtgagaatcccggacaccatcctccgctgcgcctccctccgccgcctctacctgggcgtcttccgcttcccggacaccaccggccacccacgcggccccgacgtcttcccccacctccaggagcttggcatctgccacaccatcatggatgacggggacctcgaccacgtgctcgcctgctgccccgcgctggagaagctcgcgctcgtcgccggctacggcaccccctcgcgcgtccgcgtcgagagccgccacagcctccggtgcgttctgctctggtggtccatgatcgacgagctcgccatcgtcgacgccccgtgtctagagcggctcatcctctgggggacgtacccctgcgaggaagaacccatcaagatcgagataggctacgctccgcagctcaccgtgctcggttacttggacatgggcatccacgcgcttcatatcggcggcatgattatcaaggctggggtgacggatgtgagcccgatggcaaaagttcctagtgtgaagatattgggcataaatgtgaattttgaagcccgcaaggaaatggagattttgcccagtttcttgagatgctttcccaatgttgaggcacttcatataaagtataatgtggatgagtccaatggcgagctcaactccaagttctggcaggaggttgggcatatagaatgcgtggagtcgagcatcaagaaggtggtgttcgatcagttcagagggggtgccaacgagctcgaattcatcaaattcattctggagagggctcaaatgctggacaagatggtgtttgtcgtggatcctgagaattcggcttttgtggatcaggccatgagcacaatgaagtcactagcttccacagactataccagtgccagtaagaagtgttcactgatgatggttggatatagaaaaggtcctcccgcgttcagctacatgagagcatctgatctttctctgagtgacccattctttgtttcgaaggatatacaagtgaccgtttaa

SEQ ID NO: 60395 - DNA, 213 bp, Oryza sativa
  Clone ID: PAT_MRT4530_61927C.1
atgtctctgtttgtagagatgacagcaagatcaatcttctctttcatgaaaaggctctttaagatggacacgatcactggtatggcgagcgtggagctgtggatcggtggttgtgggcgatcccggcgaggtcgtggcccggcggtgtgtgacgggggcccaccagccattgggctgggcgccctcgatcagggcgcggtcaaggccccttga

SEQ ID NO: 60396 - DNA, 162 bp, Oryza sativa
  Clone ID: PAT_MRT4530_61928C.1
atgctcctgaagatgggccatcagaactccacggggtttccaagttgtctccagagacaatgctggccctatgctctcactgcaagcaacaacaaatcttacagcggaccgtttaacccattggactggatgacacagcaagggaagagcctttccaaatag

SEQ ID NO: 60397 - DNA, 127 bp, Oryza sativa
  Clone ID: PAT_MRT4530_61929C.1
atggccggcttggagcagaccgaccaacagggcgtcgtcgttggtgagctaattaaggtctttgggctgtatctgaagattctgaacgtccatgctttgtttaacatgtgtgcaacccctgctttcg

SEQ ID NO: 60398 - DNA, 1870 bp, Oryza sativa
  Clone ID: PAT_MRT4530_6192C.1
ccaatcgtcaagcagatccttggccggctgccgaggaagccagggaaggccggcgatagccgggacgccgctgggccgaacggcaatgagccgtctaactcgtacagcgtcgccaggagcgtggagcaagggaacaagaggagtggaaatggggattacgtggtgccggctgggctgacgcccaatccgatgatgaatgggactgtggtgtatcactccaacgagccgctgccggcgttcaaggacgtgccggcctcggagaagcagaatttgtttgtcaagaaggtgaacctgtgctgcgcggtgtacgatttcgcggatccgacaaagaatctgaaggaaaaggagacgaagcggcagacgcttatggaacttgttgactatgtcacttctgcaaatggcaagttctctgaagtcgtcatgtcggagattaccaagatggtgtcgattaacttgttccggagctccagccccacccctcgagagaacaaggccatcgaaggagttgatctggaggaggaggagcctctcatggacccagcatggtcacatttacagatagtttatgaggttttcttgaggtttgtcgcatcacaggagacagatgcaaagctggctaagagatacatagatcattccttcatccttaggctactagatctttttgattcggaagaccccagggaaagggattatttgaagacaatcctccatcgcatatatggtaaattcatggtgcaccgccccttcatcaggaaagcaatcaacaatattttctacaggtttatatttgaaacagagaagcataatggtgttgcagagctgctggagatcttgggcagcataattaatggttttgctcttccacttaaagaagagcacaaattgttccttgtccgggcactgatcccacttcacaagccaaaatgtgtatctatgtaccatcagcaattatcatactgcatcacacagtttgttgagaaggactgcaaacttgctgacactgttattaggggcttgctaaaatattggcctgtgacaaacagttcaaaggaggtgatgttcttgggtgaactagaagaggttctggaggcaacacagcctgcagaattccaaagatgcatggttccactcttccgtcagattgcctgtagcatgaatagctcacatttccaggtggcagagcgggcgctgtttctttggaacaatgaccacattgagaacttaattaagcagaattacaaggtgatattacccattatctttcctgcgcttgagaggaatgcaaggggtcactggaaccaagcagttcgaagcctgacactgaacgtacgcaagatcttctcagatcatgattctgcatttttcggggagtgcacacagaagttcaacgacgatgaactcaagcaggaagaatctaattcgaagcgagaagctttgtggaagcgcttagaggaagcggctgtccccagatccgacaataacaaccctgtgggcacgcctaatggcaaattcagtcaagcagctggctagaaaataccatagcaattacagtcttgcaatcctttaaccccatgtgcgattctctggaacttggtttgtgattttagtgttgaaaattttttgttggtgagttggtttcccccttgttctaggcgggtaggatgtctttggtttcctgagaactgcatgatgaaaaatgtacacatacagaagaatttctgcgagctttgccctatgtgtagtcacattaatcagaattatcatatagttgaataaacagtgttaagtttctgttgcggatacatagttgtgttgcttactgtaatggcagcaaaaaaaaaaaaaaaaaaaaaaaaaaaaaaaaaaa

SEQ ID NO: 60399 - DNA, 535 bp, Oryza sativa
  Clone ID: PAT_MRT4530_61930C.1
caatataagctaatgttaaagttttcatcgatgcagttacgaactacagacacaagaacacaacgacaattggcacaacggcaatactacaagccacaaaaagcaaatgatcgacttgctacaaggttattcaagtatcctgatatcaggctactgtgaattcagagtctcaccctgctcccgtgccacagaagttgaaaggatggaaaggctgttatttaagaatgtaagtgcagattcacagtcggagataattttggtgacagatgaaggctcattagatgctgaaagcgatcctgcagccattgctgcatacgaatcccgtaggctcctcaaattactaaggaacttcaaaagtgtgttatatgcctccaacaagcgattagcagctggaccaaaaccatgcaattgagggacctccatcatatgtgtccaaggatgaatttccttagtgtagatcatattgaaggattttactgtttctaggaacgattgcaaatgttccctcagttttaactctgtctcggcatagtct

SEQ ID NO: 60400 - DNA, 1221 bp, Oryza sativa
  Clone ID: PAT_MRT4530_61931C.1
tgcaggaattcggcacgagttttttttttttttcaatataagctaatgttaaagttttcatctatgcagttacgaactacagacacaagaacacaacgacaattggcacaacggcaatactacaagccacaaaaagcaaatgatcgacttgctacaaggttattcaagtatcctgatatcaggctactgtgaattcagagtctcaccctgctcccgtgccacagaagttgaaaggatggaaaggctgttatttaagaatgtaagtgcagattcacagtcggagataattttggtgacagatgaaggctcattagatgctgaaagcgatcctgcagccattgctgcatacgaatcccgtaggctcctcaaattactaaggaacagacagaagacagtagacacaagcaagaagaccgcacagagcttcaaaagtgtgttatatgcctccaacaagcgattagcagctggaccaaaaccatgcaattgagggacctccatcatatgtgtccaaggatgaatttccttagtgtagatcatattgaaggattttactgtttctaggaacgattgcaaatgttccctcagttttaactctgtctcggcatagtcttcattcggattatagtcatacttagatgctaactcctgaaccatcagttgcaaatttgacatctttttagtatactcggagagcttcaactccagttctgttatatcaggcaaggggtaaattgattgtatctgaacatctgcaggaaatagtttgcactcttcagaaaatatttgggcttgtttctctgcaattgaatctacgagcagcacatcttttgccagctgctcatcaacactccactctggattgtcagcatagcagctagcttcaactagatcaacaatgagacagagaagctctacacgctcatcgtagctacctctaccctgaattgcctccgtgtcaaccgaaggcgttataccaaggaaattcgcaatctcggccaggtgttggatcctgctgttctcctcgtcgcggtcgaggctatccccctgccagttctgctgcgtgaacggcgatctgtcgcctaggagccggaagaagagccactcgaggaggcggtagcgctcgacgccggcgaagaggagggactgggcgggggcgttggcccgcgggtaggccagcaccgccagcttccgctggatctcctccatctgcttcgacgccat

SEQ ID NO: 60401 - DNA, 237 bp, Oryza sativa
  Clone ID: PAT_MRT4530_61932C.1
ccaggcacggcccgacggtcgggcttggttgatgaggacatcaataccatcaatacatccacgtccccccaagtacaacttcatggtcctattacccactctcgtgcacgtcaactcaataatcatgacgagtgccctcgtggccgggttgacgcgcaccacaagttcacggtgaccattggagacggtgtatcggttgctaaggcgcggtgtctttggacggttgtagtcagaccg

SEQ ID NO: 60402 - DNA, 213 bp, Oryza sativa
  unsure (1)..(213): unsure at all n locations
  Clone ID: PAT_MRT4530_61933C.1
gacgcattagatctcannaaaagtaaactgctgctattatatgtgcaatatataccttggaagattaatttcaatgaatattcctccagcattatgatcaactagttatccttataatataatgtatatatggaatgtgtagtctatgagatgatgaattgatcgttgatactgaactagtagtgttacaagtttagtctatatacatctagg

SEQ ID NO: 60403 - DNA, 408 bp, Oryza sativa
  Clone ID: PAT_MRT4530_61934C.1
aaggagtaatagaggttttatggttttttgggggagaacaaggaccgggcttaaaagaataacaagtggatgtgcacaaaaaatttggttataatttttccacgcacctaacccaaaggagactgccaaaaaaaaaaaaagcaggggttttttttattgggtgggaaagagtgccctgaactcaaaagaaccactgggggtgagcccattagaaatttttattgttagagatacccctttagaagaaaattgtatcgtgaaaaaaaagaatatggggctcttttttggaaaggggcttctcttccaggatgtgtttgttcttaaaagcaaagagagccccaccttctttttgtggaaaatttataaatgtataacgtatttaaaaaaaaaaaaggtgaacatgaaaaa

SEQ ID NO: 60404 - DNA, 316 bp, Oryza sativa
  Clone ID: PAT_MRT4530_61935C.1
ccctccttcatcatgtatcctccacagtagtcgccctcctttttttttttttttgggggattctaaaaccatggggggaaacccatcaacacctaatccaatttttctattttctcaacaacaactcacacaacataaggactctaaaactcaacataacacaacccaaaaacacctgatatgactgaccacaaaaacatccaatcaccattaacacattttaaccaccagacacccacataaaccaccacggactttttttacaggaaacccacagtacattcttgttgacttcttacacaaagaaaaaacccac

SEQ ID NO: 60405 - DNA, 1481 bp, Oryza sativa
  Clone ID: PAT_MRT4530_61936C.1
ctagccaatccccaccagagaccctctgtcctgtgggctgtggccattatttttttttggtattaccgaactagacatgagtgtccaactgccaatgtgtaagtagcggtaaaaaatcttttattgattgtgacaggaatacaggatactcatactaaattatgcaaaaaacactccttgcagacgcttcccaaaggtgatacttcccagtcggtaaagtttagacttcaacgtttatgcaaatcttcgggtaaacggatcattttaggtgctctcaaatattttgtccgcattccctacctcaaaaccatcgcgcctgtggtgttcgttgacctcatcatttggcaaatctttgaactgtgggagtaccaggcgttcagcaaattcaatataggaacgtggaatggattcagtgattccatcagcaaaagtaaacaacgctgaatcagctacagttgagctttgctggaggagaccatcaggactcactttcaaaatccctccttctgaatttaacttgaacccattgtcctccacaaatttgttgaacttattgatacttctaatatctgatatcaagcgatgagtggaaattgtggtatgatttagtgcatagccattaacaagagtccatgcagcatattcactttccctagataaaacttggaaatcagaataaatgggcttctcccatgtcagctcccctgatgtacttgcaagagttgcatgtttatttcctttaccagaagttctaatgtatttttgaatgatgtcctggctctgaggactcaactcatccacaagtagttctgaaatgaatatccttggcaaaggcccataaacaccagttccagtgtatccatcattggtgggaggagaaaaccatagtgctcttaacttttttgctggaaaccttagttcttcacgagggacataaccaaagtcagtaaaaaattcagcaagtgattttataccataaccatcaactccaaatgttctgaaagcaaaatgatcatagcaaatgtggtccccatcataagaacgaacaagttccaggatggttttggcagttggatttctgctcagatatactttctccatgtttgagataactgtccggaaaaatgaatcagcacccttggggagggcatcggcgggcgcgggcggggcggacgcagctgccgccatggcgatgccgcggcggcgccgggtgcctggggttccgcttccgcccagacgtacgggcgccgcggcggcgggggcgaggcggcggaggctgaggatcgcgcccgctcctggggatctcgcgccggcaagggccacggccatggacaccggcggcggcggaggcggcgagcactggaggcgaacccggcggtggccgaggcggatatagcctagcctccgacccctgctgcccggggggatgctgcaccacgacaagcaagccctcgtgccgattccgcagcccggggatccac

SEQ ID NO: 60406 - DNA, 154 bp, Oryza sativa
  unsure (1)..(154): unsure at all n locations
  Clone ID: PAT_MRT4530_61937C.1
cgatttttcaattcaccccctaggttagttaggggggggcgtnanctaaaaaaaaatcttcgacgcagtgggcggaccaagtgcccggcaacctgccggacgtgtgcctgacaagtaagccagctgccgctgaagcaaaggatacccagctatg

SEQ ID NO: 60407 - DNA, 1344 bp, Oryza sativa
  unsure (1)..(1344): unsure at all n locations
  Clone ID: PAT_MRT4530_61938C.1
nttttnggccnaanggngggcaaaatttttttccctggcgggccgaacccgggaaaagggaatttccttttaaccnccctttccccaanaanccctttttttcccgggaaaaccnggaaccggggcccttncccccccaactttggggggggaaagggnaaaaccaaaaaacgggggggaaacgcccaaacccccnnggggcccgggggggggcggggnttttntttnttgggccccgggaaaacccnaagggggaaaaagccaccccccccccccccccccnccggggggggtttggggcccctttccccttttgccngggggggnaaanaatttttggttttntttgggtcccgggnaaaaaangggaggggtttgggntaaacccaaaaaaaccccccccnccccnccngggccccttttnggnggggaaaaaaaaaaaaaaatttnaatggntttttttcccccccccccccccggggggggttttggggnaattttccccccccnnnaaattttcccccanggggggagttttcccntttcaaatttnccccttttggggtttttcccttttaaaatttncccntttnccccttttnaaccccaaanttttnaangtttnnaaaaaaaaaattttttttttaaaaaagngggggggggnaaaaaaanggggtttttttttttttaaatttttggggggggggaaaaaaaatttttnnnnancctttnaaaaaaaaaaangaaaaaaantgggggcccgggggggggggnnccttttccccctttttgggggaaaaaatttttcctttncnaaaaaattaaaanngggggnaaaaaaaaaagggggggggggggggggcnnccccccnnngggggccccnaaaaaaaaangggggntttttgggtttttttttntttgggggnttttcccccccgnccccccntttttcncntttnnnaaaaaaaacaantttttggggggggggggggggnccccccccccttttttaaaaaaaaaanccccccctttcccnnnaannaannnntttttttgggggntttttttttttttttnncccccggggggtttttnnnncccnccnttttnggggggtttttttttttttttnggggggggggggggnttttccccccnncccaaaaaaaaaaaanncccngggggttccctcttttttggggggnnttgggggggnnnaanttttnnnnaaaaaaaattttttttttttttttcccccccccngggggggntccccccccnntttaaaaaaaaaattttttttttcccccnncccccnnaaaaaaannntttggnnanaaaaa

SEQ ID NO: 60408 - DNA, 1949 bp, Oryza sativa
  Clone ID: PAT_MRT4530_61939C.1
atggagggggcaaggccgtgggggctgcgccgtcttgggtggaggagagccctgccccgggcccccggctccggcttccgctcccattcccgccggcatcggcggtgcagcaggcgcctctctggatccagccggcagacccctagcgccgcctccgtctgggccctccgttgctccccctctcccagatccgcccgcctccgccgccactcgcgccgaatatccggcttctcaatccgcggaaactactccctgttgttcgtcgacctcttcgtcgccggagacatctagtttccctatacggctataccatgtcgatgcctggtgatgcccaacctgaaggttctcaccaatccgcttcctccgcaaaacctgccttgtcatcgtgccggaggaataaatctgagaacacgtcatttgtctcagatttgagagatcacatccaggagtttatctatgcttccccgaatgagcacaggacctgttttaccaagactatcaagagaatgtttggcatgtcaaaggtcgttgcagagagatccaccgaagcaaaggaacctggagctgaaagtgttttgccacttcagaccacggtgtcgcggtagactgtgatcagtaatataattttctctgtagaaagtaatctgtcgctgaggatgatcttaggatagagaagtcatagttacacttgataccagtagatcatgtacagtaactggaggatattctgtattaatttgactgctaaaaggcctatatatattgtaagaagagaaactgagaagcagttctttgaattatctacacccaaatgtgctatcacactagaagagacatttcctcttctatggaatcacgctgcacagcataacacttgttttttgctttctaatccaatcaaatcttttggttgcctataaaaacatgtctatcatctacaattgcgtcacaagtatgaccaagactgtacaaagcagcctagctgatccagcaagcaagcgccgcggcgacgagctggacgtgccctgctcggagagcgagctgaggctgaactgtgggttggagccgtacaacgcctgcacgccctcgacgtcgtccacggtgaggcgcaccttcttctcccgcggcttgatgctcgggtacatgacggcgcgcggcgacgccgagtggccgagccccaggacatggccgatctcgtgcgtcgccacggactccaggtcgatggccgacgccgtcgcgtcgacgtcgaagtccaccgcccagtgctccgacgcgtcgaggtggagccgcccgttctttggggagaaggcgtggccgaggatgccgagcggcccgtcgaacggcacgccgtcgccgtggttgccggcgtagaagcccaccttgatgtcggccgcctcgtagtcgtccgtctcgacgaagcccacggggatcgtccgcgcccaccgcgcgaacgcgcgctggaacacggcacgcacggcggccggcggcaggtagccgacggtggccgtcggcgagacggcgtaggacagcacgatcggcgggtccgaccgcgtccatcgcggctcgcccttgaagaacgtgaaccggctgaccacgccgccctgcgcccccggcgagagcgcgacggacacggggcgctccacatcgtcatccccgacgccgcagcgcggcgacatgatctgatcgagcgtggcgttgtcgagccggccggtgaccggcaggctgaacctcgtctggtacctcctcacggcgacctcgaggtgctcgtcgaaggcgtccgtcgtgtcacgccccggcttcgccatgtacccgaacctcgccaggtaccgcttcagctccgcgagccccgtgacatggctccctcgccccgcgtcgagcagctgcttgaacgagtgccacgccacgccgccgtgcccgtgcaccacggggagcccgagcaccaccaccat

SEQ ID NO: 60409 - DNA, 444 bp, Oryza sativa
  Clone ID: PAT_MRT4530_6193C.1
aaagacatgggtgtttttttttttttttaatttgttttttcttttttttttttttttgtttttttaattttttttttttttttgttttgttgtttttttttttttttcttttttgtggagtgagtaattttattcgttttttttgttttgtgttatatgaaagtcagttcgaaaagaagatagttttttttaccagcctcttggaaattaaacaacgcgtgtttgccgtcaaatttttgggcgtccttgagatcaaccgatggctgcattgaatatgtatgctgtttagctcttgtagccggtggtgaccgtcttgctgtatttgttgcggatgaggttgatgttgatggggaggttgaggttgatatctttgttggggggggtgttggtcttggtaatttcccccgcctctttttggtgacaagtttttttttatgggggctc

SEQ ID NO: 60410 - DNA, 5103 bp, Oryza sativa
  Clone ID: PAT_MRT4530_61940C.1
atggcctccgacgccgacgccgacgagctccgcctcgtcctctacctccccatggacatggccaaaggccacggcgcgcgccgccccgcccacctcctccccccgctcgccggcgccccgcccccgcctccccccttccgcccgcctcctctctgcgccgccgcctccaacgccgaggcccgcgtctccttccgcggatggctcggcggcccccgccactgggacctctgggtcgccaagctccgccccctccacgaccgcctctggcgccacctcgggatcctcgacgccatcgtcgcctccacctacaggttcaagcgggacgccgcactcgtcctccacctcgcctccttctggtcgccggcgaccagctccttcgccttcccgtggggcgaggccaccgtctcgctcctcgacgtcgccctcctcggcggcctccccgcgaacggcggcccggtcctggcgccgctgccgagccactggcgcgccgacgaggccgcgctcaacgccgtccgcctcggcttcaaccgcagcgcctgcaagaaggcgcaccactccgcctggatcagccacttcctcaccggcccggccgccgaccccgtcgtcgagcacgccgccttcctctcgctctggctcacgcgcttcgtcctcccggggcacccggagtccaccatgcgccagtcgctcttcccgctcgccgtccgcatggcgcgcggcgaccgcgtcgcgctcgcgcccgccgtgctcgcctccatttaccgggacctgcgcgagctgaaggccttcctgtcatcctccagcgccgccgccaccggcgaattgctctcgccattgtcagtctacgcgccattctaccttctccagctctgggcgtgggagcgattcccggcgatcaggcccgcaaaggcgaaccccatcaaggccggcgagcctagggccgctcgctggaatgatgtcagcaataagatcgacccggcggtgctccgcaaggcgctcaactccgggagcagctttgtgtggcagccgtatacaatctctgtgcagccgtgcggctgggttcgtggctgccatgtctccgggaacgacgagctcacatcgctcgcgcattgcttgcgtgcttgcgagcttgtggggatggattgcattgagcagtatctcccgcaccgtgtcgcgatgcagtttggactggatcaagatgtgcccggggatgttcaacgagccaacgacgattgcagggttgcgtgggagacctaccatttggaggggaagaatgtagctttcttcatcccccagtccgagccaggggtcactgcgcgatatgcagagtggtggaggcagcccttgccacattctcatcttgatgttggtgcagcgagcacagtggtagaatcgaaggtttccaagcgtaaggtgaagaagacactagtagccattgaggccgaggaggagaaggagcggaagctgaagaaggctcgagtcttacctagtaacaatgataaaaagcgcaagctgcaagagttgtatgatgcgaagctgtcagattgccttgcagctgcaagggatgagggtgctggcagctgcgatagggggtccttgccattatctgacatggaatcagaaaaggccttgttgtctcatgttgaaactatcaatgatgatattgtgctacttgtgcccaggaagcagacagcagctcctgatgtaaatttgatcaaggataacatgaatctggctacaggagatagagggagcctcgaagccacaccaccagttggaatggaggagaaggatgagatgccgaaagcccagcagacatgtaatgtagagcatccaacgcaccaaccatattgtcaggagacaaaagcagccccatcaacagaaatcactaagggtgaatcaagtggcattgttttggcaaatgttaatgaactggatagggggagaacacccgatgtccctaattggcatgaagaggctgtaccttcagaggctatggagaaagaagaatccagatatcatttgagtgatgttgtttgtaatgatgaaagcattaaggaagttgtaacagttgataaacctctagatgtctccagtgaacctgaaggaggtgctaccgcaatgccggaggagaaaatgcttaatgtctctgtagacatgtctcttgatgccacagataggccagaagaaggtaccaccattatgctggagttggagaacgaagccaacctttcagttgatgaatcatgtcgtgtgtcaaacagtcctgaagaagtttctgcaacggttggaggagataaagaagaaaaggttgccattgatgaagcggatgaaggaaatggaacttcagaagatgtaggaacagctgcattgggatcaatctgttctattgaagttgcgcctgggagcaaacaggaagttgatacaggtgttattaatatttctcatgatgcagtgactttacctgatgaggtgcttccagttcagcagccaaatgatggagaaaccactcgtcgtgattttgtcactgaggaacagaggaaggcctgttgcatcgaagagattggaggagaaaacagccagatggttgagaaagctagcaagcagaagccccacgaagctcaccaggttaacatggtagaatgtggagaagatattaatcccatgaaaaatgacaatgaggatgagcatgataaaattcctcaaccactggagaatgccatctcggacagcaatatgactagtgtattttcaggtgttcctgaagcagagaatgcagatacggataaaggtctgttcctagcaaagaaagactctgaagacatgcccaaggaagttgtaggagcagagggctcacagcaggatcaatttactacttcaacacatgaagttgtagatgagcacaacgaagttgctgaagtagagccagtcttggcagaaccaaatatgcatggccagtgtgatggtgagaagcccgatgaaggcaaggttttaagggagaaagacactgaggagaatgccaagaatgctcttggagtagaacagatagaaagacaagacaaggcactgacagagagctgcatacatgaagtggagcaggtggatggacaaagcgagagactcacaaggacaggtgttgaggaaaagcatgcagaaatcactcaagaacaagaaaatgaatttgataacggtgtgatggaaacttcaaaggtttcagtcaatggtgcgatgccttatagtacagctagtatacaatcagaaggagagcagaaggaagcttctgataaagatatggcggagaagcaaagcaatcaggatattgagtccattgatgagagggattcattgtctgatgcagctgctacggtttttgaaggagcagatgaccacataactttggacacgaatgaggaagcgactaggaaacatacgcatgactgtggaagcatatgtgagaacaaggggacacaaatgtttcaagaaggctgtaagctggacagcggggtgaaatcggatattgatattatggagattgaaactcaagctacagaaggaattcagaaccaagaaactatggagttggacaagcaagaaatggaggaagaacagaatccaggaacaacaattgaaaacaacaaaatgaaaataccggaagaagatgccagtacatttagctgtggtgaaattcaaactgatccacatagcacagatgttaatgaggttgagttcaccacaggaacgcagaacgacgaacatttggacatcaaggaagaactgattatggacagaaggttagattgtgaaattaaatatggaaacgaaagacccttggaagaggccaacacatttggtggttgtgatggtggggtggataacattggtgttgctttggatgttaatgaggaaaattctattaaagaaatgcaaaaccaggaaattcgcagcacagaggaggcaagtgaattccaggctggggagaccaatttgaacaatggagctgaaaatgtggatgagaagaggattttggaagacgcaagtacacttgatattcgtgattcaactaatgcggtagttaatggggctgaatcaacagaaggaactcagatcctgtgtgcttttaacacggagaaggagctagaagttcaggagaagcaggaccagggaacagaaaatgagaacagaaaccaaaatttggtcaacacagattcgtttgaatgtggggtggaacctcatgggaccctgaaaactactcatgagactcttcctacagtgcaagttgttagcacatcaggagatacattttcttcgaagaatgagcagaacgatgtaccctgggaggaccagaacaaatcagatgctgaagtgtctgaatcaaaccaaactgcaccaaaggagtccgaaaggactattccaccagagcatgaagaccgggaagaagagaaagaagaaaatatggagaataagatagaaatatccataggtagagagaatgatgaagtatctgaacaagagacctccacagaggaatgtatcgttgctccttcaggtatggatgaccgggacgagaataacaaaggatgggctgaagaatctgtacaaacctatggtaggtatgcttctgatccagtaaacacatcttggcagcccagcaaatttggcaagccaggtatggaagagtctaggagaacacatagtggcagatccatctatctgagagacatcaaagaatcacagggaaggactcgctctgaaacatcaaacaaattacacataaacagtgcagggtactattctcgacatgccgttcctgaaccagtttcagtcaccagggaaatcaaagtgccgttgtatgacagtacaagggcctctggaagagatcgtggaccagagctagtggtgacaggtccaccagaagagacttctcgatggcgacaagaacaatacgcacttcaaattttagaagacgtgcaaaatgctcgcgttgcagagaaaactaggatggagatggagatcagaatactgaaggcacaggtttctagcatgcagagacaagcgatgaacttggatcgtgttggtgatgtaatttctagagcaaaaagacattga

SEQ ID NO: 60411 - DNA, 279 bp, Oryza sativa
  Clone ID: PAT_MRT4530_61941C.1
atggcgcggacgtgcctgccgtggtgctcgtggcagttggcggcggcgtcagctgacaacagcggcggaggacatggcggcggcgtcgggctggctgcttggtggtggagggcgacggtgcagcggtttgcggaggcggaggctagcgtcggtggcagcggcgactgcggccgtggctgtggaggcggtggcgatgccggcggatgcgggttgctagcgacaacaactggaggcggggaaggagtcgggtgcgagatgaggatggcggtggcgaggtga

SEQ ID NO: 60412 - DNA, 295 bp, Oryza sativa
  Clone ID: PAT_MRT4530_61942C.1
ggcggggaagttttttaaaccttttccagcttttttttaaaacattggttttttacatttccagtggttaaaaaggtgccaaaaaggggttaaattttccaagtttaaaatggtgccttaaaaaaattccacaaaatgaaacttatcctttttcggccacagtgaccgtttttttaagtgcaatgacttcaggaagttttttttttttcaacagtttcaagcttgcaccaccttccgttgaaatgtgggttataaaattttgaacttccacctttttaaaaaggggaacaaaatt

SEQ ID NO: 60413 - DNA, 423 bp, Oryza sativa
  unsure (1)..(423): unsure at all n locations
  Clone ID: PAT_MRT4530_61943C.1
ccgccgccggcatccctgactcaccgacgcggctgcaccaggcgccgccgccgccgcctccgccttgatcgtaaggaagtaagtttggagcaccatggctctgcgatcggcggccggtaggctggcgtcgtncanccgncgncgnctcctctctccgcccaccancatccacacggccttcctggaggcccacgccaccagcttcggatacaagcaagtagctgaagaggacaaaagcaaattggtcggtaacgtcttcagcagcgtcgcctccagttacgatctcatgaacgatcttatgagcgttggactacatatgttgtggaaggacaggctcatctcanagcttattccttttcctgggntgangcctctanatgtggctggtggnacaggggatggtgccttccgggccctcggggg

SEQ ID NO: 60414 - DNA, 1665 bp, Oryza sativa
  Clone ID: PAT_MRT4530_61944C.1
tcacttgagatccccatcttgtcgtcgagtttgaaaatcgttgtagtaacgcatcgatgttagtggcccaatcatgttcaactctctcgacatcggtaattgaggcggtggtggtcttgctagagcggccgtggccgttggcgggcgctggtgcctcctttggacatcacccgcacttgtccttgcacgtcgcagtggcccaatatcatctggcccaataatagcccacacaaccctaggctgcgctagtgtcgtcggtccccatcccattcggccaccgatcccaatctcaatctgacgccgccgccggcatccctgactcaccgacgcggctgcaccaggcgccgccgccgccgcctccgccttgatcgtaaggaagtaagtttggagcaccatggctctgcgatcggcggccggtaggctggcgtcgtccagccgccgccgcctcctctctccgcccaccagcatccacacggccttcctccactcccacgccaccagcttcggtacccttctcctcctaaaccctaccctaccacctaactcttcttcttcttcttgtccaaactccttcctcttggttggttcatcaggatacaagcaagtagctgaagaggacaaaagcaaattggtcggtaacgtcttcagcagcgtcgcctccagttacgatctcatgaacgatcttatgagcgttggactacataggttgtggaaggacaggctcatctcaaagcttaatccttttcctgggatgaagcatctagatgtggctggtggaacaggggatgttgccttccgtgcgctcgagagaatcaatagcgtgagccatagagctatgcagggtactcttactgatattgaagaagaaacacaaatctatgtttgtgacattaatccaaatatgctgaatgttggaaagaaacgtgcttcagaaagaggatacaaagaaggccattgccttagctggatacaaggagatgctgaagctctgagttttgaggatggatctatggatggctatactattgcgtttgggatcagaaatgtgacacacattgaaaaagctctatcagaagcttatagagtcctaaagcgagggggaaggttcctatgcttggaattgagtcatgtggatgttccgctttttaaagagatttatgatgtttattcattttctgtgattccggctgtgggagaactagtggccggtgatcgccagtcataccaatacttggttgagagtatccgccggtttccaaatcaggaaaagtttgctcagatgatccaagaagccggatttgagagggtagaatacgaaaatctggtgggtggtgtggttgccattcactctggactgaaactgtagaacattctgggtttcaagtttgatggatactttactgttactcctacggcaacggcaaggtcttgtgaagcgggcgttaagaatcaggacctaacgaacaaactaactcaatcttgtaccagtagttagcattgcaataaatacatgcagtgtttctgtacatgtttcttgtatttattttttttagatgaaaggcttttgacagcccagctttactgaaaagcataaaatgttgttttgacaaccaaaacaaacaactaaaagggagtcacactagattgacagaaaagttacagcct

SEQ ID NO: 60415 - DNA, 990 bp, Oryza sativa
  Clone ID: PAT_MRT4530_61945C.1
atggaggtgatggtgccagtgatggcgccgagcgcgccgtgcagcccaagaacggcggcggagcaccaccacctgccgagctactgctacttcttctcgagcgcgccgacgagcccgacgagggcgagctactccggcgaggcggcggcggcggcggtgggggtgggtgagggggatggggcgttcgatttcgcgttcgggttcagtggccagctgcgggagtcgacgccgatcctcgcagccgccgacgagctcttcgagggcggcaggatccggccgctgaacacgccgcacccgagcattctgcagctggtggatgatagcgcgtacgcctcgcctcggtcgccggggaggaggcggaggatcgccgccgcggaggcggcggaggtgtcgtcgtcgtcgtcgtcgcagagagggaggtcgggccgtgctgcgcctgcgtcgtcgtcgtcgagcgcctcgtctcgtagccggcgagccacgcggtctctctcaccgttcaggggaggaggaggcggcggcgccgacgacgagtacccgtcctcgccgccgtcgccgaggacctccatgatgcgcggctgcggcagcggcagccggaagtggaggctcaaggacttgttcctcttccggagcgcgtcggaggggcgcgccaccggtgccggcagcaaggacccgctcctcaagtacaccatgctctcctcctccgcctcgtcggcggccgcggcgctgcaccacaacccgcagaagcttcgcggcggcggcgacggcagcgcgtccatgcgcaagggccgcgggtcgacggcgtcggccagcgacatgccgtacacggtcggccgcgccgccgccgaggacatgcggcggcgcaccacgacgccgctgccgttccaccggaacagcctcttcggctacctccgctccaacccggccatccacagcatcagccgcaagctcagcggctccggctccaatcgcggcaagaccgccgcttga

SEQ ID NO: 60416 - DNA, 1054 bp, Oryza sativa
  Clone ID: PAT_MRT4530_61946C.1
tccgagtgtcttccccttcccagaagaaagaaaatctcccgctccttgcgccgccaacgccaagacgagtggcggctgaacaggggaggggcggcgatctctatctggcgagcagagcaggggagaggatcatgtcgaagaagaggggtctttctttggaggagaagagggagcagatgctacaaatattttatgacagtcaagacttctatctgcttaaagagcttgagaagttgggtcccaaaaagggtgtcatcagtcagtcagtgaaggatgttgtgcaaagcctggtggatgatgatcttgtcttgaaagataaaatagggacttcagtgtacttttggagtcttcccagctgtgctggaaatcagctgaggactacttacagcaaactggaatctgatctttcaagctctaaaaagcgcttcatagagcttgttgagcagagagagaatttgaaaagaggcagagaggactctgatgagagagaagctgctttggaggagctgaaggctgtagagcaacaccacaagaagttaaaggaggaactggctgcttatgctgatagtgatccagcagcactagaggcaatgaatgatgctattgaggttgctcatgcggcagctaacagatggacagacaatatcttcactctgcaacagtggtgttcgaccactttcccacaagcaaaagaacaactcgaacacatgtacagggaggtggggataactgaagatttcgaatatctgcagtaatgcataacatcctggttgccctgttacaaaaccgtatgtaacccaactcagcaaatctagagtagttcacctggaatctgtagaagtttattcatacccatgttagcaatcttacagtaaatgatcccaatatgctccatattttctgctttgtaagtaaggtacctatggaatgctgtcagaaaaacagttctctatgatgacagaacactaacagatgagatatcggatgaatttggtagatgcatgccagatattgataaccccttttaatctggtaaaaaaaaaaaaaaaaaaaa

SEQ ID NO: 60417 - DNA, 360 bp, Oryza sativa
  Clone ID: PAT_MRT4530_61947C.1
atgggctgcgaccctttcagggcaagaaaggggggcccagagtggggtggccggaagggccctgtgccgccccctgccgtgggggctcctcccgcccccggtgcccccccctcggccgcgcccccccctcgcggtctttccccctccgggagtggcgccggccacctccctgggttctctcctgccgcccgctgtcttggccccggacgccgccctccgccggggtccccgcctcgggcggtgcctctggccctcctcccgcggcccggccggtccgggcccgtccggttccccccggccgaccgctcgcgccctcctcccgccccccgccggtcccgtgccatatgctcgcgggagctg

SEQ ID NO: 60418 - DNA, 708 bp, Oryza sativa
  Clone ID: PAT_MRT4530_61948C.1
atgtcgaagaagaggggtctttctttggaggagaagagggagcagatgctacaaatattttatgacagtcaagacttctatctgcttaaagagcttgagaagttgggtcccaaaaagggtgtcatcagtcagtcagtgaaggatgttgtgcaaagcctggtggatgatgatcttgtcttgaaagataaaatagggacttcagtgtacttttggagtcttcccagctgtgctggaaatcagctgaggactacttacagcaaactggaatctgatctttcaagctctaaaaagcgcttcatagagcttgttgagcagagagagaatttgaaaagaggcagagaggactctgatgagagagaagctgctttggaggagctgaaggctgtagagcaacaccacaagaagttaaaggtatctacaactcaattgtttcgcattgtttttcaggaggaactggctgcttatgctgatagtgatccagcagcactagaggcaatgaatgatgctattgaggttgctcatgcggcagctaacagatggacagcttgtttatcatcagaacaggctaacggaattctgaatgtaactacagacaatatcttcactctgcaacagtggtgttcgaccactttcccacaagcaaaagaacaactcgaacacatgtacagggaggtggggataactgaagatttcgaatatctgcagtaa

SEQ ID NO: 60419 - DNA, 558 bp, Oryza sativa
  Clone ID: PAT_MRT4530_61949C.1
atggccacgctggtatgccttgcatgctctcacggttacgtgccgagattctcttctgccacgttgcaaaaagagacgcgacctgtcttccctcttcagagttcagtccccaacattttttatgggacagataccagcaggcagcagttgcagttcctcaccaaaacgccatccccatcctccctgccatcctccctgccgggtttgttgggcaaatctcctgtcaggcctgcactttgcaacgatgctcttctctccaggttcctctcaacggggaaagatgagaacacagtgaccgaaatcggagagaaggcaagatcaacagcggaacaattcctcaaggtggccaaggagaagactgacgaggtaagcgagaaaacaaaggaaacgatgcacgaaacaaaggaagcagtggtcggggagtcagatgacgagaaggagaagttcaagcagagggttgaggaggggagtttgcaagaatttaactggccatctagtaaccaaaagggtataggcaaaaagagaaaaggatcggatggggatgacctatggctgtga

SEQ ID NO: 60420 - DNA, 1932 bp, Oryza sativa
  Clone ID: PAT_MRT4530_6194C.1
atgaggcttcccggtggtccaactggcaatataccggcggtcagaccggcggcaagcggcggtcagaccggcggcatactggcggtccgaccggcggcgacgacaggcgcggcaggcgacatcggcggtcagactggcagatcaatgtcggacagccatgccgaccaccttcacgcccaattcccccgcctcctcgtgttccatacaccaccgcgcctccccgtcgagggcgcgccgtcgtccgtgccgcccgcgtacgtgccgccgccgccgccgccgccgaccaagatgttcccggaggcgggcgacgcggcggcggccaaggctgcggcgaggaggtgtggcaagaagaaggatgggctgaacttcttccagcgcgcggcggcggtggcgctcgacgcgttcgaggaagggttcatcacgaatgtgctggagaggccgcacgcgctgccgcggacggccgacccggcggtgcagatcgccgggaacttcgcgccggtgggggagcagccgccggtgcggtcgctcccggtgtccggccgcatcccgcccttcatcaatggcgtctacgcccgcaacggcgccaacccgcacttcgagcccaccgcgggccaccacctgttcgacggcgacggcatggtccacgccgtccgcatccgcaacggcgccgccgagtcctacgcctgccgcttcaccgagactgcgcgcctcggccaggagcgcgccctcggccgcgccgtcttccccaaggccatcggcgagctccatggccactccggcatcgcccgcctcgccctcttctacgcgcgggggctctgcggcctcgtcgacccgtcgcacggcaccggcgtcgccaacgccggcctcgtctacttcaacggccgcctcctcgccatgtccgaggacgacctcccgtaccaggtccgcgtcaccgccgacggcgacctcgagacggtggggcgctacgacttcgacggccagctcggctgcgccatgatcgcccaccccaagctcgacccggtctccggcgagctcttcgccctcagctacgacgtgatcaagaagccatacctgaaatacttctacttcgacgccgatggcaccaagtcacccgacgtcgagatcgagcttgagcagccgacgatgatccacgacttcgccatcaccgagaacttcgtggtggtacccgaccaccaggtggtgttcaagctcggcgagatgttccgcggcggctcgccggtggtgctcgacagggagaagacgtcgcggttcggcgtgctccccaagcacgcgacgagctcgttggagatggtgtgggtcgacgtccccgactgcttctgcttccacctgtggaatgcgtgggaggaggccgagtccggcgaggtggtggtggtgggatcctgcatgacgcccgccgactccatcttcaacgagtcggacgaacacctcgagagcgtgctcaccgagatccgcctcaacacgcgcaccggcgagtccacccgccgcgccgtgctgccgccggcggcgcaggtgaacctcgaggtcggcatggtgaaccgcgccatgctcggccggaagacgaggtacgcctacctcgccgtcgccgagccgtggcccaaggtgtccggcttcgccaaggtggacctcgccaccggcgagctcaccaagttcgagtacggcgagggccggttcggcggcgagccgtgcttcgtgcccatgggcggcgccggcgccgccgcgtccccggcgcgcggcgaggacgacggctacatcctctccttcgtccgcgacgaggccgcgggcacatccgagctcctcgtcgtgaacgccgccgacatgaggctggaggccaccgtccagctgccgtcgcgcgtcccctacggcttccacggcaccttcatcaacgccggcgagctcgccacgcaggcctag

SEQ ID NO: 60421 - DNA, 156 bp, Oryza sativa
  Clone ID: PAT_MRT4530_61950C.1
ctcttcgcacttcaaagttcgtcatttgaatatttgctactaccacacaagatctgcaccgacaggccagctcaaattgggctgggcccccgggttttgcggcgccagctctagagtatccaagcttagccgcggggtgcactgatagctgcttgt

SEQ ID NO: 60422 - DNA, 275 bp, Oryza sativa
  Clone ID: PAT_MRT4530_61951C.1
gtcaggaagcatctatttatatatatgtggtgaataaatgatgaacttcaatgttcttctgaataaaaaaaaaaaaagaaaaaaataaaataacaaggactatcataaagaaaaaaaaagaggcagcgcgtgccacaagcgtgaggcggcgctgtacctccaggacatggcgaaccaaggagcgatcatggcacatgtgtacataatgcgggcaactaataaacacaggcggaggagatgaaatcctgacggtaacacaaatcacttcctataca

SEQ ID NO: 60423 - DNA, 508 bp, Oryza sativa
  unsure (1)..(508): unsure at all n locations
  Clone ID: PAT_MRT4530_61952C.1
ccggccgggaccatcaccatctccacctccctctcctctctcactttcgctcgttctcctctctgtgtcgccgtctatagctgctgtgccgcgccttctagcgccgccgtcgctggcggtgcctcgccagagctccgccggaagtcgccgccgcctccccggtcgccggccgccgagccgagcctcgccgccgcggcacatcgctgcctgggactggggtagagcagcgcgtggaggaggaagaagacctcctcaaccactgccaagccggccccacctccccttcctctctcaagccactggcaagccgggcccgcgcctcctttcctccattggccactgatagagtatgaagatgaagacatngacccgaccgncgaggagtatntncaggagcaagccgagtatgaagacttntagatgtttngtgcctagccccaagcctngcctgtggaataaattagttggctaggttttttggctagtgcgtagntgcttaggtgcttag

SEQ ID NO: 60424 - DNA, 960 bp, Oryza sativa
  Clone ID: PAT_MRT4530_61953C.1
atggtcgctccgacgaccaccaccccgcctcctcctccgccgccgccgtcagagtccacgcctaccagcgacccaaagcccccgcctccgccgccgacgtcttcgaccgcggcaccgaagaagcggaagctggaggaggtggggtttcatcactcaccctactacaacatcagagcagccgtcgccaacctccgcggccgcttcattcaggtctcccccacctcgaaccctaagatatttgttgagtggcatttctctgctctgccatggcagcagcagcagcagcagcacaatcaactgaacaggtcatgttcccgtgttctagcgcaacgtttatgcaaaggcactgatacccaaaagaaagatgccgctcttgagatcctgaaagagataaaagttctcatggaattatccaaggaaatgcgacttgatctcccaactgcagctgggcctgtaaaactgatggatgagcctacatcaagagatgccagaaatatgcctgcagggaaaatcccacccggagagaagaatcaagttcgtccagcagaccaggctgcatcctttatgcatagttctggtgagaaggtaccactcaatcctgtggacattaagcatgatgccaaaccgagtgtaacagattctacaaagaaatcaggacaatgtttgcaaggatcttatattgtcggtggatctcccattggctggaatttccttatgtggcctggaagtagcacaagtaaactgtatgagccaagcgctcttgctatgtttttctgttcagaaatggaaaaatcaagtaatgaagtatctgatttcatattgtcgcttatatttgtcaatcttgctcaaaccctggcagtggacggcgtccgaagtgctcttcagtgtgtgctgctgaaaactccaatgtatggtccttccagacgattatcagttgcaggaaaacagaaatcaccctaa

SEQ ID NO: 60425 - DNA, 195 bp, Oryza sativa
  Clone ID: PAT_MRT4530_61954C.1
atggtaaggaaaggagaggggtacgctaaaacgacgcctccagggaggggaacgacgccaaagggcgtcgccgccgtcagccagccaaacggctcagtgaggcttttgccagcgattccctgtccaaacccacacaaccaatccgcacaagaaggatcatcgccggtcgactacattttccctttagcgatctag

SEQ ID NO: 60426 - DNA, 173 bp, Oryza sativa
  Clone ID: PAT_MRT4530_61955C.1
gaacaaaaagtttaaactgccccccttattaatccattatttttttttaaactttggaacctttatactttaacaatttagtcccacacccccccaacggtggaaattctccccgaacaaattcacattttaggaaaaatcccccatttgaatgccaagttaaaggccacaaa

SEQ ID NO: 60427 - DNA, 1516 bp, Oryza sativa
  Clone ID: PAT_MRT4530_61956C.1
ctactcctctgattcgttgaccgatcctgacgaagacagatcgctctcctccgattcgttgaccgatattgacgaagactgatcgctctcgtctgattcgttgaccgatgctgacgtggacagatcgctctcctctgaatcgttgaccgatgctgacgtaggctgatctctcctgatgatccagtgtggctgccccaacttccgttcgtgcaagcagccgccgccgtcgagctcgccttgcagcaatggcagcagcgtcggcggcatggggttcttgaggtggacctcgccgatcttgtggctgacgacgcggcggtccagctggtctctcgtcgtgctcccgcggatcacgtacacgcggttcctccgcactgtcgccgccgcctcctctccgccgtcggcgtcggggtcggggccgacgacgccgacggtgaagccgtgggccctggtgacgaacgccgcgcggtcgccgatgtccgtcaccggcgcccacgctggcggcggcgacggccgcgcgcccctgtgccgcgcgcggtaggcgtgggtgaagacctcccggatgtcgctgtccgccgcgcggcggcgcaccaggaggagcacgtcgtcggtggacgcgacgaggtaggcgtcgtcgatgtcgtggcggctcggcggcggcgcgatctcggcggtgggggctagcgtctcggcgtcgaacaccgtggtgagcagcgaccgccgctcgagcacgaagaagaagccgccgcggtggttgaccgtcatcggcgagttggtccgcgaccggtgcaccggcttccactcgccgccgccttccccgccgccggcgggcgtcggctccgtctccgagagcgggatgggcaggtcggggagcggcgtgcgctcgccggtgaacgggtcgacgaggtgcgacaagtagcgccagttgagatccgtgacgaacaccttcccgccgtacggcgacgacacgtagcggcggcggcacgccatcggcagccgaacgtcgccgtcgtcgcacatgcgcccctcggcgagggagtaaaccctgtacccatcaagcgacgggagcgccaagcacggcagcctcacctcctcatccttccccctcggctccggcggccgctccatggccagcaccacgcctcgcaaccacgacgacccctcctcctcctccgctttctcctccttctccgcaagcagccgccgaaacgccgcctcgaacaccaccgcctccttctccgccttctcctcatcggcgaacccccgcggccaatacggcgcggcgagcggtggtgacggtctatggcgcgctcgacggtagcggaggaacggcgtgttcaaggcgtcctccgcctcgccgccggcgctggcggccgcgtcgtcgtcctcctcctccggcggcggcgccgccatgccgcagacgaaccggttcagcctgccggagaatctcgacatcatctcggcgaagtacgacgcgctgatcttcaccgagcaacacggatcgctcaacatctactga

SEQ ID NO: 60428 - DNA, 933 bp, Oryza sativa
  Clone ID: PAT_MRT4530_61957C.1
atgaacacttttacacttttcagggatgaggtgcagaaagcttcagagaaggttcatcggcatcacgcgaacgacgacgaggccgggttattcctgtcacttgggcttagcctcggatcgtctcctgatgcgtgccagtgccacgccagcaagaaagacgaagcggacgccggcaacggcggcggcgacgggtacctcgccctcgcgctgcgttgcgcccccgccgccggcgagccaatggtgcatcccaagaggcagagggccaccaccaacagcagcagtagcagcagcatctgcggcgaatacgggggcggcgccgccgccgccgccgtgccggcgggccacgacgacgacgaccggtcttgcatgatcacggctgcgtcgacggcgaatcggcctggccgggtcgtactcagaacacgatgcagcgcacccacggtgaaggacggttgtcaatggcgcaagtacgggcagaagacggcgaagggcaacccgtggccgcggggctactaccggtgcaccggcgcgccggggtgccccgtgaagaagcaggtgcagcgctgcaaccacgacacctccgtcctcgtcaccacctacgatggcgtccacaaccaccccatcacgccctacgccgccgcgctccctccgtcgtcgtcgtcctcctcatcggcggcggtagccatgctcgcctcctcctcgtcgtcttcgacgtggtcggagcttcagcgcgcgatgccggcggcgcagtcgtcatggagccagagaaactaccctattcaggcagatgtcgtggcgaaggcgatctgggaccccaagttccaggcgacggtggcggccgccgtcgcgagctacgtccgtgaccgtgagcagagcgcgcgcgttgccggtgggaagggtgccggagagctcttcaacttggctcctccatgctga

SEQ ID NO: 60429 - DNA, 221 bp, Oryza sativa
  Clone ID: PAT_MRT4530_61958C.1
atgacgcgtattctgacacccactcaaggatatcgctcgaggtggcccatcgcctgactatgcacatagcatatcgggatacaaggagcggaacagccatcttaatgctattaactatcagaaggaagttactgaccgtatacacaatcttttcaacatacattatgaaccattactgttacgagaggcacaccactgaatgggactatgatgacccgaca

SEQ ID NO: 60430 - DNA, 402 bp, Oryza sativa
  Clone ID: PAT_MRT4530_61959C.1
aaaaaaaaaaaaaaaaattttttttttttttttttacccaaaattttaaaatttaaaatttaataattttgggcttttttttaaactcccaacccatttttttttaaaaactatttaaaaaaaccccccaaggggggaaatgttcctggggccccaaaataccctagggtaaaacccatttttaaatggcccttaaaaaccaaaaaaactttaactttaacccaatttcccttaaaagtgaaatcccccaaactcttgaattttaactttttcccttttgccctaaaaaatttaaattccctaaaagaaaaatttttcccccacaacccaaagttttttcaaaggaacccttggttcaccccgaaatttccgacccgttccctgaaggcttccaaattttcc

SEQ ID NO: 60431 - DNA, 255 bp, Oryza sativa
  unsure (1)..(255): unsure at all n locations
  Clone ID: PAT_MRT4530_6195C.1
nacaacgtcgacgacggaattcacgggcgcgacctcacaaaaattgggtgggatttgaaggcggaaaggcgatgcggcgcgcagctcgggctctgtccagactgcaggctgaagtcgatgacgaagtccagtcgccgccggtcgaaccgccttcctgccaccggtcagaccgcagaagcctcgccggtcagaccgcccggatacttgcggtcagaccgccgctatcccaccagtcagaccgcgcacacacgtacg

SEQ ID NO: 60432 - DNA, 1260 bp, Oryza sativa
  Clone ID: PAT_MRT4530_61960C.1
cacgaggctcacttgatcatcatcaccaataattccccatttgcaacacacaccatggatttggagagctgcagctacgtgctgccattgctgacgtgctgcctcttcttgctctactccataacctgctatgccttggcggcggcggccggcggcggcggttcttgcggcggctccgacgatcacgccgctccccggagctacccgctggtcggctgcctgctcgacttctaccgcaaccgccggcggcttctggcgtggtacacgggcctcctcgcggcgtcgccgtcgcagaccatcgtcgtcgaccgcctcggcgcgcgccgcaccgtggtcacggcgaacccggtgaacgtcgagcacgtcctcagggcgaacttcgggaactaccccaaggggaaggcgttcacggacgtgctcggcgatctgctcggcggcggcatcttcaacgccgacggcgagcggtggttcgcgcagcggaagctggtgagccacgagttcagcgcccgcgtgatgagggaggcggtgggcgtcgcgctggagcgggaggcgcgcgcgaggctcctgccggcgctcgacgcggcggcggagggtggcggcggcgtggtcgtcgtcgacgtgcaggagctgctcaggcagttcgcgttcaacgtgatctgcagggtggcgctcggcggcggcggcggcgaggtggcattggcattgccgctgtcgaggctggccgcggcgttcgacgccgccgcggcgatcagcgccaggcgtggcgcggcgccggtggccgccgcgtggaaggtgaagcgcgcgctgggcgtcggctcggagcggcggctcagggaggaggtgaaggtgatacgcgacgcgatcatggagttcgtccgtgacagcagcagccgccggcggcgggagcagctgctggcggcggcgcgcggccgcgacgacctggtgtcgcggatggccgcggcggggtaccccgacgaggcgatctgcgacatggtggtgagcttcatcatggccggccgcgacacgacgtcgtcggcgctgacgtggttcttctggctcatgacgcgccaccgcgacgtggagcgggaggtcctggacgaggtcgacgcgtgcatgggcgacggcggcgatggcggtggcctcgccggcgtggacctcgagggctcgcgcagggcgcgggtgctccacgccgcgctctgcgagacgatgcggctgtacccgccggtggcgtgggactcgaagcacgcggcggaggacgac

SEQ ID NO: 60433 - DNA, 695 bp, Oryza sativa
  Clone ID: PAT_MRT4530_61961C.1
acagaaccgctttgacctctgcggtcctttgcggccttgccgccgccgcccctgcacctcaaggcactccatctgcctacgacgctgcctccttcgcggccgacaaccaggctggcaccgctcctggtggctaccccaatgctgatgccacttgggttcccgagacacccgcggccatcactcctctcgcctcagagtttgacaacgcatctgatgtgtctgctaccttcaccactccggtgaccactggcactgctgctgccggtcctcagcgtagctccattgtcactggcgccaccacccacggcccatacgatggcgaggctccaacaaccactggcgctgttcacgcttcagtagtggactcgaccattccaatgctgcctcctaaccccactgccacctactacaacaaggatggccagctcacagagcctgagcccatcgactacaccccggctggcggtctcggcaccaacggtaccgagcctcgctacatggttgaaagtgacttcgactatgagtccatcactcttggtctttaccaggagtggatcgagcttgacttgttcaacaatggccttgccatcttctctgaggaggacttccttgctgctggtctcactgctgcggaccgctctttgatccaattcatggctcagcaggagcaaagtcacgccacccttctgtccaac

SEQ ID NO: 60434 - DNA, 324 bp, Oryza sativa
  Clone ID: PAT_MRT4530_61962C.1
gcacgagggtcgactcgaacgagcgccggatcagcccgccgcgtccctagctccggcggcgccgccgcactgtggattggtttcacctccattccctaatccctttgcttatctgatccctctctctttctctcttgcgcagccatggcggaggcggattccagggatgggcgcagggggtggatcccggcgccggcggagaggctcaccgacgacctcctcgtagagatcctctcgcgcgtgccctacaagtcgctctgccgatccaagtgcgtctccacgcggtggcgccgcgtcatctcccagcccgaccaacggcgccga

SEQ ID NO: 60435 - DNA, 481 bp, Oryza sativa
  Clone ID: PAT_MRT4530_61963C.1
cccacgccgtccgtttttcttgttcttcgaccccttccatcttacagtcgatctgtccctctctctgttccttacgcggcacaacacaccgacgaccatggacagctgttataacaacaacaacaactcgaggtagcgcgatgccaatgatgaggccgaccaggacaataggttgaggccggaggaccttctcgacatgctggttgatgacaccgatgccggctgcggcgttaatgatcagacgacccttaggcgaagcccaccctgtgagattggagatggggatgtcgccggagacgttgcccccacgacgcatcccgagctcgatttccttctcgaggcctccgactacgagctcggcctgccgtccgacagcgcatcctcgtaggatgatgatgccggagctgtcgagcccgaagacgccatcgctttcgttgtacattatctgagggttggaggaccaaatgggcggatgcggcta

SEQ ID NO: 60436 - DNA, 837 bp, Oryza sativa
  Clone ID: PAT_MRT4530_61964C.1
atggggcaagggaagatcgagatgaagaggatcgaggacgcgacgaggcggcaggtgacgttcagcaagcgcagggctgggtttctcaagaaggcgaacgagctcgccgtgctgtgcgatgcgcaggtcggcgtcgtcgtcttctccgacaagggcaagctcttcgacttctgcagcccgccggtcatcttgatggagctgtttcaccgttatgagatcaccaccagaaacactcggcttcaggagacaaaccgtgatgatgagcaaatggtcatggagatcacaaggctaaggaatgagatcgaccagctcgaagccagtttaaggaggcaaactggagaagacctgtcatctgtgtccacagtggatgagctcagccagctgcagctgcagcttgaatcatctctcagcaaagttcatgcgaggaaggatgagctcatgagccagcagctggaggatatgcgtcgcatggtacactactcccttattgtagtcgcagttgtggtttttgctgatgagtgctgcagaccgtgcatgagcagaacaatttcttgtgccgcatggggtgagctgcagctatggagttccttgccggtgggggagcagcagatgagtgagaactggcacagcgagaactggcagagccctggttccggggaggcgtcggcaatggaggcgctgacgatgctgccgccggcggcggcggcgacgacggcggcggaggcgttcaattgcttcttcccggaggaggagaagggggtggcggcgtcgagcacgttgctgcagctgtggccgcagccgcacgacggcgaccagcctgacctgcggctctggtag

SEQ ID NO: 60437 - DNA, 2043 bp, Oryza sativa
  Clone ID: PAT_MRT4530_61965C.1
atggaggcgattcaaaaacataatgttgcaatccagacttcggtgggatcaatagaagaaatcaagcccatggttgctgagttggtgggatggaagccaacggtggagaagacggtggcagagttacgcgacgagatgggagaactgcgctcacaagtccagcagctcgcgaagaaccccatgctgttggtcaagccggcggatctacctcctctgcttccgactccgcaaggtcccaagttgaaggaggcgaaggaggaggagcgcactcctgcgtcttctacaggtgatgggatccgcaagccatttggtaaccacgagacaactttgaaccgggggaaggctgcatggggggaatccccttctctgtctctcccggacaagggtgcattcaatgcttctccccattctaattctgtttttgattcgggagggagttcgcggggatttggtgtgtttggtcatggctatgcgtcgcatgtggattgccctggttttgaaggggagagtccgaaggcttggaaactgaagtgtgagacgtattttgggttgtctgatgaacctgtgtctgatgaacctgctgctgaatctttgcaaactgaacctgaagaaattggtgagcaggagggtgctctgttgactatttctcgtgaagctgttctgggcacagagtcacccaagtcagtacggttgcagagtttgattcagcaccatgaagtactcatgcttgttgactcgagtagcacacacaactttatcagtgttcaattggctgatcggttagctggttgtcgtcgttctgttaagccactgacggaatttgcatctgtgtttgatgagccgaccggattgcctccttctcgagtgtttgatcatagtatccctttgttgtcaggagctcagctagtgaatcttcgtccttatcgctataatccggcacagaaggatgagattgagcgccaagtggttgacatgctttgccaaggggtgttagtcttcatcgacgacattttggtgtatagtcgcaacttggaggaccatgtgaaactgcttcgggctgttctggaaatgttgacaaagcaccagctaaaggagaatcatcctcttgccttccttagtaagtccttgggaccacgaaatcgtaggttgtcgacatatgagaaggagtgcttggctattcttcttgcggttgatcattggcgctcttaccttcaaggttctgagttcattatttgcacagaccagcggagtttgattcatttgggtgtccaaaaactcactacaccttggcaacagaaggcacttactaaacttatgggttcgcgttatcgtttggtttataagaaggggactaataatcgtgcaaccgatgctctctcccggcgcgctgctgacaattctgcagagttgtgttcagtctctgtttgtgttccgatgtggcttgaggaagtacaagctggttatgcttctgatgcccatgcctctcatcttattactcagctcacattgaaaaaggatgtagtacctcatttttcctttgatgctggtattttgcgctataaagggcgagtgtggattggcaataactttgccctacagtctcgtattcttcagtccttacatgctagtgcccctggtggtcactcaggagttcaagtgacttactctcgcatcaaaaatctttttgcttggactggtttgcggcgtattgtcaaagagtttgttgatgagtgtgctgtttgtaagcaggccaaggctgaatgggtacgttatcctgggttgcttcaaccgttgcctgtgccagagcatgcttggcaaatggtctctctcgacttcattgaaggattgccgcactcgtcgggatttgattgcattatggtagtggtggacaagttttcaaaatatgcccattttgtggctttggctcatcccttctcggcgtttgatgtggctcaagcttatctcaccaatatctataagctccatggctttcctcaatcactgatttctgatcgtgatcgcatctttacaagcacactctag

SEQ ID NO: 60438 - DNA, 243 bp, Oryza sativa
  Clone ID: PAT_MRT4530_61966C.1
ggccacgaggacgaagtgtgaaattttactcccgccaagctaatggaaattttccacccgggccgacgggaaatttgtttgccgggaagaggaaccagaagggaatgagttcttcctgttgcggaatcgattctaatattctgacgcatatacatggcccaagaagaagccgtaggagccaccatgtccagggctgggcgaagcacctgggctgggcagtacgccttaatgtttagaaattct

SEQ ID NO: 60439 - DNA, 540 bp, Oryza sativa
  Clone ID: PAT_MRT4530_61967C.1
tcgtcgaagcggagggtgccatcgcagcagccatggccgactagcggctcacggtcactgcggcctcggcaacgtccggcgatcgtcgtcgatccttaccttactccctcacgccccctagctgtctcctcgagaagaatcttgcttaagttgatttacctccgggtgtttacggtctttcaaattgctaagcataatcttgaactttccaagaaaaaaaaaacaggcctgcattaactagtgccagggcagcaataatggatttgtgcgacgacactcatttcccatgggaggggtcccatactattgttggcagcaagcggaaagctaaggatttaatggcaaaaatctgaacttgtttaatggaacttataagatggtggaaaccacagttgatgttatgataagaaaaggaacaaacatgagactcgaaagctacgagtttttgagtgatttcagcatgcaacgctgtggactcctgactcacagagtccgaacaagggagttcatcgcaccaagtgatggcattactgctggttg

SEQ ID NO: 60440 - DNA, 876 bp, Oryza sativa
  unsure (1)..(876): unsure at all n locations
  Clone ID: PAT_MRT4530_61968C.1
acaggaggcggcgttcccgcgcccctatggtcgccggcgacggccataggcacggtggagcggcggccaagagaggggaatggaagggggaaaagaggcggcggtccacggctcaccccgggtcgacggcaacggcaaaggaggcggccggagtggagggagacggtggcgcggctcgggtggacgggaacggcggcgttccggcggtcggcgaggtcggcgagatggtggacggggtcggcggcggtgcggcaaagccggaggagacgacgccgaggcgggagatggtcctggcgagtggagagggccggctggaggtcgacggcgacggcggagagagaggatgacggcgcgagctcgattccggcggggagaaagggcggcgagtggcggaaacgggcgagggaggtgcggagagggtttaaatagggttgcgagtgagagggggcggccggcggggaaggaaaccggcgcgcgggatccggccgccattaatggcgctggcgagattaggggaggggtttccatccgaattagagagagagcgaggggaaaatggagggaaagggagaggggatcacggggaatatttcctcccacttaattgcacacgggaacgatcgggggcggtgggattcgcagcggtgncggtgctaggcgcgggcggggcggcaggagcggcgggaggaaggggatgacgggtgggccccacccatcagcgagggtggctggcgggcccgcccgtcagcggcgcgtgcgcggggagaggccgagtgggccgcggggagaggagagagagggggagggagatgggccgaattcggcccagagagagggaaggaggtttttagggtttttctttttataaaacttttt

SEQ ID NO: 60441 - DNA, 1932 bp, Oryza sativa
  Clone ID: PAT_MRT4530_61969C.1
atggaacattttttgttttttggtatctctggtcgtgctattgggctgaaaagtcaagatggccagcaaaagaaaagaacagtcgtccaggccccatgggctatatatattgggccgaaatggaaaggaggagtgaatttggaggttcttgacatttcgagtattgttgagggagagttctatgttaagtttcatgtctggaacaagtcagatggcttccaatggattcttgtggcagtctatgcggctgctcaagaggaattcaaggaagcttttcttgttgggttggtgaatgcttgtagcaagatgtcattacctattcttattggaagggattttaatataataagaaaacctaatgagaagaacaatgataggtataatgacaagtggcccttcttgtttaatgctgtcatagataacttaaacttgagagaaattgaactttctgggcataagttcacttgggcaaatgggttaccagtaccgacttacgagaagttggatagaattttgatgagcaagaattgggaacagaaatatcctttggttacagcaagagctctgaacagagaattgtctgaccatacaccgttattactagattcgggtactaaggcccaaaataagcaacctctattcaagttcgagcttggatggatgctaagagacggtttttatgatctagtagcggaagtttggaaaaaagaagatagagggttgactagtattgtgaggtggcaaaacaaaatccgtagggtacgtcagtttttgagaggttgggcaaaaaatgagagtggcaagtataaaaaagaaaaagctaggctgttagaaagggtggaggaacttgataagaaagcagaagtgcaggtgctctcaagtcaggagttagacattaagaattatgtgaaaaataggctggcaaccttgctaagagaagaggaaatcaagtggtatcaaagagcaaaaactaaacggatcgtggaaggagatagaaatacaaagtactaccacatgattgctaatggaaagcatagaaaaacaaaaattttccaattggaacaagaagaaggaataattaagggtgatgagcagttaaaacagtatatcgctaattattataggaagctctttggaccatctgaggaaaataatttctccctcacgcgaatgattcaacagtatagaccaatttgcttactaaatgtaagttttaaagtctttacaaaggtcatggccaacagagtagctctagtagctcaaaaggtcgtgaggccttcgcaatctgcgtttctaccagggaggaacattatggaaggaatagtaatcttgcatgaaacgctacatgaaatgcataggaaaaggatgagtggggccgtgctaaaactggatttcgaaaaggcatacgacaaagtagattggaagtttttgcaacaagctttaagaatgaaaggttttgcgcctcaatggtgtagctggattgatttgattgtgagaggaggaagtgtagcagttaagagatcaaatgaacaaggaaacttccatggagtaattccacatctaattgataatgggctctcaattttgcaatacgctgatgacacaatccttttcatggaacataatctagaagaagccaaaaacctgaaattagtgctaagtgccttcgaaaggttgtcaggtttgaagattaattttcataaaaggctcatggtgtctaagaacgcctttgtgtcatgtggatctttaaaggttcataatgggacccaagtgacattttgggaggatcgttggtgtggaaacaattccttggcaaatgattctcctaggttgtataacctggtgagaaataaaaatgcttctgtggcaacagtcctggggaaaataccacttaatgtatcttttagaagggctatttgggggataacttaa

SEQ ID NO: 60442 - DNA, 443 bp, Oryza sativa
  Clone ID: PAT_MRT4530_6196C.1
gtttcttttgttgtttttttgtttttttttttttttttttttttttggttttaatgttaccttttttttttttgacaaagggggccctatggcccacgcatggaaatgcccagtgctagagaagaccctcctttccgaaaccgatagcgagagggaagcaccaaaaaccaaacaaaaagaaaaaaaagatccctgtcaagggctgtacacaggttcaccaaacccaaagggcctaaaaggcgggcccctgaaattccacccccccttgggcgcttcgaaggggaagaacttagccccctggtcctaaacttttttaaccagaaattccttggacttgcccacccttgaaccttttgggaactggtcccccgtttttttgtccatgcccctgaaattggaaagggcccccacgggaatttttttaaacccctcaccaacggggg

SEQ ID NO: 60443 - DNA, 652 bp, Oryza sativa
  Clone ID: PAT_MRT4530_61970C.1
cccaccggcccccggcgctctcactcgaagcagcgcaacgaaggcgacgagctcacttggttgcagttgcagtagtagctcttgctgtgcagtgcagtgcagtgagcgtttgaggagaggtagcagtagtagctgtagttcagcttgtggcagctcccatggccagctacgcggcgcagctcaaggacatgttcttcggcctcgtcgagcgcgtcaccggctacggacgcggcgaggacaaggacgtcgctgcaggtgtagatgagcccagcaagttggcatctgaagaggttgcagtaagcagcgaagaggttgtgattgtacagcgcaatgagatcagatcaagaggcgtagatccctccgtgtcaggcgggaaacagccagggatcaatgcggccggtatctagaggggatgatttgatgaactgaacaactgtgtccccttgagttctcaagtactactagtagtttatatgattgtgagcgtgctgtgttactactattgtttgcttgtgtatctcaacctcactgagttcctctctgttccagtgtgtttctctgatgtacttgtcatcatgcatggttcatgattaccagtagtaatttgatgaacctcttcttcatgctaaaaaaaaaaaaaaaaaaaaaaaaa

SEQ ID NO: 60444 - DNA, 273 bp, Oryza sativa
  Clone ID: PAT_MRT4530_61971C.1
tttgttttttggcacaacctggcccatggcaaggatcagagggcacattcaacacccgaattggtaactaaatagttacaagctactcattcaagaataactaaaaatagttacaatttaatggagttttcatcggcgagcccgggaggctgcccgggctagctggtgcggtggctccgcccttgcttttaattaaaggattattgtgtgatgcttgtgctttcgtctagtaagcttgtctgttggtctcatattatcccattattacattat

SEQ ID NO: 60445 - DNA, 123 bp, Oryza sativa
  Clone ID: PAT_MRT4530_61972C.1
atggcgagggggcagcgtgcagtgcaagctgttgcgggagaaggagatgcagaggcgcagagcactgcaacagcgtgcgtcactcactacgtcaccgatgcaatatgtgatgggccgtgctaa

SEQ ID NO: 60446 - DNA, 384 bp, Oryza sativa
  Clone ID: PAT_MRT4530_61973C.1
atggcggtgacacgggtggcggtccgcggtggaccgagtccacggaccgggcaagggacggcgcaccacgtggcgctgacgtggcgccgacgcggcggccacgcggcagccacgtgggcggccgaacggacggccccggatggtagatcggacggtgggtgcggctcgcggccggcgcgcgcgggcacggctcaagccggcccggcggccatggcgcgcggtggcgtggcacgcgtgcagcggcgacgcgaggcggcaaccggcggcgactggccggcggcggagggcgacggcgtcacggcgcgcgggcagctagcggcgcgggatagagagagaggaatgggaggagggacctcaccgacaacgaccgacgacgtcgagtga

SEQ ID NO: 60447 - DNA, 1581 bp, Oryza sativa
  Clone ID: PAT_MRT4530_61974C.1
atggagcaagtcgcgtactggttcatctgcgcatgcgccttcttggctctcgtgctcctcgtcaggctgggcgccgcgcgccgcgacgtcgtgcgcctcccgccgggcccgtggcggctgccggtcgtcggcaacctccaccagctgatgctccggggaccgctcgtccaccgcaccatggcggacctagcgcgcggcctcgacgacgcgccgctcatgcgcctccagctcggcggcgtccccgtcgtcgtcgcgtcgtccgcggacgccgcgcgcgaggtgacgcgcacgcacgacctcgacttcgcgtcgcggccgtggccgcccaccgtgcgccggctgcgcccccaccgcgagggcgtggtgttcgccccctacggcgccatgtggcggcagctccgcaaggtgtgcgtcgtggagatgctcagcgcgcggcgcgtgcggtcgttccgccgcgtgcgcgaggaggaggccgcccgcctcgtcgcgtccatcgcctcgtcgtcgtcctcctcgccgaccggccacgacggcggcgccgcccccgccgtgaacgtcagcgcgccgatcgccgcggccgtggcggacgcgacgatgcgcgccgtgatcggggacaggttcgagaggcgggaggagttcctggagtcgatcacggaggcggtgaggagcttcacggggttcagcctggacgacctgttcccgtcgtcgaggctcgccgccgccgtcggcggcatgacgcgccgcgcggaggccagcatccggaagggccaccagctaatggacagcgccttccgacagcaccagcagctgagggacgccatggctgcgcagccgcatcttgatgattgcgccatggaggaggacctgttggacacgctcctcaggatccagaaggaagacaacctcgacgtgcctctcaccaccggcaacatcaaagccgttctcctggacatctttggtgcggggagtgacacatcttcacacatggtccagtgggtcttgtcagagctaatgaggaacccagaagcgatgcacaaagcacaaatcgagcttcggagtacccttcaagggaagcagatggtaagtgaagacgacttggcaagcctgacgtacctaaagcttgtcatcaaggagaccctgaggcttcatcccgtggtgccattgcttctcccgagggagtgtcgtcaaacatgcaaggtcatggggtacgatgtgcctcaaggcaccaccgtgttcgttaacgtatgggcgattaacagagaccctacgcactgggatgagcctgaggtgttcaagccggaacggtttcacagtggaaagatcgactttaaaggtgcaaatttcgagtatataccgtttggtgcgggtaggaggatttgccctggcatgacattcggacatgctaccgtggagctcatgcttgcaatgcttctgtaccacttcgactgggagctccctaaaggagttgcaccgaacgaactagacatgacagaggagatgggcatcactgtgggtaggaagaatgctctttatctgcatcctatagtccgtgtgcccttggaacaagctactatgtcgtag

SEQ ID NO: 60448 - DNA, 459 bp, Oryza sativa
  Clone ID: PAT_MRT4530_61975C.1
gcttcaacatgtacgagcttcttcttgatccgctcagtcgctctccattgttaatttttctgttgttatgttacttgttaccgccctttgatgcttgatgtgtgaagattgagataaactgtttttaattttagttatgattaaggatggtttgtagagtaggtttagatatgaattagaactgggttgcagagtagtcttagatatgaaattgattctagcaagtgaaaccatcgctcttttattgttggtatgcattgttaatgcgttgtgttgtaagtaagtcggatagcctagataagaaatggaaattagcgtggtgatgatactgctcttgttatcgctcaacagtcaagtgcttttggcatgttttggccccaaaacgaccagtccccgtgaacccctgataatctggacttaaatcagatgtacatgaaaaaaaaaatcacaccataggtc

SEQ ID NO: 60449 - DNA, 1368 bp, Oryza sativa
  Clone ID: PAT_MRT4530_61976C.1
atggagcaagtcgcgtactggttcatctgcgcatgcgccttcttggctctcgtgctcctcgtcaggctgggcgccgcgcgccgcgacgtcgtgcgcctcccgccgggcccgtggcggctgccggtcgtcggcaacctccaccagctgatgctccggggaccgctcgtccaccgcaccatggcggacctagcgcgcggcctcgacgacgcgccgctcatgcgcctccagctcggcggcgtccccgtcgtcgtcgcgtcgtccgcggacgccgcgcgcgaggtgacgcgcacgcacgacctcgacttcgcgtcgcggccgtggccgcccaccgtgcgccggctgcgcccccaccgcgagggcgtggtgttcgccccctacggcgccatgtgggggcagctccgcaaggtgtgcgtcgtggagatgctcagcgcccggcgcgtgcgctcgttccgccgcgtgcgcgaggaggaggccgccaacctcgccgcggccgtcgccgcctcgttgtcgtcgccaccggcccgccgcgacgccgtgaacgtcagcgcgctggtcgccgcggccgtggcggacgcgacgatgcgcgtggtgatcggggacaggttggagaggcgggaggagttcctggagtcgatgacggaggcggtgaggagcttcacggggttcagcctggacgacctgttcccgtcgtcgaggatcgccgccgccgtcggcggcatgacgcgccgcgcggaggcgagcatccggaaggggaacgagctgatcgagagcgccttccggcagcacgagcaggtaagggacgccatggctgcgcagccgcatcgtgatgattgcgccatggaggaggacctgttggacacgctcctcaggatccagaaggaaggtgccctcgacatgcctctcaccatggacaacatcaaagcagttatccaggagactctaaggttgcatcctgtggtaccattgcttcttccaagagagtgtctccatgcgtgcaaggtcatgggctacgacgtgcctaaaggcaccaccgtgtttgtgaacatatgggcaattaacagagaccccaagcattgggatgaccctgaggtgttcaagccagagcggttcgatgatggcaagatcgacttcaaaggtgcaaactttgagtatattccgtttggtgctggtaggaggagttgccccggggtgacattcgggcatgccaccgtggagctcatgcttgctacgctcttataccactttaaatgggagcttcttgaaggagttgcgccgaacgaactagacatgacggaggagataggcatcaacgtgggaagaaagaatccactttggttgtgtcccattgttcgtgtgcccttgcagtga

SEQ ID NO: 60450 - DNA, 324 bp, Oryza sativa
  Clone ID: PAT_MRT4530_61977C.1
atgtgccgcctcaccgtagcggccgcagcggtgttcgccgccgcggtctcggtggcgcacggtgcccgcgtcttggaggagaggatgtggcggccggtgggcgcgcgggtggtatctgcgggcaattggcccaacatcctcgactccctgcctctcggagaacccgacttcgccggcgccggtggccctgtggcctccgcctccgcctccgccggcgccgacggaaagaagggctccggcgcctttggcgttcatggtgagaggttcggggagcgggagctcagtatcaacgtgtacgacaaaatacctctctttggaccgtga

SEQ ID NO: 60451 - DNA, 170 bp, Oryza sativa
  Clone ID: PAT_MRT4530_61978C.1
ttagagatagggaggaaagctgaactgaagcggccggccccgccggggagaagggaagcccgtcgatctaccccaccgtggagagggagcacctcgtctgtgagcagagggggaggatccactcaatctgccctgccacgaaatgatgtgtggacctcgcagccggggat

SEQ ID NO: 60452 - DNA, 291 bp, Oryza sativa
  Clone ID: PAT_MRT4530_61979C.1
aattctgcatctgcattccagtgtcgcgcccgccagcctaccttaacggcacggttagtcgacgcgtttgacaccgacatcgtgccgctcgcgaagtacacactggagttgtgtgtgtctacgccgccgccggtggccgctgcggccatgaaggagtgtgtgcttgatgagtacgccaccaagcacaggatctccatcgataggtttctccagcttaggatatttgtcaagctacttagtgacagcaaatttgatcttaatgcaatatgtcacccaaataatcttccaaag

SEQ ID NO: 60453 - DNA, 507 bp, Oryza sativa
  Clone ID: PAT_MRT4530_6197C.1
atggccggcagcggcagcggcagcagcagcggcgggaggaagatgaagtcccagctgagcttcacggccgggccgccgcacctctcgcacatcgcggaggacggcgccttccccgaccgcgccggcgccgaggcctccgtgccccgcaccttctccgccggcggcagcagcggcggcggcgggttctccatcgtcgggccgtgggaggagtccagggacatcatctccaccctcggcgggtacgagtcccagttcggcggcatggcgagcacgtcggcgctggagatggccggcatggacaggtacctgcagctgcagcatgaccaggtgccgttcaaagtgcgggccaagcgcggctgcgcgacgcaccccaggagcatcgcggagaggcaaacaagcacagcggacatgttggaccttgcagttgagcacatcaagggtctgcagagccagctgcaggctctgaagcatgagcaggagaagtgcacttgctgcagcaggccttga

SEQ ID NO: 60454 - DNA, 834 bp, Oryza sativa
  Clone ID: PAT_MRT4530_61980C.1
atggattctccttcgggtatcgatgacttcgtcttctctcctgggcaggtgtttcgcttcggtagcctcaagttcatcatggacgacttcggcaacatttttctccttgactcggattcgaaccagtcgggacggaaaaaccactcggctccatttggactcccaaacgcagccgagatctactccaaagtttctttcttcgagatggcttcaaatcgctcgggggaatcttcaacaaaaactccttcgcgtggcctcctcgataggacgccggcatacaatcaccttgcgacttctaccccttctcgaagtggaaagggtcagattagagcgttgagagaagaggaagagcgcaagcgcaaggaggaagaagattgtagactgcgggagttggccgccgccgggcaaagagtttgccaggttataggtcaaacacgcattgacgacaccaatgtgttccttacacctcaacagaatgccgtcatggttgttaccttgattgtcttagatgccgctccagtcaacgtcgcgccaatcttgaacaaggtgaagaccatggtcgcggcctccatcccacgcagctccggaagcagttggcaaggcaacgaatctacaacacagacccctatcggcagccgcctaccgccattacgacctacaaattaccgagagcctgagagtagtagggccaactctcatcaatgccatgaacatacgtggcgtcaagaccagtcggccgacacgccgactggtcaccacaaccagccccttattacaacagggatcgcagggctgattccgactatcagagcacttcagggcactagctcctag

SEQ ID NO: 60455 - DNA, 249 bp, Oryza sativa
  Clone ID: PAT_MRT4530_61981C.1
aatacacaattatatttataaaaaataatatataggggtcggtcttgccctctacaggccctcctccacgtctaactcggggtagaaactaaaggaaacttgaaacatgccttccagagtaaggaaacctcgaaacccgacgaaacatagtcggactcagacctgccggtcagaccggccacacaccgccggtccgaccggccctcaaccggcggtctgactgcccaacacacagcggtcagaccggcc

SEQ ID NO: 60456 - DNA, 861 bp, Oryza sativa
  Clone ID: PAT_MRT4530_61982C.1
tcagggtggcactgcagtttttgcttttcgctacattagtgattttgccttcaaaatgcaagcttacagccatgtcgatcggattagatttaagtacttcttgtaccctgaaaggattcaagatgttatatgcagaggggcggatctttttgacatgcttcctgaagagtacacgttccaagagatcattgccaagttggggccgattccaagcacattttctgctgttcatcttcctagctatctgctacagaatgttgatcggtacagataccttctcccagggtactgcaggagagaaagtgggtagattttgatgatctacactcttcaatctgatgtgcaggcctgtcactgccatgttctccacctccgagattggctggccgtgacggttgcatctgatatgattggctaacttagctggatgattgcttgggatgagtggctatggatgatttcatcatccttcactgtgcaatctaacaccggacgaccctacaggctacagcatagtgtatgctcggtcgtggcatggttaccttcccagaggagctcattaccctgtggtagccaccacaagttcacctgtcattcatattacttccctgattgatacataaactgagaactgctgtagattgcaaaatcaagtgagatttcagatttatatgctgtagaactagcattaccctgcagataatccacacatgcttttattctctctttctttttcgcgttggtgttctgttcctttctttgatggctgcatccaatttctggttgaccaaaaactctggcttccgttgctccgtcgttggaaattgccgcatgattgcgtgagcacttcttctgtttctt

SEQ ID NO: 60457 - DNA, 579 bp, Oryza sativa
  Clone ID: PAT_MRT4530_61983C.1
ccggccggggtccttcatcacctcagtctatcaccatctgatagatttgcagtgttaaagatgttgttcatgaaaggtgtcattctcctcctactagtgtgtgcagtaatttctccccacccagtgattggtaagaacccaatatgtacccatgcaaacatgatagagatcgtgaggaaatgcgagaagttcatcagggtgcagcgtccagttcccacatttttgtgtaccccaaacagtccctgttgcgaggcggtgaggaaggtgcgggacagggacatgcactgtgtgtatttcctaattggattggacaagcagagggtgaagctgtacagtgaacgaatgatcctgcgtctcagtgatctctgcgcgccggtgccatctcgtccgcctcctcctcctcatcgccaggttttggtgtgattggtcgaagcctatcctggctaatggagtttgaagctagaggatggactaataatattaaaattgatcagcctggcatcgtgatatccatcttttcataaataaaagtgtgtgattaagatttctagtgctaaaaaaaaaaaaaaaaaagcggcc

SEQ ID NO: 60458 - DNA, 1290 bp, Oryza sativa
  unsure (1)..(1290): unsure at all n locations
  Clone ID: PAT_MRT4530_61984C.1
cccttnnaattagccctatccatcttgttaatcatttcaatagagaatcctcaatgtatccattgtacgtattacactcttcagtctgtacaaaaattcatcgaaaaaaataagcacatagaaagaaaaaaagaagtaagaaaacacactcaaacttttggaaaactgtatgcaaaagaatcaagctcattatatgtatcaaactcatcagagcaacacatttctgaattacaatctgccgctgctttccatctagtggttgaatgcagtgcagtctctcctgacctctccatccttgccggccttgacccctagcctccccagcctgaccatggagctcacgaaggcatcgaagaaggcggtctggttgacggcgaactcctcgacggtgcgccgcgacgcgccgtcggtgtagagcacctggtcggaggtgaagaggccgaggccattgacgaggttggagtagtagacgttgtcgaagacgatggggctgacggggtccatgttgacggcgatggtcttgccgacgtcgcgcgggcacgcctccatcagctgcgccgcgtagtccttgttcatggacgggtccgtctgctcgccggcgctgtagttgtacagccggccggtgaagcgggtgcagtgcgcgaagccgacggtgtgcgcgccggagagcgccaccatgtcgcgcatcgacagcccgtgcttgtcgaacacggcggcgagcttcgtcacgcgcatgtccggcccgggcagcttgccgtcgacgtcgctcgccttggacacgaggccgtccagccggccgagctccacggaccaccatggcccggacgcgagggagacgacgtctctggcagcgagggcgaggatgtcggcgcaggagaccacgccggggcaggccttctcgacggcggtcttgacacggttcacggtgtcgaagccgtcgccggcgagggacatgttgtccggcgcgtccttctcggcgtcgtcatttggggacgaaatcaaggccgaagcgtcacacccctgatttttttcttctaattgcagatatctgaacaccgtgacgaggcagtcgtggaagaagagcctgaggacggccgggatggtgacgaccgtctcgttgatcttcctcgacacctcataccgcacgatggactccagcttggggcacgacgagctgtagtaccccgccgacaagtccgccgccacgccggggaacgccggcattacggcgagcattgccaccgccgccatcacgacggcggcgcacgggcttcttctccttctctccat

SEQ ID NO: 60459 - DNA, 2520 bp, Oryza sativa
  Clone ID: PAT_MRT4530_61985C.1
atgggtttcaatccgccggtgccgcagaaggacagcgagtgggagatccgggtggctgtgctgctcagcctcctccttcaggtcatcctcatcttcgtggggcccatgcgcaagcgcacctcccaccctgtcccgtgcttcgccatctgggcatgctacctcctcgccgactgggtcgccgacctcgccctcggcctcctcctcaacaacctcggcaacatcggcagcagcagcagccacctctctgccggtgccggcggcggcccgcccatcttcgccttctggacgccgttcctcctgctccacctgggcggccccgacaccatgaccgcctactccgtcgacgacaacgagctctggcgccgccacctcattggcttgctcttcgagctcttctccgccttggtcgtcttctcctgctccatcaggagcaaccccatgatcccggccaccgccctcatcttcgtcgtcggcgtcatcaagtacggcgagcgcacctactcgctctactccggcagtgtggacggtgtcatcgccaaaatcttccgggcccctgatcctggccctaactacgccaagctcatgaccgtgtttggcggcaagcggaatggcggccttctcgtcgagatcaccattgccaacggcgaggccagcaaggccaaggaggtgttgcagcagggcagtgaggttcggctggtggagacgaccaaaagcctggaggcaatagcgtacgagttcttcaccatgttccgggtgctgtacgtcgacatcaacctcagctacaaggagaggaggatcagccaggcctacttcctggaccgccgcgacatgacggcggacaaggcgttcgaggtgatggagatagagctcaactacctctacgacatggtgtacaccaaggcgcccgtgtcccacagctcggcaggctgcgtcctccgcttcatctgcaccacctgcctcgtcgtcgccatcgtcctcttcgtgctcctggacaagaccggcatcctccccgtggaccgtggcatcacctacgcgctgctgctcggcgggctggcgctcgacgtggccgccatcctcatgctcctctgctccaaccggatgatcgtcttcctcgaagccaagcacatggcgtggctttcccgggtggccagggccgtgcggctgcagccaaggcggtggtcggagcggacctcgcagctgaacttcatctgctactgcctaggcaagcccaaggagcaggagggtcgccgccgccagtgctgcaggcggaagacgatcccgccgagtgtgatgcggttcctcatctgggtcgccaacaaggtgggcgtcagggagaccttggacgacttcttctttatccagcgcaagccggtgacgatggtgagcgtcatcgggaggcggggacgatggtgcaactgcaaggagggggatgagagggcgccgacgaccatcgatgcccttgcgtatgtcttcgttggtctccagagggaggccataaaattcagggactccgaggactactacttgaagaagctgcgcggctaccgcggcgaggggaccctattggatgacgagggcctcttccgaaacatcaagatggagctgaccaaggcaacacgagaggagctcaaccttaggcttacggaggaggagagctcgagctcaacaaccaagaagaaggaggccgaggagattacacatgacgtcctgcagctggccgacaagaagaagaaggagatagacgacttggtgaaggagaagctggatggcgtcctgcggaacagcatcgggagggagttcgacgagtcgctgctgctatggcacatcgccactgacctatgctgtcaccgagagcgggaagggcctcggatgctcgacaccatcggcttgatgtccatcagcgagaccctgtcggagtacatgctctacctcctcgtcaggcaaccggagatgctgtcggccaccgccggcatcggcctactccgctaccgggacacgtgcgccgaggcgcgccgcttcttcaagtcggcggaggcgtgggaccccaaccacgacgacgcccgccggatgctgctttccgtcaacacgtccaagaagccggccgatgtgaagggcgaccggagcaagtcggtgctgttcgacgcctgcatcctggccaaggtgctccgggagctggacgacgacaccatgtggagggtggtggccggagtgtggagggagatgctgacttacgcggccggcaagtgccaggggagcacacacgtgcgccagctcagccgtggcggcgagctcatcaccatggcatggttcctcatggcgcacatggggataggcgacgtgtatcggatcggcgagctggccggtgactccaaggccaagctcatcatccatgatcaatagctagctagccatactcaatagctcatcgacgtccaatcttcaccaagaaataatatagacacgtacctcaaattgctagcagaataagagcataaattattaaaaaaaaaaaaaaaaaaa

SEQ ID NO: 60460 - DNA, 198 bp, Oryza sativa
  Clone ID: PAT_MRT4530_61986C.1
atggtgacgcacacacctcatgtcaccagagaggcgaggcgattctcgacggtcgatgaagatgcctctcaaaactatcgtggtccactgatgtctcgcatagttggtcgtgtgagaaaagggttggagggggccaccgacgtgtttgggttcacagtcctcaccaccgccattgttgaaatattgtgctctacttga

SEQ ID NO: 60461 - DNA, 1505 bp, Oryza sativa
  Clone ID: PAT_MRT4530_61987C.1
tttttttttttttttttggccatcagtaaatgcagatatggtattactcactttcaattcactttaagctcacaacattttacagttagcgaaaagagcgagtcagagaggccgtaagacaggtgctgacatgaatagctcccttcaatgggaagtaatacacacatttttacagcgttatctatgatcaaacggaaaacacgatttccccgattgccacccgccaaaggccatcacaatgtcattgttttcttacatcagagattgcaggaaccttggctgggtagttagacaaatccacatcaagcaagtctgtcaggtcgtaaagccctacattatcaactctgtccttgattggggtgctcattgtttcttcctgatctgcctggtttgacgatacgcttgatgtcaccgcactgttcgcaggcatcacagagatgccagacaattctacatcccgcccggatggcacggtactcactgaaggatacttcctttgagtgctgtctccctcattgtgattgtacagcacatattcgttataggtaggtgcaaactgatgaacagtatcatggtagaaatcattgaacttcagagcatgcagaaggcttcccttgaaatcaccagaaggtcgaccattgggaccagcatactcgttgtaaggaaatgcaaataggtggccaatagctgctatgagcatttcaacacacaatacgaagttctggagatcagcagctttttcagcatttttgataaaccgagattttgcagcaaggaaaaccaggacacccgcatatagtgccattgagtatgagactgtatatatgatagtaatgtatagataggatgcttgacactaaagtttccatctgcatattttcctttcgcataaagtatgaaggtaataaccaccaaaataggcttaagaatcacaaactgcaaacagccttgtttgcatctccgaataaaacgcccatctagaggaatagctggaaaacagcaagtcatcagaaaccacgatggcttcagggttcgcccattcaaacttaccaccacagcaccaggacctccaacccatgccaagcaaagtgaaaagaaattgtagatgacccaagcatcataaatctctcgaatagaattaaaatatattgaattatctggtaagataagggaaaggaacgacatcacggcatagaccgggaccatgaagatgaggcggacgatgaatcgctggtagatgggctccgcgtagtggaggaggtggcggtagatgtgcacgagcgcgatgacggtggccgccgcggcgcacaccagcgccgccgccgtgtaccccgccgccgcccagtccatcgcggacgggacgagccaccagcccgctccctcccagcccccacccacggcagcgagtaggtccggccgccgccgcctccgccgccggagcgctcggattggctccggtttggtgcgcctttgcttggggccgattgcggcccgcccccgcgtcc

SEQ ID NO: 60462 - DNA, 1152 bp, Oryza sativa
  unsure (1)..(1152): unsure at all n locations
  Clone ID: PAT_MRT4530_61988C.1
caggtgctgacatgaatagctcccttcaatgggaagtaatacacacatttttacagcgttatctatgatcaaacggaaaacacgatttcnccgattgccacccgccaaaggccatcacaatgtcattgttttcttacatcagagattgcaggaaccttggctgggtagttagacaaatccacatcaagcaagtctgtcaggtcgtaaagccctacattatcaactctgtccttgattggggtgctcattgtttcttcctgatctgcctggtttgacgatacgcttgatgtcaccgcactgttcgcaggcatcacagagatgccagacaattctacatcccgcccggatggcacggtactcactgaaggatacttcctttgagtgctgtctccctcattgtgattgtacagcacatattcgttataggtaggtgcaaactgatgaacagtatcatggtagaaatcattgaacttcagagcatgcagaaggcttcccttgaaatcaccagaaggtcgaccattgggaccagcatactcgttgtaaggaaatgcaaataggtggccaatagctgctatgagcatttcaacacacaatacgaagttctggagatcagcagctttttcagcatttttgataaaccgagattttgcagcaaggaaaaccaggacaccctgccaatatgtgagaaacactactgatttgatcatgatgaattttgggacaggattatatggccgaagcagatctctgcatgccgcatagaacaccgcaagagcatatagtgccattgagtatgagactgtatatatgatagtaatgtatagataggattgcttgacactaaagtttccatctgcgtattttcctttcgcataaagtatgaaggtaataaccaccaaaataggcttaagaatcacaaactgcaaacagccttgtatgcatctccgaataaaacgcccatctagaggaatagctggaaaacagcaagtcatcagaaaccacgatggcttcagggttcgcccattcaaacttaccaccacagcaccaggacctccaacccatgccaagcaaagtgaaaagaaattgtagatgacccaagcatcataaatctctcgaatagaattaaaatatattgaattatccggacgcggg

SEQ ID NO: 60463 - DNA, 435 bp, Oryza sativa
  Clone ID: PAT_MRT4530_61989C.1
atggctaaagatgatgttgaagataatcatgtggaggagacatggctcgccctccaaccaatcgagatattcggactgtggagactaactgtggtgttgttcaaggccaccagcatcattgaggcccctggactggcagcggcagcgagaggtctcagcggcctagggtcgagaagggatgatcatggacaacacagtgaaatcaagaacggcctgctgctcaccgagtcaaggaggatgttggatgccttgaagacgctagatgaccggtgtgtcggcgtagtgaaggaaggcgagccccttcaccgcaccaatggcagtctacatcctcctcatccatggtacaggactatcgagaccttcacacaattacagttcaggtcagcttctacaagtctttccggaattgacacagaggtggtggtgacaaactga

SEQ ID NO: 60464 - DNA, 149 bp, Oryza sativa
  Clone ID: PAT_MRT4530_6198C.1
acgcccacgcgtgcgcggacgcgtgggtgatcctagacagatgatacgcccgggcttgttaaccacaggcagtggctatacacaggagataggtgaaatattgcaaagacttcttctacagatggtgccttacatgacaaagatgcctg

SEQ ID NO: 60465 - DNA, 1502 bp, Oryza sativa
  Clone ID: PAT_MRT4530_61990C.1
aaagcgttcacgcaattaatttattaaatatcgccttagcagaaattatccaaaaaataacagatgcgaaatttgaccagcaaattgatattgaaattattagtttattgtttaatgaaaaattgaatagccaacaaaataacttaaatttcctggtcggtaaggtaaatttttgcactttattacctatgcgcgccattccatttaaagttgtttgcttattaggtatgaatgaaagcgattttccgcgtgcacagacggtgaatagttttgatttaatgcagtatgcctctaaaaaaggcgatcgggctcggcgtgatgatgatcgttatttatttttagaagcactattatcagcacaacaatttttctatattagttatattggacaatctaatattaataataagcaacatttaccatcggtgatggtttcgcagttactagattatttcgctgaatatcttggtaaattttctgaacagcacttttttgcagaaatggtgcaacaacatccattaacagtatttagcttaaacaactttagcgaaacaaattatgcctatgatcgagaatggctcaccatgacccaaacggaaaaaatgcaagagttttgcccgggtgaatttaattcaaacgctgaattgcctactgaaattcagctcgaacagttaattaagtttgtggtcaatccggtgcagtatttctttaatcagcatttaggtattatttagggataataataaacagattgaagaaagtgaaaaatttgtattgaatgcattagatcgttataaactacgtgataaattggtttgcttagatgatgatttaattcagcaaatgtttgaacaggaaaagctgaaaggtaatttacccgcggcgaatttgctcaactagcacaacaaaaaattgtagcatcggttaacattataaaagacgaattagtgggttatttaaccgaaagtgagattttagaagttgatcagacctttttaattaatggaatcgaattacgtgttgtaggtaatatttgccataggtttggtgatgaaattgttttttggaaagtcagtggtttaaaagataaagattatattcgttattggctttattatttgtttcttcgaatacaatcacaaccgttgaaattaaagattatctatttagatgaaaataaaaagaaagtattccaatttaatgaaattagccaagatgatgcaaaaaagcaattacgcatttatttaaccgattatttatccagtttttcttgtttaaaatgggctatgtttgaaggtttagatgattattttaaaaatcttaataaggctgaaaatattgagcactactgtcaggaaaacttagaaaagttaatcggaaaagaattttttaatagtcgctatttaaaacgtattttaaatcaaagcgtaatgttagattatggtagtattcacagtactacattacaatggtttgagttaatgcaaactagtaaaaaaagc

SEQ ID NO: 60466 - DNA, 373 bp, Oryza sativa
  Clone ID: PAT_MRT4530_61991C.1
cccacgcgtacgcgatggcggcgggcggggcgcttaccgtgctttccgcgcgcggggggcctaacttgggccctttagaagaatgggaaggtttggcctcccgccaactttgcaccgaagccgggaacggaaaggcgtccccggccccgggggcgggaaggctggtgctgaccacaaaccccgggggctgcctttgcaagggcctaaaggaaaagctccaggccgccttcctgttcgccgacacaccctactcgttcgcctccttggagctccagaaaagggacataacgacaaatccggatgggaagcagatgtcccagtccaagaatcccggtgctcgccaaggttcttcccgacggcagcaaggaaaagc

SEQ ID NO: 60467 - DNA, 219 bp, Oryza sativa
  Clone ID: PAT_MRT4530_61992C.1
gctgatttgaagccctgaaaaacaacactgtcgacaggctttgatggaacaagacgggcgaggcgagctccactcccaggtgtcgcaatacaacaagagattggtaaagctcctgagataggacaagatacactccagagtacacagtgtcgactgatggcagccacaggcccaacaggtggagtacaaaaactgacgcatgcatcagctcatactggg

SEQ ID NO: 60468 - DNA, 375 bp, Oryza sativa
  Clone ID: PAT_MRT4530_61993C.1
atggctgttggtgattttgtgtccatctacgcgcagctgaacatcgagctggccgagcaagcagcacagtggcccgtttggccgtcaagcagcgacatgactggggagcatcgtgctgaagaatcgagagaaaaaacacgaagagactcgccggaacgacggcctccatggctccatgcggacactatagatggagacgaaccattcagcgagcagctggacagccacgccggctgtgaaggacagcgccgaggcagccgcagcctggcgtgtgttgcgggcggctttctgcaaaaatgccgcacctgcgtttttagcctttggattagaattgaagggccgacagtggccgagtgcatgagtgcaccaagatag

SEQ ID NO: 60469 - DNA, 1417 bp, Oryza sativa
  Clone ID: PAT_MRT4530_61994C.1
atttggaggcagaggaggtagttttaatgctgcaatggtgtgattcctttgaaataggtagtcaagacctagtaagtcctcaaattgaaacacttcttcaatcttacacggatttattccaagaaccaactcaactacctcccaagagaagtttggatcattcgatcccccgaaggtactgaacccattaacttgcgcccctacagatattcacacccccaaaaatcagaaatagagaatatatgtgaagaactgttgagaaattcgataattcaacccagctatagtccttttgcagctcctgcactttaggtaaaaaagaaggacaattcatggcgcatgtgcattaattatagggaactaaatgccgcaaccataaagaacaagtatcccatacctataaatgaagatttattagatgaggggcgaaaatattctcgagaatttatttgaaggtccccggatgaaagaaagtgatgtgcataaaaccgctttcaggactcaccgtggtcattttgagttcaaggtgatgcggaatgacaaatgcacccgcaacttttctgaatttgatgaatgaaatattcaaggagaagttgagaaaaggggtattagtcttctttgacgatatcctagtatacagtgacgggatggagactcatttgaaataacttgaagaagtgtttaagctgctcaagaaaaacaaacctaaactgagcaagtgctctttcgggatgggacaaatagaataccttggttacatcatttctgaaaagggagtagcaactgatccaagcaaaattgaagctatggttcagtggccagtgcctaaaaatgtcaaggagctaagaggatttttgggtttgactggttactataggcggtttgtgcaaggatatggtggcatttgcagacctctcaccgaattgctcaagaaaggaggttttgaatggaatgcagaagctcaaaaggcctttgagcaactcaagagagcaatggtatcagctccagttttggaattacccgatttctctaaaccattcactatagaggctgatgcatctgatttgggaattggagctgtgttatctcaagataaaaagacaattgcatatttaagctaagcattaggagttataagtttggggttatcggcctatgagaaggaactgaactaatggcaattttgatggcagtgtctgtctaaatggaggcattaccttcagctgaaaccatttcttataaagacagaccaccaaagtttaaaatacttgcttgagcaaagattaactcaaccactccaattcaaaaccctaaccaaattcattggactcgatttttagattgaatacaaaaagggaacttctaataaggtaacagatgccttatctagaaggagctctccttggagaaggataag

SEQ ID NO: 60470 - DNA, 1683 bp, Oryza sativa
  Clone ID: PAT_MRT4530_61995C.1
atggggtttctgccgggcgacgacgacgggccggcggtcggcatcgacctcgggacgacgtactcgtgcgtggccgtgtggcggcgcggccgcgtggaggtgatccccaacgaccagggcaacctcaccacgccgtcctgcgtcgccttcaccgacacctggcgcctcatcggcgacgccgccttgaaccaggccgccatgaatcccctcaacaccatcttcgatgcgaagcgattgatcggccggcgattcagcgacgtgtccgtgcagggagatatcaagctatggcctttcaaggtcacctccggcaaggacgaccggccgatgatcgtggtgcagtacaggggcgaggagaaggagttctccgccgaggagatctccgccatggtgctcttcaagatgaaggagaccgccgaggcctacctcgacaagacggtcgagaaggccgtcatcaccgtgccggtctacttcaacgactcccagcgccaggccaccatggacgccggcgccgtcgccggcctcgacgtcctgcgcatcatcaacgagcccaccgccgccgccgtcgcctacggcctcgacaaggtggtcggcagcagcgacaagaagaagagagtgctgatatttgacctcggcggcggcaccctggacgtgtccgtcctcaacatcgaccccggggtggacatcgacataggcatcttcgaggtgaaggccaccgccggcgacacccacctcggcggcgaggatttcaatggcaggatggtgaagcacctggttcgggagttcctgaggaagtacaagaggccggagatcaggggcgaccagagggcgctccggcggctgaggacggcgtgcgagaaggcgaagaggatgctgtcctccacggcgcagaccaccatcgagatcgactcgctccacggcggcgtcgacttccacgcgaccgtcacacgggccaagttcgaggagctcaacatggacctcttcctcgagtgcatggacaccgtcaagcagtgcctccgcgacgccgggacggacaagggcaccgtcgacgacgtcgtgctcgtcggaggctccacccgcatccccaaggtgcggagcctgctccaggacctgttcgacggcaaggcgctctgcaggagcatcaaccccgacgaggccgtcgcgcacggcgccgccgtcaaggccgccctcctcaacggcgacgccaacgagaaggaccttcgcgacgtggtccttctcgacgtcacgccgctgtcgctcgggatagaggtattcggtggcgggatgtcggtgttgatcccgaggaacaccaccatccccgtaagcaggcagaaaatgtacactacccactacgacaacgagaccgccgtgctcatcaacgtgaacgagggcgaaggccgaagaaccaaggataacaacccgctcggcaagtttgttctcaccggcatcccaccggcgccgaggggcgtgccccagatcaacgtcaccttcagcattgattataacggcatcatgaacgtgtccgcggaggacaagacgacgggacgcagcaacagcatcaccatcaagagcgacaaggggaggctgagcaaggaggagatcgagaggatggtgaagaaggccgagaagtacaaggccgaggatgaggaggagatgaagaaagctgaaggctatgtggcaccctaa

SEQ ID NO: 60471 - DNA, 198 bp, Oryza sativa
  Clone ID: PAT_MRT4530_61996C.1
atgggaggagggagggggagcgacgggaagaaagagagggagatcgggaggagggatggggaggacaggagggagggagggcggctaggacggcgtggacgtgggcgtgccacgtgcgcgctacttattaatctggcgcctaagctcgcactaggaagccccgctgttaggatagatgcaaaccttgctaaccactag

SEQ ID NO: 60472 - DNA, 267 bp, Oryza sativa
  Clone ID: PAT_MRT4530_61997C.1
tcgttcacgcgttcgagggagcagcggagtgcacatgcggcgtacaggactgtatatgcagtgtacgatcaaaactacatccagtacaagctcatgaacatctttgtgtgttgtaccatactctataagacctacacgtatcacactgtgtaggagaaatggcgtttgactgatcaaatttttcatgctgtcaagaacacactccatgctgattataatattttatgggctgtattcaaactaaagcgttatgacgtaaattacaca

SEQ ID NO: 60473 - DNA, 481 bp, Oryza sativa
  Clone ID: PAT_MRT4530_61998C.1
aatttctctcctcttcagaaatcacgttcacacggcggtgccttcatcgctctgccgctccatctccctctccgccttctcccgttcctccccgcacctccctcccgctccaccatctctccctgtccatggccttccgcatcaatctcgatgtggtgatagaggcataagcttgtaaggagggagatccaacgcagccgacggtggcgtcggatggatgcggctcggatgcgatggtgaaggtgagagtgacgagcggatgcggcgtcgatggcgggggcggccacgagcggaggcggcgttgtcggcggggacggccacgagcggacgcgtcgtcgtcggcgggggcggccatgagcggacgcggcgtcatcggccgcggcggcaacgagtggacgcgggcgttggcgagatgctatagtatttctctttttctctgttcttgctcttctctgttcttcttgataatttgctagtcatg

SEQ ID NO: 60474 - DNA, 297 bp, Oryza sativa
  Clone ID: PAT_MRT4530_61999C.1
atggcgcagcggccgtgcatgctcttcttcggctccggcgcggcaggacggcggcatgctcttcttctgctcgaccgcggtgccggcaacggggtgcacgcactgctccttcagctcacggcagaatgggaggattccaaaagcctcaccaagttagagtcacgccgccgccacgccgtgctgctccggagacttggccgggagccgccggtggcgagggtggagatcgaggcgttgagcaagtccacctccacccccacctccacgacactatcttcctcctttcccgtgcgctag

SEQ ID NO: 60475 - DNA, 669 bp, Oryza sativa
  Clone ID: PAT_MRT4530_6199C.1
aagccggaaacgcacgaagagaagactattctatgataaatatgaaaagaaagaagtctctttccacactcgtaacctagaaaaggtgtaattaatgggagtcgatacagattgggtgtagtgaagaatcgagatgccatgtagaacaaagaggcgctggtctgggcctatttacaagcgaacccgctctatgacggctaagttacatgcacacccccattttgaaggcttagttacacgtataatagtctgcttgctctcatgtttagctgtgtacccattttggggctttactctttcatgatggaacgaggagcttgagttgatttgcggcagcagcggcaagcttgtgtcgactgcagacaacttgaatccgttagcaacggtagtgcgaagcagcttgaactgacttgttctagccattggccggtcggagttatgggctcttccctgtgtccgcaaagagttctgcttaaaactatcgtgtctgcttgatcctaagctgcaaatgagtgaaatttggggttgaatttcgatcataaacatggcttcgcttcgtgttattggttcctttatctccgtcttacggcgctcgccagatgtatcactcatcccgaaaataaggcaaggagtctgcagtttgttataatcattacgggaatgaatcgc

SEQ ID NO: 60476 - DNA, 1254 bp, Oryza sativa
  Clone ID: PAT_MRT4530_619C.1
atggagaaaggcaagctcgatttcctcctcgagctagggtttcgcttcaacccgtcgccggagcaggtcgtcacctactacctgccatgcctcgtcgccggccagcagcccaaggacaccgaggggtgcatccacagcgccgacgtctacggcgccgacgagcccagggacctcgccggcaagtacgcgcccgtggccaggagctccaacggcgaccggttcttcttcaccggttgcaagcggatgaaagggaagttctcccgctccgccgggggtggcacctgggtctctcagtccagcaaggatctcaagaacagggaggggatcaagatcggcgaggtcaagaacttccgcttcaagaaagatggcaagaacacggattggttgatggaggagtatcacctctgcgggcaagaatccggtgatgttgtcgagcccgtcgtctgccggatttacgtctcccctagggctgctcctgattcggtggcgcaccaagaatcagctgtcctgcagcctcaagaacccgcgccgctgccggttcctgcagcaccagcgccgccacgacaagtgcccgtggtcacgcagcaagcgccgccgccgccgccaccacttgttccggtgatcacgcaggacgcgccgcccctgaagaggcccgcgccggtcgccgcgccgccgtgcgccaagaagatgagaggcgatgtctcggcattccctgtggtgcgccagagctgcgtggcggcgccgcgatgtgcgccacgcgtcgtggcaccaccgccgcgtcatccacccatccagacctatccgacggatccgttcgagtcagcgccgctggatccgttcgagccgccgccagcagctgcctcggtgaccggcggacaccacacgcctcagccgtctgtccctgtccctgcgacgccagagcaagggttttcactggcagcttccaatagtccagaactcgatccggctaacatcggcattgacatggacgagcttatgagatatctgggcaatacaccattggacggcgttctcccttcccagctatttgttctgcccaccaacgacgatgaagacgtcgagctcgccaaagtactagaggacgggctacaaggaggaggaggacggcaatggcaatccaccgctgtgtgtgactcctcctcctccgcgaccggcatcttggcccgtcatggcgccaccgccgcctcatccacccatcctgacctgtcccaaggatccgttcgagcccaatga

SEQ ID NO: 60477 - DNA, 292 bp, Oryza sativa
  unsure (1)..(292): unsure at all n locations
  Clone ID: PAT_MRT4530_61C.1
aaaaaatcaattactagctatgancctgtacacatgtaggaattggttttnttgggacggagcagtaagttgtaacacatctagcatcctaccaaatttncagtgcaagatatgacttaaatgcagagaaataaagagagaaatagtgtttatcaggggaggaaagtaaaatattttnantaatccgggatgtaaaattagaaaaaaaanttgangtaaagtggactttttccgttgcatatctgtgtgtactgtgtgtgtgtgtgtgtgtgtgtgagagngagagagagag

SEQ ID NO: 60478 - DNA, 325 bp, Oryza sativa
  Clone ID: PAT_MRT4530_62000C.1
tattgatgctgatctactcattctgagaacatgccattgtatgatgcaaagccgaaatcactgagccgggacaatgccacactgaccaactatggagtaatggtgtattgagccttcaaactgcacatttcatacgttgatggaccacatcgatgcgataacatgctactatggtggtgacctaggatacctgaatgagatatccacatggaggcatcgtatgccgaagcacatgaacttgttaaaacatttctgacatggggatgaagagcgagcgcaagtgaacaatactcggttgactagtgctgacccaacaaatctctat

SEQ ID NO: 60479 - DNA, 3914 bp, Oryza sativa
  Clone ID: PAT_MRT4530_62001C.1
atggccggaaccctccgcgaccccagcgccgggtcgggcggcgaagcggcgcccactcctcctcctcctcccgtggccgcgcccttcgcccagtacctctcgctggaacctcttggctgggtggagcccaagcactcgcgccacggcgagctcaggagggcgctccagcaccaggcggacgacaagccccaagagctcaggcggatccgctccagcgtagccgactcctcctccaaggccagggagaaggtgaggtcaatgcaggaggcggtgcagaaggtggacaggtgcaggaacgtgctcaatcggaagcgccagaggagtgagcctgctgctgctgctgctgctggggctgaaaagccctctggttccggtgcactcaggattggagcccagaacagcaactcttctgcggtcatgagcaagcgtgtccgctcctcgctggcggatggacggttggaaggacgcagtaatatttctacaaggcaaagccctttagttaataatgagaaaagctcacttgtggagaaggaaaaaagttgtggacgaacatctgggctgtccgaagacaaattacagggtttatctactggaggtgaaggttgggagaaaaaattgaaacgcaagcgctccattggaacagtgcttaacagaggcaatgatgctgatcgagatgttaaatccgggggtcaacacagaccagccaatgaagcaaacccacgacctagtgatggtccttcacatagacatggagcatctgccgtagaatatgcaggtagcaggatggatggaagttctcagcagaatagcaactcatcccgtattctatgcaagacagatatggatcatgccactctgccaaatgaaagaagagagcggtatgttggaattgaaaaggagcggggtatggtaaaaggaaacagagcacaagcttctgaagatatgcaaactggaagcatcagtcctttgcccaaggctaaagcatgcagggcaccgagaaccggttcacacggcatgggttcagcttctagtttccaacgttcaactggaggaagcgacgaatgggaagaaataccatactcaaataaagcatcacttttgggaggcatgacaaaccgcaaacgttccatacattcaaatgcttcttcacctcctattgcttgggtcggtcaacgtccacagaaaatgtcacggacaagacgagcaaacgttgtttctccggtctcaaattttgatgaagtcctatctgaaggatcaccacttgatacagctattgctgctaaaccaacatctacagagtcctgcggtgttgtgcttacaaaaaagggaactagtagcaatacacaaatggcaaacacaatgaatgatatcccttctcctgttggattgtcagaaagtgagggatcagctgttaaagaacgcaaggtcaaggagaaagctacaaacaatggtgaggtggagaacgaggctgcaaatctagtccgtaattcagcaggatcaatagtttcatcaaacaaaaatacgattcctttgaaagaagagcttcaagatggtggtgtccgtcgtcaagggaggagtggcagaggtactatgcatgttaaagagtactcttcctcttccatatcgaaagaaaaattagatgctgcagagacaagaaagccaaacaaaggtgggcgacctggatctgaaaagaatgaaagtaaggtggggcgtcccacaatgaagaaaggttctgatcaaaacaatttgtcatgtttccctcaggctcttaattgtgaacacacagatgaccgagaagaacttttagctgctgtaaatgctgctcgcggcgctattgttggtgcatattgtggcccattttggaagaaaatggaacccatgctaactttcataagctctgaaaatttgtctttcttaaaaaaacagattgacattgttgaagagcttgatttgggcatgtcttgcgtgcctgatggtgaatatgttttagcacccaccaattacagcaggcagcaaacgacggagttttcatgtcaggagctagttccatctaattcgtctatcttacctgagcaaagcgaaaccaatggagttggattaaaaggaactattgactgtttttctcctagtgaggaaaaccaacaccatgtaccacaaaagatagaagctgacaaatggtttcatgagatggtcccaatggaacacagactcctttcagctatagttatggaagaggacatctcggaacccaatgttgtacaaagggatatactttttgaattttctaatagccatgttccttgcgctgcaagcagattcttaggaaatgaacttcaggctagtgccatatcatctaattttggattgagtgttgatttcatgaactcaaacaattcttcggttgtacatcaaagcctgagcaatgggttcacatcttccagcagtttcatcagttcaagtagtcaaagttcagtccataatgataatttgtctgatgaagtcaatttcgtataccctgaaaatggcccttttgataacttgataccgcagacttcttcactacgtcaaaagccaggaaaaaacttctcttcatctccacatgaataccaatatggacagatgtctgtgaatgataagattttcatcgagcttcaaagtattggcattttcccggaggcagtgccaaagctagatgatggagaggacaataacatcaataaaatgatttcagagttgaggaaaaggctgcatgatcaggtgaagcaaaagaaatgtaaattaagtaagttagagaaagcaattcaagatacaaaaagtatcgaggagaggagcttggagcaacatgcaatgaataaattggttgaaagggcataccgaaaacttaagggtgggcgaactggttctagtcacaaggctggtgctagtaagtctgccagcaaggctgcaaaacagcttgctttggattttgccaagcgtactctcttgcggtgccaaaaatttgaggaaacaaagaaaagctgcttcagtgagccttccctttggagtgttctatctgcgcccttgccaagcagcggcacaaaatctacagaaggtggcacaaaatggaacaagtgtgatagggaaagggaacacagcagagatgcatctgccaagggttctggtacgaagtcagggcgtcattcatcaggcagtgggaggagtggtgaacgtaaaaacaagacaaagccgaagcaaaagatagtacagctattatcgacttctggaaatgttcttgatagagctgtggagtcggttccaacaccggcaatgcaggagccccctcgaccgtcagttcctctgggtgcaaaaattacccagcaaccaaggaaccatcctgagaatgctgcttcacgattgccggaggctcccctgaccaatttgcctggattatttgatatatttgctggaacagaagggcttggcgaacagggcaacgatatcagttcttggcttactgatgatcttgatgtaccacaagactttgatctttcaggcgccttagaaatcccactggacgacattgctgagctgggttttatgtaagtaaggaaacgaaccaattgttctttatcctgcgccgtgaatatgtggggagtttggacatgatgttagtaggtttaccctacctaatgggtataagtagagttaaccgattgttttctctgcctcaatctggcaagagctttaagtgtttaactaggttggtcggtcgttttttatctcattgaactgttgatagccgctaggtaaacttattggcagaagaagacgaggtattctattgattcctcgtgattgtgctgagtttatcaacttgtgaatatgaatgagcttggttcgttgccaattggaaagaaaaaaaaaaaaaaaaaaaa

SEQ ID NO: 60480 - DNA, 243 bp, Oryza sativa
  Clone ID: PAT_MRT4530_62002C.1
atggcgcccacctctccagctgccttggcgtcacatacgatgatgagcctgtgcggccatcacgtcaagggcaccgccggtcgccgcggcgtcgggtggaggaggcaggtcaaagaggtggacagatatattcaccaagaagcaacaactagcgacggtggcggaggagaaggatcagccgaggcagaaggacgtggggagattgggcattttcccgagtgggtgtgcctaagaactgttggg

SEQ ID NO: 60481 - DNA, 242 bp, Oryza sativa
  Clone ID: PAT_MRT4530_62003C.1
aaaaaatcacgggatgtattaacattcagagggcatagcaaataccattgcttgctgcatcacatcaggctctgatctgagtatggatacactgtcagaaacaaatctggacggaggcaaaaggaatgacaacaatgcttgaagcgacagttgtaggaaacaatgatcacagctttatattccaacaactgtactaccgtacatactctattttttttttccgggggatacatacttgcatt

SEQ ID NO: 60482 - DNA, 2274 bp, Oryza sativa
  Clone ID: PAT_MRT4530_62004C.1
aagcaagcatgtgcattgagcttcctctttgcgagaaaatcactgccagattcgagggttttcgtacaacaggaggggaagtgctacagctaaaaagccccccacaaaacacatctttaacaacaacagggccgtatcatcatgatcatcaaacatacatccagctggaagaagaaaataagggggcaaaaaatagaattgaattacagattagcggggtatatagccatcctgtacttcctcgaggagatccaatcaactacgcgttctccagagcacattatcaatctatgctgtcaggtgcgcagcacagctgacatcaacatctaacatctctgaatgaaaggtgacctgctatgtggcgaaacttttttactcctcaaagccatccatcatcgggtgacctccttccgacgaggtgcttttcgatgattgtttccgagttgagccccgcctgttcttggctttctttgccttcatcctccgtttcttctcgttggcatcaacccaggtgtagtcagaaggtatttggaatggatcaacctcatctttccagttacggctatcaccactatcactggactgtgcaccacgcccccctctaacccacgaataccatgagcctgatccttctgattctttgcccttggcatcctggaattgcgttgggcttgagggtggggtagcaaactcatccaaaggttgtaattcctcaaactttgtgaatgtcacgatgactcgtattgttggaacaataggtatcgcaatcttcaccggaaatgtgcctggaggcagtttagtagtcaagagttccctaagccttctgacagctttcactttgtttgctaagacatcaagcagagggatcagttcatccgtcttcaaagggaaatctggtgtcagccacaacactggtcttaaccccttcttgtattcactttcatgtttagtagaatcccctgatgatgcacccttcttcttcttgctgctgttcttctcctttccctttcctaggtcacctgattcatccttactcccttgattcgccttggatggtttctcgtcattcttggtgcctttcttgccaccccaaccaaaccatcccttcttatcttttgccacgccatttgcatccaaatgatcagccccgccatcaccttcctcgcacctctcctcaaattcttcttcctggttccccattctcaacgcagaatcaagctgtttcctctcttcggctgtcaacacttcatccagctccgcgtcaagttcagtgcccctcccattcttctcctccccctccatcgcaaacagctcctcatctgtcatcgcccccggcacacgccttgacttcacagtcaccagaacgtttaacatatcataaaccttagctttccaatgtccaacggcttccgtcctctcctgccggcgccaattcaaatgaggcacaagctctgcctgcgtcacgtcgatcccgggacgatacatgttcgtctttgacatcaacgccacctcatgtgcgacctcggcctccgttggttgcacccctgctccctccaatgcatctgtgatctccttgtccttatgagccagcactatgagagaacctgggtgcaactctttgcccccagcatcctcaggacgagcaccatccccgagaaacaagaaggtctggtccgaacgctggatgcggaagccgtcgaagccggcaagcgtcatgtcggcacgcagcgcagctccacgcttccaaatgcggtaagtgtcggagggggcgatgcggccgatgaagggtatgacggaggactcgaagtggaaggagatctccatgtagaagtctcggatgcggttgatggaggcgaggacgcgcgggaggcggcggcaccacttggcccaggcgaggggctggtagtggcgcgcgatgatggtggcgatggcgtcctcccgcgtgcagacggcctcctggagcgcggaccacccgtcggcgttctggagcgaccagtcggcgccggcggacatgaggatgtcggcggcgacggggtcgcggagccgcacggcgaggtggagcggggtctccctccgcggcacgtcgcggcggtcgatggcggcggagaccgcgtcggccacggcctcgccggcgatggactcctcctcggtggccacctccccggcgcgcgggaggcgcgggagccccgcgaccaggcggcggagcgaggcgtggtcccgccgcaccacggcgaggtgggccgggctgtgcgcgtacttggacgcgtcctccat

SEQ ID NO: 60483 - DNA, 289 bp, Oryza sativa
  unsure (1)..(289): unsure at all n locations
  Clone ID: PAT_MRT4530_62005C.1
cccacgcgtacgtccanaaatacaataatttatgggttgtaacttggaagtgtgatgggggagggtgtttattttatgatgaaatatttataattanttgtttttaaaaatatatagattaattaattgattaaataataaggtaggtgattaatttgataaagtatattattaggtatttagtatgaatgtagtagatttagaggtggatgtttatttatttaattaattatattatatgaagtgaaattatagtaaattttaggggtaatataatttatggttgaat

SEQ ID NO: 60484 - DNA, 408 bp, Oryza sativa
  Clone ID: PAT_MRT4530_62006C.1
gggggggcaatttaccttttttaaaatgaaaaacaaaacagtttttttttcgaccaaacaaaaccattgttttgataacaggcagttcaacttttaaatgtaacccataaaaccagattttttacccaaaagggttttagctggcaaccctgaaaaggagcctttaaaggggaagaagtttttgggtttttttcgccctcaccacctgaaaaagctgttgcattgttcccctaagcctttgccgttgaatccttttcctccggggtagcataaacattatttgaggggggccgaacctgttcctcctccggaaggggcttttccacatagtctttctcaaaggcatcaaaaggcccctcataaatcctcacttggggcttcgctggatcttttaaagcacatactttc

SEQ ID NO: 60485 - DNA, 238 bp, Oryza sativa
  Clone ID: PAT_MRT4530_62007C.1
cccacgcgtccgtgatagttaagatagactgcaacaaaaatatggcattccaacaaggtagagttctcagtgttgcttctcgccgaagactccgtgctcgcggcgaccgcgaccatggcggagtaccactaccaagaccaggtgatctacaccccaggacccgctctgtcagtcagagaatgccctacccgatgtacccgatgccgacgtgccagacgttcgtgaagctccagtgcgt

SEQ ID NO: 60486 - DNA, 319 bp, Oryza sativa
  Clone ID: PAT_MRT4530_62008C.1
tgggggttttttttttttttttggttttttttttttttttttttttttttttttttttttggcatcggggaagcaacacttcgatttagattaagcgccagaaaattagacacaaaatttgagccctggcccggcccaaccaacccccatgatccaacccagtttagttttagggtttgacgggcataaaaccctaccgaatttaaaatttttttttggaagggggttcatttacttttttttgggggaaaacacaactcccctgtatttggaggcccccatgaggggggcccgcctaaatggggctgggcatgggacg

SEQ ID NO: 60487 - DNA, 734 bp, Oryza sativa
  unsure (1)..(734): unsure at all n locations
  Clone ID: PAT_MRT4530_62009C.1
gtttcctggcatcttgtagatctttgtgtactttcatgctatgctcatttgacactatttttaaccagttagtttggcaatgatatcacaccatgtaagaataggttacttttttgtagccttcgtcgttgattagcatgaataattatattagaaacatttgtttgattacttcccattgttctagataattagagtacttgggtgacacagtagtttgatctagaagactagaactattaaccaaatatatgaaaacattcacacttgcagaatatgagtagtgctgtgaatcatgtgactacttgtgtgtcctggtttctttcgatactgaagttcacatagaagcatctcctgtttctttgataattgttgttttgttcacatatctcgtcttgttccagagaaacttattgtcctactacgagatggacggaagctgcttggcacactctgctcatttgatcagtttggtatgccactcttcacaatcctctttcttaaaagtgttcatctcgattttttctgccattagctcctgttaacttttttttacctcgcagcaaatgttgttcttcagggtgcttgtgaacgagtaattgtaggtgaactatattgtgatgttcctcttggtctatatgtgatccggggagagaatgtcgtattaatcggagaattggtaatgatctctgctgcgcanaaacatgatcatgatcaattgcatttcccccata

SEQ ID NO: 60488 - DNA, 392 bp, Oryza sativa
  Clone ID: PAT_MRT4530_6200C.1
cgatgaatacaacccaaagtatcacatgttacagatgatgattaccgtgccaattacggacaaagcagcctctatactggataaacgcatttcgcgacactggctaaggtaagtattggaactgcgggcaccctaattcattaggtaaatacgctatggccatggcacgtaataactcaggaaggctagacatgccaccccataacatggagcggccaaagcaaccagcgggctgaatggtgcatcgtgcgctatgcgctaaacagctctaaattcctgatagcgagatggttgcgcacccaggcccagctggctgcaaaatcattccggtgacacgggaaacgtacttcattaccacaaggggcatgacgatgttcaatactgctgactta

SEQ ID NO: 60489 - DNA, 747 bp, Oryza sativa
  Clone ID: PAT_MRT4530_62010C.1
atgactacgcccccaagcgctactcgctccctcctcccatccccgcgctacacctcgctccgcgcttcctcgcttcttcccgtcgtcgcgaccatggtctgcccccaccggcaccggggtggttccccctttccactggagccctgcctggactaccccgacggcgccggggtgggagcagcatttgatcctcctacaattggatcttcaaaaacaattgttaggagagtacatacccagacctttctcagctttgtaatggctatttcattgctgcagcccactactcttctagctctgccgacaaccacacctacaagagctacaactgaagcatcacatagggcagatgaggcatcacattttcagtttcatcttctgtttctaccaccttgcaataaaactagagcttcacatagacagatacctaatttgttgtcactgggactaggaggattctacattatagggaaccatctttgccaggtgttcaacaagtttagtgataggaccctatatggcttacatatattcaaagacattatagtgaaccatctttggatagggcttcgcgtgaagtttgtgtcatatggtgtactgatgcacaagagtgtcttgcatttgcaattctataccataatcgtgctccacgacatagccgttcattctgattactttcaatggataatgtacgaagccctacaatgcaaaattgtgccacgacagaaaatttttattggcctatag

SEQ ID NO: 60490 - DNA, 534 bp, Oryza sativa
  Clone ID: PAT_MRT4530_62011C.1
atggcgacatcgccgctgccacgctgggcaccgacgccaagcccgtcgctcccgctgtggcgaacctctcccggcggcggtgacggtgccgccgtccgtggcttcctgcgttccccattccgcaccgtgctcgcggctctccgcggtcggcgcgccgctccccgcggcgacacggcgcctcctcgtccgctacatccggcggcagcggcggcgacgacggagcacgccgccgccagcgggttcgatagtataggtatcgacgtcgtcggcgcggctcgaggggagaagcggcttgacgacggcgatggcgggggcgtgttcctgacgtgggaggacgtgtgggtgacggcggtggacagcagggggcacgccgccgccatcctcaacggcgtcggcggctgcgcgcgccccggcgaggtgctggccatcatggggccctccggctgcggcaagaccacgctgctcgacaccctcgccggtaacccaacacgtacactttgctcagttagtttctccccatggatcgcatgctag

SEQ ID NO: 60491 - DNA, 666 bp, Oryza sativa
  Clone ID: PAT_MRT4530_62012C.1
atgcgcggcggcgtcatcagtgctgacgccggcgagcggcggagggcggcggcgaggagtcctgccggcgatggatggggcgtaatcgtctgtcctgacgacaacggcggcggcggtgaccggacggcggctcggatcgtcgccgccgtcgtctttctcatcaacgtgcatcgcagcagcgacgacatgatcgatcgatcggctaatcaaccagggatcgatgagatcgcagaaccgatcgttcgatcgagcggcgaacgcgatcaggagatggcagcaacaaggcagacgacgggtggtagcacaacttttcactttgggctaggtattattaccaaaaaatcacttaacactagtggcccacatatatctaggaaggagctcagccaacgtttactcaacctaatcatagctagctgctcacttgcaaggccaggagggttgaggttaatacagggatgggtgcaggcaatatcgatcgagtggcctgagctaacgaaggtcgagctcaatccagtgcgcacgcagggattggaggaggtcaagctagattggtggcgcaatctgctcaccaccgatggtgagctcaagcgcagggcaacgcttaatgcagctccagtgcaaggtggtgccggtgaaggtcaagctcgatgcagcgtagggtag

SEQ ID NO: 60492 - DNA, 108 bp, Oryza sativa
  Clone ID: PAT_MRT4530_62013C.1
tataataagagtaagcgcaagcaggtgtggggtacattatatagagtactcgataatatgtcaacggatgacttgcagcagggattactaaatatgtaaccgaaaaat

SEQ ID NO: 60493 - DNA, 669 bp, Oryza sativa
  Clone ID: PAT_MRT4530_62014C.1
atgatgaaggaaatcagatttccaagggattccagaatttggtttgcctatcagcatttcgcagactttgaactcccagccgatttcagatttgaagaaatcaaccatgagagatttgagcaatccacggcatccaccaagactacatattcttcacctcctcatgctagccagagcggggaacccatccactatgttgtagggattcttccaaacggtggtgggctggctccttccattatcgactataatgcccccaagacaactcctgtacttcatggtcaacctcgtgaaccaatccctactgatattgggaaaaggaaaaggaccaggcaatcagttgctcaaccatcggctgctaaaccccctgttactaaaaagaaagccacaaagaaacaaaagactgctgctgctgatgatctttcaaccatagacccagatgtagaagaattcttggctcatgaagagatggaagaagccattgatgatgctgctgccgaccctcctcgttctccatctccttctcaacatgaatcaagtgagcgaactccatcggctagggatagtcatcatatagaagtaccagaacaaccaactcccgctgttcctgtcttagccgatatgttttcctttgacattagggagttcatagatgaagaggaagagtaa

SEQ ID NO: 60494 - DNA, 3237 bp, Oryza sativa
  Clone ID: PAT_MRT4530_62015C.1
atggagagattacatacgagccgtaaccacgtctatggcttcatcatcatcctcctcctcctcgtacaagctacggccgcggccacctcgcggtgcccggcgcaacaggccgccgcgctgctccggctcaaacgatccttccaccaccaccaccagccgctcctcctgccgtcgtggcgcgccgccacggactgctgcctctgggagggcgtgtcgtgcgacgcggcctccggcgtcgtcgtcaccgcgctcgacctcggtggccacggggtacatagccccggcggcctggacggcgccgccctcttccagctcacgtcgctccggcggctcagcctcgcggggaacgacttcggcggcgcggggctcccggcgtccgggctcgaggggctcgccgagctcacccacctcaacctctccaacgccggcttcgccggccagatacccatcggcgtcggcagcctgagggagctcgtgtccctcgacctctcctccatgccactctccttcaagcaaccgagcttcagagctgtaatggccaacctgacgaagctgagggagctccggctggacggggtggacatgtcggcggcggcggcggcggcggccggagactggtgcgacgtgctcgcggaatccgcccccaagctccagctcctcaccttgcagtcctgcaagctctccggcgccatacgctcctccttctcgcgcctcgggtccctcgccgtcatcgacctgtcatacaaccagggcttctccgacgcgtccggcgagcccttcgccttgtcgggtgagatccccggcttcttcgccgagctcagctcactggcgattctcaacctctccaacaatggcttcaacggctcgtttcctcaaggagtgttccacctggagaggctcagggtgctagacgtgtcgtcgaacaccaacctctccggcagcttgccggagttcccggccgccggggaagcctccctggaggtgctggacctgagcgagaccaatttttccggccaaattccgggctccatcggaaacctgaagcgtctgaagatgctggacatcagtggcagcaacggccgcttctctggtgctcttcctgattcgatcagtgagcttacatccttgagcttcttggacctgagcagcagcgggttccaactcggggaattgcctgcttccatcggcaggatgcggtcactgtccacgcttcggctgagtgagtgtgccatctccggcgagataccgtcgtccgttgggaatctcacacgcttgagagagttggatctctcacagaacaatctcacagggccaataacctccatcaacaggaaaggggcattcctgaacctagagatattgcagctatgttgtaactccctgtcagggccagttccagccttcttattctcacttccacgattggagttcatatcgctcatgtcaaacaatctagcaggtcccctccaagaattcgacaatccttctccgtccctaacatctgtttacctgaattacaaccagttgaatggatcaatacccaggtctttctttcagctcatgggcttacagacactagatctctctaggaacggcttgagtggggaagtacaacttagttacatttggagactcacaaatctaagtaacctatgcctgtcagcaaacagactgacagtgatagctgatgatgaacacatctacaacagctcttcctctgcatcactccttcaacttaactccctggggttagcatgctgcaacatgaccaagatccctgccatactaaggtcagttgtggtgaatgaccttgatctctcgtgcaaccaacttgatgggcctatacccgattggatatgggcaaatcagaacgagaacatagatgtcttcaagttcaatctttcgcgcaatagatttactaacatggagctccctctggctaatgccagcgtatactatcttgatcttagtttcaactatcttcaagggcctctacctgtcccctcatctccacagttcttggattactccaacaacctattctcatcaatcccggagaacttgatgtcaaggttgagcagttctttctttctgaacttggccaacaattcactgcaggggggcatcccacctatcatttgcaatgcaagtgacctcaaattccttgacctgtcttacaaccatttcagtggtcgtgttccaccttgtctactagatggacatctgaccatattgaagctgagacaaaacaaatttgaggggaccttgcctgatgacaccaaaggaggatgtgtttctcagacaatagacctgaatggaaatcaattgggggggaagctacctagatcactcactaactgcaatgacctagaaatccttgatgtgggcaacaacaatttcgtggactccttcccaagctggacaggggagctaccaaagcttagggttcttgttctacgatccaacaaattcttcggcgcagtggggggaattcctgtcgacaacggtgatcgaaacagaacacaattctctagtttgcagatcatcgatcttgcctcaaacaacttctctggcagtttgcagccgcaatggttcgatagcctcaaagcaatgatggttacaagagagggtgacgtgcgaaaggccctggagaacaacctctcggggaaattctaccgtgacacagtcgtggtcacgtacaagggcgcggccacgacattcatcagggtcctgatcgccttcacgatgatcgacttctccgacaacgcgttcaccggcaacattcctgaatccattggaaggctcacctcgctaagaggtctcaacctgtcgcataatgccttcaccggaacaatcccttctcagctcagtggattggcgcagcttgaatcgctcgatctctctttgaaccagcttagtggggagatcccagaggtgttggtgtctttaacttctgtcggctggttgaacttgtcctacaatcgtttggagggtgctattccgcagggaggtcaatttcagacgtttggaagtagctcatttgaagggaatgccgccctatgcggcaaaccgctgtctattcggtgcaatggttcgaatgcagggcccccttcgttggagcacagtgagagctgggaggcccggacagagaccattgtactgtatatttccgttggatcagggttcggtttgggatttgcaatggccttcttgttccaagtgttccgcggaaagtga

SEQ ID NO: 60495 - DNA, 310 bp, Oryza sativa
  Clone ID: PAT_MRT4530_62016C.1
accgctagcgctgccggccgatgtgaggatgcgccaggaggacgatgcagcggtgggaggagaataccggctgccgtcatccgtccgccgccacccgtccaccacgccgcaccaccccccccccccccccccccgcggcaccgccgtcggccgagtcgccatcgtcctcccgttcccgcatcctcccgtgtcgtcgtccaggcggtggcagcgctgctgctcgccgcgcgcctgtcgcgtccggggtggacgtggcggcggtgctggcggcgttcccggacctcgctggcttcgcacagctgcccgctag

SEQ ID NO: 60496 - DNA, 1461 bp, Oryza sativa
  Clone ID: PAT_MRT4530_62017C.1
tcaagcgtacaccaacctggtggcgcggctgctgacggcgagccgtggcggcgtccagtcgccggtgcctctcgattccgggctgtacaccgcgcacggtttttgtacatgcgcgccgccgccgccgctgccgctgccgctctgccccgagctcgacgtgtccccggcgagaacggcgccggaccggctcctggcgtgcgccggggtggccggcggcgccgtgcgcgccctggcgcgcgccgcctgcgtcgccgccatgtaacctgggacagccggcggccggccctgcacggcggcggagtgcgagttgagcgggctccggtacgacgtcgtgtccatctcgaccgtcctctcgggcatggtggtgccgtcggcggcggccgtcagggcggctctgcggcggctcttgtcgggctccggcgcgtgctgctgcgcttgcgctgccatccatctgtccagccattggaagccgccggccttctcctgccattgtctctgctgctggtagccgtaggcgtaggcgcgcgcgcgctcgcggcgagcggcggcgtcgtgccggcgcacgccctcggccctgtcttcctccggggtgcggctgctgccgtcccagctccggaaagggctcctgctcctgacgtcgttgcctcgttgccgctgctgctgctgccgcgcgtgctcgccaaccttgccgccgtcgccgtcgacgtcgtcgtcgctctcgtctcgctcgccgagctgagcgtggtacgaattgttgcggagaggatgccacgagtatccgccttcccgtcgccgggagctgtaggtggcggcggcggtggcgggaggaaggggcgggaggcggagcggggcgacgccggcgtggatgtggtcggtgatgaggcggcgggcgcggacgcgggcctgggcgcggacgagcgcctgcatgcagcgcatggtgaggtggacctggcgccgcacctggtgaccgcgcaccagcgcctgcagccgcaccagcccgcggagcgcgcgcagggctcgacgcgccaggtagccgcggtagaatgcctggatgcgcacggcggcgcgctcctcccgcgacgcgcgccggagcgccgacatcctcaccaccctcgccgcggcctcggccgccgccaccgccgcctccgccgctgccgccagcgccctcgcgcgctccacctcgccgtacccgtcctcgccgtcctcctcctcaccctcccctttccccaccaccgtgccgccctgatcattgcccgtcccctccgccgacggcgacgtcccgcccgccgggaaatgctccagcagaaggacctccggcgcagcctccgccgccggctccttctccctatcgccgccgccgccacccttcttgtcggcggcgtccttggaggggcggaagaccttcctgacggcggcgagccacccgccgccgctgccggcggcggcgtgcttcttgcccat

SEQ ID NO: 60497 - DNA, 1050 bp, Oryza sativa
  Clone ID: PAT_MRT4530_62018C.1
atggcctcatcaagcgacgttgacctcgccgactccggcccggtgcatatgatggcgaaaaacgactgcactggttcttctggaatagtgattgactgggacaaggaggagcaccgccattgcgtcgccgcatgccttgtcaaaggcgttatggtgatgatgaaggacaggagcaacccactcgcgccggcatggtggaaaagcttcggcttccgctgccgcaacgtgatcaaggatgacagctgggtctccatagacatggacgcttccgaccagggtagctctgactccggccgggatgacgaaatcttcggagccacctacgagtacgagccaccagcccgcctgccccgccacccgtccgctccaagctatgtcgtcgccttccgaggcaccattcctaccaacctgggagatctaatacatgacatcaagatcgtatacaatacattttccaactccaatcgttgtgacatcacccacgacgaagttgaaggactcctccaaggtggtgcaaactcctgtactatgtggctcgccgggcactcacttggtgcgtcgcaggctctagatgtcgggcggtccatggccgagaaaggcttcaacctccccacctttctgttcaacccgccgcaagtgtcgccagcgccggcaatctacttgctgcgcccgaatgagaaggccaagatgcatctatacgccacgagctccctcctcaagggctacgtcgactacttcgagcagaggcaactggtgcaggaacgcttccctagcatcggcatgtcggcgatgaagctgtcgtaccgagacatgttcttctcagcgctcaacaaagacaaggagcggtcgcacctcctgccgtcggcactgctgtgggagaactcgaggatggacaatgacgtggagaatcacccgtccaagtgtacgctgctccgcaaagcgaaccgtctcaagaagcgggtcctcaaggcgcatagcctcgagcagtggtggaagccggacaatgagctgagcttgaccaagacacagtacaactgtccttcagcatag

SEQ ID NO: 60498 - DNA, 1995 bp, Oryza sativa
  Clone ID: PAT_MRT4530_62019C.1
atggcagcgggagggaggtgctgcttccggagaggggctcccgcggcggtgctcgtgctgccgctgctgctgctgatcgccgcggcggcattgccccggcgggcgctcgcggccaccgtcgccgccgatgttgctgctataaatggactgtatgttgcacttggatcaccggctcttcctaaatggactgcgaatggtggtgacccctgtggtgatggttggcagggcgttgtatgtattggctcaaatatagattcaataattttcaatgctgcaaatttggaaggacagttaggcagcctggggaacttcacttcaataaccactataaatcttagcaacaacaatattggtggaactataccagaagatctacctgttacactgcagcatttttttatgtctgataaccagctcactggaagcattccgacgtcactatcaatgcttcagagtttaacagacatgtctctaaatgataatcatctcgacgggaaactgccagatgcttttggttcccttactggccttgtaaattttgatatttcatccaataacttcagtggttcattaccaccttctctgggaagcctgtcatcattgactacattaaaggatgggaacccatttaataccagcatagctccttctgcatcaccctcttcaacacctacaggctctacaccaacacaaacaccatcgtcaccttcatcttctggaactccttcgccatctagttcgccctctaattcttctggtggatctactgctcgagacagcagctctccatcatctaggaaacataagtcttcaaccctcaggattgttggatatgttcttctagctattgtcctgtttatagttacagtgctgctggtaatattttgcctgtccaagtaccaagagagacagtcaagacgtgattatacaacaagtcaggtggggagggttcatcagagggttgaagagccgaaagttaagcaagcttcagtgcagtcaaggaatgatgccaaaaaaggatcaacagaggttcctgaacggaggcagatgtataaaataactattcaattgctggcagctgctctcgagaagcctcctgaaaagagaaaagaacatcaatatacaaatagttttgaagagggaaatttgataagagagagtaggttgggaaaagtatatctggcagaacttcctgaaggcaggttcttggaagttatgaagattgataacgccaatgatagaataccggtagatgaatttctagaactggttgcaagtgtatcagatattaggcatcccaacatcctcgagcttgttggatactgtgcagaatatggtcagaggttacttgtttataatcatttcagtagaaaaacactgcatgatgtactacatgaaggggaggaattggatggtgcactatcatggaatgctcgcctccaagttgctcttggtgcagcaaaggccttagactatctacatgagagctgtgaacctccagtagtgcaccagaattttgagccagccaatgtgctccttggtaatggattctcagtacgtgtcgctgaatgtggactggcagaattgacgctgtcaggttctgttacacagttgtcaggtcgcatgagggcactgctgaattatgaagctcctgaaatccatgaagctgggacttttacctaccgaagtgatgtttacagttttggcgtggtaatgctagaacttctcactggccgtaaaccatatgacagttctggtcctcgtgctgaacaacatcttgttagatgggctgattctcaatttcatgacattgagtccatatcaaagatggttgatccttctattcaaggagagtgttctgagaaagtactgtcacgttttgcagacatcatcagccgttgtattcggccggaaccagaattcagaccatcaatgtcagagattgtccaagacctagctaggattataagtgttaccagtgaggaatcagagtaa

SEQ ID NO: 60499 - DNA, 507 bp, Oryza sativa
  Clone ID: PAT_MRT4530_6201C.1
atgacgacgggcggcacgcacgcgcggccggaggctggcggcggggggctgcggcagcggcggggagcggctgttgggggacgaggacgggcggcgcggcggcgaggccagcaggtggcggcggcccatcttcttccccatcctccgacgacggccacaaccggttgtggcggcgtctgcgttggcagcatacgggggcagcaggctgcggcgcatcggcggcggcaggcggtggcggcggctgcgggcggtgttgcggtggccgcgacaggcggtggcggcggctgcgggcggtgttgcggtggccgcgacgggcggcacgcggcggcggcgtcggcaggcgactcgcgtgcgggggcgtcggcaggaggcagcctgggcgacggcggcggcctgtgcggcggcgcttgcgcagcggcttgggaggcggcggagatgcgtgggcttctcggcggcggtggctcgtgggctgactggctacggcggcaacgtcaaggcgacgcctag

SEQ ID NO: 60500 - DNA, 657 bp, Oryza sativa
  Clone ID: PAT_MRT4530_62020C.1
ggcacgagatacattttctccagggtcttatcaacgaaagtatcagtgctttcttccctcaagtggttgagaccatccatcaatgggcacagtctaggcgttaaaaacatttataatatttggtcaagacatttataatatttggtctgtacatgtcagttttgaagttcttctctgttccggtgacatcatattttcttcgataactacgaggctcttaactgcattctacaacataatgtgtattttatggtgatgcaacagatcttctgttatcatcagttacaaaggaaactgccatctctggatgctggtcttattcatatatctaccaaagcactacacatgttgccatgtagttggaagagaacttcaacccgtgggatcaatatttagggtataatgtcactcatccgcaatgttggatttggagtgcccctggagaacagagtaaaaagagaaggatgctgctatatgttcattagtagacgattcttataactagcttctgattagcagtcagttttgtacagtaccatctatactagaatgtctatagttatatgaagttacttactaaaccgatagcatattgtcttgtgtataactactgtcccaaggaaaatttcaaatttacttaaaaaaaaaaaaaaaaaa

SEQ ID NO: 60501 - DNA, 977 bp, Oryza sativa
  Clone ID: PAT_MRT4530_62021C.1
tgtttgtagaattttcaatgctgcaaatttggaaggacagttaggcagcctggggaacttcacttcaataaccactataaatcttagcaacaacaatattggtggaactataccagaagatctacctgttacactgcagcatttttttatgtctgataaccagctcactggaagcattccgacgtcactatcaatgcttcagagtttaacagacatgtctctaaatgataatcatctcgacgggaaactgccagatgcttttggttcccttactggccttgtaaattttgatatttcatccaataacttcagtggttcattaccaccttctctgggaagcctgtcatcattgactacattgcacatgcaagacaaccaactatccggaacccttgatgtcttgcaggatctccccctcaaagatttaaatatagagaataatttgttttctggaccggttcctccaaagttgctgaatgtgccaaacttcaaaaaggatgggaacccatttaataccagcatagctccttctgcatcaccctcttcaacacctacaggctctacaccaacacaaacaccatcgtcaccttcatcttctggaactccttcgccatctagttcgccctctaattcttctggtggatctactgctcgagacagcagctctccatcatctaggaaacataagtcttcaaccctcaggattgttggatatgttcttctagctattgtcctgtttatagttacagtgctgctggtaatattttgcctgtccaagtaccaagagagacagtcaagacgtgattatacaacaagtcaggtggggagggttcatcagagggttgaagagccgaaagttaagcaagcttcagtgcagtcaaggaatgatgccaaaaaaggatcaacagaggttcctgaacggaggcaggttcgtgaaataaatttggcggtaccagctgctctcgagaagcctcctg

SEQ ID NO: 60502 - DNA, 689 bp, Oryza sativa
  unsure (1)..(689): unsure at all n locations
  Clone ID: PAT_MRT4530_62022C.1
gtcgtcactctcactctcctctctctcctctctctctctctctcactctctctctctctctcctctggagactgcagttttacagctagattctactagaagcccaccaaaagcacaagcctctgcggcggcggcggcggcggcgtgctccgggaagcgagccccgtggtggcggcggtggtgcggagcacggcacggcatctctctctcgcgagcgcgcgagcgagcgaacgctagatctgcgaacgcggggtttggttccttcttcttccgcgatcgcttcgggttgatctggctgatgctgcttcggcggaggccgcgctgattaattgctggaggggagagagagagagagagtttgcgtcgatgcggatggcagcgggagggaggtgctgcttccggagaggggctcccgcggcggtgctcgtgctgccgctgctgctgctgatcgccgcggcgcanttgccccggcggcgctacgcggccaccgtcgccnccgatgttgctgctataaatggactgtatgttgcacttggatcaccggctcttcctaaatggacttcgaatggtngtgacccctgtggtgatggttggcagggcgttaattttcaatgctgcaaattttgaaggcangtaggcagcctggggaacttaattcaataaccactataaatttagcacacaatatt

SEQ ID NO: 60503 - DNA, 339 bp, Oryza sativa
  Clone ID: PAT_MRT4530_62023C.1
atggctagggcaacaacgagtgaggcggcagctacaattgcagcagtgggagagctagtcagatccgccagcggcaatgacaggagggacagatacggcaggctctcctcctatgcggatcccgccgcctcccccaccctcacacatggatctagcaggccgggctctcctccacgcggatcctaccacctctccctcccctccctcatgcatagattcaatggtggcggcaatgggaggggcagatccggcatggctctccccctctggtttggatcccaccgtctccccctccctcatgcatggaacgtctcccacctccctcgcatatggatctag

SEQ ID NO: 60504 - DNA, 357 bp, Oryza sativa
  Clone ID: PAT_MRT4530_62024C.1
atggagaactccaaacgctacgggataattgaccctattttaaagcctaacgcaaccagcggcggcggcagcacggggagggaggagacggtgatgcgtgaagggaggcggcagcgacgcctgcttgcaaagagagggcgcagtggtggcgtcggcgtgtggacgaatgcagcggtggaggcatgtcaagggagggcgcggtggtggcgccggtgcgcggaacccaaggagcagcgatgtggctggcgcgcggagggagtgttggggcgccggcatgtggagggaggacggggcgtgcagaaggaggcggtggggcgccgatgcgtggagggagggggcggcgacgcgccggcgtga

SEQ ID NO: 60505 - DNA, 1909 bp, Oryza sativa
  Clone ID: PAT_MRT4530_62025C.1
gcgcccaaccccgcgcgcgctctcccctctcccctcccaccaaccccaccccatcctcccgacctccacgccgccggcaatggcggcgaccatggcgtccaacgccgcggctgcggcggcggtgtccctggaccaggccgtggcggcgtcggcggcgttctcgtcgcggaagcagctgcggctgcccgccgcggcgcgcggggggatgcgggtgcgggtgcgggcgcgggggcggcgggaggcggtggtggtggcgtccgcgtcgtcgtcgtcggtggcagcgccggcggcgaaggcggaggagatcgtgctccagcccatcagggagatctccggggcggttcagctgccagggtccaagtcgctctccaacaggatcctcctcctctccgccctctccgagggcacaacagtggtggacaacttgctgaacagtgaggatgttcactacatgcttgaggccctgaaagccctcgggctctctgtggaagcagataaagttgcaaaaagagctgtagtcgttggctgtggtggcaagtttcctgttgagaaggatgcgaaagaggaagtgcaactcttcttggggaacgctggaactgcaatgcgaccattgacagcagccgtgactgctgctggtggaaatgcaacttatgtgcttgatggagtgccacgaatgagggagagaccgattggtgacttggttgtcgggttgaaacaacttggtgcggatgtcgactgtttccttggcactgaatgcccacctgttcgtgtcaagggaattggaggacttcctggtggcaaggttaagctctctggttccatcagcagtcagtacttgagtgccttgctgatggctgctcctttggcccttggggatgtggagatcgaaatcattgacaaactaatctccattccttacgttgaaatgacattgagattgatggagcgttttggtgtgaaggcagagcattctgatagttgggacagattctatattaagggagggcagaagtacaaatctcctggaaatgcctatgttgaaggtgatgcctcaagcgcgagctatttcttggctggtgctgcaatcactggaggcactgtgacagttcaaggttgtggtacgaccagtttgcagggtgatgtcaaatttgctgaggtacttgagatgatgggagcaaaggttacatggactgacaccagtgtaaccgtaactggtccaccacgtgagccttatgggaagaaacacctgaaagctgttgatgtcaacatgaacaaaatgcctgatgttgccatgacccttgccgttgttgcactcttcgctgatggtccaactgctatcagagatgtggcttcctggagagtaaaggaaaccgaaaggatggttgcaattcggaccgagctaacaaagctgggagcatcggttgaagaaggtcctgactactgcatcatcaccccaccggagaagctgaacatcacggcaatcgacacctacgatgatcacaggatggccatggccttctccctcgctgcctgcgccgacgtgcccgtgacgatcagggaccctggttgcacccgcaagaccttccccaactacttcgacgttctaagcactttcgtcaggaactgaactgagcttttaaaagagtgaggtctaggttctgttgtctgtctgtccatcatccatgtgttgactgttgagggaactcgtttcttcttttcttcacgagatgagtttttgtgtgcctgtaatactagtttgtagcaaaggctgcgttacataaggtgatgagaattgaggtaaaatgagatctgtacactaaattcattcagactgttttggcataaagaataatttggccttctgcgatttcagaagctataaaaaaaaaaatcaaaaaaaaaaaaaaaa

SEQ ID NO: 60506 - DNA, 3577 bp, Oryza sativa
  Clone ID: PAT_MRT4530_62026C.1
cggacgcgtgggccgcttcgaaacccccgacgcgaaggaagcgagacgaaaccctcgcgcgagccgcctccgccaccgccgcctccttccgaccagccgccgccgccgccgccgcgtcgccgaatccgggcgggggctaggcgcgggctccccgctccccgccgatcgaatccttcgagggagcaatggccggcgtggtgtggatgaggacgtgaggtgggagcgatggtggggatggaagggaagggggatgcatcggtgacaccagtgaggactagtgaccggctgcgtaagcggcccaagtacttcggtcgcaattatatgtactacaatccagccatacgcaagaagatgaagtctaagaagagagcggctgcatcacagattgccaagaagctgcttcgcaagtcagctgccagggcaccgcctgctgatagtgcacttgagataattgagagggttgatagagtgatattggatttgcttggtattattgttagtgtttggtcaaatctacgtcgttcaacacgaaagcgaagaatgtctgtaaatctggaggactatgacaccgatagttctagtatggaagatgatgatcttatgaggcccagatatcgatcttcaaagaataaagtggatgacgaagtgtcagctaggccaaagcgcaagaagctgtccaactctagctccattcctcgccgtgagggtttacggcctagaagatctatccgaggacaaagacttcatccataccaagaatctgaggatgaccaggaaagctctgaagaacagcctgcacaagataggagggaaaatggtaatgatatcgaagaggatggcaatgaggaggaagttgatggaggtgatgaagctgaagcggatggagatgatgaagatggtgaggaagaacaagaagggaggaggagatatgatctcagggatcgttcagaagttcgtagaccctccccacggaaggaagggaagcacagaacacaatcaccccgtagagtactagtacatggaattggtccaaagaacagcaaatatttgaaaaagggtggttcacgcatgcataagcgccctcgattctcattgccagatgattcagatgattctcttcttgtggatgagccagatgaaggtccatccatgccatggatgcgtggtgggagaggaggtatgccgtggtttttaggtggattggatatgcattgtccaggagcatggggtctgaatgttggagcatccggttggggtcatcagggtgacaacacagtgagtacttcttcacttatgccagggatccaaactgctggaccaagttccaagggaggagctgatattcagcctctccaggttgacgggagtgtgagttttaatgatataggggggctgtccgattacattgatgcattgaaggaaatggttttcttccctttgctttatccagatttttttgcaaactatcacattactcctcctaggggtgttcttctctgtggccctcctggtacagggaagacattgattgctcgtgccttagcgtgtgctgcctctaaagctggtcagaaggttagcttttatatgagaaaaggagctgatgttcttagtaagtgggttggagaggctgaaaggcagctcaagctactgtttgaggaagctcagaagaatcagccatcaatcatattttttgacgaaatagatggtttggcacctgtgaggtctagcaagcaagagcagattcacaattcaattgtttctacattgcttgctttgatggatggtctggattcacgtggacaagttgttttgattggagcaacaaaccgaattgatgccattgatggagcattgcgtaggcctggccgatttgatcgtgagttcttttttcctctacctggttatgaggcaagggctgaaatactggacattcatacacggaaatggaaggaccctccaccaaaggaattaaagacggagcttgctgcaagctgtgtggggtattgtggagctgatttgaaagccttatgtacagaagctgctattcgagcatttagggagaagtatcctcaggtctacacgagtgacgataagtttgtcattgatgttgattcagtcagggttgagaagtaccacttcttggaagctatgtctacaataactccagctgcacatagggggtcgattgtgcattcaaggccgctgtcaccagttatcgctccttgtctaaaaaggcatcatgaaaaaataatggaaagaattgctgatattttccctttcctatcatcagtagatgttagcaagttctctgccctttcctatggatcatccatccctcttgtttatagacctcgacttttgatgtgcggtggtgtgagtgttggactggatcatgttgggccagctgttttgcacgaacttgagaaattttctgttcactccttggggttgccgtctcttctgtctgatccaagtgcaaagacacctgaagaagctcttgtgcacatttttggggaagctaggagaacaaccccgtcaatactgtacttgcctcagtttcatctttggtgggatacggcacatgaacagcttagggccgtgttgttgactttgttgaatgagctgccatccaaccttccagttttgttgctaggaacctcgtcagtggcctttggtgaccttgaagaagagtgtgcttccatattttcttctcgtaatgtatatgaagtggatcaaccaagtgatgatgatagaatgagatacctgcatgcactgtttgagtcattgctctcatttcaaatggaagagtctaggagtaagtctaaagaccagaagtcttctgttgatcttcccaaagcaccaaaggaagtggatggtcccaaactttcagagctaaaagcgaaggcagaagccgaacaacatgctgttcgacggatgagaatgtgtcttcgagatatttgtaaccgcattctgtacaacaaaaggttcgatgtgtttcactgtccaaattctgtagctctgttctctgactatagatctgtagttcacaatcctatggatatggctactgtcttacagcaggtggactctgggcagtaccttactcgggcctcatttatgaaggacattgatcttatagtctcaaatgcaaagacatataatgggagtgactacaatggatctcgtattgtcagtagagcatgtgaactacgagatgtggtgcaaggaatgttgtcacagatggacccatctttggtgtccttttgtgataaaattgctgaacaggggggaccactacaggttacggatgatggagatagctctattcttcaagcagcgcctgttgctcagctggtatctggtactaggatgagcgcaaggcttcgtaatgtacaaccagaagtaaatctatcacgaagttatgaggcgttgaagcggcaaaagaaaagcaccgaaactgaacaaggcatggttaaagaatcgacaacaagagatgacaagtctcttggtgatgttgatttgtcaaagccaatctccccagaagaagctccaaaagaaccggttcaaatggtgttct

SEQ ID NO: 60507 - DNA, 1175 bp, Oryza sativa
  Clone ID: PAT_MRT4530_62027C.1
ccggccgggctctcctcccccccgctagttcccaaccagcagctgcggcggcgcgagcacacgaagaggaggcggagcagccggagccacctccgccgccgccgccaccatgggtatctcgcgtgactccatgcacaagcgccgggccaccggtgggaagcagaaagcgtggaggaagaagcgaaagtatgagcttggtcgccagccggcaaacaccaagttgtcgagcaacaagacagtgaggagggtccgtgttcgtggaggaaatctgaagtggagggctcttcgcctggatactggtaactattcttggggaagtgaggctgtcactcgcaagacccgtatccttgatgtggtctacaatgcgtcaaacaatgagcttgtgaggacccagacccttgtgaagagtgccattgtgcaagttgatgctgccccattcaagcagtggtatctcactcactatggtgtcgatatcggtaggaagaagaaagctcctgctgctaagaaggatgctgctgagggacaagagggtgaggctgccacggaggaagcaaaaaagagcaaccatgttgtgaggaagcttgaaaagcgtcagcaaactcgcactctggactcgcacattgaagagcaatttggcagcggaaggctcttggcctgcatctcctcccggcctgggcaatgtggcagagctgatgggtacatcctggagggcaaagagcttgagttctacatgaagaagctccagaggaagaagggcaagggtgctgcagcttagagcgttctctcgagtgtgttttacgctggaaggcccgcctattttattcagtggattttgttagtcatgtttgcgtctatgtcgtgcctacagaccctactgaacaccaattttctgaaagaatgatgaatcaactcttagcttggaagaactgattgtgagaattttcacatgctatggttgtattctcgtggtatttaggttccatgtgtactcagctacagcattctgttatgttttatgcccttccaaggttttagtttttcggtctaaaaaaaaaaaaaaaaataaaattagagtctacgccttgggttgcccgtttagtgttgtgtatggctatggcgcctaaacccgtatcaaattgtaatttatgatggaagtgcaggtataggagagaggg

SEQ ID NO: 60508 - DNA, 186 bp, Oryza sativa
  Clone ID: PAT_MRT4530_62028C.1
atgatgacagcagtgacagtacagaagtacgccggtgactggatggctgttagatctcgtcacacaaaccagcttccctcgtcgcatggtgcaatcgtggtcaggaagctgtcgagcagagagaaagcgctagccgcgggcacaaggagccagatcgttagatcgaagacgaaccaacgggcttga

SEQ ID NO: 60509 - DNA, 213 bp, Oryza sativa
  Clone ID: PAT_MRT4530_62029C.1
tccacgcgtccagccacgcgtccgagaccgtctactctagtctcgtcttcccgctagggttcaggccatggctcacggccgcgccgcccgcgtacgctcgcccaagtcgtcgtcggcgtcgtccgcgggggcggctgccgaacggaagcggaagcgcgccgccggcgccaagaccgtttccctcaagaaccagatccgctccaccgagcgcct

SEQ ID NO: 60510 - DNA, 2283 bp, Oryza sativa
  Clone ID: PAT_MRT4530_6202C.1
atggccatggatggcatggagaaggtggcgtggtgcgcttgcttcctcttgctggctctcatggtggtcaggttgacggcgaagcggcgtggcgacaatggcgcggagaggctgccgcctgggccgtggcggctgccgctcgtcggcaacctccaccaggtcatggcgcgcggcccgctcgtgcaccgcaccatggccgacctggcgcgccggctcgacgcgccgctcatgtcgctcaggctcggcgaggtccccgtcgttgtcgcctcgtccgccgacgccgccagggagatcatgaggacgcacgacgtcgcgttcgcaacgcggccgtggaacccgaccacgcggcggctgcggtgcgacggcgagggcgtggtgttcgcgacgtacggcgcgctgtggcgccagctccgcaagctgtgcgtcgtcgagctgctcggcgcgcggcgcgtccggtcgttccgccgcgtccgcgaggaggaggcgcgccgcctcgtcgccgccgtcgccgcgtccccgcgcggcgaggccgtgaacgtcagcgagcggatcacggcggtgatcacggacgcgacgatgcgggccatgatcggggacaggttcgggcggcgcgacgagttcctggagctgctcgccgacatcgtcaagatcggctccgggttcagcctcgacgacctgttcccgtcgtggcgtctcgccggcgccatcggcggcatggcgcgccgcgccgaggcgaaccaccggaggacctacgagctgatggacagcgtgttccagcagcacgaacagcggagggttcacgttgctgcgccggctgacggcgccatggacgacgcggaggaggacctcgttgacgtgctcttcaggatacagaaagatggtggcctcgaggtgcctctcaccattggcaacatcaaagcaatcatcctggacctcttcaatgcagggagtgagacatcagcaaatacgctccagtgggttatgtcagagctaatgaggaacccaaaagtgatgagaaaggcacaagcagagttaaggaacaacctacaagggaagacaacggtaaccgaagacgatctcacaaatctaaagtacctgaagcttgtcatcaaggagacgcttagggaccccaaatattgggacatggccgagatgtttaagccagaacgctttgacaatagcatgattgacttcaaaggtacagacttcgagttcgtgccatttggggctggaagaaggatctgtcctggcatagcatttgcacagtccaatatggagcttgtgcttgctacactcctatactactttgactgggagcttcctagtggcgtcgccttgacgttgccgccgtagccagtcagcccacgagccaccgccgccgagaagcccacgcatctccgccgcctcccaagccgctgcgcaagcgccgccgcacaggccgccgccgtcgcccaggctgcctcctgccgacgcccccgcacgcgagtcgcctgccgacgccgccgccgcgtgccgcccgtcgcggccaccgcaacaccgcccgcagccgccgccaccgcctgccgccgccgatgcgccgcggcctgctgcccccgtatgctgccaacgcagacgccgccacaaccggttgtggccgtcgtcggaggatggggaagaagatgggccgccgccacctgctggccccgccgccgcgccgcccgtcctcgtcccccaacagccgctccccgccgctgccgcagccccccgccgccagcctccggccgcgcgagtagctctgccaactccactccaaaaaaaggtgaatctgaatcgtttggcacagctcccgctccagcaagtgcccataagccggtcataaatgtgatccacgtgaaacaacctacagatgccacagatctcaccaccgcacgctccattgaatcatttgcaaggtcgcaattaatcatcgcagatgcatctgaagctgagaggcagcagctagctagcagctgggacctgcagttttgtccatatacatcatttcgatctcgcatgctgtttattcggtcaaacctgtcaaaattttgcctaaacatcgcgacaatgaagccaatcaaatcgagcaatagtcgccttgattggctcttctgtcaatggacagatggagagagagagagagagagagagagagtttcagtacgtgacagatgcagatcgaattcgatcactttcatggaaaaagtttttgctgtgaatcaaacagatcatgcaggaaccaaaggatctggaaagaaaaaggatatt

SEQ ID NO: 60511 - DNA, 174 bp, Oryza sativa
  Clone ID: PAT_MRT4530_62030C.1
ccggtcgaccacgcgtccgggaattgcacgtctgaagattggaattagcgctttggcagatgccaagaagtggcaggggagttgtgcccattttgatttgtaataactggagagaatatgaagacaattggaagggctatgaaagagaatgacgtgttatctgatgaggttccg

SEQ ID NO: 60512 - DNA, 138 bp, Oryza sativa
  Clone ID: PAT_MRT4530_62031C.1
atggccgacgaagagctggcgagggctacggcgtgggcgggtgtgggcaacgcggcgaccctcccctaccccaatctggcggccttcaccctcccccacccagatctgctagccgcctccctcccccgccccgaatag

SEQ ID NO: 60513 - DNA, 144 bp, Oryza sativa
  Clone ID: PAT_MRT4530_62032C.1
atgggcagcattgcactaagggctaccgcgccgagcatgtcgtctggaggccatgtcgctgacccgagtccggaaggttttattgctggcctctttggtgattcaagctctgcatatcgcctgacggtcagtgcattgaaatag

SEQ ID NO: 60514 - DNA, 277 bp, Oryza sativa
  Clone ID: PAT_MRT4530_62033C.1
gggaaaaaacaatttttttgcttacgggggggccaaccgcatgggataatcattttcccgggcgggccccttatcctgggcggtcaaattataccgcccacatggaacaaaagaaaaccaaaaattaaaaaaaaaccgaaaattgggggctctggacgcaaccggtccaccgcaactttgtcgggatctggggcggggtcccgtttgtttgtcgccctttccgggtcgctgccttgccaacgcccggtttgggtcccccttgttccctgttgttgcc

SEQ ID NO: 60515 - DNA, 728 bp, Oryza sativa
  Clone ID: PAT_MRT4530_62034C.1
actccatggctccgaatctccttccggtgccctacgtctcaggggattacacacggtggcctccacccttgccgacaactactgggtaagggacatccgtggcgccctcattgtccttgtcatctcccaattcttgatggtctaggatgtgggtgcttcctacctagctctctccgggaactggagactgtcttgtatggtgttggacgggcaaccagtgctactcagcccgctcgccctatcatgctttattgctgggcaactcccctttccttgcaccgaactgctgtggcaggctgagggccctgccaagtgcaagttgttactttggcttgcattccagcaacgctgctggatggcagaccttctgcagaagcgtggcattgacggccactcggcctgccccttttgcgcgaagaaacttgaaacgccgaatcacatccttctcgattgtgtgttcgctcaccaagtctagctggcctgggctcgctccttcccgtggcgacactcttcagggctggtggtcatatgctagggtctacttgcctgagcaccttcacaagggcttcgactttctgttcctatcctgacagctttggaaggagtggaacgtcagggtttttgattcttccctttcgctggtctaggtggtgttggggtccatcctccaagaggaccatctctggtctttagctagtgccgctttgtttggggatttgttgggagga

SEQ ID NO: 60516 - DNA, 1296 bp, Oryza sativa
  Clone ID: PAT_MRT4530_62035C.1
atggcggcgccggagaaggtgttcgtggcgctgccggcggaggcgaagtccggcaggtcgacgctgtcgtgggctctcggccatttccgggccacggccatcgtcgtcacgcatgttcatgtgccgccgcagatgatccccgtcatgggagtcaagttccatgccagtaaactgaatccggagcaagtgagcttgttcagaatggctgagcgtgacaaggtggacaagcaattagatcactacgtcaatcaatgcctgaggatgaagatgaaatgtgagaagctagtcattgagaacgaaaatgttgtagacggtcttgttgaactaatcaacttgcatggagtgaccaagctagtaatttcagctgccccagacaggaattactcaagaaaaatggacaaacctgcatccaggacagcaacagaaattatgcagagagctgacccatcatgcaagatttggtttgtctgcaaagaacggttaatctgtacaagtggcgtggaagtagaaattgcacctggacatacgcctttcattcctgatactggtcacgatgctctgcagttgacacttcaccaggaacaggatgacaacaatgaatcggaactgggtttttacgatgagatcaaagaagcatgcaaagcagctgacaacttaatgatgagagctttaagagaatcttacagacggcagaaagcagacgaagaagtagtttcatctcttcagaaagccaaagaatacgaggagctgtacttggaggaggttaaaaagaggaaagaactggaagaagcacttctgagagcaagcgaagaaattgcacagttaaaacaagaaagagatctacccaagaatgatcagaacacaaccatggaggaacagaaagaagtgatttcagacaatttgatcttagaggcctccgggcaaataattaagccgctgcaagagtatcttgatcatgatgagaactgtgtcagagaaccggagacgttgctcatacaaaggaagctagctgcatcattttctccatcatcagtgatgcagtcgcctttcgatgaagactgctgcatcccttcatacttcatctgcccaatccttcaggaggttatgagggagccttgcattgcatcagacggattcacctacgaaaccgatgcgatcagatcctggcttgatggaggacggagggtatctcccattacaggacagccgattgtgcaccagcagctaattccaaacctttctctccgttctgtcatccaagatcatgcaaggaggaatcagtattcattttcctga

SEQ ID NO: 60517 - DNA, 291 bp, Oryza sativa
  Clone ID: PAT_MRT4530_62036C.1
atggccggcaacaagtggatctgctacagcatcggtgatgaagaccttcatggccggcggcaggggtgcgccgagcacgtcgtcgtccacagccggttgaggaggctgtggaggcatgggtaccaggtgtcaagtattagccggtaccagggtaccaggtactggtacctaccgataccagggtacaggtaccagagggaaactaaacatggcctcaaggaggtggatctagcgtggatgctgggggaactcaagtccccttatcctactgagggggtggatctagcgtag

SEQ ID NO: 60518 - DNA, 1711 bp, Oryza sativa
  Clone ID: PAT_MRT4530_62037C.1
atggttcaggtcatcagtgatgagctcagactatcccctcttacgcgtaggccactgcacacggggcaaaggaggacatatccagtggtgcccaaccacctggactcctgatctaccgccaagtagctcagggcgacggccaggcggccctacgtgaccttggtcccacgggtcttcctggttggctcgtgggtccaacggctggccgccagtgggactacaaataccaccgcacaccgctgccgggcggggaaccttccagaagctccagattccaaaccagcaggagtcgcctcgcctcctccttcatcctcctcgtcgtcgccgcgggggtcgcctgagatcacattaacaatggtgaaggctgttgttgtgcttggtagcagtgagattgttaagggcactatccactttgtccaagagggagatggtcccaccactgtgactggaagtgtctctggcctcaagcctggtctccatgggttccatattcatgcacttggtgacaccaccaatggttgcatgtcaactgggccacactacaatcctgccggaaaggagcatggagcaccagaagatgagacccgccatgctggtgatcttggaaatgtcaccgctggagaagatggtgttgctaatatccatgttgttgacagtcagattccacttactggaccaaattcaatcattggcagagccgtcgttgtgcatgccgatcctgatgatcttggaaagggtgggcacgagctgagcaagaccaccggaaacgctggtggccgtgttgcttgcgggatcatcggacttcaaggctgaaacctggaggtgtgaactcaccttccatctcccagcaccagaagcctgaaactctacgagctcttagccgtttcgtctttacctgagtggctactctagattctacaataagcacctgatctctgcgcatggtttttggtgtaccattctgtcgcccgcatcgttggcgcccaatgaactatgtgttttgtgttaaaccttaagctgaagggtaccatttgtagactcgatgttgctctcttcctcggaatgtcgttacatctgttcgctcgtttcgtccgtaaaaaaaaaaaaaaaaaacgatcgctcgtttcatccctctgcttttgcgagtaaacggaacgcaagatattcaaatgtggtgttcaagtactacaacagacttggacactacactgttccggaggagatggatgaagtctgcaaatggctcaccgcgaacttgggggtcagcagctcatcgtcggcttgattgaagaattgagctgtccgaataatacctgtggttgttccaaacaaaattgagaggtaaatggttgaatgaatagcgaagaacttggggcttgggtatacggccatggggtagcctggcgtgtcatcatgcggacatgcctcacggcatcttaactagaactcttataatttccacagtttgggtctttgttttgtttgtttcccttccctcttaaagcaggggacggcatcgtggtgtattatttgttttggttagcacggatgtttttgtttggtacgccgtgtgttcttccgattgggtcagttgtatgtttcctttatgagttatgagatgcattgggattttgggttcaaaaaaaaataaaaaaatgcatatatttctcatcaaaagtcaatcaccccatatacgtgttcggttgtggtg

SEQ ID NO: 60519 - DNA, 480 bp, Oryza sativa
  unsure (1)..(480): unsure at all n locations
  Clone ID: PAT_MRT4530_62038C.1
ctccagattccaaaccagcaggagtcgcctcgcctcctccttcatcctcctcgtcgtcgccgcgggggtcgcctgaggtaggaatcccaacaaccccccccccccccccccacccaagcaagcttctagggttttcgaccgcgcctcgcttcctccggtttcgtgggaggcgatcacattaacaatggtgaaggctgttgttgtgcttggtagcagtgagattgttaagggcactatccactttgtccaagagggagatggtcccaccactgtgactggaagtgtctctggcctcaagcctggtctccatgggttccatattcatgcacttggtgacaccaccaatggttgcatgtcactggactgggctacactaaacaatcctgccggaatgggagcagggagcaccagaagatgagacccgcatgctggatcttggaaatgtcaccggtggagcatgctggtgatctnggaaatgtc

SEQ ID NO: 60520 - DNA, 609 bp, Oryza sativa
  Clone ID: PAT_MRT4530_62039C.1
atgttcgatttcaacagcgaagactttgatgagcttgctcttgatggaagcaattacttggaacgggctattgaggctcaaatccatttaggcatgaaaggtctctgtacggcacttatctctaattcagagtgtaccgagacccaaaagagggaggcattggcttttctttggcgccatttaaacaaaggatttcggactgattatcgcgctgaaagagatccatttgtcttatggcaatccctgaaggatcgatttgaagaagagcagaaggccagggtcctatatcaagctcagaatgactggttgaacttgcgtttccatgactacaagcttgtgtctgaatatgactcagctctccatctcataatctctcgattcaaaatttgtggtagagaaatcacgcaggaggagttaattgagaagacattatctacatttcatccaattaaccttcatctacatcggcaatacagggctgcaagatatgagaagtactatgacctgctatggacattaagagaggctgaagctcacaagctgttgctcatgaaagctcaacaaaggatgctgacagatgaggtcattgaggacaccaaacgtggataa

SEQ ID NO: 60521 - DNA, 468 bp, Oryza sativa
  Clone ID: PAT_MRT4530_6203C.1
gctgcaggaatcggcacgaggattttatgtgcagaacggtatgtaggatatactttggacagtcttatgttgggaatattgatggatatgtcatcaaagattctccataaacctggcaatctaggcatatatcatatcaaacctttcaatttgtccactttaaaggtattgttattagtccatttgaatctccatgtttattagcttaattccttcatctctatgtccattatgagatagcaagcttattccaagtctattcttccagtcctaggcttattgattacatttttaagatgttgcatttagtgcccagaaatctcagctgctatcaggtgcttatttctttatggtaaaaggtttacatctttatgtgacttcatactcaaagcagtccaagatgcttatagctgtcaagtttgcgccaaaggcatacttgcatttacacattacaattgtccagatcaa

SEQ ID NO: 60522 - DNA, 367 bp, Oryza sativa
  Clone ID: PAT_MRT4530_62040C.1
cataagtgtgtgtgtctcgcctgcttgtggctgcctgtgcgttcatctcgtgatgtctcctcctgctgctggtatcatggggatgtggagggcggccgccgacgcatcttgtaggccgcgcgctcggatccaggtgtccgcacacatcacctggcagcatgaagatcgggggtgtgttctacaacggcggcgagcacgcgcacgagaatccaagcttcgacggctgggtggagggcgctatcagatcacgaaagggatcgagtacgaggggcatgactacattgtgaacgaccacaaggacgtgatgaacagctagctggagaagcacattgaggatatgcatgcatcgagcaccacgatttttcta

SEQ ID NO: 60523 - DNA, 216 bp, Oryza sativa
  Clone ID: PAT_MRT4530_62041C.1
ttcctgccattaaaatctcatgctctgtaaactgcatatcatgaaatttcagcaaccccgtgttgaattgaagacggggcaccactgctcctctcgccctcccctgctacacttcccgtttccctgggaggcggaggaggaggggagagacacacatactctagctcccctgtataccatcactcagccgcatagctcgcttcgttcattgggctc

SEQ ID NO: 60524 - DNA, 911 bp, Oryza sativa
  Clone ID: PAT_MRT4530_62042C.1
ctagtccttcttcgtcgtcacacgatcatccttgtcctcggagttgatgtggcctaggatcacctccaaagcggcaagcacctttttgaccaccttcttcatgatgcatttgttccaatgtgcccctgctcggatgagggcttcaacctctgatatagcacgaaggtcatatgaggttgcctctccgttcaccgagattgtcctgccggtctgaccgcctggttgccgtcggtctgaccaagatcggatctccagtctgaccgccgagatcagctcctgtcgcctgttgccgacaccggtctgaccacagattatccgccagtctgaccgccgatgtgtagctggttagacgctccccctctatttatacccgaggtaggcagactaaagccacgaaccaaactcttactagaagtcctaatccccataggaaaccctctagtacaagaaacaaactttacataaccaatcgtaccaaatttggactccttccaaattcgactccgcatcccatacgcacacaatacctccatcgtatgccatatggaatattcaccaaccacgtgcattgagctctagccggcaaccactgcccgatctgaccggtcacataaaataacaacacctgtaatttacctgtaaatccaatcatctccaaaaccacttcatgaataacttccaaatatcaaaaccaataatctctgatgccatttgtccatcatagaaaaataataaaaaacacctttgattttacataaaatatgattatatatctcaaaatcaatattaaaattaagttttaaaatttagattttagctacgactgttaagccaaacggcaaacgatggaagccctagtaacactttttgggataaatttcctttttctcactaatataattcaaaccaac

SEQ ID NO: 60525 - DNA, 699 bp, Oryza sativa
  Clone ID: PAT_MRT4530_62043C.1
ttttttttttttttttttttacccacacaaatgagtacatttcagaggatttttttttttttttttttttttacataaacatggatttttgaatagctaacattacaaaccccatgtacaaacatggtacaacgaaacttacagctctaatacaatgttttcaactactactaatttacaaggtggccacaattaatatccaattgaacggtgtccaaaacaactggacacagttacaaattgcaatgctacacacacaacttcatgctcgatcacacggagcttaatcatgctcctctctcgagcaatcatcaatcagatcacatattattattattctttgagagccaatctacacatgctcccaagtttattcttaatttattattaattgattcaataataaactcgccattgacgagctcaacatcccaatcattgtggcaagcttcgccgccggccgggaaagcaagcaatgaatcagtcgtcgtctccgccgccggggcatccggaccccgcggcgaccttcctcccctgcggcggcggcggtggcgcggccggggacgccggtggcgagtcgaggcagcggcggagcagcctcgagacggcggcgacgaggtcgtcctccgcccggggcccccggcgcgggcggggaccggcgaagcaagtgcggtcgagcgccttccacgcgctgattgt

SEQ ID NO: 60526 - DNA, 654 bp, Oryza sativa
  Clone ID: PAT_MRT4530_62044C.1
atgactcacgagttttcacagtcacagctgcagggctatcgggttgtagtccatcgcattgggtgctacggccgcgcagcgctacgagtaaagaagaaagagcaaatcttttcttgttgtcttcaagaaatatatccagtcgccggctcgccgccggccgacggatccgccggaagggcaccatggcaacagccgagcaacaatttgtcatcgcctactattccgtaccggcccgctacagaaacgggccgtgccgaatggcggcccaagcacggcacggcccacgagctcccgtgcccgtgcagtgctgggctgggccgttggggccgtatcctggcccattttgccaccaggatccctagtccctgtggtcggtggtgtgggagtccgacgctctcccagctctccgcgcccctcgccgccggcggccgtttgccgtcgcggatgagatcgccatcggtttccctctccaaatcaagccccaatgccgccttattcttcatgcctaacgcagcccagctcagctacgcccggcacgcaggccactacgattcctcgttgacgacgccctcccttccccttcacgcgtcggcggcccagatccgggcgagtcctcatcgtggcgggcaaggggattcaaaggaaaatttgtaa

SEQ ID NO: 60527 - DNA, 438 bp, Oryza sativa
  Clone ID: PAT_MRT4530_62045C.1
gtgatcttgaatttagtgacaggcctgtttcattctagcatcacacttagatttgttgtgtttgatattttgcatgctttatgtggttatgttgaactagcatccaagctcttatagttgtatatgtcattagaatatcatgttaagaggaaaacttttctggtacagaatatctcttcaagaaggatgttcacttagtaaaatacactgctttgaaatttttgtggtagaaaatagggcaaataccctttgcaactaaaccataagcttcgtactggtattgttatggaaaagattgaggcaatgttttagcagtgaatttgaaatgttgctgaggctgagcaacgttttgcacaatagcaatttgactctggtacccaatcattaaacgggaaggtgtgcaggcacataagatttatgtagtgtcagcactctttt

SEQ ID NO: 60528 - DNA, 192 bp, Oryza sativa
  Clone ID: PAT_MRT4530_62046C.1
atgggtcaacctcgacgaaccggatttgtgcatgcgtgtcgtcttggcttacacaccacgccacgtcggatgggccccacactcagagccaagcctacctacacacacctacccctccgacggacggcctcacccaatcacgacccaggccaccccgggcccaccgtcacagcgaccgttatcgatcagcag

SEQ ID NO: 60529 - DNA, 1819 bp, Oryza sativa
  Clone ID: PAT_MRT4530_62047C.1
ccggccgggggaaagggattttcggatacaccggaaaggcttctgaccctcctgacctccccgagccccaacacgacgacacggagcacaaacctcccgcgcctcaccacttcccctcgcctccgccgcccccacttggccacatctcctccggtctcggtccccgcggcggcggcggcggaggagctcgcccatgttgttccgcggacttctcgcttgggctgtcgggtagggaaccctgagaaaacgcataccggcggtcgcggagagcagagcaaaggcgggggatggggtacctgccgtcgctgggcgggaaggcggcgcacctggtgtccgacctcgccaccgtcatcctcaaccccgtctccgagcgggagagccagcgccacccctcccacctccccgaggccactgaagtgcaagaaaatatctatgaggatgacgatgatgataattcagtcaagaattctgagattcctaatggccctgacacatcttccttcagagcattcctgatgtcatttatgtcgtcatcaaactccagcagtgattctatagaaatcatacctgagcacaatatgaatatggaatatccaactttaacacctgttgggaagggaagcaatggaaggaagggcctgtttagcagagggaagcattccattggaaaaatcattaacaaagcaggcagaattggtggtttcagacaaaaacccagctacagcattgatggtgaaactgttcaaacagaatatgatgcacctgggttggaacttaagggatcaaaggaatctgcttcacatgataagttaccagccatgtctgaaccatcaatgcttttgtctgaaacaatgcgaactgttctttatacatctcttcctgtacttgtccaaggaaggaactggatgttggtatacagtacctggagacatggaatatctttatctactctgtatagaaggagcatgctttgtgcaggctactcacttttgatagttggggatcgaaaaggagcggttttcggtgggttggttgaggccccattgcaaccattaataaaaaagaagtatcaggggaccaacaactgctttgtgttcaccaatatagctggccgtcctgttatatatcgtccaacaggtgctaataactatttcacattttgctccaccgattatttggcaatgggaggtggtggtcactttgcactttatcttgatggagaccttctgaatggttcaagttccacttcagagacatttaacaacccgtgcttatcacgttcccgggagtttgaagtcaaagatgtcgagctatggggcttcgtcaatgcttccaagtatgatgagatgctcactatctgccgtactgagaagcaagggatctggaatctgtgactgtctgtttacaattgatctgagctgtttagtgcttgtacctgatgccaacccatcctggtggtttgtacagttttgtagttctgtctgttaagtatagtatatataggccttgttggagttctgtctgtatgtatagtaaaatgccccttgtaaaacaagttcatcaacggagttatggagcttaaaatgagtaactctgaaacatgaatcgagcaactgccaaagctgatccttgtaaatattgtaccgtaccatagcttcctgaagaaaatgcagtggaattcaggcagtggttttgtcatgtttgttggagtaataacaagtgaaaaaattcaattctccaataataaaataaagaaaaagaagggggggtggttataaggttttaaggctccccccgggtgcatgcgaagtgataggtt

SEQ ID NO: 60530 - DNA, 237 bp, Oryza sativa
  Clone ID: PAT_MRT4530_62048C.1
ctcgacatcaccaaggtcgtctcccgcgtgctctacttccgctacatgctcatcgggtccggggccttttaggggcggaccggcacaatcggctactacgcctgcttctggttcaccaggctcagctactcctccggcaagagcgactagtgcttaattacatttgcacttgcatgaatgcagtgtcatttaacgtgcttgcttgagatactactttcatgtataacagttaattcg

SEQ ID NO: 60531 - DNA, 225 bp, Oryza sativa
  Clone ID: PAT_MRT4530_62049C.1
atggcgatggcgctgtggcgcaagaggccgccgcactaccccttgcgactctatcggccttggaggtggaggggaggaggcggcatggtgaatcgtggctggcgtggaggagggtgtcggaggccgacaatgggcgacgcggcggcggcagtgacgtggaagaaggggaagcggcggttgcaggggccgcgtgcgcggaggaaagccgccgtctcgatggcgtag

SEQ ID NO: 60532 - DNA, 2453 bp, Oryza sativa
  unsure (1)..(2453): unsure at all n locations
  Clone ID: PAT_MRT4530_6204C.1
ttcccaaccaaacccaaccccgagcacaagcggagcagatgccgccgccgccgccgccgcgcgcgccgcgccgcgccgccgggtagctcagcgcaaaaaagccacagccgcccgcccgcccgatccgntgcagcatggggcgcggcggctcgcgcgcggcgtgcgccgccgcggcgccgccgtggttttttttcccggacgaggtctgggagcacgccttctccttcctccccgccgccgcggacaggggcgccgcggcgggggcgtgcagctcgtggctccgcgccgagcgccggtcgcgccgccgcctcgccgtcgccaactgctacgccgccgcgccgcgggacgccgtcgagcggttcccgtccgtgcgcgccgccgaggtcaagggcaagccccacttcgccgacttcggcctcgtcccccccgcctggggcgccgccgcggcgccgtggatcgccgccgccgccgacgggtggccgctgctcgaggagctcagcttcaagcgcatggtcgtcaccgacgagtgcctcgagatgatcgccgcgtccttcaggaacttccaggtgctccgcctcgtctcctgcgacggcttcagcaccgcgggcctcgccgccattgctgccggttgcagacacctaagagaaactgacctgcagagatggggcgcgtgggctcgcgcgcggcgtgcgccgccgcggcgccgccgtggcactcgctcccggacgaggtctgggagcaaccgttacgtctcccggacgatcgcaggtccaaggtccgacacaccagcctgcgtccagattgtgtaggggccagtatgtgcggtatcggtatgcgggtgttatggaggtatttattttcaatctcgattagtaccttcaaacaccttcctcgcataacatagaattgtttccttccaagtagaaaggctgatggttggatagacttgtcatgatctctactcggctacaaaactgttgcaggtgtagaatgaaaattcacagcctttttcaggtgttaataactgtaggaggagactggatgaattacagaaaactactagatagcatcatgagaaaacttcggtttgttttcttagcgtgtttagcactttgtatgtataaaaatatggcatccatttgtactgtactagtggaaaatttgtatctggagctgagctttgtcacttctacttttttgacctaaattatgaattgttgttgcttcagcctcttcccaaaatcgttcacttctctagtaactctaaacttttcatgcttagagggggaggtcaatatcactgtacttgaacggttagtgaccagatgtcacaacctgaagactcttaagctcaacaatgctatcccccttgacaagcttgctagcctccttcataaggctcctcagctagttgaactcggaactggcaaattctctgctgattaccattccgatctgtttgcaaagctggaggcggcgtttggaggttgtaaaagcttgagaaggctttctggggcttgggatgctgttccagattatctgccagcattctattgtgtatgtgaaggcctcacatcacttaatctgagttatgctactgtgcgaggtcctgagctcatcaaattcattagtagatgcagaaatttgcaaccaattatgggtgatggacctcattgaggatcatggtttaagctgttgtggcatcatcttgcaataaacttcaagagttgcgggtcttcccttctgacctttttggtgcaggattcttgactgaaagaggtcttgttgatgtctctgcaagttgtccaatgttggagtcagtgctctacttctgcagacggatgacaaatgaggcacttattaccattgcaaagaaccgtcccaacttcacttgcttccgcctatgcatccttgagccacacactccagactacatcacacgggagcctcttgatgcaggtttcagcgccattgtggagtcatgcaggggccttaggcgtctctctatctcaggccttctcacagatcttgtgtttaaatccattggggcacatgctgatcgtcttgagatgctttcaatcgccttcgctgggaacagcgacttgggcctgcattacatcctctcaggctgcaagagcctgaagaaactggagatcagggactgcccatttggtgataagccattgctggcgaacgcagcaaagctggagacaatgcgatccctttggatgtcgtcgtgcttgttgaccctgggcgcatgccgacagcttgcacgcaagatgccccgccttagtgtggagatcatgaacgatcctggaaggtcatgccccttggattcgcttccggatgaaacacctgttgagaaactgtacgtctaccggacgatcgcaggtccaaggtgtagaatgaaaattcacagcctttttcaggacatggaaatgcatggactctag

SEQ ID NO: 60533 - DNA, 716 bp, Oryza sativa
  Clone ID: PAT_MRT4530_62050C.1
atggctgcaaataggaagctgctgttctgctttgccatcctcgttgctacggcgatcttgctattgacctgtttctggcctctcgtctgcagcaataggaggacaggcagattcccaaaaaacaggactgcatcacaggtcatcgatggccaaggggaagggcgtgatgggcagcggcgctactgctcgatgggcgtggggatggcgcgatgggcggagcctgggtgatgcgagggtgcgacgatctgggtgccgtcggacccgagatggaggagtcaccgctgggtcctggcgtcgggtcttcaggtgaccgtcggcagcacctgagagacggcgatgaaggcggtcagggaccggcgactgcggcctcctcgctgcccccagtgaccgtcgagccgccacatgcggcctcctcgccgctacagcccccacgccaatgccttcggaccctgcgccacagccagcaacctccacgccgctgcccccacgactgccgcgccgccaccatggaccgccgccgccgatagagccgcctggatcgggtctagacattttccccatttcatctttatctttttcctttttaccgtgaatgctagggtatatttttggactgagggcaatttggtcattcttaaattgtaaacggtgtgaaatcaacggtagattgacgacgatggtatttctgggagaaaaatgcttatacgatggcattt

SEQ ID NO: 60534 - DNA, 2538 bp, Oryza sativa
  Clone ID: PAT_MRT4530_62051C.1
atggctcttccaggccgcctcctcctcctctttctcactgccgcacatgcagccctgcaaacatgcggtggtgaccaaacccctggccccgttgcaaatgtatccagggtctggagcagcaatacctctagagacgtgctcctctgctctgtcccaggcaatggcaacgagaaactgtccttcgctgccggcttctactgctcctccccttgcgacgccatcctcttcgccgtctacatcacctcaggctccggcgatatccctgtggtcgtgtggtctgccaaccgtgaccttgcggcacaccagaacgccaccctgagcttcaccgccagtggtgatttggttcttgcaaatgcagatggcagcgttgtctggtccaccggcacctcagggcagtttgtcattggaatgaccatcaccaactctggcaacctggtgctatttaatgatgcctacatgccggtgtggcagtcgttcgaaaatccaacagattctttgctccctgggcagatgctagcggagggaatgatgttaaggcccaacagctctgccaccaactggactacaagcagacagttatatttcactgttcggtctgatgggctctatgcgtttgccggatctgaccaacctcaaccatactatcggtttgagttttattcgtcatatctggttaaaaatgaaagcatcacacagtatcagtacaaaccaacctttgtgactctggtgaatgggagcctatcaatccctggatctgatccactggagaccaaattgccacctgcacactcacttcagtacttgaggtttgagtcagatgggcatctcaggctatatgaatgggaagagttcaaacaacgctgggtgatagcaaaggacatctttgagttaaactactgtcaatacccaactgtttgtggggagtacggcatctgcttaagtgagggctgctccactgagggcatggactgctcgactacggagtgctcctgtcccaataccacatacttcaagccaattgacaacatgagacctactcttggttgtgcggtggaaactgagatttcctgccaagctatgcaagatcaccaactcgtagcaattcctaatgttacatacttccatctctggggcgatagccgtggtgcaccaatgaccgatgaagagagttgcaagaaagactgcttgagcaactgctcctgtaaagctgccttgtttagtttgtatctcaaccaaactcaggctttgctctatccggatctatctctttctatgtcatatctgaatacgtgttacttgctaccagaagtcctttcactgcaagcatatcttgatccaggctactactcaaaagatccggtaaacgctaggtcaacattgtacgtcaaggtgcagagtacacacctgcttcctccatcaaagaaaaaaaacacttttggttatgcaattggagcaaccgccgctgcactagtgacactcaccattatctcaatggtcatcaggaagaggtgtaatcgacaaagagctgatgaaagcgattttgcagacctgcctggaacaataacgaggttcaccttcaagatgctgaaagcagcaaccaatgatttcagtagcaagcttggggaaggaggatttggttcagtttttctaggaaaattaggcaatgagatggttgcagtaaaactgctggatcgagcaggtcaaggaaagaaggacttcttagcagaagttcagacaattggcaacattcatcacatcaatctggtaaagctgataggtttttgtgtggagagatcacacaggctcctggtttatgagtatatgcctagaggatcactagacaagtggatttattacttgcatagcaatgctccactagattggggcacgcggaagaggataatcaccaatgtcgccaggggtctgtcttatcttcatgacgagtgtaggcagagaattgttcatttggacattaaaccacataacattctcttagatgacagcttcaatgcgaaagttgctgactttggtctatcaaagctgatcgagagggagataagcaaagttgtgacaagaatgaaagggacacctggatacatggcacctgaatggctgacttcacaaatcacagagaaggttgatgtatatagctttggtgttgtggtcatggaaatcatcagtggaagaaagaacattgactactctcagtcagaggagaatgttcagctcattactttactgcaagagaaggcaaagaaaggccagcttgaagatctggttgacaagaatagtgatgaaatgcacttacacaaggaggaagtgattgaggtgatgaagcttgccatgtggtgtttgcagagcgatagcagtagaagaccatccatgtccgtggtggtgaagaccatggaaggagaaagggcggtagatgacaatttgggttataacttctttgatttgagccctgcaatatctgttccagttgagcagctcaacagttcattgcaccctgaagcatcaattttatctgcccctaggtga

SEQ ID NO: 60535 - DNA, 1211 bp, Oryza sativa
  Clone ID: PAT_MRT4530_62052C.1
ctcgcttctcgcttctttgaccggcggcgccgatgctcctccgccgcggcgccgcctcctcctcctcttccatggcctttccagcgccatcgttttacccgtcctccaacagtgcttccctaaagtgtacggtggtggctgcgctcgatggaggggctcaacggcggtttcaacatagccttgaggtcggggaccctggcggcggcgtcggagcctctagcacaggggtttggcagcggcggctgctgctggaggtcccagcgatttaaggtcgctgcggctctcccaacagttttttggaggtcttcgacgtggtgacgacgcatcgagttcgacgggtcactgtcgccgctggcggttaggccaatggcatagaggaggattaggacgagaagaagctgtcctctctgttgcctctcctgtacagcccaacatactactatcatattgtctgtagctagcacatgcagaagatagactggcaggatgaggtggtggtggttcttccccagacccgtcactgctctggttgcatttattaccttttgggttgttgtcctatgaattgagcctaattagttgatattcaacagctggagtttgcttgctggaccttttgcgtcgcttacatggctcctcccattatatctggcttttagtgcttcagagggcaatgaattcttttgaagttttccattgttacctgttttcagtttcagtaaaaaactaagctcttcaataaacttatcattggtagataaggatgtgttaaaaggggcttgcttagtacaactcaaggcgaggctaatactatgccattcagaacacgacgcgtgtgagagccaggggggggcaacggaaaaaggaactacatatgcttgcattgaagtttctttggggaaccaggagatgctttaatctttattgatgtattgtcctatggtttgttggatagtcgatctacaaaattaatcctaacactcccaatttacctacaagaggtattcttggatgggtacaacatgttagtttggttcggttttgtcaatacaaaatcatgaggatttctagatgtgtatattctgtgatattatctataatttgatatatattaaattcatctgattatacatgagtttatatatgctacaccattacgaactgctactatagtctccccgttgtctctttatacacatgtattacatata

SEQ ID NO: 60536 - DNA, 363 bp, Oryza sativa
  Clone ID: PAT_MRT4530_62053C.1
atgaataccaactttattatatatccatgttatattcattatgatgatagcttatctgggagatgcaatggtgtgggcatactaatcatatttacgatgactctatatcatgatgatgatattagagtagtatttggtgatttatgcgtggtgtttagattactggatatctttatttagggttatatgctacggaagcgaggtaggccgttgatggtgacagctcagtacgggtattcctccgcgtgtgtatatagtcctaagttaatttcctggggagggtactcctccatatttagccccggttggatggtcaagacggattgtcgtaaggaactcggtcagcgtgggcaacgactgggc

SEQ ID NO: 60537 - DNA, 464 bp, Oryza sativa
  unsure (1)..(464): unsure at all n locations
  Clone ID: PAT_MRT4530_62054C.1
cggacggncntngcanaggtaganatgcttctcctatccnatatacctagcctagtcgacacatggacgatggcgttcgggttcgtaccgatagacgacctcgacaggaagaatctcagcaggctgaggctggtgtcggtcccggggaccgttctactgaagaggaacctgtacgagtntccgggcaccaatgcggcgggtggtggtggtggtggtggtggtagcaaggagaatctcgcgttcgtcgatcggtcggtggcggtgacggctgcggatgctggacagcagaggccgtttgaggatcgctcgccggtttcttgtgcagtggacagcctcgccgacgagctgcggagtttgaagatcaattcgtcctgtgaaaatcgtcgtcgtcttggcaaaactactgtaaattcagctagtaccttgtatgaaaggcctgttggatgctagggccttaagcgact

SEQ ID NO: 60538 - DNA, 229 bp, Oryza sativa
  Clone ID: PAT_MRT4530_62055C.1
tgaagatgtaggaaaactgactggaccggctactgacattgtgctgatcacccttctgaggtctaagatgctcacactactcagaccggtacatcaagggaacccatacactgtttctgaaaaacctgtatgttacaccgagatactatggatgcgtataaaactgaacatacttctgacatagacagtcaaaagtatatgactcgctagtcatgcaatactgcatttg

SEQ ID NO: 60539 - DNA, 879 bp, Oryza sativa
  Clone ID: PAT_MRT4530_62056C.1
atgacgagcgaattgccggagcaacaagaaacaaagaagagaagaaatggaaaaaagaaaagggggaagaagacgccgacgaacgttggtcgccggccgtaccgacaccgatccgaccagccgtcacgcctccctggctgcatcgccgtctgcgccatgctcgctggcctcgtgacttggcacccgacgcggggctgcatcgtcttcgatctccggcgaagggataagtccaatgttccgtcggcccaggcaattgtatcgtctacatcggcgtcgttcaaggctgcatcagacctaagcagatctcccaggccggtgtgttcgattttttcatcaacacctcgccggcgcctgcacaaggctgccgcgcgccacaccgcaaaggcctccgtgacctgcgtcgcgcccacgaaatgcttgtgccaggccaccatcgaccgcgccttgccgccgcactgccgagcctcactggcaaaccgcgtcgtgccgccaccatcaggccgcgccaggtcgccgcgcgccgcgccaccccgtgcccggcctcaccatccgccgtgcccgcgcatagttggcccactgcgcaaggtcacccatagtcaactaccgcgccgtccgcgccgcccgccacccatacgggcggcgcggtggcgcggcggcgacggctggccgggagcagcggcggtgggtgtgaaggctgaggcggggccgggcgccgcggcgacgggcgcggaggtggaggcaggcgccatggcagccgtcgcggtcttccatggagctcgcggtcagggcagccgccacggcctcatgctcctccgggctcgccgggtgactgtcgcggccgtggcgatcgccgtcgagccggtgaatttgatgctctaa

SEQ ID NO: 60540 - DNA, 861 bp, Oryza sativa
  Clone ID: PAT_MRT4530_62057C.1
atgacgagcgaattgccggagcaacaagaaacaaagaagagaagaaatggaaaaaagaaaagggggaagaagacgccgacgaacgttggtcgccggccgtaccgacaccgatccgaccagccgtcacgcctccctggctgcatcgccgtctgcgccatgctcgctggcctcgtgacttggcacccgacgcggggctgcatcgtcttcgatctccggcgaagggataagtccaatgttccgtcggcccaggcaattgtatcgtctacatcggcgtcgttcaaggctgcatcagacctaagcagatctcccaggccggtgtgttcgattttttcatcaacacctcgccggcgcctgcacaaggctgccgcgcgccacaccgcaaaggcctccgtgacctgcgtcgcgcccacgaaatgcttgtgccaggccaccatcgaccgcgccttgccgccgcactgccgagcctcactggcaaaccgcgtcgtgccgccaccatcaggccgcgccagcatacgggcggcgcggtggcgcggcggcgacggctggccgggagcagcggcggtgggtgtgaaggctgaggcggggccgggcgccgcggcgacgggcgcggaggtggaggcaggcgccatggcagccgtaagcgagcttcttggtggcgatggacaggccgcggaggagcgggaggatctccggatagaaaccgaagctatggaaggcctgcaccgagaacgattcgatccgccacctatgccgactccggcaacccctgcctcaacttcttcttccaggtcgcggtcttccatggagctcgcggtcagggcagccgccacggcctcatgctcctccgggctcgccgggtga

SEQ ID NO: 60541 - DNA, 303 bp, Oryza sativa
  Clone ID: PAT_MRT4530_62058C.1
tcgccgaggagaccggtgctctccgagagcgtcgccggcgccgacactcgccaggagtcggagactgacgacaggtgacacggcaggcagacgccattgaaagcggtgaaacaagacaagggctttgtacatacatcaacatgtacataggtttcacagggtttcccctgtgcagatgttgatgtgaagagtaggcagaagcagctttagcttagaaattactcttcttctttgcatcacattcactgtggtttaatcttgatttttgttattacttgtttagcaaaaaaaaaaaaaaaaaaa

SEQ ID NO: 60542 - DNA, 637 bp, Oryza sativa
  Clone ID: PAT_MRT4530_62059C.1
attcccaatttcccattcccccctctatttcaacatctccccccatgtctctcctcccccatctcgccatttcaattccaccaacgcgagagagagagcgatcgagaagcaaacccgacccgacaaccaatttctccgacccaattcgcctcctccaagattcttgcgccaccgccgaggaggcgatcggttcttgatttcttgaattcgattcttgaagaattcttgggggtggtatgaggtcgtcggcgacggcggcggcggaggcggcggaggctgaccagtcgagggcgatgtacgagctgtgcgcgctgctgctgacggtgctccgggcgtggccggaggaagggggcgggcggggggcggcggcgtggccgcggcaggtgacggcggcgggggtggcgtcgatgctgctgggggcgtccgtggcgctgatgctgtgcaggtcggtgacgttgatgctgaggtccatactgatgcacagcgacgtcgggcttgtctgcgtcttcctgctgaacagactcgtcatcaagctgaccgtgatctggagggtcatcctctggaacgccccatgctcctaaacgccaaaagtggcctgagcatggtatattgtttcaaagccgacattcatgtgcta

SEQ ID NO: 60543 - DNA, 333 bp, Oryza sativa
  Clone ID: PAT_MRT4530_6205C.1
cctggctcctgccgacagctgaccggcgcgcggcgtccctgcccccaagcggcgaccgacgcggtggctatcccgcccccaggaggcagcgtccctagctccctggaccctgccccaggtggcgaccgacgcggtggatgtccgcccccacgctgggggctgcccgcacgacggcgcccctactccatcggcgcgaccgagaccggctggcggctggtgctgcggccgtgcgcgcctgcgcggtggcgtgccggcggccaccgctgcattgtgcacgcggcgctgtcgcggaacgccacgtggagcgggtttcacggcgccaggacggcgtag

SEQ ID NO: 60544 - DNA, 358 bp, Oryza sativa
  Clone ID: PAT_MRT4530_62060C.1
ggaaaaaaaaaaaaccggggggggggtttatttttaaaaaaaaacccctacaaacatgggggtcccaaacatgttaaacacaaacaatacagccgatcgaggggaagaccccctcaaattaaaggcacagaggcccaggcccaaatctgctccctggccggggggaacgggcccaggcccaaaaggtcggaaagggaaaggcaccccgggccttgaaaaggggggcctggccacgttttccggtgaaacggcccccgtttcaaaggggcccggtgggccctcaaagggttccacggatgccaggtgtttcccgcccaattttatgggagcaaaaacttttggggctcaatagggggga

SEQ ID NO: 60545 - DNA, 729 bp, Oryza sativa
  unsure (1)..(729): unsure at all n locations
  Clone ID: PAT_MRT4530_62061C.1
ttttttttttttttttttggagacaatcagtctgacagtgccagttgagcaaaaacaagatacaaaccttgaaggaaaagaactctccaattctgaaacaattataggatagatgtaataaataataaaaccaaaccgttctttttccatatgtacaaagttttctgttaaagcttgccatcctaattataatatataaaaccatctaagcttgttgcggcgttacatggtaaaaatgttgtccgggaaggaaaagataggatggcaacaacgtaatgccgcccaaactcttctgcttgtatacacctccatgagaacctacttctcattcaacttcacatgtaggacatgaatggaggcttggaaaatatataccatgtggaggccaccttgggcgaggaggagcacgaggcgggccagaggatggccctccagatcacggacaggttggtgacgaacccgacgaggaggaagacgcaggcgaggccgatgacccagggcatgaggaagaaccccagcatgaaggtcaccgacccgcacagcatcagcgccaccgacgcccccagcagcatcgacgccacccccgccgccgtcacctgccgggccacgccgncgccccacgcccgcccccttcctccggccacgcccggagcaccgtcagcagcagcgcgcacagctcgtacatcgccctcgactggtcagcctccgccgcctccgccgccgccgtcg

SEQ ID NO: 60546 - DNA, 498 bp, Oryza sativa
  Clone ID: PAT_MRT4530_62062C.1
gagaaacttaagcgtgaccagttgaatgacctttttgttgagctcagcagtatgcttggttagcacagtcccatcatcatcaatcaatgtcatatctttatagtagatatactatgctctttcgagaaaataaatattagtaccagcaacttgcattctattacttgaatccatctttcctttaattacttaatgatatgtaactgagtgtacattgcggagaatacgaagtcaacttaaattaggttgtgttttagcaggtcgcaggtacctgatgtaagtatgtgcgtattgtttagagtatgaaattaggaatacaacacctaagtggacatacgttagttcctgaattcaattatttgctattgtcccatagttatatgttgtctctatctattttggagtttgcagtgttagactgtgccattcctatcctgccattctatgatcccaaaaagaatgggtcctacactgttcaatttgctaaaatatccccat

SEQ ID NO: 60547 - DNA, 494 bp, Oryza sativa
  Clone ID: PAT_MRT4530_62063C.1
gaacaatattgccaggcatcacaaggaaaagtatcattgatgttgctctgagcaagggtttccaggtcgaggagcgacttgtgtcagtagatgagctgcttgaagctgatgaggttttctgcacaggaactgctgtcgtagtgtctcctgtgggtagtattacctatcaagggaaaaggtgatactcttatccttccttgcatggttccaagaaattagcaagcatattacatgaaaattagattatataacactaaaatagcaacaaaacaccacccaagcaagttcaacagcctaatgcaccatctaattcctaatcgtggtggctaccaggctcctaggcggcacccagtgccgacttttagaacattgctttccttgaaatttcagctgtttgctgtatgtgtagtcaaaagtcaaaattgttttctttcttaacacccatattatgtattgttcctcaaatatatcaccaattaagaactttctaatgg

SEQ ID NO: 60548 - DNA, 474 bp, Oryza sativa
  Clone ID: PAT_MRT4530_62064C.1
ggggggggggggggttttttttattttttttttttttttttttttttttggacgcgggggggggcccgccaattacagaccggcccctgccggcgggccagccagccctacatagagtgggattaaagctagccggaaaaaagaaaaaaggggggtcgttggggaaataaatatccatccacaaacacacacaaaaaacaaaccggaagcaaaaataaaaaagaaaggggggcctaacgaatgagctaactaacataaattaagtggggctcactgaccgctttccatccagaaaacaaacctggccagccgccttaatgaatgaaccaaccaacggggagagggaggcggcttattgatcgccagcgagggttttttttctaccaacgagacgggacaacaaatgattgaccgtcaccaaccggccctgccagagtagaatcaagcaagccaccctggcttgccccacccagc

SEQ ID NO: 60549 - DNA, 1052 bp, Oryza sativa
  unsure (1)..(1052): unsure at all n locations
  Clone ID: PAT_MRT4530_62065C.1
ccctcacccgcacacacagacacagacacacaaacagaaaaacaagaaacaaccanataaacgaggaccactttcnggaaataacaccgaagagcgcgtttggattgattataaaccccacaccggcaccccaccgggactagaagggaataaggtacagaggactcctccctgtctcctcctgctgactttaacttccctgagaggatcactccataggcaggcggagcaggagagacacacaacacactgcaagaatgccggccgcacccacagcaagaggaatgactagaaacggaatggcacaacacacgaaaccaatcaccactaaccgaagcaacagaccacattttacaaagacacacgaaacaagcaccaaaacaagacagcacctgagacatttaacgcacacaactagcccacagcacaccagctctatccaacacgtgatgaccacaaaaccaataacacacaggatacacagccccgatcccagccaaccacaccgacacgaattaatgcccagaacaacaaaccatttctcacaaaactcatcccacacatcaaagatacaaccaaacagaagaagacccagtgctaaaccatccctaaagataccgcgngatagacagctcacaacgcaccgcaacactatttcgctatcgtaataaaagacacgaacaaccacacacccaccaagacctcactacgaccgacccaacgcccgctcaccgtccaatgaactcaactagagtagaccagacaatggcagatgctgacatgctcgacaccgaacgagagagtaaggacaccctgctcctngctcacaactcacacacacacacgcaccgtcacgatttatcatcacaccgcgaggaccaagttcatataacataaaccgaagcaccactacaaacaaaacgcgaacgaaaggacagaccacaagcatatcggcatatagttactcagacacagaacagactggaataccacagcaaccgaatcacaccacgcagtcctccacccacacatgcaaaaacgcaaagacaact

SEQ ID NO: 60550 - DNA, 197 bp, Oryza sativa
  Clone ID: PAT_MRT4530_62066C.1
cggacgcttgagaagaacggattataccttaaacacatagaactcataagcggcgaggagtccagctccgtggcgcactacacacatctgtatgccaagcgaacagttggcgggatcgtttatactattgtcagggaggccgtcatcctcatgggatctgagggctagcacgtggcctttaaatagcgcgggtcttg

SEQ ID NO: 60551 - DNA, 2823 bp, Oryza sativa
  Clone ID: PAT_MRT4530_62067C.1
atggagcccgacgccgacgacaacaagcagcagccgggtggtggtgggaaggcgacggtggcgagccaccccaaatcgcgggagtggcagctgcgcaagtacctcctgctgctcgccatcctggtggcgacggtgacctacatcgcggggctcgacccgccggggggcgtctggctggagaccacggacgaacacctcaccggcgaccccatcctgccggacacccgccgcctccggtacgacctgttctactacttcaacgcgacggcgttcgtggcgtcgctcgtgctcaccatcctcctcctcccgttccgcgtggaggggccccggctcatggcggtgcgaggggtcatggtggtcgatctgctctgcctcatggtggcctacatcgccgggagctgccggggcaggctcaccaccatcttcgcctcggtgctttcggcaaccatcttcgtttacatcgtggttcatgcgctggtcgccccttctaccgacacgcctgagaagaagacagtgcacgactcacctgacaaggagaaggccatggacatggaggatggccatctccatggttgctcaagtaacccgcttgacatgaaggaggccgtggaggatggcaagctccgccccaaagagcggcgcaaggtcttgatgctgctctccatcttcatggtgacgatcacgtacacggcaggtttgagccctccgggtggcacatgggagcatgctgccgaggagggtggcgccgccgccgccgccggtggccaccaccgcgccggtgaccccgtcctgcaggagggccactactggcgcttcgtggcgttcttcgtcttgaacaccgtcgcgttcgtcgcgtcgctcactgtcatcatgttgctcctgagcaccagcatgggcaacaacgggagaaggctatcggcgctgaacgtggccatcgccttcgcgctgcttggtctcatgggcgcctacgcatccggcagctgcagggagacggagaccaccgtgtacgtcctctgcctgatcggcgctgtcctcctatacatttcttgccttgctgtgatcaagtttttatccaaaaaaactaaaccgcaagcacaaacacatggttgttgcggctggatgacagcaacggcccggccctgcccggcgtgtaggtcggactgtgctagcccgactgacctcggcccagacccggtcatgcctgggccgtgtcagggcgagcaacccactgagccatctatagcaacaggatccagacgtaatccggcctccaaaaaccgtgaagacagcacagatcccgttgagagggcacggtcactgatacttctgctggccactctcatcacaaccgtaacataccaggccggcctagacccgcccggtggagtctggagagacgacgacaatggccatagtggtgggggtttgatactccccgcaacccatgctaagcggtacaaggtgttcttttattgcaactcagctgccttcgtagcatccatcatcgtcatcatcatggtccagagtaggtctctgatcggccggcgtgcactcgaggcagctgtgatactcgacctctttggcctgatcggcgcatactctgctgggagctgccgagacgtgcgcacctccatctatgtcttttcattggctgtggccatctttgtgttggtggtggcaatctacgttgtgattagcaagcttccacatgacaaaaagggtaagttggaggagaaaagcaagctggagaagaagcagaaactattgctgcttcttgcaattctagccgtcaccatcacctaccaagctgggttgaccccgccaggaggcttctggatcgagcacaccgatgaagaccaccgctacggtgactcgattctcgcggacaattaccctctccgatacaaggcattcttctattgcaacgcgacgagcttcatggcatctgtcattgccatagtttgcttgatgagtcggaacctctccagcatcgccgtaggctactgcaacgcactctatgcctgcatggctgcaggcttggtcggattgatgggtgcctacgctgccggaaccacccgaaggctgcggacgtccatctacgtcttcgccttggtcggcgcggtgcttattttcgccgctctacacatcaaatttttccataaaatactcattggttgtctttccttcttctcttccaagaagcaagacgaggtcactaagaatcatgatcaggcaacggggtctaaaggttcgacaggaaagaagtgcaccaataatcatgatgaagagaccactgatgagtacaaagagaagtacaagatgcgcaagtatctgacgctactggggatcctggcagcgagcgtcacgtaccaggccggcctagtgccgccagggagcgtgtggccgacgaacgacggcaaagggcacgcagcggggaaccccatcctgggggacaccgacggccgccggtaccacgccttcttctacagcaactccacatccttctcggcatccatcgtggccatcgttctcctcctgcaagggaccttgatcctcccagagctcaatgaccctgaccggttcgggccaatgcacatggtggtcgtgctcgacctgctcggcctcctggtggcgtacgcggcaggcagcagcagggactggggcacctccgggtacgtcgtcgccatggccgtcatggtgctggcttatgtagccatctatgtgttcctgtctctccgtgacaggaagggatcggagggcagggcaacgacggagatgttactaaattttcctataaacttgatcatacttcaagaaatttga

SEQ ID NO: 60552 - DNA, 1633 bp, Oryza sativa
  unsure (1)..(1633): unsure at all n locations
  Clone ID: PAT_MRT4530_62068C.1
atctggagctttcatttgtcttaacactccaaaaaaaagtgaaaatctgaccataagcagagctggcattttattccactccacacaaaagagagagagagagagagagagcatancaattatacttcttttttgcatgctgtccctcgtagtagtattacaaatctcgtaatctttatttcctccttctagaactccctaccagctcagccattttatcttggaaaaaatataaaaaaaataaagaagggaaaaatctccattaatttctcctacagtatttagctgtataggaggagcaaagctggttgagctcaaaactgctagctccaactcgcgatcatcagtagctccagagtgtgacgtcgccgccgccgtagccgccggcgccaccatcgtcgtcgccgtccatctgccagctctggtactcgccgccgccgcccatcccgtcgtagtagtaggacggctggtcgaagtccatgttgccgtagtacgcgtagtcgtagctggacggcgtcgccgccatgtcgtcctggtactgcatcatcatggcgggcgcggcggcggcggaggcctcgacggcggcggcggagctggaggcggcggcggcggcggcgtcgtgcgggcatgactcggcgagctcgatggcggcgcggcggatgtcgtcgggggtggcgagggtggccgggtcgacgcggaggaggcgggccgagtcggcgaagttgaggcacgcgccgcggccgcggagggcgagcgcggcgacgtcgtgggcgcgcgcggcggcctcggcggtggcgaaggtgccgagccagatgcgggacttcttgttgggctccctgacctcgcacacccaccgccccgcgggcccccgccgccgcacgccgcggtacaccgggtgcctcgtctccctgaacttggtcctccccgccggccgcttcggcggcgccgacgtcaccgtcgcgtactcctcctgctcgtagtactccatgtcagtagtgtgtgttgctgctggtggggcggtggccggtgtgcccacgcgccgccgctcgtcgctcctccggacggcctctccatttccttttgtgtttgtttctgctgacggcggcagcggcagctcacaggtgtacaacgccactgacacgtgtccgtggtccaggtgagacgccgtcgccggtgaccaaaagagcggcggaagatcaacggacggcgacgacgacgaggaagaagcggcgacgctcttcgggttgacggcggcgacggtgctccggcgatcttcggcgacggcgaaggggcggacgaggacggagacgcgacggcgaccacgatgacgaccttcccgagcgacggcgacgactggaacggcggcggcgcacggctggagcgacggcggcgctaggtcccatgatgctagagcgtttccgacgacgagaggcgaaggcgagggtggcgacgggtagaggagagctcggggaactttcttgggagccagttgaagcagccctatagcaacaactatgtcgaggctcgatttgatgagagcgagacgcctctcgttgcacttctgcagtttcatctggtattgctcgttctttaacagctcctggtgtttaagctccttctctagtttcttcat

SEQ ID NO: 60553 - DNA, 567 bp, Oryza sativa
  Clone ID: PAT_MRT4530_62069C.1
ccccatattcagccagtatgtatccactgtcccaccgatctttacatgtcaatttcaacagtaataataaatttatagtataccaattaatcagccaaatgaacatgaaaaacctttgataatcttaccaagaaagaatcaaactttccattcaaaatgttgcaacaacccaaatgcatatatatgtgaattgattcattgatggaagatgagatcatcacttggtgtggaagagctcctccatgtcctcgaggctccgccccctggtctccggcaggcaggcgtagatgaacacgaaggaggcggcgggcgatggcggcgtagaggtagaacgcccccgccatggtggattggcgtgcctgtaaagctgagattgaactgtcatcggtgaccactgcccgctgactgacttgctggttcactgcgtggttgcctgacgccggctgccctgccctgctgcagcctgcagctggcaggatctcctgcagcttgtacacccacgtgccagactgtgcgcctgatccctgactggagaacgctgcacactgaacgccaacacaccaacgg

SEQ ID NO: 60554 - DNA, 552 bp, Oryza sativa
  unsure (1)..(552): unsure at all n locations
  Clone ID: PAT_MRT4530_6206C.1
gcaagtgacagtcagatgagtctacaagatggccacagtgtgttgattgcacatgtgtggtgacggggtacattggatcattgcacgcttgagcactgttgacttccggagctgtaggcaagatagaactggggctngtgcttgttagaattcngagttcngccaatcngccctgcgaaacttgtggtgcggattgtgatgtggtggattcaatggatagtatgtatggtgctaccaagcagctaataagcggagaactccacatngtgtgcgctaaccnatgactttgtaatatgtgggaggggaaaatttttcaaggggacaaaccatggaacagaggagatggagcaaagtagttgctctgtgctatcattttcagagctcaggctgattcttctgagctcagataggagtactgtaattnttatgtgtgtgtatttgatnctgatgatggtacgttttaagagttggaccagatattgcttgatctttacatgatgaattgatgatatgcaaaaaaatggtatttgacaaaaaaaaaaaaaaaaaaaa

SEQ ID NO: 60555 - DNA, 300 bp, Oryza sativa
  Clone ID: PAT_MRT4530_62070C.1
atgacggttgtggaaggggaattgcccgaagtaccctccaaccgtcattggggtgcaatcttggacgtccatgccgaaccctggcctcaacggtggagatgggggttcggccgaaccccctggttcggccgaaccatgggctggcaaaaaccagcccatcttcggctggcaacctcctctattgcttcactttgtagacttgtgaattttggcccaattcatcgtgtcaattctgagttcttggcctattcatgcataagtctgattcttgacatcgtccgattgatttatcattcgagt

SEQ ID NO: 60556 - DNA, 186 bp, Oryza sativa
  Clone ID: PAT_MRT4530_62071C.1
atggaggaaacattagagtacaaaagcaacaaacctgagctgcattattgggagccgctgccggcgcccccggcggagtgctgctcggcgctgggccccgtgtcgcacgactgcgcctgcggcacgctcgacatcatcaacagcctccccgccaagtgcgggctcccgcgcgtcacctgccagtga

SEQ ID NO: 60557 - DNA, 967 bp, Oryza sativa
  Clone ID: PAT_MRT4530_62072C.1
ggcctcgagcagaattcggccccagccgcgcatgtgtagctcactgctcactcgtcaaccaacttcctcaataatgtctcgctccagcctcgccatggcgctcctcctcgccgccttcgccgccgcggcgacggcgaacagcggcgcagcgccggcggctagcgacttcatccgcaagtcgtgccgcgcgacgcagtacccggcggtgtgcgtgcagagcctggcgtcgtacggcggggccggggcgccgccgccgcggagcccgcgcgagctggcgcgcgccgcgctgtcggtgagcgtggacaaggcgcggtcggcgtcgacgtacgtggggcacatatgcggccctggccggccgcggcggcgccgtcggcgcgggccccgtgcgcgactgcctggagaacatggcggacagcgtggggcacctccgcgacgcggcgcaggagctcggcggcaacatggggcacgccggctcgccggggttcaagtggcacctgagcaacgtccagacctggtgcagcgccgccctcaccgacgagaacacctgcctcgacggcctctcccgcggcgtcgacgccgccacccgctccgccatccgcggtaagatcgtcgaggtcgcccaggtcaccagcaacgccctcgccctcgtcaaccgcgtcgcccccgccaattaaacatctactcctcctataactaattaagcttttgttcttggaatcttggtcgagttcatcttcgtcatgggttaattagctcagttaatctcgatgcgtcgtcgttgctatggttgtaacatatactgtactgctagttaattatcaagacttaattaaaagagtcgatgtaatattgtaatggttgagtctttacaccgaagatggtgaggaaattaatccgtgttttgcttgctaggtacaattatcgattactgtttgattgattgttttgctgaaaaaaaaaaaaaaaa

SEQ ID NO: 60558 - DNA, 368 bp, Oryza sativa
  Clone ID: PAT_MRT4530_62073C.1
cgggggcccaccaaagtatatcggtggggggaccgccaaaatttcaggggggaaaaaagttgggaaactagcaaacatcatcagggtgggggcagcccccattggaaactacccgcccaaaaaagaattccgaaccaaaaaaagccccggttaattaacgggcaggggcaagctgggggaaaaacatccctgggacccccggaaaggggggctgaattggaatttccttgggggccatcctttaaagattttaaacccacccccttaggttctaatcgggggggaaataatccgggcgcatttccagccccttggtggccccccccaaaaaaacccgggaatacctggggaggggggcatttgggggc

SEQ ID NO: 60559 - DNA, 397 bp, Oryza sativa
  Clone ID: PAT_MRT4530_62074C.1
ggagtgacaaggatgatttgtaatttgtgaggcataagttcttggatccacatgcaaagcgtctttccgcagatgaagcccataggaattctaaggagtttagtgaggcacttgagttactgtactccaaaaaggatgttttccctaaaatccttcaggagaacagtggtgcatttccaggattctcagggcacatccttggtcacagtggattgcagtactccaaattgtttgagcaagacaactgctctagcagcggtgttgaacatgacgggttgtttaatgtaccaaaggagccagagatgcagcaaaagtaaccacccacatgatttcatcagaaacaaactacattcatgataatgtacagaaggcaggtattatggtttgaaggcaggga

SEQ ID NO: 60560 - DNA, 106 bp, Oryza sativa
  Clone ID: PAT_MRT4530_62075C.1
atggtggcttgcattggatctagccacctatatgatgttaaggagagcatattcagtgtctccgatatcagggaggttggatctggcatctctaaggtggtggccg

SEQ ID NO: 60561 - DNA, 495 bp, Oryza sativa
  Clone ID: PAT_MRT4530_62076C.1
atggaaaggaacacgcaaggtgatcatctccgaaagatcaaaatagtggctcagaattttgacaatgacagcaagtcatatggtagaaggatggaaaggaacacccaagtggccaaatttgtggagcatgttcagtacagatttttgtcaagtagaggtaggtatgtgtggttcaatatatccagtcagaaactaagaatagttcagatatacatgcagagaacagaactgttcaccaaccctttctccaaatccttcaaacaacttgatctttcaagtcacaggatgagtcacctgcagaaagcggattattcagacagtatcagctctgcggctaatgcttatccacaaaaccaaagtgcaagtgatcttccacacaatcttggaggcaaggaatcgaataatcccagtaacccaagcccgttaactaaactgacacgattttccaacgatgtaacagccgatggacacccgtatgaccgtcgagaagattag

SEQ ID NO: 60562 - DNA, 345 bp, Oryza sativa
  Clone ID: PAT_MRT4530_62077C.1
atggtcagggggcgggtcttcgtcatgatcacaggcggtggggtcgtcgtgccagtgacgggtagcgccgtggacagtagaggtgggatcgggggagccatagcagctggattcatcccattcacggtcgcacgggggctcgcatcgtcggcagcccaacagggttatgaggcatggcagtggcgctcgggaaggtcgcgcggcgcaggaggcggaggacgtgctcgttgggattcgatgcggcggaagagcgagcgttgcagtggccgcggccggtgggggaggcggagcgtgatgcgggaggagaggataagatccaggtggacggcacgtgatgcggtgtag

SEQ ID NO: 60563 - DNA, 1335 bp, Oryza sativa
  Clone ID: PAT_MRT4530_62078C.1
caaatccgatgaggagaagtaactgaaagggagaggtggaacctgagggaaacttctctctcagcatggggtccatattcccctcctcaccgctgctcctttcttcggcatggtcggcgatgtcgtagccgccggatccggctatctctatcgagtccagtcgctttttggcgaggcgctgccgcgaccgccgccggatcggggtcgtccatcgccgtcgcgagcgccgtgtggctctcacgtcgttgggggctgccgaagccgagcggggaagcacgtgcgcgatctccggttagttgaagaggacgggggtggcgcggcccttgatggcacggcggtggcaaacgtgcagagccagatgcgcgagttcttgcgcagctctcagatctccgacacccacttgccccaactccacatgctgctgctagatccaacgggcggcgagcttcgtcggtggagagcttttgcgccgactgctcgagcatccagcaaaatgtaaggtggaggtggtccggtggttgggtcacggatcggccagggtggcgagcctgggggaattggcaggcaggcaaaggagggaaagacgggccaaacattaaaaaaaaataaaggttgcaagtggaagaaaacaaactgtagaaggcaaatccggtgacttggagctgctaaggggctgtttggtttccagggacttattccaagtccatgtcacatcggatatttggacactaatttggagtattaaacatacattaattacaaaacctattccataagcttggactaattcgcgagacgaatcttttgagtctaattatgtcatgattttgacaatgtgatgctacagtaaacttttgataattatggattaattaggcttaaaaaaatcgtctcgcggattagctctcatttatgaaattagtttttttattagtctatgtttaatactctaaattagcgttcaaacatctgatgtgacttgggctaaaaagttttagccccatctaaacaccccctaagcaaatccggcgacttttgctatctcgctgttctgattgccagcaaatttgatgatttggagctgctaagcaaatccggcgacttctgctatctcgctgttctgattgccagcaaatttgatgattgccactggttgcatgttgtttgctattgacttgatttgttgttggctgtgggatgtgaatccgatcgtcaaagcagtcggtttcggtgacagtcatagcagtcggtttcggtgaataatagcagtagtttggaaaagttttggctataggaatctttgcatgtcaatccgtgccctaccctgtttcagtg

SEQ ID NO: 60564 - DNA, 3061 bp, Oryza sativa
  Clone ID: PAT_MRT4530_62079C.1
atgaggaagaagctggacgaccgcagccggacgctgatcgagaacggcgtgcgggggctgcagccgtcgatgttcgtcatcgttggcgtcaagccgcgctacccgttcgtcaacctcaattacatgggccaaaagtcccgcgtcaagtgccgccggagggacgtgaagtgctagaaggaaaaggcagtgagccgcaggcacaagaagaagcgcgcgaagcagatttagagcctcaggcagatctggctcctggaccccgagaaggccgaccacttctcgctcttcaactagacgtttgaggtcaaccacttcccctaccaggactcctagagcgtttttggcagcacattaagcatgtgcctcctgcaggatgtcgaggccctagcgctctaactagtcacgagaattgtagagccgtgaggcgctgaacttgcgatgatactgcagtttctgtgcctagcaagtctcgctagtcgtaaccctctgatcatggttgcacacaaaaggtcaggcgtatagtaggaacatcttgccggtactacatttttcagcaggcactgactattttgagcttctagattcttatgtgacgtcaagaattatgagcttaatatactgcctataccttaacatttttaagttatacaatctcatcagaatagttaggattgtgagggaaagactcaaaacaaaagagagttgaaagatttatactatgaattccgtgaagtctttccagtcggtactttaatgggaaacttctttacgatatagaaggggaacgcagcgatcaatttacttcattttactttagactaatacaacaggagcacagttgccttgcttgctgctcgcggacgcgggaaatcagctgcccttggtcttgctattgctggagccattgctgctgggtattcaaacatatttgtcacagccccaagtccagagaacctaaaaacactgtttgattttgtgtgcaagggaatgaatgcactggagtacaaggagcatttgcattatgatgtggtgaagagtgcagatccagaactcaagaaggcaactattcaaataaatgtctacaagcagcatcgtcagacgatccagtatctgaaaccacatgatcatgggaagctttctcaagttgagctccttgtcattgatgaagctgctgctattccattgccaattgttaagtccttgcttggtccataccttgttttcctatcatccactgtcaatgggtacgaaggaactgggcgatccttgtctttgaagctcctacagcagttggaatcccaaagccagccatctgctccaaataatggacccaattcaagtaggctttttaagaaaattgaattaaatgagtccattaggtatgcatctggtgatcctattgagagctggcttaatgatttactttgtttggatcttgcgaactccatccccaatatcagtaggctacctcatccaaaagaatgtgatctttattatgtcaaccgagacacacttttctcatatcataaggagagtgagatatttttacaggtctgtttggaaggtcaaatatctcgaaaatcagctatgaaaagcctaagtgagggtcggtcaccttctggtgatcaaataccatggaaattttgtgaacagtttcaagacaacgtgtttccaagtctctcaggagctcggattgtacgaattgctgtccatccaagtgctgtgaggcttggatatggttcagctgctgtggaccttttgacaaggtactatgaagggcaaatgactctatttgctgaggatgaggaggaaaatgaagagcctgaagtcaggatcactgaggctgcagagaagagtgctgtgactggtgagcatacttgtatggtcttgaggcccttaaatagcgatgacattgaagttaatgagtcaagcaaatgtggatttttggatccattttatcaagatttcagacaaagattcaggcgtctcttaggaacatctttccggcatctcaattttaagcttgcaatgagtgtattggcttccaagattgatttttcagatcacgaaccctcagactattataccaatattacctcaaagatattgggagatatgctatcaccacatgatatgaagcggctggaagcatattctaacaatttggtcgattatcatctgattctggaccttgtccctattcttgcacaccagtatttttcagagaagcttcctgttacactacatggtgcccaagcagctgttttgttctgtatgggactacaagacaaagacataggtgctacaaaggaagaactggggatagagagggaacaggttctatcaaacttcatcaagacaatgaagaagttatacggttaccttcataatattgcaggaaaagaaattgaagcaacattacctacgactaaaggaaattgatacagctcctcttaaatcattggatgaggaccttgatgaagcagccagggaagtaaaggaacaaagaagagcaatagatgaggatgatgtggacccaaagtttctgcaaaagtatgcaattgatgccgatgacgatgagattgagaaggcgctgaacggaggaaagatttccgcaagcggtgttatcagtgtgaaatccaacaagacaaaggctgacaagcaagagaagcgcaaagaaatgaagaaatcaaaaaggaaaggaaatgatggagagaaatctgagtctaagaagaagaggtcttgaatcatcaatttaaattagcacttccagaaagttgacctcggtagcttgtgaaactcacgagaaacaagttgacctcggtggctcgtaaaacttaccagaaaaactccctgtgcatgctgaggaagccctgctaacacaaagcctcgaaaacgtgttcatctcacaaggggggctcaaaggagcagacaagttctccagaaaacatctggcaccagcagccatcaattttgatgtttcaatttcttagaatattactatagttttgctgtatcctcactgtagcacagttaattttgttatggaagaaaattgcagctt

SEQ ID NO: 60565 - DNA, 502 bp, Oryza sativa
  unsure (1)..(502): unsure at all n locations
  Clone ID: PAT_MRT4530_6207C.1
cggacgntcnggccaccgcgtcgacgcccggttgctctgcctcgggggcgacgcgggcggcgaaacaagccgcgccgcccccgtccctctcctcccctcccacgccgagccgccgccggcaaagccgggcgcttgcaaggacagcggcggcggggctctctctctctctctccaccgctcgcagtggagctggacggggcgccggcaagacggagcggcaaggcgccgacgacgacgaccagatccagcgccaggatgcacggatccggtacccctatggccggatctgctgcttccgggcggcggcgacccgggtcggcaagtcgcggcgtcggcggcgtggaggtggcggtgtcagcggccggagggcggcgtcgacaactggagggcggcctcggcggcgtggagttggcagcgaggcggaggacacggcggcatgaccgtggctgcggtgacaaacggggagcgtgaccagttctggccggacggctagcggcggtgc

SEQ ID NO: 60566 - DNA, 702 bp, Oryza sativa
  Clone ID: PAT_MRT4530_62080C.1
atggcacggcggctgctccgcctccgcgcccacgccgccggcttgtcccagcgcctcgccccccgcctcctcccctcgcgcccgtacatctccgacatgcgccgctccgccttctccgaccgcctcctccgctccctccgctccgagatctcctcccgccgcgcgccctcgcccccgccctccgcggcgcccttcgccgtcgacgaccgcccgggcgagcagtggatccggctgcgccgcgcgttcggtggtgatgatgatgatgagaaggaggaggtcagggtggacgccaccatggtggacggcgccacggcgcccacacgctccggggaggtcgcgggtgcggggcccgacgacgccgccggcccgcagctcaggatgcacatcagcgtcaacgtcgaggtcaccaaggccgcgcggcgtgacctggcgctcaccttcgagtgctcggcgtggcccgatgaaatggaggtggagagggtctaccccgtccgccgcggcgggccggcggcggcgcagcagtacatgggccgccagttcagtgagttggatgacgagatgcaaagcacggtacatgattacttggagcatcgaggggtgaacgatgagcttgccgcattcctgcactcatacatggaaaacaaggagcagacagaactggtccggtggtttaagaatgtggagtgcttcataaaaaagtag

SEQ ID NO: 60567 - DNA, 522 bp, Oryza sativa
  unsure (1)..(522): unsure at all n locations
  Clone ID: PAT_MRT4530_62081C.1
tgggcggttcaccgtgctggcgtttcggggttggcgtgcagggagatccacgacgccggcgcggcggggcccgccggcgccgcgcgcttttgtcttatgccctcactttatttctgaggggggggggggttttttcgcaggtcctctacatgctgttgctggacgccgtcgtcgccggcgagcgctgcggcctcggctgcgccggcgacgcatgagcatttcaatcgagctctctggatcaatttcattaattgccaaataatagtaaccgggcgtggaagnggcaaaaaaaaaaaaatagtataaaaanaagaaaaggaaagggnnnncnnccnnccaannccccaagaaaagggacatgttccccccaanncaggggcttttttagatagaaaaggggcaggggtcactggtgggaacatgggcccctctttgggggtggtgtgcaagccaaacaatttaaaaattaacttttcccacccttgtttttttaaaaaataatccataccgccccgggggggg

SEQ ID NO: 60568 - DNA, 624 bp, Oryza sativa
  Clone ID: PAT_MRT4530_62082C.1
atggcagtggtgcgggtgatggcagtggtgcggtggatggcgatggcggtggtgcgggctgtctgcgtagagaagggggcacaggggcaaggagtcctggtagttggcatcggcgatctggaggcgaaaatcggcgccaacatatgtttagtctatattggtaggggcggcgcgggagaggagagaaatcgaggagcggcggacgcgggatcgacggcgaactggcgttgggatgaactcaagtggggaggggcggcgctgcgtggggcgtcgggcatcgacggggaagcgcccgcacctgccgtcgactgtgtggggatcgattttggagatgaacagtgggcatggcggtggccgtcgttcgtgcttggggggataccaattgcgagcagtgagcctggccttcctatcccatgggccatggcgccgctgattcccggaacagatacccggcggcgcccatgccgcccatctcctgacgtttgcttccacgagtccccacgcgccccagcccatggcgccctcctaagccatggtgaaccagaagtagtggaagatgaaacgttgtcgtcgaagaacgaagaacaggagcagtcgcgcttcaagcgctacccaaaaacttga

SEQ ID NO: 60569 - DNA, 669 bp, Oryza sativa
  Clone ID: PAT_MRT4530_62083C.1
tttttttttttttttttttttgttgtcttggtttttttttttttttaagacatcaacaagcaacatatatttttacagagcactaaatgattttatttacacactgtcaatcatgccatgtaaaagccaacaagacggtaagatcacccaaatccacatcacatacttcctaggatcaaacacatatcgcatacaattttttccatgatgtttatgtagtcatcaggagtgaggccaatccaatttggagaaagttctgtgcgactgatccagttgcagtacctataccaattttgttcaccaatgtgactggaaagaaattggtacagctagtgatccctcaaatagcttcacttgtgtctgatttgagcaattccttctgcacaaagggtgccatgaagaaattaaacacctaatctgcagctctgaacagaaaagatttttaattaaattaaacgtggggttctgcaatttcttaccggcgggggaaaccagacgacgggggaggtggggtgcaaaggttgcccgccggggttgccggcgcaggtggagctcaattttctcgtcgatcgggaccaaatcaaatggatacacaagtacaaaccagttatctccttccttggttctggactccgggaccaaagacccagtttcctcgatgcaactgtc

SEQ ID NO: 60570 - DNA, 561 bp, Oryza sativa
  Clone ID: PAT_MRT4530_62084C.1
gggaaaaaaatgggttggggctaaacattcacccaacacgtttccccattttttggggggccccccccaaaggggcagaccccgctttatattttaaaaaaggggggaaaccccctaagggaagggaaacaaaaacaaaaaccatggggggggggaacagggggcaattcccagcctcccgaacgaaagaaaaaggcccgacagggggttttggcccccctatacccaaaattattacaaaatttgggaattggggaacccaacccggtgggggggtaaaagcaaaacaaaacctaaaggggaaccccctttgggaagggggggaggggggcccccttaaagggttcccccacggggggaagagcggggaaagaacaaactatgcccccactgggggccccaaaccggaaaaaaagggccgccccatgtattaactccccaaccccgggggccctgatatgcccccccaaaaatttggaagtttctttttaaacccccccctttaccaagccctaaaaaaagaaaagggccttgggccggggggtggcccacaggggaaat

SEQ ID NO: 60571 - DNA, 3129 bp, Oryza sativa
  Clone ID: PAT_MRT4530_62085C.1
actcgctctctctcactctcgccgcggcttaaagcgcacacggcacggcgggggcggcggccacttccacatcgccattaatgagcctggagcaagccccataggccgtagtagtagtgctactagcttcatcagctccacctcgctcggaagagatcgtctcgtcgagcgaggccctttttgctcccccaatggattcttgccgcagctagtgtttcttggcgattcttgcggcgctttgggagctgaccggtgaagagctctctttgaggcgatgggttgggcgtggcggagggagcagtgggcggttgcatggctgtccgtggcggttcttggggcggcgctggtgggcgccgctggcgcgttcgaggagggcacggcggtgtacattgtgaccatgaagcaggcgccggtgttccacaagcgcctcgacctggagaggtttgggagcagcagagtcgccggcggcggcggcggcggcgggggggacaccccgtccactagcatcctcatgaagccaaggcatggtccagcccaacctatgaattatggctcgtacttagttcgtcttcaaaattcactcttgaagagaacactgagaggagagcgctatataaagctctacagctaccgctatctgattaatggttttgctgttgtcatcactcctcagcaggcagagaggctatctatgacgaaagaagtggcaaatgtaatgttggacttctcagttaggacggcaacaactcatacccctgaattccttggtttgccacaaggagcatgggttcaagagggtggcccacaatgtgctggtcagggtgttgttgttggcctcatcgacacaggaatcgatccaactcatcccagcttcgcagacgacttgataactgacagttatcctgttcctgctcattactctggcatttgcgaggttacaaatgattttccatctggatcctgcaacagaaaacttgtgggagctaggcattttgcagcctctgcaataaccaggggagtgttcaatgcctctcaagatcatgcttcaccttctgatagtgatggtcatgggacccatacagcatccatagcagctggtaatcatggaattcctgttgttgtggctgggcatcattttgggaatgcaagtggaatggctcctcgtgcacacattgctgtctataaagctctgtacaaaagctttggagggtttgctgctgatgtagtagctgcaatagatcaggcagctgaagataatgttgatataatcagcttatccattaccccaaatagaaggcctcctggactagccaccttctttaatccaattgacatggctcttctttcagctgtaaaagctggcatatttgtcgtgcaagctgcaggaaatacaggtccttcccccaagagcatgtcatcatacagtccatggatttttactgtaggagcatctgcccatgacagggaatacaacaactatgttgtacttggcaacaatctgaccattacaggagttggccttgctcctggaacagatggtgattccatgttcactctagttgctgcacctcatgcactgaaaaacaatgtagccagtcctactgaaatgtccctaggggagtgccaagattcaagccaccttgatgaagatctgataaggggaaagatactggtctgcagctattccatacgatttgtacttggcctgtcgtctgtgaagcaagctttagatactgcaaagaatgtcagtgctgcaggagttatattctatctggatccatttgtcattggattccagctgaatccaactccaatggatatgcctggacttataataccatcatctgatgactctaaggtatttctaaattattacaatgagtcccttgtgagagatgagacctcaaacaaaatcgtcagctttggtgcaattgcaaaaatactaggaggccaaaatccaaattatggtatttctgccccaaaagtaatgttttattctgccaggggtcctgatcctgaggacaactcactggccaatgctgatatcctgaagccaaatctgatagcacctggcagttccatttggggtgcttggagttctcttggattggactctgctgaatttgctggtgaaagttttgcaataatttccggtacaagtatggctgcaccacacgttgctgggcttgctgctctagtcaagcagaagttcccttattttagccctgcagctataggttctgcattatcgactactacaagtctcagtgacagggaggggaatccaatcatggcacagagaacatacggcaatccaaattcaactcaatctccagctacaccttttgacatgggaaatggatttgtcaatgctactgctgctttggatcctgggctcatatttgattccagttacgacgacttcttctcctttctatgtggcataaacggctctgctccagtagtgatgaattacaccggcaacagctgcagctcctccgccatgacaggggctgatctgaacctcccctccatcaccattgcagtgctcaaccagtcaagaacgataacaagaactgtaaccaacgtggcgagcgacgagcgctacacggtcagttacagcgccccttacggggtcgccgtctccgcgtcgccggcccagttcttcatccccagcgggcagaggcagcaggtgaccttcgtcgtcaacgccaccatgaacggcacctccgcgagcttcggcagcgtcggcttctacggcgacaagggccaccgggtgatgatcccgttctcagttatctccaaggttgtgcaccgttcatgatttgactgatggaagaacgctgtaatatggcaaaggatctgcctgatccggcgtatgcagcgggggtaactttgactgcctggggcttaacctgaccggagattttttgttgatcttgatgtacattttgatgcatgtcggtgtaagtaagatcaagatgagtgagtggctaatatctgtaactgtaaagagaatggtgtaccggactccgtcctttcacgaatgagaaatcatgctttttctcaaaaaaaaaaaaaaaaaaaaaaaaaaaaaaaggagggggcctcgtgccgaattcctgcagc

SEQ ID NO: 60572 - DNA, 711 bp, Oryza sativa
  Clone ID: PAT_MRT4530_62086C.1
atggccaataatcacgagcacaaggtggaccacctcgaccagcccttctacggcccgcccgttctccctccggtcgagccgctgtccgccgccgccgcgcgccgccggtgcgtcgccgacccgtacgcgctctgctgcagggcgatccgcgtgctgacgatcgtggtcatcgccgtcggcgtggtggcgctggtgctctggctcgtgtccctgcccaacgccctcaaggcctacgtcgactccgccgagctcacccgcttcgagctcggcggcagcgacggcgccaagcggggccagctgctgcggtacaacctcaccgtggccgtgagcatccgcaacccgaaccgggaccaggccgtgctgtaccggcggctggaggcggtggtgctctacggcggcgagaggttcgggtacgtcgacttcccgcggacgcggcaggggcggaagagcacgatggtgatccggccgagcttcgtcgggcagggcgtcctcgccggcgcggcggcgttcggaagggagaaggaggaagggttcttcaacatcaacgtgaagctccacatgagggtgcgtctcaaggtgatggtcttcgtggacagcgtcgagtacaggccggacgtggactgctacatcagggtgcccgacccgagcaacgcgacggcggtggcgatggggttcacggcgacgcgctgccgtgtcgacgacttcatgtga

SEQ ID NO: 60573 - DNA, 582 bp, Oryza sativa
  Clone ID: PAT_MRT4530_62087C.1
atggctgatgaggaggtggaagccatggagagcaaaaaaggaaaagaaaaaaaaaagaaggtaaaagaaaaggatggggtggtggtgagcttgtcgccgagcgagcgcaagtttgaagtcaaaaaagaggagagagctcctgctctgctggcagctgatgtggtcaaggtggtcgggctgctcgactgctcgcgttctgttctgcgtcgccgattggggacaggagactgggggcttggcgctgcgattccggccgacgccatgcgcggaggaggtggggccaggaaggccggcaacaacctcctcactggccgcgacgtcgccatcaactccttccccaaccctcgccatggcctccacggcggcgaggatctccaccccacgcccatcgattgggaggatgggatcggggagattgggccgagcggtgttggtgttggcaccaacggcgacttcgtgtttggcggtgccgctcccactatgagtcagcagcctctagtggcgtcattctatggagaactcctcttcatgttcgggagcatgagggacagcttgcctcggttcggggaaggatggcgatga

SEQ ID NO: 60574 - DNA, 1023 bp, Oryza sativa
  Clone ID: PAT_MRT4530_62088C.1
atggagttcaagaagccaacgatcgggatctcctccttcctcctcctgctcctcgtgtccgccgccgccgcggcaaggccgacgcgccagctagtcgccaacgacggcaccgttgccgcgcccgctgtcgcaccggccgcggcggacgtggcggccggtgttgccgatgcgccggtggctgctgccaatgccgacgtcccggctgctgcggcagcaatgggccctgtggctggcgcggcggcggccggagcaccgatcggcgccagcaccatccctgtggcggcgggcgcgggcgcggtggggatgaacggcggcggcggcggcggcgaccaccctatggtgttcttcatgcatgacatcctcggcgggacgaacccgtcggcgcgcatcgtggcgggcatcgtcgacaacacggccgtcaccggccagctccccttcgcgcggcccaacggcgccgtgctgccgctgaacagcggcgtcaacgtcaagagcggcgcggccggcgccatcgacaacaacaacatccccttcctcaccggcctcggcggcgccaccaacgccgccttcacgtcgaacagcaacaacaacaacaacggcgtgcccgtcttcgccggcggcagcctcccgcaggggaccacgctccagaagctcctcttcgggaccatgacggtggtcgacgacgagctgacggaggcgccggggctgggctcgccggcggtgggcagggcgcaggggttctacatcgcgagctccgaggagggcgtgagccagacggtggtggtgacggcgatgttcaaggaaggcgagttcgccgacagcatcagcttcttcggcgtgcaccgcacggcggactcggagtcgcacctcgccgtcgtcggcggcacagggaagttcgccggtgtgaagggattcgccaaggtggccgtcgtgaggcccggaggtgtggcggcgactgccgcggagcacgagacggacggcgtcgagacggtgctccagttcaccgtgttgctcatcatgtactag

SEQ ID NO: 60575 - DNA, 340 bp, Oryza sativa
  Clone ID: PAT_MRT4530_62089C.1
cacagaaaattcacggatcccaaatgttctaaccgactgattgcaatatcatacatgcaaccaccccaattaagaatgcaaacccaccccatgccggatccctggaacaactccaccgaattgacccaggaactgcccctaatctaaccaaaccatgggctgatctgacatgaccaacacgacacgagcttatggaaagaataacaccagcaccaccttcttgttatatagggacttgacgcctccagacgactgctactggggaaaggccaaggggcacaccccacatctaggaaaggtggccctattgggcgacgaccaccggcttggtgggactccc

SEQ ID NO: 60576 - DNA, 1185 bp, Oryza sativa
  unsure (1)..(1185): unsure at all n locations
  Clone ID: PAT_MRT4530_6208C.1
agctcacaaaantacactttgtgtggagagaatacaagaaaatgtactgttatcattcgtaattttcttttactgggatcaattgctttccgtattggatacttggaagtataggtgctttagcacacaactgaacaagtgaagaatggagtacattttacattcgctacaatatttttttcacctttgattctcccttgatatgtaaatgccattaatttgaggaattgatgctggtacgcagaaactcgcctgtttaggagcaaaagctttcgtatcttcgttgttgctaatttcaagtccacataatctacaaagagtttccaggtccagctcctcgatcattaggatttctgataaatgtgtcaaagggtggtgttgaagtttgtagccactatgattgaagtacattaatgctctaacacgagcctcattgagaaaaggttctaacagacgcagctgaagatcggttccttcagctgctatggcgcagaagaaacgcttgaagtttcctaggtggtagaatcttaatatagatctagcaaataccatttcctttgattgtataattgaagcagatagatggccataccacaaagagagtgaatctaccattttgggtatcttgcagcccaaatgtagaagcacgtagaaggaataatattcagtctctttactactctgtgaattgttcttgtgaattacatcatacatatcaaacagagaaagaaggcacttcattagctgctccatgtttaggtaacacagggaagaagcatcagaatcctgggaagacctagaaagcttctgatgggatagaatatgaaactttatcttgtccttcttcacggcgagggaaggggacgtgcgcgcggggtcgccgcccacccgctcgaacaccgccaggtccctcagccgctccctctgcgccctctccctcgctgggcacatgtcggggcagctgcccacgatcggcggggcgtcgccgccggtaccagccgcggtggcgctggccgccgccgggaaggaagaggtggaggaggaaggaggaggtggcggtgaggggccggcgccgcggctgagaccaaggccgcggccttctccccgacctcgccagcctcggccccatccgtggccacgagtggaactccggccgcggtggctcgccatgtcccggcgatccat

SEQ ID NO: 60577 - DNA, 254 bp, Oryza sativa
  Clone ID: PAT_MRT4530_62090C.1
tgatataaaagaaaaaaaaaaggaaaatcgtgtctcgtctcgtctcgtcttcgtctcccccgattcccgagcagcttctcgaaaccctcgcggcctcgattccggcgatggcggagcccaacccgcaagtggagagggaggtggaggtggaggaattcccctgtcgcgcccacaggtggctgtactgttccaccgacaccgtcgttctccaccgatgccatccccgggatccatttcttccctttacgccgtcg

SEQ ID NO: 60578 - DNA, 759 bp, Oryza sativa
  Clone ID: PAT_MRT4530_62091C.1
ccggccgggatagatcccctcctcttcttcctcctgctcggcttcctcacacagagcttctcgttgcattagccgacggaggccaccggtggggagagcccgaggaggagcaagaaatgtctggcaacgacggagacatgaagatgagggtgatcgtcgtggaaggcgatgagacgagtaacgccccgaaggatgtatgctgcgagtacaccctcgatggctccgtggatatcaagggctcaccggcggtgaagggcaagtccggcggatggctcgccggcggccttattcttctgaaccagggtctggcaaccctggcgttcttcggggtaaacgtgaacctggtgttgttcctgacgagggtgctgcagcagagcaacggcgacgccgccaacaacgtgagcaaatggaccggcacggtttacatgttctccctcatcggcgccttcctcagcgactcctactggggccgctacaagacctgcgccatattccaggccatctttgtccttggcctcgcgctgctgtccctgtcgtcgcggctgtacctgatcaggccggtcgggtgcggcacggagcacgtgccctgcgagccgcactccggcgcggagctggggatcttctacatcgcgctgtacatgatcgcgttcggcaacggcgggtaccagcccaacgtcgccaccttcggcgccgaccagttcgacggcgaggacccggccgagtcgcactccaaggtctccttcttcagctacttctacc

SEQ ID NO: 60579 - DNA, 232 bp, Oryza sativa
  Clone ID: PAT_MRT4530_62092C.1
gcgagatgaagaggaacgaggtcaaggagaaggagaagaccgacaagcctttgacccgccgccgcatgctcggagtaaccgccttcatcggcgccgccgccgccggcaccttgttcctgctgacggcgattggcgagagcagtggacacccgaacatgacggcagatgatgatccgacgacgacccggacaatgaacgcgccgggctctgacagcaacgtgatgatctcccg

SEQ ID NO: 60580 - DNA, 2340 bp, Oryza sativa
  Clone ID: PAT_MRT4530_62093C.1
atgtctggcaacgacggagacatgaagatgagggtgatcgtcgtggaaggcgatgagacgagtaacgccccgaaggatgtatgctgcgagtacaccctcgatggctccgtggatatcaagggctcaccggcggtgaagggcaagtccggcggatggctcgccggcggccttattcttcggtatgtggagtacgatatcgccctaccacagtttggctttattgctgctttcatgggggagttaagcggcgcactgtttgcattgaaccagggtctggcaaccctggcgttcttcggggtaaacgtgaacctggtgttgttcctgacgagggtgctgcagcagagcaacggcgacgccgccaacaacgtgagcaaatggaccggcacggtttacatgttctccctcatcggcgccttcctcagcgactcctactggggccgctacaagacctgcgccatattccaggccatctttgtccttggcctcgcgctgctgtccctgtcgtcgcggctgtacctgatcaggccggtcgggtgcggcacggagcacgtgccctgcgagccgcactccggcgcggagctggggatcttctacatcgcgctgtacatgatcgcgttcggcaacggcgggtaccagcccaacgtcgccaccttcggcgccgaccagttcgacggcgaggacccggccgagtcgcactccaaggtctccttcttcagctacttctacctggcgctcaacctcggctcgctcttctccaacaccttcctcagcttcctcgaggacgagggcaactgggcgctcggcttctgggtctccaccgccgccgcggccaccgcgctgctgctgttcctcggcggcacgctccgctaccggtacatccgccccagcggcaacccggttggcaggatcttccaggtcgcgttcgccgcgtgcaggaactggaaggccggcgagtcgccgggcgccgtgacactctacgagagcgacgagaaggcggattccggtgggaggaagctcctgcacacggaaggtttcaggttcttggaccgtgcggcggtggtgggcgctaacccgaagcttggcacgtgcacccaaccgcgtgacccctggaagctgtgcacggtgacgcaggtggaggaggtgaagagcatcctgcggctcctccccatctggctctgcaccatcctctattcggtcgtgttcacgcagatggcgtcgctgttcgtcgtgcagggcgccgcgatgcgccgcaccacccggttcccgggcttctccgtcccgccctccagcatgtcggccttcgacatcctcaccgtcgccaccaccatcttcctgtaccgccgggccgtctgcccgctcgtgtcgcggctcacgggccgccacaccggcccaaccgagctgcagaggatgggcctcggcctggtgctcggcgcgatggccatggccaccgccggcacggtcgagcacttcaggaaggccggcgccaccacggcgatgagcagcgacctgcacatcatgtggcaggtgccgcagtacgcgctgatcggcgtgtcggaggtgatgatgtacgtcggccagctcgagttcttcaacggggagatgcccgacgcgctcaagagcttcgggagcgcgctctgcatgatgtccatgtcgctcggcaactacttcagcgacgtcatcgtgagcgcggtgaccaaggccaccgccgtgcgcggccgccccggctggatccccgccgaccttaacgagggccacctcgacaagttcttcttcctgctcgccgtgctggccgtcgcggacttcgccgtgtacctcgtgtgcgcgagccggtacaggagtggcacggtggacgtcgaccggagcgacggggaggaggaggatggcgtggccggcaggcagatggcggcaacggtgtaagcgtcaggatgaatcggccgtctgctcgcgctcgatagatgcatggtaggctgtcttggttcttgagacggagactgcagactctttgaggggatgagttgcattgtgacgagttggtttagcacgacaagtctccgttgatgataggacatgcgcggggggatagtgacacgatactaaagaataagaggtcgcctacagatgcagtattgttctatcatgtacgcctgtgtttcatcgattcacatttttctggccaatgtaacaagagaacgcgactgttactgaccactcatgttttttcttctgcaagagtgactgatcaatgcttttgtgcattgccgactggtgattgatacgcatactagtgctaataatacttcattttccctgcctaaaaaaaaaaaaaaaaaaaaaaaaaaa

SEQ ID NO: 60581 - DNA, 223 bp, Oryza sativa
  unsure (1)..(223): unsure at all n locations
  Clone ID: PAT_MRT4530_62094C.1
ggtgctgcaaacttgtgcaggttttctcggttctcttcattatttatccccgaacagaaagagtttgtacaactgaataatgtctaaaatnctgcaacggtcctacacaatcaatgacatcaaaagaccagatcgagcaggcacgcacattgaaagttgaaaatagacgcattggacgtcaggggataattgagctacttctactagagacacagccagtctt

SEQ ID NO: 60582 - DNA, 630 bp, Oryza sativa
  Clone ID: PAT_MRT4530_62095C.1
ccgggctgcaggatcggcacgagggggcgtcccgtgttcgacacgattactctcacctccgttcgctctcgtcttggcgtctccgctccgctccacacaatcgccgtgctctccacgcctccgccgaggaggagatcgacctcgccgccgaggccgcgcccctcaccctccacgcgctccactccaaccgtctcgcgctcctgcttcacctgcgcccagtcaccgcgccgcctctgatgtcttcctctcctcgcgccccgatccccactcccagtcccagtcccagtcccacggcgccgcgccacggcacagatccgtcacggccgcggcggcgtgctctccaccgtctccgtggccttgctcccgcgcgccgcggcgccatgcgcgtcaccgtcgccgtgggctttgctgccgcgccacgcagctgtgtgcgattcccgcgcggcgccgcgccgcgtctgatttcctcgcgcgcaagctcttcctctccgcctccgccctcgcagcgccccattccccactcccaccgcgacacggccaagctccgtcagggccgcggcggcgtgctcgccaccgtcgctgtggccttgctcccacgccacgcagcggcgtacgaagccggcgggagcg

SEQ ID NO: 60583 - DNA, 133 bp, Oryza sativa
  Clone ID: PAT_MRT4530_62096C.1
gccgccttgatgcgctgcaggtcgttcggccggtccggcttgtggccgacggagagggggacggggacgccggcgcggcagaggacggtacgggagtcgtcggagttgtcgactacgactcggttaggaccta

SEQ ID NO: 60584 - DNA, 771 bp, Oryza sativa
  Clone ID: PAT_MRT4530_62097C.1
atgccgaccacctctgcctccgtcctctccgtcgcggtctccaccttcgcggacttcgagcccgtcttcttcagcaatgtcgagccgcacccgcacgcggtgaaggtgctcgccgttcgcgagctcaagcacgcgcccgcgctcctccaccttctcgagtccgcgtcgtccgaccatgggtgtaagatcgtcggcctccgcctcgtggagaacctgtccaagctcgacgccctcctcgccgtcgtgagcgagggtgtcatcccgctcctcctcaacgacctccgcgacccagacgccaaccgggagcttcgccgctgcgcccagagcatccaccgcgtcggccgcctcatcggaggctacgcgcgccgcaagtcgaaggcgctagcgctggttctccggcgacatgtcagccatgtcttcaagggaacccgcggcgatggttggctcctcaaaaacctgcaggccaccgttccctcccgcatcgccaccatgaggactcaccgcatcgacctcgcgcgcgcgcccccgcctgatcacctcgcgagatcacgccgcggccgggtcacctgggccaaggtttgctccccaactgattatggcagcctgggtgtgctaacttggaactcatgggagtggctcttcgctctcgtgggatctggtcgcagcgcactgctgaggataaaccttggcaagtgcgcgtctggtgccgcagaatggtggtggaaggtctgctcaacagaagatggatccatgatatccagggtgccctga

SEQ ID NO: 60585 - DNA, 756 bp, Oryza sativa
  Clone ID: PAT_MRT4530_62098C.1
atgggtacaacaaaccttaatattccaaaagatattccagaccacagttccaggaagggtgcacgcactgatctgcctgacagagcatgctgtgttgtggtagaatatctcactgggggcacattgaaacagcatctcataaagcattacaggaagaacaagaagcttctatatgaagaggtggttcggcttgcattggatttggccagaggattgagcttcctgcactcaaaaaagattgtgcatcgggatgtcaaaagtgagaacatgctacttgacccacagctgaaccttaagattgctgattttggtgttgctcgtctcgttgaggctcaggatcccaaggatttgacacgcacgactggaacacttggttacatggccccagaggtgcttgatggaaagccatacaacagaaagtgcgatgtttacagtttcggcatctgcctatgggagacatactgctgtgatatgccctatggaccctactcagacctcagctttgcagacttctcatcgtttgttgtccataagaatttgcgaccggagatcccggactgctgcccgagcgcaatggcgagcatcatgcggagatgctgggacgccaacccggaggtccggcccgagatggaggaggtggtgcgcctcctcgagtccctggacacgagcaatggcggcggcatgttgctggagaagaagaagaagaagcatcccggcggtggatgcttctgcttcttcgtaccccgcgccgcgtag

SEQ ID NO: 60586 - DNA, 685 bp, Oryza sativa
  Clone ID: PAT_MRT4530_62099C.1
aaaacgacgcgcacccacggaacggtctttttgttaagaaattcctcagctcttactactaactcgcaggttgtttgagaggacggaagtcataccacagtcaagatgccttcagaagccggtcaccgactatacgtcaagggacgtcacctgagctaccagcgctctcgtcacaccacccgccctgctaccagcctgatcaagatcgagggtgttgacgacaccaacgccgccaacttctacctcggcaagaaggtcgctttcgtctaccgtgcccagaaggagatccgtggcacctagatccgcgtcatctggggcaaggtcacccgtcctcacggaaactctggcgtcgtccgcggcaagttcacctctcctctccccaccaagtctttcggtgcttccgttcgcgtcatgttgtacccttcgtcgatataaaaaaagggcttcgggctggagttggtagtgaggcgcggttctcatttggctgcattggtcgaggcaaggataaaacaaactgccttgctttgaggcattcgattctgaaagacgtcaaatcccaaccctcgaaaggactcttcgcacctgagctactcgattttgatgatataacttgatctccctatcatgcaacggttatcggcaatcgatcctgtccactgggaggggagcttcagcgatgaaacac

SEQ ID NO: 60587 - DNA, 727 bp, Oryza sativa
  unsure (1)..(727): unsure at all n locations
  Clone ID: PAT_MRT4530_6209C.1
ggccggnnttcccgggtcgacccacgcgtccgcttccttctccacctcttccttcccgggggcggccagcgccaccgcggctggtaccggcggcgacgccccgccgatcgtgggcagctgccccgacatgtgcccagcgagggagagggcgcagagggagcggctgagggacctggcggtgttcgagcgggtgggcggcgaccccgcgcgcacgtggccttccctcgccgtgaagaagttttgcagaactatctcttccacgagtgtacaggcatcagatatacgccctctcccagtcctgcgagaaacaatggattatcttttgcatttattggattcctcagagcatcagtttgagatagttcatgattttatatttgataggacaaggtctgtgaggcaagacctcagtattcagaacatagtgaatgcccaagcaattcaaatatacgaggatgtgataaagtttcatattctatcccatcagaagctttctaggtcttcccaggattctgatgcttcttccctgtgttacctaaacatggagcagctaatgaagtgccttctttctctgtttgatatgtatgatgtaattcacaagaacaattcacagagtagtaaagagactgaatattattccttctacgtgcttctacatttggggctgcaagatacccaaaatggtagattcactctctttgtgggatggccatctatctgcttcaat

SEQ ID NO: 60588 - DNA, 4425 bp, Oryza sativa
  Clone ID: PAT_MRT4530_620C.1
ggaaccgctatgtcaaaagatccgaatatatgaacgttttgatataacagggtcaaataaaaaaagatataacaagtggggcaaaaggtactatttaccccttacttaagggtgttaactcgccttatcggaataggaccagacaattttgaaaagcaagttcaaataagtaaagtatgaaaagtagggctaaattggtagttaaaaatgtacaaaatgggactgcagttcagtcactgaaatgctcttgatcgctatgcattaacatacatcagttaactacccggactagggttcaattttggttccttcaggctttccgttggctgactacaagagattaaaggggtcaagagggccaacaaccttctactagtagggcacatgcatattcacaaaagacctgcttctacgcatgaagtagccatcttgtaggctagcctgacctggtatctgatggttagtctgttcaaggtcagggacatacctatctgtaactgtccctctagctgaactcctgtgttcccagtcgaaactgtctcgacggcggtaatctggtccccatccatgatcattcctacgcctaccataagccgccgcctgttcctcctcaccaaaatttgtctgaggtcgatatgcaccattgtggtgctcctgaggataatatctatcaacaggaagagtgtccattccatggtagccgcaccctgactgggatccatatccatcatactcggtattgtatctagtaccatcgtactcggtatcgggtgaattaccacgaggaggaactgtgctccagtctctttcagagctgaaatgccttgatcttctacgtcttcttggataagaaggggacccacgccttgcagtagcactataatcaggccttcttgaatatggagcatgaccatttcttctttccactggtacctggcgtctagctgaattttcgctcacggtatcccttgactctagtattctatttgatgtccccctctttctggacttgcatactgaagcccctcgtgctctttgatcatcattatgcgaaggacttttgacgtcaacacattgaggatgagcagttctatcatcttcatgatgaccatctcgcgcgtttttcatgcgaacggcttctcttttcctatccaagtccaatctcttaccatcagtcacctccttttgttccctggtttttcttgaattgtcacctgaagtatccatttcagttcctctgagattatcattgccgtgaggactctttggctcatgttgaagagcataattgtcatcaacatctacagccacattgtatccacattcttgctgagtatctactctgttggtagttgtcttgtgcacaaatgcaacatctacatgcttatctggaggtagtccatcaacaagatctggcttcactgtccccttgttgctgccatccctgggaatcttctcttttcctgatctcatgttctcttcatgtgtactatccgtcattctgttttctctcttcgagatctctgtcttttgacgtgctgcagagttatgcccacatgcattctctccccgatgcacatcactctcttttcctgatgtcaagttatttccgcctccacttccattagcatgtttctccttatacaagctttgtagctcatcattctgctcttgatttgcatgaaaagtaactacattgggaattatcaatcgttctcctgaacagtgctcagatgtttgttctctctcgctagtgtcttcttttccaactgtgaagatctcgttatcccccttagcacctttgtccacagaagaatccttcaacatgacactatgtgccttgtgcccaacatttaaatggccatgttttccagctatcctcatattctcctctgtcttgtcagggaaactccacaaggaaacacagagaggaattacatgcaaaccattctttgcgtcgtcattcacatccacatcaccaggttgatacaatggcttcccaaagatgtgctgattatattcccatatcaaatgatagggctcctccttgcaatccaatctttcaatatctgtgggggaaactattataataagccttggcttaaaggttaatactttgtcaacaaatttgttcgctgaaacggcttggatatcaagaggaaggtccaggaccataactagatttaatccatgaggtaaatcctttggttgcatggtcacccagttgctctcatcaaaacacagattgttcttatgttggaagagatcataattcttgaaattgcaccctttagacacatcttcaagcttttctttcatcagtcgactaaaattatccatgttgaagcagagatcaactatctccctcacgacaacaatggacctctctaataacaccccatctggcaattttccacagctttccgtgttgccaggctgcacataccaatgaagtttatcagcaatctgaaccaaacactctgacaaaccatctatctcaatcctgggctgcctcagtacatcctttgtagccatatcttgggatgtccctgcagatatttccttttctgctgtacttgttaccctcttttctgtttcaccatccaccgcacaagatgcactctttgatatttcccccataacaaatgaagacggagttccaggttgcccttccttcccttccacggtttttgcaccacttaatctagcagaaacatcaaccagaggtacttcaaactgcagatccttttttaagcgctttactgcacacccatgttctagtgcaatatgctcagatgagctattccttgctactcttctggtttgcttgctttctcctctaggtgacacatttgccaacttagtggattttgttgaaaatttattaccgctctttttccttttgccagtcactttagcatccttcttagaaagatttttcgttttcttgatttttggaatagaagggaactttatatgctccccactaggtgttccagtagtagcatctattccatggtgtaaacagtagaagtaactcctttttttaattttccaagcaagttttggggcacctttgtcctttgtttcaaaggaaatttcgctgtgaaaaataccatttgatgccatgagaacatgatagcttggtaaacattctgtgtgatatgatcttggacagcgtctgcagactgcaaactggaattcacttcgtgtcctgtcctccatctttgcacatttaaagcaccaatggacagggcatgtaaatgacataccatctgcgatcatttcctccaatttacaagcaccatcagtgtcttcaggctcaagtagcactgcgatgcacttggggtggtagaagtgcccacaagattctttattacattgaaacaccatcaagccatggcgtattgttgagaggacaccaacatatcgcgcatggtgaatgatatccggcgatcccttagcatttggaccataagatggctcaagctctccgcatttgaaacattgatgttcattatgttcacaattctcacacaagaaagttccactttcctttagctttagctccacagaagtgaaacggagagttctgcatttggatttcctgccatgcttcaccctggcatggaaggacctcttgcatggaccttcacagctaagcaactttccaccatcatcacatatggcacatatcatatctgtatcatcatcagttgcattaccatcagtatcagtatcttcatcagtactatcatcattattatcatcactgctgtcgctattgctgtagctgcagtcatcactgctttcaagtgactcatcactgacaataaatcgatcttctgtacacgctctccttggtatgggctcaatggccttcctggaagcatcctcaataaagcatcgtataatcttcgacttcactaaaattggatccctctccatgaaaagcttgattagatgatggtgcttctttatgtcatccccattaggtacaggaccaaatttattgaaaacttcaccgaggtgatcaaaaaggcttctctgttgtttcttgggacacttcctgacaaagtggagcatttgcactgtgatcaatattgatcgaacttttttttcataatagcacatccgtggtttcaacagttctatccatttcccgtcactcgaaagcactgagatctttggcctctgacaatcaagatctaccctccaagctatcaccttcttgaacacatgacggttattatctgtaaatccacgcaagttcagttccttgtaatcagaacatgagacttcttcgttctcatcaaactttatgggcaagacactgaagcagactggcttgtcctcgctttcctcaaaatagtagatgtccacatcgttaaccggtggctccacgtcatcgtcgtcgtcaaacat

SEQ ID NO: 60589 - DNA, 277 bp, Oryza sativa
  Clone ID: PAT_MRT4530_62100C.1
gccgcgatcctcaagaggctcttcatgagcaagaccaaccgtccgccgatctccctgcgccgcctaagcaagttcatggaaggcaaggaagagaacaacattgctgtgattgtggcaacagtcactgatgacaagaggatccatgagattgcgtagatgatgtgcactgccctgatgttcacagagacggcttgggcaaggattgtcaatgctggcagcgagtgcctcaccttcgaccagcttgctctgcgagctccgcttgaggagaacacagtcc

SEQ ID NO: 60590 - DNA, 801 bp, Oryza sativa
  Clone ID: PAT_MRT4530_62101C.1
atgcgttctagcgggatcagcgtaattgttgtcgttcgccacctggcgtggctggtgctaattttgtgctcatggccgcgggttgcagctgctcaggctcaacaagcaccaaaaactgatccagtcgaagcggccgccctgaacacgatcctagggagatggggcaagaaggcatcgtgggagtggaacattagcggcgagctctgcagcggtttcgcctctactgaaatcgactgggattactaccccaccatcaacccgttcatcaaatgcgattgcagtttcagcaacaacaccctctgccatattaccaaactggcattagcttcaaattcactgtccggacaacttccaaaggaacttgggaacctcaccaatcttctctcgttgggcattaacttaaataattttaccggtgtacttcctgaagagctgggcaacatgaccaaacttcagcaattgagagcatcagacaatggattcatagggaagatacctcattattttggcagcatgactaatttagaagatattatgagctttagtggtttcgaaggaaactcatttgaaggaccaattccagaaaatctgtctaatctgaccagattagaaaacttgatattaagaaactgtaagatatcgggtgatctcagagcattagatttttccaagtttcgaacactaatatcgctgtttattgggacaatttatgtaaggatgcatgatagtaaaagctcttcacatagagcaatgtatgtcaaaaataataatcagcggagcagtatagcacaaatattttga

SEQ ID NO: 60591 - DNA, 126 bp, Oryza sativa
  unsure (1)..(126): unsure at all n locations
  Clone ID: PAT_MRT4530_62102C.1
cttcaagatcggaagaaatgtcgaggccggccagagcgacncaccttccccggagaggcggcatggaggacggtgcggagtactacacgaggnncccaannctccaaaccctccctcatcttccct

SEQ ID NO: 60592 - DNA, 300 bp, Oryza sativa
  Clone ID: PAT_MRT4530_62103C.1
tcatgcatgaccaaaattgcaaaattgcccgtatatggtagtaatgatcttgacgttacccatcttgtacagagaagacccgttgttgaggaagctgacgaaggcggcgacgggaagaggcaggaaagaagtagcagctgaggcggtggtcgtcaccgaatgttcggggtggacgcggcggacgtcggcagagggtgtagagtcttgactgagaggcgtggtcacggcctcacgggtggagaggatcccgacaacggcaacggggccgtggaggacgggcttgggcgccggtggagacat

SEQ ID NO: 60593 - DNA, 489 bp, Oryza sativa
  Clone ID: PAT_MRT4530_62104C.1
atgccgcatctcaattaccttcccaaagctctctggcgacgacgaccgagcaaggagaggaggcggcggcttaccgacgacggcgacggcggtgatgacggcgcaacggcggcgcacggcgcggcgccacgaaggcggcggtgcgagggcggcgcgacgacggcgcacggcgcggtggcacaaaggcggcggtgcagcggcgcgatggcggcagcgcggcggcacgaaggtagtggctcggtggagagggaagagcggagaaagagggagatggagtggggcaaatggagagggggtgtggaggctcggcgcgcggtgatgggacggcgcggcgcggcgtggggctcggcgcgcggcgatggaatggcgacgacgacagcggcgcaggctcgaggcggcgatggaacacgcgtggcgacgggacgggcggtgatggggtgcgtgggcgcgcgggtcggtgggatgacggcgcgccggctcggggcgtga

SEQ ID NO: 60594 - DNA, 2744 bp, Oryza sativa
  Clone ID: PAT_MRT4530_62105C.1
gcggcgccacgaaggcgacggtgcgaggccggcgcgacgacggcgcacggcgcggtggcacaaaggcggcggtgcagcggcgcgatggcggcagcgcggcggcacgaaggtagtggctcggtggagagggaagatcggagaaagagggagatggagtggggcaaatggagagggggtgtggagtatttataggggagagggggaagaaatataggggacggggtggcgggcctgacgcgacgccggcgcggggcggcgacacgacggcggggacgcgacggccggcaacgtgatgtcggcgcggggcttgggcgggcgcagggctcggcgcgcggtgatggaacggcgcggcgcggcgtggggctcggcgcgcggcgatggaatggcgacgacgacagcggcgcaggctcgaggcggcgatggaacacgcgtggcgacgggacggccggtgatggggtgcgtgggcgcgcgggccggtgggatgacggcgcgccggctcggggcgtaaggcgcgcgcagcagggaagatgggacgggcgcacggctgggaaggggcgcggggcgcgaggcgacgacgcgacggcgacatgagataccttgtacatacgccacactttggttctagtcctcttttcagcttcatccaatatccggactgggtgttctggatacatgagatcattgctaatacgaatttcttccaatgtagcttgttcttccggcactcgcaagcacttctttaactgagacacgtggaagactgggtgcacatcggcgatgtttttcggtagctgtaactgatatgcaacttctcctcgtctagcgatgatttggaatggtcccacatatcttggtgctagttttcctttgaccttaaaccttttcgttcccctcatcggagaaacctttagataaatgtaatctccttccttaaattccaggtttcttcttcgggtgtcggcgtaactcttcctgttgcggtcttgggcaaccccgactatgaaatccatacctatctcatcccatttccattcggtaatcctctggcatacgtcacagagcgctacgtattcggccacatctctcttcatattgggccaccagtatccttccttcagatcctggtacatcttggtacttccggggtgcaatgaatatgccgattcgtgagcttcctttaagattaatcctctcagtccaccctgttcgggtacatagatcctctttttataccatagaacatctttttcgtcggttgaaaattcctttgcaaatcctgcggctaggcgttccttcacctctcggatttcctcgttgtccttctgggctttttctatttgggttctcagaagaggttgaatgtccaaggtgtttatctgtccacgaggtactatatgtaggtttagttgggccatttcctccttaagctcaggagccatcccttccgtcctcagatgattgcaatggctcttccgactcaaagcgtcggccacaacgttggccttgccggggtgatagtgaacctctagatcatagtccttgattaattccaaccatcgcctttgcctcaagttgagatctgactgggtgaaaatatacttcagacatacaaacttcttttctttcttgagtagttgtgttataggtcgggctatcttagagaacccctcaatgaacctccggtagtatccggccaaacctagaaaactccgaatcttagtcacagatttgggtgccttccattccgtaatggcctcaactttagcaggatccactgctactccaccggctgagattacatggcctagaaaagcgacttcttctaaccagaactcacatttactaaactttgcatataatttatgcttccgaagtttctcgagtaccaatcgcaagtgttccgcatgctcttcctcatccttggagtagattaaaatatcatcgatgaatactaccacaaatttgtccaagtaatccatgaacaccttattcatgagattcataaagtatgccggggcgttggttaatccaaacgatatcactgcaaactcatacaatccataacacgttgagaacgcggtcttaggtatatccccggtcctaattttcaattggtggtatcctgatcgaaggtcaatcttagagaacaccttagctccttcaagttgatcgaagagatcatcagtccgtggtagtgggtacttgtttttgaaagttacttcgttcagtgagcggtagtccacacacattctcatgctaccatctttcttcttaacgaataacactggggctccccaaggtgacgaactgggacgtacaaatcccttttcttgcaactctctgatttgctttttaagttcttccaactcattgactggcatccgatatggtctcttggatatgggagcagttccgggtatcaggtcaataatgaactctatgtcacgatctggtggcattccaggtaaatcttctgggaacacatcaggaaatcgcttcactacgggcattccctttaggggtagcttggtaaatatgcctctggcacgttcggttagtctaggatcttgatccacggtcgctgtcatatccgatccccaaggtgtggtcagggtaacttccctacgtctacagtcgattactgtcgggtcctttccccacctcccaccgatctcgctcgcgccggcgagcccgcaaccgtcgacgggccctcgtctacggctcctccgggccacgtcgaccat

SEQ ID NO: 60595 - DNA, 714 bp, Oryza sativa
  Clone ID: PAT_MRT4530_62106C.1
atgtcaaccaaggctaaaatgattgtttcatccaccttggtatccctgcctgccatcaaatcttccttcatacctagggtgaaagtcttgttggaatatgttggaaatatcatcatactttggcatattttaatccaaaataacaagataataaacataacattcgcaatgggaattgatctagtgatagtactagataattgggagaatagaagtataccccgagaatggaccttcgctggatccgtctcctcaagtagcgccaccgctcgctgcgcatgcaccacctccagcagcaccagcatcagatatgttgacgtagaggaagcagagcagtcgcgcccgagagcgctccccaaaaacttgatcgcccgcctacttgtgcagtggttgagggttgatttagccaagagtcaagtgcattgcttccattgtaaagctagtgtggcacttgatcatttccgagctgcgccattgcttgttactcttggaggttgccacctcctagacggcttgtggaggagttgcccggtgacctatccgaggagattgtggaggaggtcggcgccggttgtgagtggtttagagttcaccaccttcgaagtgaaacaagaactacccctagtgatcgaggcttgggtagtcctctccgtgcgccggctcccgccttgcccaccccttgacgaagggggtgtgcgatggcatcatggttga

SEQ ID NO: 60596 - DNA, 377 bp, Oryza sativa
  Clone ID: PAT_MRT4530_62107C.1
aagcacattgcacaaacgtgggatagagacatattatctctcaggccatgagcacgctctgggatcagcctatcgatgttgtgcacggaccggtcagggggcttaggcgacgcgacagagctctgcctgagatcaaccactcgcgcgacctatttccaatgcagttctatgacgctcatggccgtgcagatcagcgcctccacctcgacgggccacaagtcggagaaaatcttcgcccacatcctccattctaagcgcttgaacactgagatagtctaggtgttggcgaagaacctgcaggagaccatgacgacgccggcggcgatgatctacagcgaggacatccagcccgagtgggagatgaacacccccaccgt

SEQ ID NO: 60597 - DNA, 415 bp, Oryza sativa
  unsure (1)..(415): unsure at all n locations
  Clone ID: PAT_MRT4530_62108C.1
tctgactcttgggctgactcgtgggagcaaacatatgattgtatataantgggggggggcgtttattgggtcggggtgtaaaataacatacatgctttcctgatattttcttgtatatatgtacacacacacgacaaatgctggcatttctattattattgaacaatttaaaaaaaaaaaaaaaaaaaaaaaaaaaaaaataaaaaaaaaaataaaaaaaaaaaaaaaaaaaaaaaaaaaaaaaaaaaaataaaaaaataaaaaaaaaaaaaaaataaaaaaaaataaaaaaggggggggcctttttaaaggtccaaatttatatttccgtggatttcaacaatatatttttttaatggggcccccaaatatatattgatggcgccgtgttttaaaaacatcttaagttgtaaaa

SEQ ID NO: 60598 - DNA, 402 bp, Oryza sativa
  Clone ID: PAT_MRT4530_62109C.1
aaactgacaaatctattagatggaaagagcagcaatattagaaagctaagagtctatagaatatttgttatacaaaaggatttgcatgaaacagctgcatggtggatactggacacaaatactgaaccataaagcctaacaaacacccttaacaggttagtttcttgtagggaaccacttccttaacgaggtagttcctcttaagggaacattatacgcttattggcccgtttcaagaattggttgagccatcttgaccgattctttgaccgttgaaaaaccgaggcacctttcggaagatacccaagtgtagacatgttaaattccggcctttgtttttctgaaaacctaaacaagggcaaattaagagtttttgggattcagaaaatttgggcagaaagt

SEQ ID NO: 60599 - DNA, 1065 bp, Oryza sativa
  Clone ID: PAT_MRT4530_6210C.1
atggtgagagccgacgacccgctctatgttgcgctacatgaggacggtcggtccggtgatggtaaccatatgtcaccgacgcagtgcgactatgagatcaagtacgccgatggggcatcaactatcggtgcactcatcgttgaccagttctccttgcctaggatcgccacccgccccaaccttccctttggctgcgggtacaaccagggcatcggagagaacttccagcaaacatcgccggtgaatggcattcttgggctcgataggggcaaggtgagttttgtatcgcagctcaagatgcttgggatcatcaccaagcatgtggttgggcattgcctcagctccggaggagggggcctcctcttcgtcggggacggcgatggcaacttggtgcttcttcacgcgtcacttgggaattactactcacctggctcagcaacactgtacttcgatagacattcactaggcatgaacccgatggatgtggtatttgacagtggaagtacatatacatacttcactgcgcagccataccaagcaactgtttatgcgatcaaaggtggtctcagcagcacctcacttgaacaggtttcagatcctagtcttccactgtgctggaaagggcagaaggcattcgaatctgtgtttgatgtgaagaaagagttcaagtcattgcagctgaactttggtaataatgctgtcatggagatccctcctgaaaactatctcattgtcactgaatatgggaatgtgtgcttgggcatccttcatggatgtagactgaatttcaacataattggagacattacaatgcaggatcagatggtgatatatgataacgagagagaacagcttggatggatccgtggatcatgcgtatttggtttgcgagccgagttacaaccgtcggatcaaggctgcacggtgcagatctttccgccgcttggaaaaacagagcagagtatctgtatggccgccgccgcttccgagctccacttcgccggagacgcgcaacccgcggcggcggcggcgctgatcgccggcgagatatcaccttccacatga

SEQ ID NO: 60600 - DNA, 637 bp, Oryza sativa
  Clone ID: PAT_MRT4530_62110C.1
actagtggacccctggacccccgggttcccccgattattttctttttttttttttttttttttttttttaaaacacaagaacttgttttaacaaagcatacggacagtacatatacggttacaacacccagtctttatacagttctgctggagttccatctactggctgtcattgtatctcaggacagacaggttaacataggtacaacgcaattacaggctaaaccgaagcgaactacactgtcagcatctctaacagtatcgtcaagcaagcttatttacagctgctctagtaaatttacaacgtccctggcagaatccctctcgtttctggcagcgacgaggcacggtccatggccttagcaggacatctcacccgtcagctgcatagaaagcaaccgacttcagtggaatcacctcctgctcctcagagttctctatttgctctgcagggaaatgaagtccagtggaacagttctcaagcacctcagggctcttcatccatgctttgtgtgcttcaatggctttcagcttatagcgaaacatctcagataaagaaatggttggtttttccagttcatctccctcaacatggattccagtaccctggcattctgggcaaaggatggatgttatt

SEQ ID NO: 60601 - DNA, 525 bp, Oryza sativa
  unsure (1)..(525): unsure at all n locations
  Clone ID: PAT_MRT4530_62111C.1
cccaatagtataacctttagcctctaaaagtnttatctcaaattatagcaacttcttcacctatagttcgtcttataaaacagtcataaccttcccttaattaaatttcttacacatatatttctcctcttatcaatcaagtcccaactgccttttttgtttcagtgtgttatttccggtaactttcgtaatatatccgtatatcctatctaaaacttattatattttgggatggtgatggtattatatatctttcttgcatgccatgcaactagagacgggggaagctatgtgtaatgtatgtgcatgtgtttctctggtgttggtttccgcttctgttgtattcatttgtatcggtcaatgggtatctattattcctaattagttccttgtacttgtaatgtatgtcaaaattaataaaaatgtaatcgataaatatctcttctatcaaaaaaaaaaaaaaaaaaaaaaaaaaaaaaaaaaaaaaaaaaaaaaaaaaaaaaaaaaaaaaaaaaaaaaaaaaaa

SEQ ID NO: 60602 - DNA, 532 bp, Oryza sativa
  unsure (1)..(532): unsure at all n locations
  Clone ID: PAT_MRT4530_62112C.1
aaccccgcccgacccacgcgnncgaggaaggaggaagaggtggcggtggaggagaacttccatcagcagcagcagcagcaaggggaggaggagcggggcggcctctcgctcgccggcggcaggcccaaagtattcccaatgtcgagccctccacccaatccttcgcaacttacaattctctatggaggatcagcacgtgcctatgacccagtgccgccagagaaggctcaagcaatcatgcccattgccgcagcagctgctgcagcggcgtctgccaccaaaagcaatgctgccaccgccgtcaagccccccgagatgcctgcagccaatgctacccaagccagaggctctcccgtgcccacaagaccgctcccattgcagagcactcccggagcaactggacaaccccaaggtgccggtgaccccagcccaattagaaagctccaggccgacccccccactgccaggaggcacccccctcagcgcctcccaaagaaacgcccggaacacaagctggcgagcaaagccccac

SEQ ID NO: 60603 - DNA, 681 bp, Oryza sativa
  Clone ID: PAT_MRT4530_62113C.1
gtgcggcggcgggatgggtggcacggcgcgggcgcagccggcgaggcgggcggcctcggcggctcgccggggaggttcaaggggacacggggagggtcacggcgcaaggaatcggtgggagaagggcctacggcggcggattgcagcggcggccattgccggccgagagaaggggaaaactcgccggggcaacggaagtccaattcaccggggaaggagcttctacacggttccgggaactcgtttcaagcgacgggcggcgacgagctagctatggcgaacggcgacgggcgcggcgcggcgtctaagcgcgagagcatgagggtgacgacactgcattcatcgagacgaagaacacggtggggagctcaccgacgagaggggagcggcgttggcggcgcggatggagtcgcggcgagacggtcgcgacggcggggcgacgcggcaccgagggtgcgcggccgaggaggaagggagggagaggtggcgcctggagctcctcgtcacgcgtccacgcacgcaccggctcccccggtgctcggcgacagacggcgacggcaaggacaggtggcgaccgggcggtcagtcacgaccggcgcgtgcgcgggaaccaaaagcgaggctttgttaagattgatctgggttattttgggacggaggattaatccgctgcaggtcagg

SEQ ID NO: 60604 - DNA, 642 bp, Oryza sativa
  Clone ID: PAT_MRT4530_62114C.1
ggcttaatgtatgcacaagtcttcacgcaatcaaatttggtatttgttattgggatgcttggtatatttctatctaatctaggtatggaccactagaaagtaattatgaaagtattacgttatttgcaaggaactaagcattacatgctcacatatataaaaggtcagataaacttgaggtcgtaggttattcagacgctgactttgcagggtgcttagacactaagaaatccactttgggttatattttcactctcgtggagggagttatttcatggaaaagctcaaaaccgatgctcattgcatcgtcaacaatgcaaacggaatttgtgtcatgcaatcatgcaacagggcaagctgtatggcttaagaattttatcctgaaattaagagtggttgatagcataaccaaacaattagtaatatactacaataatgaggttgaagtcaagtgaagcggttaaacacattggcattaaatttcatgttgtgaaagatagagtccaggataaaaaaaataaagttgagtacattagtactaaattaatgctcgtggatccattaaccaaagccttacctcccaacttattcaaataacatgtagtcggcataggattaagtcactgcctttgattaatatcc

SEQ ID NO: 60605 - DNA, 272 bp, Oryza sativa
  Clone ID: PAT_MRT4530_62115C.1
tcctgccgccgtcttccgtctgccgtctgccgcgccatctcccccaaatcacccagcaaaatcaaaaatttccccccaatcttcctcggcacggcgcgctctcttccctccccttatccgctcctccttccctcgcaagccaccgccaaaatccattccaattcaaagtccccccccccctcaaattccccccacccccgcattacaaaggcccgcctcgtcccccgtcccatccggtccccaccgccgcgccccgccgagctctcccacaa

SEQ ID NO: 60606 - DNA, 1310 bp, Oryza sativa
  Clone ID: PAT_MRT4530_62116C.1
ttttttttttttttttttttttttttatatgaaaggctaagaagtacttttattggttattatcgagtattgctcagagctcacgctcgatctacagcatctgacagatgaccatgactgaacgtctcagaccaaaccatctactcaacctcgttagaagaaactaattagcactaatcaaactacccaactacccaagtagactgagcgtcgagatatttacatgtgttttcatgacctcctagagccgtcgaccttaggaatcctgcagctgagcggagcggctggtcagagggacgtagcggacggacgcgtcgttctggacggtcaccgagccgtcggcgttcttgtcgaccacctgcagctcctggaagtagctgccgacgggtatgaccatccggccgccggtcttcagctgatcgaccagaggctgaggaatctccggtgccgcggcgcccacatgaatggcgtcgtatggtgcatcgtcaggccaaccaagcctgccatctgcaacatggaaagaaagagatccatccttcagtaattgtgctgcggcacttctttggacattctcagtcgaagcagcgacaagctcaggaatatgttctatccccactgcacggccttctggtccaaccatcattgcaaaacaagctgtcaagtaaccgctgcctgatccaacatctagagcatgcattcctggctgcaagtgatccttcagtagctccaagcaggtcgcatgcatgtgaggagcagatatcgtcgcgttataaccaataggcatagggctgtcagtgtaaggagtaaggccctctgctacgaacaatgctctgtcaatgctttccattacttcagccactttatcagttctaacagcaccatattgcttcaggtattcgacaagagctttgttcttgtccagtgatccttgagtccagaattgcgccatccggtggaacgggatgcagcgcagcggcggcgggggcggtgttggccggggaggagtcgcggcgaggaggaggtggtggaggaagcggcgggggagcgcggcggaggagggcgacaggcagcgggcgggtgaggcggacgcggacgcgatggcggcggcgaggcacatgacggcggccccccgtgcgtcagaaacccgttaaaaagaggacgaggcggcacgaggaggggagcaggacaggtggtgggggtggttgccgctgcggtggccgtgtggagaagccccctcccgactcctgccccccccgccggccacctctggtggccgccgccgccgccgggtgcctgccggctgccgcccc

SEQ ID NO: 60607 - DNA, 454 bp, Oryza sativa
  Clone ID: PAT_MRT4530_62117C.1
gtattatcgcggcttcgcttccggggagaggagagggggaaaattaaaaccctcatgcacattcttccctccccctagctcctaggcagggtctcggctcgactcccaatcttaaggattcttctccacgctccccgccgcgggcgccatggaggcggcggtcgccgacgcggggcggaagctgctcaaggccgggatcgccttgcccgaccagcccccatcgctggtgatgccgcccaagatgaagttggaggtagaggacggccagatgggcgacggcgccgtggcggaggaggtggcgcagccggtggtgcgtggcttcatgaaggactgggacgccatggaggacctgctcaactacgtcctgtacagcaacattgggtgggagtttggggatgagggccagatcctcttcacagagccgctcttacacccaaggcacttttggagcaac

SEQ ID NO: 60608 - DNA, 336 bp, Oryza sativa
  Clone ID: PAT_MRT4530_62118C.1
atgcagctcaatccgagagcacgaactcgtcgaaataaaagtaaagcaaaaaaggtggcgatgcgccgagattgtattggatgtgactctatccatgcgtggcaatcatcttgaagcacatcaacttgaacccgatgacgtacacctagtcatattatcagaatcagctatatcggctagccccatccgactcgaactctgccgacctgaccttagctgatttggactgcagccgattcttactctgtttccgcaatgatcttcatcttggattccacttcgatctgatcttcatctccgatgccaataatgatagaatttaccaaatttggtcat

SEQ ID NO: 60609 - DNA, 336 bp, Oryza sativa
  Clone ID: PAT_MRT4530_62119C.1
atgcagctcaacccgagagcacgaactcatcgaaataaaagtaaagcataaagggtggcgatgcgccgagattgtattggatatgactctatccatgcatggcaatcatcttgaagcacatcaacttgaacccgatgacgtacaccgagtcaaattatcggaatcggctgtatcggctaaccccgtccgactcgaactctgccaacctgaccttagccgatttggactgcagtcgattcttactctgtttccgcaacgatcttcatcttggattccactttgatctgatcttcacctccgatgccaatagtgatagaatttaccaaatttggttgt

SEQ ID NO: 60610 - DNA, 430 bp, Oryza sativa
  unsure (1)..(430): unsure at all n locations
  Clone ID: PAT_MRT4530_6211C.1
tcctcttatttctaacatgctataagtaattctgtagaatggatacaagggattctattggagtaattatcttcctatgacacctaaaagtgtcnatgatatccacaaaagaggtggcacagttctgggaacatcacggggtggtcatgacgccggggggctccttttttccgcgggctcttatggaaaccaacacatttcaagtatcggggaattaataaggtagcctttttcaattggcagaaaattcgtagacgtggtctaaaagttgctgttgctggtgttcccaagacaattgataatgatatagcggtaatttatgattacaagcgtttatttttgcctgcaaggggatcctctagagtcgacctgcaggcatgcaagcttgagtattctatagtgtcactaacaagcggacgtcactggacac

SEQ ID NO: 60611 - DNA, 327 bp, Oryza sativa
  Clone ID: PAT_MRT4530_62120C.1
atgcagctcaacccgagagcacgaactcgtcgaaataaaagtaaagcataaagggtggcgatgcgccgagattgtattggatgtgactctatccatgcgtggcaattatcttgaaacacatcaacttgaacccgatgacgtacaccgagtcatattggctgtatcggctagccccgtccgactcgaactctgtcgacctgaccttagccgatttggactgcagccgattcttactctgtttccgcaacgatcttcatcttggattccacttcgatctgatcttcatctccgatgccaataatgatagaatttatgaaatttggtcgt

SEQ ID NO: 60612 - DNA, 408 bp, Oryza sativa
  Clone ID: PAT_MRT4530_62121C.1
attggggattatttttaaattgggttatttttttcactttttacattattaaaccattactaaaagatgcaaataaaaaccaccatcattcacccatccgaagcaacaagtaaacatattactgataacaacaagaatgctacaaaccattagccataacactgaatacacaatctagaacacaaataaccatccaagatattcataatgaactgacctgaccaattaaccaaggaatagcattatatctttgtgaatgaatccattttcattgtgaactctaaaattctccaccaccactggcatgactcaaattgacactcagatcaacaatatttccagtgaacagttgatacatattaaaaacgtctttcaccgcagactaaaaatgtttaaccacataataac

SEQ ID NO: 60613 - DNA, 2826 bp, Oryza sativa
  Clone ID: PAT_MRT4530_62122C.1
acgggcgggtcgggtctcgtgtatcgcgccgcctcgcttccttccggccgcggctcgtcacgcttctcggcctcctccgggaggaagacagtgagataagcagagagattgaggcgcagaagcatcggcattgagccgaatggtgtagagagctccagggatggatcgccggagctggctatggcggcggagatcgacggagaagagcccggccgagaccgagagctcggtttcttctccatccgagaggctgtctgatgaacaggatactccaaagagttctccaagctcagttcaatcaccggagatctcgtcgaaggaagcgcaggatgacaatgtgaaggtgaaggtgttgagcgagagactgtcatctgcagttttggacatacgtgcaaaagatgatcttgtgaagcagcattcaaaagttgcggaggaagctgttctaggatgggagaaggccgagaaagagatagcatcactgaagacccagctgaacgctgcaactgccaagaactcaacactggaagacagaatcgttcacctcgacggcgccctcaaggaatgcgtcaggcaactccggcgtgccaaggaagagctggatcatggcatccaggacgcgctagcgcagcagtcgcgagaatgggagtcggagaaggccgacctcgagctgcgagtagtcgagctgaaggcgaagctggaggcgaagtccgagttctcggtgaacgctgaaactgatgcgagctcaaggctggcctccttggagaaggagaactctgctctcaaggttcagctgctggccatgtcggaggaggtggagctcaggaccatcgagaaggagctgaacaggagggcagcagagacggccagcaagcagcagcttgagagcatcaagaagatagccaagctcgaagccgaatgcagaaggctgcaggccaatgcacggagagaactcaagcgtgcaccaagctcggtctacgccgagtcagtcaccgattgccagtcagactgctcggactcatgggcctcgattctgatcaccgagctcgatcaattcaagaacgacaagagcatcacgaggagtgcgagcctcgcggctgcagacatcggcatgatggatgacttcctggagatggagaagatcgcgtcggcgaatagcccatccaagagcgaggccgaggacgccgctagcgtccagctggtgaagctcgaggagaagatcaagaggctggcaatggagaaggcggacagggagaaggcgctgcacgaagctcagcgagagctcaggaacacccggcatcgggcgatggtggcagaggagaaatcggtcgaattgcagaggcaactgaaccttgtcaagggagtgaaacattccatggaaaccgaaatggaagccatggagaacaggaggaatgaactggaggggagaattgagctcgcccatggcgagatcacgagcttgctcgacaagggccgcattctggaggaacgtctcgagtccgaaaaggcgctgacgctggagctggctgctaagtatcagcagatggatgcactagaggcagagaggagagagctgcgtggtcacctggaagcatcacaatctgaagccaaaaatctcggtgataagatcactcttctagagaagaagctggaggaggagaaggcgttttcaacccggctcgcagtgaggtgccatggaatcgaagctctggaagagaagaagaagggtacagagcatgagttggagtcggcacgagaggaaattgcatctctgcagaagaaagttagcatcttggaactgaaaatccaggaggagagggcactgtctgagaaactcgcgacacggtcttgtgatctagaggcactgggtgtgcagacaaatgagctcagatctcagctccaatctgcaaactcagaaatcgctggcctgaatgagaaggttaagatgcttgaagaggctgaagagaagcacaagccattgactgcaggattggagtcccagctcaggttggcacaggctgaagccatgcgcctgaaggatcatgtcagttcgttggagaagaagctggaaagccagaagaacttgtcatctgcctacattactgcattggatgcttctgaagcccagaagaacaaattcgccagtcggtttgagctcaaagaggcggaagtggaggaattgcgcaggaagatccgtttgctcgaggaggaaattcacaaagagaaagcacaatcttctgaacttggagtgcaatgtcagaatttgaaagagcaatttaccagcagagctcttagccaaccaatgaaacctatggcaagtaaagaacttcacattaaaaaggagaaagagctagctcgtgcagcagggaaactggcagactgccagaagacaatagcttcactgaacaggcaacttaaatcgttagcagattttgatgagtttgtccccggattcgagaacgacagcgtaatagctgaaggctgggaggaaaatggtctgaaactgttgaactctgcaaattatccagcacaattgggatgtttggcggtcaaatgattgctgttgttgcgagaagactgccattgttttttgttctggctgtcatatgatcacatggttgttgtgatgaggagattgccaggatccttctgaagatgctatatatatatggagataagttaatcgtttatagataagcaaatgttcatacggaaacgatgttaataaagttattcaagccttgaagggaactatgtaaagattaattttgttccccttgtaccactcatggaaatgggcattttcttttcctggcattaaaaaaaaaa

SEQ ID NO: 60614 - DNA, 204 bp, Oryza sativa
  Clone ID: PAT_MRT4530_62123C.1
atcacaaaagatattatcaccttaagcagggaatccttctccacattgaatgtccctaccaaatccctaaatgtgatactaaatgtgtagggtttgtgcatacagtgtacatgtactaaagaaagtaatgacattaacaaatccaacagtcatatttacattcaaatcaattttccattgtcattagggtggcattaggtggtc

SEQ ID NO: 60615 - DNA, 501 bp, Oryza sativa
  Clone ID: PAT_MRT4530_62124C.1
ggttgtggggttttaaataaattttttttttttttttttttttttttttttttttggacaagtgattaggggatattttattacttttaactgccgcattacatatttacattacaaattatactgaaattagtacaaaacgccacgagcaaaaacaccgtggcgtggccccccgcggtttttttccgaaatctcaacgggggggcccaccattttcggccgccatgccggtgcccttcttccccattttgcccacgtcgttaaacccctgccccgtaatttggtcccccgccttaacccgaataataaacttcttcgccgccggcttcccggcggtgtttgtcgccctccccgtcgcgggggttgttcccttgttccccccgggggaagccttggcgcgcttttgctccaccacgtcctccggaatagtaattttttgcctaaacaccttcgccgggcttgccgccgacccgtaaatattccggacgcctgggtcaaccc

SEQ ID NO: 60616 - DNA, 231 bp, Oryza sativa
  Clone ID: PAT_MRT4530_62125C.1
gagagagagaaggtatcaacaagactccctgaagagcggcctgccgctaccatctcctatctgtgccttcagtatgtgcagcactctcacatgtgaaccaaggctaggaggaggccatggcagccaaggggggcatggatgtaggtcgcaacatctgcagactccaagaacattcttgtgatggcgggaaccaggttcattggagtctttcatggccaggctccttgtcaa

SEQ ID NO: 60617 - DNA, 500 bp, Oryza sativa
  unsure (1)..(500): unsure at all n locations
  Clone ID: PAT_MRT4530_62126C.1
gggtgcaggactctgcacgagctcgagttttgtnccctttttttaanntttttttttttttttttttttttttttttttttttgaccaacaatgggnaacagggaacccattattatggtgtgctacagcaattacatacattctacttacaagcggatggacnacaaaatgggacgcaacattattcgcacctggcaacaggctccagcctacttacttccttacctnattgaattgccgactttgggtggctgggnctaaaacctataatanaggggggccctataagaggaaattcnaaccaacgtccacataataacaatttttttttttgtttggggcagctctctcccngaaacatngaaantttttggacaccgtgcaattattatatcagcgattattgttctagcttacaggaatnaaacnntcctatactcaaaacctccattccnaattgaaacaggattnaagtatggtcttangccnaatgttgtcc

SEQ ID NO: 60618 - DNA, 1981 bp, Oryza sativa
  Clone ID: PAT_MRT4530_62127C.1
gagcctaattcactcggtgagaggtgttggcatacacccctaacacccaagttagaagtattcttaggttcaaagacacctgtttcttcttcaaattctttacgcactgtgagatgttaactgcagcctgcacagcatcaccgctatgcattgtccccaggggatgttactccaggattttgtatgtacgctccatttttacaccgtgcctgtacatattgaaagcatgactggtttcttcaacttggattatcaaagtcatcctaaaactccttccttcagttgcatcagatgagtacggaggctggactcctgtaccaagggcaaccttttcttgccttgccatgtctgaaagttcagaaaccaaagacgtcctaccttcaacctttgataggaggtacaaaattgaggaactcaaagcttgcataacatcaaccgctgagcttatagaattcttaactgcaacagcatctgcctgtgctcctgatgtaactggaaggcgaagtgtgcatgcttgtaaagcttcaatagccccaatcaaagtactaccgttctctccttctagtttcggccaatgttgaagataagcaatctgctcttttaaaacgtagtacagtttgagctcttgttgcaggagttgaacatcaattcttctgactgtaacagaatcccgcagctgcacgatacttttccacacactgtaaagaatactctctatgctactcttttggaaggttagtgtatcttctgaacgagcatttacaaactgccactgcaggcatctattatacagcagacgtaattggtgaatattctcaaactggcttgcactcttcttccctttcctcgcatcaactatatagttaaacacaagaggtgcaacgcctgattgacttgttgaacaacatcgtgatcggcaaggtgccgaaggccttgtcctcaaaggactttgaaaggctgtagaagcaggggatgcagctgacaagaccttgtttggtgacgacgagcgatgtagaacaggtgaagacagagtcctgctcgggcgagtagcagctttagagttttctgatgtctgtgaagaaacatcactaccagattctgtcttatcctctcttctgctctcatgtgtagccaatctctttgccaatccgttcaatggctgattcagaccattggctttgacttcagctggacaaatcctccttggtgaaagcccccttgtagggtttgatggagtgactgacctgataggcgtgttggcaacaccattgcttctcgaagttaagacggcagagccacggccacccatcattgccgccggccatcggtgttgctcaacgaccctcttgtttggagtctctgatggccgagcattctcacattggttgccaatgttcctccctctaagaggacttcttttcctctcagtctcggtcacgtttcttgcctgcaccttggtctggtcagaagatgagccatcagcaagcttgtgtctcttcttggcagaggttgccattgccatggactccttctgaagcaatggaggcacgctacgagctgatgcccacaagccatcagggggctttgtactggctgcacgacgagagatgccatgtacctcggtggctgccgcaacacgcaccggcgtcctgggcctcgacgcagcgccgccaccaccaccggacggcgtcgagctggaagaaggcgtggaagacctcctcctctcagctgactgtgctctgtttgtcgatgctgtgccttcagctgctgaagccctgctcagacttggagacgtgcatcgcctcaccgaggaagcagcagcctgtggcgccggcgtgccgccggacttgaacctggaggccacctccctcctccgacctgccggagcagcaatgttcttctccggtggcaccagcggctgccgcaaggcgcagtcgacggtacctgcggccttcctcccctctgtcttcacggcatccat

SEQ ID NO: 60619 - DNA, 636 bp, Oryza sativa
  Clone ID: PAT_MRT4530_62128C.1
atggaggaaaatccaagaaatgaaccaacatctgctcctccaggggcaggaaatatgacactctatgggcacaccatgttgtatgatgagcaccaaatgatgtcagattctacgaggattgggcaacaatgtaccttcacagggttgatgcacgaaataatgcaaactccaaaaagtgctataaatgctgatcaagattatttgggcatgtccagagatatcttacatactccagctggatttgagaactcaatgataatgacgagcaataggtttcctgagaactatgagcaaatgggaggtgaaatagaacaaggaacacaggcaatttgtgatcaatgggcaagcaagaatatagaagaactatacaacatcaacatgaacaatcagcagggattatcttctattatcaagacacttgccagtcgatggagcaaaaaagatatagatgaactatacaacatcaacaacacgcatcaggttgtaaatggcagcacaccggaagttgaaaacaatgtcagcgcatcggaattggaaaacaatggcaccacatcgaacaaccaggatgatgaagacagtgagaaccaaaacacctgggcatttgaatcaaacaatgaaacctctgagggacaataa

SEQ ID NO: 60620 - DNA, 830 bp, Oryza sativa
  Clone ID: PAT_MRT4530_62129C.1
aactttagtagggaatcaggaactcctgaagtgcgggagattgaaccttgtagacttggcaggatcagagaatattgctcggtcaggtgcaagagagggtagagcaagagaagcaggagagatgaataagagcttgttaaccctgggtcgtgttattactgcacttgtggaacattcggttcatgtgccatacaggttcagtaagctcaccagactgctaagggaatctttaggtggaaaagccaaaacgtgcataatagctacggtttctccctccatccattgcctagaagaaacagtagttacacttgattatgcttatcgtgctaaaagcataaaaaacaagccagaggcaaaccaaaaagtttgcaaatctgtaatactcaaggatctctaccaggaaatggaaagaatgaaacaagatgtaaaagctgcaagggaaaagaatggaatttatattcctcaggaaaggtttgctcttgaggaggcagagaaaaagacaatgagggataaaatagaatatttggaaactcagaataaagagttgaagatgaatatcgaggagttgcaagaaggaatatcttgatcttgaagaagctcattctagggctaacatttcgctcaaggaaaaggagttcataatatcaaacttactgcatgctgagcaatcaattgttgaacgtgcaaaggatatacgcggtgccttggagaatgtatctggggatatctctgctcttgtagataaacttggaaggcaatccaacactgaagctgaaaataaagggctgctatttgatttccggtctcaattggatcacggtcttgacctt

SEQ ID NO: 60621 - DNA, 138 bp, Oryza sativa
  Clone ID: PAT_MRT4530_6212C.1
actaaaccctgacagggattacgagatgtaaatttgcatgcagatcagttttcacgcgtatttaacacccgtgaaatggaatgagcaaacgacgtgctaaaagcaaaattagtgaggtaggagtactgcgtacttgtg

SEQ ID NO: 60622 - DNA, 2499 bp, Oryza sativa
  Clone ID: PAT_MRT4530_62130C.1
tcatgtttgtcctgtaattttcttgaacaccatcggtccagttgcctctcggtcatgcctgtcaaatggcacgtcgctcttcactttctttgtgtacctctttaggatgtaggcagcgggtatcttctcaagttgtacatgaacaaatgcccggagcatgtgtgtgcaaaacatgcatgtatgctcccactgtttgcactcgcatgtaaacacccctgcgtcaacatctgcaattagcttgaattgcttctgacaccaatcgtgtttttcagaacgtttggtgtgtgatactatccacccgttgcggaaatcgtggtcttgtgaaatcctcaagtcggtgctgtcctgtagcgcctcctcaaacaatctgaaagccgccctggtgtacagtctcgacatctgtataacaaatggccacctcacagccaacattggctttcccgagcatgctcttgtttcagcagcctccttctccttcctatcagttataacctccaacattctcttgtgcttcaccaacttgttcatgctctcactgcgctgcgtggacgtcatcctcccgcagtagtccttcctgaagaacgcaggcacccacttctccctgatatcatataaagctttcatgatgggacagccctccaaatcatacctctttaagaattgatcccaggatgtttcaaactcataaggtttgtaagtttgattgatgcacaacatcatgtctggttcaatttgttcgttccgttcaaaaattgtgttcagcgggtcagagtggcagttaaggatatgccatcgacacagccggtgtattatcccagggaagcaccttccaacagcgacagccattgcaggatcttgatcattttcatcgagctgggcgtcccagtaaaactttgggttttgcaacgtgcactcgttgaaaaactccaacagcttgttgatgtcgtttgcattttccatccggacattggctgctttcctgttctctacgtcgcgggtcgtgaatgggattttgtccaggcctccatgaagatcatatagaacgcccatgatacagctttgcggcacgtgactttcttgcattatgtccacaatcttcatagccgtgtcatcatgattcttatgtgcacgcatgggctttaccgccgaaggagatggcgttagagggtggttgtgctgtagctcgaccacatcatactgtaccgatgagagcacgccaccgtcatagttgtgcctcagcttcacataagccttgcaccccattttcttggatggtttcttccgttctctatcacaatctgcgacctttgacacatgcttgccctctctcgtacaacacacctcgtgaatcgatttgtgcgtgcggctcttcttgatgtcaaaaccagcgtgatatgcatatgtcttgtagaagttgtatggatcgtcgtatgtagggaaagccatacctttggtgggcaccatgtgcggtggcacgctgggaccctcatgcagcgcatcactcaggcgcttgacgatgcgtttggacaatgcacggtggtggtcgctctctagtgttccaatcaaattgtagttgttcgaatccataatgtcgacccgcctatgtgcaatgttgattgcgtacagagaccagtggtcatggtggagcacgggaaccattatcgatatagaagtcgaaaagaaaatccgttttccaaatgtatctggcctgttcctcctgtcatccttgatcagaatcgagctgaacgcgtctatgaatagcccctccgtctggttcccggtggagaacgagttgacaacatcattcccatatgcaacgtagctgtcgatctccatcaatttcacgcataagtatataatcaatgtggtgatgaacacagacatacgaccgccattgttcagtaagaagtccctgagctgtacgctcagcgacacgtcagatggcatgatacttgggccaacaaccaccggcgaaacaaatcttgctggcttttgaataaaccgctttggctgagaccatggcgttgaatttacatcatcggtgtcctcattagtctcggccaatagctccgtccggtgctgttcttgatcaacggcgcgaagggcatcttccatctggctggcggttgacgcactcgagacattaccgatcacaccgccagcctcgatggctggtggctctaccgcggtgtcaggcgccgaatgttgagctgaaacttcatcagatatgattggtgcactgtccgtggggattggtgaccgctgtgtcagatccggagagagatcactagcaggatggggctgatctgcaacctccgtgatgatgatgctgctgctggtcctcactaacgttggtattgatttcggcgctggtgaattgcacgtcgctctgcctatgactgtcttcttggcattgagcagcctgtggctgtcacaccctgattttcgtatgccctccaaattcgcagccgaccatccaatctccggcgaggtcgccat

SEQ ID NO: 60623 - DNA, 505 bp, Oryza sativa
  unsure (1)..(505): unsure at all n locations
  Clone ID: PAT_MRT4530_62131C.1
tgcaaatataaaatcagagcagagttagaggatgcatatatcacccaaaaaaaaaaaaaaaaaaaaaaaaaaaaaaaaaaaaaaaagggcgggcgggtcagaaggttccaggtcttacgttcgccgtgcttgtcgacgtcatcgtcttttctttttttgtcgcctaacttcaattccctggtccggggggggggggcgtatcgactgggcatgcccctggccgttgcccttctctatctgccttgccgtccatccccctttcgccttgctggcgtggtggcgtaccggcccgcgccgttcgcccttccctctgttgcgctgcctgtttggcttttgggacgcgccctgtcgcgtcgctttttgcgcggcgcgtgtggtggttgcgcgccgcgtgtccgttccctttgtctttcccttgccctccctcctttcgttttttttttttcctttctctcctgtttcggtgtttttccctttcgngttcttgttgtgtggcttttttttt

SEQ ID NO: 60624 - DNA, 1457 bp, Oryza sativa
  Clone ID: PAT_MRT4530_62132C.1
ccacgcgtccggccactttagcagcagttcccgtgtacccacgagtgcactgcagaaaattagggcaatggaaatgaccctatctaaagctcaaagagcctacccacattgttctcatatgacagcaaagttacgtgcaatgacacatcaaagcgaagagttggtcagagcccatcgaagcgaaacttcattccttgagcaggttgcagtgaggacattaccaaaaagccatcactgcctagcaatgcgacttacctcagaatacttcctgttagatccgaaggaacgtgaatttcctcaaagatacacaatgcagatgggtgacctttaccattatgcaatattctcagacaatgtgctagcacaaggcgtggttgtcatggatattatttcttcatctaatgatcccaaaaggataatgtttcatattgtgactgatgcactgaattttcctgcaatgatgatgtggtttctgacaaacccaccaaatccagccacaattcaaatcaagagcttagataatttgaaatggctgccagctgatttcagtttcagatttaagcagaagggcatccgagatccaagatacacttctgcgcttaaccacttgcgcttttatttgccagaagtattcccttctctgaacaaacttgtactcttggaccatgacattgtagtccaaagagacttgagtggattatggcagatagatttgaatggtaaagtaaatggtgctgttgagacgtgcacttctggtgatggttatcatcggttggagaaccttgttaatttctctgatccaagtatcatcaacaaatttgatgcaaaggcttgcatacatgcatttgggatgaacatctttgaccttaaggaatggcgcaggcaggggctgactactgcttataataagtggtttcaagctggcaaaaggcggagactatggaaagcagggagcttgccactgggccagattgtcttctacaatcaaacagtgcctcttgaccaccggtggcatgttcttgggcttggtcatgacagaagcataggaagagatgcaattgagagggccgccgtgatccactacagcggaaaactcaaaccctggctggagatctccattcccaagtacagagattattggaacaatttccttgactatgacaacccatacttgcagcagtgcaacattcacatgtagaagcagtagaagctagaagattcacacaatggcccatgaatacacggtttttgcaatacgtacgtagtaagctaatcttattcattctttttgtagatttagcaagcatcttgtttctatactcagttgtacccgcacattgttagccacttgttaaaaaaaatgtgcaaaaggaagaaaaggcagtggttaaagtaaaaccggctagtggcctactaagtagagtagttaagtttgggggggggggggggggggggag

SEQ ID NO: 60625 - DNA, 1299 bp, Oryza sativa
  Clone ID: PAT_MRT4530_62133C.1
atggcgacctcggcgctgctccgggctctgaggcggccctcgtcggaagccgcgctgcgattggcagcaagtgtaagggtgcaaggagttactggatataggcatttgaaaaatcgcaatttaggcatccttaatgagacctcttaagatttgaggggggatgctaagaggaattctgagctcaagaaatccatgaaggaataccgtgaaagactttgtggaggaaaagaagtaattaaagtaaggactaagcaaacaggtgcgacaacaaataacagcgtcgatgacattgtgcatgacgctgtgtcgggatgtaaaaacattacagtacaagcgaatgaaaaaatatcttgtgatacagtaaattcagaggagacaattatcctccaaaagttacatacatttactactgaggatagctccctctacactttgtaactctctctctctcacactttctcttcctcccgtggaggtatctaatgtctttgaagtttttatgtattgtagtgtataatttttttaacaagttggttttatgaacctgtataggttgggttacacccaaattttagggatcaaaaaggaaaaaaatacactaaggagtgagatgaaattttcaaagatgagctaagctctagctctagcagaaagaagagaaatcatgccaggcatgcttctgctggaacagttgaaaagagtactcgaactgagttagttattgtaccaacaaagaaatcagtactgggtgaaaagtgggaagcatttaagaataaggtagctgaggatgtacgagagcggtgggagacaagtgacaatccagtggttcagaaaattcaagatttgaatgaatctatttttgaggaaaccgcaactgcagtgtctttcagggaaattcggcagagagacccatccttttctttgcctgattttgctggtgatgttcaagaaatgattaaacctgttcttactgcatattccaagattttgcatatttcagatgctgatgtaagagaaacaaaaatgatgggatctacgcccatcattattgtagggttccaaacacagcaaatttactgtgttcgtgatagggaaggacaagtaacagaaggagggcaggacaccatccaaaccgtcttttatgcatgggccatgcaactgatggatagtgatgaggtgccagaggaagagtcatattacccggtttggcggttgcgtgagatccagcaagttggtatcaaagctctcatatagagtacgtcttatcttctcttgttatttatttcccaatgggattag

SEQ ID NO: 60626 - DNA, 404 bp, Oryza sativa
  Clone ID: PAT_MRT4530_62134C.1
atcgagcggccttcctttttttttttttttttttctttctgtgcgtggggtttttaatagggggggttttttttttttttttctttttccctaaaaaaaaaaccaaagggggttcaccgaaaaatctcagggttttttggttcctttcattttccctttaataaacatttaaagcttggtttggttctttggggcatggtctaccataaagcccctaacctgagcttcctttttgcccaaagaactggccaagggttgtttcattcatttgataataaacaaagcagtttccataataactgatatccacaatcctcaaagggttttttttgaaatccatttcccaaacatttgaagacacctttccgggtgggtctctgtggccgtttggccacccccctttt

SEQ ID NO: 60627 - DNA, 417 bp, Oryza sativa
  Clone ID: PAT_MRT4530_62135C.1
cagtcaccaggcttacaaactgagcagctgccaggtgatgcggcaagcaaatgctgtcagcagatgaggctgatggcgcaacaatatcattgccaggctatttgcaccatggtcaagtctatcatggcaagcaagttgcaagtttgatgctggctttgttggtgagcacaccaagctcaggcaccaggcaccaggtggctctcaaattgtgcccatccatgtgtggagtctaccctaggtactgcagcactccatgcaatgttgctactggtcattccggttcttggtagtgtgtaccatcatatatatatattggataaataaagtgtcacacatcatcgtgtgtgtcatggtaataaaatttggaatagtcttgcctgttcgtatgaataaatgaaaattatgaaaaaaaaaaaa

SEQ ID NO: 60628 - DNA, 457 bp, Oryza sativa
  Clone ID: PAT_MRT4530_62136C.1
acttccaaaaggtgcctgatttcgtgcatttttacaaacaccacagcacacaatcaaatgttttgtaagctaaaaccctttccagtcaacaatgaccaacattgtttctccctttccgtgaaaagcttacaaaggatatcgaaaatataaaaaaaactccaaaatttgaatgttctaacattctacaactataattgtttacttgactcataacgccttgacaaaactatcaagtttatatcagtactgtaacactgtaactatggttcctactttctaaggttacttaaagctttcttagcgaacaacttctcttatctagctcgttttttcgccaaggccttcttatacaacacctgaataggcgaccattctgtgagcgtaaaccaatctttttttccaaaaaaatgttctttttatgtctatgccatttgccattaattttactactcatctt

SEQ ID NO: 60629 - DNA, 718 bp, Oryza sativa
  Clone ID: PAT_MRT4530_62137C.1
tgccggccgggggctcacccttactgaaaaatcacaaacatcaaaacgttataagagttctctagcatccatcacatagccatgaagatctttgtcatcctctctctcctcgccctcgcagcgagcagcgcctcggcacagtttgatgcttgcacctatgggcaatgccagcagcagccgtttatgcaaccgatcatgaacccgtgcaatgagttcgtgaggcaacagtgcagcccgatgagcctaccttgggagcagtcacgcaggctacaactgagcagctgccaggtgatgcggcagcaatgctgtcagcagatgaggttgatggcgcaacaatatcattgcccaggctatttgcaccatggtgcagtctatcatgcagccaagtgcagtttgatgctggctttgttggcgagccccaagctcaggcccaggcccaggtggctctcaatttgcccctccatgtgtggagtctaccctaggtactgcagcactccatgcaaagttgctactggtcattgcggttcttggtagtgtgtaccatcatatatatatagttggataaataaagtgtcacacatcatcgtgtgtgtcatgtaataaaatttggaatagtctttggctgttcgtatgaataaatgaaaattataacatgtccaattgttgaagcggaaaaaaaaaaaaaaaaaaaaaaaaaaaaaaaaaaaaaaaaaaaagg

SEQ ID NO: 60630 - DNA, 673 bp, Oryza sativa
  Clone ID: PAT_MRT4530_62138C.1
ccggccgggctccgcccaccccaccggcgatggcacacggcggcggcgaggaagaggaggagcgggtgctgagccacggcgacgtggtgctgctccgctgcgacctcaccatcctccgtggcccccacttcctcaacgaccgcatcatcgccttctacctcgcccacctcgccgccgaccaccacgacgacgacctactcctgcttcccccctccgtcccctacctcctctccaaccttcccgaccccgcctccgtcttcgccgtcgccgaccccctccgctcgctcatggccccgcgtctgactggtatcaccataccacctcgccctgcggaagcacgctgagggcgaattgctctggaccctccttcgatgcccctacttcaagacactttacgagcaacatgatcacggtcacctcgacagctgactgtgccgagctcatcattgactccaccactgctgggtctgacgctggcatctgcaaggatggtcagacctgcgagcacgctcttgttgctttcactcttggagtgaagcatatgatcggctggtgtaacaagatggatgccaccactgccaagtactccaggggccgctacgatgaaatcctgaacgaaggctcatcctacctgaagaaggtccggtacaagcctgacaagattcccttcgtt

SEQ ID NO: 60631 - DNA, 579 bp, Oryza sativa
  Clone ID: PAT_MRT4530_62139C.1
atgtcagagcgtgtgttcgccgagctcgcgaccatccactaccaaaaaagccttccatgtcgccactcctttgacccccctcgcaccacaccaattctccatctatatatcatccaccttcttcttcctcctctcattgccattgtgtgtttgtgttacattgcaatcgtgccatttgaagaagaggaggagaggatgaggatgcaggtggtggagacggcggcggtggaggaggaggaggcggcggcggcgatgatgtcggtgtacgagagggtggcgaggatggcgagcgggaacgcggtggtggtgttcagcgcgagcgggtgctgcatgtgccacgtcgtcaagcgcctcctcctcggcctcggcgtcggccccgccgtctacgagctcgaccagctcgccgccgccgccgacatccaggccgcgctgtcgcagctcctcccgccgggccagccgccggtgcccgtcgtgttcgtcggcggcaggctcctcggcggcgtcgagaaggtgatggcgtgccacatcaatggcaccctcgtccccctcctcaagcaggccggcgccctctggctctga

SEQ ID NO: 60632 - DNA, 282 bp, Oryza sativa
  Clone ID: PAT_MRT4530_6213C.1
atgcagcggcgtgaagccatccccgaccacgccattgtcgttgcacccgtgcagtactcgaacttggccaccgccatcatcactcgctggtatgctcacccgagcgcaatggcatggagtgcagctccggccttcgagcacgatggcggggatgacaaacgaaggcgaaagaaacgcgccatggtggcaagggagggcccggcgatggtgacggtggcgccctacactagtcgtattgaacgggagaagagtgggcggcggccacggctccgtgagatctag

SEQ ID NO: 60633 - DNA, 1603 bp, Oryza sativa
  Clone ID: PAT_MRT4530_62140C.1
atgccgatactccgtcccattcttccgcaagtccaacaagtcaagatgtcctcatcagcgccaacaggaggaacacagcctaaggaactgtccgttcggtttggtgcggatcatatcgcctctgctcgattggtgcacgtctcagaacacgttgatcttgctctgatccgtgtccaaggggcgcctaactgcattcctctgggattctccgatgaggctgatttgtctgggaaggaggttgtcgcgattggattcttcggacttgacggcacctccatgtgtattgatccgggaacatcgcgcggccacatactgggcgaagcagtggtctttccaacagattctgatgatctaaatgaattctcccctaccaatttgccgacggcgaaaggcatgtcaggcgcaccggtcctcctggaggataaggtggccggcgtcctatgcaatagtgatgctgcggaaggcgtctcgccgcgggagggccatctccagcttgttgaggcggcacgggagcttctttggagctccggtgctccaggctgaacaccgacacgctatacttcaccgtggtggaacgccgatcattcacctccttggtggtcacggagtagatggtgttgccctcgaggttctcgaatcccgcggtctccatggcgaacccgtggagggaatcgacgaacagggcgcggccgccgatgccggtgagctcctgtcaggccaagtcaaagctgtccggaagccttggagaagtcgatgtcgtcgccgaagaggtacatcctttggacttgatgagaaggaagagctcgtcgcctgccaccgcgatgcgcgcctcggcggggagctcgacggcgggcaccgggatgacggcggcgatggggagggtgagggcgtcgacgatggtggtgcagcagtagcagacgtcgtcctcgaagacaaagaactcgccaccggagtagttgatgctgctcgcgttgcagtcggccatggcggcgataggggcccaggcggcggcgggcgggtcggaggcgtagaagaggagtccctcgccgcaggacgccatgacgccatgcggcgaccagtcccaggccaggtcgtccgtctcggcgaagaaggccgggagcggcgggagggcgcggacggctccggtgaagaggtggaggagcgacgcggcgaggtcggtggggtcgatggcgagcgtccacccgtgcggggagacgtagaggatgcagtggcggcaaggagcggcggtggaggagacggcggcggtggagaaggcggcaggcgatgaaggcgtgataggcgtgaggaggcgtcggcggcggggttcgcggcctccatttaggatggtgtctatggcattaactatattgccatgtaggacttttatcttatgtggcaccttaatccacccatccctcctcccgatgcacgcctcgccgcccaccggatcctccgccacccgcgtgccgcagcggaccacccactcatgtcctccctcaaggcgcgggctcgtcttcttcaccaccacccggccaccttgccctcccctgcgctccccgccgccatgctgctgcccttccttgacacgcggggttgtcgccat

SEQ ID NO: 60634 - DNA, 762 bp, Oryza sativa
  Clone ID: PAT_MRT4530_62141C.1
atggcggatccgttcccggcggcggcgcgcggcggcgagcagggtggtggcaccgcggggcagctggtgtcgacgccgtccaggttgaggacggcggtggcgtccatgctcaaccgcaccggccacgcgcgcttccgccgcgccgcccccgtcgtcgtgcaggaggaggaggatgaggcggcggcggcggcgagggatgcggtcgtgcggtgtgacgggctcagcgcgtcggccagctcgtcgttcccgtcgtcggtgacgggggtcaccggcgatgggagcgtgtccaacgcccgcgcggtgctcccggcggcaggcgacggcgacaagccgccaccaatgcagtctgcttcagattatgcttctgatggccgcctcaaacgcagcagcgacgacgacggcgagcgctgccactgctccaagaaaaaacggaaggcgtcgtggagggcgaggcggcgcatccgcgtgccggcgatcagctcacggaacgccgacatcccggcggacgactattcgtggcgcaagtacggccagaagcccatcaaaggctcgccttatccacgcgggtactacaagtgcagcacggtgcgcgggtgcccggcgcggaagcacgtggagcgcgaccccggcgagccggccatgctcatcgtcacctacgacggcgaccaccgccacggggaacccggccatcgacgtcccgatgaggcggcaacgacgacggagcacaggacgactgaccaaactactggaagattgctctag

SEQ ID NO: 60635 - DNA, 493 bp, Oryza sativa
  Clone ID: PAT_MRT4530_62142C.1
ccccgggctgcaggtgtttagatggtctgcatattatggctgcatgaaatctgttttctcatggaagttttgcaattgaaaatacctatgtatttatctatgggaaattatatatatctcattcttaaaacatcaattttgctgcaccctagaaatttactggtcattttatattatttatgcttctgttgttttggctgagactatacggttcaattatatagttcagttctgcaacagatggctttttttaatctaaggtataatgtatggggtctttaacaccttaagaaaactgatttgcttgtttgcttagtatcatttagctgtacatatcaagacaacaaaaagaaaatgttcaaaagatagcctgtattgctttattaagcatgatatgctatttctgataatgatgacatttgttgcacgacgacatgttatcagagcaaacaatacattcagaaagtttgtaccttttatattgctcaacaac

SEQ ID NO: 60636 - DNA, 388 bp, Oryza sativa
  unsure (1)..(388): unsure at all n locations
  Clone ID: PAT_MRT4530_62145C.1
ggaatattcaatcaatttttgttaatttttcaaataattttggcgaaaaagtatgaaaattcctgaaattttcagaaattttgagccatactacttacagttacagtatagatgaatatangttcttgttttcatgaaaagnttgaagtgtgcccacttagctgtatnntattattaattgnnataaaaaatagataatggtcgattnnntgttgttcttttaggcaaaaaannnaagagctaccatcacttttttgtcgattttgagaaagttcaattttganggaggtttttataaattcccgataaattattctgtttaccattatttagcctttcgattttgtgttccgcttctgtttttcatattcaattaataattaaaatt

SEQ ID NO: 60637 - DNA, 685 bp, Oryza sativa
  Clone ID: PAT_MRT4530_62146C.1
ttttgccaaatcatctgcaactttgttgagatctctggggatccatttgatgtgaacttcccttccctgcagaaattttgtgaagcacttgaatatagtgatcaatacaaccaactttttggctgctaggtcggcaacttcccattccgttatcttgacatttcgatcaattataggaagttgagaaatacggaatagaaagaagtagtctagagatttgagaggaaattaagtagctggaaaagaaaacttctttcgttgggaggacgacttactttgattaactcagtacttagcagtcttctaatgtataatgtatatgatgtcattccttgcaatccctagtggggtacttaaaaaacttaattacctttgatctaggttttattggcaaggagatggatataagaagaaataccgacttgctaagtgggacattatttgtcgtccctaagaacaggagggctaggaattcatgacctcgaggtaaagaataaagtgttgattagtaagtggttatacaaactactttatcaccgatggaatatagcaacaactattacgctataaatatttgggatcacaacctttatctcaagcctattggaaagcgggggattcacatttttgggctagtcttataaaggtcaaacaagactttttccgttttggatccttcaaaatt

SEQ ID NO: 60638 - DNA, 506 bp, Oryza sativa
  unsure (1)..(506): unsure at all n locations
  Clone ID: PAT_MRT4530_62147C.1
ttttttttttttttttttttttagaagggcacactggaataacagctacaaaacgttgcagcacactaaagaacaaatgaacaaccagttgtttacaacttgccggtggaataaataattgcctaagacgacagggacaggaaccaaaatttttcagcatacatgtgtatatattttatatatactaaaggaacagaactaataaaagaatgaaatgtctcagaatcccagaaacataagatgaaagtgagaccaaaaaagggtggtttagggagcctcttatataataggatgccaaatcaaaaacattttggccagacttatttgttagcagtgtatattttgctcgtatttatagttggtacttctcatatcctcaaaaaacggttctgttatgttcctcccttctggcttaagtgggntcctccttccaagatgccaatttcttcaggattccatcacctcagctgggncccgtacggnatagaaagcatcagtatcctggg

SEQ ID NO: 60639 - DNA, 325 bp, Oryza sativa
  unsure (1)..(325): unsure at all n locations
  Clone ID: PAT_MRT4530_62148C.1
cggaaggctcttggcctgcatctcctcccggcctgggcnatntggccgagctgatgggtacatcctggggggcaaagngcttgngttctacatgaagaagctccngnggaagaagggcaagggtgctncngcttagngcgttctctcgngtgtnttttacgctggaaggcccgcctnttttattcngtggattttgttngtcatgtttgcgtntntntcgtgcctacagacccttntgaacnccnattttntgaaagnatgatgnatcnactnttngnttggtnnaaaaaaaaaaaaaaaaaaaaaaaaaaaaaaaaaaaaaaaa

SEQ ID NO: 60640 - DNA, 641 bp, Oryza sativa
  Clone ID: PAT_MRT4530_62149C.1
acatccacatattccacatatggagtgtaaaacgtctgtaagcagggctaagcagtaagtaaataatcacgtgtaacgtaatagactcaggtaacaaaggtatgtaaatacgtaaggataacaatatcaaaggtaggcttaaacaattgtaggtaattttataattagcatgcaattttatttgtaatcaacacatttataaaaataggatcaacatgttcaaggagggtgcgtagtgacttgccttgctatcggtcctaatgtcttcgagataattgctccagttagataactagaattcccacgatcgaagaataacccggatattcgcgctcgataaacggctaaataaaccacacacaatcctaaaagaattaaaataaagcaacattcaatacaactaatggtgctgttaaatagatctcgattttagagagattacagaagttgaacggagttgatcggaattacagttggaaagatatgaattttcgaagttgggaagggcttataaaccgttgagggaacactcctcggttaggacttggatcagactttatgagaggctcggagttgaatagaggaggtaacatggactttagtggaaagggaggccgaccggttggctatgccctcgtgcc

SEQ ID NO: 60641 - DNA, 1099 bp, Oryza sativa
  Clone ID: PAT_MRT4530_6214C.1
ccacgcgtccgccacgcgtccgccacgcgtccgccacgcgtccgcccacgcgtccgcggacgcgtgggcttcattctccattaatttcacggtttcatctcgacatctcatcatctgttttaagttgctagctgaggaggaggagcaggtgccagcaatggcgtcgtcaaagccaatcctgtacggtgcctggatcagctcctgctctcaccgaatccggatcgttctcaatctcaaaggtgtggattatgagtacaagtcagtcaatcctcgaacagatccagactatgagaaaatcaatccaattaagtacataccagcattagtagatggagacctagttgtttctgactctctcgccattgcattgtatcttgaagataaataccctcaacatgctctcctacctaaggatctcaaaaagaaagctcttaatcttcagattgcaaacatagtttgttcaagcatccaacctctccaaggttatgctgtaattggtttgcatgagggtaagctaagccccgatgagagtcttcagatagttcagcattatattgataagggcttcaaagcaatcgaaaagcttttagaaggatccaactttaaatatgctactggggacgaagttcaattgggggatgtgtttctagcaccacagatccatgctggcataaatcgcttccaaattgatatcacaaagtacccaaatttggcaagactccatgacacatacatggaaattcctgcatttcaggcagcacttccaaagaatcagccagatgcaccttcatgctaaaatcaagattgcaaacaagctgccatatccaaaggtgcaagacctgcttgcccttgtataagagggtcagtgtttgagaatgtggctctccaccaaccatgtcatattgtcattttgcatgaatgtctaagtttgttagttctaaaaacagcagaaatgtgttaacagatgttttgaatgtatgtaactggggttccacaaatcaaatataagcagctcaactcaagtgctcagtcacactttggtaataaatacggaatttgtcatcaaatgaatgagtacatgtctaaaaaaaaaaaaaaa

SEQ ID NO: 60642 - DNA, 739 bp, Oryza sativa
  unsure (1)..(739): unsure at all n locations
  Clone ID: PAT_MRT4530_62150C.1
attcggctcgagagatcacaaaccacattaaaaaaagactccctttttctcttctctctccgtctctctctctctctcttcatttctcattgactctctctttctctctctctctgcacagtgccaatggcggatccaatcgcgaaggctctgatcgcgtttgcgctcttagcttcccttttgctgtgcttgcaagcttcctccgatgtccccttcatcgtcgctcacaaaaaggcctccctcaacagactcaagtccggcgccgaaagggtctccgtcaccatcgacatctacaaccaaggaacctcgacggcctatgatgtaagcttatcagacgatagctggccaagtgatgcttttgatgtaatcagtggtagcacatcaaagtcatgggaaaggcttgatgctggtggcatcatttctcacacatttgagctggaggcaaaatcaaagggagtatttgctggtgaaccagctgtcataaagttccgtgttcccacaaaggctgctttgcaggaggcatattcaactcccatattgcctttggatgttctttctgatagacctcccgagaagaagtttgaatgggctaagaggttgctggctaagtatggatctctaatctcggtgatctccatcatggtcctgttcatatacttggtagcttcaccatcaaaatccagcgcanagggaagcaagaagaagccgttatcatgggcaaattagagcatttgcaatc

SEQ ID NO: 60643 - DNA, 825 bp, Oryza sativa
  Clone ID: PAT_MRT4530_62151C.1
atggagaagctgacatctagcgagccactggatcccctctcacacgaagcttctatcggcagttcctccagagtatggactgtaggtgacgaagaattcctccacatgagcaatttcgcaaaattgcctgacttgaacaaggatgatatggagcgagagcgatattacacaaacttgatcaatgatgagagcaaccattttggctcgagtgagatgggaagccagtatgatgatgaacaagaaccagttgtgaatgaaaatgttgctcatgtgcaagcaagcctgatgtacaagaagaaagaggaaaagaagtttcagttcatgcattgctacaacgttttaaagaatctgccaaagtggaatgataagcggaatcagctggcagctagtaaaacttcaagcaagaagcagaagaagaccgccaatgattctcctgcgatatctactcctgcatgtaatgttgatgagaattgggctgctgatcctgagaatacagtaggtgagggaagacccatggggaggaagaaggcgaaacaacagatgtgcgaacgctcggatctatcacggaaagagtccttagactatctatgggataagaagaaagaggccgatgcggaggagcgaaagtttgaggagaggtaccaaatcgcttttgcacttgagcaaaagcggattgatttggagagagacaagttcgagttcaagagaatgataaaagaagataagcttttgaggactgatactagtgcaatgagcatcgaggagcaggagtactataaaaatgtgaagaatcaaattctaagtcatcgttcagctcaagcataa

SEQ ID NO: 60644 - DNA, 270 bp, Oryza sativa
  Clone ID: PAT_MRT4530_62152C.1
atgtacatccagggtttcacagtagggatcttcggctactggcgctgtgctcttgccacgagcagagtgtggggagacaggcagaaggggctagatgggctcgagggagagggatacctaccatggccaatctggttggggaagaaaggggagctagttgtccgtatgctgttatgcgcgggtggtgcagctagctcggccaccatcgatcagctgctcatgcatggaagccgatggaagaagtacgctgatgctgtcatccatctctag

SEQ ID NO: 60645 - DNA, 1068 bp, Oryza sativa
  Clone ID: PAT_MRT4530_62153C.1
atggagaagctgacatctagcgagccattggatcccctctcacacgaagcttctatcggcagttcctccagagtatggactgtaggtgacgaagaattcctccacatgaacaatttcgcaaaattgcctgacttgaacaagggtatgtctgctgtatgtgctgatgtaattcactgtggtgtatatcctgcatttatgtccagaaatgatatggagcgagagcgatattacacaaacttgatcaatgatgagagcaaccattttggctcgagtgagatgggaagccagtatgatgatgaacaagaaccagttgtgaatgaaaatgttgctattcagaatcgaaatcagagtggtgtcaatcatgaggacatgcatgtgcaagcaagcctgatgtacaagaagaaagaggaaaagaagtttcagttcatgcattgctacaacattttaaagaatctgccaaagtgggatgataagcggaatcagctggcagctagtaaaacttcaagcaagaagcagaagaagaccgccaatgattctcctgcgatatctactcctgcatgtaatgttgatgagaatagggctgctgatcctgagaatacagtaggtgagggaagacccatggggaggaagaaggcgaaacaacagatgcgcgaacgctcggatctatcacggaaagagtccttagactatctatgggataagaagaaagaggccgatgcggagaaggagcgaaagtttgaggagaggtaccaaattgcttttgcacttgagcaaaagcggattgatttggagagagacaagttcgagttcaagagaatgacaaaagaagataagcttttgaggactgatactagtgcaatgagcatcgaggagcaggagtactataaaaatgtgaagaatcaaattctaagtcgtcgttcagctcaagcataaattagtcttattactcatcaattagcattcaaaatttgttagatctttagctatagagtctacttaatggactagtaaattttactatcttgttttggtactgttttatgtagccggagcatttgctactactac

SEQ ID NO: 60646 - DNA, 240 bp, Oryza sativa
  Clone ID: PAT_MRT4530_62154C.1
atggatctgagctcgtacgtggatggaggcggcggatctggcgtcaagaaggttacggggggaggcgaccagcgaaggagctcagacggtgaaggaggcagcggtcggagcccgggggttccagatccggggtgggagggaggcgcggtggcgcgggggtggccgacgacgggaggggaggcgtcggtggcgttggtggccgggaggcggggggaggcgccggcggaggtggaggtgtag

SEQ ID NO: 60647 - DNA, 2619 bp, Oryza sativa
  Clone ID: PAT_MRT4530_62155C.1
gcccgcgcgtgcccttagatgagcctcttcgatggattacttcctctgctactaattgtgtttactatgacccctgtgatacaagcttcaaacagaactacaagccttccatctgctgccacgcttgcaggttgccaaagaagctgcagtaatctgaccatcgactatccctttggaattggatcatcccattgctctaggcagcccgatttcgagctcatctgcaacaataccacacaaccaccaaggctgttattcaagaatggcaccactgagatcattgactctcccagtactgaatatttggacgttatgttttcccattccatctccatgaaatccaatgtcagtgtgtacaacatgtcatgggatgctcctgggaaatctttcacccttggatatgctagactaaacatcaccggctgtgatttcgatatataccaggtgctcgatcaaagtggaaatgttcctgccaagctttgcaacgttacatgcccaaacaggggaatcacagaggacattgctaggcaggactgcaatggcaccggatgctgctccatcgatgttccaattcgtgctcagaccttacagcttatgtttgtccgccatggcaaaggggcggtcgaacttgacgcacaatccaaccaaagctccctgtggagcacaatcaatgtaacaacagtttacgctgtcattttgtggagaatcctggaccaaccgacgtgtgccagcaccttcgataacaggaccaactatgcctgtattagtgagcacagcaaatgcatggatggctatttcgcaccgattcttggttacaattgcttatgtgatggtgggtaccaaggaaatccatatatactagatggctgctcacgtgatagaggatataatccattccaacagaaggatgtctgcgacagaaagtgcgggagcattgatgtcccatatccatttggcctagaagaagggtgcgctgcaaggaaatcatttcagctaaactgcacaaacatgttatcgtccagcctccaactgaacgatgaataccatgtaacgtatataaatgtcagcaatgggctcatgggcgtagaagacaccacagattacaaacagtacatgtatgggatgcgtgtgacgcaggagcctcaactctatatcggatctggggaatcagcctcagtgcaatgggctgttgctaatctaacctgcctagaggcacagcaaaatatatctggatatgcttgtgttagcatcaatagcacatgcttgggtgtcaactcaacagatgattacattgggtatcggtgtagttgcacacttggcttccaaggaaatccatatatccaagatggttgccaaggtgttgtcattggacttagctgtggcttcagcatcctacttctcagcttaggaataatgcttctcattcatagatggaaaaaagacatacaaaagcaactacgaaggaagcatttccaaaagaaccaaggacttctgctggaacaactaatatcttcggatgaaaatgcaagtgagaacacaaagatattctctttagatgagctagagaaggcaacaaacaactttgatcctacacgtattcttggtcatggagggcatggcatggtgtacaaaggcattctatctgaccaacgtgtggttgcaataaaaaggtctaagcacattgaggaaggagagatcagtcaattcattaatgaggtagcaattctgtctcaaataaatcatcgaaatatagtgaaattatttggatgttgtcttgaaaccgaggtcccattattggtatatgactttattcccaatggttcattatttggtattctccattctggttcaaacaatggtttctccttgtcatgggatgactgcctaagaattgcagtggaagctgcaggagctctctattatctccattcggcagcttcagtatcagtgttccatcgtgatgtgaaatcctctaatatacttctagatgcaaactacaccgctaaagtatcagactttggtgcttcgagattggttcccattgaccaaactcatgttgtcacaaatgtacaaggcacatttggttacttagatccagagtattatcataccgggcagctgaatgagaagagtgatgtatatagttttggtgtggtacttgtggaactactactcagaaaagagcctatttttacaagggtgtcaggatcaaagcagaatttgtccaattactttctctgggaactgaaggtgaagccaatcacggagattgttgctgctcaagttcgtgaggaagctactgacgaagagatagagagtgtcgcttctcttgcacagatgtgcttgaggctccgaagtgaagatagacctactatgaagcaagttgaaatgaatttacagttcttgcgaacaaaaaggttgaactcatgccctgatgctctagacaaagctgaagagatgcagcctttgctatgtacaagatctgaagctagttgtgcatcattggcgattaacttgggtgacagttataaccctgagtctcaaagtagccacaaatgctatagcttggagcaagagtttagttcatcagttgggttgccacgatctagacaggtctga

SEQ ID NO: 60648 - DNA, 1988 bp, Oryza sativa
  Clone ID: PAT_MRT4530_62156C.1
gcacgaggaccaagcacctccttgagatagaacaacccaaggattgtgaacgaacaagagcctgagggggcaccggctgcccaggctgtggaaaaactagaggcaggaacagctgatttcctggttgaccttgaggggaagagatctattaaagtgctgggatcgaacaccttcctatgggcgtgtcactggtgctcctgggcacatggccggtggtcctcgccgtgctggagcgccgcggccgcctcccgcagcacacctacctggactactccatcaccaacttcctcgccgccctcctcgtcgccttcaccttcggccagatcggcgccgacccgccgcagacgccaaatttcctcactcagccttcccacttgctggttaactggccttcctttttctgcttattctccggctccggcgagatcatgtatcttgtgaaggacatcggcggcgccattgcgctgatgggcgtgtcactggtgctcctgggcacatggccggtggtcctcgccgtgctggagcgccgcggccgccttcccgcagcacacctacctggactactccatcaccaacttcctcgccgccctcctcgtcgccttcaccttcggccagatcggcgccgacacgccggagacgcccaatttcctcacacagctcacccagatgcaggacaactggccttcaatcttgttcgcgatgtcgggcggcatctttaacggcctagggacactggccacgcagtatgggtgggcgtttgtcgggctttcggtcaccgaggtcatggcgtcaagcctgaaggttgtcatagggacaacactgaactattttctcgatggccggatcaacaaggccgagattcctttccccggtgtttgttcccgccggcgttcaacctcgccaccatctactggtggcacacgctaggggggtgcgtccccgacaaggtggtgtagtgggcagtctactacttctcccacgcctgcttcacaatcggcatcgccctcaacataaggttcctctaccaccccatggtcggcgtgccgcggtcgtcgctcacggcctacctgaaggattggaaggggagggatcttgctctcgtcgcaggcatggtgtgtggccttggcaatgcgttccagttcatggctgggcaggctgctgggtatgctgctgctgacgctgtccaggcgttgccgctggtgagcacggtgtgggggatcgtgctgttcggcgagtaccggagatcgtcgcggcggacttacactctcctggggagcatgctgttcatgttcgtcgtcgccatggtcatcctcatggcgtcgtcggcgcaccggaggccgctctgatggcggccggccggcggctgccgtcgacctcctcctctcctcatggacatgaccgagaaacatcagaagaagaagaagaagctgcatatgtacagctccattgatctgaccacatcagtgtgtagttcctgaccttctcgacgtaggatctatgcatattgcctcccggtgcttgcgcatcggcgaggctacacatcaattaatttcttctgcaatgagcaaccatgggatgggggagtgaatttggagatgtgattggactagtatatagtgtaatgttgtaatatatgtctcagcttctttgtgtgaagcttctgtgaagggaaccaaaataattttcaaatgtataaattttgatcaatgttatgaggagctacttcctccgtttcccaatgtaagtcattacattcatattaatgctaatgattctagatagatatatatgtctaaattcattagcatcaatacgaatgtggaaaatgctagaatgacttacattgtgaaatggagggagtagctattaaggctagctctagtaaagccagattaataacctttttgtaatcctcaaagtagaaatgttacaactttgtcaatgaaagaatcaataatggcattatgacgtcatgagggcttttttcc

SEQ ID NO: 60649 - DNA, 519 bp, Oryza sativa
  Clone ID: PAT_MRT4530_62157C.1
cgcttgctgggagctactccttcaaacggcattcatcaccgcaaacacgctagcattcagttgctctctgctagctaccgtcagcctgctctactctgggatgccgtcgcgggagatctccatccgctacgtataccagtccctatcgttggtcatgatgcggagctcagctacaagcctggtcgccgccttcgccttgggcatgtacgtcgtgctagctcccgttgctctcaccatggcaaagtctgtctgcgccatcacttttctctccttcttgtctgcatgtatggaggtccggaggccccttatcgtggcaactcggtgcgtattagagttggaatctgggcagcgaggtatcaagcagcgccagtcctaaaattcatcgggaaaagattctggtcctatgtaattatctttggcttgccggcggtgttgaagattcgtggaacccatgactttgtgtaattatcttatctgctaataagattatctttcgccggccaaaaaaaaaaaaaaaaa

SEQ ID NO: 60650 - DNA, 234 bp, Oryza sativa
  Clone ID: PAT_MRT4530_62158C.1
atgcgtggcaatcatcatgaagcacgtcaacctaaaccgacaacatatgctgtgtcatattgtcggattcggcttaatcggctaaccccgtccaactcgaactctgtcgatcctagtcgtagccgatttggactttagccgatcttcactctgtttccgggacaatctctatctcgatttccatctcgattcctccttcacatccgatatttggactaccaaatttggtcgtta

SEQ ID NO: 60651 - DNA, 810 bp, Oryza sativa
  Clone ID: PAT_MRT4530_62159C.1
atgatcacccacgtcaaatcggctctcctctccggccaccgcggcccgcaccacctcgccgcctccgccgccgccgccgcctcgttccactccacccctcccctccagcggaagcgcaagacgcagtggcaccacgggataatgcatgcgaaaattgaggaatttattgtcagtgctcgtaggttcagttattatgagaagcgcaggagaaatagagaatcaaaaaggaccatgctacggaatatgtctgaatatgctgagtacctcttccagagttggcgggatgaagatgacaaaaatgatgaatcaagtggaccttcttggttcaggggacaccgttgggtcaggaatccaaagaataatggtttccgcccacatgatttttattttggaaacttcagaagcaggggtggatttgagttttgcacaagtgatgaagatgaaccggaaacggtgtttcgcaatgctttccgtgggcaacagacattttattggtcttttgattctgatgatttttgtcagagaaatcacagacgttctcattcagaaagttccagacgttggagttatgagacagatgatgaggatgaaacacccgcacagacggaggtatctttggcacggcaggcacttggattgagtacttctggtccactgaaactcgaagatgttaaaagcgcataccggacatgtgcacttagatggcacccagatcgtcacaatggctcaacgaaggctactgcagaggagaaattcaagcactgcagtgcagcataccaaacattatgtgatagtttggcctctgcataa

SEQ ID NO: 60652 - DNA, 159 bp, Oryza sativa
  Clone ID: PAT_MRT4530_6215C.1
atgccaccagatttcatggtggagacgattttagacatcgtcttgaagctgcgggagtctagctggaggcttggtgcgcttaagggccagaggcggaggggaggagaagggaagaaagcgtgccggctcaactgcagtttgacagaagaaatgggctaa

SEQ ID NO: 60653 - DNA, 570 bp, Oryza sativa
  Clone ID: PAT_MRT4530_62160C.1
catgattatccatattcaagtggatatcgtggctcagatgatattggccctattgacagctatgcaagttatggcagctcccaggtctttggaggaggttatggggcttatggtggatatagtggtcgttctggcagcagtgggttatctggccctagttcattttcctatggaaagcgacatggttattaggacttagattgacaaatgcaacagccaagacaaaagaatgccaagaccaatgaagtatggagcctgcttattggagccccttcccaaaccagatgaccaagagtatggccccaacctggaagctttgcctaagagggacctgcctggatgccatagaccatcttatttccctagtatacagcatttacttatattttcctctgggactatgttgattccccgtcttacatgttctaaacctatgtattgaaagttcacagttgagacttcctgtatgtgttctcgtgcaacctgcttcatcttagtagttcgtgtggaagaacttggttccctgtttgccaaccaaaagcctagaagttacttgcccttgctttaagg

SEQ ID NO: 60654 - DNA, 2137 bp, Oryza sativa
  Clone ID: PAT_MRT4530_62161C.1
ctcttcaacttggggctccccccgctcccggcttggcgtaaaagaaaatctccccgtctcgtcgtctcctccgctccttgcgccatctcgcggctgaacaggggaggggcggcgatctccatccggcgagcggagcaggggaggggaggggatcttgacaatggttggacctgggcataggaacagtcacgggaagcgtcactctgattatgctgaaaatggaggtggcaagagaaggaatcctggtgatgatacatatgctcctggtccagatgatactgtctaccgctatctttgcccttctagaaaaatagggagcatcattgggaggggtggagaaattgctaagcagatgagggccgacactcaagctaagataaggattggtgagagtgtatctggttgtgatgagagagttatcacaatatttagctcaagcagggaaactaataccctagtagatgctgaagataaggtttgccctgcccaagacgctctctttagagttcatgaaaagctatccatagatgatgatattgggaatgaagaaagtgatgaaggtttagctcaagttaccgttcggttgcttgtgccatcagaccagattggatgcattattggaaaaggtgggcatattatacagggaatccgcagtgacactggtgctcatatacgtgttcttagcaatgaaaatctccctgcgtgtgccatcagtggtgatgaacttcttcagatatctggggactcaacagttgtcagaaaagctcttcttcaagtgtcatctcgtctccatgacaacccatctaggtcacagcatcttcttgcatccagcatgacacagccttatccagtgggctcccaccttggtagttcctcaactgcaccagttgtggggattacgcctttaattagttcttatggaggatacaaaggtgatgtggctggagattggccttctatatatcaaccacggagggaggagagctctgcaaaggaatttagcttgcgccttctttgtgctgcatcaaatgtgggaggtgtaattggaaagggtggtggaattatcaaacagattaggcaggagtctggagcctttatcaaagttgatagttcaaatactgaagatgactgcataattactgtttctgcaaaggagttctttgaagatcctgtctccccaacaataaatgctgcagttcatttacaaccaagatgcagtgagaaaactgatccggaatcagcgatcccgtcttacacaacacgcttgttggtgtcgacatcacgtattgggtgcttgattggaaaaggtggttcaatcattactgagataaggagaacatcaagagcaaacatacgtatcctttctaaggagaatgtaccaaaagtagcagcagaagacgaagagatggttcagatcagtggagaccttgatgttgtaagacatgctcttctgcaaataactactaggctgaaagccaatttctttgaaagagaaggtgctttatcaggtttcccacctgtaatcccttaccatcctcttccagttggtgtttctgaagggccaaagtatctaggcagagatactaagcctcttgggcatgattatccatattcaagtggatatcgtggctcagatgatattggccctattgacagctatgcaagttatggcagctcccaggtctctggaggaggttatggggcttatggtggatatagtggtcgttctggcagcagtgggttatctggccctagttcattttcctatggaaagcgacatggttattaggacttagattgacaaatgcaacaggtatggttcgtccaccttgtcttgaaatgaacagaatgatcatgcgatcaagacttgctccttattgcatttctgccttttaaacacatttaacccagctcagctatcttctgatggacctgttcttttcacctttgccccatgcccacctgccttactaaaaacagccaagacaaaagaatgccaagaccaatgaagtatggagcctgcttattggagccccttcccaaaccagatgaccaagagtatgggcccaacctggaagctttgcctaagagggacctgcctggatgccatagaccatcttatttccctagtatacag

SEQ ID NO: 60655 - DNA, 261 bp, Oryza sativa
  Clone ID: PAT_MRT4530_62162C.1
atggacgacctcagccccgccgcgactgacgccgagcagtggtccaactacttcaatgacgcataccaagcagcgacggccacccaaggcggcgcccttctagggcggtgcctctacaacggcggtggcggcgatggcaaggacgtcgacgacgcagtccaattcctggacgtccatagcctaagcaactggcgcatgggagctccccgccgcagcctaccccaacctgcgggagctcgtcctcgggtgggtggctggtag

SEQ ID NO: 60656 - DNA, 411 bp, Oryza sativa
  Clone ID: PAT_MRT4530_62163C.1
atgatgccgctgcgggggctggaggagtgcgggctggtgcgggagacggggttcgtgtggatgcggcagaaggcgccgtacgagcactacttccgcggcacggggacgcgggtgcggtacgacgtcgaggtgacggcgttcgtggaggaagggaggatgaagcggatgaccggcgtgcggcgaggcaggctcatgctctgggtccccatcgtcgagatgagcctcgacggcgccgaccgcgtctacttcaagtccaacgtcggcatcggccgctccttcccggcctccgccttcgccgacgagaccgccgccgccgccgccttcttaaggaagccgacgccgccgccgccgccgccgagaaagaagccgccgccacagccaccgccgtcacggccaacgagtgatcgatga

SEQ ID NO: 60657 - DNA, 300 bp, Oryza sativa
  Clone ID: PAT_MRT4530_62164C.1
atggagccaagcaatatcgcaggagcgaaaaaatttcaaaaaccaaatttggccaaaaccctagcttccattcccatccctcttgagctcgccgccaccgtcaccgtcgcagcccaccctcgagctcatcgctcctcccgaggccaatggaggcgctgccggatctactgccctagagctccgccgtcgcccctcctggggctgagggcgacgcttctggatccaccacccaagcccaccaaacaggagtggcagggagggagagtggggagggggaagtgggagggaggaggaggttga

SEQ ID NO: 60658 - DNA, 609 bp, Oryza sativa
  Clone ID: PAT_MRT4530_62165C.1
cagtgtgaactataagagcttccattgatgattgattaacaggagaaatcaaccggatgatttatgttacttacagagatgatgacaatgtggtttatgcacagcttacacaggcaacgaacgcccgctacttactactaaataatgcacatgccgcgctcgcgtcgcgtcgcgtgtcacggctgcgacgccgccccgatctcctccacctcgccggcgtcgtccacccagtaggcgtgccatagcggcgaccgcctccgcggcggcgtggagccgacgcagccggcgagggtggccctgaacttgtcgtcgcccggccggagcatggccggcagcggcatcctgacgccccgcgcggcgcaggcctcgtggcgcggcgcgatgcgcgtggcgagcgcgtaggagaagtactccgggaactcgaagaggtcgtcggcgtcccgggccatgtcgccgaggaggtactccgccttgggccgcatgttgccgtcgatgccgtagtagaagagcgccgggaagcggcgcgccatggagcgcgcggcgcgggaggggaggccgagcgactcgaggaactcgatccgcgggaggagcttgtcctcggacgcgtgg

SEQ ID NO: 60659 - DNA, 284 bp, Oryza sativa
  Clone ID: PAT_MRT4530_62166C.1
attgatcaccaggaacagaacagaggaagggacggttataactaaggaagctgtgacatatataccagaaatcacaggacatcgacagtctatgtacccaatgccaactagacagcatcacgcatctacctattcaaactctctgagaaaagacagtgtgtcccatctgctttccaacagattcatcacggaggagatacagaaggataaaaaccagcaatcctgagactagccacagggaggcatttaagtgcatgctgcaaagatcttgggctcatatttcc

SEQ ID NO: 60660 - DNA, 817 bp, Oryza sativa
  Clone ID: PAT_MRT4530_62167C.1
ggcaggtcctcgaggaacttgggacactatagaagagctatgacgtcgtatgcacgcgtacgtaagcttggatcctctagagcggcgcgcgctgcctgagcgcctggccgccctcggactccatcacccacctgaccttcgcctccacctcctccgccaccaccacctcctcgtcgtagcccctcatctccacgccaagcttcatctcctccacgacgaacaccttgttcagcctctgctccgcgtacagcggccagcacagcagcggcagccccgccgtgatcccctcaagcgtcgagttccacccgcaatgcgtcacgaacgcgccggtcgccctgtggcggagcacctccacctgcggcgcccatagcttcaccacgagccctctcccccttgtctcctccatgaacccggccggcaggagcgcgtcgaggtctggctccgccagcggctcggacacgttcttttcgtagatgcgcgggatccgcacgacccacaggaacctcttctccgacttctgcaggccaatggcgatctcctcgagctgcttcttgcagaaccttcccaagctcccgaacgagaggaacgccacgctgttgtccggcatgcgcgtccagccaccggaggcagtcgtgatccttgtcgctgcctccgccacccgacaccattggcccgatgggagtagaccgtcggcgtggcacggccggggacgcagagcccgtcctccagagcgcgcgacccgcgcgtctccagcgactcgaatgtattgacaagaattcctctcgactctggacgccgacggatcatcagctcgtgc

SEQ ID NO: 60661 - DNA, 2135 bp, Oryza sativa
  Clone ID: PAT_MRT4530_62168C.1
atggtgccgctgtacgtggcgatgatcctggcgtacgggtcggtgaagtggtggcgcatcttcacgcccgaccagtgctccgggatcaaccgcttcgtggcgctcttcgccgtcccgctcctctccttccacttcatctccaccaacaacccctacaccatgaacctccgcttcatcgccgccgacaccctgcagaagctcatcgtcctcgcgctcctcaccctgtggagccacctctcccgccgcggctccctcgagtggaccatcaccctcttctccctctccacgctgcccaacacgctcgtcatggggatcccgctgctgaaggggatgtacggggagttctccggtagcctcatggtgcagatcgtggtgctccagtgcatcatctggtacacgctgatgctcttcatgttcgagtaccgcggcgccaggatcctcatcaccgagcagttcccggacaccgcgggcgccatcgcgtccatcgtcgtggacgccgacgtcgtgtcgctcgacgggcggagggacatgatcgagacggaggccgaggtgaaggaggacggcaagatacacgtcaccgtgcgccgctccaacgcgtcgcgctccgacgtctactcgcggcgctccatggggttctccagcaccacgccgcggccgagcaacctcaccaacgccgagatctactcgctgcagtcgtcgcgcaacccgacgccgcggggctccagcttcaaccacactgacttctactccatggtcgggcgcagctccaacttcgccgccggggacgcgttcggggtgcgcaccggcgccacgccgcggccgtccaactacgaggaggacgcggcggcgcccaacaaggccggcagcaagtacgggcagtacccggcgcccaacccggccatggcggcgccgcccaagcccaagaaggcggccaacggccaggccaagggcgaggacggcaaagacctccacatgttcgtctggagctccagcgcgtcgcccgtgtccgacgtcttcggcaacggcgccgagtacaacgacgccgccgccgtcaaggaggtccgcatggccgtcgcctcgccgcgcaaagcggacggcgtggagagggacgacttcagcttcgggaacagaggcgtcgccgagagggacgcggaggccggcgacgagaagagcgtggcggcggcggtgtcgggtgagcatggcaagcctggcttgacgccggcgccgacggcgatgccgccgacgagcgtgatgacgcggctcatcctgatcatggtgtggcgcaagctcatccgcaaccccaacacctactccagcctcatcggcctcatctggtcgctcgtctgcttccggtggaacttcgagatgccggcgatcatcctgaaatccatctccatcctctccgacgccggcctcggcatggccatgttcagcctcgggctgttcatggcgctgcagccgcggatcatcgcgtgcgggaacaaggtggcgacgttcgccatggcggtgcggttcctgaccggcccggccgtcatggccgccgcctccatcgccgtcggcctccgcggcacgctcctccacgtcgccatcgtgcaggcagcgttgccacagggcattgtccccttcgtcttcgccaaggagtacagcgtgcaccccgacattctcagcacggcggtcatctttggcatgctcatcgcgctgcccatcacgctggtgtactacatcctgctggggctgtggaagaagacagagctggtacactgtttgcaaagtcaggactctttgatttttcttttcttttctgtatttcttgaagtagaatttgggaggagggggattggaagggagtcaaacgagtcaaggggaggacaggatggtagctagcttagctaggacaatggtgagtcacaaaagagcaccaaaagcaagtacaagtacaaagcttggggggacacaggatccagttcaggtcacagaaacggttcggttttgggaggggattgtgggagttttggttggctgcgctgcgctgacccttgtaaaacggacgccgattctgacaagagatcgaccttgttttgttcgtgtcgtggtattgctgactactactttggaatgattaatctcctactact

SEQ ID NO: 60662 - DNA, 2608 bp, Oryza sativa
  Clone ID: PAT_MRT4530_62169C.1
ggaagtgcccgcgcgccaactaagctgcccccccatcttctcctcccgctcttgagatctcccccgcctgggaacagagctagctcttgatcccccaggcacccgacccaccgccgggcggctcgaagcgagaaagaccagggaggtgatgtccgggcacgacgtcggcacggtggtcgccggggaggagccgcagttcaatgctcctcctccgccgccccgctcgtcctctcgctgagctgagctgagctgtgaaatagtgccaccgagtgagcgctgagctgagctcgaagcaagagaggaagaggaggaggagggaagagggggggcgaagatgattacggcggcggacttctaccacgtgatgacggcgatggtgccgttgtacgtggcgatgatactggcgtacgggtcggtgaagtggtggcgcatcttcacgccggaccagtgctccgggatcaaccgcttcgtggcgctcttcgccgtgccgctgctgtcgttccacttcatctccaccaacaacccgtacacgatgaacctccggttcatcgccgccgacacgctgcagaagctgatggtgctggccatgctcacggcgtggagccacctcagccgccgggggagcctcgagtggaccatcacgctcttctccctctccacgctgcccaacacgctcgtcatggggatccctttgcacataggcatgtaaagcttggggggacacaggatcggagatttgtccggcagcctcatgttggttttgggaggggattgtgggagttttggttggctgctgctgctgctgaccctttgtaaaccgcggcgcccgattctgacaagagatcgaccttgttttcaccgtctcgtggaattgctgactactactttgaaatgacgacgtttcgcacgactgcagaagggaagaaaacgaaaaaaaaaagacggagacggaggtgaaggaggacggcaggatacacgtcaccgtgcgccgctccaacgcgtctcgctcggacatctactcccgccgctccatgggcttctccagcaccacgccgcggccgagcaacctcaccaacgccgagatctactcgctgcagtcgtcgcggaacccgacgccgaggggttcaagcttcaaccacaccgacttctactccatggtgggccgcagctccaacttcggcgcggccgacgcgttcggcgtccgcaccggcgccacgccgcgcccgtccaactacgaggacgacgcgtccaagcccaagtacccgctcccggcgtcgaatgcggcgcccatggcgggccactacccggcgccgaacccggccgtgtcgtcggcgcccaagggcgccaagaaggcggccacgaacgggcaggccaagggcgaggacctccacatgttcgtctggagctccagcgcgtcgcccgtgtccgacgtcttcggcggcggcgcgccagactacaacgacgccgcggcagtcaagtccccccgcaaaatggatggagcgaaggacagggaggactacgtggagcgggacgatttcagcttcgggaacaggggcgtcatggacagggacgcggaggcaggggacgagaaggcggcggcggcggcgggcgccgaccccagcaaggccatggcggcgccgacggcgatgccgccgacgagcgtgatgacccgcctcatcctgatcatggtgtggcgcaagctcatccgcaacccgaacacctactccagcctcatcggcctcatctggtccctcgtctgcttcaggtggaacttcgagatgccggccatcgtcctgaaatccatctcgatcctgtcggacgcggggctcggcatggccatgttcagtctcggtctgttcatggcgctgcagccgcacatcatcgcgtgcgggaacaaggtggcgacgtacgccatggcggtgcggttcctggccgggccggccgtgatggcggcggcgtccttcgccgtcggactccgtggcacgctcctgcacgtcgccattgtccaggcagctctgccccagggcattgtccccttcgtcttcgccaaggagtacagcgtgcaccctagcattctcagcacagctgtcatctttggcatgctcatcgccttgcctatcaccctcgtctactacatcttgcttgggctgtaatcgagttgcatgcatgtaaattcctgctcctgacaaccagccatgttaagaagaggggagaagaagacagagctggtacactgtttgcaaagtcaggactctttgatttttcttttcttttctgtatttcttgaagtagaatttgggaggagggggattggaagggagtcaaacgagtcaaggggaggacaggatggtagctagcttagctaggacaatggtgagtcacaaaagagcaccaaaagcaagtacaagtacaaagcttggggggacacaggatccagttcaggtcacagaaacggttcggttttgggaggggattgtgggagttttggttggctgcgctgcgctgacccttgtaaaacggacgccgattctgacaagagatcgaccttgttttaaaaaaaaaaaaaaaaaaatgactactactttggaatgattaatctcctactact

SEQ ID NO: 60663 - DNA, 1208 bp, Oryza sativa
  unsure (1)..(1208): unsure at all n locations
  Clone ID: PAT_MRT4530_6216C.1
ctagttgccttgtaacgcatacactggagcgtttgtcccatcgacgaaggccaatgagactactatacgcgttttccgaggagcaacatccgcccataagatgtgcctagagataacaatcatttcagaatctcgtataagtgatgtgcttctttctccgaaaaggtggacaatcaggaggaaatgcttcttttcaagagttgggattgaaggatttgctaatgcccgacccttctcgactataaactcttccgctcctccggacctttggaaaaccaagaagcagactgcagtgtcccgctcgagtgctgaagctgagttgagagctatggcctcagatactgctgaaatatagaattcatgggcgttgaaatgtaccaggggcgtagttgcttctttcatccagcccagcacgccatataatcccttttccatgcccgtgctttgacctacgcctaagttacctcggtttcggctttcccactcggcttttccacgacttggatcgtataatgatgatcggaacctcctttcgttattccaccttgagcctagtgtagttggggagaggagatccctggggtcaaggttgaatcggagcgggattcggatgccgctcttgactgaccacagattccgggggagcggtctgctcctgggatgcagaggtgtcctcatagtcagccagaaaacctttgaatagctcttccgagttagtggatccngagggaggcattgaagggcctgggtcccccattccgtcccagtcggactcggagcgaacatctcccaacaagatttgaaaaaatcattatccccaacctagggctggtcgagtatgaagaaaagacctatatgggattcggattaccgaatatgtcgcttagactttactttttcccctttctgccctttcctctatttgtttgatagggtcttcgtctccgtgtaaaagcaaactctccaaatttatgaccaacctttccttcagtgatcttacaacgaacaaaagtttttccattgtaaatgagtacagagcaatcaacaaattccggcaaaatagaagatctacgtgaccaaattttcctgctcatcaaactttctctgttcttctttattctaaacaggaaagcatcaacaaaacttcccttccatatagatcgtcgtggcataaactaaattctgcgtttccccacccccaactcctg

SEQ ID NO: 60664 - DNA, 665 bp, Oryza sativa
  Clone ID: PAT_MRT4530_62170C.1
cgggcggccggcaggcccgctcccgctgcttccagaagcgagcgagctctcctttcctttctcctacgcctaggcttctagaagcttcctttccaaataggggctaatctcctgagctcgaagctctcctcgtcagcttcaggtggtcgggtgctgcctcctcctcctcctcctcctcctcctcgtcctcaaatctccccgagagttcgtgctttgccgcgagcagcgagctgcgatctcgcctgaatccttcgtcggcgggggggatgaattgatcacgcggtgtgcgctttctgattctgtcgggttcctttcagatgcacgagcacgtcggtgtccgcctcctctttgcttgatttgcttccgctgctgctgttaggtgcgcgagagctcgtgatggggtgaagcgtgtgttcacaggattagattgcgctcgcctgattcgctgcatcttgttcttcttgctgccgcctacgcgacttgatttcgtcacgccaaagccgtgacaggctgattgctaccttgcttggcgatctgtgctttaaattccaccattgtttgctggtgctggatgagcaaattcttggttcgtgtggctctagttggtagttcttgattgaggtgaggttctgagctgccatgaactaccgagtggtgaacccggt

SEQ ID NO: 60665 - DNA, 1820 bp, Oryza sativa
  Clone ID: PAT_MRT4530_62171C.1
gaattcggcacgaggctttcccatagtctccttctctcttccaaatcaatcaataaactagcaaaagtcagcgcctccctcttatctcctctctagagcccaagaaaccaccaccaccacctcctcctcttgaggattttcttgatttcttctcgacggccatggaggaggagctctgcggcaacaactgggacctcgacgccgtcgtccgcctcggctgctgccgacggaggatctctccggcggcggtggcgcagcaggtggatccgttcgcgtcgttcttgcagcagggggtggcgatggaggttgcggcggagaaggaggtcggggtggaggctgcgtggagcttcccggagctgacggtcagggacggcggcggcggcgggctcggccgcgacgccgacgagctcctcaaggcgttctgcgccgcctttccttcttcttcctcgtcgaagtcgtcgcctctgccgacgcctcctcctcctcctccgacgcagccgcagccagagcagcagaaaccggtgacggtgcaggagaatctaccggctccgacgacggctccggcgagggcgtcgcagacggcggcggcgaggcaggtgccagctggcggcgtgcctagatccaagaggaggaagaaccagcagaagaaggtggtgcggcacgtgccggcggacggcgtgtcggccgacgtgtgggcgtggcggaagtacggacagaagcccatcaagggctcaccctacccaagggggtactaccggtgcagtagctcgaaggggtgcccggcgaggaagcaggtggagaggagccgctccgaccccaacaccttcatcctcacctacaccggcgagcacaaccactcggcgcccacccaccgcaactcgctcgccggcaccacccgcaacaagctcccttcctcctccgccgcctccgccgcctccgcgcagccccagccgccgccgccgtcggtggtggtggtcggcgccgggggtggtggagccgaggcggcggggctctccccgaccacaccgctgcggacgccgtccatggaggaggacgaggaggaggaggaggaggaagagctgctcgtggaggacatggagatggccggcgaggacgagctcctcttcctcaacggcggcgacgacaacgccgcattggatggcacccccatcaggggtgctttgctcttcttggctcttcctttctctgttcaacaacctaacctttctgcatgtagctcccttgggatgtttgattgggatctcaattctcatcactcatcactcttcttgcatccccaactattgatggttggagacgacggcggcattgcggatgtagccagtctcggtgatggcaacgcgattacgaccgaagatgatggcggcggcgcggatccagtccgcggcgatggcggtggcggcggctgctcggatgcggtccgtggcggcggcagcggctcgaatgtggcccgcggcggtggcggctgcgctgttgctgcctctggcggcaatgactgcactgttgtggcctacgtcggcgtcggtggtgttagtctgggtggctggatctgggatccttcttcctctttgtctccgggcagtggcatccacgctgggtgtgccattcgggttgagctcaagctcctcagattcaatggagaactccgtggtgaagtttggttgagtccgtttctgtggaggcgaccgaaggggattaacggttcgtcaagcggtctgcatgctaaaggagacccaaggttgcaattgtcatggctttgccgctgctccctgtcgattcgcgccttctgcactgtctag

SEQ ID NO: 60666 - DNA, 168 bp, Oryza sativa
  Clone ID: PAT_MRT4530_62172C.1
atgggggcgatggggaagctgagggtcttcgtggtgcaggagccggtcgtcgccgcctcctgcctcatcgccggcttcgatcggggaaccctagaatggaatctaccagattcggagccatcagtcatggcccgtcctggatctccaggcgcgttcaccaggccgtaa

SEQ ID NO: 60667 - DNA, 561 bp, Oryza sativa
  Clone ID: PAT_MRT4530_62173C.1
tcagtgcatcccgttctgcctcgtcgtcctcttgccattgtcggatcccttgcctcctccaacaactcctggatctcctcctgtcacacctcttccacgccaactgaggacggcgatggcgcgtggggcttggccgccgttgctgaatcgaagagaggtgccgtgttgaggagcagcgcgagctcgacatcggagctgatggatgtgggttgtcacgacgatcggggatagagctatcgtcgaagtggatagacgcggagcaaggaggacacagccgctggcgatgagctccgacatggcatggacggtggaggatgcggccatcagtgacgagcttcggcgtggggcctggatgacggagaggacacgaccgccgccactgagctccgacgtggcgtggacggtggaggatgcagccgccggcgacgagctccggcgtgagacgtggacgatgggaccaccggcgacaatgccttggtgcccggctcctggcgccgccccggcgtcccaaaccccccgccgtccgccgaccagccgcatatcacatcggcgcgtcgccat

SEQ ID NO: 60668 - DNA, 309 bp, Oryza sativa
  Clone ID: PAT_MRT4530_62174C.1
ttttattataacacatccttcaacaactcaaggggggtcttcactaacattgagagggactaaatacgacatcagatcaacaattttcacataactaaacacgtcatcactgttattagctcacgataagttctttatctcagacctttggtttctatagataggcccatctaagcaattctcacatggtatacacttattttcttcttctccactatcctggttcaacaataacacaaaggtgccttcatgaactgcttattcttagttctttggataccccttaccatgcaatcataaatgcactta

SEQ ID NO: 60669 - DNA, 192 bp, Oryza sativa
  Clone ID: PAT_MRT4530_62175C.1
atggattggatcggtgttcaagcaacggtgcccatccatccatccatccatcccaacccctctcccctgcagcctgatctagcaagacgccatggaaatggcccgaatgcgacacgagcaagtgtccgcctccacactttcttctcgctcaagggtagcggcgcgcagacgctgcgattggcacagcgatga

SEQ ID NO: 60670 - DNA, 459 bp, Oryza sativa
  Clone ID: PAT_MRT4530_62176C.1
cagaaatcaatatttttagttgctctgtttatttttcttggtatgtgctcactttgtttcctagccaaactcaaaacttttttagatttgatcaaatttacaaaaaaaaaatatacatctataacaccaaattagtttcactaaatgtaatgttgaatatattgtgatagtacattttgtgttgaaaatgtaattatgcctttctataattttggttataaactttttaaatttgtttaggaataaaatcaaaccaaattagtttcactaaatgtaatattgaatatattctgatagtacattgtgttgaaaatgtaattatgcctttctataattttggttataaactttttaaatttgtttaggaataaaatcaaagcttataatataagagagtaataattagctcaaccattaaggcaggagaaatatatgacgctgagcacctatcaaaacatt

SEQ ID NO: 60671 - DNA, 289 bp, Oryza sativa
  Clone ID: PAT_MRT4530_62178C.1
gaagagatctgccaggtgagatacatggcattgtcatgggtttacccaaaggagttggattgacctttacgtgtatatgtattgcttgcgactaggtgccagtaaaaaagactcctcgatgacccagttatgtcacttaaactgattgtaagagccaattttttgcagaaattaatttatctatataccaaacacaaatgcattgcctggaaagaaaaaaaaaaagggctgacgcccttttttttttttatcctttagctctttactttatatctgacactgattaact

SEQ ID NO: 60672 - DNA, 2497 bp, Oryza sativa
  Clone ID: PAT_MRT4530_62179C.1
gcttgttttgctttcctcgccgcgcctagtccttggctagtccgcgccgcctccgttccccccctcgctccactgatcctccgtcctccagccccgctacagctcccggccgcggcagctgatcaccgccgcgccccggcgcgtccccccgctccagggtgtgcggctacagtggtagagagccaagtgtcgcgacaacacgaggaggcgtcattcctggccgtgccactcccgcaggacatgctgccgttgctccgcccacggcgccaccactccaaccgccgctggaccaggacctgcagctcgaccaccttcatcgtcttggtcgctctgcctctactcaggtgcccgcggctgccacggctcccgggggggcggccccccggacccgcgcggagagccctcttgctcgggcgcagccctcggccgcctggggctagggcggcggaagcccatgaccaagcttctccactccgcctgccttctcatctgcatttcaggcgccatcgggttggccgcggctgctgccggacacccaggctgccagacgaggtgcggggacgtcgacatcccgttccccttcggcatcggcgatcactgcgcgattcacgagggttttcggctcgagtgcgacaacgccacgaaaggcaccagcaatcagaagcctttctggggggacttcgaggtgatcaagatctccatggaagacggcaaggtctgggtgaaggcgtacatgtccaggcagtgctacgaccaatccacgggcggtatgtcatacagcgacgcatcggcgaatttgagtggttcatctttctggttatcggacacggataacaaaattaccgtgatcggatgcaagactctcgcctacatgacgaccgattcttatgtaatcgggtgttcgtcagcatgcgacaacaaagtgaacaaactaactcccaagaatggttcatgctctggcgctggctgctgccaggcaaatgttcctaagagcatacagtactaccagggttatttcaacgaaggctacaacaccactaaaatatggatgagcagcccttgcagctacatggcagtgatggaaaccgcagcattcaactttagcacaagttacctcacatccagcgtattttatgacacgtacaaggggggagttccggttgtctacgactgggccataacatcaaaaacatgtacagaatctagaagaaacaagacttcctacgcatgtattagtaacaacagtcagtgcattgacaacctgacgaatgcacaaggttaccgctgcaagtgctccaatggatatgaaggcaacccgtacataaaggatggttgcaaagatattgatgagtgcctcaacaatgctacttacccttgcaaggggatatgcaccaacacgttggggaatttcacctgctcatgctccccaggaagttatatgatgaatggagattgtatgccaaagaagaaactacgttttgactcagtgcctgtggtagtagaattacaggaagcaacaaataggttcaatgaacaacagattcttgggcaaggaggccatggaactgtttacaaggggcttctgaagggcaacatggaagtagctgtcaaaagatgcatgacaatcaatgagcatcagaagaaagaatttggtaaagaaatgctaattttatctcaaatcaaccacaaaaatattgtcaaactattaggttgttgtcttgaagtagaggtccctatgctagtatacgagttcatcccgaacggcacgcttttcgatctcatccatggtaaccatggtcagcagatctccctggccactcgtcttcagattgcccatgagtcagctgaggcacttacttatctccattcatgtgcttcaccaccaatccttcatggtgacatcaaatcatccaacatcctccttgatagaaacctgatagcaaaggtttcagattttggtgcttccattctagcaccaacagatgagtcacagtttgtcacactggttcaaggaacttgtggatatcttgacccagagtacatgcagttgtgtcaattaacagataagagtgacgtatatagcttcggagttgttctcgtagagcttctcacatgccagaaagcgttcaacctcaatgcacctgaacatgagaaaagcctatcgatgaggtttctcaatgcaatgaagaataacaagcttgcagatatattagatgaccagatcaagaatagtgagaatatgccatttctcgaagagattgcagagttggcagcacaatgcttggagatgtctggtgtgaataggccatcaatgaagcacattgcagataatcttgacaggctgagaaaggttatgcaacatccatgggcagaacagaattcagaagagttggagagtttgcttggagaatcgtccatggtcagctcaaggtataccagtacaggaaatttcagcatagagagaaaaggtgtcatggagctagattcagggaggtag

SEQ ID NO: 60673 - DNA, 333 bp, Oryza sativa
  Clone ID: PAT_MRT4530_6217C.1
atggcggttttaacgtctccatcaagagattctagtgggctagcagatgtctactggctgaacatgtcatcgacattaaccgcctcgcagtcggcgtggactcgcggcagccgcaactgtcatcgtccattggtcacagggacagcacggcccctccatggcgcccgcagtcccctacggcggtccaagcctgcagtacaggctggtcgccctcgccggcggaggaggctggatgaccctgctgatgatggccagtcaaagcatgtggccccagtggaggttgagccgcagcaggaccgtcctacccccgatgagaaaagcaaacgtgcttag

SEQ ID NO: 60674 - DNA, 177 bp, Oryza sativa
  Clone ID: PAT_MRT4530_62180C.1
atcctcctcgtgagaaagaaacataacattgtcttgtcccctttattatgcctttcgatcccaatagtacagtctcactgcaataagcaatattttctacagaagagtacaactctgtgatcgggaaaaaaacaaaacaataataacatcggtgtgttgtgagaacagagagagata

SEQ ID NO: 60675 - DNA, 404 bp, Oryza sativa
  Clone ID: PAT_MRT4530_62181C.1
cttctctcttttttttgttgatgttttgtccacaaaccaggcaatacaaattccaatgttctttttgagaaacttcaccagttacggtggaagaaacaatcaacaataatacaatgtgaccatatatataggtacatggtacactaaactcagtaacagattctgcgctcccgcgcacgatacagccatacagtgcatcataaaacattacattcctccagaaggagaagaaaacaccaaccggaaaaaaaaaagaaaaaagaagaagctactattggtttatgcacatcggtacacacctcctgtgatttaaccgcccacaagtgcctcaaaacgctaattaatggaaactaggtctagaaaagctcactggggccgttaaaaatctggaggaaaaaaccatc

SEQ ID NO: 60676 - DNA, 397 bp, Oryza sativa
  Clone ID: PAT_MRT4530_62182C.1
cgcttacaacggcgagtaccaattgtcctctgtcggggagacctggctcttcgtgggggtctcacatttgttctttgtacgccgccgcgacaagatgaaccaaatacgccgccatgagggagtgcatttcaatccacatgagacacagaggcatccaggcatgcaactcttgctggaagctttactggactcagactgggatcaatgctgatggtcatattcccaccgatacgactgctgctggacgtgaacaaactctcacacactttcttaacggagagtggtgctcaggatcatattcccagaacagggtcctatgatcttcaccatactgaaactgatgaggcgcggactggttaataccagcagctgtttcaacatgagccagtcatcaatg

SEQ ID NO: 60677 - DNA, 450 bp, Oryza sativa
  Clone ID: PAT_MRT4530_62183C.1
atgaagattggagacagctcgaactctggtgccgccgtggagcgcgtcatcgccaactccggtgccgtggagctgccgttgctgactaggaccaactaccatgagtggtccttggtcatgcgggtgagcttggaggcgctggggctgtgggacacggtggagaaggacaagctcgagcatcgtgaaggtcgggctcgctgtgaagaagtcgcgaaagaggcgcgggctgcagtggagaagatgagggtcggcgatgatcgcgcgaagtccgccagcatgcaacgtctcttgaaagagttcaagaacgtcgcgttccatgatggggagtccgttgacgacttcgcgatgcacatcaatgggcttgtcgctagcctggcgcaagcatggcgaggcaatggaggacagccatgtggtgaagaagatccttgcgcgtggtccccaataagatga

SEQ ID NO: 60678 - DNA, 471 bp, Oryza sativa
  Clone ID: PAT_MRT4530_62184C.1
atggccctcggtgctcgtcaccctccctcctcaaagaaaaccaccaccaacttcaaaaccaaccgcaacaacatcaacacataccaatgcaagaacacagaccaacttcaaaaccaaccgcaacaacatcaacacacaccaacgcaagaacacaggccgcagcattccagaccaagagtaaaactctcacagaatcgtctcaagatcgaagacaaacacaacacccaatggtctcgatcaagtactccacaggaccacggcgaacgaaacgaaacagcaagaactagaagagcagcggctactagcaacagcatcaccaacacaaacacatggacattgaagaagagaagaaatctcacggttgtcttggagcagaggaaagcagaggaggaggaggaggaggagagagtgggagagagatcaaatcaagccctcacctctccgcgattccgctgcgcttgtgacttgtga

SEQ ID NO: 60679 - DNA, 2337 bp, Oryza sativa
  Clone ID: PAT_MRT4530_62185C.1
tcacttgtgtggatctctaatcattattctgttagaggagtatctattcaatttttgaacataaattagctcttcattattaacagatttatctgagtattctcttggttcttctgattcataatgcctctgcacaaaatatataggttgtgttggaattgggtgtggcatgtcctcgttctccagcatagacacaacgaatgacatcagtggcctagcatttgggctgtcaatttctagaagcaaaataccaaagctatatgtgtcggacttgactgaaaaggtgccttccattgcatattcaggtgacatgtaaccatatgtcccaacaactcgtctagtactttcttgttgctcattgcctccaaatatcctcgccataccaaaatccgatattttggggttcatctctccatcgagcagtatgttgcttgctttgagatctctatgaattatcttcattcttgaatcttgatggagataaagaagtcctcttgctacccctttgataatgttgaaccttgtcagccaatcaagtgtagcctctgttgtatgattgaaaaggaatttatctaagcttttgttgggcaagtattcgtaaataagcagcttctcatctccatgaatacagcaaccaagaagtctaactaagtttttgtgttgcagtttggcaataagaaccagttcatttctgaactgctccatcccttgctcagaacacttgctgagccttttaacagcaatttccttgccatcctccaatgttcccaccatgtgcctcttcttctttctgtttactgtagaatttgacccagtagaatcggccaaccggaggtacaggttctcagcaatggtgttcctgatgtccctccacgcgtcggcaagctcccctgtccaaagcaaacaccttggctggttggacatggtgccggttgcggtcaagttggtgtaggcgtaggccgtgcacgagcagttgcgggtacactcgtccgtgcactcgtcgaagtttctgttctggacatgcaagaacttgtcaggaaccttcattctagacatgatcacaaaatggtcatctccacatctcaattgttgctttctccggcatcctgaagaagaattggagccaacaggctcaaacccatcgaggcattggcaacttgggacggccgacgtgaggtcgcagtagccgaatgggccacacgagccataggtatcgcagccaggggcccttgggagttgatttgcgacagtccatgaggacaagctgctgttccaactcatgaacctaaagttgcccatgtagtcaatcatgacgcgcgtgtatggtgaatcatcagagattgtgtacttgaggtaaaactcatccttagtgttcacgactgttttatagacaaaagaggtgctgttgtgcaagtatgttgcaccggacaccgagacactatcaaacagaatgaaacggtaatatggccttgtctcgtgccagatgaagatctgaaagtttgacgtgggatcgccgctgaaggagaaatccccggtggatgggtcatctgggcccttccaagcgatgaaccgcatggcgacttgtccgtaggatctcactaaaaacttcatgttgggcagaatggtatcagttggttgatcaaagctttgccatatggtggtattgttcgatagccgaagaaccaaatttcctgagtcgagcagcaccgcgtaaactccgtcgtcttcggtgaccatactgttgggacttgccatcgtcgtccatagggtgcggcctttggaatctgacaatacaagagcagaattgttgctgatggagagcgtcgcggatgaagatgcagcgatcgggtcgtcgcggttggcaacccaaacataggtgcgctcggagatattgtgataccatataccaaggaataagctctggttggaggtggccggggagaagaatccgagcgcaaagtctccacctttggagatgagcatgtcgctaggagagattagtcgcttcgcatgtctcaactggtcatcgcatccgaggtttgcatgcagcgcatgcatggggatgggggtgggggtgccatacttcggcactgcagctatgtcggcctttgagaggtgtgcaagttcaacagagacctgccgcgcttcttcccttgatgccgtctgctccctgcttaaccgccaccgcctgcatcctcgatccggcctccacgtcctggccggcggccgctcgctctcctgcctcgccgcgccttcgctgcaagcctgcaaggagaagggcgagcggtggcgggcggtggccttgctcccggtctccacgggcgccgccaatgacat

SEQ ID NO: 60680 - DNA, 420 bp, Oryza sativa
  Clone ID: PAT_MRT4530_62186C.1
gcgagtcgtactggaagagcgagcactagagccaacagtcagggcacccgacagtgcacaatactctacccaatccgcagctgcggcggcggctcccggcggagatcctgcaggacatgctgctgatgccggagctgacgccgccgtcgctgatgccggcgttgatgctggtgtccatgctggtcaccatccaggaggacaagctggtggacgagatggtcgtgtccaagctcgaggacaagctgaacgacatgctgaagaacaacagtaagatcgagatcatagtcgagaccatcggcgagccaaacgaggactacaacgacgaggacgacgacgacgacgacgacaacgacgacgagtacgacggagactactacgaacacgagaccgactaggacagccgctgactccgactcctac

SEQ ID NO: 60681 - DNA, 289 bp, Oryza sativa
  Clone ID: PAT_MRT4530_62187C.1
aggagaagctcatgggcagccgcgcgagcaagacagggggagggaccgacttgtggaaggatggccggctacggagaaaaagctcgtcggcagccacgcacacggggaggacatgaccggctatggtgcacgccggacgagatgctcgtcgaccggccgcgacgaggggaggacctggctggctgcgacgcgctgggaagagtcgccggctggctgcgcgagagaaaagagagagatgaggagagagataggagatagacctgacatgtgggcccaatggtatttttga

SEQ ID NO: 60682 - DNA, 2143 bp, Oryza sativa
  Clone ID: PAT_MRT4530_62188C.1
ttaaacgcgaagggggtcgaggaagagggcggtgacgagacccttgaggtcggcgccgacggtgtagccgtccctgccgccgaagtagatgacctccggtgtcgtcgcaaggttcaccaacagccgcgccgccggcagcaggttgggatccatctcgacgcacgccctgttgatcgtcctccacgcgctctccaccagcgcggccaccgccgccacggcctcctccccgcccacgccgcgctccgccatgtagcactcgatcgtgctcgccgcgtccttgccgctcttcccggtcttgtaggaggcgatgtcgttgaggaagcgggtgacctcgccgccggcgcggaccaagctgggcgcccactcggatgcctccatggacgccgccgcaccgtcgccgtcgcgtgcgcacaatagcaccaccacagccattgttgggtagccaattgacatgaaagacacgtccagatgctcggcgaagctgggcatgtgcttgtcgctcgaccattgggcctcacggaggtagtattctgactgctgcttgaacgaagatttcacgtaagacatgcggtgcttctcatctggctccaagctgtcctccatctcatcaaagtcattgagaatccttatgtaaaagttgcgcaggtattctggtagaatagaaaccgcactcttgtcccatctctgtacagcttcgttaaacttataacactcctccaaggtggcgtggatatcatagatgtcatccgtcatggtcataagttgaaacaccttagcaaatatgattcgcgcacgagagtagtcctccccgtggaacatggcacaggtccaaaagtaagactctactaggcaatctcgagcgtagcttagctgcacgctgtcataaagttgtctccaccacaaggagagggccttgagctccttgaggtaaagagatctgacgagctcgaagtccagcctcgcgagctctagcaccatgccgtcgtgcgccgcctcctgctcatactcggtgatgtagtgcatcgtctccagcagcttgggcgcccgcgggagagggatgtcgagggcgcgggagacctgcttggccatgggtgacctcagtgcaccttgcagggactggaggctccgtctcgagaacgcgatggcgtcatcgagtgccgcttcaccgggcatggcgaggtgcgctgcattgtataggcttagcaggccccttgcatccgtgcttaggctctctctaaaacaacccgtgctatctttgaacttgtcgaatacatctgcagatacccagaaaccgtgctggcgaagtagacgaaatctaagggattcgaggtagagctggtcaccatcgtcaaagccagcggcagctttctgctgttcatcgtggtgaaatacatgctgtaacgctgtggcaatctcgtcacggaagtggttgtctatatggaggcgttcgagcacgtccactagcatcaccgtgtagggcacatttatggtcttcaaaattttgcagcccacctgcatctttagccgatccacccgttctctcatccactcctccgacctgtggcggtccagcgtggcaacatatttacattttgtcccccatttttcttcctgtcttcctaaatctctctctctctctctctgatgcaggttggcaagtgcgcacggcgaggcgtcggtggcgaccggcgaattgctacgcggaggggcgggcggcgcatggggacggccccgctgccctcccacgcggcgtcgccgactctgcccttccgctccgagcctccgagactccatcgctgccatcgcgcccgagctcgtcattgtcgtcttcaacctgggcggcgagagaggaggcgtcggtggcagggagatccggtggccgccgtcggcgccggcgacgtgcgccgggtgctgcgcctctccgccatgcctgcctcgccgacgcttccgcctctccgccatggccaccgccgtgcgcgccgactgccggcccgcccccgcacttgcccaccgccgcccgcggccgtggtgcacgaagaggaagggggtggccggtggtgagcgtgtgtggagaaggagggggtggccagtggcgaacgcgtgcggagagggaggaggcggagaggcgttttgctcggcctag

SEQ ID NO: 60683 - DNA, 1028 bp, Oryza sativa
  Clone ID: PAT_MRT4530_62189C.1
gcacgagggcactcttaaaatgatctggtagaaatccccaccttaaacccttaatactctagaaagcaccgctatcttttacatctattgcccttattttgcttattccaaacatgactttgcttcatgttcattttctgaaagtgtcagcacctgacatttggaagcgcataactaacaaagtgggcatggtgtaacaatttctagaacaagaggcaccactcatagggcaatgcagtacatgtgtgctgatagcagttgtagggagaaaacaaatttatgaagaggcatgtttattgttgacaataagggaccaattgaaagggtagtagtgctgctgccacctccgtacctcaacttctcagtcatgccagaacataaactttgcttgcagattgtatttcaatgcttagaataccaaaatacaagtaacacttagcatattttgctattacaaactaatatggaatgactaactacgttttttgtttgttccttaaattttgcttgtgataggaaaaaagggggattttcatttttgctctgctatattagttttcttttaccagcatgcttgcttattaaaatttggtgtacatcttcgtttatctaggcatataaatttgatcatttcatgtctacctgtgtttgctcttaagtcatgatgcatcaatggggctcaacagttcatcagtgctaattaccagagaggataatgaaataaagatccgcaatcacttatttggatgcatcaagctaacaagtctttcctgcagcaaaatactatgctcaaatcagtgtcttaattataggctggctgattgggcccaggaacttgggatcttcatagaactatcattctatttcattgcgtacattagccctcataccatggaaacagtcattcaattccacttgtaccattatacatgacaacagagcacttatttcctccctatactatcaacaaaaacaaccagaaaagcaaattcttctcctcgtgccgaattcctgcagcccggggatcc

SEQ ID NO: 60684 - DNA, 909 bp, Oryza sativa
  Clone ID: PAT_MRT4530_6218C.1
ttagtcaggtttgtcctgttcgtagctagtctcgtgtcctagagtttgccggtgttgcctcccatggtggcggccggtgtggtggtccttgatggcggtggtggttggagctggtggctttgtgcctctatgatggggaatcgaagctctggtgggggattcaccctcccgctttggtcccaaagggtggtgaagattccagatctgagttaccttggtggtgatggaggcggttccagcggcggttgctggaggtgccctgcgtgcgtgtgggcacacgctggtggtggcaactacgtcgcgctcggcgttgtggcggtcgtcgtctccctccgttgtacttgtgctggaggtggcgacggcgtgtacgccgcccttggcgttgctgcggtcatcgtctcccttcgtcgtgcttgcgctggcagtggcgacagcgtgtgcacggcgctcggtgccgctgcggtcgtcgtctcccttcgtcgtgctcctgtcgtctgctgcgccccagcttgcgctgcccctgttgcagcctctgcctctgttggcagcagccatggttggttagatgacgacaatctcctccaagtcacctccttcttagccatcgtcgtcctcacagcaagacataagtcaattggcaacctctcaaatgccccattgttgatgcaggtcgatccattgctcttgaagaatgtcgaaaatttggcaaaaaggcaattacttcgtgacttgactaagagtcctctgttggaggcatgtcacgcgggccttcgaccgaagctgccgaaaccactataccgacgaagcaccggtcaacgaccaaggcgttcacctagggcgaagccaggacggttcgccatcatgcctaagggactcgccgtgaagtcttcgcttaggatgaagctatag

SEQ ID NO: 60685 - DNA, 499 bp, Oryza sativa
  unsure (1)..(499): unsure at all n locations
  Clone ID: PAT_MRT4530_62190C.1
gtgcgtggaggagcagcgaagccggatgacagacgaagggagacggactgatgtggggttgatgctggggtttggaccgggtttcaccattgaaaccatggtgctgcacgcagcacgcaccgtaatgatagccggaagtaagaattagttcagagcanaaggtaagtgaacgcaatacactgatgttctcaggccatgtctgctagtgaggttctaaatggattagtacgcaaatgaaggcatcatagtagtacttgttccagaggtttcatgtattcgnggctgttatatngctaaaccacgtgttatgtttttatctattgtcgagcaatgtttcatgtattcagagaaacttgagtggatggtaccatactaccattcacgatgtaaaatgtactgttgggcatttgtgtgacgtgcgctatatatgttctgctacttcacatttgaagggttaataaaagtataaacacgacacgtcattgttaaaaaaaaaaaa

SEQ ID NO: 60686 - DNA, 315 bp, Oryza sativa
  Clone ID: PAT_MRT4530_62191C.1
atgaacacactacaatgttgctggcttgctgcattacccttcgagttggtcaccaattcatctgcatttcgcttggagaaagactgccttgtgctccgctgtgcacttgtgctgctcatcgttgcttccagcgaggtgtggtctgttcagggtgaggactgctggaacgtggacaacgtccgctacctcgtatgcacccacacccacaagtgcagggagacatgccaggatcacggcaacgtcgacggccgctgcaaatggggctgctcccacctgtggcccatctgcgagtgcctgcctccaaacttccaataa

SEQ ID NO: 60687 - DNA, 535 bp, Oryza sativa
  Clone ID: PAT_MRT4530_62192C.1
atggcctcggggacagccgccgcagcaccgggaggcaaagagggagagccggtggcactttgggagtgggctctagcgaccggtggcgcgtggccggatctggtgtctcctgccagatctggtcagagccggcgacaacaacggctcgtcggcagccgggcggccgcgaacggcgacatgggtcggcagcggtggtggtcggccgcccgtggtgacctcagcggcttatggcagcaagcaaggaagcggttagaaggtggagagtttgttctctattgccggccaagcatcctcttctccacagggctcatccccttctatggcccaagtgcttcagttttggtcgtggggatggcggccatgggccatcttgacgacaacgacaccattaggtaccgttccgcttcttggaggcgttattatggcgttgagccctcctagcaccaagaaccttccgcgtgcaacggtgaccattggtggactcgaggccttcgtcgttggttttgtgtcttgctctgcggcaggtgaccatcat

SEQ ID NO: 60688 - DNA, 2390 bp, Oryza sativa
  unsure (1)..(2390): unsure at all n locations
  Clone ID: PAT_MRT4530_62193C.1
ctgcaggaattcggcacgaggtctcgtcccctcgtgccgtggcgactgagatctctctcgtctcgtgtataatttgctgcgccttagtttcgcatctgctatctgcttcttcttcttcttcctctgctgctgccgcgttgcgtacggtcgtgggaggaaacagggagagggagatggcggcctcgacgatgaagcacctcgtgcaggtcggggaggcgcgggaggcggcggaggaggacggaggggcgccctcggccgggccggcgtaccgctgcgcctacggcgggggcgccgcctcgccgcccgccgtgccggggctcgagtgctgctgggacatattccggatgacggtggagaggtgcccggacaacaagatgttgggccgccgagaaatcgtcgacggcaaggctggcaagtacacgtggataacttacaaggaagcgtacgacaccgtgatcaaggtgggcgcgtccatccggagccttggagtcggcaagggtggacgctgtggtatttacggagccaactgccctgagtgggttatcagtatgcaggcctgcaatgcccatggcatatactgtgttccgttgtatgacacgctaggtgctggggctgtagaatttatactgtgccatgctgaggtagaaattgcttttatagaggaaaagaagataggagaggtgctcaagacatttccaaatgcaacaaagtatttgaagacaattgtgagctttggaaaggtcaatcctgaacaaaaggaaaaggttgaacaaaacggagtgtccatctactcgtgggaagagtttttgcagttgcttcgtgaagatgatgtttacatttcttatcttcctcttgcccatatctttgaccgtgtacttgaggaagtgttcattcaccatggtgcatcaattggattttggcgtggagatgtcaaactcttggttgaagacattggagaactcaagccaacaattttctgcgctgttccacgtgtactagacagaatttatggaggactgcaagataaagtttcgactggtggtttcctgaagaagacactgtttaatgttgcttacaaatacaaacaagggaatatggtgaaaggaagcaagcatgaagaagctgctgccatgttcgataaactagtcttcaccaaggttaaacgaggattaggtggcagagtacgacttattttgtctggtgcagctcccctgtctaatcatgttgaagagtacctgcgtgtggtaacttgctcccttgttcttcagggctatggtcttactgagacctgtgctgggtccttcgtttcccttccaaacaacatgtcgatgctgggaactgtaggccctccagtcccctatgtcgaagtacacctcgagtctgttcctgaaatgggatatgatgcattgtcaaaagaatcacctcgtggggagatttgcatcagaggggacaccttgttctcagggtaccacaaacgagaagacctcaccaaggaagttttagtcgatggatggtttcacacaggagacattggtgagtggcagtctgatggaagcatgaagatcattgatcgcaagaagaacatcttcaagctctcccaaggagaatatgtcgctgtggagaatttggagaacatattcggtcaagctcctggtgttgattcgatttgggtgtacgggaatagcttcgaatcatgcttggttgcagtggtcaacccgaacaagcaagctctggaacgatgggcagagtcaaacggggtaactggagactttgctaccatgtgtgaagatcctaaagcaaaagaatttatcttgggagaattaaccaagactggtaaagaaaagaagctcaaaggctttgagctcatcagggctgttcatctggagccagtgccattcgatatggatcgtgacctaattaccccaacttacaagaagaagcggccacagctgctcaaatattaccagaacgtcatcgacagcatgtataagaacatgaagtaggactggactcatggcggtacggtggaccaaaacttcacttagtagtttcgatgcgaacggaaagaaagaatttggtgatagttaggcttattttatttccattttctcctaaatttggacgtgtaatagttagtcttacatagccgtgctagcatgagcgacctcatatattaccgtgtcaattcttgcattttctttgcactgatagaaaagagtgaacagatacaaaactgttgctggcgagtttctactgtgtgaatttacattcttttatggtaacaaggacacatactttactcctgtattgttatacttcgccccacttcttctcgctctctcccgccctcgggccgtaanatatnttaagtttataacaanaaaaataaa

SEQ ID NO: 60689 - DNA, 2048 bp, Oryza sativa
  unsure (1)..(2048): unsure at all n locations
  Clone ID: PAT_MRT4530_62194C.1
ttttttttttttttttttttantggaaaataaagacttcgcgaccttatatttgccttccaggaagcccaaaattctacccaatagtgaatataccacaaagctatttatagtctaatggttacaggccttgcaacctaagctaactgattgccttattttccatctgtcccactaactgagcatgcaatcttacagaaatgcaatggcaaaagaaaaaaaaggagcgaaaatagatatcatctgtctcatgccttctgttctgtggtcaaatcaccccatctgacgttgtactttgctgcaaggtagtgagcccctacaggaccgcggcttccataagggtatagctcaggggctatccgcttctcttccagctccttgagtaagggagtgaagagctcccatgcggcatccaactcatcagaacggataaaaagccttcgctctccttcaatggcatcaagtaagagcctctcataagcatctggtatctccttggagtaccttgctgcatagtgaagattcaaattacttctatctagtctcataccaagaccaggaattttgttgttaatcttcaagtagatagcttcatcaggttgcacacgtatgacaagttcattagtggctgtatcaagatcagtcccaaaactcctcttataaagattaccaggaacatgtcggaactgtactctaatctcagccccctttgtatgtaaagccttcccagctttcataagaaaaggaactccatcccatctagcattatttatgaaaagtgcagctgcagcaaatgttggggttacactatccttgggcaccgtcttatcttcagtgtatccagggtatgtggtaccaccctttgtatgacttttgtactgtcctatcaccacatcttccagttgcaggggcttcatggaacgcagaactttaaccttttcgtttcttatgtcctctgcctccaagctaacaggagtttccattgcaaatagggctagtatctgaagaagatgattctgcattatgtcacggataataccatacctatcaaagtaccctcctcgtccttcagtgccgaaatcctctgagaatatcagctgcacattccttatatactgccttgaccatagaggttcaaaaacaagatttgagaagcgaaggacagacaggttctccactagttcctttcccaagtagtggtcaatccacctgaagatttggtcctctaccaggtactgcttcagaccccttgttaatgcagaagatgaatctgagtcacgaccaaaaggtttctcaacaattacccttgtccaaccattcccagatgatgctgatttgcttgcacattttacaacatcaaggaatatatttggtggtattgacaagtagaaaagacggttagaaactctggaaccctcatgttgtttcagcttcttgtcaaggtccatgaaatgctcctctgaatcatattggcctgaatgatagaagcatctctttaaaaactcttccatcttctcattacagttttcccttttatctattctgcatgtcagtgttttgctgaccatgtttctcaattcagcatctgtcatcttgctgcgtgcatatccgaagatagtgaaatgctttggaagacaatcttcatagtatagagcaaaaagtgcaggaaatatcttcttcttggcaaggtcaccagatgctccgactacagtgatactaacagtggagtcatcattttctgatagagggctcaagtcttcaaaatcatctaaaatgatttctgaaggtgagccattttccacctttgattgggaagcacttctggcagctttctccagaccagcatccttggcaccttgcactcccgtagtggcgacggcggcgacgcgccacccgagcgcggccgctctacggaggccgcatctggcgaaggagagcgccgccggcggagccgccgatgccaatcctcgtcgtacggcgccggcggccggggagcacctcatgcaggagagcgccatgcctgtatgccttcctcctggcctcgtgcca

SEQ ID NO: 60690 - DNA, 402 bp, Oryza sativa
  Clone ID: PAT_MRT4530_62195C.1
ctagccggagccgccgtggccgtcctccttcttccccaccgccgcgccccgctcttccccacctccttcttcccagatcgtgcttctcccactcggatcagctgccggagccgccgtcggagccgactttggccccttctccgccgccggaaccgacatcgacctcagcccgcggccgtccttcttcttccccaccgccacggctgtcctcctcacggacttctcctcggccccactgccggcgctatgccacgtcctcgccagagccgccgccatatcgttcttctcccactcggacccatacaaatctcctcctccaccttcgccggtcgcccctctctctctctctctttgcccgtgactccatcccctccctagccgctgccctcgcggccttgccat

SEQ ID NO: 60691 - DNA, 559 bp, Oryza sativa
  Clone ID: PAT_MRT4530_62196C.1
gcagccgcggagaccgcgcgcttctcttcctcgctcactcctcccagcgtcctcgcaggagcgactccccactgccgccgcagccatcctcctcgctcgctcctccttctccccgctgctgccgctacgccgcgccctagccggagccgccgcggccgtcctccttcttccccaccgccgcgccccgctcttccccacctccttcttcccagatcgtgcttctcccactcggatcagccgccgccggagccgactttggccccttctccgccgccggaaccaacatcgacctcagcccgcggccgtccttcttcttccccaccgccgcggctgtcctcctcacgggcttctcctctgccccgctgccggcgctacgccgcgtcctcgccggagccgccgccgtatcgttcttctcccactcggacccgtacgaatctccgtcctccaccttcgccgctcgcccctctctctctctcttcgcccgcgactccatcccctccctagccgctgccctcacggcctcgccatcgccaatccctccatgccttctcgggctcat

SEQ ID NO: 60692 - DNA, 319 bp, Oryza sativa
  Clone ID: PAT_MRT4530_62197C.1
ctctttcttccagaccgtggcatgcacggcttgacacagacgctctcgtacgtcgtcgtcgtcgccgtcgtcctcctcgtcggcataaagcagtctccactgcaaaccagctagctgtagctctcaattcgtaggtgagatcgacgcgcatcgcgccgcgtctacgtttgtatatagagggggagagaggatcggaggagccgatcgagctgaagtagggatggtgctgagggcgtgcacaatggtggaggggtcatctttcgtcgtcggcggcggcggcggtgtgccgcttttcgagtggcttaagccgaggacctcg

SEQ ID NO: 60693 - DNA, 1085 bp, Oryza sativa
  Clone ID: PAT_MRT4530_62198C.1
gcacgagggccagcgcggcgcggtcgcctttgccctgccctgcactgaccgttggagagccaagcaacccaacccaagcgctcttctcttctcctcctcttcctcccaaatcgatcgggatccgatgcgcacggaggaggaaggagcatggtgaggacgcccgagaggagctactcctgctcctccgccaaggaagtcgcctacagctgtggttactgtggctatgcattgaacctgagctcctcaacacggaacacagcgaacattggatccaagtatggtaagcagatcaggaaaggtgtaatctcattctttgcgatcgacgagagtcggttcacacaaactgatgaggtgagctgcatgccatacttccattcaaggcgctcctggggtttgttcagaaagaggacaaggttgatctgccgcaaatgtggtggccgtatcggtaatgcttatgaggatgaggattccacattgtatgatggttcagatgatttgcacatgagctccgagggctacagcatgtcgagtggaaagaaatatgttatcaagattaatgcactgcagccttcaaccgatgactctggtgttcccttcaccctgtgatgctgttctgaacttctgcagtatgcacttttcgattcttgcccttgcgctatactggactgtcaatcaagtaactgcagaaccaagagattacgtgctagtgtgtaactgtatattttgataggaatgctgaattttgcctacctgtatttataaaatggaagagtttgttgtctatttacatatacattcagagttcagtgggtgtgcaactgtgcatcatggacctggatttggcaatccatatttgggcaaatgtttagttagaaatcaggtttctgatgatgttcagtggtgtgtacttgtgtcttgtactgaaatattgtagtgtcttttgattttttgtgtatctaaagaatgatgtaaatcttcagctattctaaacggcagtttttttttgtttgtgttttgaagctatgccaattaatttctgccactaatgttgatatgatttgaagtgaattcctgtgactctgagc

SEQ ID NO: 60694 - DNA, 660 bp, Oryza sativa
  Clone ID: PAT_MRT4530_62199C.1
atggcagcggcggctggcgacgcgacggcagcggcgcaagagaaggggagggcgtcggcggtgggagcgctgggcggggtgggggggagcgccacgggaggttcggcggccgacggcacggcggcgacgcaagagaaggggagggcgtcggcggcgggagtgctgggtgagggcggagggagcgaggcagccggcacactccgggttcctcaagggccaccgcctggccgtcttctgcctcgcctcgggctgctgcgggcgggtggtggcaggccgacgaaggagagactgggcgcgtggttcggggggaagacatgcttgtacagaggcccgatgcggttgtcgtccagtcagcaaaataatatgatcaaggtgggctctgatatacgaggttgcttgggcgaggcgggcatcatccgctgccgcccctcttcctttcttaccctagatcgacctcgggaaggtgatgtggacaccagcaactcgaccctcaccgtcgccgtcactgtccctctttccctagatcgacctcatgaggcgatgcggacttcggcgagacggggcctcagctgccactaccgcccctcttctctggtggcacgatctgagcatcggctcaaggtcctcactgagcgggggttgagtcctccacggttctag

SEQ ID NO: 60695 - DNA, 287 bp, Oryza sativa
  Clone ID: PAT_MRT4530_6219C.1
atggtgaggaacgggactatgttttaaggaggaacagaggtctagtgcggtcaggataccatgtgagaaggtgactagagtcaggattcttggagatcaacttcggtcaacggtggggatcgggactagactcagggaggagttgaggtccagacggtcaaggataccgggtgacgaagttggatatgagatagcatacggtggatggatatcgtgtggaaaagatcttcgcaacgggcttcacgaggtgtgcatgcaagcgtcggtgttcgaggaggaaattggtt

SEQ ID NO: 60696 - DNA, 285 bp, Oryza sativa
  Clone ID: PAT_MRT4530_621C.1
atgctgatgaccatcgtcggcggcacaaaggggtttgttgatgttagccattggggttttgtgggaggtgcagataggaagcggagagagagcaagggaagtagaagaggcggcggaaggaaagctataatcaaggcaagttacagggatgtcgccaacaaatattttattaattcctctcctctccgataccaccggaacaacagaaagcatcccagagttgggctgagcaggctttttccgaatctagactttctcaaagggcttcttattccaacagactga

SEQ ID NO: 60697 - DNA, 249 bp, Oryza sativa
  Clone ID: PAT_MRT4530_62200C.1
atgtacgcgccggctcaactattccaccggcagcgagccgctgcctacgtgctgggctgctgcgtagtgcacccgatgagagatgcgcgagatgtgtgcggcggcgagcgcgacgagagtgcggccggcgagcgcgacgcaagcagcggcggtggcgagtgcgacgagagcagcggcggcgagagtgacgagagcgcgaccggcgagcgcgacgcaagcggcggcggcaagcgtgagcggcgaggttga

SEQ ID NO: 60698 - DNA, 436 bp, Oryza sativa
  unsure (1)..(436): unsure at all n locations
  Clone ID: PAT_MRT4530_62201C.1
cagagactcgtcctgctcgtgctcttaaggcaaacccagctgcattgtcncggtcgcagtcgttccaggagacttcttgactctttacctgttgaatttcctatagtttttgtcagcacagtgtgtgtactgtaaaatgtgtatagcagtagaggcggacgcgtgggcagaaggatcaggagagagctttttgtgcagccactaacttgaggtggataggagttgcaaagggctttcatgagaaactacatcgagatgtatatgtattgtaaatacttgacaaactggttgtgtacatctaggttaagtcaggaaaatacactcacctggtttagctctcctagtaaaaaaaacaaaaaaagaaagtataactttgtttttgaagaaaaaaggagtgcaaaagattcagattaaaaaaaaaaaaaaaaaaaaaaaa

SEQ ID NO: 60699 - DNA, 393 bp, Oryza sativa
  Clone ID: PAT_MRT4530_62202C.1
atgtgggccccacatgccatcctctctctccctttcttcttcttcttcccttctctctttctttttctttctcctctccccttcggccgaccgcggggagcacgggcggctagagctggagcggcggcgggcggggccagagcagcggcggcggcctcaccatcggcctcgccaagtggagagaggagaggagaggatagcagggcgtgtgtgtggtttgaggagaaggaatctgatggagcgggaaatttgcagagggaaggtagggatgcagagaggtgctccagggacccgtatgccgccgggtcaccggatctgcaccccgccgtcttccgtctccgccttccgtttctgcaccgtaatgatgctgcttgccgatttgactgcgaatag

SEQ ID NO: 60700 - DNA, 403 bp, Oryza sativa
  Clone ID: PAT_MRT4530_62203C.1
ggcacccctatttagcaacaaattgaagcttactcaaatcttacaaaagaagaattggcaacaacccaaactaactttaccaaaattttagcaattgccaaaccttgccataccaaaaaaaaaaaattgttaaggcaggggctagaataaaacaggccctgagcctttcaggcctttttgggcaccagccacgggacaacactaatccaccaagggccaaggttgtaagggacaggccctttgcaaccggcagctgcaaagggctagattgcccaaatttccctcaaaactagcaactgtttaaaggaatgcctttgggctagaaacaactgggcctcaagttttggttaatgcagcccatcgcatggacattagcccctcatttaacccggaagagagcccc

SEQ ID NO: 60701 - DNA, 234 bp, Oryza sativa
  Clone ID: PAT_MRT4530_62204C.1
cccctatctccccgatgtcgtcgccggcgccgtcttcgccatgcaagccgaagatccgacagatcctgtcaattccggtattgtaccccagcgaggacaacaggcagggacctatgctcgactggctgctctcccgcgcagctactgtcaccagacgttgggctgactgcggacactcctatccagatatttgctgaagtgttcgcaaggccgtgctactcgacaagatcctac

SEQ ID NO: 60702 - DNA, 518 bp, Oryza sativa
  unsure (1)..(518): unsure at all n locations
  Clone ID: PAT_MRT4530_62205C.1
gacccacgnncgtccggnagagtagtttggtgnnnatggcgccagggnaggagagagaaggnagaaaatggtggcagacttacttacgatgaggaggagcctgcnnacgccgacnngtgctgnngcgcgcgcgcntnngcggcggctttggaccgggcnnnggtcgcttgnngcggcggcgaaagctttgcgccacggnncggggcttccgggccgcttcgtccgtcggacccccggagaacgtgtgcgcggcggcgtcgtgcgctcgcnnggagtggccccgtccattggcggggnngcacccgcggcgtgcgtgtgcccgtggtccccgcccgnncgccggcgtcttttcgccgacnngcgttcccggtgtcccccgcgcccccggacccgccggggaaaagcttcggcggcgnnngcggcggagggtccccctcnnccgtcggagcctcgtgctcgnngcggtggaccgtcttactaaacagggggggcgccccttttgctctcccgtgtgcgtg

SEQ ID NO: 60703 - DNA, 539 bp, Oryza sativa
  Clone ID: PAT_MRT4530_62206C.1
ggacaataggcggggttttttggacagaccccccaataaaacaaaaacagccccatcaggagaaaaaaatgggcccaaaaaatacaccctactaaaatgggttttataagcaaaaaattaaaacccattacaaaccccacaacgcaggctttatttggaaaaggaatcgccggggggaattaaagccctttaaccaaaaatcctcctagccaggggaagggccttaggcatgagggccacaccctgggcatgaaggggccaaagggggggggcccaaaaaaaaccaacaagggatgcccccgaaccctccgggggggcaaggacagaatggctttggaaacccaaatggggcttgaagcccggggcaatttccctaaaaagccttgggaaggggagtttccggaaaaaaagcccagtacttttcggggcctggggaatcccacggggggcaacagttccagggggggaacgggggggctttttaactcctccaggggggggagcaaacttaaaaacacccttgggggaaagctgtttcc

SEQ ID NO: 60704 - DNA, 1671 bp, Oryza sativa
  Clone ID: PAT_MRT4530_62207C.1
tcaccactccgttcggtcgacaagcttgagccccgcgggcatgtcgtggcagtgccgaacgtgcggcacgatcttgccggcgtcctcccaccgcttgcagtcgtacagcggcgcgacgtggaagcacggctccatggacatgtcccggcggcacggcggcgccgtgccgttcacctcccggcgcggcagcacccacggcgtcagcccgccgagcccctgcgccacgtacccgaacgtcgacgtccccgtcgtcaccagcacgtccgtcgtgctcagcaggtacatctccgcccacgccttccgctcgtgcgccctcacgccgtacatctgctgctcctcgtggctcggctggtcgaacaccaccacctcgccggactccgtcgccctctcccagtacatccccttcatcttctcgtagtaccacgacttgagcgaggtgatcaccacggcgctcggcctgagaccgcggcgcgcgctcgccgccgccgtcgccggtggttcttggtccgtgtcgtcgagcacccgcgggagcagcccttcgtcctgcgtgcacgacgtgatcgtcctgaggatctccggcgactcccactcccacgaggagacgcgcacctggatgccgacgcggcggcgcgcccacgcgaggtggccgcggtagtagcgggtgacgaggccccagacgtggttggtcgggtggaacaggtagcggccgaggtggtggaacacggcgtcgcgctccgggaacagcgcggcgagctcgtcctggaacgcgtcgacgaggaacagccccggcacgatgtagctgtccgtcctcatcaccagccactggatgctcgacagcagccgctggtcctcgtcacagaagaagagcttgtcgtagtcggtctggttgtaatcgaggtggatgtacgcgaacgccggcggcggcgccgccgccgccgcttcgccgccgtctggtctgagcactctgtcctcgcgcatcttcccgtaccgctcggcggtgtggaggtagaagccctggtagcccacgagcgggaactccggcggcagcagccacgtcgtgccggcgaagggctcgcagaacagctcgcccatctcgttgctggggtcgacgaggagcacgcggtcggtgagcatcgcgtacaggaacgccgacgcggcggcgaggatccggttgccgaggccgcggtaggagatggagacgaggtacctgcacgcctccggcgaggcctcggccgccgccgggctcttgccggacttgagctgctccactgcggcgctgtaggcggcggtgccagggccgcaccgcctctgcaggtcttcgtggcgccgcagtttggagacgaggtgctccgatggtcgccggccggcgtttcgccggtacgcggcggattggtaccggctgtggcaggattcttggtcgaagccgtcgacaaggaggccgccgagaagcttgtcgtgtgacgtcgtcgggtgcttcatgaaggagacatcatcatctgtacctccccgaatgccatccaccgccgtcttgatccacatcgcttgatcgccaattcgcccgctgaagatgacgacgagcggcggcatggtcatcaggacagcgacgagcaccgtgctcatcttccccgggcgccacggcttgccgccggcggcctgcagggccttcgtcat

SEQ ID NO: 60705 - DNA, 746 bp, Oryza sativa
  unsure (1)..(746): unsure at all n locations
  Clone ID: PAT_MRT4530_62208C.1
ccacgngtccgcaagaaaacagcacaaagaaccagctgatcagctctcctacccgagaggagatcgatcgatcgatcgaagcatccatccatttccatccaagaacaagcagaggcaatgaggccaggagcagggttcaacgcgacggcggtggcggcggcgaaagcggccgtggtggcccccgtggccgccggcggcgcggcggcgcattccgcgtggcactccccggtgccgtacctcttcggcggcctcgccgccatgctcgggctcatcgcgttcgcgctcctcatcctcgcctgctcgtactggaagctctccggctacctggagggtggcgccggcggccgtggcggcaacgacgacggcggcgcccccgccgacggcgcgaagccggcagcgtcggagctgccgccgccgatatgggaggagaagatactggtgatcatggccggcgacgtgaagccgacttacctggccacgcccatgtcgagcagggcctcctccttcggcgaccggagcagcagcaacggcgatcaggccgacgacgagaagaagaaggtgcaggaggtcgccatgggtagcctcgtcaaggatggtgagaatggtgagcacagtgagagccagagagacagagatgagcaccacatccctgaggtgtgatgagttttgtttccatttctttttcttatgtagtttttaggtctattttgatgcctcgttgagatgatctcatgatcgtcagagat

SEQ ID NO: 60706 - DNA, 253 bp, Oryza sativa
  Clone ID: PAT_MRT4530_62209C.1
cttgttctagatcgcagcggccctttatttttatggagggtttttttatatatatctttctttatttctaccatgtccctttgataattactaactacagcagctccaccctaaataccacacacaccccaaccactgcacggacaaaacaagaatcaacgctaacaccaaaaaaaacagagaccaaaaaaaagacaaaaccgccaataacccattacccgtcgacaaaggataaatccgccacagctacact

SEQ ID NO: 60707 - DNA, 252 bp, Oryza sativa
  Clone ID: PAT_MRT4530_6220C.1
atgttcgcctgcgaaaataagatcccacaaattttgtggatgagttcggagcccgctcttattgcttcacctcgaagtctctcgaaaggtgggcggaaaacaaaaagcttcgactcccagccccattccttccttccatggcctccaggtcatcggcgtgtgaagcatcttgacctcctttgccgtactatcaagagggttaatgaactaggcaaagaagccgccgatctagccgggccaccatcggtctga

SEQ ID NO: 60708 - DNA, 970 bp, Oryza sativa
  Clone ID: PAT_MRT4530_62210C.1
cttaaacaagataagacggtgtacaatacaagagcttgcagagtattgtataggcaggagaagcatttgatggtagtgcaatataatgctgtacaagttgcttgaaaataacatgctcaagtcttaatttctcagtaattaactttcttcatagtggccacactggtactcactcccgttactccactacttagcttctcacgttttcatgaaccacacacttcatcagcatctgagggcatcagggcaggccatcctcaagttgcaatgatggaaaatccatgcacatccttttggcacgataaggacttcgctgattgcattggtccaagatacagcgcagtaatttcgctgcatcttatgacaaccacaaactcagaaaacaacacccaacacatactgaacctgtctgagtatctaacatccatatttcagaggggggcaaacttactcggtatatttatgcattatgtggcaacttggaggttaaaaacagttggagactcgaaaggaaatctaaaaactgttagaaaatggttttctaaataacagatgccaatagcgtaagcagaatggctgtaaagcaacaaagccagaacaacaaggatacatagcaaaccaagtgatattaacagttaaaagtaccgttgcccacgcattgaccagtaaactcgacagacaattgtaaacataaaaaatatataccttaagaaacaaaccgtctacgcataaaaatttcaccgctgctgatggtatgatattcatgttactgaatcatggggaatatgaagtgatattttcaggagtactagcttatgtactcctttatgaatttcatttccatgtcatcatttatttaatgtttattctttctatatgttaaggaaaagctcccaaacaagcatccacacctacatggtctcaaagaactgtagtacatagcatgcccccctcgtgccgattcctgcag

SEQ ID NO: 60709 - DNA, 210 bp, Oryza sativa
  Clone ID: PAT_MRT4530_62211C.1
atggccgtacggtcggaccggaaatggctggttagacctaggggcaaagccagtcggattgaggtgaacgtcatatctggcgaagaaatgatatatctaggactcgatgagactcatcgagcggctcctggtgaagctgcaaaagaaaacaacccaagtctggaggacagggagatgatggcggcgtggccatattctcgtagcggctag

SEQ ID NO: 60710 - DNA, 565 bp, Oryza sativa
  Clone ID: PAT_MRT4530_62212C.1
aagcaaaaacaagcatactttaaacaagataaaacagtgtacaatacaagagcttgcagagtattgtataggcaggagaagcatttgatggtagtgcaatataatgctgtacaagttgcttgaaaataacatgctcaagtcttaatttctcagtaattaactttcttcatagtggccacactggtactcactcccgttactccactacttagcttctcacgttttcatgaaccacacacttcatcagcatctgagggcatcagggcaggccatcctcaagtttgcaaatgatggaaaatccatgcacatcctgacatcgaacgttcagccaaagaagcgtatgaagatcataaggcgattcgcgaaaaaaaaaaaaggggcagattataggtgcatacgtaccttttggcacgataaggacttcgctgattgcattggtccaagatacagcgcagtaatttcgctgcatcttatgacaaccacaaactcagaaaacaacacccaacacatactgaacctgtctgagtatctaacatccatatttcagaggggggcaaacttactc

SEQ ID NO: 60711 - DNA, 565 bp, Oryza sativa
  unsure (1)..(565): unsure at all n locations
  Clone ID: PAT_MRT4530_62213C.1
ccgcccgggattcagagagacacagacacatcaatgatgatgaggaagtcaccaccatcaacatcgccggtgcatgccgctgcagccgtgctgctcctcatgtacttgatggccatgggcgtcggcgtggtggaggcagcggtgttgccgccgtcgaggtgcaaccctacgttgctgacgccatgtgcggggccgacgctgttcggggggccggtgccgccggcgtgttgcgcacagctgcgggcacaggcggcgtgcctatgcgcgtacgcgcggagccccaattacggcagctacatccggagccccaacgccaagcgtctcttcactgtttgcggccttcccataccgcagtgctcctagacctcaattagctcatatcggtcacgcccatggctatgcctttggagctctagcatcatgtgcacagtgtaaaatgttgtgacatgaataaaatggttgtcatgtttagtccaggtatataataatgtatgtttagtaaaaaaaaaaaaaaaaaaagacggacctcgagnnnnnnnnnnnnnnnnnnnnnnnnnnnnnnnnn

SEQ ID NO: 60712 - DNA, 780 bp, Oryza sativa
  Clone ID: PAT_MRT4530_62214C.1
atgaccggtagctgggcggctaaggtggagatgatgaatgatgccggagaggaggggcaagcctttgtagcagggaaggccgggggcggcgcacggtggggagtgccagcggcagtgtggagggcatgcggcgacaaggggtatgagggagccaggagcactttgagggagggagggcaatggtggggcgtcgcgggaggtgagggggtccgtgggacgatgcgagccattggattcgttcattttggatcgttggatttcatgaatgaggtgggccggcccaggttcggccggaggtgcctcacctcggccctccacgtggacatccaggatacctccctcaatggaggttgcggggagaattctggcagaggaaggcgacaccagtgccagcctctagaactgatagagggaggcggcagcggtggcctccacgagcaggcggaggaagacggaggcgttgtgaaggggccttgcggcagcctgcatggttggggaatggagggggtgctgccgtgctggaggtccgcgaaggctgccttctccctccacctgatctcgatcgcctcctcctccctccattttctcgcccggtggctcaggcaagcgcccgtggctgcgcccgcacaggttggagctcttcctaatgacgggcttagcgtaccctccgacttcatttctgtcgctgtcgtgtgccccgacacgatcacactcaccacccggttggaagctgcctcaccgactctccgagctggagcacaacgcctcagcggcagatga

SEQ ID NO: 60713 - DNA, 219 bp, Oryza sativa
  Clone ID: PAT_MRT4530_62215C.1
atggagacgctgatatcaatatgcatgaacaaatcacttccaacgcacagtggggcattgtaccgagcacctggcgagcagggacaacgacacccgaagccggcgcgcgctgcctcctcctccgtcaacccgctcacctcgtcgtcggcgcaaccacttcctcttcttcttccaacatctcctgcaaaagatccacgcaaagggatagtagtttcttga

SEQ ID NO: 60714 - DNA, 419 bp, Oryza sativa
  unsure (1)..(419): unsure at all n locations
  Clone ID: PAT_MRT4530_62216C.1
agtcgttccggccnccatgcccgaaacccgttgcggacccggtggtcgccgagaacggatcgcttcagctggaagcagcgccgccgcctggtcccggcaaagcatggaagcgagctcgcgatcaaggtttgtagtaggaggaggagtacaagtaacaacggctcgtactctcgttgggctacccgaggtgacatcttggcgggtggcagctgaatgaatgactatattgtatgatgcttgaaactgatttttttttatacatgtagagctagagagagcctgttcagtactccaagcctgacttgtatgactgaattgtgatagtgtgatggtgacatactatatcaagtcaatgcaaatgcaaataatcaaaagatccgttggcatcgtaaaaaaaaaaaaaaaaaaaaaaaaaaaaa

SEQ ID NO: 60715 - DNA, 1347 bp, Oryza sativa
  Clone ID: PAT_MRT4530_62217C.1
atggggacgtcgggtctccggaaccttcgccttcgatgtcttgcactgggagaaggcggcaataaggtttttggaaaatgctttgcgcgactgctccctgtttgtccacaatggctcatcttcctcttcgctggcgtgttgcgcgccatcgtcaatgcacggtaccctgagtccttcctgctgagcagccagttttccaaaaccctcggagttctcattgctgaaaagcagaaagaattcgagaagaccactactctctttgtgggatggattcgtagcgttcttatcgatcgtctagtcgagtttcatgactacaggatggttgacaaacgttttgtacttgagcaggctcatgaaatacatgccatggctaaggaactcgaactccttaagagagtggtgaggcatctcccggggttcgatggggcgctccccttcgagctggagaccgggtacgtggaggtggaccgcatcgccggcgtgcgcctcttctactacttcatccgctcggagagcagcccggccgacgatcccctcttgctctggctcaccggcgggccaggctgctcggccttctccggcctcgtctacgaggtcggacccctcaccttcgatgtccatggccatggacatggacaactgccaaggctcttgtacaagccggagtcgtggaccaaacgtaccaacgtcatcttcctcgactcccctgtcggaactggcttttcctacgctgacaccgacgccggattccgcaccggcgataccattgctgtccaccacattctcgtcttcctcaacaactggtttcaggaggtgcaccccgatttcctctccaatcctctatacatcgccggcgactcctactctgggatgattgtgccggctgtcaccttcggaatcgccacttcatcacccaaaccatctctcaatctcaagggctaccttttgggcaatccagtcactgatcacaacttcgatgctccatccaaaattccatttgcccatgggatgggtctcatatctgaccaactgtatcagacggcagaatatacaatgtccagaatatgggccaacaatgatacagtaagagaggcccttggaattcaccagggaacagttccttcgtggcaaagatgcaactacgacattctgtacacttatgacatcaaaagttcagtaagataccatctggatttgacaactagaggctacagaagcctaatttacagtggtgatcatgacatgattatccctttcatcggcacgcaagcctggattagatctctgaatttctctgtcgtggatgagtggagaccatggtttgtggatggacaagttgcagggtga

SEQ ID NO: 60716 - DNA, 303 bp, Oryza sativa
  Clone ID: PAT_MRT4530_62218C.1
caagaaccgtcgcctttgctgttaccacaaccttagaggatgtgctcatgctcttcaaggtgttgaatggtggctagccagcaaacgtcactgatggataccaggcatcacaggtgtcaagatcaatttcgaggatcctagggcgcaagagcccctacttaacacacctgatctataacatgtaccatacatagcacgagcttctccgagacctgcacaagttgcaatgcaaggatctgtcactgagccccagtttgatccatcttgggcattgcactatgaatctaaatgctacagtggaga

SEQ ID NO: 60717 - DNA, 450 bp, Oryza sativa
  Clone ID: PAT_MRT4530_62219C.1
gaaagcagcgcgtgtttattgcatttaataacccttactaaagtcgacgatatgctctaaaggtttcccttctaagtgccgggtcaaattttcactgaagactttcaggactgattttgggtagcttggggccgaggtgtggcccgttatgaagacattcttcgtagtccaataagggtgcgtctggggcaagggctccgtctgaaacacgtcgagcacggccgctttcaggcgatcgccgtttaaggcggaaatgagggcatcgtcatcgacggcttggccacggccaacgttgattaagacacaatttgccggaagatactcgagaaactctttgcttatgattttgtgagtatttggcgtatttggaagagtcgacacaacgtagtcgaggccttggcagaagtctttggcgttttctattgtgaagtttgcatcgaccaagggact

SEQ ID NO: 60718 - DNA, 330 bp, Oryza sativa
  Clone ID: PAT_MRT4530_6221C.1
atgtcgtcgtctgggccaccgtccgccgtggcagtcatcgtcgtcgccgtcgcgccactgtcacgcacgagccgtcgccaccgcggggagccgtcaccatctgcatcgccactgccgcgcggggagccaccgccgccgccgcctcgcgcacgcggggcgccgtcgccgccgcctcacctccaccgttgtcgccgccgcctcgcgcctcgcgcacatggggagtcgccgcctccgctggatcaatgggccgatgcggccatgcgggagaaaagaaaggggaagagaaagagaaagaggaggaagaagaagggaatggagatgggaggatga

SEQ ID NO: 60719 - DNA, 1389 bp, Oryza sativa
  Clone ID: PAT_MRT4530_62220C.1
atgaatttatgtacagagcagccggcggtaacacggcggcagctgctgctgctgcttctcctcctcctcctcctcctcacctcctctcctctctgcagccgcgtgtccgcgagtgcgggtgcgagagcgagaagcaatggcggcggcagcagcaggagagtggtgaggcatctcccggggttcgacgggccgctcccgttcgagctggagaccgggtacgtggaggtggaccacatcgccggcgtccgcctcttctactacttcatccgctcggagcgccgccccgccgccgacgacgaccccctcctgctctggctcaccggcggccccggctgctccgccttctccggcctcgtctacgaggtcggacccctcaccttcgacctccaccatggccgccatggcggactgccgagactgctgtacaagccggagtcgtggacgaagcgagccagcgtcatcttcctcgactcccccgtcggaactggcttctcctacgccgccgacgccgacaccgacggcgccggattccgcaccggcgacaccattgccgtccgccacattctcgtcttcctccgcaagtggttgcaggaggtgcacccagtggcgaagccaggatttgggtatagggggtgctggccaggagacggctaccttttgggcaatccagtcactgatcccaacttcgacactccatccaaaattccatttactcatgggatgggtctcatatctgacgaactgtacgagtgtgtcaaggacatataccaaaatcacattctggagccttactgcacgttggcaagccctcataatccgcgcatcgataagccatttacttcaggaggacggcagatgctccaactccaagaggaccaagaccttcacttgtctgagatttcttcagaatgcagaacagcaagatataccatgtccagaatatgggccaacaatgacacagtaagagaggcccttggaattcaccagggaacagttccttcgtggcaaagatgcatcttcgccattccgtacactcgcgacatcaaaagttcagtaagataccatctggatttgacagctagaggctacagaagcctaatttacagtggtgatcatgacatggctatccctttcatcggcacgcaagcctggattaggtctctgaatttctctgtcgtggatgagtggagaccatggtttgtggatggacaagttgcaggatatacaaggtcatactccaataacctcacattcgcaactgtcaagggtggtggacatactgctccagagtacatgccaaagcaatgccttgctatgcttgcaagtggatttttttccccaagggttgcggtggagactcctgctcgcgtgtgcattgcgtctggttga

SEQ ID NO: 60720 - DNA, 440 bp, Oryza sativa
  Clone ID: PAT_MRT4530_62221C.1
gcatccttaaagggcagcgggggggatatttattccattattaaaaagcagcaaatttgcaatactacaatcgacgtcgggagaaccccaacgcgtacacataaaaaaaacacatttcccggggacataacacaaacacccccggtttttattatttggaaattaatgaaattgatccaaagagctcgatcgaaatgatcatgcctcgggggcgcaggcgaggccccaacgctcgccggcgacgggggggtgcaacaacagcacgtaaaggagctgcgtgaaccccagcgtcacggggagcccctccagggcgcgcattcgccacccgggcgcggggccggggggccccgccgggggggggttggggatctccctgcccgcccccccgaaagccagggcggggggcccccacccggggggcccctggcacccctcggggg

SEQ ID NO: 60721 - DNA, 748 bp, Oryza sativa
  Clone ID: PAT_MRT4530_62222C.1
ccggccgaagaaataggtgaagctatctacttctcgatgcatctatgtacggaggcggcggtaacacggcggcggctgctgctgctgcttcttcttctcctggtcacctgcagctgcctgtctgcgagagagagaagcaatagcagcagcagcagcagcagcaggagagtggtgaggcatctcccggggttcgatggggcgctccccttcgagctggagaccgggtacgtggaggtggaccgcatcgccggcgtgcgcctcttctactacttcatccgctcggagagcagcccggccgacgatcccctcctgctctggctcaccggcgggccaggctgctcggccttctccggcctcgtctacgaggtcggacccctcaccttcgatgtccatggccatggacatggacaactgccaaggctcttgtacaagccggagtcgtggactaaacgtaccaacgtcatcttcctcgactcccctgtcggaactggcttttcctacgctgacaccgacgccggattccgcaccggcgataccattgctgtccaccacattctcgtcttcctcaacaactggtttcaggaggtgcaccccgatttcctctccaatcctctatacatcgccggcgactcctactctgggatgattgtgccggctgtcaccttcggaatcgccacttcatcacccaaaccatctctcaatctcaggggctacctttttgggcatccagtcactgatcacaacttcg

SEQ ID NO: 60722 - DNA, 331 bp, Oryza sativa
  unsure (1)..(331): unsure at all n locations
  Clone ID: PAT_MRT4530_62223C.1
actctttcctcctctcctctctctctctctctctcancgacgggagctgcgcggcgtggcgggctggagcggcgggctcggcaccggcagcggctgcggccttccatncgtgacggcggcgggcacggngacgacgacgggagcggtggcggcggcggnggctgcagctgcggctaggtcggncagcgtccgaaggtcgcggggcagcggatncatnggcngtggagcnggncgctggcgacgacgacggcgnttgtngtgacgncgaantcggagagctcgaccgntggcatggtctaggnaggagctcntgacantcntcngatnnggt

SEQ ID NO: 60723 - DNA, 266 bp, Oryza sativa
  Clone ID: PAT_MRT4530_62224C.1
acaaccaagaaacccgaagcaacgttaacctttagcacagaaacgggttcgttctttttacaagacgtgatgggttttaagaccataaaaaggtccggggcctcactaataaaggggtggagaaaggggctgcaaaaagaagggatccaatccaacatgggggggattcagattcagattccacttaagagcttttttttgggctgagagggggactcattttgccgggtggcctgccattgcttggcgaaaaacgtggtttaatc

SEQ ID NO: 60724 - DNA, 283 bp, Oryza sativa
  unsure (1)..(283): unsure at all n locations
  Clone ID: PAT_MRT4530_62225C.1
gngntggnacatttaatggnaggcttaatttcagttccagtaatttagctgtttgtttggtactctgcagactaaagtggtttatgtttctgatgctatttgaatgatgtggatgctaagtatgaattaatcgcgcatcaaaaaaaacctttaatactaaaaaaaaaaaaaggggggggggggggaaaaaaaaaaaaaaaaaaaaaaaaaaaaaaaaaaaaaaaaaaaaaaaaaaaaaaaacaaaaaaaaaaaaaaaaaaaaaaaaaaaaaaaaaaggggggc

SEQ ID NO: 60725 - DNA, 1864 bp, Oryza sativa
  Clone ID: PAT_MRT4530_62226C.1
ccggcccggccgggcctactgcgcctccactcccacccgtagcgcctccccgcgaacccactcccagccgccgccgccgccacctgcaaccgagggctcgccatgccgccgaagctcgacccgacgcaggtggtggatgtgttcgtccgcgtgaccggaggcgaggtgggcgcggcgtcgtcccttgcccccaagatcggccctctcggtctctcccccaagaagatcggtgaggacatcgccaaggagacggccaaggactggaagggcctccgcgtcaccgtcaagctcaccgtccagaaccgtcaggcgaaggtgtccgtcgtcccctccgccgcggcgctcgtcatcaaggccctcaaggagcccgagcgggacaggaagaaggtcaagaacatcaagcacagtggtaacatcagcctcgacgacgtcatcgagatcgccaggatcatgaggaacaggtccatggccaaggagatggccgggaccgtcaaggagatccttgggacctgcgtcagcgttgggtgcaccgtcgacggcaaggaccccaaggatctgcagcaggagatctccgatggcgaggtcgagatcccttcggcttaaaaggcttgatatttgaggacattaccatctcgtgctactgaagtgatcatttgttccaaaatgctgcttatgtaccttacgagacgatgtgattcgacctatttttgtcatgctttagtagtgatcttgttgagacctcaatgttactattgcaacttggtaccatttggtccctctggaaatggagtttcaagtacttgcataatttaatcaataaacctgtctagtgagaggcctgagtcagttttcggattggagatgacgcagaagcagagccagttcaaggggcaggggaagaagaagaccatccctcccaaccgccatggcaaggcgccccacgtccgcaaagggaagagggccgtgaagctcaccgtccagaaccggcaggccaaggtctccgtcgtcccctccgccgcggcgctcgtcatcaaggcgctcaaggagcccgagagggaccgcaagaaggtgaagaacatcaagcacagcggcaacatcagcctcgacgacgtcatcgagatcgcgagggtcatgaggcccaggtccatggccaaggagatggccggcaccgtcaaggagatcctcggcacctgcgtcagcgtcggctgcaccgtggacggcaaggaccccaaggacctgcagcaggagatctccgacggcgaggtcgagatcccctcagcttaagcaggtttggcattggggtggttgttatgtgaggctgctgaagtagtttttctacctagatggttcctggtgcagtgcagagaatggaagcttgatctgttcttgttctgctcttgctcaagaagtaaacttttgtcatgcttaaagtggtaccatgtgagactttttttgccatgctatattgtttaccttgcgaaatcaatgttgttaatgcagctagatttataatattgagttttctttgcgaaaaaaaaaaaaaaaaaagcggaaggggcagggaaagaagaagaccatccctcccaaccgccatggcaaggcgccccacgtccgcaaagggaagagggccgtgaagccggccaagttcaccaaggacatggacgccgattaggaactcacaaaattcatcaaccagtgcaacgagaagaaggctgcaagtcttgccagcaaagaaggcggcgacctcagtatactcaaggcggacgttgatccctccaattcaaactaggaatctgtggctacctctgcctacggctatgtgctatagaagatgagtgtctccggggccccctccgccgggggg

SEQ ID NO: 60726 - DNA, 190 bp, Oryza sativa
  Clone ID: PAT_MRT4530_62227C.1
ctgggcaggaacgtattacagacaatttgcaggtcctacaatgactcagccaaagcaaacaaaattggacttgatcacgacgtctactgaatggatccttgtccatccaaagaatgcttgctaatctaacaaaatttactttcctttcgaacgtttaggccttccaaattcttcttcattagaaagaaaa

SEQ ID NO: 60727 - DNA, 380 bp, Oryza sativa
  Clone ID: PAT_MRT4530_62228C.1
tctctccccctctcgaattatgatctcttccgggagaattttaaattcgtgtgcgggtgttaacgttcgattggatcggtgctggtagtacttgctagcatgatcccccacgtgatctgtggccgattgttgggatcgtttttcatcttaatttttatctcaaccctgttgtattccgtagcaatttttttttgctaagccatgcttttaaggcatgtttgtatgcacaaaatgatccgggtctctggtggatttgaagtgatctgtctgcggctgatgtgaattttaccgaatatgagtggatccttcaaaaacctgagtactgatagtgttctgaggttcttgaccaagtttgcttttcaaaattttgccaataattt

SEQ ID NO: 60728 - DNA, 243 bp, Oryza sativa
  Clone ID: PAT_MRT4530_62229C.1
atgcagcacgtccctacgacgactctcctgcggccgttgtgtcacgtcaacgttcttggcctgttagcagcactccagtctccagctagtgctcctgtgttttacgcttttgctgctgttggatgttgccgaccgaggtcgctgatagatgctggattgctgccgacttatcgcggtttgttggaatcttcctctttcagacacaaaagaaacaactttgttgctggacccgtcaaaaggtag

SEQ ID NO: 60729 - DNA, 1038 bp, Oryza sativa
  Clone ID: PAT_MRT4530_6222C.1
atgactatcattgttctagcatatgtggatgggagtatccaaaatggaattacaggtccggaatatactattcctccgaaaataacttttccaacatctaaccgtagcacttttgaagacgtcaagaatgaaattttcagaggactcggatacactgaggatgactatatcattagtatccaagctcgatttgatatcggggctcctgggccacattatttccaactaattccgatttatgaagaaagaggatggaagatgatatttgaaaagacacagacacgcgcaagttggcatattattgagttatatgtggactgtaaaccagcccaagtagttttgagtcaaattacagaatcaagcagacaaactgaaaggaatgacacaaatgtttatttgcagcacagaacaatccatccagcacaagttgcctctcaagaagatgattatgttggggaggagacggaccttgcagaggacagaattgaacaagatgacgacagcgagcatgatactgacggatccacagaccatagcacagatgatgagcatcctgaaccacagcctgttgttcattctatcaattcatttccatttatgcatgcaacaggcaaaaatcccataaaggcttttagtgatatttatgtactaaaggaaacaattgcagatgagagtttctttgggcataagaagcaatttgatagtccactagcaagggggaagacttttgattcaaaagagcacctgaaaattgccataggtgagtttcacatagaaaagaatgctgaagtgaagtacagtaccagtagcaaatccaaaattgtggctgaatgcacggacaatagttgcacatggaggctctatgcaacaccgacaggaattgattgtttcttatttcataggtgcatcatttcgctgaacatacaactgattgggaactaccaggaacttccagccttatggacgcaacattgtcgatcagatgtgcccctttttgttattatttgctttatagcatcttgtgcccagatattgtaa

SEQ ID NO: 60730 - DNA, 291 bp, Oryza sativa
  Clone ID: PAT_MRT4530_62230C.1
atgcggcagttgaggatgatgctgaggctggctccgttcccaccagaggctggttgctgggctcaatatcatatgctcgcgaagatgggctccggcgttggagtgaagttttgcaaagggaaattgagtttcatcaaacattacatcgattggtgcgattgccaccgggattgccacggcctcttcttccgtggtttccagcgttgctggtgccacggttgccgctggggctattgcgattgctgccgccaccacctatgccgcgttgctgctgtcctcaaccgcgactag

SEQ ID NO: 60731 - DNA, 4213 bp, Oryza sativa
  Clone ID: PAT_MRT4530_62231C.1
acatctactggcaactccctggcaggccaactcatctcagagaaactcggaaaatcgaaccatgccctatgaaagaggcgctggttcttgcagcaattcgaggtgccaagcttgaagggcatctcaccggtgcgtcgagagctctggccgccgttctcaggagcaaggatggcgaggcagaaacaattgtcaacaacccagaatatgaagaatgggttgcggttgatcagcaggtcctctcgtacctgctgtccttcatgaccatggacatgctaatccaggtggcggcgtgcgccactgctgcatcagcatggaagatgattgagggaatgttctcctcgatgacacgagtgcgatgcatcaacacgcgtctttcactcactactctgaagaaaggagagatgacggtgatagcctacgtcgggaagatgcgggcgctagcatatgaactcatcatcactggcaagtccgtcaacgacgacgacctcatcagctacatcatcaccggcctagatgaagaatacgagccggtgatctccaacattgtcgggcaagatcagatcaccatcgaggaagccttgctcagatcataagcttcgagcagaggcttgctcttcatcgcagggaataaggagcgcacttggccaatagagctagtcgcggttgaggacagcagcaacgcggcataggtggtggcggcagcaatcgcaatagccccagcggcaaccgtggcaccagcaacgctggaaaccacggaagaagaggccgtggcaatcccggtggcaatcgcaccaatcctagaggcatcgacaactggccaaaatgccaactctgctacaagatagggcacacggtaaaagactattggtatcactatgatgaaaattttgttctagatgagaggtttgcaggtaccgccacatcatatggtgtggatacaaattggtacctcgacacagagctactgatcatgccataggagagttggacaagctgactgttcgtgacaagtatcatggcaatgatcagattcacaccgcaagcggtgcaggtatggagattagtcacattggaaattctgttgttaagacccctagtcgtaatatctacttaaataaaattctatatgctcctaaggctagcaagaatcttgtttcagctcattgtcttgcttgtgataactttgctttcatagagttatatcgtttttttttctttacaaaggatctggccatgaggagaactctgcttaggggtcgatgtcataaaggactctatgctcttccatctgcaccgccaagtcaacatcataccaaacaagtttatggagtctcccagccatcctttgagagattgcatagtcatcttggccatccttcctatgttgtcgtagagaaggttattaagagtcataagttaccatgtttagatgtgtctaatgaagttctagtctgtgatgcatgtttattctgatgtttgggatactgcactacaatctgttggtcgttgtaagtactatgtaagcttttttgacgattatagaaagttcacttggatatatctccttaagtataagtctgaagattttcaaaaatttcatgaatttctatagcttgtggagcgtttctttaatagaaaaaatataaccatgcaaactgattggggaggagaatatcaaaaacttcattccttcattgcacaagctggcattactcaacatatctcatgtcctcacactcaccaacaaaatggctcagctgaaagaaaacactgtcatatagttgaggtaggacttgcattgctagcttactcatctatgccacttaaattttggaatgaagcctttctttcagcggtctatttgattaatcacacccctagtagagctctcggtgatatttctctgttggaaaaactctttgattgccaaccaaattacatagcccttcgagtttttgggtgtgcatgttggcccaatcttcgaccttataacaagcataagcttcatttccgctcaaaagaatgcacttttattggttatagaatttttcacaaaggtattaaatgccttgatcctactactggtcatgtgtatatatatttcccacgatgtaatgtttgatgaaactcaatttccctttgcaaaacttcactccaacgccggagcccatcttcgcgctgaaatatctcttatactagaattagctccatatatccctaggggtccccaacagaattcctatgtgattgattctcctgaaatttctgataattcgcttgaagttttgtagcagaatacagaggcctatgataatacagcaccagcctcagcatcatcctcaactgccgcatcgcgccagccgtcgggatctcacctgcaccaatcgcctgcgcatggctctcccggcggccattcgatcctctgctgccacgtcacccaactcccagtccccaggcacgaccaggccacggtctggcgccggctctgacacggtgacctccctgcccggatcatctatggccagggaggaatcacagtaggcaaccgcgtctcaagaagccacagaatatcgcagcaatggccacagtggtggtggtcacatcgatgcagacgcagcagatattcctgttgctcgccctcacacgcgactgcaaagcggaatcagaaaagagaaagactacattgacggtactcttaaatggggtcgtctgacatcatctagtgatccacaaaatttacaagatgcttaatattggaaagatgctgtggatgcagaatatatagctttaattaaaaataaaacatggcacttagttcctcctcagaaagacaaaaatattatttactacaaatgggtttacaaaattaaaagaaaataagatggtagcttagagcctagttgccaaaggatttaaacaacggtatggtatagactatgaggacactttcagtcatgtaaataaagctattactatcaaaattgtcttatccattgcagaggatggagtctaagacagcttgatgtacagaatgcctttttgcatggagtgcttgaagagggagtttatatgaaacaaccactagggtatgaaactcctccactctaggttatgtatgtaagttagataaagctctatatggtttaaagcaggctcccagagcttggtatgccaaacttagtggaaagttatatgatcttggtttcaagggttccaaggcagacacatctttattcttcaacaataagggagatttgacattgtttttgcctatctatgttgatgatataattgttgtaagttcaagacaggagacggtgccaactctattgcaggatctacaaaaggagtttgctctcaaggatcttggagagctgcattacttccttggaatagaggtaaataagattgcaaatggaatcttttgacacaagaaaaatatgcctctgatctgttaaaatgaactagaatgagtgattgcaaaccagttagtacacttttgtccaccagtgaaaaattaaaagttgataaaggatcattttaggacaaacttatgctactcagtacagaagtttggagcactttagtacttaactttgactaggctagatattgctttctcagttaataaagtttgtcaattcttgcatactccaactacagtacattgggcagctattaaaagaatactgaggtacttgagacaatccattaaacttggcctaaagatctgtaagtctaaaactatgatggtcagtgcctattctgatgcagactgggtagaatgtttagatgacaaaaggtcaactggtggatttgctgtatatctaggtgataacatggtctcatggagtgcaaagaaacagacaattatttcaaggtcaagtacataagcagagtacaaagccttagtaaatgctactgctgaaattatgtgggttcagactctcttgcaagaattgcacatagacagtccaactaccgctcaactatggtgtgacaacatgggtgcaaggtacttatccttcaatcatgtctttcatgcaagaactaaacatatagcaactgattaccattttgttcgagagagagtagcacaaaaattattgcaagttggttatgtactaaagatcaagttgcaaatggttttactaaaccattgtcagaacgacttccagaaaacttcaaatacaatctcaacctaggaaggttg

SEQ ID NO: 60732 - DNA, 354 bp, Oryza sativa
  Clone ID: PAT_MRT4530_62232C.1
tcacgccgccgagagtgcctcccacggtcgagctcgtagttgccgggagtggaaggtaacggagccgctcgtggtccatgtcgctgcccatgccatcggtcgagcttccaccagcttcggcggccacctctcaatccacatcatggtggtttggaaggtgctgcttgcgccgatcgccgtgattgcagtcagtcgccgctgcacggggttgacaagagacgacaccaggtcccctccactctccacgtcgtcggcttcggtggtggcgttgccgcgtcggtcattcgccagtctccaaggcgggcatggacgagacggccccatcatcttcaccggccaccgccgccgctcctt

SEQ ID NO: 60733 - DNA, 444 bp, Oryza sativa
  Clone ID: PAT_MRT4530_62233C.1
agctaacagggaagaaagtggtaacagaaatccaacctataaaggtctgtacaaaagcatcataatggaaatagatataaccatacatcagtcttacccactggaaaccaaaaaaagggcagccactaaagcaccattaatattaacgatttactctgtgcaaaatttagtgctaaatgcctcaaagacttagcaaggcggtttcttttctttttcttttgcaggtttatccaaccataaatgaaaataacacgcaagaatatccccaaaaacatttttgtagacaaacctgccaagtattcaaattccatgctctaaataaggcacatgacggtaatgatttgctaacctactacgagtgccgacattgacaaatgcaaccttggctgaacactgatccttctcacttcacagcattcaatggaaatgttactcattgacata

SEQ ID NO: 60734 - DNA, 328 bp, Oryza sativa
  Clone ID: PAT_MRT4530_62234C.1
agactgatcaaggggggtgctcccgacctattcaagctccaaagagcaaaacacaggttatacatacatcaagcattacaaggacgagaagaccactctctccccgaggacaccgaatcacagcttggtgcatcagataccgaggctctcgaatgaatgattactcaatcaattaaccctgcccttaaaatatagatacagtgataccccctctcggaggcagattatctctgtttcatactggagaagagctcatcttgctttcattcaacatactggaggacccagccatctgtttcattatactgtcatcaaacttattttccct

SEQ ID NO: 60735 - DNA, 183 bp, Oryza sativa
  Clone ID: PAT_MRT4530_62235C.1
atggcggctggctgttgctgctgggaggagcaatgcctggatgcaatgggcttccagctccacctgaggattcactcaatgtgcctcttgaaggggataaaaccatacctggactggagtagctgctatgagaagtccggcaacaccgcctcccaacagacgaccatcaggaccagccagtga

SEQ ID NO: 60736 - DNA, 1858 bp, Oryza sativa
  Clone ID: PAT_MRT4530_62236C.1
gttcgagatcgcgcgcggccggcgttttttttttttttttttttgtggtgatcaatgtaagcagaggggataataataacaataattctttgataacattgcatataggacattaggataacatgatcatatgtctctcaagataccactacctacctaatacataataaatccagggtgaaacctacacgacagctacacttaccagctacaaattctcccctaattaaacttcagatttacactacatcataggagctagttagagaaaacgtgtggcaacggttgctactactttctggccagaagatgcagttcatcgacaaagtctatcagagattcagagtccaggtttggtgaaggatgaaaaggtctcatttcatttccatggcatgctagacaagaatggcggctggctgttgctgctgggaggagcaatgcctggatgcaatgggcttccagctccacctgaggattcactcaatgtgcctcttgaaggtgggctgttgggtcccatcccggccgtcggcacggctttcgatggcgcggatgcgggttctgaatgagcatgctgctttggctcctttttcccttcagaattgaagcttccaaccacaatctggactggagtagctgctatgagaagtccggcaacaccgcctcccaacagacgaccatcaggaccagccagtgaaacactgagtcccccagttcgactacgctggcctccatggtcggttagaaggaaagagccagacagcgatagtatctcgaatcggccctcatatgttactgttccacctgaagtagcagtttggcgaagtgttacatttgatatggcaccatttgctgaaagaacacaaaccgcacgatttccatgctgagcaaacgacataatctttgcagacacatcctctccagctagaactgtaataacgtgtggtgtaaatccaactcccgccgatccgacggcgtcgatgcgcggcttgttggtagaacccttgggccggccacgcttcttcaccccgtccggccaccccgacgacaagaagctcgccggcggcttcggctgcgtcggcgagaacggccctgggacgccctgcgccaccggcgtcgacgcggcggccgtcggcgaggtcaccaaccccagcgacatggacccgtcggggccgtacttcctcggccgcccgcgcttcttcttggccacgggctccccgccggagtccgccagcgccgccgcgccattgccaccggcggcgccacccggctggtaacccggcggcgccgagaccgcggcgctcaccggggcgaacaccggggtgccgtccgaggtgtacgccatgcgcacgctctgcggcggcgccgcggccgccgccggcgggctcttcggcatgccgaacagatccctccccgccattagcccttgctccgacctcacctccatggccaagaacacgtttcttgtatcaccaaaaactctaacacaaagccgcggaaattcgtatccaccgatgagagctcacgagcacgtgaggagattagggctagggatttgggaacctactagcctctcacaaattcttgcttatatctcaactatccttcatcaatatatatctcctttttttccccctatttttttccaacctctcctactcctgacttcacatgcactctttcttttccctaattaacaaaaataaagatggtttttttttttcaaggaaagagaagaaaaaacaggcagctcctcgggcaagcacgccgaaattgccttgggggagaaaaatatataattgctgtagcagataagaagaaggagcctcgtgccgatcctgcagcccggggatccactagt

SEQ ID NO: 60737 - DNA, 481 bp, Oryza sativa
  Clone ID: PAT_MRT4530_62237C.1
acaaacgaaagcacatcaattataaagcagccatgaatagcacaataggaatatgtaaaaaaatggaattttagctcacagggcagcaagctcacactctacatctgaagctttatgggatcaaggaaataatatttcattatatttaaccttttcattttgttgaagagcatggccatccacaagcaataatccatgaagagaccttggttgcctgtaagtgagaagctataatgacacagagacaggccaactggccaagcgaggtcctctaaagttcttcaggttccacttctccgcatgaccaccacaacatcttctataactttgcatgatcaaactgtgcaaaccaacattaggatggtctcaattcattcacaggaacagagtatcgtgccttccatttcatccatgtaaaaaaatcaattgcactcctaggactgctatgggaatacgtgtactacattgttctctataaatg

SEQ ID NO: 60738 - DNA, 1767 bp, Oryza sativa
  Clone ID: PAT_MRT4530_62238C.1
cgggctggggttgggaggagatggaacagatggagaccgagccaccaaaaagcccaaacctgtaacaacaccccactgacccagcagcgtaataggcctcttgcctccttgcgttgcgacccagccccctgtcccctggcctcccctcctccagcacccgttccgtctccttcgcccgccgcctacgccgtcgcgccgatctccatcaccgcgagtagcggcgccggcgtcgtgctgcttccggcttccgccgcatattctcgcctctgactccttgcgcgcaagccagtctccacgtcacatcagcctcgactcccgtctcctcgcgagttcgtcggccgcctgcgtcgacctcttatacatcgcgcgagcagcggtgccgtcgccctgctgcttccgcctccgggaggcgctgtgtgtggtcaaaaattaaaggagagggagggagaggtagcatatttctcccccaaaacgtttgggggagcagctgaacccccatgccccaccggtaggtctcacagagttgtacatcgtgcaaccatttctcctgaatttccaggggtacggcacgaggtagtgggtccccgggccgcgggccactgcctcaagcccagcaggcccacgcgtcggagcgtccggctgtaaaggcggcgggttgcggcgccggcgacttcgtgtttcgcgatccagtcatctatccacgccaatggctccttgcgcgcaccgctaactccccaacaccagagcgtggccccgtgtctcgacactttgcatggcatgatcatattttgctaaggttctattagactgtcactcaatggcccatttcatggatttacgggctttcatcctgcgttcacgtgttttaaagctttataggcaggccttgcgcatgactcgccgagctcctgtgcatgcatgcgatgagttgaggcaaactgtaagagctgagattgaaaaaaatcgccgttgcgacgataaacagaagattaagttcttgatcagtgaaggtctgcaacgattaaaaggccttgatgagatgcttgacatgacaggaaatagttaacctgagtttcatgtcggatatgaggttcaatttacacggaagctgggtttgcatgagctcctgcaaaacattcattagctctgtgacctcctacacctgatatttccagaacccataaggcatcaggccacatgaacttgtggcctcctggattagagtttgttagaacggacccattcagattctttgcctcgttctatccaggggataggaaagatatcaggctcagatatattatcatggtagatcatcgatggtgtgcgtgcatatgggacgaaaatgcagttaccgaggcatcatgcttgattttgcacacatctattcagtcaagatatgctagcgagctttagaagcaattgggatttctttagatgctatcttgagaccctgaatttccaggtgttacatctgagaaaatagcagctagagatggattaagctgaagaaaggtatctgacttgtcgtttaggtacgtctgctttgaggcgatgatgttcaactttttcagacccgatggcttacttttcatatttgagatactgacctcatgtttcagtcctgatgttcttaccatttcttcgttgcaatttcttagctggtatgatgaggtcattaaacatgtactttctttccaactatttcattatatgccacaataaagatacttggtaatatatgctggtcctgccgtgctggtatat

SEQ ID NO: 60739 - DNA, 697 bp, Oryza sativa
  Clone ID: PAT_MRT4530_62239C.1
acccgttccggctccttcgcccgccgcctacgccgtcgcgccgatctccatcaccgcgagtagcggcgccggcgtcgtgctgcttccggcttccgccgcatattctcgcctctgactccttgcgcgcaagccagtctccacgtcacatcagcctcgactcccgtctcctcgcgagttcgtcggccgcctgcgtcgacctcttatacatcgcgcgagcagcggtgccgtcgccctgctgcttccgcctccgggaggcgctgtgtgtggtcaaaaattaaaggagagggagggagaggtagcatatttctcccccaaaacgtttgggggtggcagctggccccccatgccccaccggtaggtctcacagaattgtacatcatgcagctttttctcctgaatttccagggtcacgggacagtttgcatggcatgatcatattttgctaaggttctattagagtgtcattcaatggcccatttcatggatttacgggctttcatcctgcgtgcacgtggtttaaagctttataggcaggccttgcgcatgactcgccgagctcctgtgcatgcatgcgatgagttgaggcaaactgttagagctgagattgaaaaaaaatcgccgttgcgacgataaacagaagattaagttcttgatcagtgaaagtcctgccacgattaaaagggcctgatgagatgct

SEQ ID NO: 60740 - DNA, 527 bp, Oryza sativa
  Clone ID: PAT_MRT4530_6223C.1
gtcctatcctcctcttcttccccttgctctgctcgccctcctcttcctctgtctcctccacggcgagcgcgccgccgccgccgacgacgacctcacctccggcaccggcgacggcagcgagctctggggatacgtccaagttcgcccgaaggcgcacctgttctggtggtactacaagagcccgcagcgggcgtcgtcgccggggaagccatggccgaccatcctctggcttcagggcggcccgggagcgtcgggcgtcgggctcggcaacttcctggaggtcgggccgctggacgtcaacctgaagccgcgcgactcgacgtggctgcagaaggccgacctcatcttcgtggacaacccggtgggcgtcgggtacagctacgcggacgacccgagcgcgctggtgacgacggactggcaggcggccacggacgccaccgagctgctcagggcgctcgccgccaaggagatacccaccctgcagagcagcccgcatgtcctcgtcgccgagtcctacggcggcaagt

SEQ ID NO: 60741 - DNA, 333 bp, Oryza sativa
  Clone ID: PAT_MRT4530_62240C.1
acggaataccgctgtagcactttaccttcaggtgaccctaaaaggatatcaaactcatggaacgtgtgtaatctacctaaggctaagactatccaaggaccactattggtacatggttccagctatagctctatgatgtacccgaacgtggaggattactaggacagggttcagggctgtcaccacctgccgtctacctctgacaaatccgtgggatacataacaaacaaaggtaatcctagcggcctctgtcagggttcggccgaactcatggacattgattttgaggctctcagtccattggcatggtggttaggcccatttgaaggtgtt

SEQ ID NO: 60742 - DNA, 2262 bp, Oryza sativa
  Clone ID: PAT_MRT4530_62241C.1
atggatgtcgatgtttccaccgatagtgatgattttgagggtggttttgatttagaggatatgctaagccatgttgaaccagaggtgctagcggagtgtaccgatccagattctgataagagtaagcgcggaaagattccctcaatggtgatgtggtacctaccaattaaggaccgcctgaagcgtctgtactcaaacccgactgatgctgagttgatgagatggcatcaagagagccggaagatagatggtatgattcgatatcccgccgacgctcgccagtggaagacatttgatgcaaaacacccagaatttgctaaggatcccaggaatgtaagattgttcgataatacagtggagaatgacactgccccagcagcacgaggtggtacatacgtgtatgagataacaaagaagattaaggttgtatatggaaagggaaagaagaagacagtaaagaggaagaaagctgatggtgacaaagatactgcgtcgcctttcaagaagcactcaattttcttcaaatacttagattactggaaggacctagagattcgacatgcaattcatgctatgcacctcgagaagaacgtgtttgatagcaccattggcacattgctggacatcccgagtaagacgaaggatggattgaagtcacgtaacgaccttaaggtatttgatcctctagaattaggtccccttcagacatttgccgtcgagaccgtatgccagcttgagatgtatttccgaccatcatatttagatatgatggagcatttgatcgttcacatcgtccctcatattattgaacttggttccttatacttacatcagatgtgggcctatgagcgttacatgtcgatcctcaaaggctatgtacgcaatcgtgctcaccccgaaggatcaatgatagagggatacacaactgaagaggcagtcgagtgttgtatggactacataaaggatgctaatgccattgggattcctgttcatcgacatgaagggagattgtctggaaggggtattgttggtaggaagcagttcttcgataatgattacaaaaaggaaatatgggaactggactatggcctgaatatccaaatcccagtgctccgttgtgaatgggttaaagacacaacaggggtttccgttgatgactacggggacccttcggatgaaagaaaaactattgtcatatctggaaagcaacagatcgtcggcatcgacaacatcgaagaccccaatgattacaaccagttcgacgatgtaacattgtttactgatcttcctatgcgaattaagaaggttgagaccccctcgtcgtcgccgccgccaagtcctccccgtcaccgccggctcctccccgaagtggtccccctcgccgtcaccgtcgccgccgccaggacctctcccccctcgccgcgtcgccgccgccaagtcgtccccgccaccgccggctcctccccgaagtcgcccctctcgccgtcgccgtcgtcgccgccgccaggatctctcccccctcgcgtgtcgtcgccgccaagtcctccccgccaccgccggcaatacctccccgccgccgccgcgccggctcctccggtccaaagtcccccggatgggaagcccgttgagccaccgatagtgcggtccaagtttagcaacgcctgtggtactctagtcaggacgcgttgtcccattaatgtcaagttgtgggaaacggtggacgacaacatcaagacacttctctggaatgagttgcagaagtattttgtgttccctcctggatcacaggctgactgggatacgtttgttgcggatcatataatagctgaagcattggctttgaggaaaaaaatgtctgagctcgcgaagaagaacagatatccccatagattggggtcgagcggatacgctggtcacgtcgatcaatggtgggagatcgagcaaagattttccgcggccggcaaacccctgctggtagaccccatggtggaacgtagcaagaactgggtttgggtgcgcagcacagctgaaaacccgacagcctttccaagtctcgtcgtaccaatcggccgcgctggaaagactaaggaggttgcaatgggtttagcgatacccggacgtcaattccacaacacggcattccctgaggattacgcaaggagacataatcctaaccgcggccgttccagcagcaggatcttcaactccatcctcatcgcaggcaaggacagctgccgctcctgcaccaccgtcgcctcctga

SEQ ID NO: 60743 - DNA, 4659 bp, Oryza sativa
  Clone ID: PAT_MRT4530_62242C.1
atgtcgtatcgtgtagatcctcgtaccaacgtcccccaataccccacttatccagtctacgagtatcccctgtcgacaatgttggtccatgtccctcatgaggctaaggagcatgctttgagggagaatatgacaaagatcttttgtccgtgccgtcattgcaagaatcagaaattgttggtagatcctggtgaaatattgggtcacataatggagtacggattcaccgccaactacaaggtttggacctatcacggggaattcgccaatccggaagatgacgatgaagagttaagtttcgagatgaatgaggcagagaattttataatcgaagacatgtcgcgtgaaagaatgattgtcgatgtttccaccgatagtgatgatttcgatggtggttttgatttagaggatatgctacgccatgttgaaccagaggaccgcctgaagcgtctgtactcaaacccgactgatgctgagttgatgagatggcatcaagagagccggaaagtagatggtatgattcgacatcccgccgacgctcgccagtggaagacatttgatgcaaaacacccagaatttgctaaggatcctaggaatgtaaggtttgcgttgagcactgatggaatgaacccgtttggtgacttaagcagctcgcacagcacatggccagtccttctcacaatgtataatcttccaacatggatatgtcagaaacgaaagtacattctactcactatcctcatacaaggtccaaaccaacctggaatcgacatagatgttttccttgagcctttgatggaggacatggaggagctttggaaagaggggttacgactatgggatgagtttaagcgggagcacttcaatctacgtgcgatcatattcgttaccatcaatgacctacctgcaaacttttcattatctgggcagattaaagggaagactggatgtctgatatgtctggagaaaacttcatacaaatacctgacgtcgtctttgaagacagtgtacatgcgacatcgacggttcctaccacaaagacataggtaccgtaagatggctagattgttcgataatacagtggagaatgacactgccccagtagcaagaggtggtacatacgtgtatgagataacaaagaagattaaggttgtatatggaaagggaaagaagaagacagtaaagaggaagaaagctgatggtgacaacggtactgcgtcgcctttcaagaagcactcaattttctttaaatacttagattactggaaggacctagagattcgacatgcaattgatgttatgcacctcgagaagaacgtgtttgatagcaccgttggcacattgctggacatcccgagtaaaacgaaggatggattgaagtcacgtaacgaccttaaagtatttgatcctttggaattaggtccgcttcagacatttgccgtcgagactgtatgccagcttgagatgtatttcccaccatcatttttagatatgatggagcatttgatcgttcacatcgtccctcagattattgaacttggtccattatacttacatcagatgtgggcctatgagtgttacatgtcgatcctcaaaggctatgtacgcaatcgcgctcacccggaagaatcaatgatagagggatacacaactgaagaggcagtcgagtgttgtatggactacataaaggatgctaatgccattggcattcctgttcatcgacatgaaggtagattgtctggaaggggtactgttggtaggaagcagttcttcgataatgattacaaaaaggtgtccgcgacacacaacagcgttcttcaacagctcgctatcgttgagccattcattgagcgacacctagaagaaatcaaagcctgcttcccagggcggtccaatgattggatatcaagagagcacaagcgtcgctttcctctgtggttgaaagatctaaacctgccagttggtgattctgtggaggaacttactttacaaagattggcatgtgggccttcaagtattgtcaattcatggcaaggttacgacatcaatggatttaccttgagtacgactacgaaggacatgaaaagcacctcacaaaacagtgggatccgtgtcgaagcgattgacacgagtggagaaaagaggtcgtattatgggaccattcaagaaatatgggaactggactatggcctaaacatccagatccctgtgctccgttgtgaatgggttaaagacacaataggggtttccgttgatgactacgggctaacgatagtcgatcacagtaaaacaggccacaaggatgatccatgggttttagcagagcgtgtggctcaagtgttttatgtgaaggacccttcagatgaaagaaaaactattgtcatatccggaaagcaacagatcgtcggcatcgacaacatcgaagaccccaatgattacaaccagttcgacgatgtaccattgtttactgatcttcctatgcgaattaagaaggttgagagaacaatcgatgaagcaaatatgtcgtacgttcgagcagatggtgttgccaaggacctctcccccctcgccgttgccgtcgccgccgccaggacctctcccccctcgccgtcgccgtcgccgccggcaggtcaccgtcgccaccgcacggaactctcccccctcgccgttgccatcgccgccgccaggtcgtccccgccgccaagtcgtccccgctaccgctggctcctccccgaagtcgccccgcccctcgccgtcgccgacgccactgccaggacctctcccccctcgccgtcgccgtcgccgccgccaggtcgccgtcgccgccgcacggacctctcccccctcgccgttgccatcgccgccgccaggtcgtcgccgccgccaggcgcttctagtgaagaaacgtggcgcacaccaagtgacccgtttccaatggaaataacacaaatcgccccccgcgatgatgatccagactacatacctatcgaacaggccatggtagtccgacgccgcttgaaacgtaaagccgggaggaacaggacagagcaagaagttgagatggacaccgctacgtctgcacctgaacgtacggagacatctacaagtgcaggcgggagtgggaaaaaaagacgtggtgagagaagcaagaataaattacccaaggaaacttataacgtgattgctctcgatcaggatgggaagcccatcgagccaccgatagtgcggtccaagttcagcaacgcctgtggcactctagtcaggacgcgttgtcccattaatgtcaagttgtgggaaacagtggacgacaacatcaagacacttctctggaatgagttgcagaagtattttgtgttccctcctggatcagaggctgactgggacacgtttgttgcggatcgtacaacagctgaagcattggctttgaggaaaaaaatgtccgagctcgcgaagaagaacagatatccccatagattggggtcgagcggatacactagtcacgtcgatcaatggcgggagatcgagcaaagatttgccgcggccggtaagcccctgctggtagaccccatggttgaacgtagcaagaactgggtttgggcgcgcagcacaagtcaagtctcggatgagggagacatactattcgagactccagacatagaagaagtgactactaatttgcagcagatagtcgagaaagaaagatcaggacagttcgtcccacggagggagagagatcagcttactgcggcgttggggacggctgaacactctggacgtgtaaggggtttgtcctcaaagacaagttggaaggtcaggtttccacaagacgcaccaagttataagaagagagacaaatacaaagaacaactatcggacaagatctatgcgcaagtgaaggaacacttctactcgttggcagctgaaaacccgatagcatttccaaggaattctgagaagagaaaagaacttgctcacgtcttgtcagactcccagaagtcagtactagcggcccaagatgaagtgcaatcctggttatctgccgatgtgcctgaaacttatgagtatggcaagccattcttgccaacttatcttatgaacaagctaccatgggaaatgagggtaatgcacgaatgtatgcaattccacgaagctgatagaactggagcaaaggttggatacgtcgatccaacaagaatatgcaaaacacaacacaccgtagagctgagacaggactgcgagcaattggttggcaagaccccggaagaaaaggaagaatatgtgaagacattgcacaagaggaagaagctagaagtagcaacatacttggcaatagcaatgttggcgcacgccgacaaagatgtcttaatggtcccctaccagttcacagcacacaagtactaccgcaaaagaggtggaccagtacatattccatcccggaagaagttatccgtcaggactggctggccgatccccgaaatcccatatattgcacaacgattcaaccacactactatcttgaacgtggccgctgacctctgccgattcatccgtcgcgatgtctgcaacgcaagaggtctcttctacgacaaccagagtgaactcgcaatggacgacaaatttaaacctctcagagagtgggagaaagaacatatgcaataa

SEQ ID NO: 60744 - DNA, 2868 bp, Oryza sativa
  Clone ID: PAT_MRT4530_62243C.1
atggagtacggattcaccgccaactacaaggtttggacctatcacggggaattcgccaatccggaagatgatgatgaagagttaagtttcgagatgaatgaggcagagaattttataatcgaagacatgtcgcgtgaaagaatggttgtcgatgtttccaccgatagtgatgatttcgatggtggttttgatttagaggatatgctacgccatgttgaaccagaggtgctagcgggcaggtcacgaggattggagaattggcaggcattagagaaggcatcgaaggatcttctttacgatgaaacgaagggatgtgataaggatttcacagtcttgcgttcagtgcttaaacttctgagattgaaggctaaacatggatggtcggacacaagttttaatgatctgatgagtttgttgcgtgtgttgcttcctaagcctaactttgtaccatcgaacacgtatcaagcgaagaaactcatatgtcctttatctcttggtgtagaaaagattcatgcttgtaagaatcactgcatattataccgtaaagaatatgcggaattggaatgttgcccaacgtgtggcacaagtcagtataaaacggggaatgggcctgtagattcagagtgtaccgatctagattctgataagggaccgcctgaagcgtctgtactcaaaccgactgatgctgagttgatgagatggcatcaagagagccggaaaatagatggtatgattcgacatcccgccgacgctcgccagtggaagacatttgatgcaaaacacccagaatttgctaaggatcctaggaatgtaaggtttgcgttgagcactgatggaatgaacccgtttggtgacttaagcagctcgcacagcacatggccagtccttctcacaatgtataatcttccaacatggatatgtcagaaacgaaagtacattctactcactatcctcatacaaggtccaaaccaacctggaatcgacatagatgttttccttgagcctttgatggaggacatggaggagctttggaaagaggggttacgactatgggatgagtttaagcgggagcacttcaatctatgtgcgatcatattcgttaccatcaatgacctacctgcaaacttttcattatctgggcagattaaagggaagactggatgtctgatatgtctggagaaaacttcatacaaatacctgacgtcgtctttgaagacagtgtacatgcgacatcgacggttcctaccaatcggccgcgctggaaagactaaggaggttgcaacgggtttagcgatacccggacgtcaattccacaacacggcaatccctgaggattacgcaagggtacaggtcgccaaggtccatagcgaccacgtttccttggaactagacatacctgcacctgaggggattgaacttctcggtgatgcagtgaatcagtttatcttgtggcaccgcagagacataatcctgagcgcggccgttcctgcagcaggatcttcaaccccatcctcatcgcaggcaatgactgctgctgctcctgcaccaccgtcgcctcctgaaccaccgtcacctcgacatccgccgtcaccaccaccgcttaggtcaccgcctcgccaacctacaccaccaccctccccttctcaacaaccgcctctcctggccccgcaaccagttcaagcctctcccacctccccagctaaacagcatgctcccccggctccgccctcagttcaaacctctccacctacaccccaatctgctctggtagaacaagtacacataccagatggtactacatccgaaccgaagtctaatactttggaacctcgtcgtataattccaaagttgatatcgacatacgacccaaaggagattgacaatgataaggagaagttcatgttttcagctttcaggaattctgagaagagaaaagaacttgctcacgtcttgtcagactcccagaagtcagtactagcggcccaagatgaagtgcaatcctggttatttgccgatgtgcctgaaacttatgagtatggcaagccattcttgccaacttatcttatgaacaagctaccatgggaaatgagggtaatgcacgaatggtatatgaaggcatctaggaaaggtctcggtttcataagcgtcgccgtcccggaaggcgcttttatgagtggtcctaatgggatattttttatctctttccgagacctttactccctctacaagctagataaaatggacgttaatctcgttgcggctttctatcttatgcaattccacgaagctaatagaactggagcaaaggttggatacgtcgatccaacaagaatatgcaaaacacaacacaccgtagagctgagagtggactgcgagcaattggttggcaagaccccggaagaaaaggaagaatatgtgaagacattgcacaagaggaagaagctagaagtagcaacatacttggcaatagcaatgttggcgcacgccgacaaagatgtcttaatggtcccctaccagttcacagaccactacatattattccttgtatatccgaaagaccaatttatcatatcattggaccccgcacactatgacaaggagacatttatggaattcctcactattttgaatttgtcgatcaccagtcttctaactactaataaaacaattgtttccttcaaacagagcacacaagtactaccgcaaaagaggtggaccagtacatattccatcctagaagaagttatccgtcaggactggctggccgtgctacaaacaaccaccaggaaccaacttgtgtggttattacgtgtgcgagatgctcagagtaaatgggagatccccgaaatcccatatattgcacaatga

SEQ ID NO: 60745 - DNA, 590 bp, Oryza sativa
  Clone ID: PAT_MRT4530_62244C.1
gcacgaggcctcgtgccgaattcggcacgagggagagagactagtctcgagttcttcttttttgtgtgttgggacttgggagagtgagaaaaatgctgtcagtgcaggaggcgcttgactttgacctggacgcgatgacgtccgggttcgggttcacgccgtgggcggctgacacgtgccctaccttggagcagctgatggcgtcgtccgcgtcgccctcgccgtcgtcgtcgcttgatgacaacgcggcggcggcggaggaggagaacggtgaggtggaggaggaggaggagcggaggcggcagcggcggaaggtgtcgaaccggctgtcggcgcggcggtcgcgggcgcggaagcagcagcggctggaggagctgcgtggggagagcgcccgcctccgcgccgagaaccgggagctggcggccaggctgcacgccgtggcgcgccacggcctcgccgcgcggtgccagaacgcgcgcctccgcgccgaggccgccgcgctcgcccgccgcctcctcgcgctccagcggctcgcccgcggccgccacatgatgatcacggcgtcgccgccgcagttctcgcgtcgctga

SEQ ID NO: 60746 - DNA, 861 bp, Oryza sativa
  Clone ID: PAT_MRT4530_62245C.1
tactttgaaatctgcctatgctacggatagtgatgtattgatgatttacaacgataagtgccgggaattgatgaatagtttttggctggtaactttgaagcatgtccctcgggagcagaacgttgaagctaatgaccttgctcagggggcatcaggatacaagccgatgatgaaggatatcgaggtagaggtagctgcaatcacagccgatgattggaggtatgatgtttttcagtatttacagaatccatctcaatcggcttcacgaaaattgcgctataaggccttgaaatataccttattggatgatgagctgtattatcggacgattgatgggatattgcttaagtgtttgagtgccgatcaggctaaggttgtgatgggcgaagtacatgaaggtatttgtggtactcatcaatcggcacacaagatgaagtggttgcttcggcacacaaggtgtgtttttggccgacaatgttggaggattgcttccgatactacaaaggatgtcaagattgccagaaatttggagcaattcagagagcaccagcatcggctatgaatcctatcatcaaatcatggccgtttagaggttggggaattgatatgatcggtcaaattaatccaccatcgagtaaggggcataaattcatattggtggcaaccgattattttaccaaatgggtggaggcagttcctttgaagaaagttgattctaggggatacaattcagtttgtgaaggaatacatcatctaccgatttgggattcctcagactattacaaccgatcaagggtcgatctttgtatctgatgagtttgttcagtttgccaatagcatgggtatcaagttgttgaattc

SEQ ID NO: 60747 - DNA, 5070 bp, Oryza sativa
  Clone ID: PAT_MRT4530_62246C.1
atgacgaagatcggagatagctcgccaccgaagatcggagaaggctcgagctcgggtgccgccgagcgcgtcatggccaactccagcgtcgtggagctcccgctattgacaaggaccaactaccacgagtggtctttggtgatgcaggtgagcttggaggcgttggagcagtgggacgcggtggaggcggtgagcaaggaccggggcaaggatcggcgcgcgctggccacgatcatccgcgccgttccaagggagatgaaggccgggctcgccgtgaagaagtcggcgaaggaggcgtgggacgtagtgaagaagatgcacgctggcgacgaccgcgtgaaggctacgagtgtccaacgtctcatgaagcagttcgagaacatggcgttccgtgacggagagaacgtcggcgacttcgcaatgcgcatcaacgggctcgtcgccagcctgcgcgagcttggtgaggagatggaggacagtcgcgtcgtgaagaaagttctgcgcgtggtccccaagaggctgaagcaagtcgcggtggcgattgagatgctcgccgacatcgacaccatggagatcgaggagctcgtcggccggttgcaggtggcagaggacgcggacgctgaggatcaagcggcgtctagcgcggagcacgctgggcaactcctgctcacggaggagcaatgggaggcgaggcggcgtcaacgccgtggcaaggaacatgcccacggcggcgttggcgagaagggcggcggccacgacgacgacgacgacgatggcagtagcacaagctcggggcgcggtaagaaacgctaccgaggcaagtgcttcgactgcggcgtgcgcggtcacatggcgcgggactgcccgaagaagaagaaggagagagcgctgctcgtcgacgtcgacgacgagccgacactgctggggagattgttaggaataaacgcgttgtcatggccgtgcctgcgttttgccacggcgcggcagtggcgcatggcgtcaggccaagtcctggcggttgagcgcatgcaggagcacgccatgcgagaaggatggaggcccgttcatgtggaggagtatgtggctcacgaacgcgtgaaaccaggtcgtccaggctgccatgcgtacgtgcgcgtgaagctcgctaagtgggtgcgtgggcgctgcgtcgccgtgggagcgataggctccgcggcgttcgtcgccgaaactccactgttcatcttcaacctccagccattcttgcatgggatggaagcgccggcgaacgtaggtgtcgccatgccaccaccgaagcaggtcatggcggagccgttgcccttgacgacgccacagaggaagtcgtggccgagggcgatgcgggagaagtcgaggcccttgagcaagctcagccccggccactcccagcacgtcgggtcgtgggcgtcggagaggccgcaaacgaccacccagcgcatggcggcgtggctgccgttgggcgccatgaggccgcacaagatgttggtgccagcggcgatggccgcgcgctcgtccaccgccgccgccgcgctccactcctgctctgccgcagccgacgccctgctccactctgccagcctccttcctcgccatctccgccgcgaccgacaccgccccgctaaggagcatgctttgagggagaatatgacaaagatcttttgtctgtgccgtcattgcaagaatcagaaattgttggtagatcctggtgaaatattgggtcacataatggagtacggattcaccgccaactacaaggtttggacctatcacggggaattcgccaatccggaagatgacgatgaagagttaagtttcgagatgagtgaggcagagaattttataatcgaagacatgtcgcgtgaaagaatggttgtcgatgtttccaccgatagtgatgatttcgatggtggttttgatttagaggatatgctacgccatgttgaaccagagggtaagcgcgggaagattccttcaatggtgatgtggtacctaccaattaaggaccgcctgaagcgtctgtactcaaacccgactgatgctgagttgatgagatggcatcaagagagccggaaaatagatggtatgattcgacatcccgccgacgctcgccagtggaagacatttgatgcaaaacacccagaatttgctaaggatcctaggaatgtaaggtttgcgttgagcactgatggaatgaacccgtttgtggagaatgacactgccccagtagcaagaggtggtacatacgtgtatgagataacaaagaagattaaggttgtatatggaaagggaaagaagaagacagtaaagaggaagaaagctgatggtgacaacggtactgcgtcgcctttcaagaagcactcaattttctttaaatacttagattactggaaggacctagagattcgacatgcaattgatgttatgcacctcgagaagaacgtgtttgatagcaccgttggcacattgctggacatcccgagtccgcttcagacatttgccgtcgagactgtatgccagcttgagatgtatttcccaccatcatttttagatatgatggagcatttgatcgttcacatcgtccctcagattattgaacttggtccattatacttacatcagatgtgggcctatgagcgttacatgtcgatcctcaaaggctatgtacgcaatcgcgctcacccggaaggatcaatgatagagggatacacaactgaagaggcagtcgagtgttgtatggactacataaaggatgctaatgccattggcattcctgttcatcgacatgaaggtagattgtctggaaggggtactgttggtaggaagcagttcttcgataatgattacaaaaaggtgtccgcggcacacaacagcgttcttcaacagctcgctatcgttgagccattcattgagcgacacctagaagaaatcaaagcctgcttcccagggcggtccaatgattggatatcaagagagcacaagcgtcgctttcctctgtggttgaaagatctaaacttgccagttggtgattctgtggaggaacttactttacaaagattggcatgtgggccttcaagtattgtcaattcatggcaaggttacgacatcaatggatttaccttgagtacgactacgaaggacatgaaaagcaccacacaaaacagtgggatccgtgtcgaagcgattgacacgagtggagaaaagaggtcgtattatgggaccattcaagaaatatgggaactggactatggcctaaacatccagatccctgtgctccgttgtgaatgggttaaagacacaataggggtttccgttgatgactacgggctaacgatagtcaatcacagtaaaacaagccacaaggatgatccatgggttttagcagagcgtgtggctcaagtgttttatgtgaaggacccttcagatgaaagaaaaactattgtcatatccggaaagcaacagatcgtcggcatcgacaacatcgaagaccccaatgattacaaccagttcgacgatgtaccattgtttactgatcttcctatgcgaattaagaaggttgagagaacaatcgatgaagcaaatatgtcgtacgttcgagcagatggtgttgccaaggctgccaaaatttcccaagtcgccgtcgccgtcgtccccgccaccgccggctcctccccaaagtcgccccgccaccgccggctcctccccgaagtcgccccgcccctcgccgtcgccgacgccactgccaggaccgttgccctcgccgtcgccgtcgccgccgccaggtggccgtcgccgccgcacggacctctcccccctcgccgttgccatcgccgccgccaggtcgtcgccgccgccaggtcgtccccgccgtcgctaggcgggagtgggaaaaaaagacgtggtgagagaagcaagaataaattacccaaggaaacttacaacgtgattgctctcgatcaggatgggaagcccatcgagccaccgatagtgcggtccaagttcagcaacgcctgtggcactctagtcaggacgcgttgtcccattaatgtcaagttgtgggaaacagtggacgacaacatcaagacacttctctggaatgagttgcagaagtattttgtgttccctcctggatcagaggctgactgggacacgtttgttgcggatcgtacaacagctgaagcattggctttgaggaaaaaaatgtccgagctcgcgaagaagaacagatatccccatagattggggtcgagcggatacgctggtcatgtcgatcaatggcgggagatcgagcaaagatttgccgcggccggtaagcccctgctggtagaccccatggttgaacgtagcaagaactgggtcgccaaggtccatagcgaccacgtttccttggaactagacatacctgcacctgaggggattgaacttctcggtgatgcagtgaatcagtttatcttgtggcaccgcagagacataatcctgagcgcggccgttcttgcagcaggatctttaaccccatcctcatcgcaggcaatgactgctgccgctcctgcaccaccgtcgcctcctgaaccaccgtcacctcgacatctgccgtcaccaccaccgcttaggaattctgagaagagaaaagaacttgctcacgtcttgtcagactcccagaagtcagtactagcggcccaagatgaagtgcaatcctggttatctgccgatgtgcctaaaacttatgagtatggcaagccattcttgccaacttatcttatgaacaagctaccatgggaaatgagggtaatgcacgaatgtatgcaattccacgaagctgatagaactggagcaaaggttggatacgtcgatccaacaagaatatgcaaaacacaacacaccgtagagctgagacaggactgcgagcaattggttggcaagaccccggaagaaaaggaagaatatgtgaagacattgcacaagaggaagaagctagaagtagcaacatacttggcaatagcaatgttggcgcacgccgacaaagatgtcttaatggtcccctaccagttcacgtaa

SEQ ID NO: 60748 - DNA, 306 bp, Oryza sativa
  unsure (1)..(306): unsure at all n locations
  Clone ID: PAT_MRT4530_62247C.1
gcccggatgaccgcncccaatccgatggcgatctttgacaggcgactaacgtaggaggngcaatcggagtnanaatcggtgatcgctggtgtcacgctaactctgacgtcgatctcctgtgaagtcgtggccatggtcccttctcgggtcatttgcaagattcagaagttgctccccactatgaacatcaaatcgcaaatttggcttccttttcacctttcctcgcttcaatttactaccctgttcattcaaactccatgctaaatactccatacaataaaatacttgtattaaaanaaaaaaaaa

SEQ ID NO: 60749 - DNA, 4539 bp, Oryza sativa
  Clone ID: PAT_MRT4530_62248C.1
atgcggcacacgctctcgctcccgccgtcccgctcccacgtggccacgtcctgctcccgtgtggccacgttgcgcgtgctcgcgtcctcctgccccaccgctgactggctggctgaccgtgccgcccgtgtccatgggtggtgccgtgttggcccatgggctgaggcgctggcccagacacgggatgggagaatgggccgtgccggcatggcccacatgctacatgctaaggagcatgctttgagggagaatatgacaaagatcttttgtccgtgccgtcattgcaagaatcagaaattgttggtagatcctggtgaaatattgggtcacataatggagtacggattcaccgccaactacaaggtttggacctatcacggggaattcgccaatccggaagatgacgatgaagagttaagtttcgagatgaatgaggcagagaattttataatcgaagacatgtcgcgtgaaagaatgattgtcgatgtttccaccgatagtgatgatttcgatggtggttttgatttagaggatatgctacgccatgttgaaccagaggaccgcctgaagcgtctgtactcaaacccgactgatgctgagttgatgagatggcatcaagagagccggaaaatagatggtatgattcgacatcccgccgacgctcgccagtggaagacatttgatgcaaaacacccagaatttgctaaggatcctaggaatgtaaggtttgcgttgagcactgatggaatgaacccgtttggtgacttaagcagctcgcacagcacatggccagtccttctcacaatgtataatcttccaacatggatatgtcagaaacgaaagtacattctactcactatcctcatacaaggtccaaaccaacctggaatcgacatagatgttttccttgagcctttgatggaggacatggaggagctttggaaagaggggttacgactatgggatgagtttaagcgggagcacttcaatctacgtgcaatcatattcgttaccatcaatgacctacctgcaaacttttcattatctgggcagattaaagggaagactggatgtctgatatgtctggagaaaacttcatacaaatacctgacgtcgtctttgaagacagtgtacatgcgacatcgacggttcctaccacaaagacataggtaccgtaagatggctagattgttcgataatacagtggagaatgacactgccccagtagcaagaggtggtacatacgtgtatgagataacaaagaagattaaggttgtatatggaaagggaaagaagaagacagtaaagaggaagaaagctgatggtgacaacggtactgcgtcgcctttcaagaagcactcaattttctttaaatacttagattactggaaggacctagagattcgacatgcaattgatgttatgcacctcgagaagaacgtgtttgatagcaccgttggcacattgctggacatcccgagtccgcttcagacatttgccgtcgagactgtatgccagcttgagatgtatttcccaccatcatttttagatatgatggagcatttgatcgttcacatcgtccctcagattattgaacttggtccattatacttacatcagatgtgggcctatgagcgttacatgtcgatcctcaaaggctatgtacgcaatcgcgctcacccggaaggatcaatgatagagggatacacaactgaagaggcagtcgagtgttgtatggactacataaaggatgctaatgctattggcattcctgttcatcgacatgaaggtagattgtctggaaggggtactgttggtaggaagcagttcttcgataatgattacaaaaaggtgtccgcggcacacaacagcgttcttcaacagctcgctatcgttgagccattcattgagcgacacctagaagaaatcaaagcctgcttcccagggcggtccaatgattggatatcaagagagcacaagcgtcgctttcctctgtggttgaaagatctaaacctgccagttggtgattctgtggaggaacttactttacaaagattggcatgtgggccttcaagtattgtcaattcatggcaaggttacgacatcaatggatttaccttgagtacgactacgaaggacatgaaaagcacctcacaaaacagtgggatccgtgtcgaagcgattgacacgagtggagaaaagaggtcgtattatgggaccattcaagaaatatgggaactggactatggcctaaacatccagatccctgtgctccgttgtgaatgggttaaagacacaataggggtttccgttgatgactacgggctaacgatagtcgatcacagtaaaacaggccacaaggatgatccatgggttttagcagagcgtgtggctcaggtgttttatgtgaaggacccttcagatgaaagaaaatctattgtcatatccggaaagcaacagatcgtcggcatcgacaacatcgaagaccccaatgattacaaccagttcgacgatgtaccattgtttactgatcttcctatgcgaattaagaaggttgagagaacaatcgatgaagcaaatatgtcgtacgttcgagcagatggtgttgccaaggacctctcccccctcgccgttgccgtcgctgccgccaggacctctcccccctcgccgtcgccgtcgccgccggcaggtcgccgtcgccaccgcacggaactctcccccctcgccgttgccatcgccgccgccaggtcgtccccgccgccaagtcgtccccgctaccgccggctcctccccgaagtcgccccgcccctcgccgtcgccgacgccactgccaggacctctcccccctcgccgtcgccgtcgccgccgccaggtcgccgtcgccgccgcacggacctctcccccctcgccgttgccatcgccgccgccaggtcgtcgccgccgccaggcgcttctagtgaagaaacgtggcgcacaccaagtgacccgtttccaatggaaataacacaagtcgccccccgcgatgatgatccggactacatacctatcgaacaggccatggtagtccgacgccgctcgaaacgtaaagccgggaggaacaggacagagcaagaagttgagatggacaccgctacgtctgcacctgaacgtacggagacatctacaagtgcaggcgggagtgggaaaaaaagacgtggtgagagaagcaagaataaattacccaaggaaacttacaacgtgattgctctcgatcaggatgggaagcccatcgagccaccgatagtgcggtccaagttcatcaacgcctgtggcactctagtcaggacgcgttgtcccattaatgtcaagttgtgggaaacagtggacgacaacatcaagacacttctctggaatgagttgcagaagtattttgtgttccctcctggatcagaggctgactgggacacgtttgttgcggatcgtacaacagctgaagcattggctttgaggaaaaaaatgtccgagctcgcgaagaagaacaaatatccccatagattggggtcgagcggatacgctggtcacgtcgatcaatggcgggagatcgagcaaagatttgccgcggccgacatagaagaagtgactactaatttgcagcagatagtcgagaaagaaagatcaggacagttcgttccacggagggagagagatcagcttactgcggcgttggggacggctgaacactctggacgtgtaaggggtttgtcctcaaagacaagttggaaggtcgggtttccacaagacgcaccaagttataagaagagagacaaatacaaagaacaactatcggacaagatctatgcgcaagtgaaggaacacttctactcgttggcagctgaaaacccgacagcatttccaaggaattctgagaagagaaaagaacttgctcacgtcttgtcagactcccagaagtcagtactagcggcccaagatgaagtgcaatcctggttatctgccgatgtgcctgaaacttatgatatgcaattccacgaagctgatagaactggagcaaaggttggatacgtcgatccaacaagaatatgcaaaacacaacacaccgtagagctgagacaggactgcgagcaattggttggcaagaccccggaagaaaaggaagaatatgtgaagacattgcacaagaggaagaagctagaagtagcaacatacttggcaatagcaatgttggcgcacgccgacaaagatgtcttaatggtcccctaccagttcacagcacacaagtactaccgcaaaagaggtggaccagtacatattccatcccagaagaagttatccgtcaggactggctggccgatccccgaaatcccatatattgcacaacgattcaaccacactactatcttgaacgtggccgctgacctctgccgattcatccgtcgcgatgtctgcaacgcaagaggtctcttctacgacaaccagagtgaactcgcaatggacgacaaatttaaacctctcagagagtgggagaaagaacatatgcaataa

SEQ ID NO: 60750 - DNA, 504 bp, Oryza sativa
  Clone ID: PAT_MRT4530_62249C.1
atggcaccaaacaagggagatttatgcttgccagtggagaatgaaatttcaaattatactatggttcttagtgttgctctcgatagttgtctccatgcttgtggcaacgacaacaatggcagaccaccactgctaggtggtgtatacccccagccagctttgccagccaagaatagactactcgatgtgtacccactcccacgctgccgaacaatggtgaagggccagtgcattggcggtggcgcagccggtaacgtggatgagcaagtctggcgagactgctgtaggcagctcgccaccatcaacaacaacttatgtaggtgtccggtgctcagccacaagttggtaggcatgtacaaggagctcggcacggcggctcacgggcaacccatggacgaggtattccctggctgccggagagacaacatgaaatgcatggtggtggcgagcctcctggcattatgcggtgtggatatccatatcggcatcggtggtgtttgctaa

SEQ ID NO: 60751 - DNA, 900 bp, Oryza sativa
  Clone ID: PAT_MRT4530_6224C.1
atggccgacctgatctccaccagcaccctgacgtcgccggtaggccgcgccgcccgctggtcgtcggcctcacctagggcaaggccgccccgacgccaccggcgccatcttcatcaagcttcgtccgggcgccggtgttgctatggtcgtcgcggtgtcgttggcgcggcacagagtacggggggacacatccctgccggttcctcctcggcggccgcctacgcctgcaggccgccgttcaccgtcgacgccccctccaccatccacgcaaccatctggcagtcgtcatctggaggtcgtcgtcgttgcggtcgaggtgcggtcgagagtttgggtttgcgtcgcccaccgcctcgtcgacatccgcgcgtctccgatatcggcatcgactcagctttgactttatcattccgcctcgcgcatcttcggcttgatcacccgttcaagcgcccggctacaacgacttctacaaccgatcgtcatcgagcacgcgtctacgtcatcaagctttgggttgccgctgcgtcgccctctcgggctgcagtgtcgccgcctgtgccccctgaggctcaatacaatgtatccaatattcgcagtatcctctttccccatactatccaacagttaggacaagctcctcttagagtgcagtaccctgggttgtataaattagtttgcaatgtggcgtacaaggccgttgctatgatgcaaaggtggaaggagttactaaaggggggaggtcgagggcaagtagataactggagagacaagatcttggcaaacttggcgcggctgcggcaactttgtgaccctcctgaattcatcttacgctggtggttgatgctggagctggtttttgggtggtgttttctctgtgatcgtggtgtcagctttgcttga

SEQ ID NO: 60752 - DNA, 3726 bp, Oryza sativa
  Clone ID: PAT_MRT4530_62250C.1
atggagtacggattcaccgccaactacaaggtttggacctatcacggggaattcgccaatccggaagatgacgatgaagagttaagtttcgagatgaatgaggcagagaattttataatcgaagacatgtcgcgtgaaagaatggttgtcgatgtttccaccgatagtgatgatttcgatggtggttttgatttagaggatatgctacgccatgttgaaccagaggaccgcctgaagcgtctgtactcaaacccgactgatgctgagttgatgatatggcatcaagagagccgaaaaatagatggtatgattcgacatcccgtcgacgctcgccagtggaagacatttgatgcaaaacacccagaatttgctaaggatcctaggaatgacctagagattcgacatgcaattgatgttatgcacctcgagaagaacgtgtttgatagcaccgttggcacattgctggacatcccgagtaaaacgaaggatggattgaagtcacgtaacgaccttaaggtatttgatcctttggaattaggtccgcttcagacatttgccgtcgagactgtatgccagcttgagatgtatttcgcaccatcatttttagatatgatggagcatttgatcgttcacatcgtccctcagattattgaacttggtccattatacttacatcagatgtgggcctatgagcgttacatgtcgatcctcaaaggctatgtacgcaatcgcgctcacccggaaggatcaatgatagagggatacacaactgaagaggcagtcgagtgttgtatggactacataaaggatgctaatgccattggcattcctgttcatcgacatgaaggtagattgtctggaaggggtactgttggtaggaagcagttcttcgataatgattacaaaaaggtgtccgcggcacacaacagcgttcttcaacagctcgctatcgttgagccattcattgagcgacacctagaagaaatcaaagcctgcttcccagggcggtccaatgattggatatcaagagagcacaagcgtcgctttcctctgtggttgaaagatctaaacctgccagttggtgattctgtggaggaacttactttacaaagactggcatgtgggccttcaagtattgtcaattcatggcaaggttacgacatcaatggatttaccttgagtacgactacgaaggacatgaaaagcaccgcacaaaatagtgggatccgtgtcgaagcgattgacacgagtggagaaaagaggtcgtattatgggaccattcaagaaatatgggaactggactatggcctaaacatccagatccctgtgctccgttgtgaatgggttaaagacacaataggggtttccgttgatgactacgggctaacgatagtcgatcacagtaaaacaggccacaaggatgatccatgggttttagcagagcgtatggctcaagtgttttatgtgaaggacccttcagatgaaagaaaaactattgtcatatccggaaagcaacagatcgtcggcatcgacaacatcgaagaccccaatgattacaacaagttggacgatgtaccattgtttactgatcttcctatgcgaattaagaaggttgagagaacaatcgatgaagcaaatatgtcgtacgttcgagcagatggtgttgccaaggacctctcccccctcgccgttgccgtcgccgccgccaggacctctcccccctcgccgtcgccgtcgccgccgccaggtcgccgtcgccaccgcacggaactctcccccctcgccgttgccatcgccgccgccaggtcgtccccgccaccaagtcgtccccgctaccgccggctcctccccgaagtcgccccgcccctcgccgtcgccgacgccactgccaggacctctcccccctcgccgtcgccgtcgccgccgccaggtcgccatcgccgccgcacggacctctcccccctcgccgttgccatcgccgccgccaggtcgtccccgccgccagccatcgcgtgtgtgccggaggagccggtgcgcactaggacgcggaaggggactccgggcgctcgtcttcctcctcttccccggcccgaggccggagagatcactcccgcgccgtcggcctctcgtcactgcgccccgtcccgcacggatgggaagcccgtcgagccaccgatagtgcggttcaagttcagcaacgcctgtggcactctagtcaggacgcgttgtcccattaatgtcaagttgtgggaaacagtggacgacaacatcaagacacttctctggaatgagttgcagaagtattttgtgttccctcctggatcagaggctgactgggacacgtttgttgcggatcgtacaatagctgaagcattggctttgaggaaaaaaatgtccgagctcgcgaagaagaacagatatccccatagattggggtcgagcggatacgctggtcacgtcgatcaatggcgggagatcgagcaaagatttgccgcggccggtaagcccctgctggtagaccccatggttgaacgtagcaagaactgggtttgggcgcgcagcacaggtcaagtctcggatgagggagacatactattcgagactccagacatagaagaagtgactactaatttgcagcagatagtcgagaaagaaagatcaggacagttcgtcccatggagggagcgagatcagcttactgcggcgttggggacggctgaacactctggacgtgtaaggggtttgtcctcaaaggcaagttggaaggtcgggtttccacaagacgcaccaagttataagaagagagacaaatacaaagaacaactatcggacaagatctatgcgcaagtgaaggaacacttctactcgttggcagctgaaaacccaacagcatttccaagtctcgtcgtaccaatcggccgcgctggaaagactaaggaggttgcaacgggtttagcgatacccggacgtcaattccacaacacggcaatccctgaggattacgcaagggtacaggtcgccaaggatcttcaaccccatcctcagctgccgctcctgcaccaccgtcgcctcctgaaccaccgtcacctcgacatccgccgtcaccaccaccgcttaggtcaccgcctcgccaacctacaccaccaccctccccttctcaacaaccgcctctcccggccccgcaaccagttcaagcctctcccacctccccagctaaacagcatgctcccccggctccgccctcagttcaaacctctccacctacaccccaatctgctctggaattctgagaagagaaaagaacttgctcacatcttgtcagactcccagaagtcagtactagcggcccaagatgaagtgcaatcctggttatctgccgatgtgcctgaaacttatgagtatggcaagccattcttgccaacttatcttatgaacaagctaccatgggaaatgagggtaatgcacgaatgtatgcaattccacgaagctgatagaactggagcaaaggttggatacgtcgatccaacaagaatatgcaaaacacaacacaccgtagagctgagacaggactgcgagcaattggttggcaagaccccggaagaaaaggaagaatatgtgaagacattgcacaagaggaagaagctagaagtagcaacatacttggcaatagcaatgttggcgcacgccgacaaagatgtcttaatggtcccctaccagttcacgtaa

SEQ ID NO: 60753 - DNA, 781 bp, Oryza sativa
  Clone ID: PAT_MRT4530_62251C.1
cggacgcgtgggcccaaaacctccttcttcttctccttcctcactgcaacactcttcggggtgcaggcagccagagccatggcaaccatcctcgccgtggccgccatggccaccttccaggctccgacgaccctcccggggcccctggctcctacgctaccggttcgccggaacgtcgtgtcgttcgccggccgccggcaggggcgcgcgctgggaaggctggcggtggtggtcgcggcgggctcgccgacgccgccggagctggcgcagaaggtgtcggagagcatcaagcaggcggaggagacgtgcgcgggcgacccggagggcggcgagtgcgcggcggcgtgggacgaggtggaggagctcagcgccgccgccagccacgcgcgcgaccgcaagaaggacagcgacccgctcgaggagtactgcaaggacaacccggagaccgacgagtgccgcacctacgaagactgagcccacacgagcgccaccagttcatccatggctttcgccattgctgttactgtgttacacatttcagctctaagcaagctagagcagcatggcatactggggtgtacactttgcctcttgggcgtgtaagtttgatcgttaatttgtcttagtttgcaataatgcgaggttttttatttgttaattacaaaaacaaatacttcctccgattttaatgtatgacgccattgactttttaacaaacgtttgaccttttgtcttattaaaaaaattatgtaattatcatttatttaaaaaaaaaaaaaaa

SEQ ID NO: 60754 - DNA, 307 bp, Oryza sativa
  Clone ID: PAT_MRT4530_62252C.1
cggacctacataatctgaataaatttgaacatgactcaacgggctgctaagggacaaatataaattccgcgttgaaagtgtattaaaagccacatttgacggtgacttaagggctgaagctatcactttacacaggctcttttacacaaactctgcttatttaccctgaataacgacctggcatgggggctctgcagaatcctacccactaccctgatcctacacaaacttgggcggggtttctacagggggaggatcccttaaaaggatctaatgaaaattgacggtcacagggacgctacatctg

SEQ ID NO: 60755 - DNA, 3536 bp, Oryza sativa
  Clone ID: PAT_MRT4530_62253C.1
atggagtacggattcaccgccaactacaaggtttggacctatcacggggaattcgccaatccggaagatgacgatgaagagttaagtttcgagatgaatgaggcagagaattttataatcgaagacatgtcgcgtgaaagaatggttgtcgatgtttccaccgatagtgatgatttcgatggtggttttgatttagaggatatgctacgccatgttgaaccagaggtgctagcgggcaggtcacgaggattggagaattggcaagcattagagaaggcatcgaaggatcttctttacgatgaaacgaagggatgtgataaggatttcacagtcttgcgttcagtgcttgaacttctgagattgaaggctaaacatggatggtcggacacaaagtgtaccgatccagattctgataagggtaagcgcgggaagattccttcaatggtgatgtggtacctaccaattaaggaccgcctgaagcgtctgtactcaaacccgactgatgctgagttgatgagatggcatcaagagagccggaaaatagatggtatgattcgacatcccgccgacgctcgccagtggaagacatttgatgcaaaacacccagaatttgctaaggatcctaggaatgtaaggtttgcgttgagcactgatggaatgaacccgtttgtggagaatgacactgccccagtagcaagaggtggtacatacgtgtatgagataacaaagaagattaaggttgtatatggaaagggaaagaagaagacagtaaagaggaagaaagctgatggtgacaacggtactgcgtcgcctttcaagaagcactcaattttctttacatacttagattactggaaggacctagagattcgacatgcaattgatgttatgcacctcgagaagaacgtgtttgatagcaccgttggcacattgctggacatcccgagtccgcttcagacatttgccgtcgagactgtatgccagcttgagatgtatttcccaccatcatttttagatatgatggagcatttgatcgttcacatcgtccctcagattattgaacttggtccattatacttacatcagatgtgggcctatgagcgttacatgtcgatcctcaaaggctatgtacgcaatcgcgctcacccggaaggatcaatgatagagggatacacaactgaagaggcagtcgagtgttgtatggactacataaaggatgctaatgccattggcattcctgttcatcgacatgaaggtagattgtctggaaggggtactgttggtaggaagcagttcttcgataatgattacaaaaaggtgtccgcggcacacaacagcgttcttcaacagctcgctatcgttgagccattcattgagcgacacctagaagaaatcaaagcctgcttcccagggcggtccaatgattggatatcaagagagcacaagcgtcgctttcctctgtggttgaaagatctaaacctgccagttggtgattctgtggaggaacttactttacaaagattggcatgtgggccttcaagtattgtcaattcatggcaaggttacgacatcaatggatttaccttgagtacgactacgaaggacatgaaaagcaccacacaaaacagtgggatccgtgtcgaagcaattgacacgagtggagaaaagaggtcgtattatgggaccattcaagaaatatgggaactggactatggcctaaacatccagatccctgtgctccgttgtgaatgggttaaagacacaataggggtttccgttgatgactacgggctaacgatagtcgatcacagtaaaacaggccacaaggatgatccatgggttttagcagagcgtgtggctcaagtgttttatgtgaaggacccttcagatgaaagaaaaactattgtcatatccggaaagcaacagatcgtcggcatcgacaacatcgaagaccccaatgattacaaccagttcgacgatgtaccattgtttactgatcttcctatgcgaattaagaaggttgagagaacaatcgatgaagcaaatatgtcgtacgttcgagcagatggtgttgccaaggacctctcccccctcgccgttgccgtcgccgccgccaggacctctcccccctcgccgtcgccgtcgccgccgccaggtcgccgtcgccaccgcacggaactctcccccctcgccgttgccatcgccgccgccaggtcgtccccgccgccaagtcgtccccgctaccgccggctcctccccgaagtcgccccgcccctcgccgtcgccgacgccactgccaggaccgttgccctcgccatcgccgtcgccgccgccaggtcgccgtcgccgccgcacggacctctcccccctcgccgttgccatcgccgccgccaggtcgtcgccgccgccaggtcgtccccgccgtcgctcggcgggagtaggaaaaaaagacgtggtgagagaagcaagaataaattacccaaggaaacttacaacgtgattgctctcgatcaggatgggaagcccatcgagccaccgatagtgcggtccaagttcagcaacgcctgtggcactctagttaggacgcgttgtcccattaatgtcaagttgtgggaaacagtggacgacaacatcaagacacttctctggaatgagttgcagaagtattttgtgttccctcctggatcagagaagaatctcccaccgtttacggattatggacatatatcccaggctgactgggacacgtttgttgcggatcgtacaacagctgaagcattggctttgaggaaaaaaatgtccgagctcgcgaagaagaacagatatccccatagattggggtcgagcggatacgctggtcacgtcgatcaatggcgggagatcgagcaaagatttgccgcggccggtaagcccctgctggtagaccccatggttgaacgtagcaagaactgggtcgccaaggtccatagcgaccacgtttccttggaactagacataccagcacctgaggggattgaacttctcggtgatgcagtgaatcagtttatcttatggcaccgcagagacataatcctgagcgcggccgttcttgcagcaggatcttcaaccccatcctcatcgcaggcaatgactgctgccgctcctgcaccaccgtcgcctcctgaaccaccgtcacctcgacatccgccgtcaccaccaccgcttaggaattctgagaagagaaaagaacttgctaacgtcttgtcagactcccagaagtcagtactagcggcccaagatgaagtgcaatcctggttatctgccgatgtgcctgaaacttatgagtatggcaagccattcttgccaacttatcttatgaacaagctaccatgggaaatgagggactgcgagcaattggttggcaagaccccggaagaaaaggaagaatatgtgaagacattgcacaagaggaagaagctagaagtagcaacatacttggcaatagcaatgttggcgcacgccgacaaagatgtcttaatggtcccctaccagttcac

SEQ ID NO: 60756 - DNA, 2928 bp, Oryza sativa
  Clone ID: PAT_MRT4530_62254C.1
gctaaggcgcatgctttgagggagaatatgacaaagatcttttgtccgtgccgtcattgcaagaatcagaaattgttggtagatcctggtgaaatattgggtcacataatggagtacggatttaccgccaactacaaggtttggacctatcatggggaattcgccaatccggaagatgacgatgaagagttaagttttgagataaatgaggcagagaattttataatcgaagacatgtcgcgtgaaagaatggatgtcgatgtttccaccgatagtgatgatttcgatggtggttttgatttagaggatatgctacgccatgttgaaccagaggtgctagcgggcaggtcacgaggattggagaattggcaggcattagagaaggcatcgaaggatcttctttacgatgaaacgaagggatgtgataaggatttcacagtcttgcgttcagtgcttgaacttctgagattgaaggctaaacatggatggtcggacacaagttttaatgatctgaagagtttattgcgtgtgttgcttcctaagcctaactttgtaccatcgaacatgtatcaagcgaagaaactcatatgtcctttatctcttggtgtagaaaagattcatgcttattctgataagggtaagcgcgggaagattccttcaatggtgacgtggtacctaccaattaaggaccgcctgaagcgtctgtactcaaacccgactgatgctgagttgatgagatggcctcaagagagctggaaaatagatggtatgattcgacatcctgccgacgcttgccagtggaagacatttgatgcaaaacacccagaatttgctaaggatcctaggaatgtaaggtttgcgttgagcactgatggaatgaacccgtttggtgacttaagcagctcgcacagcacatggccagtccttctcacaatgtataatcttccaacatggatatgtcagaaacgaaagtacattcttctcactatcctcatacaaggtccaaaccaacctggaatcgacatagatgttttccttaagcctttgatggaggacatggaggagctttggaaagaggggttacgactatgggatgagtttaagtgggagcacttcaatctacgtgcgatcatattcgttaccatcaatgacctacctgcaaacttttcattatctgggcagattaaagggaagactggatgtctgatatgtctggagaaaacttcgtacaaatacctgacgtcgtctttgaagacagtgtacatgcgacatcgacggttcctaccacaaagacataggtaccgtaagatggctagattgttcgataatacagtggagaatgacactgccccagtagcaagaggtggtacatacatgtatgagataacaaagaagattaaggttgtatatggaaagggaaagaagaagacagtaaagtggaagaaagctgatggtgacaacggtactgcgtcgcctttcaagaagcactcaattttctttaaatacttagattactggaaggacctagagattcgacatgcaattgatgttatgcacctcgagaagaacgtgtttgatagcaccgttggcacattgctggacatcccgagtaaaacgaaggatggattgaagtcacgtaatgaccttaaggtatttgatcctctggaattaggtccgcttcagacatttgccgtcgagactgtatgccagcttgagatgtatttcccaccatcatttttagatatgatggagcatttgatcgttcacatcgtccctcagattattgaacttggtccattatacttacatcagatgtgggcctatgagcgttacatgtcgatcctcaaaggctatttcttcgataatgattacaaaaaggtgtccgcagcacacaacagcgttcttcaacagctcgctatcgttgagccattcattgagcgacacctagaagaaatcaaagcctgcttcccagggcggtccaatgattgggtatcaagagagcacaagcgtcgctttcctctggggttgaaagatctaaacctaccagttggtgattctgtggaggaacttactctacaaagactggcatgtgggccttcaagtattgtcaattcatggcaaggttacgacatcattggatttaccttgaaaatatgggaactggactatggcctaaacatccagatccctgtgctccgttgtgaatgggttaaagacacaacaggggtttccgttgatgactacgggctaacgatagtcgatcacagtaaaataggccacaaggatgatccatgggttttagcagagcgtgtggctcaagtgttttatgtgaaggacccttcagatgaaagaaaaactattgtcatatccggaaagcaacagatcgtcggcatcgacaacatcgaagaccccaatgattacaaccagttcgacgatgtaccattgtttactgatcttcctatgcgaattaagaaggttgagcgaacaatcgatgaagtgaatatgtcgtacgttcgagcagatggtgttgccaaggacctctcccccctcgccgtcgccgtcgccgccgcacggacctctcccccctcgccggcgccatcgccgccgccaggtctgtccccgtccctcgccgtcgccgacgccgctgccaggacttctaccccctcgcggtcgctcggcgggagtgggaaaaaaagacgtggtgagagaagcaagaataaattacccaaggaaacttacaacgtgattgctctcgatcaggatgggaagcccgtcgagccaccgatagtgcggtccaagttcagcaacgcctgtggcactctagctgactgggacgcaagaggtctcttctacgacagccagagtgaactcgcaatggacgacaaatttaaacctctcagagagtgggagaaagaacatatgcaataa

SEQ ID NO: 60757 - DNA, 2178 bp, Oryza sativa
  Clone ID: PAT_MRT4530_62255C.1
atggatcggtcgtcatggatgtatgagatgcggagaacgcagccgatatttattaaggaagcatctaaatttattgatcaggctaaggcgcatgctttgagggagaatatgacaaagatcttttgtccgtaccatcattgcaagaatcagaaattgttggtagagcctggtgaaatattgggtcacataatggagtacggattcaccaccaactacaaggtttggacttatcacggggaattcgccgatcccgaagatgacgatgaagagttaagtttcgagatgaatgaggcagagaattttataatcgaagacatgtcccatgaaagaatggatgtcgatgtttccaccgatagtgatgatttcgagggtggttttgatttagaggatatgctatgccatgttgaaccagagaaaacttcgtacaaatacctgacgtcgtctttgaagacagtgtacatgcaacatcgacggttcctaccacaaagacacaggtaccgtaagatggccagattgttcgataatacagtggagaatgacactgccccagaagcacaaagtggtacatacgtgtatgagataacaaagaagattaaggttgtatatggcaagggaaagaagaagacagtaaagaggaagaaaggtgatggtgacaaagatactacgttgcctttcaagaagcactcaattttcttcagatacttagattactggaaggacctagagattcaacatgcaattgatgttatgcacctcaagaagaacgtgtttgatagcaccattggcacattgctggacatcccgagggttagagtgcctcctggtttctcatcgaacatcaggaagctagtatcaatgaaggatttgaccatttccggatacaatgcgcatgactgccataggttgctaacggtattcctaccaattgctataagggcagtcaaaccagtccataccaaggtggttataacaaagttgtgctactttttcaatcaaatttcgcagaaggtatttgatcctctggaattaggtccccttcagacatttgctgtcgagatcgtatgccagtttgagatgtatttcccaccatcatatttagatatgatggagcatttgatcgttcacatcgtccctcagattattgaacttggtcccttatacttacatcatatgtgggcctacgagcgttacatgtcgatcctcaaaggctatgtacacaatcgcgctcaccccgaaggatcaatgatagagggatacacaactgaagaggcggtcgagtgttgtatggattacataaaggatgctaatgccattgggattcctgttcatcgacacgaagggagattgtctggaaggggtacagttggtaggaagcagttcttcgataatgattacaaaaaggtgtccgcggcacacaacagcgttcttaaacagctcgctatcattgagccattcattgagcgacaccttgaagaaatcaaagcctgcttcccagggcgatccaatgattgggaatcaagagagcacaagcgtcgctttcctctgtggttcaaagatctaaacctgccagttggtaattctgtggaggaacttactttacaaagactagcatgtgggccttcaagtattgtcaattcatggcaaggttacgacatcaatggatttaccttgtatacgactacgaaggatatgaaaagcaccacacaaaacagtgggatccgtgtcgaagcgattgacacgagtggtgaaaagaagtcgtattatgggaccatacaggaaatatgggaactggactatggcctgaacatccagatccttgtgctccgttgtgaatgggttaaagacacaataggagtttccgttgatgactacgggctaacaatagtcgatcacagtaaaacaggccacaaggatgatccatgggttttagcagagcgtgtggctcaagtgttttatgtgaaggacccttcggatgaaagaaaaactattgtcatatccggaaagcaacagatcgtcggcatcgacaacatcgaagaccccaataattacaaccagttcgacgatgtaccattgtttactgatcttcctatgcgaattaagaaggttgagagaacaatcgatgaagcgaatatgtcgtacgtccaagcagatggtgttgccaaggttattaagtcatag

SEQ ID NO: 60758 - DNA, 1288 bp, Oryza sativa
  Clone ID: PAT_MRT4530_62256C.1
ggtcgaccacgcgtccgcactctatttgtactaggtagatcgctagaacaatggcgtccggtggcgaggagaagaagagcaggatcctggtggtgggcggcacggggtacatcggccggcacgtcgtcttggccagcgcgcggctgggtcatcccaccaccgccctcgtcagggacctctccccctccgaccccgccaagtcgcagcttctccagagcttccgcgacgccggcgtcaccctcctccacggcgacctctacgaccacgccagcctgctcagcgccgtccgcgacgccgacgtcgtcatctccacgctgggcgcgctgcagatcgccgaccagaccaagctcatcgccgccatcaaggagggcggcggtggcaacgtgcggaggttcctgccgtcggagttcgggctggacccggaccacacgggcgcggtggagccggccaggtccatcttcaccgggaaggccgccgtgcggcgcgccgtggaggcggcgggagtgccgtacacgtacgtggtgtccaactacttcgccggctacgcgctgccgacgatcgggcagaacctgccgccggcgcggccggtggatagcgtggtgatcctcggggacggagccaccaaggtggtgttcgtggaggagggggacatcgggacgtacacggtgctggcggcggtggatccgcgggcggagaacaagacggtgaacatacggccggcgaagaacgcggtgtcgcacgaggagctggtggcgctgtgggagaagaagacggggaagaagctggagagggtgtacgtgcccgaggacgccgtgctcaagcaaatccaggagtcggagatcccgttgaacatcgtgctgtcgatcgcgcacgcagggtacataaggggggagacgacgacgccgttggatccagccaccgccgttgaggccacccagctcttcccggacgtccagtacaccaccgtcgatgactacctcaacaggctcctctgaaatacatcgatacatccatcatcttttatgtgccaataaaataattaagtctcttccttagtaatgtacatgttcctgcaaatttcacaccgtcggtgagagtgagtgtcttggtttaatctgtcatggatcactgtgctcagttcagctcttcttcagggcttgatttgcatgttaatgaatttatttgcttaaaaaaaaaaaaaaagatatggagaaacaaccagggatcttccgggtagcttcacaaggtggtgggctagatgatctaagttcaaagcctcaccccttct

SEQ ID NO: 60759 - DNA, 1377 bp, Oryza sativa
  Clone ID: PAT_MRT4530_62257C.1
atgtccgagctcgcgaagaaaaatagatatccccatagattggggtcaagtggatacgctgggcacgtcgatcaatggcgggagaccgagcaaagatttgcagcggccggcaaaccactactggtagaccccatggtggaacgtagtaagaactgggtttgggcgcgcagcacaggtcaagtctcggatgagggagacatactattcgagactccggacatagaacaagtgactactaatttgcagcagatcgtcgagaaagaaagagcaggacagtttgtcccacggagggagcgagaccagcttactgtggcgttggggaccgccgaacactctggacgtgtaaggggtttgtcctcaaagccaagttggaagataggctttccacatgacgcaccaagttataagaagagagacaaatacaaagaacaactatcatacaaaatctatgcgcaagtgaaggaacacttctactcgttggtagctaaaaacccgacagcctttccaaggttattccctgatggccagcaacccacacaatccacacagcaaacaactaatgcacccagtagtgtaggatcagtggagacaactcccttccctatggatggtataactggaccaactccgtgcagtctcgtcgtacctatcggccgcgctagaaagactaaggaggttgcaactggtttagcgatacccggatgtcaattacacaacacggcaatccctgaggattacgcaagggtacaggtcgccaagtatgcaattcatgaagctgatagaactggatcaccggttggatacatcgatccaacaagaatatgcaaaagacaacacaccgtagagctgagagaggactacgagcaaattggttggcaagacccctcaagaaaaggaagaatatgtgaagcaattgcacaacaggaagaagctagaagtagcaacatacttagcaatagcaatgttggcgcacgccgacaaagatgtcttaatggtcccctacgcgttgaccacacaagtactaccgcaaaagaggcggacccagtacatattccatcccagaagcagttacccatcatgactggctggccgcgttacaaacaaccaccaggaaccaacttgtgcggttattacgtgtgcgcgatgctcagagtaaacgggaggtacaaaacaaccagtaaccaaatccccgaaatcccatatattgcacaacaaatcaacaacggtactacctggaacgtgggcgctgacctctgccgattcctccgtcgtgatgtctgcaacgcaagaggtctcttctacgacaacaagaatgaactcgcaatgaacgacaaatttaaacctctcagagagtgggagaaagaacatatgcaatga

SEQ ID NO: 60760 - DNA, 448 bp, Oryza sativa
  Clone ID: PAT_MRT4530_62258C.1
ttaatcacgaaagacccaatctgaatcatagaaaggttatcgcgagaaatgtagaccaatctgaaattggccgttactaaccatgaaagttccaaatttggaaccagaatttaaaagtgtgtttagaaccattagagttatctgagagatgtccgagatataaccaagtaatttgattgattctctgccaaacgaattttaaaagcgtttaaaatgatataaagaatgtaaatagtaaagaaaagaaacctataactaaaggcccaaatctagaaaataaagtaagtaaaagtcccaaacccgtaaaaaatgcccaaaattcttaaaaactcccttttttgaaaagcccagatcctaaaccaaaaaagatcacagtaggaaaaatttattaatatttaatttgtttattatttttaattaattattatttaaaaaaaaaaaaaaaaaa

SEQ ID NO: 60761 - DNA, 4584 bp, Oryza sativa
  Clone ID: PAT_MRT4530_62259C.1
cggtctgcttcgattcggtccgaggaacagtgtgagagccagcgcaagccctgcgacatttctttgcagttccccagtccgcatattcaactttattttgatgatatcctagcctgatggcactatgctgaagacttgaacaagcatatactgttaacagttttaacacccactacatttcataccatcagcttcaactttcaacacctcatttcagtgcaacagctgaactatgggtttagcaaactcactcttaactcgccaactcaagacaaatgcatcaaagcctgcattcgtcagaagcatcacagctaccataggttttgggagttcacctggggaccaaaaacaggctaccccttaagttagtgcatttctgatatcattttgctacaattcctcaacttggattgaaaaaccacatggacagcgtttcgtcctcacaaacgtctcttcgtcgaagctctgatcttcctctggatactcatgctcatggtcatggacaggaaaaggagaatcaaatggtcggtccgcctgtagtctgcttgagcgagtcttcgtttccgagcttcgacttttgcgtgtgcccttctgctgactaacatcttgggatggtccttctggtccgtgctctgatgagggtgctttgtaagagtccttcaaccgctgtgtggttacgacggaacacagcagctgataccacctaataagagcctgagcttcctcctgcttcctctcctcggcttgtctccgttcctcttgttctgcatatgcctctaagatagtatttttgaattcggaacagacaacaattccatcaaaaactggaaggcaccgggtgtttcgataatcaaatccaaccatggctggggcaaaatcaattccaagtctctttgcgacctggaatattcttggtaacctcaggtgtacagtaccaggcggaagacatttctctgaccacacatcgacttgaccacgctcattctttggtacaataccatttactgcatggggaagttgcagcggttccagctgccatttaccatatagttccatggttggcttaagcccatcttcattactattactattagattgaattgactgagaattgaaagtcctctttggccgcgtcacgacctttgcaggcaactcattttctctgacttgcagaccctcccgcaaccatccatgtcttgattgcagtgtctgaacacaagatcttctggtcacatctttagcaccatttccagcaaaggcaacaacatatctcaaaggcttcctgcaaacagcggaagcagcttctactttttgttcaccatcaataatatcatttgcaacatcaacatggacccatcttccagacgatgcctcgccaccacaaaatacctcagcccaaaataacggtgctctattcctcgaccaaaccacgctcgagttgcttgaggcttcttcactttttcgtaacttcttcaatggtggagttgaacttagtaagctatcagttgactgatttaattgagttgctagcttgttgtcttgacttttagctgcagatgctaaaagagccatttccagctgcaactcaaattccaaatccccttttcgtcttggtacttcagcattactggaggtggaaggatattggctgctggatgagctatcttttgatagtgatgcagagctatctctctgatttgccttgcacttcgacaattttttagacaaacttttcctgcagccttgaactttgacttgttttggagttgtattgatgctaccttcagtattgttttgtgacaggacaggtgaaaggttattatactcattatggcctgcaacaaaagaactagatggcagcgcctttgtacaaagcctaggttcatcctgatttgatgtccccattgatttagtgtcaggcttgagaccagcaacatccagattcgcaacaaacctagaagggaagcttatttgccactcgacagtcctgtataagtttgctgttaagtggtccacaaaaaaaaaagacagttctgcatcttctccagccaaaaaggagtcaaggtagtcatggtcactccaggtgcactggctccatcctccttccattgtgacatcaaggaacctctccatcattatcttccccattgagaaccggagcaccaggggtccaagaacaatttcagcagcgtaaagatgtgttcccatacccatatttctaaaagggcagacgacaatagaaataacagaacaatatttaggggtgacaatgaagggagaccaagtttcctcttcagcagtgcctacataactttgaagagcaaatgccaaatttgatttaaaagaccccttgtcgtcggattgtgcaattacactgaaagtgttgtggaaccagctcacaagactacgcagttcattagctttcagaattggagtgtctacagaattccgtagtacatgttgtggtaaaacagagagaattgaagcctgaatcagaggatcattgcaagccttgtcaattaccctaccccttgctagtaggcaaagcaaatggaccctgtgcacgagttcagccaactccttttcttcagcagtaagcctccgagcagtcttcttttcagtggaagagggtagatcagtgaactcaacggtgactgtctctccaagctcatgggaataacactcatcgtgttccgccgcgaaaacaatcccttcttcccagtccatatcagctgcatctggatcttcttcctccaaactgttcttttcagagccatccctaccgaacctcgtcatcccggcatcgtcataaccctctgcatggaccttaacgtttttacttttatcctccaatgccgattccatttccactagtttagcgagtttgaagtcatacaatgtgaacatatgtcgaacaatcgcgcttaaccacaaggaacatttagagcccgaagttccttggcgggcgacttccctttctccgcggccggcgaagccctccggcgacggcgaggcgtgccaccgcccctcgcaacgtcccctcctgatcctccgcttgcccctgttgctaaacttctcgatggcagtagatgcataaagaagtgtttcaccagccttctctaacgccatataaagttctcttcctcgggtaactttagcaatgacccatgcattatttttggctctgatgcatacttcaaaatccttgtcatgacaagagtcagacctcttggcccttgacttctccaaatctatttcttctcttagtctattcaaggaaagtagagaatcctttgagagggtggtgactttcccaggtggggaggctcttgatacttttctatctggatcaacaagtaagtagcgatatccaccaacatgataagcattttctcctccccatcctcgtgataatttcagctccagagtcacaatgttctgtgatgcattttcaagaagatgtctcttcacatgagcaatgccatcatctccatttattagagatgaagctggaatcagtagcagaatggttatgttcttgtgctgataaacacagagatgcatgcggtcttctgcctgctggaaccacagtatgggaacccaagccacagcaccacgaacttctgaagtagtggaaccagcggcaacaaaaccatcctttcctttgtatagtttctcacgctggagaggcctttctactgaagctgttccatttgatgaactagaagtggggccagcatgaaccgaagttcctttccgcagataggaccaggaagttgcattggacaataaagcacgaggagttaacctcaagatagcataagtatataggtttagtgtatcatccggtggaagtgttgtggacaccaagagatcttcaaataatacaagtgattggcacatgacatttccaagacatgacccaagaactgtggtgagtgactgaacttcaagtgccacttctcgtgagattgttagcatttggacagttcctcgctcctttaggcaatcacggaaggttggcaattgtatctttttaccagcattaaaatcacttaaataatctgtgaaaaatgtgcgaaggtgaccacgggcaagttctgcactgggttgcctgtcaagtaaagttcgaattggtccgtggaacattgtgaaaagcgagtgaacctctttaagaattccttgcaatgcaccacaccgccaagttgactcaatgtccttgtttttctccactaccagaaccatccatatatctgcttcagcttggtaaaaaacatgggagtgtttctctgattctatcacctcacaatcatcatcaggagaaaatattctgcgcgaggagccaagcagcagcacgaacaggagggggatgcgagtgagaagggggtggagcaaaactgcaaacctagcgaaggtgatgatcccctcgcagaggccgatgacggagagctggaggaggatggggcagtcggtggggtggaagaagaggatcttgtcgagctcctgcccctcctgctgcccccgcctcaggtcgaacacgcacagctgcggcccctcccccgccgccgccgacgagagccccat

SEQ ID NO: 60762 - DNA, 158 bp, Oryza sativa
  Clone ID: PAT_MRT4530_6225C.1
cgcatcgcgtagattggagtgtttgcattgtactaaacttagcagcgtcgggggcattggcgactgcaatagactacttccagaggaacaatatactgtcaggaaacctagcgaacactgtcgtagatctgcatcttgctcgcttcgatcagctcaag

SEQ ID NO: 60763 - DNA, 901 bp, Oryza sativa
  unsure (1)..(901): unsure at all n locations
  Clone ID: PAT_MRT4530_62260C.1
cccgggctgcaggaatcggcacgaggtttttttttttttttttttttttttttttggatccttaagagcagaaatcaccttatcaaagtaccacataacttccttacaaagttaatcacatttcgaattctcatgatcaaattataaatcaatctccaattgaagtaaaatgttccagctttgacatcagaaagctacaaaattgtgaacgacctccataaagcctcagaaaccatcttgctctaagatttttactcataccatatgattattttcagtaaggtacacaatatggataccaaagaagaaaaaaaaaaagcttcttgaaagagacttatgacactcttgcaccctgcaaagttttgcagaaaaccacacccgctgaggtacgcatcgggtgctcgccaagaaatgctgtgcagttttctgatgtcctaagatgaggctgaactgattcccaaatctgcttgtgttggacctggtttggtgaagcagcttctgattggcgatcctttccatcttcagtaccaaaccataccctttcacctggaacagatccttcaggaggggtaagcaattcgacattttcatgagaagcatcagatgcagccataagcatgccgtttgactttatcccccgcatgttcctcggtttgaggttcgcaagaacaatcacattgctgtcctggagctggtcgatggggaggtagttgacgaggccgctgcagatggtgcgcggctgctcctcgccgacgtcgacctcctccacgtacagcgtgtccgcctccgggtgccgccacggctttaacacccggccccaacccggatgtccagcagcgccgccacctcctccacggggggaaccccccccttcttctccccctcctcncnttccccctcn

SEQ ID NO: 60764 - DNA, 1327 bp, Oryza sativa
  Clone ID: PAT_MRT4530_62261C.1
gaattgaaacatagatatcgaagcaatcgaatgaactactacataagtcagcaggtccatcgtcagaatatacaacaaacaaattaagatggtcgaatctggaactggaaggacgtcggagcgcagggcaggggaaactgactgtttcctgcgctgtattgttctctgacgaagctatttgttttgtatgcatagaaaggcaacaacatggcagctgtacaacatgtacgaatctcttcaaaataacaagatccatattcacgacaccatgagggagcgagccgcacagcctaaatgacgaagctggataggtgagtggtttggataaaacaatcgttgtcatttcggtgttctagtctgtagagaatgctccttcacagtacctgttgctaaacttctcgatggcagtagatgcataaagaagtgtttcaccagccttctctaacgccatataaagttctcttcctcgggtaactttagcaatgacccatgcattatttttggctctgatgcatacttcaaaatccttgtcatgacaagagtcagacctcttggcccttgacttctccaaatctatttcttctcttagtctattcaaggaaagtagagaatcctttgagagggtggtgactttcccaggtggggaggctcttgatacttttctatctggatcaacaagtaagtagcgatatccaccaacatgataagcattttctcctccccatcctcgtgataatttcagctccagagtcacaatgttctgtgatgcattttcaagaagatgtctcttcacatgagcaatgccatcatctccatttattagagatgaagctggaatcagtagcagaatggttatgttcttgtgctgataaacacagagatgcatgcggtcttctgcctgctggaaccacagtatgggaacccaagccacagcaccacgaacttttgaagtagtggaaccagcggcaacaaaaccatcctttcctttgtatagtttctcacgctggagaggcctgaaataatgatgcatctgattttgtccgccaggagaagtatcacgagatcgactacgatacctttctactgaagctgttccatttgatgaactagaagtggggccagcatgaaccgaagttcctttccgcagataggaccaggaagttgcattggacaataaagcacgaggagttaacctcaagatagcataagtatataggtttagtgtatcatccggtggaagtgttgtggacaccaagagatcttcaaataatacaagtgattggcacatgacatttccaagacatgacccaagaactgtggtgagtga

SEQ ID NO: 60765 - DNA, 885 bp, Oryza sativa
  Clone ID: PAT_MRT4530_62262C.1
atggcgccgcctaatgacgccggagatggcgacgacgacaagcccgagatgccggtggtgctcatcaccggctgcgccaacggcggcatcggctacgagtactgcaaggccttcgcctccctcggctgccgcgtcgtcgccaccgacgtccccgaccgcgtgcccgacctcgccggcctcgacgccgaccacctcccgctcgacgtcacctccgacgagagcgtcgagggcgccgtggcgcgcgtcctcgccgagcacgggcgcgtcgacgtgctggtgaacaacgccggcatcgggtgcaccggcccgctcgccgagctccgcggcgaggccgtgcgtcgcgccatggacgtcaacttcctcggccagctccggatggtgcgcgccgtggcgccgcacatggcgtcgcggcgttccgggcgcgtggtgaacgtgggcagcgtggtgggcacggcggcgacgccgtgggccggcccctactgcgcgtcgaaggcggcggtgcacgcggcgacggacgcgctgcgggtggagctgcggccgttcggcgtgcacgtggtgaaggtggtgcccggcgcggtgaggtccgggctgggccacgccaacacggcgcagctcgccggagggcaggcggagtggcggctgtaccgggagttcgcggcggcgatcgcggagagggcgcgggcgtcgcaggcggggggcgcgacggacggcggcgtgttcgcggcgcacgtggctcggcgggtgatgagcgcgcggccgccgcgggagatcgtgtacgggaacatgacgttgctgttcgcggcgctggcggcggcgccgctgtgggcgcgcgacgccttcttcgccaagcgcttcggcctcgacaagatgctaccaccgcgctag

SEQ ID NO: 60766 - DNA, 1692 bp, Oryza sativa
  Clone ID: PAT_MRT4530_62263C.1
atggtgaagacgtcggccaacccgaatgccaagggcaaggccgcagcttcgtcctctggtcttccgtcacccaagaccacgcccagaggggtgaggcctaaggcgtttaagaagaaggccaaggccgatccagagatgcagaaggtggcagctgcggaagccgccgccactgctgagactgcatcggcaccccctctgaagccggctgaggtcagcccagcggcagcggtggccaaggagaatggaggacagaggatgagcagaaaggaaaagacaaagatgaaagagggggaccagatgaaggaggataagaaggggagaataaaggggaaggaaaagaaggacgataaagcgagggagaggaagggtgaagctgggtttatattcatgtgcagtgctaagacaaagccggagtgcttccagaatggtgtgtttggcttgcctaaggggaagatcgatgtggtggagaagatccagccaggggcaaaactgttcctctatgacttcgacctgaagctgctctatgggatatacaaggccaagacaaagggagggttagatcttgtgcgaggcgcgttccatggaaaattccctgcacaggtcaaatttaaggttgacaaagattgccttcctcttccggagagtagtttcaagcatgccattaaggagaactacaattcaaagggaaagttcacccaggaactcagccttaaacaagttcataggttgttagaactattcaagcctattagcttgcctcaatcatctattcaatatgttaaagaaaggcatcgacgattggatgtctttgagggtcgcctaccacactatgttgaaggaaggagactgccacgacatgtcgaggaaatgcatcatttacgacatgttgaagaaaggagattgccatatgaccatgaagaaagaagattaccgtatgaccatgaagaaagaagacgaccacgatatgttgaagatattcgtcatccacaatttcttaaagaaagacatgctataaccgactctctgcatgatccatttcgatctcggcatgtgactcatttaccagagcttcaacatgctcctcccacatactatcatcatgttgctcatacttttgacgaacggtaccatcaacctcaagttgatatcgtgtatgaacgttctgcccccagagctatagttgaggctactgacagggaggccttcctcgcaagagattacagagtgccagaagagattgtcgcacgctcggatcatgtggatgagctctaccgttcttatagacttgccactcgtgcaatggatctccatcagggtccgtcctatgtgacagctgcctatgagaacccaggacctgcctacagtgaaagcatccatcagatgcctgtttcttctacaaggcctaacgtgcctggtgcgccggtctcctccctgtattcctttgctggtgcaccagcatatcgatgatcaccccagtggcccagtgcactgaaattggccccagacaaccttattgtcagttggtgatggtgtaggtactggcatcctggtactatactcctgctctcttgaaagtcaggctacaagttaatcgtacttgttgctgcagagtatcgattcctttttatcccaattgtaacatagattcctttatactggatcatgggttttatttcatcagatttaatgaac

SEQ ID NO: 60767 - DNA, 532 bp, Oryza sativa
  unsure (1)..(532): unsure at all n locations
  Clone ID: PAT_MRT4530_62264C.1
ngntgggggnaaattnaaaaggaananttngcccggtaacccagttggatnaaccttctctaaggggaaaaagngggttccncngggggggccgntttagaaaaannnatcccccggctnccggnatttgcnnggggngatgggggttaaaccttttttatanccagggaggatggtttaanggnttggangcctatnantgngtccccanncnggtcagtttaagtnattttgtagggntngaaaaanaggggntntggnanattttntttttgggtgntttagnngggngggnntggntaattanccaaaataggggggntnaaatggttttntttnaaatggggnaggnnttagnacggttttttttttnanttttnnccccgnggtntttttttggggggttttttnttaaaaaaaaaaaaaaaaaaaaaaaaaaaaaaaaaaaaaaaaaaaaaaaaaaaaaaaaaaaaaaaaaaaaaaaaaaaaaaaaaaaaaaaaaaaaaaaaaaaaaaaaaaaaaaaaaaaaaaa

SEQ ID NO: 60768 - DNA, 1590 bp, Oryza sativa
  Clone ID: PAT_MRT4530_62265C.1
atggtggccgacaagtgggcgctggagaaggctcaggcactgcaagatttggaggaggaattcaaccaacaaactgcaaagattctcacctgttaccaactacctaagcacctcaggctggatctccatgagcagcaccgcaatgactacatggtgcctgacgatctcaggctcaagttcgtgaatgccgttttcgagggcaatcccaggatgcttgatcacgaagagaagctcaaggcccaggctcgcaaagaagcagacaagttttggacggaggcggcgggggcggcgaacaaggcgcaagccctgcaagacatgaaagagtggtacatgcaattacttgttaatcatgcttttgacatagaaggcatacctgagcgcatcaaggaggcctacatcagggaaatcaagctagatgacgaggagctgatgttcaagaaccatgtggagaagaaattcgggatatgtaatcacgaaacaagactccgggtccgagcttgggaggaatcgcagcagtttcggatcaagacaatggccgattattgggcagcgaagaagctgcacgccttgcaagatctggaaaaggcacacattcagcgtttcatgaacatattagacaaaatagacatacctgactacgtccaacaggcctacttccagaaatacaaggtacctgatgatctccggctgcgttacataaaccatgtggagattaaattcaggaggatgcctgatgatgaagaggaaccacctaagggttacatttcggaggattacaacaaactgcaaggattctcaagtgttatgacctacctgagcacatcaggctgggtctcccaggagcaacactgcaatgactacaaggtgcctgacaatctccgggtcaagttcataactgccgttttcaagggaaattccaggatacttgatcacaagggggagcttaaggtccaggctcggaaagaagcagagaagttttggattgaggaggcggcaacggagaagaagacacaagccctacaagatatggaagagaggttcaagcaacaatttatcaagcttggttatgccaggaaaggcatacctgagcatatccaggagtactacctcacggattgtaagttacatgaagataccctacttaagttcaggaatgatgtcgaggagaaattcgagatgcgtaaccacgaaatgcaactcaagatccgggcttgggagaaaacacagcagtttcggattgagatgatggctgataaacgggcagcgaagaagacaaaggcactgcaagatatggaggagagatatattcaggattttatgaacatagttgacaaattagatgtacctgagtacttccagcaggcctacttccagaaatttaaggtacctgacgacatccgactgcgttacataaatgatatcgaggaggaattcaggatgcttggtgacaaagagggatataaggttcacatttgggacagtttcaagaagttgaagtccctcatcacctgtcatctcttgtgcggccgtgctcagctaaaaacacgaatattagggaaaaatctaatatcaaataaaaagaagcagtga

SEQ ID NO: 60769 - DNA, 1414 bp, Oryza sativa
  unsure (1)..(1414): unsure at all n locations
  Clone ID: PAT_MRT4530_62266C.1
gcacgaggcttcgtttttattatatctcccctaggacagaggcggaggaggatcaggattggttagacatcaggccgtaccacgcccttgtattcaaaactttagcttagtggtttctccnggcaagttgacaagcaaaaactgatcatatcaacagatgagcttcaaatctattgaccggttaattaggaggaacagtaagaccaaactttctcggaatattgttgatggtatttatgaccagaaggaagagcaatatgtgcaatccttgagggagttgcttcttgcaaacaaccagcttcccgagaagtttgatgactatcatgtcctactacgctttctgaaaatgagaggatttaacatagtaaaggcaaaagaaatgtttttaaatatgctaaaatggcgtgaagaatgtgctgttgatgccattgcaaaggattttaaatttgaagagtacgatgctgtaaaaagatgctatcctcatggatttcatggagttgatagatttggcaggccattgtatatcgaaaggattggcttggttgatctcaataagctcatgcaagtatctagcactgatcgatatgtaaagtatcatatatcagaacaagagaaaactttatccttgagatatccagcttgctcccttgtggctaagaagcacataggctctacaacagccatatttgatgtgaaaggattgggtatgaataacttttcaaaatctggaagggacctgttcatagagattcaaaagatagacagcaattactatccagagacattaaatcaattatacataatcaatgctggtgctggatttagagcactgtggaaagtattaaaagcatgcatggaggcaagaactttagcaaagattcaggttttagggaccaattatcttagtacaatactagaagcagttgacccaagtaatttaccagacttcttagggggaacatgtacttgttctgcaactggaggatgcttgctccaagataaaggaccttggactgaccaggaaatttctcaagcttctaagggagtgtttggtaaaggtcagaaatctttcgatgagataagtactacagttgcctgcgaaaactttccaggtcaccaggagccttctgtaggaaaattgcatcccatttctggctggaaacgtactcttggcatgttgttgaaggataaccaggttggcgatacgaatgaaaatattcaacagaataaagtgaatgaacaaatctcagagaagatccaagaacttgaaaattgctctgctcagacccaggagacccttcacgcactactacagaagcagaatgagcttgcgaaccacattgaacagttgaggaagctcctccgggaggccgcaaatgcagacaacaaagcaaacgtcctaatcttgaagtga

SEQ ID NO: 60770 - DNA, 267 bp, Oryza sativa
  Clone ID: PAT_MRT4530_62267C.1
ggatgaaaaactgaagctacacgtgttgggggattctattagaagggggcacacacatttaaaaacatctaaatattacaatggaccatcatgcatatgctctagtctagatgcagcacaataatgcaacaaccgtataacaatctacaacaaaagaaaaaaaaaagaaaatctgcatatcaaaaccataattaagaaaacataatacattagctaccgatgcataaaaatgacagccaaatccaagccagaaactaaacctgaaat

SEQ ID NO: 60771 - DNA, 539 bp, Oryza sativa
  Clone ID: PAT_MRT4530_62268C.1
cccaaaaggggaggacccctttaaaaaaaacaacaaatcggggtcttctttcggggtcccaataccaccagacccccaaaaaaaaggccctttggcgggggaacaacacccacagtaaaccagtttttattcggacccatcagaaaaaggtcaaggggctttcggtttcccttggacgaaaaaccaaatcccggttttcaggcgtcccaacttataaggagggaaattaaggggcccaatcccgggtttaaactcccgaaaataaacatcttcccccacagtctgaaaaaaaacttggcgggccaaaaatgggaaaaaacccagggttctttgggaaatagggaaaccttcaaacccgggaggggagggaaaaaacagtccctcatggaaaacagctggaccccatgattggggtccacaaaaaagggggccagctcctttatccaaaagctcaaaaaaaggaatgggggcccttataaaaaaaaacccggaattataaccccataggcccatggggggggcgtatctgccccacccca

SEQ ID NO: 60772 - DNA, 162 bp, Oryza sativa
  Clone ID: PAT_MRT4530_62269C.1
gcgttgaagctgcgggtgtgcgccaacgtgctggggctcgtcaaggccaaggtcggcgcggtggcgccggacgagccctgctattcgctgctcgacagcctcgtcaacctcgacaccgccatctgcctctgcaccgacgtgaaggccaacgacctcgacacc

SEQ ID NO: 60773 - DNA, 1575 bp, Oryza sativa
  Clone ID: PAT_MRT4530_6226C.1
atggacaggccctatcctcctcttcttccccttgctctgctcgccctcctcttcctctgtctcctccacggcgagcgcgccgccgccgccgacgacgacctcacctccggcaccggcgacggcagcgagctctggggatacgtccaagttcgcccgaaggcgcacctgttctggtggtactacaagagcccgcagcgggcgtcgtcgccggggaagccatggccgaccatcctctggcttcagggcggcccgctcaagaacgctaatcgatgcatgtcggcgtcgtcgtcgtcggggcagggagcgtcgggcgtcgggctcggcaacttcctggatgtcggcccgctggacctcaacctgaagccgcgcggctcgacgtgcctccagagggccgacctcatcttcgtggaccgctgccggcagctcccgctcgggccacggccacctccgccccgcggccccacgtgcccgcggaactgccggcgtccccggcggggccagccccggacaacccggtgggcgtcgggtacaggtacgcggacggcgacgcgcggggcgtgacgacggactggcaggcggccacggacgccaccgagctgctcagggcgctcgccgccaaggagatacccaccctgcagagcagcccgctgttcctcgtcgccgagtcctacggcggcaagtacgccgccacgctcggcgtctccctcgcccgggccatccgcgccggcgacctcaagctcaacctcggcggcgtggcgctcggcgacagctggatctcgccggaggatttcacgctcgcgtacacgccgctgctgctggaggtgtcgaggctggacgacaacgccggcgacgaggccagcaagatggcggcgacggtgaaggagcagatcacggcggggcagcttgcggactcgcagcagtcgtggatcgacctgctgggtttcatcgacaaaaagagcgccagcgtcgacatgtacaatttcttgcttgactccggcatggacccggtgtcggcagacttaccggcggcgagctcctcatcgccgtcgtcaagcagtgctcagttgatgaagtactcaacataccttagcagccaagcggccgattcaggctccaacacgatcgagggcatcatgaacggtgtcatcaaggaaaagctcaagatcatccccaacaacctcaagtggcaggaactgtcggatccggtctacaatgcgctggtcaacgatttcatgaagccaagaatcaacgagatcgatgagctgctgtcttacggtatcaatgtgacggtctacaatggtcagcttgatgtaatatgctcgacgatcggtgcagaagcatgggtgaagaagctcaaatgggatgggctgaagaacttcctgagcctaccaaggcagcctttgaagtgtggctcttccaagggcaccaaggcgttcgtcagatcatacaagaacctgcatttctactggatacttggggctggacactttgtacctgctgatcagccctgcattgcactgagcatgatcagtagcataacccagtctccagccagttagatatctcccatcagta

SEQ ID NO: 60774 - DNA, 152 bp, Oryza sativa
  Clone ID: PAT_MRT4530_62270C.1
taagatctccatcacataaaaacatacagtgactgagtactggattacacgcattgcagttgttccagggttccagcatcaggcacacacacaccatcttgtgggcacctcagccagcatccagcagggcacatccgcacagattgccgccc

SEQ ID NO: 60775 - DNA, 861 bp, Oryza sativa
  Clone ID: PAT_MRT4530_62271C.1
atggcgctgatggtgccggaacttctcctggtcgtcgccacctcggaaggagccctcgccagcatcgagctcgcctgcaacctgcttgacagcatcgagttcgatgtcctcgtcgacatcgcgcatggcgtccccttcaacaccaccggcggcggcgagcagccgttgtacatgggtggcgggtgcggcggcggcggtggcggctggcgcggcgccagccgtagcttcggtgtccccatggatagcactggtggtggcgagggcagcttcagcgtggacgccctcgcttacgagccgttcaccttcggcgtccccatggacaccagcggcggcggcgtcgaacacaccggcggcgacggggcggccaccaatgtcgccgctgaccacaaggggcgcaaggccggcatcgactactgggccaacaccctcgccagcgcgttcgccaccgacgggccgctcaacgccgcccaccgcgagatcacgcgcctcatcacgctccacggcgtggccgcccacttgctgatccgatgcctcgaactccacgacttcccgcacggcgacgaggcggcgtggcagaggtggtgggagcaccacgacgccttcgtcccccgcgcccacgacgcgctcctgaggctgagctccgccacgtcggcctccgccgcggccgaggacttcctccgcttgagatccgccttgtcccctggccggaacgattggccgtcggaggcgaagcagctcgtgcgcgacgccaggcgcgacatcggcgaggcgcgggacgcggtgatcctgatgcgcgacgacgctgtgcgcgagttcttcgagacctggatgatcctgaaacgatcgcaggccagccgctaa

SEQ ID NO: 60776 - DNA, 1283 bp, Oryza sativa
  Clone ID: PAT_MRT4530_62272C.1
ccggccgggctctcttccccttccacgccacctctccccttcccacagtcccacgtcgtcgccggcgacacgcagacgaacgcgcccggcaaaccatggcggcgcgatccggaccacccgccgcggccgtcgaccccgaggccgtgctctcccacagcttccccgaggtctccttcgcctacgacgagagggatgtggcgctgtacgcgctcggagtcggggcgtgcggcgcggacgccatcgacgagaaggagctgcacctggtgtaccacagggacggccagccacacatcaaggctcttcctacttttgcttctttatttcctttcaagaacagcaatgggcttggaattgttgatgtgcctggccttaactttgacgcaagccttctattgcatggtcaacattacatagagatatacaagccaattcattcgcgtgccaatgttgtaaacaagaccaagatagctggcttgcatgacaaagggaaagcaactattcttgagattgagactacaacccatgtcaaagattctggtgaagttttatgtatgaacaggagtactatctacctgcgtggtgctggaggcttttctgatccttcacgaccatactcctatgctagttatcccactaaccaggtttctcgcatttctattccaaattcagcgccttctgcagtatatgaagaccagacacaacaatcccaggcactattgtacaggttatctggggactataatcctttgcattcagaccctatggttgcgcaggttgcagggttcactcgtccaatactgcatggtctcagttcccttggattcgcgatccgcgctgtcatcaaatctttctgcaatggagatccaacagcagtgaaaagcatctttggccgttttcttctgcatgtctatcctggagaaactttagtcactgaaatgtggctccaaggccagagggtgctttatcaaacaaaggtcaaggaacgcaaccgcgccgtgctttctggatatgtgttgctcaaacacatcccctcatcattgtaagtgctgtatcatattcttgactggatattttataaattggtgcctgcctgcttgtattagtttggtagtgtgtagtggtcagaaaagctaaagctttccggggacataaaatcaggtaaatgaagagcttcagctaccgcaagtggtgggttgccattgtaatgataacaagtgctctgcacctatcttcaaatgatacattgcctaatttctcttctgtaaaaaaaaaaaaaaaaaaaa

SEQ ID NO: 60777 - DNA, 564 bp, Oryza sativa
  Clone ID: PAT_MRT4530_62273C.1
atggccttgggtggcgtgtccatggccatcatcgccatggccttgggcggcggcggcggcggcggaggcgggagcgtgaaggggagggacatggcggggagcggatgggcggccgacgcctgctgcacggcggcgacctcctcgacgcggcgctcgaggcggccaatgcgcgcatcggcctcgtcgcggaggcggcgcacgccgttcgagcacgtggtagggtcgtggcgggacagccaccgcgcgatggcggtgtcggcggcctccatacggcgggccagctgggcggatatgcaaccgaggttggtaccagaggctcatcttgatgtgctcgttgaggacaaatgtgccaaaaaccaactgaaccgtgaaaaagttcagtttcagcagcgtaccggatctcggtcttacattgcacatgcctatgtcgtgcagcgtgggttggccctctattcagcttttgctgcccttgttttgcattgtataggtatagcaatatgccattctgtagtggcatacctctacagtgcaaaacaaggacaacaagaggtggcaaagctctaa
